United States Patent Application Publication US 2023/0416942 A1 - sequence listing, part 2

SEQ ID NO: 11996 - protein, 118 aa, Artificial Sequence
  Chemically Synthesized
QVQLQESGGGLVQAGGSLRLSCAASGNISFIPRMGWYRQAPGKEREFVAGIDEGGSTYYADSVKGRFTISRDNAKNTVYLQMNSLKPEDTAVYYCAALWYRASRHRYWGQGTQVTVSS

SEQ ID NO: 11997 - protein, 118 aa, Artificial Sequence
  Chemically Synthesized
QVQLQESGGGLVQAGGSLRLSCAASGTISPPYFMGWYRQAPGKEREFVAAISLGGSTNYADSVKGRFTISRDNAKNTVYLQMNSLKPEDTAVYYCAALWYRASRHRYWGQGTQVTVSS

SEQ ID NO: 11998 - protein, 118 aa, Artificial Sequence
  Chemically Synthesized
QVQLQESGGGLVQAGGSLRLSCAASGTIFGRSRMGWYRQAPGKEREFVAGIGDGASTYYADSVKGRFTISRDNAKNTVYLQMNSLKPEDTAVYYCAALWYRASRHRYWGQGTQVTVSS

SEQ ID NO: 11999 - protein, 126 aa, Artificial Sequence
  Chemically Synthesized
QVQLQESGGGLVQAGGSLRLSCAASGTISYVYGMGWYRQAPGKEREFVAGINYGGTTYYADSVKGRFTISRDNAKNTVYLQMNSLKPEDTAVYYCAAFVIYRDPWKDGYYTRLTYWGQGTQVTVSS

SEQ ID NO: 12000 - protein, 118 aa, Artificial Sequence
  Chemically Synthesized
QVQLQESGGGLVQAGGSLRLSCAASGNISFIPRMGWYRQAPGKEREVVAGIDEGGSTYYADSVKGRFTISRDNAKNTVYLQMNSLKPEDTAVYYCAVLVIDRIWYRYWGQGTQVTVSS

SEQ ID NO: 12001 - protein, 118 aa, Artificial Sequence
  Chemically Synthesized
QVQLQESGGGLVQAGGSLRLSCAASGYISLSSAMGWYRQAPGKERELVATITVGATTYYADSVKGRFTISRDNAKNTVYLQMNSLKPEDTAVYYCAASKPPYRVLDYWGQGTQVTVSS

SEQ ID NO: 12002 - protein, 117 aa, Artificial Sequence
  Chemically Synthesized
QVQLQESGGGLVQAGGSLRLSCAASGTIFRYVVMGWYRQAPGKERELVAAISYGGNTNYADSVKGRFTISRDNAKNTVYLQMNSLKPEDTAVYYCAVSDYSTVTIYWGQGTQVTVSS

SEQ ID NO: 12003 - protein, 116 aa, Artificial Sequence
  Chemically Synthesized
QVQLQESGGGLVQAGGSLRLSCAASGYIFSIQDMGWYRQAPGKERELVATINFGASTYYADSVKGRFTISRDNAKNTVYLQMNSLKPEDTAVYYCAADTYDQHYYWGQGTQVTVSS

SEQ ID NO: 12004 - protein, 118 aa, Artificial Sequence
  Chemically Synthesized
QVQLQESGGGLVQAGGSLRLSCAASGTISLTGVMGWYRQAPGKERELVAGIDRGTTTYYADSVKGRFTISRDNAKNTVYLQMNSLKPEDTAVYYCAVGDDSALRFEYWGQGTQVTVSS

SEQ ID NO: 12005 - protein, 117 aa, Artificial Sequence
  Chemically Synthesized
QVQLQESGGGLVQAGGSLRLSCAASGYIFTLTMGWYRQAPGKEREFVAGIAVGASTYYADSVKGRFTISRDNAKNTVYLQMNSLKPEDTAVYYCAVATRAYRTHAYWGQGTQVTVSS

SEQ ID NO: 12006 - protein, 118 aa, Artificial Sequence
  Chemically Synthesized
QVQLQESGGGLVQAGGSLRLSCAASGSISYRGIMGWYRQAPGKEREFVASISYGASTNYADSVKGRFTISRDNAKNTVYLQMNSLKPEDTAVYYCAAYVYGSYTYLYWGQGTQVTVSS

SEQ ID NO: 12007 - protein, 132 aa, Artificial Sequence
  Chemically Synthesized
QVQLQESGGGLVQAGGSLRLSCAASGNIFSCLLMGWYRQAPGKEREFVASINSGANTNYADSVKGRFTISRDNAKNTVYLQMNSLKPEDTAVYYCAAEDYDTARYVVSHVATWLDSRDFYYWGQGTQVTVSS

SEQ ID NO: 12008 - protein, 126 aa, Artificial Sequence
  Chemically Synthesized
QVQLQESGGGLVQAGGSLRLSCAASGSISYNLGMGWYRQAPGKEREFVAGITYGATTNYADSVKGRFTISRDNAKNTVYLQMNSLKPEDTAVYYCAVDYPEVGARGEVWRGDHTYWGQGTQVTVSS

SEQ ID NO: 12009 - protein, 118 aa, Artificial Sequence
  Chemically Synthesized
QVQLQESGGGLVQAGGSLRLSCAASGSIFAYVNMGWYRQAPGKERELVAGINVGANTYYADSVKGRFTISRDNAKNTVYLQMNSLKPEDTAVYYCAVSQDQTYPLFYWGQGTQVTVSS

SEQ ID NO: 12010 - protein, 124 aa, Artificial Sequence
  Chemically Synthesized
QVQLQESGGGLVQAGGSLRLSCAASGTISRQTGMGWYRQAPGKERELVAGITVGITYYADSVKGRFTISRDNAKNTVYLQMNSLKPEDTAVYYCAVYANQWIKGDVAREESIYWGQGTQVTVSS

SEQ ID NO: 12011 - protein, 118 aa, Artificial Sequence
  Chemically Synthesized
QVQLQESGGGLVQAGGSLRLSCAASGSIFPPTIMGWYRQAPGKERELVAAITRGGSTNYADSVKGRFTISRDNAKNTVYLQMNSLKPEDTAVYYCAASRPYLAYYYYWGQGTQVTVSS

SEQ ID NO: 12012 - protein, 122 aa, Artificial Sequence
  Chemically Synthesized
QVQLQESGGGLVQAGGSLRLSCAASGSISRRFVMGWYRQAPGKERELVAAITLGGITNYADSVKGRFTISRDNAKNTVYLQMNSLKPEDTAVYYCAADGLVEHRYYDTHPYWGQGTQVTVSS

SEQ ID NO: 12013 - protein, 117 aa, Artificial Sequence
  Chemically Synthesized
QVQLQESGGGLVQAGGSLRLSCAASGTISIGTSMGWYRQAPGKERELVASIGPGTSTNYADSVKGRFTISRDNAKNTVYLQMNSLKPEDTAVYYCAARLASDDHGYWGQGTQVTVSS

SEQ ID NO: 12014 - protein, 117 aa, Artificial Sequence
  Chemically Synthesized
QVQLQESGGGLVQAGGSLRLSCAASGTIFALYHMGWYRQAPGKEREFVAAIGYGAITNYADSVKGRFTISRDNAKNTVYLQMNSLKPEDTAVYYCAAIHVPVDTHYWGQGTQVTVSS

SEQ ID NO: 12015 - protein, 122 aa, Artificial Sequence
  Chemically Synthesized
QVQLQESGGGLVQAGGSLRLSCAASGYIFRYDRMGWYRQAPGKEREFVAGIGYGGSTYYADSVKGRFTISRDNAKNTVYLQMNSLKPEDTAVYYCAVSYRYIRAHRVWHAYWGQGTQVTVSS

SEQ ID NO: 12016 - protein, 125 aa, Artificial Sequence
  Chemically Synthesized
QVQLQESGGGLVQAGGSLRLSCAASGNISTHKEMGWYRQAPGKEREFVATINAGTITYYADSVKGRFTISRDNAKNTVYLQMNSLKPEDTAVYYCAAYYYAGPYTSTCMFTVIYWGQGTQVTVSS

SEQ ID NO: 12017 - protein, 121 aa, Artificial Sequence
  Chemically Synthesized
QVQLQESGGGLVQAGGSLRLSCAASGSIFYSSPMGWYRQAPGKEREFVAAILTVLLPYADSVKGRFTISRDNAKNTVYLQMNSLKPEDTAVYYCAAFGVRWYYLYTYLKYWGQGTQVTVSS

SEQ ID NO: 12018 - protein, 111 aa, Artificial Sequence
  Chemically Synthesized
QVQLQESGGGLVQAGGSLRLSCAASGSISYPWSMGWYRQAPGKERELVAGIGFGSTTNYADSVKGRFTISRDNAKNTVYLQMNSLKPEDTAVYYCADYAYWGQGTQVTVSS

SEQ ID NO: 12019 - protein, 118 aa, Artificial Sequence
  Chemically Synthesized
QVQLQESGGGLVQAGGSLRLSCAASGNIFDRTYMGWYRQAPGKEREFVAGISNGSNTYYADSVKGRFTISRDNAKNTVYLQMNSLKPEDTAVYYCAVQRYYLVRYRYWGQGTQVTVSS

SEQ ID NO: 12020 - protein, 121 aa, Artificial Sequence
  Chemically Synthesized
QVQLQESGGGLVQAGGSLRLSCAASGTIFDRLAMGWYRQAPGKEREFVAAIGSVVLIPYADSVKGRFTISRDNAKNTVYLQMNSLKPEDTAVYYCAAFGPYFYYVDDHHYWGQGTQVTVSS

SEQ ID NO: 12021 - protein, 118 aa, Artificial Sequence
  Chemically Synthesized
QVQLQESGGGLVQAGGSLRLSCAASGTISRYFIMGWYRQAPGKEREFVAAIGSGGITNYADSVKGRFTISRDNAKNTVYLQMNSLKPEDTAVYYCAVAGWGVSPYIYWGQGTQVTVSS

SEQ ID NO: 12022 - protein, 118 aa, Artificial Sequence
  Chemically Synthesized
QVQLQESGGGLVQAGGSLRLSCAASGYISYPLSMGWYRQAPGKERELVAGISAGAITNYADSVKGRFTISRDNAKNTVYLQMNSLKPEDTAVYYCAAHTQDSKVHAYWGQGTQVTVSS

SEQ ID NO: 12023 - protein, 117 aa, Artificial Sequence
  Chemically Synthesized
QVQLQESGGGLVQAGGSLRLSCAASGTISFNGMGWYRQAPGKERELVAAINPGGITYYADSVKGRFTISRDNAKNTVYLQMNSLKPEDTAVYYCAATIGVSYYFQYWGQGTQVTVSS

SEQ ID NO: 12024 - protein, 117 aa, Artificial Sequence
  Chemically Synthesized
QVQLQESGGGLVQAGGSLRLSCAASGYIMGWYRQAPGKERELVATIDEGGSTYYADSVKGRFTISRDNAKNTVYLQMNSLKPEDTAVYYCAADFYIDAELPSSLFYWGQGTQVTVSS

SEQ ID NO: 12025 - protein, 116 aa, Artificial Sequence
  Chemically Synthesized
QVQLQESGGGLVQAGGSLRLSCAASGYISGESYMGWYRQAPGKERELVAGIGYGGNTYADSVKGRFTISRDNAKNTVYLQMNSLKPEDTAVYYCAASRTTTTTIYWGQGTQVTVSS

SEQ ID NO: 12026 - protein, 118 aa, Artificial Sequence
  Chemically Synthesized
QVQLQESGGGLVQAGGSLRLSCAASGTISWSYLMGWYRQAPGKEREFVAGIATGTTTYYADSVKGRFTISRDNAKNTVYLQMNSLKPEDTAVYYCAAHYYFDQLHDYWGQGTQVTVSS

SEQ ID NO: 12027 - protein, 122 aa, Artificial Sequence
  Chemically Synthesized
QVQLQESGGGLVQAGGSLRLSCAASGSISRPRVMGWYRQAPGKEREFVAAIANGSTTYYADSVKGRFTISRDNAKNTVYLQMNSLKPEDTAVYYCAARGDYGYNISAAFYYWGQGTQVTVSS

SEQ ID NO: 12028 - protein, 119 aa, Artificial Sequence
  Chemically Synthesized
QVQLQESGGGLVQAGGSLRLSCAASGNISDLVTMGWYRQAPGKERELVLTDGGIPYADSVKGRFTISRDNAKNTVYLQMNSLKPEDTAVYYCAAADASSSDVNGVSIYWGQGTQVTVSS

SEQ ID NO: 12029 - protein, 120 aa, Artificial Sequence
  Chemically Synthesized
QVQLQESGGGLVQAGGSLRLSCAASGNISTSRYYTMGWYRQAPGKEREFVASITRGANTYYADSVKGRFTISRDNAKNTVYLQMNSLKPEDTAVYYCAVYEDSPDEHGYWGQGTQVTVSS

SEQ ID NO: 12030 - protein, 120 aa, Artificial Sequence
  Chemically Synthesized
QVQLQESGGGLVQAGGSLRLSCAASGTIFSAYMGWYRQAPGKEREFLPVLLTVVIPYADSVKGRFTISRDNAKNTVYLQMNSLKPEDTAVYYCAVNGIDFGTGYFYYTYWGQGTQVTVSS

SEQ ID NO: 12031 - protein, 118 aa, Artificial Sequence
  Chemically Synthesized
QVQLQESGGGLVQAGGSLRLSCAASGNISDVSVMGWYRQAPGKEREFVAGIAGGSITYYADSVKGRFTISRDNAKNTVYLQMNSLKPEDTAVYYCAARQGYYSAFGYWGQGTQVTVSS

SEQ ID NO: 12032 - protein, 118 aa, Artificial Sequence
  Chemically Synthesized
QVQLQESGGGLVQAGGSLRLSCAASGNISYFRYMGWYRQAPGKEREFVAGIDFGTNTNYADSVKGRFTISRDNAKNTVYLQMNSLKPEDTAVYYCAVTQGYFLSYGYWGQGTQVTVSS

SEQ ID NO: 12033 - protein, 115 aa, Artificial Sequence
  Chemically Synthesized
QVQLQESGGGLVQAGGSLRLSCAASGTISRYYYMGWYRQAPGKEREFVASISAGATTNYADSVKGRFTISRDNAKNTVYLQMNSLKPEDTAVYYCAVIGQGYDYWGQGTQVTVSS

SEQ ID NO: 12034 - protein, 113 aa, Artificial Sequence
  Chemically Synthesized
QVQLQESGGGLVQAGGSLRLSCAASGSISGYRAMGWYRQAPGKEREFVAAIAQGGNTYYADSVKGRFTISRDNAKNTVYLQMNSLKPEDTAVYYCAVGGHAYWGQGTQVTVSS

SEQ ID NO: 12035 - protein, 122 aa, Artificial Sequence
  Chemically Synthesized
QVQLQESGGGLVQAGGSLRLSCAASGSISLGYDMGWYRQAPGKERELVAAISSGGSTYYADSVKGRFTISRDNAKNTVYLQMNSLKPEDTAVYYCAVYRYYYYDATLQFPYWGQGTQVTVSS

SEQ ID NO: 12036 - protein, 118 aa, Artificial Sequence
  Chemically Synthesized
QVQLQESGGGLVQAGGSLRLSCAASGSISAPRSMGWYRQAPGKEREFVAGINVGGNTYYADSVKGRFTISRDNAKNTVYLQMNSLKPEDTAVYYCAAYVYSAIRYPYWGQGTQVTVSS

SEQ ID NO: 12037 - protein, 118 aa, Artificial Sequence
  Chemically Synthesized
QVQLQESGGGLVQAGGSLRLSCAASGSISRFYVMGWYRQAPGKEREFVAGISYGSTTNYADSVKGRFTISRDNAKNTVYLQMNSLKPEDTAVYYCAVFWGYAYWFGYWGQGTQVTVSS

SEQ ID NO: 12038 - protein, 115 aa, Artificial Sequence
  Chemically Synthesized
QVQLQESGGGLVQAGGSLRLSCAASGNISQSYVMGWYRQAPGKEREFVAAITYGTNTNYADSVKGRFTISRDNAKNTVYLQMNSLKPEDTAVYYCAVIARYHNYWGQGTQVTVSS

SEQ ID NO: 12039 - protein, 117 aa, Artificial Sequence
  Chemically Synthesized
QVQLQESGGGLVQAGGSLRLSCAASGSISPYYFMGWYRQAPGKEREFVATITKGGNTNYADSVKGRFTISRDNAKNTVYLQMNSLKPEDTAVYYCAAYDVRSYYDYWGQGTQVTVSS

SEQ ID NO: 12040 - protein, 118 aa, Artificial Sequence
  Chemically Synthesized
QVQLQESGGGLVQAGGSLRLSCAASGNISSDDWMGWYRQAPGKERELVAAIAYGATTNYADSVKGRFTISRDNAKNTVYLQMNSLKPEDTAVYYCAVWVKSELFHLYWGQGTQVTVSS

SEQ ID NO: 12041 - protein, 115 aa, Artificial Sequence
  Chemically Synthesized
QVQLQESGGGLVQAGGSLRLSCAASGNISVRRTMGWYRQAPGKERELVASIGYGASTYYADSVKGRFTISRDNAKNTVYLQMNSLKPEDTAVYYCAVYIGIYDYWGQGTQVTVSS

SEQ ID NO: 12042 - protein, 115 aa, Artificial Sequence
  Chemically Synthesized
QVQLQESGGGLVQAGGSLRLSCAASGYISWIAYMGWYRQAPGKEREFVATITPGGSTNYADSVKGRFTISRDNAKNTVYLQMNSLKPEDTAVYYCAVIARYHNYWGQGTQVTVSS

SEQ ID NO: 12043 - protein, 113 aa, Artificial Sequence
  Chemically Synthesized
QVQLQESGGGLVQAGGSLRLSCAASGNIFRSARMGWYRQAPGKERELVAAIGDGAITYYADSVKGRFTISRDNAKNTVYLQMNSLKPEDTAVYYCAAVNHYYWGQGTQVTVSS

SEQ ID NO: 12044 - protein, 115 aa, Artificial Sequence
  Chemically Synthesized
QVQLQESGGGLVQAGGSLRLSCAASGNIFGYYYMGWYRQAPGKEREFVAAITPGTSTYYADSVKGRFTISRDNAKNTVYLQMNSLKPEDTAVYYCAVIARYHNYWGQGTQVTVSS

SEQ ID NO: 12045 - protein, 115 aa, Artificial Sequence
  Chemically Synthesized
QVQLQESGGGLVQAGGSLRLSCAASGYIFYVFFMGWYRQAPGKEREFVATISRGTSTYYADSVKGRFTISRDNAKNTVYLQMNSLKPEDTAVYYCAVVTYTLDYWGQGTQVTVSS

SEQ ID NO: 12046 - protein, 118 aa, Artificial Sequence
  Chemically Synthesized
QVQLQESGGGLVQAGGSLRLSCAASGSISPYYFMGWYRQAPGKEREFVATITKGGNTNYADSVKGRFTISRDNAKNTVYLQMNSLKPEDTAVYYCAAITSWYESHDYWGQGTQVTVSS

SEQ ID NO: 12047 - protein, 114 aa, Artificial Sequence
  Chemically Synthesized
QVQLQESGGGLVQAGGSLRLSCAASGTISSRPWMGWYRQAPGKEREFVATITYGSTTNYADSVKGRFTISRDNAKNTVYLQMNSLKPEDTAVYYCAVIGPYPYWGQGTQVTVSS

SEQ ID NO: 12048 - protein, 115 aa, Artificial Sequence
  Chemically Synthesized
QVQLQESGGGLVQAGGSLRLSCAASGNISQSYVMGWYRQAPGKEREFVATITKGGNTNYADSVKGRFTISRDNAKNTVYLQMNSLKPEDTAVYYCAVIARYHNYWGQGTQVTVSS

SEQ ID NO: 12049 - protein, 121 aa, Artificial Sequence
  Chemically Synthesized
QVQLQESGGGLVQAGGSLRLSCAASGTISPYVSMGWYRQAPGKEREFVASIGGGSNTYYADSVKGRFTISRDNAKNTVYLQMNSLKPEDTAVYYCAAHYYAYDPDLDYEYWGQGTQVTVSS

SEQ ID NO: 12050 - protein, 118 aa, Artificial Sequence
  Chemically Synthesized
QVQLQESGGGLVQAGGSLRLSCAASGNISSWYFMGWYRQAPGKERELVAAITPGGTTNYADSVKGRFTISRDNAKNTVYLQMNSLKPEDTAVYYCAVIIIARDALDYWGQGTQVTVSS

SEQ ID NO: 12051 - protein, 118 aa, Artificial Sequence
  Chemically Synthesized
QVQLQESGGGLVQAGGSLRLSCAASGYISAYPIMGWYRQAPGKERELVAAISRGASTYYADSVKGRFTISRDNAKNTVYLQMNSLKPEDTAVYYCAAIVLEAGEHDYWGQGTQVTVSS

SEQ ID NO: 12052 - protein, 118 aa, Artificial Sequence
  Chemically Synthesized
QVQLQESGGGLVQAGGSLRLSCAASGSISPYYFMGWYRQAPGKEREFVATITKGGNTNYADSVKGRFTISRDNAKNTVYLQMNSLKPEDTAVYYCAVVTFYYGDYVYWGQGTQVTVSS

SEQ ID NO: 12053 - protein, 117 aa, Artificial Sequence
  Chemically Synthesized
QVQLQESGGGLVQAGGSLRLSCAASGSISPYYFMGWYRQAPGKEREFVAAITYGTNTNYADSVKGRFTISRDNAKNTVYLQMNSLKPEDTAVYYCAAYDVRSYYDYWGQGTQVTVSS

SEQ ID NO: 12054 - protein, 118 aa, Artificial Sequence
  Chemically Synthesized
QVQLQESGGGLVQAGGSLRLSCAASGSISPDGGMGWYRQAPGKEREFVAGIGRGATTYYADSVKGRFTISRDNAKNTVYLQMNSLKPEDTAVYYCAAHLWSAKYYAYWGQGTQVTVSS

SEQ ID NO: 12055 - protein, 116 aa, Artificial Sequence
  Chemically Synthesized
QVQLQESGGGLVQAGGSLRLSCAASGSIFERYGMGWYRQAPGKEREFVAAIGLGANTYYADSVKGRFTISRDNAKNTVYLQMNSLKPEDTAVYYCAVATHRTHSYWGQGTQVTVSS

SEQ ID NO: 12056 - protein, 118 aa, Artificial Sequence
  Chemically Synthesized
QVQLQESGGGLVQAGGSLRLSCAASGSISPYYFMGWYRQAPGKEREFVATITKGGNTNYADSVKGRFTISRDNAKNTVYLQMNSLKPEDTAVYYCAATNLDPYAHLYWGQGTQVTVSS

SEQ ID NO: 12057 - protein, 126 aa, Artificial Sequence
  Chemically Synthesized
QVQLQESGGGLVQAGGSLRLSCAASGSISPYYFMGWYRQAPGKEREFVATITKGGNTNYADSVKGRFTISRDNAKNTVYLQMNSLKPEDTAVYYCAAHSVYYDTRSYAPPDIHVYWGQGTQVTVSS

SEQ ID NO: 12058 - protein, 118 aa, Artificial Sequence
  Chemically Synthesized
QVQLQESGGGLVQAGGSLRLSCAASGYISYYGYMGWYRQAPGKEREFVASISYGGSTNYADSVKGRFTISRDNAKNTVYLQMNSLKPEDTAVYYCAAIWVRPNDHDYWGQGTQVTVSS

SEQ ID NO: 12059 - protein, 115 aa, Artificial Sequence
  Chemically Synthesized
QVQLQESGGGLVQAGGSLRLSCAASGSISVYFYMGWYRQAPGKEREFVASISRGGTTNYADSVKGRFTISRDNAKNTVYLQMNSLKPEDTAVYYCAVIGRVHDYWGQGTQVTVSS

SEQ ID NO: 12060 - protein, 118 aa, Artificial Sequence
  Chemically Synthesized
QVQLQESGGGLVQAGGSLRLSCAASGNISRVIFMGWYRQAPGKERELVATISSGSTTNYADSVKGRFTISRDNAKNTVYLQMNSLKPEDTAVYYCAVIRWTSVQHDYWGQGTQVTVSS

SEQ ID NO: 12061 - protein, 115 aa, Artificial Sequence
  Chemically Synthesized
QVQLQESGGGLVQAGGSLRLSCAASGSISGTIYMGWYRQAPGKERELVAAITAGGSTYYADSVKGRFTISRDNAKNTVYLQMNSLKPEDTAVYYCAVIARYHNYWGQGTQVTVSS

SEQ ID NO: 12062 - protein, 118 aa, Artificial Sequence
  Chemically Synthesized
QVQLQESGGGLVQAGGSLRLSCAASGSISPYYFMGWYRQAPGKEREFVAAITPGTSTYYADSVKGRFTISRDNAKNTVYLQMNSLKPEDTAVYYCAAITSWYESHDYWGQGTQVTVSS

SEQ ID NO: 12063 - protein, 115 aa, Artificial Sequence
  Chemically Synthesized
QVQLQESGGGLVQAGGSLRLSCAASGYISWIAYMGWYRQAPGKEREFVATITKGGNTNYADSVKGRFTISRDNAKNTVYLQMNSLKPEDTAVYYCAVIARYHNYWGQGTQVTVSS

SEQ ID NO: 12064 - protein, 117 aa, Artificial Sequence
  Chemically Synthesized
QVQLQESGGGLVQAGGSLRLSCAASGSISPYYFMGWYRQAPGKEREFVATITKGGNTNYADSVKGRFTISRDNAKNTVYLQMNSLKPEDTAVYYCAAVRYVLSFDYWGQGTQVTVSS

SEQ ID NO: 12065 - protein, 116 aa, Artificial Sequence
  Chemically Synthesized
QVQLQESGGGLVQAGGSLRLSCAASGYISGWRAMGWYRQAPGKEREFVAAISSGASTYYADSVKGRFTISRDNAKNTVYLQMNSLKPEDTAVYYCAVGGGRQHGYWGQGTQVTVSS

SEQ ID NO: 12066 - protein, 115 aa, Artificial Sequence
  Chemically Synthesized
QVQLQESGGGLVQAGGSLRLSCAASGSISPYYFMGWYRQAPGKEREFVATITKGGNTNYADSVKGRFTISRDNAKNTVYLQMNSLKPEDTAVYYCAAIAYYHDYWGQGTQVTVSS

SEQ ID NO: 12067 - protein, 115 aa, Artificial Sequence
  Chemically Synthesized
QVQLQESGGGLVQAGGSLRLSCAASGTISHYYYMGWYRQAPGKERELVASITYGGNTYYADSVKGRFTISRDNAKNTVYLQMNSLKPEDTAVYYCAVIARYHNYWGQGTQVTVSS

SEQ ID NO: 12068 - protein, 122 aa, Artificial Sequence
  Chemically Synthesized
QVQLQESGGGLVQAGGSLRLSCAASGTIFQYTYMGWYRQAPGKERELVASIDVGSNTNYADSVKGRFTISRDNAKNTVYLQMNSLKPEDTAVYYCAADRPYYFGAPITHVYWGQGTQVTVSS

SEQ ID NO: 12069 - protein, 118 aa, Artificial Sequence
  Chemically Synthesized
QVQLQESGGGLVQAGGSLRLSCAASGNIFYNRAMGWYRQAPGKEREFVATIAGGGNTYYADSVKGRFTISRDNAKNTVYLQMNSLKPEDTAVYYCAAGIYDPTRYPYWGQGTQVTVSS

SEQ ID NO: 12070 - protein, 118 aa, Artificial Sequence
  Chemically Synthesized
QVQLQESGGGLVQAGGSLRLSCAASGNIFQADNMGWYRQAPGKERELVAAISTGGSTNYADSVKGRFTISRDNAKNTVYLQMNSLKPEDTAVYYCAAQNWYVPSHWYWGQGTQVTVSS

SEQ ID NO: 12071 - protein, 115 aa, Artificial Sequence
  Chemically Synthesized
QVQLQESGGGLVQAGGSLRLSCAASGNISDYYYMGWYRQAPGKEREFVAAISPGASTNYADSVKGRFTISRDNAKNTVYLQMNSLKPEDTAVYYCAVIARYHNYWGQGTQVTVSS

SEQ ID NO: 12072 - protein, 118 aa, Artificial Sequence
  Chemically Synthesized
QVQLQESGGGLVQAGGSLRLSCAASGSISPYYFMGWYRQAPGKEREFVATITKGGNTNYADSVKGRFTISRDNAKNTVYLQMNSLKPEDTAVYYCAVLGARFPYHDYWGQGTQVTVSS

SEQ ID NO: 12073 - protein, 127 aa, Artificial Sequence
  Chemically Synthesized
QVQLQESGGGLVQAGGSLRLSCAASGNIFYPVIMGWYRQAPGKEREFVAAIADHGTITNYADSVKGRFTISRDNAKNTVYLQMNSLKPEDTAVYYCAVVLASEYDDTRYTFSYHRYWGQGTQVTVSS

SEQ ID NO: 12074 - protein, 118 aa, Artificial Sequence
  Chemically Synthesized
QVQLQESGGGLVQAGGSLRLSCAASGSISYPTVMGWYRQAPGKERELVAAIGQGTSTYYADSVKGRFTISRDNAKNTVYLQMNSLKPEDTAVYYCAARGYRKQDHGYWGQGTQVTVSS

SEQ ID NO: 12075 - protein, 115 aa, Artificial Sequence
  Chemically Synthesized
QVQLQESGGGLVQAGGSLRLSCAASGSISLTPIMGWYRQAPGKEREFVAAISKGATTYYADSVKGRFTISRDNAKNTVYLQMNSLKPEDTAVYYCAAGGAQVTYWGQGTQVTVSS

SEQ ID NO: 12076 - protein, 126 aa, Artificial Sequence
  Chemically Synthesized
QVQLQESGGGLVQAGGSLRLSCAASGNISQLYAMGWYRQAPGKERELVASIADGSTTYYADSVKGRFTISRDNAKNTVYLQMNSLKPEDTAVYYCAVIYLYGPADTQYRYRYHRYWGQGTQVTVSS

SEQ ID NO: 12077 - protein, 116 aa, Artificial Sequence
  Chemically Synthesized
QVQLQESGGGLVQAGGSLRLSCAASGNISGPSIMGWYRQAPGKEREFVASIGDGATTYYADSVKGRFTISRDNAKNTVYLQMNSLKPEDTAVYYCAVRYWPYHAYWGQGTQVTVSS

SEQ ID NO: 12078 - protein, 119 aa, Artificial Sequence
  Chemically Synthesized
QVQLQESGGGLVQAGGSLRLSCAASGSISYRQVMGWYRQAPGKERELVAAIGLGTITYYADSVKGRFTISRDNAKNTVYLQMNSLKPEDTAVYYCAAQYQADGNYRAYWGQGTQVTVSS

SEQ ID NO: 12079 - protein, 125 aa, Artificial Sequence
  Chemically Synthesized
QVQLQESGGGLVQAGGSLRLSCAASGTISPGDIMGWYRQAPGKEREFVASIAGTSTYYADSVKGRFTISRDNAKNTVYLQMNSLKPEDTAVYYCAARLIGYVYGDTTVRAYLYYWGQGTQVTVSS

SEQ ID NO: 12080 - protein, 117 aa, Artificial Sequence
  Chemically Synthesized
QVQLQESGGGLVQAGGSLRLSCAASGNISSRYVMGWYRQAPGKERELVAGITAGTNTYYADSVKGRFTISRDNAKNTVYLQMNSLKPEDTAVYYCAAGNWYDYHYYWGQGTQVTVSS

SEQ ID NO: 12081 - protein, 122 aa, Artificial Sequence
  Chemically Synthesized
QVQLQESGGGLVQAGGSLRLSCAASGSISVRSVMGWYRQAPGKERELVAAIGKGAITYYADSVKGRFTISRDNAKNTVYLQMNSLKPEDTAVYYCAAVYLEKGVEDGQYSYWGQGTQVTVSS

SEQ ID NO: 12082 - protein, 122 aa, Artificial Sequence
  Chemically Synthesized
QVQLQESGGGLVQAGGSLRLSCAASGNIFTYVVMGWYRQAPGKERELVAGINLGGSTYYADSVKGRFTISRDNAKNTVYLQMNSLKPEDTAVYYCAAYYRDLREATIYYYYWGQGTQVTVSS

SEQ ID NO: 12083 - protein, 118 aa, Artificial Sequence
  Chemically Synthesized
QVQLQESGGGLVQAGGSLRLSCAASGTIFYTYVMGWYRQAPGKERELVAAIGRGTSTYYADSVKGRFTISRDNAKNTVYLQMNSLKPEDTAVYYCAVQSWSTENHYYWGQGTQVTVSS

SEQ ID NO: 12084 - protein, 118 aa, Artificial Sequence
  Chemically Synthesized
QVQLQESGGGLVQAGGSLRLSCAASGTISYDQVMGWYRQAPGKEREFVAAIDDGSSTYYADSVKGRFTISRDNAKNTVYLQMNSLKPEDTAVYYCAVLVYDGDYHRYWGQGTQVTVSS

SEQ ID NO: 12085 - protein, 118 aa, Artificial Sequence
  Chemically Synthesized
QVQLQESGGGLVQAGGSLRLSCAASGNISTYVIMGWYRQAPGKEREFVASIGIGGNTYYADSVKGRFTISRDNAKNTVYLQMNSLKPEDTAVYYCAARQYYKPFHRYWGQGTQVTVSS

SEQ ID NO: 12086 - protein, 126 aa, Artificial Sequence
  Chemically Synthesized
QVQLQESGGGLVQAGGSLRLSCAASGSISRYLLMGWYRQAPGKEREFVAGIAAGASTNYADSVKGRFTISRDNAKNTVYLQMNSLKPEDTAVYYCAVISIDSRTGSYDTYRYHRYWGQGTQVTVSS

SEQ ID NO: 12087 - protein, 116 aa, Artificial Sequence
  Chemically Synthesized
QVQLQESGGGLVQAGGSLRLSCAASGNIFGVMGWYRQAPGKERELVAGINAGGITYYADSVKGRFTISRDNAKNTVYLQMNSLKPEDTAVYYCAAWLRVGSKFIYWGQGTQVTVSS

SEQ ID NO: 12088 - protein, 115 aa, Artificial Sequence
  Chemically Synthesized
QVQLQESGGGLVQAGGSLRLSCAASGYISDPNIMGWYRQAPGKEREFVASISGGATYYADSVKGRFTISRDNAKNTVYLQMNSLKPEDTAVYYCAAYYSRQHRYWGQGTQVTVSS

SEQ ID NO: 12089 - protein, 118 aa, Artificial Sequence
  Chemically Synthesized
QVQLQESGGGLVQAGGSLRLSCAASGTIFGATAMGWYRQAPGKEREFVAGITPGSTTNYADSVKGRFTISRDNAKNTVYLQMNSLKPEDTAVYYCAAFRVSNAVYGYWGQGTQVTVSS

SEQ ID NO: 12090 - protein, 120 aa, Artificial Sequence
  Chemically Synthesized
QVQLQESGGGLVQAGGSLRLSCAASGTISRRVGMGWYRQAPGKEREFVAAITRGGNTNYADSVKGRFTISRDNAKNTVYLQMNSLKPEDTAVYYCAVFVAGERYDYYGYWGQGTQVTVSS

SEQ ID NO: 12091 - protein, 119 aa, Artificial Sequence
  Chemically Synthesized
QVQLQESGGGLVQAGGSLRLSCAASGSIFNYVVMGWYRQAPGKERELVAGISPGSTTNYADSVKGRFTISRDNAKNTVYLQMNSLKPEDTAVYYCAAASYLDRTYYYYWGQGTQVTVSS

SEQ ID NO: 12092 - protein, 122 aa, Artificial Sequence
  Chemically Synthesized
QVQLQESGGGLVQAGGSLRLSCAASGSISRRLVMGWYRQAPGKERELVAAIGWGTITYYADSVKGRFTISRDNAKNTVYLQMNSLKPEDTAVYYCAARVPTYGPNQDLHAYWGQGTQVTVSS

SEQ ID NO: 12093 - protein, 117 aa, Artificial Sequence
  Chemically Synthesized
QVQLQESGGGLVQAGGSLRLSCAASGNISSRTMGWYRQAPGKERELVAGISHGASTNYADSVKGRFTISRDNAKNTVYLQMNSLKPEDTAVYYCAAGQDVIADLGYWGQGTQVTVSS

SEQ ID NO: 12094 - protein, 118 aa, Artificial Sequence
  Chemically Synthesized
QVQLQESGGGLVQAGGSLRLSCAASGTIFQYIIMGWYRQAPGKERELVAGITGGSSTYYADSVKGRFTISRDNAKNTVYLQMNSLKPEDTAVYYCAAIYRGAPVYYYWGQGTQVTVSS

SEQ ID NO: 12095 - protein, 118 aa, Artificial Sequence
  Chemically Synthesized
QVQLQESGGGLVQAGGSLRLSCAASGNISYDSIMGWYRQAPGKEREFVAAIAYGGITYYADSVKGRFTISRDNAKNTVYLQMNSLKPEDTAVYYCAARTAPYDRYRYWGQGTQVTVSS

SEQ ID NO: 12096 - protein, 121 aa, Artificial Sequence
  Chemically Synthesized
QVQLQESGGGLVQAGGSLRLSCAASGTISSWTMGWYRQAPGKEREFVAGISAGSTTYYADSVKGRFTISRDNAKNTVYLQMNSLKPEDTAVYYCAAIGSSDVYYEDDHGYWGQGTQVTVSS

SEQ ID NO: 12097 - protein, 122 aa, Artificial Sequence
  Chemically Synthesized
QVQLQESGGGLVQAGGSLRLSCAASGTISSASIMGWYRQAPGKEREFVAGITPGATTNYADSVKGRFTISRDNAKNTVYLQMNSLKPEDTAVYYCAVAVFFAYTHGGYLDYWGQGTQVTVSS

SEQ ID NO: 12098 - protein, 118 aa, Artificial Sequence
  Chemically Synthesized
QVQLQESGGGLVQAGGSLRLSCAASGYISDHIVMGWYRQAPGKEREFVAAIGAGAITYYADSVKGRFTISRDNAKNTVYLQMNSLKPEDTAVYYCAVRVGSRDSHRYWGQGTQVTVSS

SEQ ID NO: 12099 - protein, 126 aa, Artificial Sequence
  Chemically Synthesized
QVQLQESGGGLVQAGGSLRLSCAASGTISYPGGMGWYRQAPGKERELVAAIGDGATTYYADSVKGRFTISRDNAKNTVYLQMNSLKPEDTAVYYCAAAILSRFKYDPSRITYHRYWGQGTQVTVSS

SEQ ID NO: 12100 - protein, 119 aa, Artificial Sequence
  Chemically Synthesized
QVQLQESGGGLVQAGGSLRLSCAASGNISTPPPMGWYRQAPGKERELVAAIDQGTSTYYADSVKGRFTISRDNAKNTVYLQMNSLKPEDTAVYYCAVITYTLRSWFRYWGQGTQVTVSS

SEQ ID NO: 12101 - protein, 126 aa, Artificial Sequence
  Chemically Synthesized
QVQLQESGGGLVQAGGSLRLSCAASGNIFSSLVMGWYRQAPGKERELVAGISPGATTNYADSVKGRFTISRDNAKNTVYLQMNSLKPEDTAVYYCAAVAPDRDPYPDGYYRWFYYWGQGTQVTVSS

SEQ ID NO: 12102 - protein, 123 aa, Artificial Sequence
  Chemically Synthesized
QVQLQESGGGLVQAGGSLRLSCAASGNISAFDGMGWYRQAPGKERELVAAIDDGTNTYYADSVKGRFTISRDNAKNTVYLQMNSLKPEDTAVYYCAAVALTAVQSYYRYYRYWGQGTQVTVSS

SEQ ID NO: 12103 - protein, 122 aa, Artificial Sequence
  Chemically Synthesized
QVQLQESGGGLVQAGGSLRLSCAASGNIFYPLAMGWYRQAPGKEREFVAAIGGGSTTNYADSVKGRFTISRDNAKNTVYLQMNSLKPEDTAVYYCAASIYTYDNGPYPFTYWGQGTQVTVSS

SEQ ID NO: 12104 - protein, 118 aa, Artificial Sequence
  Chemically Synthesized
QVQLQESGGGLVQAGGSLRLSCAASGNISARHAMGWYRQAPGKERELVAAITGGGNTYYADSVKGRFTISRDNAKNTVYLQMNSLKPEDTAVYYCAAGHRYVGSFYYWGQGTQVTVSS

SEQ ID NO: 12105 - protein, 126 aa, Artificial Sequence
  Chemically Synthesized
QVQLQESGGGLVQAGGSLRLSCAASGSIFPYTVMGWYRQAPGKEREFVAGISVGATTYYADSVKGRFTISRDNAKNTVYLQMNSLKPEDTAVYYCAAVIRIRDPYEQYIREYFYYWGQGTQVTVSS

SEQ ID NO: 12106 - protein, 126 aa, Artificial Sequence
  Chemically Synthesized
QVQLQESGGGLVQAGGSLRLSCAASGSISGRYGMGWYRQAPGKERELVAAISEGGSTYYADSVKGRFTISRDNAKNTVYLQMNSLKPEDTAVYYCAAIIVSKYRPNGYIGNFHRYWGQGTQVTVSS

SEQ ID NO: 12107 - protein, 118 aa, Artificial Sequence
  Chemically Synthesized
QVQLQESGGGLVQAGGSLRLSCAASGSIFYLSTMGWYRQAPGKEREFVAGITQGGSTYYADSVKGRFTISRDNAKNTVYLQMNSLKPEDTAVYYCAAYYFNDAHFYYWGQGTQVTVSS

SEQ ID NO: 12108 - protein, 118 aa, Artificial Sequence
  Chemically Synthesized
QVQLQESGGGLVQAGGSLRLSCAASGSISTYFVMGWYRQAPGKEREFVAAISVGASTYYADSVKGRFTISRDNAKNTVYLQMNSLKPEDTAVYYCAVRPGYVELHGYWGQGTQVTVSS

SEQ ID NO: 12109 - protein, 122 aa, Artificial Sequence
  Chemically Synthesized
QVQLQESGGGLVQAGGSLRLSCAASGNISYAAGMGWYRQAPGKERELVAAITRGGTTYYADSVKGRFTISRDNAKNTVYLQMNSLKPEDTAVYYCAVYAVVRKYHFDLYIYWGQGTQVTVSS

SEQ ID NO: 12110 - protein, 125 aa, Artificial Sequence
  Chemically Synthesized
QVQLQESGGGLVQAGGSLRLSCAASGYISYVPLMGWYRQAPGKEREFVAAITDGTTTNYADSVKGRFTISRDNAKNTVYLQMNSLKPEDTAVYYCAALNYGRDRPDGYYVYHRYWGQGTQVTVSS

SEQ ID NO: 12111 - protein, 119 aa, Artificial Sequence
  Chemically Synthesized
QVQLQESGGGLVQAGGSLRLSCAASGSISHHDPMGWYRQAPGKERELVAAIDAGTTTYYADSVKGRFTISRDNAKNTVYLQMNSLKPEDTAVYYCAVVYVAVGRWHRYWGQGTQVTVSS

SEQ ID NO: 12112 - protein, 126 aa, Artificial Sequence
  Chemically Synthesized
QVQLQESGGGLVQAGGSLRLSCAASGSISGPYAMGWYRQAPGKERELVATIAPGTSTYYADSVKGRFTISRDNAKNTVYLQMNSLKPEDTAVYYCAVITLRHGYRGGNDYYYHRYWGQGTQVTVSS

SEQ ID NO: 12113 - protein, 122 aa, Artificial Sequence
  Chemically Synthesized
QVQLQESGGGLVQAGGSLRLSCAASGTISQPVPMGWYRQAPGKERELVAAIARGSITYYADSVKGRFTISRDNAKNTVYLQMNSLKPEDTAVYYCAAIITNRHELGTYHRYWGQGTQVTVSS

SEQ ID NO: 12114 - protein, 126 aa, Artificial Sequence
  Chemically Synthesized
QVQLQESGGGLVQAGGSLRLSCAASGTIFTLAIMGWYRQAPGKEREFVAAIALGSSTNYADSVKGRFTISRDNAKNTVYLQMNSLKPEDTAVYYCAARDVTYRSEPVRYRLGHAYWGQGTQVTVSS

SEQ ID NO: 12115 - protein, 118 aa, Artificial Sequence
  Chemically Synthesized
QVQLQESGGGLVQAGGSLRLSCAASGSISDVTIMGWYRQAPGKEREFVASISPGGSTYYADSVKGRFTISRDNAKNTVYLQMNSLKPEDTAVYYCAVRDTSVRYLGYWGQGTQVTVSS

SEQ ID NO: 12116 - protein, 122 aa, Artificial Sequence
  Chemically Synthesized
QVQLQESGGGLVQAGGSLRLSCAASGTISAVIIMGWYRQAPGKEREFVASITDGTNTYYADSVKGRFTISRDNAKNTVYLQMNSLKPEDTAVYYCAVIGRPSPNYDYYHGYWGQGTQVTVSS

SEQ ID NO: 12117 - protein, 125 aa, Artificial Sequence
  Chemically Synthesized
QVQLQESGGGLVQAGGSLRLSCAASGTIFYNYMGWYRQAPGKERELVATINDGSTTYYADSVKGRFTISRDNAKNTVYLQMNSLKPEDTAVYYCAAIHVYAPSRPVPRYTYHRYWGQGTQVTVSS

SEQ ID NO: 12118 - protein, 121 aa, Artificial Sequence
  Chemically Synthesized
QVQLQESGGGLVQAGGSLRLSCAASGSISKQGGMGWYRQAPGKERELVAAITKGASTYYADSVKGRFTISRDNAKNTVYLQMNSLKPEDTAVYYCAVFYYNGAEVYAYGYWGQGTQVTVSS

SEQ ID NO: 12119 - protein, 118 aa, Artificial Sequence
  Chemically Synthesized
QVQLQESGGGLVQAGGSLRLSCAASGTISPLGYMGWYRQAPGKEREFVASIGDGGTTYYADSVKGRFTISRDNAKNTVYLQMNSLKPEDTAVYYCAVYQYPGGPFQYWGQGTQVTVSS

SEQ ID NO: 12120 - protein, 121 aa, Artificial Sequence
  Chemically Synthesized
QVQLQESGGGLVQAGGSLRLSCAASGSISLRTVMGWYRQAPGKERELVAAIGRGTITYYADSVKGRFTISRDNAKNTVYLQMNSLKPEDTAVYYCAVRWLDSYYAGGLGYWGQGTQVTVSS

SEQ ID NO: 12121 - protein, 126 aa, Artificial Sequence
  Chemically Synthesized
QVQLQESGGGLVQAGGSLRLSCAASGNIFYELNMGWYRQAPGKERELVAAISTGSSTNYADSVKGRFTISRDNAKNTVYLQMNSLKPEDTAVYYCAAIQLDDRDPYGSYRRWYRYWGQGTQVTVSS

SEQ ID NO: 12122 - protein, 122 aa, Artificial Sequence
  Chemically Synthesized
QVQLQESGGGLVQAGGSLRLSCAASGTISGHYIMGWYRQAPGKEREFVASIGYGTTTYYADSVKGRFTISRDNAKNTVYLQMNSLKPEDTAVYYCAVRQQRDEYKARTYFYWGQGTQVTVSS

SEQ ID NO: 12123 - protein, 112 aa, Artificial Sequence
  Chemically Synthesized
QVQLQESGGGLVQAGGSLRLSCAASGYISDYSMGWYRQAPGKERELVATIDDGATTYYADSVKGRFTISRDNAKNTVYLQMNSLKPEDTAVYYCAAASSNYWGQGTQVTVSS

SEQ ID NO: 12124 - protein, 118 aa, Artificial Sequence
  Chemically Synthesized
QVQLQESGGGLVQAGGSLRLSCAASGTISRYAYMGWYRQAPGKEREFVAAIAFGTNTYYADSVKGRFTISRDNAKNTVYLQMNSLKPEDTAVYYCAVRPWYDRDYGYWGQGTQVTVSS

SEQ ID NO: 12125 - protein, 118 aa, Artificial Sequence
  Chemically Synthesized
QVQLQESGGGLVQAGGSLRLSCAASGYISARDYMGWYRQAPGKEREFVASIDVGGTTYYADSVKGRFTISRDNAKNTVYLQMNSLKPEDTAVYYCAADGETLYHLLYWGQGTQVTVSS

SEQ ID NO: 12126 - protein, 118 aa, Artificial Sequence
  Chemically Synthesized
QVQLQESGGGLVQAGGSLRLSCAASGNISREATMGWYRQAPGKEREFVASITYGGNTNYADSVKGRFTISRDNAKNTVYLQMNSLKPEDTAVYYCAAVAYRSKWFVYWGQGTQVTVSS

SEQ ID NO: 12127 - protein, 118 aa, Artificial Sequence
  Chemically Synthesized
QVQLQESGGGLVQAGGSLRLSCAASGNIFPYVSMGWYRQAPGKEREFVAGISRGSITNYADSVKGRFTISRDNAKNTVYLQMNSLKPEDTAVYYCAALLWHRQYYYYWGQGTQVTVSS

SEQ ID NO: 12128 - protein, 120 aa, Artificial Sequence
  Chemically Synthesized
QVQLQESGGGLVQAGGSLRLSCAASGSISHGVLMGWYRQAPGKERELVAGISWGSSTYYADSVKGRFTISRDNAKNTVYLQMNSLKPEDTAVYYCAALYRHNTSAYYYYWGQGTQVTVSS

SEQ ID NO: 12129 - protein, 118 aa, Artificial Sequence
  Chemically Synthesized
QVQLQESGGGLVQAGGSLRLSCAASGNISRVYLMGWYRQAPGKEREFVAAISGGGNTYYADSVKGRFTISRDNAKNTVYLQMNSLKPEDTAVYYCAAGRWNRRAFEYWGQGTQVTVSS

SEQ ID NO: 12130 - protein, 121 aa, Artificial Sequence
  Chemically Synthesized
QVQLQESGGGLVQAGGSLRLSCAASGNIFDLDTMGWYRQAPGKEREFVAAIASVVLPYADSVKGRFTISRDNAKNTVYLQMNSLKPEDTAVYYCAAYYTTDVGFESAHVYWGQGTQVTVSS

SEQ ID NO: 12131 - protein, 118 aa, Artificial Sequence
  Chemically Synthesized
QVQLQESGGGLVQAGGSLRLSCAASGTIFRYGLMGWYRQAPGKEREFVAGITPGASTNYADSVKGRFTISRDNAKNTVYLQMNSLKPEDTAVYYCAAYVQYGPNLYYWGQGTQVTVSS

SEQ ID NO: 12132 - protein, 118 aa, Artificial Sequence
  Chemically Synthesized
QVQLQESGGGLVQAGGSLRLSCAASGSIFDQSWMGWYRQAPGKEREFVATITRGTNTYYADSVKGRFTISRDNAKNTVYLQMNSLKPEDTAVYYCAAQVYIGATFVYWGQGTQVTVSS

SEQ ID NO: 12133 - protein, 122 aa, Artificial Sequence
  Chemically Synthesized
QVQLQESGGGLVQAGGSLRLSCAASGNIFTRTIMGWYRQAPGKERELVAGIGLGGTTNYADSVKGRFTISRDNAKNTVYLQMNSLKPEDTAVYYCAAYYQARRGDYDYYYYWGQGTQVTVSS

SEQ ID NO: 12134 - protein, 118 aa, Artificial Sequence
  Chemically Synthesized
QVQLQESGGGLVQAGGSLRLSCAASGSIFERTLMGWYRQAPGKERELVAGIAAGTTTYYADSVKGRFTISRDNAKNTVYLQMNSLKPEDTAVYYCAAVYLGAGTYYYWGQGTQVTVSS

SEQ ID NO: 12135 - protein, 118 aa, Artificial Sequence
  Chemically Synthesized
QVQLQESGGGLVQAGGSLRLSCAASGSISATRIMGWYRQAPGKERELVAAIARGTNTYYADSVKGRFTISRDNAKNTVYLQMNSLKPEDTAVYYCAASGFGHAEYPYWGQGTQVTVSS

SEQ ID NO: 12136 - protein, 118 aa, Artificial Sequence
  Chemically Synthesized
QVQLQESGGGLVQAGGSLRLSCAASGTISDRATMGWYRQAPGKEREFVAGITGGANTYYADSVKGRFTISRDNAKNTVYLQMNSLKPEDTAVYYCAAYWYSLIHHYYWGQGTQVTVSS

SEQ ID NO: 12137 - protein, 118 aa, Artificial Sequence
  Chemically Synthesized
QVQLQESGGGLVQAGGSLRLSCAASGTIFEGIVMGWYRQAPGKERELVAAINRGASTYYADSVKGRFTISRDNAKNTVYLQMNSLKPEDTAVYYCAVRYFYGWPFRYWGQGTQVTVSS

SEQ ID NO: 12138 - protein, 118 aa, Artificial Sequence
  Chemically Synthesized
QVQLQESGGGLVQAGGSLRLSCAASGTISRYAIMGWYRQAPGKERELVAAISRGANTYYADSVKGRFTISRDNAKNTVYLQMNSLKPEDTAVYYCAVRIYFSFVHGYWGQGTQVTVSS

SEQ ID NO: 12139 - protein, 112 aa, Artificial Sequence
  Chemically Synthesized
QVQLQESGGGLVQAGGSLRLSCAASGFISYQDMGWYRQAPGKEREFVAGIDTGTTTYYADSVKGRFTISRDNAKNTVYLQMNSLKPEDTAVYYCAACFSLYWGQGTQVTVSS

SEQ ID NO: 12140 - protein, 126 aa, Artificial Sequence
  Chemically Synthesized
QVQLQESGGGLVQAGGSLRLSCAASGNISQSVVMGWYRQAPGKERELVATISFGGSTYYADSVKGRFTISRDNAKNTVYLQMNSLKPEDTAVYYCAAVRLSHGPDKGTHWYYHRYWGQGTQVTVSS

SEQ ID NO: 12141 - protein, 118 aa, Artificial Sequence
  Chemically Synthesized
QVQLQESGGGLVQAGGSLRLSCAASGYIFPNVDMGWYRQAPGKERELVASISYGGTTYYADSVKGRFTISRDNAKNTVYLQMNSLKPEDTAVYYCAAANTHPSYFGYWGQGTQVTVSS

SEQ ID NO: 12142 - protein, 118 aa, Artificial Sequence
  Chemically Synthesized
QVQLQESGGGLVQAGGSLRLSCAASGTIFVATVMGWYRQAPGKERELVAAINYGANTYYADSVKGRFTISRDNAKNTVYLQMNSLKPEDTAVYYCAAYNVADPYLTYWGQGTQVTVSS

SEQ ID NO: 12143 - protein, 126 aa, Artificial Sequence
  Chemically Synthesized
QVQLQESGGGLVQAGGSLRLSCAASGSISYVSAMGWYRQAPGKEREFVAAIASGANTYYADSVKGRFTISRDNAKNTVYLQMNSLKPEDTAVYYCAAITVRYSAPADERYRYHRYWGQGTQVTVSS

SEQ ID NO: 12144 - protein, 126 aa, Artificial Sequence
  Chemically Synthesized
QVQLQESGGGLVQAGGSLRLSCAASGSISYYSVMGWYRQAPGKEREFVAAITSGGNTNYADSVKGRFTISRDNAKNTVYLQMNSLKPEDTAVYYCAALYYYDEAQGQSAGRWHRYWGQGTQVTVSS

SEQ ID NO: 12145 - protein, 125 aa, Artificial Sequence
  Chemically Synthesized
QVQLQESGGGLVQAGGSLRLSCAASGNIFARYEMGWYRQAPGKEREFVASITAGSNTNYADSVKGRFTISRDNAKNTVYLQMNSLKPEDTAVYYCAVPQWLSGNGTDYDHDSLYWGQGTQVTVSS

SEQ ID NO: 12146 - protein, 121 aa, Artificial Sequence
  Chemically Synthesized
QVQLQESGGGLVQAGGSLRLSCAASGSIFGDPPMGWYRQAPGKERELVASIDTGGNTNYADSVKGRFTISRDNAKNTVYLQMNSLKPEDTAVYYCAAYRYDVDVTVLTLYWGQGTQVTVSS

SEQ ID NO: 12147 - protein, 118 aa, Artificial Sequence
  Chemically Synthesized
QVQLQESGGGLVQAGGSLRLSCAASGSISPLGPMGWYRQAPGKEREFVATIGYGATTNYADSVKGRFTISRDNAKNTVYLQMNSLKPEDTAVYYCAADDTGRDLLSYWGQGTQVTVSS

SEQ ID NO: 12148 - protein, 122 aa, Artificial Sequence
  Chemically Synthesized
QVQLQESGGGLVQAGGSLRLSCAASGNIFDSTIMGWYRQAPGKEREFVAGIALGTNTYYADSVKGRFTISRDNAKNTVYLQMNSLKPEDTAVYYCAVDAKYPYPIRVTHSYWGQGTQVTVSS

SEQ ID NO: 12149 - protein, 122 aa, Artificial Sequence
  Chemically Synthesized
QVQLQESGGGLVQAGGSLRLSCAASGNIFEAYVMGWYRQAPGKEREFVAGIGQGGSTNYADSVKGRFTISRDNAKNTVYLQMNSLKPEDTAVYYCAVLSWVYRGHYQLLDYWGQGTQVTVSS

SEQ ID NO: 12150 - protein, 118 aa, Artificial Sequence
  Chemically Synthesized
QVQLQESGGGLVQAGGSLRLSCAASGSIFWYILMGWYRQAPGKERELVASISYGANTNYADSVKGRFTISRDNAKNTVYLQMNSLKPEDTAVYYCAATGWLRPWYRYWGQGTQVTVSS

SEQ ID NO: 12151 - protein, 118 aa, Artificial Sequence
  Chemically Synthesized
QVQLQESGGGLVQAGGSLRLSCAASGYISVVYDMGWYRQAPGKEREFVAAIATGSITYYADSVKGRFTISRDNAKNTVYLQMNSLKPEDTAVYYCAADSPTNGFLGYWGQGTQVTVSS

SEQ ID NO: 12152 - protein, 126 aa, Artificial Sequence
  Chemically Synthesized
QVQLQESGGGLVQAGGSLRLSCAASGTISASYYMGWYRQAPGKERELVAAISLGGTTYYADSVKGRFTISRDNAKNTVYLQMNSLKPEDTAVYYCAVYYYTNQDISYWYLLTHGYWGQGTQVTVSS

SEQ ID NO: 12153 - protein, 118 aa, Artificial Sequence
  Chemically Synthesized
QVQLQESGGGLVQAGGSLRLSCAASGSISVWPAMGWYRQAPGKERELVAGIDNGTITYYADSVKGRFTISRDNAKNTVYLQMNSLKPEDTAVYYCAVRTVTVTTTIYWGQGTQVTVSS

SEQ ID NO: 12154 - protein, 118 aa, Artificial Sequence
  Chemically Synthesized
QVQLQESGGGLVQAGGSLRLSCAASGNIFTGRAMGWYRQAPGKERELVATIARGSSTYYADSVKGRFTISRDNAKNTVYLQMNSLKPEDTAVYYCAAFSLWTSRLYYWGQGTQVTVSS

SEQ ID NO: 12155 - protein, 120 aa, Artificial Sequence
  Chemically Synthesized
QVQLQESGGGLVQAGGSLRLSCAASGTISEGRYMGWYRQAPGKERELVAAIADGVLPYADSVKGRFTISRDNAKNTVYLQMNSLKPEDTAVYYCAAHRVDYSTLTLIFYWGQGTQVTVSS

SEQ ID NO: 12156 - protein, 122 aa, Artificial Sequence
  Chemically Synthesized
QVQLQESGGGLVQAGGSLRLSCAASGNISTDGPMGWYRQAPGKEREFVAAIAIGATTNYADSVKGRFTISRDNAKNTVYLQMNSLKPEDTAVYYCAATTSYPDDFDTTFEYWGQGTQVTVSS

SEQ ID NO: 12157 - protein, 116 aa, Artificial Sequence
  Chemically Synthesized
QVQLQESGGGLVQAGGSLRLSCAASGNISDGLDMGWYRQAPGKERELVAAIDTGGITYYADSVKGRFTISRDNAKNTVYLQMNSLKPEDTAVYYCAAARPWRHIYWGQGTQVTVSS

SEQ ID NO: 12158 - protein, 118 aa, Artificial Sequence
  Chemically Synthesized
QVQLQESGGGLVQAGGSLRLSCAASGNIFRLRSMGWYRQAPGKEREFVAAISYGATTYYADSVKGRFTISRDNAKNTVYLQMNSLKPEDTAVYYCAAETNPITPLPYWGQGTQVTVSS

SEQ ID NO: 12159 - protein, 122 aa, Artificial Sequence
  Chemically Synthesized
QVQLQESGGGLVQAGGSLRLSCAASGSISSFDYMGWYRQAPGKERELVAAIGDGSITYYADSVKGRFTISRDNAKNTVYLQMNSLKPEDTAVYYCAAVYGPVRTYAAVLYYWGQGTQVTVSS

SEQ ID NO: 12160 - protein, 122 aa, Artificial Sequence
  Chemically Synthesized
QVQLQESGGGLVQAGGSLRLSCAASGSISRSLYMGWYRQAPGKERELVAAIADGGTTNYADSVKGRFTISRDNAKNTVYLQMNSLKPEDTAVYYCAAYYGGGRDQDQWLGYWGQGTQVTVSS

SEQ ID NO: 12161 - protein, 126 aa, Artificial Sequence
  Chemically Synthesized
QVQLQESGGGLVQAGGSLRLSCAASGNISYDYIMGWYRQAPGKEREFVAGISWGGTTNYADSVKGRFTISRDNAKNTVYLQMNSLKPEDTAVYYCAVYVLDSYSQEYASAGWLGYWGQGTQVTVSS

SEQ ID NO: 12162 - protein, 118 aa, Artificial Sequence
  Chemically Synthesized
QVQLQESGGGLVQAGGSLRLSCAASGNIFRDDNMGWYRQAPGKERELVASIDGGGSTNYADSVKGRFTISRDNAKNTVYLQMNSLKPEDTAVYYCAVWYSVRFWLGYWGQGTQVTVSS

SEQ ID NO: 12163 - protein, 118 aa, Artificial Sequence
  Chemically Synthesized
QVQLQESGGGLVQAGGSLRLSCAASGYISSPYTMGWYRQAPGKEREFVAGIAGGANTNYADSVKGRFTISRDNAKNTVYLQMNSLKPEDTAVYYCAAWYGQTWVLGYWGQGTQVTVSS

SEQ ID NO: 12164 - protein, 118 aa, Artificial Sequence
  Chemically Synthesized
QVQLQESGGGLVQAGGSLRLSCAASGYISANTPMGWYRQAPGKERELVATITSGGTTYYADSVKGRFTISRDNAKNTVYLQMNSLKPEDTAVYYCAAYDRYKYFLDYWGQGTQVTVSS

SEQ ID NO: 12165 - protein, 126 aa, Artificial Sequence
  Chemically Synthesized
QVQLQESGGGLVQAGGSLRLSCAASGNISDHAYMGWYRQAPGKEREFVATIGVGGNTYYADSVKGRFTISRDNAKNTVYLQMNSLKPEDTAVYYCAVYWNGYDYGPYYTTEWLGYWGQGTQVTVSS

SEQ ID NO: 12166 - protein, 116 aa, Artificial Sequence
  Chemically Synthesized
QVQLQESGGGLVQAGGSLRLSCAASGSIFDRDIMGWYRQAPGKERELVATIDYGSTTYYADSVKGRFTISRDNAKNTVYLQMNSLKPEDTAVYYCAVRYASYFAYWGQGTQVTVSS

SEQ ID NO: 12167 - protein, 122 aa, Artificial Sequence
  Chemically Synthesized
QVQLQESGGGLVQAGGSLRLSCAASGNISPEWNMGWYRQAPGKERELVAAITYGSSTNYADSVKGRFTISRDNAKNTVYLQMNSLKPEDTAVYYCAAAVVPGGRLRDGLYYWGQGTQVTVSS

SEQ ID NO: 12168 - protein, 118 aa, Artificial Sequence
  Chemically Synthesized
QVQLQESGGGLVQAGGSLRLSCAASGNISGYDTMGWYRQAPGKEREFVASINYGSITYYADSVKGRFTISRDNAKNTVYLQMNSLKPEDTAVYYCAVYDGRSFTLGYWGQGTQVTVSS

SEQ ID NO: 12169 - protein, 119 aa, Artificial Sequence
  Chemically Synthesized
QVQLQESGGGLVQAGGSLRLSCAASGTIFSERAMGWYRQAPGKEREFVAAINDGANTYYADSVKGRFTISRDNAKNTVYLQMNSLKPEDTAVYYCAAYNRGTPVFADYWGQGTQVTVSS

SEQ ID NO: 12170 - protein, 122 aa, Artificial Sequence
  Chemically Synthesized
QVQLQESGGGLVQAGGSLRLSCAASGNIFPVPDMGWYRQAPGKEREFVASIGVGTITNYADSVKGRFTISRDNAKNTVYLQMNSLKPEDTAVYYCAVGGLAYLDWTKVHAYWGQGTQVTVSS

SEQ ID NO: 12171 - protein, 122 aa, Artificial Sequence
  Chemically Synthesized
QVQLQESGGGLVQAGGSLRLSCAASGYISQYGQMGWYRQAPGKERELVASIAVGGNTNYADSVKGRFTISRDNAKNTVYLQMNSLKPEDTAVYYCAVRYGYTDVPRDGLYYWGQGTQVTVSS

SEQ ID NO: 12172 - protein, 122 aa, Artificial Sequence
  Chemically Synthesized
QVQLQESGGGLVQAGGSLRLSCAASGSISSDVIMGWYRQAPGKERELVAGIAGGGTTYYADSVKGRFTISRDNAKNTVYLQMNSLKPEDTAVYYCAAAYYQYPGWRWGLGYWGQGTQVTVSS

SEQ ID NO: 12173 - protein, 122 aa, Artificial Sequence
  Chemically Synthesized
QVQLQESGGGLVQAGGSLRLSCAASGTISSSDEMGWYRQAPGKEREFVATINEGGTTNYADSVKGRFTISRDNAKNTVYLQMNSLKPEDTAVYYCAVAYGDAVPHRFRLYYWGQGTQVTVSS

SEQ ID NO: 12174 - protein, 118 aa, Artificial Sequence
  Chemically Synthesized
QVQLQESGGGLVQAGGSLRLSCAASGNIFNTYTMGWYRQAPGKEREFVAAIASGTNTYYADSVKGRFTISRDNAKNTVYLQMNSLKPEDTAVYYCAVYWGRYFILGYWGQGTQVTVSS

SEQ ID NO: 12175 - protein, 122 aa, Artificial Sequence
  Chemically Synthesized
QVQLQESGGGLVQAGGSLRLSCAASGTIFGSVWMGWYRQAPGKERELVASIDQGTTTNYADSVKGRFTISRDNAKNTVYLQMNSLKPEDTAVYYCAVNYSRDNDRRVFLGYWGQGTQVTVSS

SEQ ID NO: 12176 - protein, 122 aa, Artificial Sequence
  Chemically Synthesized
QVQLQESGGGLVQAGGSLRLSCAASGTISYRDIMGWYRQAPGKEREFVAGINDGTTTNYADSVKGRFTISRDNAKNTVYLQMNSLKPEDTAVYYCAVTYGGVGDRFYAFAYWGQGTQVTVSS

SEQ ID NO: 12177 - protein, 126 aa, Artificial Sequence
  Chemically Synthesized
QVQLQESGGGLVQAGGSLRLSCAASGNISPQINMGWYRQAPGKEREFVATIGWGASTYYADSVKGRFTISRDNAKNTVYLQMNSLKPEDTAVYYCAAVWFDYPDDDYTPYWALGYWGQGTQVTVSS

SEQ ID NO: 12178 - protein, 122 aa, Artificial Sequence
  Chemically Synthesized
QVQLQESGGGLVQAGGSLRLSCAASGTISRGDYMGWYRQAPGKEREFVAAITGGGSTNYADSVKGRFTISRDNAKNTVYLQMNSLKPEDTAVYYCAVYDIQNDYTTSFLGYWGQGTQVTVSS

SEQ ID NO: 12179 - protein, 116 aa, Artificial Sequence
  Chemically Synthesized
QVQLQESGGGLVQAGGSLRLSCAASGNISDHDTMGWYRQAPGKEREFVAAIDWGASTNYADSVKGRFTISRDNAKNTVYLQMNSLKPEDTAVYYCAVGDTYFVLYWGQGTQVTVSS

SEQ ID NO: 12180 - protein, 126 aa, Artificial Sequence
  Chemically Synthesized
QVQLQESGGGLVQAGGSLRLSCAASGYISRTSLMGWYRQAPGKERELVASIDSGSSTNYADSVKGRFTISRDNAKNTVYLQMNSLKPEDTAVYYCAVYDYDSTIDHYAYHYWLGYWGQGTQVTVSS

SEQ ID NO: 12181 - protein, 122 aa, Artificial Sequence
  Chemically Synthesized
QVQLQESGGGLVQAGGSLRLSCAASGNISQDEYMGWYRQAPGKEREFVAAIAFGANTNYADSVKGRFTISRDNAKNTVYLQMNSLKPEDTAVYYCAAYWSADATYYFSLGYWGQGTQVTVSS

SEQ ID NO: 12182 - protein, 122 aa, Artificial Sequence
  Chemically Synthesized
QVQLQESGGGLVQAGGSLRLSCAASGNIFDHDVMGWYRQAPGKEREFVATIGRGATTYYADSVKGRFTISRDNAKNTVYLQMNSLKPEDTAVYYCAVNYDTYLAPYVFLGYWGQGTQVTVSS

SEQ ID NO: 12183 - protein, 118 aa, Artificial Sequence
  Chemically Synthesized
QVQLQESGGGLVQAGGSLRLSCAASGYIFQYYRMGWYRQAPGKEREFVAAISDGGTTYYADSVKGRFTISRDNAKNTVYLQMNSLKPEDTAVYYCAAKGGDHAFHTYWGQGTQVTVSS

SEQ ID NO: 12184 - protein, 118 aa, Artificial Sequence
  Chemically Synthesized
QVQLQESGGGLVQAGGSLRLSCAASGTIFGPQYMGWYRQAPGKEREFVASIDNGSITNYADSVKGRFTISRDNAKNTVYLQMNSLKPEDTAVYYCAASGRAYRLYDYWGQGTQVTVSS

SEQ ID NO: 12185 - protein, 122 aa, Artificial Sequence
  Chemically Synthesized
QVQLQESGGGLVQAGGSLRLSCAASGSISDGTYMGWYRQAPGKEREFVAAIANGSNTYYADSVKGRFTISRDNAKNTVYLQMNSLKPEDTAVYYCAVYWSEADAYYFVLGYWGQGTQVTVSS

SEQ ID NO: 12186 - protein, 122 aa, Artificial Sequence
  Chemically Synthesized
QVQLQESGGGLVQAGGSLRLSCAASGTISTQARMGWYRQAPGKERELVATITYGGTTNYADSVKGRFTISRDNAKNTVYLQMNSLKPEDTAVYYCAVAYGYDGRPHDGLYYWGQGTQVTVSS

SEQ ID NO: 12187 - protein, 126 aa, Artificial Sequence
  Chemically Synthesized
QVQLQESGGGLVQAGGSLRLSCAASGTISRGYAMGWYRQAPGKERELVASISDGGTTNYADSVKGRFTISRDNAKNTVYLQMNSLKPEDTAVYYCAAFWRQPDYTSEQPTDWLGYWGQGTQVTVSS

SEQ ID NO: 12188 - protein, 122 aa, Artificial Sequence
  Chemically Synthesized
QVQLQESGGGLVQAGGSLRLSCAASGTIFRDSFMGWYRQAPGKERELVATINYGSTTYYADSVKGRFTISRDNAKNTVYLQMNSLKPEDTAVYYCAVYYDGDRGYRDNLYYWGQGTQVTVSS

SEQ ID NO: 12189 - protein, 116 aa, Artificial Sequence
  Chemically Synthesized
QVQLQESGGGLVQAGGSLRLSCAASGTIFGPTRMGWYRQAPGKERELVAGIADGASTYYADSVKGRFTISRDNAKNTVYLQMNSLKPEDTAVYYCAADGWRAFVYWGQGTQVTVSS

SEQ ID NO: 12190 - protein, 118 aa, Artificial Sequence
  Chemically Synthesized
QVQLQESGGGLVQAGGSLRLSCAASGYISRVDRMGWYRQAPGKEREFVAGITAGATTYYADSVKGRFTISRDNAKNTVYLQMNSLKPEDTAVYYCAADFQGYPGFVYWGQGTQVTVSS

SEQ ID NO: 12191 - protein, 122 aa, Artificial Sequence
  Chemically Synthesized
QVQLQESGGGLVQAGGSLRLSCAASGNISYGVLMGWYRQAPGKERELVATIDPGGTTNYADSVKGRFTISRDNAKNTVYLQMNSLKPEDTAVYYCAVRLDESYDNSDFLGYWGQGTQVTVSS

SEQ ID NO: 12192 - protein, 122 aa, Artificial Sequence
  Chemically Synthesized
QVQLQESGGGLVQAGGSLRLSCAASGNISDAYFMGWYRQAPGKEREFVATIADGTTTNYADSVKGRFTISRDNAKNTVYLQMNSLKPEDTAVYYCAVNLGGDRDFRLSLYYWGQGTQVTVSS

SEQ ID NO: 12193 - protein, 117 aa, Artificial Sequence
  Chemically Synthesized
QVQLQESGGGLVQAGGSLRLSCAASGTISSSFQMGWYRQAPGKEREFVATIGVGASTYYADSVKGRFTISRDNAKNTVYLQMNSLKPEDTAVYYCAAGYPLYTFLYWGQGTQVTVSS

SEQ ID NO: 12194 - protein, 118 aa, Artificial Sequence
  Chemically Synthesized
QVQLQESGGGLVQAGGSLRLSCAASGNISSDLTMGWYRQAPGKERELVASIAGGASTNYADSVKGRFTISRDNAKNTVYLQMNSLKPEDTAVYYCAATYGNYAYLGYWGQGTQVTVSS

SEQ ID NO: 12195 - protein, 122 aa, Artificial Sequence
  Chemically Synthesized
QVQLQESGGGLVQAGGSLRLSCAASGNIFDYDYMGWYRQAPGKEREFVASIGYGGSTNYADSVKGRFTISRDNAKNTVYLQMNSLKPEDTAVYYCAAYWNEKPYGFYFLGYWGQGTQVTVSS

SEQ ID NO: 12196 - protein, 122 aa, Artificial Sequence
  Chemically Synthesized
QVQLQESGGGLVQAGGSLRLSCAASGSISRFTAMGWYRQAPGKERELVAAITPGATTNYADSVKGRFTISRDNAKNTVYLQMNSLKPEDTAVYYCAAVWGKSPHNTDRLYYWGQGTQVTVSS

SEQ ID NO: 12197 - protein, 122 aa, Artificial Sequence
  Chemically Synthesized
QVQLQESGGGLVQAGGSLRLSCAASGNISGTDGMGWYRQAPGKEREFVATISQGSNTYYADSVKGRFTISRDNAKNTVYLQMNSLKPEDTAVYYCAVYYGYDHDYFNYLYYWGQGTQVTVSS

SEQ ID NO: 12198 - protein, 122 aa, Artificial Sequence
  Chemically Synthesized
QVQLQESGGGLVQAGGSLRLSCAASGSISDYPYMGWYRQAPGKERELVATITPGSNTNYADSVKGRFTISRDNAKNTVYLQMNSLKPEDTAVYYCAVDWNPSSVYRNFLGYWGQGTQVTVSS

SEQ ID NO: 12199 - protein, 118 aa, Artificial Sequence
  Chemically Synthesized
QVQLQESGGGLVQAGGSLRLSCAASGYISDGTYMGWYRQAPGKEREFVASISWGGTTNYADSVKGRFTISRDNAKNTVYLQMNSLKPEDTAVYYCAAYYGDGFILGYWGQGTQVTVSS

SEQ ID NO: 12200 - protein, 122 aa, Artificial Sequence
  Chemically Synthesized
QVQLQESGGGLVQAGGSLRLSCAASGTISPDQYMGWYRQAPGKERELVATIDFGGITNYADSVKGRFTISRDNAKNTVYLQMNSLKPEDTAVYYCAVQYGYGLESANYLYYWGQGTQVTVSS

SEQ ID NO: 12201 - protein, 122 aa, Artificial Sequence
  Chemically Synthesized
QVQLQESGGGLVQAGGSLRLSCAASGTISSDTHMGWYRQAPGKEREFVAGINRGAITYYADSVKGRFTISRDNAKNTVYLQMNSLKPEDTAVYYCAAYYDGLGTNRFTFGYWGQGTQVTVSS

SEQ ID NO: 12202 - protein, 122 aa, Artificial Sequence
  Chemically Synthesized
QVQLQESGGGLVQAGGSLRLSCAASGTISGHPNMGWYRQAPGKEREFVASIDSGTSTNYADSVKGRFTISRDNAKNTVYLQMNSLKPEDTAVYYCAAWWSDAYDYIFQLGYWGQGTQVTVSS

SEQ ID NO: 12203 - protein, 122 aa, Artificial Sequence
  Chemically Synthesized
QVQLQESGGGLVQAGGSLRLSCAASGSIFPPPYMGWYRQAPGKERELVATIDYGASTYYADSVKGRFTISRDNAKNTVYLQMNSLKPEDTAVYYCAAGAQRFVGQTPYHVYWGQGTQVTVSS

SEQ ID NO: 12204 - protein, 125 aa, Artificial Sequence
  Chemically Synthesized
QVQLQESGGGLVQAGGSLRLSCAASGTISDDPNMGWYRQAPGKEREFVAGITYGGNTYYADSVKGRFTISRDNAKNTVYLQMNSLKPEDTAVYYCAVSWGNDIGGERHSWLLGYWGQGTQVTVSS

SEQ ID NO: 12205 - protein, 125 aa, Artificial Sequence
  Chemically Synthesized
QVQLQESGGGLVQAGGSLRLSCAASGNISVGTYMGWYRQAPGKEREFVAAIAYGTSTNYADSVKGRFTISRDNAKNTVYLQMNSLKPEDTAVYYCAVVYGRQYERGPDSDYLYYWGQGTQVTVSS

SEQ ID NO: 12206 - protein, 118 aa, Artificial Sequence
  Chemically Synthesized
QVQLQESGGGLVQAGGSLRLSCAASGSIFPTVVMGWYRQAPGKEREFVAGINPGTNTNYADSVKGRFTISRDNAKNTVYLQMNSLKPEDTAVYYCAAYYGYDDWLGYWGQGTQVTVSS

SEQ ID NO: 12207 - protein, 122 aa, Artificial Sequence
  Chemically Synthesized
QVQLQESGGGLVQAGGSLRLSCAASGTISADYSMGWYRQAPGKERELVAGITLGGNTYYADSVKGRFTISRDNAKNTVYLQMNSLKPEDTAVYYCAVWWGVKHLFDYDLGYWGQGTQVTVSS

SEQ ID NO: 12208 - protein, 116 aa, Artificial Sequence
  Chemically Synthesized
QVQLQESGGGLVQAGGSLRLSCAASGNISLDDWMGWYRQAPGKERELVAAIGYGSNTYYADSVKGRFTISRDNAKNTVYLQMNSLKPEDTAVYYCAARYGGGFAYWGQGTQVTVSS

SEQ ID NO: 12209 - protein, 115 aa, Artificial Sequence
  Chemically Synthesized
QVQLQESGGGLVQAGGSLRLSCAASGYIFYRSDMGWYRQAPGKERELVATIAVGSTTYYADSVKGRFTISRDNAKNTVYLQMNSLKPEDTAVYYCAVNRRGFPYWGQGTQVTVSS

SEQ ID NO: 12210 - protein, 124 aa, Artificial Sequence
  Chemically Synthesized
QVQLQESGGGLVQAGGSLRLSCAASGNISPSGTMGWYRQAPGKEREFVATIGYGAITNYADSVKGRFTISRDNAKNTVYLQMNSLKPEDTAVYYCAVVFYGDDYASDHLHLYYWGQGTQVTVSS

SEQ ID NO: 12211 - protein, 122 aa, Artificial Sequence
  Chemically Synthesized
QVQLQESGGGLVQAGGSLRLSCAASGSIFYDANMGWYRQAPGKEREFVATIAYGGNTNYADSVKGRFTISRDNAKNTVYLQMNSLKPEDTAVYYCAVYFGSVGGEQWYLGYWGQGTQVTVSS

SEQ ID NO: 12212 - protein, 126 aa, Artificial Sequence
  Chemically Synthesized
QVQLQESGGGLVQAGGSLRLSCAASGSISDATFMGWYRQAPGKEREFVATIGRGTTTNYADSVKGRFTISRDNAKNTVYLQMNSLKPEDTAVYYCAVGYGTGEKETSHPSFYLYYWGQGTQVTVSS

SEQ ID NO: 12213 - protein, 118 aa, Artificial Sequence
  Chemically Synthesized
QVQLQESGGGLVQAGGSLRLSCAASGYISRDVAMGWYRQAPGKEREFVASITAGSTTYYADSVKGRFTISRDNAKNTVYLQMNSLKPEDTAVYYCAADTYPYRTLGYWGQGTQVTVSS

SEQ ID NO: 12214 - protein, 116 aa, Artificial Sequence
  Chemically Synthesized
QVQLQESGGGLVQAGGSLRLSCAASGSIFDARTMGWYRQAPGKERELVATISIGATTYYADSVKGRFTISRDNAKNTVYLQMNSLKPEDTAVYYCAVTFDGYFAYWGQGTQVTVSS

SEQ ID NO: 12215 - protein, 124 aa, Artificial Sequence
  Chemically Synthesized
QVQLQESGGGLVQAGGSLRLSCAASGNIFSSDRMGWYRQAPGKEREFVASISDGTTTNYADSVKGRFTISRDNAKNTVYLQMNSLKPEDTAVYYCAVTYGAPGYRHERYDFSYWGQGTQVTVSS

SEQ ID NO: 12216 - protein, 125 aa, Artificial Sequence
  Chemically Synthesized
QVQLQESGGGLVQAGGSLRLSCAASGTIFEYGIMGWYRQAPGKEREFVAGIGDGGTTYYADSVKGRFTISRDNAKNTVYLQMNSLKPEDTAVYYCAVILGAYAWGDDWSTHLYYWGQGTQVTVSS

SEQ ID NO: 12217 - protein, 126 aa, Artificial Sequence
  Chemically Synthesized
QVQLQESGGGLVQAGGSLRLSCAASGSISDDFDMGWYRQAPGKEREFVAAIATGTNTYYADSVKGRFTISRDNAKNTVYLQMNSLKPEDTAVYYCAVRYRQHAHYNDDYANSLYYWGQGTQVTVSS

SEQ ID NO: 12218 - protein, 122 aa, Artificial Sequence
  Chemically Synthesized
QVQLQESGGGLVQAGGSLRLSCAASGSISRDTYMGWYRQAPGKEREFVATIGIGASTYYADSVKGRFTISRDNAKNTVYLQMNSLKPEDTAVYYCAAYYDDGRFYNFVLGYWGQGTQVTVSS

SEQ ID NO: 12219 - protein, 118 aa, Artificial Sequence
  Chemically Synthesized
QVQLQESGGGLVQAGGSLRLSCAASGSISDKDYMGWYRQAPGKEREFVASITAGTNTYYADSVKGRFTISRDNAKNTVYLQMNSLKPEDTAVYYCAASTGYARDHGYWGQGTQVTVSS

SEQ ID NO: 12220 - protein, 121 aa, Artificial Sequence
  Chemically Synthesized
QVQLQESGGGLVQAGGSLRLSCAASGNISTFNYMGWYRQAPGKEREFVASINDGGITNYADSVKGRFTISRDNAKNTVYLQMNSLKPEDTAVYYCATYVEDVRGLYWLGYWGQGTQVTVSS

SEQ ID NO: 12221 - protein, 122 aa, Artificial Sequence
  Chemically Synthesized
QVQLQESGGGLVQAGGSLRLSCAASGTISGHPYMGWYRQAPGKERELVAAIADGGTTNYADSVKGRFTISRDNAKNTVYLQMNSLKPEDTAVYYCAVFDVDGWDDHYWLGYWGQGTQVTVSS

SEQ ID NO: 12222 - protein, 122 aa, Artificial Sequence
  Chemically Synthesized
QVQLQESGGGLVQAGGSLRLSCAASGSIFGASSMGWYRQAPGKERELVAGIGEGSSTNYADSVKGRFTISRDNAKNTVYLQMNSLKPEDTAVYYCAVVVGHSAETRYNLYYWGQGTQVTVSS

SEQ ID NO: 12223 - protein, 126 aa, Artificial Sequence
  Chemically Synthesized
QVQLQESGGGLVQAGGSLRLSCAASGYIFYAAYMGWYRQAPGKEREFVASIGYGGTTNYADSVKGRFTISRDNAKNTVYLQMNSLKPEDTAVYYCAVIHSNGPPTASERYYYLYYWGQGTQVTVSS

SEQ ID NO: 12224 - protein, 122 aa, Artificial Sequence
  Chemically Synthesized
QVQLQESGGGLVQAGGSLRLSCAASGTISNDLAMGWYRQAPGKERELVAGIGHGGNTNYADSVKGRFTISRDNAKNTVYLQMNSLKPEDTAVYYCAARYLPAGGDAGWLGYWGQGTQVTVSS

SEQ ID NO: 12225 - protein, 122 aa, Artificial Sequence
  Chemically Synthesized
QVQLQESGGGLVQAGGSLRLSCAASGSISTDSKMGWYRQAPGKERELVAGITYGSITNYADSVKGRFTISRDNAKNTVYLQMNSLKPEDTAVYYCAVYYSLDSTSEYNLYYWGQGTQVTVSS

SEQ ID NO: 12226 - protein, 112 aa, Artificial Sequence
  Chemically Synthesized
QVQLQESGGGLVQAGGSLRLSCAASGSISDPMGWYRQAPGKEREFVATISDGSNTYYADSVKGRFTISRDNAKNTVYLQMNSLKPEDTAVYYCAAGYFLDYWGQGTQVTVSS

SEQ ID NO: 12227 - protein, 118 aa, Artificial Sequence
  Chemically Synthesized
QVQLQESGGGLVQAGGSLRLSCAASGSIFGPQYMGWYRQAPGKERELVATIDYGTTTNYADSVKGRFTISRDNAKNTVYLQMNSLKPEDTAVYYCAADGSSRRRHYYWGQGTQVTVSS

SEQ ID NO: 12228 - protein, 122 aa, Artificial Sequence
  Chemically Synthesized
QVQLQESGGGLVQAGGSLRLSCAASGTIFDGAYMGWYRQAPGKERELVAGITYGSSTNYADSVKGRFTISRDNAKNTVYLQMNSLKPEDTAVYYCAVYYVSGDDYVDWLYYWGQGTQVTVSS

SEQ ID NO: 12229 - protein, 118 aa, Artificial Sequence
  Chemically Synthesized
QVQLQESGGGLVQAGGSLRLSCAASGNISAQVTMGWYRQAPGKEREFVAAIGNGGSTNYADSVKGRFTISRDNAKNTVYLQMNSLKPEDTAVYYCAVYDGAHFQLGYWGQGTQVTVSS

SEQ ID NO: 12230 - protein, 117 aa, Artificial Sequence
  Chemically Synthesized
QVQLQESGGGLVQAGGSLRLSCAASGSISPQAIMGWYRQAPGKEREFVAGIAYGATTNYADSVKGRFTISRDNAKNTVYLQMNSLKPEDTAVYYCAAQGDYVGYRYWGQGTQVTVSS

SEQ ID NO: 12231 - protein, 122 aa, Artificial Sequence
  Chemically Synthesized
QVQLQESGGGLVQAGGSLRLSCAASGSISPDLRMGWYRQAPGKERELVAGIDSGGTTNYADSVKGRFTISRDNAKNTVYLQMNSLKPEDTAVYYCAAWYQGWARYDEWLGYWGQGTQVTVSS

SEQ ID NO: 12232 - protein, 118 aa, Artificial Sequence
  Chemically Synthesized
QVQLQESGGGLVQAGGSLRLSCAASGNIFFDGAMGWYRQAPGKERELVATITFGTTTYYADSVKGRFTISRDNAKNTVYLQMNSLKPEDTAVYYCAAYWSDQGWLGYWGQGTQVTVSS

SEQ ID NO: 12233 - protein, 125 aa, Artificial Sequence
  Chemically Synthesized
QVQLQESGGGLVQAGGSLRLSCAASGSIFSKWDMGWYRQAPGKEREFVASITDGAITNYADSVKGRFTISRDNAKNTVYLQMNSLKPEDTAVYYCAAKAQYLSYRDDDSPSHIYWGQGTQVTVSS

SEQ ID NO: 12234 - protein, 126 aa, Artificial Sequence
  Chemically Synthesized
QVQLQESGGGLVQAGGSLRLSCAASGSIFRSLFMGWYRQAPGKEREFVATISPGGNTNYADSVKGRFTISRDNAKNTVYLQMNSLKPEDTAVYYCAVVYGHGSNGEADYRGYLYYWGQGTQVTVSS

SEQ ID NO: 12235 - protein, 126 aa, Artificial Sequence
  Chemically Synthesized
QVQLQESGGGLVQAGGSLRLSCAASGSISDWSYMGWYRQAPGKEREFVASITDGASTYYADSVKGRFTISRDNAKNTVYLQMNSLKPEDTAVYYCAVYATDYGDDYYSSRVWLGYWGQGTQVTVSS

SEQ ID NO: 12236 - protein, 122 aa, Artificial Sequence
  Chemically Synthesized
QVQLQESGGGLVQAGGSLRLSCAASGTISPTNTMGWYRQAPGKEREFVATIAYGAITNYADSVKGRFTISRDNAKNTVYLQMNSLKPEDTAVYYCAAGRPILHHGDNVHLYWGQGTQVTVSS

SEQ ID NO: 12237 - protein, 122 aa, Artificial Sequence
  Chemically Synthesized
QVQLQESGGGLVQAGGSLRLSCAASGYISPYQFMGWYRQAPGKERELVATIGDGSITYYADSVKGRFTISRDNAKNTVYLQMNSLKPEDTAVYYCAAVYGLTTDARSNLYYWGQGTQVTVSS

SEQ ID NO: 12238 - protein, 118 aa, Artificial Sequence
  Chemically Synthesized
QVQLQESGGGLVQAGGSLRLSCAASGSISGDVYMGWYRQAPGKEREFVASIDYGGNTNYADSVKGRFTISRDNAKNTVYLQMNSLKPEDTAVYYCAVYWYVADWLGYWGQGTQVTVSS

SEQ ID NO: 12239 - protein, 122 aa, Artificial Sequence
  Chemically Synthesized
QVQLQESGGGLVQAGGSLRLSCAASGNISYGDYMGWYRQAPGKEREFVAAINYGSNTNYADSVKGRFTISRDNAKNTVYLQMNSLKPEDTAVYYCAAYGYTDYSYTFQLGYWGQGTQVTVSS

SEQ ID NO: 12240 - protein, 118 aa, Artificial Sequence
  Chemically Synthesized
QVQLQESGGGLVQAGGSLRLSCAASGSIFDQPTMGWYRQAPGKEREFVAAIDYGASTYYADSVKGRFTISRDNAKNTVYLQMNSLKPEDTAVYYCAAWWGYYYRLGYWGQGTQVTVSS

SEQ ID NO: 12241 - protein, 122 aa, Artificial Sequence
  Chemically Synthesized
QVQLQESGGGLVQAGGSLRLSCAASGSISRVDYMGWYRQAPGKEREFVAAIGYGGNTYYADSVKGRFTISRDNAKNTVYLQMNSLKPEDTAVYYCAVTKYGGQYDYADLYYWGQGTQVTVSS

SEQ ID NO: 12242 - protein, 122 aa, Artificial Sequence
  Chemically Synthesized
QVQLQESGGGLVQAGGSLRLSCAASGNISFLANMGWYRQAPGKEREFVATIADGSITYYADSVKGRFTISRDNAKNTVYLQMNSLKPEDTAVYYCAAPTKDGDDDYPYFYYWGQGTQVTVSS

SEQ ID NO: 12243 - protein, 121 aa, Artificial Sequence
  Chemically Synthesized
QVQLQESGGGLVQAGGSLRLSCAASGSISHRVTMGWYRQAPGKERELVATIGDGSTTYYADSVKGRFTISRDNAKNTVYLQMNSLKPEDTAVYYCAAGESYILPRNYRLYWGQGTQVTVSS

SEQ ID NO: 12244 - protein, 118 aa, Artificial Sequence
  Chemically Synthesized
QVQLQESGGGLVQAGGSLRLSCAASGSIFDGPWMGWYRQAPGKERELVAGIDGGGSTNYADSVKGRFTISRDNAKNTVYLQMNSLKPEDTAVYYCAVYWQDYGWLGYWGQGTQVTVSS

SEQ ID NO: 12245 - protein, 126 aa, Artificial Sequence
  Chemically Synthesized
QVQLQESGGGLVQAGGSLRLSCAASGSISPGTVMGWYRQAPGKEREFVATISDGASTNYADSVKGRFTISRDNAKNTVYLQMNSLKPEDTAVYYCAVYWAYDDYPDYIRRYGLGYWGQGTQVTVSS

SEQ ID NO: 12246 - protein, 122 aa, Artificial Sequence
  Chemically Synthesized
QVQLQESGGGLVQAGGSLRLSCAASGSIFGPERMGWYRQAPGKEREFVAGIDDGTSTYYADSVKGRFTISRDNAKNTVYLQMNSLKPEDTAVYYCAAPQGLDYTYRDLFSYWGQGTQVTVSS

SEQ ID NO: 12247 - protein, 122 aa, Artificial Sequence
  Chemically Synthesized
QVQLQESGGGLVQAGGSLRLSCAASGSIFYTPYMGWYRQAPGKEREFVAAINRGANTYYADSVKGRFTISRDNAKNTVYLQMNSLKPEDTAVYYCAAYWSSKVADAFFLGYWGQGTQVTVSS

SEQ ID NO: 12248 - protein, 119 aa, Artificial Sequence
  Chemically Synthesized
QVQLQESGGGLVQAGGSLRLSCAASGNISAYDSMGWYRQAPGKERELVASINGSTNYADSVKGRFTISRDNAKNTVYLQMNSLKPEDTAVYYCAAYYGSSIGHAWLGYWGQGTQVTVSS

SEQ ID NO: 12249 - protein, 118 aa, Artificial Sequence
  Chemically Synthesized
QVQLQESGGGLVQAGGSLRLSCAASGTISWLAVMGWYRQAPGKEREFVASINDGAITYYADSVKGRFTISRDNAKNTVYLQMNSLKPEDTAVYYCAVPWYGYDTHSYWGQGTQVTVSS

SEQ ID NO: 12250 - protein, 118 aa, Artificial Sequence
  Chemically Synthesized
QVQLQESGGGLVQAGGSLRLSCAASGNISDPYFMGWYRQAPGKERELVAAINIGGTTNYADSVKGRFTISRDNAKNTVYLQMNSLKPEDTAVYYCAAYWYDDDWLGYWGQGTQVTVSS

SEQ ID NO: 12251 - protein, 118 aa, Artificial Sequence
  Chemically Synthesized
QVQLQESGGGLVQAGGSLRLSCAASGYIFTGGYMGWYRQAPGKERELVAGIGPGATTNYADSVKGRFTISRDNAKNTVYLQMNSLKPEDTAVYYCAVYWSDGGWLGYWGQGTQVTVSS

SEQ ID NO: 12252 - protein, 122 aa, Artificial Sequence
  Chemically Synthesized
QVQLQESGGGLVQAGGSLRLSCAASGTISYADYMGWYRQAPGKEREFVATINWGGITYYADSVKGRFTISRDNAKNTVYLQMNSLKPEDTAVYYCAVYENDIEYRSYLLGYWGQGTQVTVSS

SEQ ID NO: 12253 - protein, 122 aa, Artificial Sequence
  Chemically Synthesized
QVQLQESGGGLVQAGGSLRLSCAASGNISAVDYMGWYRQAPGKEREFVAAITRGTTTNYADSVKGRFTISRDNAKNTVYLQMNSLKPEDTAVYYCAAYWTEGTGYDYALGYWGQGTQVTVSS

SEQ ID NO: 12254 - protein, 118 aa, Artificial Sequence
  Chemically Synthesized
QVQLQESGGGLVQAGGSLRLSCAASGTISYVRSMGWYRQAPGKERELVAAITQGSSTNYADSVKGRFTISRDNAKNTVYLQMNSLKPEDTAVYYCAVDFTGFIDLAYWGQGTQVTVSS

SEQ ID NO: 12255 - protein, 125 aa, Artificial Sequence
  Chemically Synthesized
QVQLQESGGGLVQAGGSLRLSCAASGSIFETDYMGWYRQAPGKEREFVASIAGGTTNYADSVKGRFTISRDNAKNTVYLQMNSLKPEDTAVYYCAVYYSDGGANYRRDQLGLYYWGQGTQVTVSS

SEQ ID NO: 12256 - protein, 122 aa, Artificial Sequence
  Chemically Synthesized
QVQLQESGGGLVQAGGSLRLSCAASGTISRAEYMGWYRQAPGKEREFVASIGQGGSTNYADSVKGRFTISRDNAKNTVYLQMNSLKPEDTAVYYCAAWYGRYADGGFLLGYWGQGTQVTVSS

SEQ ID NO: 12257 - protein, 118 aa, Artificial Sequence
  Chemically Synthesized
QVQLQESGGGLVQAGGSLRLSCAASGSIFGPPYMGWYRQAPGKERELVAGIATGSTTYYADSVKGRFTISRDNAKNTVYLQMNSLKPEDTAVYYCAADGERADAHRYWGQGTQVTVSS

SEQ ID NO: 12258 - protein, 126 aa, Artificial Sequence
  Chemically Synthesized
QVQLQESGGGLVQAGGSLRLSCAASGYISDDGLMGWYRQAPGKEREFVAGIDTGGTTNYADSVKGRFTISRDNAKNTVYLQMNSLKPEDTAVYYCAAYYQAYGPYINAPEYALYYWGQGTQVTVSS

SEQ ID NO: 12259 - protein, 118 aa, Artificial Sequence
  Chemically Synthesized
QVQLQESGGGLVQAGGSLRLSCAASGNIFYTPFMGWYRQAPGKERELVASIATGGTTYYADSVKGRFTISRDNAKNTVYLQMNSLKPEDTAVYYCAALDWYYRDFRYWGQGTQVTVSS

SEQ ID NO: 12260 - protein, 122 aa, Artificial Sequence
  Chemically Synthesized
QVQLQESGGGLVQAGGSLRLSCAASGSISPGGYMGWYRQAPGKERELVASISQGSTTNYADSVKGRFTISRDNAKNTVYLQMNSLKPEDTAVYYCAVVFSTENRTYTGLYYWGQGTQVTVSS

SEQ ID NO: 12261 - protein, 118 aa, Artificial Sequence
  Chemically Synthesized
QVQLQESGGGLVQAGGSLRLSCAASGNISGGPTMGWYRQAPGKEREFVAAIADGSITNYADSVKGRFTISRDNAKNTVYLQMNSLKPEDTAVYYCAAWYNTYFLLGYWGQGTQVTVSS

SEQ ID NO: 12262 - protein, 118 aa, Artificial Sequence
  Chemically Synthesized
QVQLQESGGGLVQAGGSLRLSCAASGTISPDNAMGWYRQAPGKERELVAAIGSGAITYYADSVKGRFTISRDNAKNTVYLQMNSLKPEDTAVYYCAADRDGFYHHSYWGQGTQVTVSS

SEQ ID NO: 12263 - protein, 118 aa, Artificial Sequence
  Chemically Synthesized
QVQLQESGGGLVQAGGSLRLSCAASGTIFPPEYMGWYRQAPGKERELVAAINYGANTNYADSVKGRFTISRDNAKNTVYLQMNSLKPEDTAVYYCAAGARYQHVHNYWGQGTQVTVSS

SEQ ID NO: 12264 - protein, 118 aa, Artificial Sequence
  Chemically Synthesized
QVQLQESGGGLVQAGGSLRLSCAASGSIFPAYGMGWYRQAPGKEREFVATITGGTSTNYADSVKGRFTISRDNAKNTVYLQMNSLKPEDTAVYYCAANNTGYHYLSYWGQGTQVTVSS

SEQ ID NO: 12265 - protein, 126 aa, Artificial Sequence
  Chemically Synthesized
QVQLQESGGGLVQAGGSLRLSCAASGYISNTDEMGWYRQAPGKERELVASITNGGTTNYADSVKGRFTISRDNAKNTVYLQMNSLKPEDTAVYYCAVALDVGGGGRDQQQFGLYYWGQGTQVTVSS

SEQ ID NO: 12266 - protein, 116 aa, Artificial Sequence
  Chemically Synthesized
QVQLQESGGGLVQAGGSLRLSCAASGNISTRGTMGWYRQAPGKERELVAGIAYGGTTNYADSVKGRFTISRDNAKNTVYLQMNSLKPEDTAVYYCAAQYDWYFAYWGQGTQVTVSS

SEQ ID NO: 12267 - protein, 122 aa, Artificial Sequence
  Chemically Synthesized
QVQLQESGGGLVQAGGSLRLSCAASGNISYTKFMGWYRQAPGKERELVATITYGTSTNYADSVKGRFTISRDNAKNTVYLQMNSLKPEDTAVYYCAVTLGDAIDYRHALYYWGQGTQVTVSS

SEQ ID NO: 12268 - protein, 122 aa, Artificial Sequence
  Chemically Synthesized
QVQLQESGGGLVQAGGSLRLSCAASGSISGWYYMGWYRQAPGKERELVAGISLGSTTNYADSVKGRFTISRDNAKNTVYLQMNSLKPEDTAVYYCAAYWVRGDDYRGGLYYWGQGTQVTVSS

SEQ ID NO: 12269 - protein, 122 aa, Artificial Sequence
  Chemically Synthesized
QVQLQESGGGLVQAGGSLRLSCAASGNISGSFYMGWYRQAPGKERELVAAISSGAITNYADSVKGRFTISRDNAKNTVYLQMNSLKPEDTAVYYCAVSYGVRDSVYDSLYYWGQGTQVTVSS

SEQ ID NO: 12270 - protein, 116 aa, Artificial Sequence
  Chemically Synthesized
QVQLQESGGGLVQAGGSLRLSCAASGNISRVDRMGWYRQAPGKERELVASIDYGGSTNYADSVKGRFTISRDNAKNTVYLQMNSLKPEDTAVYYCAARWDYYFAYWGQGTQVTVSS

SEQ ID NO: 12271 - protein, 126 aa, Artificial Sequence
  Chemically Synthesized
QVQLQESGGGLVQAGGSLRLSCAASGTISADPHMGWYRQAPGKERELVATIDLGSTTNYADSVKGRFTISRDNAKNTVYLQMNSLKPEDTAVYYCAVVWPPDDYAWEDVYAALYYWGQGTQVTVSS

SEQ ID NO: 12272 - protein, 118 aa, Artificial Sequence
  Chemically Synthesized
QVQLQESGGGLVQAGGSLRLSCAASGTIFGPPYMGWYRQAPGKERELVAGIALGGSTYYADSVKGRFTISRDNAKNTVYLQMNSLKPEDTAVYYCAADGASNSSHHYWGQGTQVTVSS

SEQ ID NO: 12273 - protein, 122 aa, Artificial Sequence
  Chemically Synthesized
QVQLQESGGGLVQAGGSLRLSCAASGTIFATIVMGWYRQAPGKERELVAAINPGGNTNYADSVKGRFTISRDNAKNTVYLQMNSLKPEDTAVYYCAAYWADLDDYTWVLGYWGQGTQVTVSS

SEQ ID NO: 12274 - protein, 122 aa, Artificial Sequence
  Chemically Synthesized
QVQLQESGGGLVQAGGSLRLSCAASGYISTYAYMGWYRQAPGKERELVAGIDVGAITYYADSVKGRFTISRDNAKNTVYLQMNSLKPEDTAVYYCAVQFEDFYHTTDNLYYWGQGTQVTVSS

SEQ ID NO: 12275 - protein, 122 aa, Artificial Sequence
  Chemically Synthesized
QVQLQESGGGLVQAGGSLRLSCAASGNISTAGYMGWYRQAPGKERELVAAINSGSNTNYADSVKGRFTISRDNAKNTVYLQMNSLKPEDTAVYYCAAVYGYVNSRAVSLYYWGQGTQVTVSS

SEQ ID NO: 12276 - protein, 126 aa, Artificial Sequence
  Chemically Synthesized
QVQLQESGGGLVQAGGSLRLSCAASGYISDGLQMGWYRQAPGKEREFVAAINGGSSTYYADSVKGRFTISRDNAKNTVYLQMNSLKPEDTAVYYCAVGWWAYGTDYGHDALGLYYWGQGTQVTVSS

SEQ ID NO: 12277 - protein, 121 aa, Artificial Sequence
  Chemically Synthesized
QVQLQESGGGLVQAGGSLRLSCAASGNISDFGMGWYRQAPGKERELVATITGGATTYYADSVKGRFTISRDNAKNTVYLQMNSLKPEDTAVYYCAAIHGDIARYYDSLYYWGQGTQVTVSS

SEQ ID NO: 12278 - protein, 118 aa, Artificial Sequence
  Chemically Synthesized
QVQLQESGGGLVQAGGSLRLSCAASGNIFYVPYMGWYRQAPGKERELVAAIGPGANTNYADSVKGRFTISRDNAKNTVYLQMNSLKPEDTAVYYCAVLTYRGADLYYWGQGTQVTVSS

SEQ ID NO: 12279 - protein, 125 aa, Artificial Sequence
  Chemically Synthesized
QVQLQESGGGLVQAGGSLRLSCAASGNISARDTMGWYRQAPGKERELVATIGPGSSTNYADSVKGRFTISRDNAKNTVYLQMNSLKPEDTAVYYCAVVYTYYQEYSLPNYYLYYWGQGTQVTVSS

SEQ ID NO: 12280 - protein, 126 aa, Artificial Sequence
  Chemically Synthesized
QVQLQESGGGLVQAGGSLRLSCAASGTIFYHDGMGWYRQAPGKERELVAAISQGATTYYADSVKGRFTISRDNAKNTVYLQMNSLKPEDTAVYYCAAYYTYIPSAPPRPSEGLYYWGQGTQVTVSS

SEQ ID NO: 12281 - protein, 118 aa, Artificial Sequence
  Chemically Synthesized
QVQLQESGGGLVQAGGSLRLSCAASGTIFYAYDMGWYRQAPGKERELVATITWGSSTYYADSVKGRFTISRDNAKNTVYLQMNSLKPEDTAVYYCAVKRSWYGRLLYWGQGTQVTVSS

SEQ ID NO: 12282 - protein, 122 aa, Artificial Sequence
  Chemically Synthesized
QVQLQESGGGLVQAGGSLRLSCAASGSIFDGAYMGWYRQAPGKERELVATIGTGGNTYYADSVKGRFTISRDNAKNTVYLQMNSLKPEDTAVYYCAVAYLYNIWREEGLYYWGQGTQVTVSS

SEQ ID NO: 12283 - protein, 123 aa, Artificial Sequence
  Chemically Synthesized
QVQLQESGGGLVQAGGSLRLSCAASGSISADSDMGWYRQAPGKEREFVASINYGGTTYYADSVKGRFTISRDNAKNTVYLQMNSLKPEDTAVYYCAVYWPGYQQYYVWQLGYWGQGTQVTVSS

SEQ ID NO: 12284 - protein, 125 aa, Artificial Sequence
  Chemically Synthesized
QVQLQESGGGLVQAGGSLRLSCAASGTISADGLMGWYRQAPGKERELVATINLGSSTNYADSVKGRFTISRDNAKNTVYLQMNSLKPEDTAVYYCAVIWSSFYDPRYSAQYLYYWGQGTQVTVSS

SEQ ID NO: 12285 - protein, 122 aa, Artificial Sequence
  Chemically Synthesized
QVQLQESGGGLVQAGGSLRLSCAASGNISATDYMGWYRQAPGKERELVAAIGIGASTNYADSVKGRFTISRDNAKNTVYLQMNSLKPEDTAVYYCAAYFADGAHPDYTLGYWGQGTQVTVSS

SEQ ID NO: 12286 - protein, 121 aa, Artificial Sequence
  Chemically Synthesized
QVQLQESGGGLVQAGGSLRLSCAASGNISQGDYMGWYRQAPGKERELVASIGIGANTYYADSVKGRFTISRDNAKNTVYLQMNSLKPEDTAVYYCAAYYNESGGDGWLGYWGQGTQVTVSS

SEQ ID NO: 12287 - protein, 118 aa, Artificial Sequence
  Chemically Synthesized
QVQLQESGGGLVQAGGSLRLSCAASGNIFPYGYMGWYRQAPGKEREFVASINDGASTNYADSVKGRFTISRDNAKNTVYLQMNSLKPEDTAVYYCAVWWYEHFLLGYWGQGTQVTVSS

SEQ ID NO: 12288 - protein, 120 aa, Artificial Sequence
  Chemically Synthesized
QVQLQESGGGLVQAGGSLRLSCAASGYISRKDTMGWYRQAPGKEREFVASIAYGSTTNYADSVKGRFTISRDNAKNTVYLQMNSLKPEDTAVYYCAVQYGSRLRYSFYYWGQGTQVTVSS

SEQ ID NO: 12289 - protein, 117 aa, Artificial Sequence
  Chemically Synthesized
QVQLQESGGGLVQAGGSLRLSCAASGTISGEPFMGWYRQAPGKEREFVATINVGTNTNYADSVKGRFTISRDNAKNTVYLQMNSLKPEDTAVYYCAAQSDYVGHRYWGQGTQVTVSS

SEQ ID NO: 12290 - protein, 126 aa, Artificial Sequence
  Chemically Synthesized
QVQLQESGGGLVQAGGSLRLSCAASGSIFSQAYMGWYRQAPGKEREFVATIAAGAITNYADSVKGRFTISRDNAKNTVYLQMNSLKPEDTAVYYCAVAYADDYAGPTDYRAALYYWGQGTQVTVSS

SEQ ID NO: 12291 - protein, 126 aa, Artificial Sequence
  Chemically Synthesized
QVQLQESGGGLVQAGGSLRLSCAASGSIFGDSYMGWYRQAPGKEREFVAGIAYEGVVPYADSVKGRFTISRDNAKNTVYLQMNSLKPEDTAVYYCAAWQYAVDNFTVVRQGVHPYWGQGTQVTVSS

SEQ ID NO: 12292 - protein, 118 aa, Artificial Sequence
  Chemically Synthesized
QVQLQESGGGLVQAGGSLRLSCAASGSIFVSGDMGWYRQAPGKERELVVGITYGSSTNYADSVKGRFTISRDNAKNTVYLQMNSLKPEDTAVYYCAVRTAYPQSHQYWGQGTQVTVSS

SEQ ID NO: 12293 - protein, 118 aa, Artificial Sequence
  Chemically Synthesized
QVQLQESGGGLVQAGGSLRLSCAASGSISPWAYMGWYRQAPGKEREFVAGIGYGATTNYADSVKGRFTISRDNAKNTVYLQMNSLKPEDTAVYYCAVGGGPPLGHEYWGQGTQVTVSS

SEQ ID NO: 12294 - protein, 118 aa, Artificial Sequence
  Chemically Synthesized
QVQLQESGGGLVQAGGSLRLSCAASGSISYAWYMGWYRQAPGKERELVASIAHGANTYYADSVKGRFTISRDNAKNTVYLQMNSLKPEDTAVYYCAVPFNAFTTFGYWGQGTQVTVSS

SEQ ID NO: 12295 - protein, 115 aa, Artificial Sequence
  Chemically Synthesized
QVQLQESGGGLVQAGGSLRLSCAASGYIFPFLGMGWYRQAPGKERELVAGIGEGGTTNYADSVKGRFTISRDNAKNTVYLQMNSLKPEDTAVYYCAAKDLGYDYWGQGTQVTVSS

SEQ ID NO: 12296 - protein, 117 aa, Artificial Sequence
  Chemically Synthesized
QVQLQESGGGLVQAGGSLRLSCAASGYISAYLDMGWYRQAPGKERELVATISTGGITNYADSVKGRFTISRDNAKNTVYLQMNSLKPEDTAVYYCAVDPEVTVRLYWGQGTQVTVSS

SEQ ID NO: 12297 - protein, 118 aa, Artificial Sequence
  Chemically Synthesized
QVQLQESGGGLVQAGGSLRLSCAASGTISSLDKMGWYRQAPGKERELVAAINYGGSTNYADSVKGRFTISRDNAKNTVYLQMNSLKPEDTAVYYCAVYGFGPSDLVYWGQGTQVTVSS

SEQ ID NO: 12298 - protein, 118 aa, Artificial Sequence
  Chemically Synthesized
QVQLQESGGGLVQAGGSLRLSCAASGTIFPYNHMGWYRQAPGKERELVAGIDPGASTNYADSVKGRFTISRDNAKNTVYLQMNSLKPEDTAVYYCAAYQYLQVPHYYWGQGTQVTVSS

SEQ ID NO: 12299 - protein, 122 aa, Artificial Sequence
  Chemically Synthesized
QVQLQESGGGLVQAGGSLRLSCAASGTIFYEYDMGWYRQAPGKEREFVATIADGAITYYADSVKGRFTISRDNAKNTVYLQMNSLKPEDTAVYYCAVYQYLPLSTLQGFDYWGQGTQVTVSS

SEQ ID NO: 12300 - protein, 120 aa, Artificial Sequence
  Chemically Synthesized
QVQLQESGGGLVQAGGSLRLSCAASGYFSGLRMGWYRQAPGKERELVASINGGTITYADSVKGRFTISRDNAKNTVYLQMNSLKPEDTAVYYCAVTVLADNDLGDDFVYWGQGTQVTVSS

SEQ ID NO: 12301 - protein, 126 aa, Artificial Sequence
  Chemically Synthesized
QVQLQESGGGLVQAGGSLRLSCAASGSISAANYMGWYRQAPGKERELVAAITSGGNTYYADSVKGRFTISRDNAKNTVYLQMNSLKPEDTAVYYCAVVNRVLFYRWGLFDATYDYWGQGTQVTVSS

SEQ ID NO: 12302 - protein, 120 aa, Artificial Sequence
  Chemically Synthesized
QVQLQESGGGLVQAGGSLRLSCAASGTIFRYRDMGWYRQAPGKERELVAAITIGTNYADSVKGRFTISRDNAKNTVYLQMNSLKPEDTAVYYCAAGVPYSLYISGYLDYWGQGTQVTVSS

SEQ ID NO: 12303 - protein, 118 aa, Artificial Sequence
  Chemically Synthesized
QVQLQESGGGLVQAGGSLRLSCAASGTIFRPPIMGWYRQAPGKEREFVASIGWGGTTNYADSVKGRFTISRDNAKNTVYLQMNSLKPEDTAVYYCAVRRVRYDYYVYWGQGTQVTVSS

SEQ ID NO: 12304 - protein, 126 aa, Artificial Sequence
  Chemically Synthesized
QVQLQESGGGLVQAGGSLRLSCAASGNIFVHRYMGWYRQAPGKEREFVAGITYGTITYYADSVKGRFTISRDNAKNTVYLQMNSLKPEDTAVYYCAVVLTAYDGGGLLWLRKYWYWGQGTQVTVSS

SEQ ID NO: 12305 - protein, 118 aa, Artificial Sequence
  Chemically Synthesized
QVQLQESGGGLVQAGGSLRLSCAASGYIFLYATMGWYRQAPGKEREFVAAIGYGASTNYADSVKGRFTISRDNAKNTVYLQMNSLKPEDTAVYYCAVWLYDSDGHDYWGQGTQVTVSS

SEQ ID NO: 12306 - protein, 118 aa, Artificial Sequence
  Chemically Synthesized
QVQLQESGGGLVQAGGSLRLSCAASGTISSDLPMGWYRQAPGKERELVASIGVGTSTNYADSVKGRFTISRDNAKNTVYLQMNSLKPEDTAVYYCAVYSQWYQRLSYWGQGTQVTVSS

SEQ ID NO: 12307 - protein, 118 aa, Artificial Sequence
  Chemically Synthesized
QVQLQESGGGLVQAGGSLRLSCAASGSIFWYYRMGWYRQAPGKEREFVAGIGGGTSTNYADSVKGRFTISRDNAKNTVYLQMNSLKPEDTAVYYCAVTGSGPPRLGYWGQGTQVTVSS

SEQ ID NO: 12308 - protein, 119 aa, Artificial Sequence
  Chemically Synthesized
QVQLQESGGGLVQAGGSLRLSCAASGNISYVRRMGWYRQAPGKERELVASITDGGTTTNYADSVKGRFTISRDNAKNTVYLQMNSLKPEDTAVYYCAVPYTEVVRFPYWGQGTQVTVSS

SEQ ID NO: 12309 - protein, 118 aa, Artificial Sequence
  Chemically Synthesized
QVQLQESGGGLVQAGGSLRLSCAASGTISWATIMGWYRQAPGKERELVAGIDPGTNTNYADSVKGRFTISRDNAKNTVYLQMNSLKPEDTAVYYCAVTAADYVRYYYWGQGTQVTVSS

SEQ ID NO: 12310 - protein, 118 aa, Artificial Sequence
  Chemically Synthesized
QVQLQESGGGLVQAGGSLRLSCAASGYISRPHLMGWYRQAPGKEREFVAGISRGSNTNYADSVKGRFTISRDNAKNTVYLQMNSLKPEDTAVYYCAVVWPFWPSYNYWGQGTQVTVSS

SEQ ID NO: 12311 - protein, 120 aa, Artificial Sequence
  Chemically Synthesized
QVQLQESGGGLVQAGGSLRLSCAASGNIFVDNSMGWYRQAPGKEREFVAGIDLVVVPYADSVKGRFTISRDNAKNTVYLQMNSLKPEDTAVYYCAVGGEKGGRAGSSLYWGQGTQVTVSS

SEQ ID NO: 12312 - protein, 118 aa, Artificial Sequence
  Chemically Synthesized
QVQLQESGGGLVQAGGSLRLSCAASGSIFRPYYMGWYRQAPGKEREFVASIGPGGNTYYADSVKGRFTISRDNAKNTVYLQMNSLKPEDTAVYYCAALAQFYEIYVYWGQGTQVTVSS

SEQ ID NO: 12313 - protein, 122 aa, Artificial Sequence
  Chemically Synthesized
QVQLQESGGGLVQAGGSLRLSCAASGNISEGYVMGWYRQAPGKEREFVAGIDDGTNTNYADSVKGRFTISRDNAKNTVYLQMNSLKPEDTAVYYCAVHYANPPGGVTAHAYWGQGTQVTVSS

SEQ ID NO: 12314 - protein, 118 aa, Artificial Sequence
  Chemically Synthesized
QVQLQESGGGLVQAGGSLRLSCAASGTIFDTAAMGWYRQAPGKERELVATIGDGTITYYADSVKGRFTISRDNAKNTVYLQMNSLKPEDTAVYYCAVDIRVSQDFLYWGQGTQVTVSS

SEQ ID NO: 12315 - protein, 124 aa, Artificial Sequence
  Chemically Synthesized
QVQLQESGGGLVQAGGSLRLSCAASGTISLADYMGWYRQAPGKEREFVAGIAYGGITYYADSVKGRFTISRDNAKNTVYLQMNSLKPEDTAVYYCAAGPSARYLSSTGYDHYYWGQGTQVTVSS

SEQ ID NO: 12316 - protein, 118 aa, Artificial Sequence
  Chemically Synthesized
QVQLQESGGGLVQAGGSLRLSCAASGTISYRTYMGWYRQAPGKERELVAAISTGSTTYYADSVKGRFTISRDNAKNTVYLQMNSLKPEDTAVYYCAADRYYTGYYPYWGQGTQVTVSS

SEQ ID NO: 12317 - protein, 117 aa, Artificial Sequence
  Chemically Synthesized
QVQLQESGGGLVQAGGSLRLSCAASGTIFSHLDMGWYRQAPGKEREFVAGINYGTNTNYADSVKGRFTISRDNAKNTVYLQMNSLKPEDTAVYYCAASLTGSNLLYWGQGTQVTVSS

SEQ ID NO: 12318 - protein, 125 aa, Artificial Sequence
  Chemically Synthesized
QVQLQESGGGLVQAGGSLRLSCAASGYIFDDRYMGWYRQAPGKERELVATIDAGSTTYYADSVKGRFTISRDNAKNTVYLQMNSLKPEDTAVYYCAVPYNRVDTTRIGQDQWHYWGQGTQVTVSS

SEQ ID NO: 12319 - protein, 122 aa, Artificial Sequence
  Chemically Synthesized
QVQLQESGGGLVQAGGSLRLSCAASGSIFLPVYMGWYRQAPGKEREFVASITYGTTTYYADSVKGRFTISRDNAKNTVYLQMNSLKPEDTAVYYCAADYRYTPYTGLSFYYWGQGTQVTVSS

SEQ ID NO: 12320 - protein, 125 aa, Artificial Sequence
  Chemically Synthesized
QVQLQESGGGLVQAGGSLRLSCAASGYIFSTTMGWYRQAPGKEREFVAGIAFGSNTNYADSVKGRFTISRDNAKNTVYLQMNSLKPEDTAVYYCAADGGISTTREYITLTIHPYWGQGTQVTVSS

SEQ ID NO: 12321 - protein, 118 aa, Artificial Sequence
  Chemically Synthesized
QVQLQESGGGLVQAGGSLRLSCAASGNISRPITMGWYRQAPGKEREFVAGIGQGGITYYADSVKGRFTISRDNAKNTVYLQMNSLKPEDTAVYYCAVLDRGFYTFIYWGQGTQVTVSS

SEQ ID NO: 12322 - protein, 118 aa, Artificial Sequence
  Chemically Synthesized
QVQLQESGGGLVQAGGSLRLSCAASGTISWYAYMGWYRQAPGKEREFVASIDSGGSTYYADSVKGRFTISRDNAKNTVYLQMNSLKPEDTAVYYCAVHGYGPYVFGYWGQGTQVTVSS

SEQ ID NO: 12323 - protein, 117 aa, Artificial Sequence
  Chemically Synthesized
QVQLQESGGGLVQAGGSLRLSCAASGNIFPTLTMGWYRQAPGKERELVATIADGGNTNYADSVKGRFTISRDNAKNTVYLQMNSLKPEDTAVYYCAVDDLNGTLLYWGQGTQVTVSS

SEQ ID NO: 12324 - protein, 122 aa, Artificial Sequence
  Chemically Synthesized
QVQLQESGGGLVQAGGSLRLSCAASGYISPDDVMGWYRQAPGKEREFVAGIGVGSITNYADSVKGRFTISRDNAKNTVYLQMNSLKPEDTAVYYCAVWRDTVYYPVILHAYWGQGTQVTVSS

SEQ ID NO: 12325 - protein, 122 aa, Artificial Sequence
  Chemically Synthesized
QVQLQESGGGLVQAGGSLRLSCAASGYIFPSAAMGWYRQAPGKERELVATIGIGANTYYADSVKGRFTISRDNAKNTVYLQMNSLKPEDTAVYYCAVGWTTDDPGYYYHYYWGQGTQVTVSS

SEQ ID NO: 12326 - protein, 118 aa, Artificial Sequence
  Chemically Synthesized
QVQLQESGGGLVQAGGSLRLSCAASGSIFQYDAMGWYRQAPGKEREFVAGITAGSITNYADSVKGRFTISRDNAKNTVYLQMNSLKPEDTAVYYCAVYYNIARSHYYWGQGTQVTVSS

SEQ ID NO: 12327 - protein, 118 aa, Artificial Sequence
  Chemically Synthesized
QVQLQESGGGLVQAGGSLRLSCAASGYIFLLAVMGWYRQAPGKEREFVAGIDFGANTNYADSVKGRFTISRDNAKNTVYLQMNSLKPEDTAVYYCAVWYYPRNWLLYWGQGTQVTVSS

SEQ ID NO: 12328 - protein, 126 aa, Artificial Sequence
  Chemically Synthesized
QVQLQESGGGLVQAGGSLRLSCAASGNIFPPSIMGWYRQAPGKERELVATINGGSNTNYADSVKGRFTISRDNAKNTVYLQMNSLKPEDTAVYYCAVNVDDLYSSVRPRDLVYDYWGQGTQVTVSS

SEQ ID NO: 12329 - protein, 115 aa, Artificial Sequence
  Chemically Synthesized
QVQLQESGGGLVQAGGSLRLSCAASGNISHPFYMGWYRQAPGKEREFVAGINFGTITYYADSVKGRFTISRDNAKNTVYLQMNSLKPEDTAVYYCAAGLSRNMYWGQGTQVTVSS

SEQ ID NO: 12330 - protein, 125 aa, Artificial Sequence
  Chemically Synthesized
QVQLQESGGGLVQAGGSLRLSCAASGNISTDSLMGWYRQAPGKERELVAAISSGGITYYADSVKGRFTISRDNAKNTVYLQMNSLKPEDTAVYYCAALSPSYYWDKVYGSYHNYWGQGTQVTVSS

SEQ ID NO: 12331 - protein, 118 aa, Artificial Sequence
  Chemically Synthesized
QVQLQESGGGLVQAGGSLRLSCAASGSIFPSASMGWYRQAPGKERELVATITPGTIYQYADSVKGRFTISRDNAKNTVYLQMNSLKPEDTAVYYCAVPQAYIYFLIYWGQGTQVTVSS

SEQ ID NO: 12332 - protein, 117 aa, Artificial Sequence
  Chemically Synthesized
QVQLQESGGGLVQAGGSLRLSCAASGTIFGSTMGWYRQAPGKEREFVATINYGTNTYYADSVKGRFTISRDNAKNTVYLQMNSLKPEDTAVYYCAVYVDTHYTLQYWGQGTQVTVSS

SEQ ID NO: 12333 - protein, 118 aa, Artificial Sequence
  Chemically Synthesized
QVQLQESGGGLVQAGGSLRLSCAASGYIFERTLMGWYRQAPGKEREFVAGIDDGATTYYADSVKGRFTISRDNAKNTVYLQMNSLKPEDTAVYYCAVAYGNYLPHDYWGQGTQVTVSS

SEQ ID NO: 12334 - protein, 110 aa, Artificial Sequence
  Chemically Synthesized
QVQLQESGGGLVQAGGSLRLSCAASGTISGLSAMGWYRQAPGKERELVAGIGIGATTNYADSVKGRFTISRDNAKNTVYLQMNSLKPEDTAVYYCAVIYWGQGTQVTVSS

SEQ ID NO: 12335 - protein, 119 aa, Artificial Sequence
  Chemically Synthesized
QVQLQESGGGLVQAGGSLRLSCAASGSIFATYTMGWYRQAPGKERELVAGIAGGGITYYADSVKGRFTISRDNAKNTVYLQMNSLKPEDTAVYYCAAYHIVYYSTFYYWGQGTQVTVSS

SEQ ID NO: 12336 - protein, 126 aa, Artificial Sequence
  Chemically Synthesized
QVQLQESGGGLVQAGGSLRLSCAASGTIFGSDEMGWYRQAPGKEREFVASIAQGAITNYADSVKGRFTISRDNAKNTVYLQMNSLKPEDTAVYYCAVVDGKRFWDAKYPYVTFDYWGQGTQVTVSS

SEQ ID NO: 12337 - protein, 118 aa, Artificial Sequence
  Chemically Synthesized
QVQLQESGGGLVQAGGSLRLSCAASGYIFANSYMGWYRQAPGKERELVATINAGATTYYADSVKGRFTISRDNAKNTVYLQMNSLKPEDTAVYYCAVYDPGIVGFAYWGQGTQVTVSS

SEQ ID NO: 12338 - protein, 122 aa, Artificial Sequence
  Chemically Synthesized
QVQLQESGGGLVQAGGSLRLSCAASGNISSILTMGWYRQAPGKERELVATIAEGGSTYYADSVKGRFTISRDNAKNTVYLQMNSLKPEDTAVYYCAANSYDRYYYTDIFAYWGQGTQVTVSS

SEQ ID NO: 12339 - protein, 117 aa, Artificial Sequence
  Chemically Synthesized
QVQLQESGGGLVQAGGSLRLSCAASGYISRDDFMGWYRQAPGKEREFVAAIGSVVLPYADSVKGRFTISRDNAKNTVYLQMNSLKPEDTAVYYCAVWDRLYLYLDYWGQGTQVTVSS

SEQ ID NO: 12340 - protein, 118 aa, Artificial Sequence
  Chemically Synthesized
QVQLQESGGGLVQAGGSLRLSCAASGTIFRSLYMGWYRQAPGKEREFVAAINSGSSTNYADSVKGRFTISRDNAKNTVYLQMNSLKPEDTAVYYCAVDDYRDYGLIYWGQGTQVTVSS

SEQ ID NO: 12341 - protein, 123 aa, Artificial Sequence
  Chemically Synthesized
QVQLQESGGGLVQAGGSLRLSCAASGTIFVRYYMGWYRQAPGKEREFVASIADGTNTNYADSVKGRFTISRDNAKNTVYLQMNSLKPEDTAVYYCAAIIWYTVHRDGYYHYYWGQGTQVTVSS

SEQ ID NO: 12342 - protein, 122 aa, Artificial Sequence
  Chemically Synthesized
QVQLQESGGGLVQAGGSLRLSCAASGTISDADFMGWYRQAPGKEREFVAAIDLGASTYYADSVKGRFTISRDNAKNTVYLQMNSLKPEDTAVYYCAAPALYGPDGGRYFSYWGQGTQVTVSS

SEQ ID NO: 12343 - protein, 122 aa, Artificial Sequence
  Chemically Synthesized
QVQLQESGGGLVQAGGSLRLSCAASGYISFNAFMGWYRQAPGKEREFVASITGGTNTYYADSVKGRFTISRDNAKNTVYLQMNSLKPEDTAVYYCAALGDYWSDDATELYYWGQGTQVTVSS

SEQ ID NO: 12344 - protein, 122 aa, Artificial Sequence
  Chemically Synthesized
QVQLQESGGGLVQAGGSLRLSCAASGSISSASRMGWYRQAPGKEREFVASITQGGNTNYADSVKGRFTISRDNAKNTVYLQMNSLKPEDTAVYYCAVGFGEGGATINTLYYWGQGTQVTVSS

SEQ ID NO: 12345 - protein, 121 aa, Artificial Sequence
  Chemically Synthesized
QVQLQESGGGLVQAGGSLRLSCAASGNISPITYMGWYRQAPGKEREFVASIGRGSNTNYADSVKGRFTISRDNAKNTVYLQMNSLKPEDTAVYYCAAWSNGGKPYYVLLYWGQGTQVTVSS

SEQ ID NO: 12346 - protein, 118 aa, Artificial Sequence
  Chemically Synthesized
QVQLQESGGGLVQAGGSLRLSCAASGTIFVARVMGWYRQAPGKERELVAAINYGASTNYADSVKGRFTISRDNAKNTVYLQMNSLKPEDTAVYYCAAYHDVTIGHYYWGQGTQVTVSS

SEQ ID NO: 12347 - protein, 118 aa, Artificial Sequence
  Chemically Synthesized
QVQLQESGGGLVQAGGSLRLSCAASGTISYIRGMGWYRQAPGKEREFVAAINQGGNTYYADSVKGRFTISRDNAKNTVYLQMNSLKPEDTAVYYCAVLRYYRYHHKYWGQGTQVTVSS

SEQ ID NO: 12348 - protein, 118 aa, Artificial Sequence
  Chemically Synthesized
QVQLQESGGGLVQAGGSLRLSCAASGNISFSDDMGWYRQAPGKEREFVATIANGASTNYADSVKGRFTISRDNAKNTVYLQMNSLKPEDTAVYYCAAYYQGGDPHYYWGQGTQVTVSS

SEQ ID NO: 12349 - protein, 122 aa, Artificial Sequence
  Chemically Synthesized
QVQLQESGGGLVQAGGSLRLSCAASGYISWRRKMGWYRQAPGKERELVAAIGWGGTTNYADSVKGRFTISRDNAKNTVYLQMNSLKPEDTAVYYCAARSPYYHHGNPGYLYWGQGTQVTVSS

SEQ ID NO: 12350 - protein, 117 aa, Artificial Sequence
  Chemically Synthesized
QVQLQESGGGLVQAGGSLRLSCAASGYISRKKTMGWYRQAPGKEREFVATISGGGTTNYADSVKGRFTISRDNAKNTVYLQMNSLKPEDTAVYYCAVQRWSYVFRYWGQGTQVTVSS

SEQ ID NO: 12351 - protein, 117 aa, Artificial Sequence
  Chemically Synthesized
QVQLQESGGGLVQAGGSLRLSCAASGNISHEPYMGWYRQAPGKERELVAGITTGTSTNYADSVKGRFTISRDNAKNTVYLQMNSLKPEDTAVYYCAAKENTTTLLYWGQGTQVTVSS

SEQ ID NO: 12352 - protein, 118 aa, Artificial Sequence
  Chemically Synthesized
QVQLQESGGGLVQAGGSLRLSCAASGYIFTAWYMGWYRQAPGKERELVAGITGGAITYYADSVKGRFTISRDNAKNTVYLQMNSLKPEDTAVYYCAVGHSYTSVYEYWGQGTQVTVSS

SEQ ID NO: 12353 - protein, 126 aa, Artificial Sequence
  Chemically Synthesized
QVQLQESGGGLVQAGGSLRLSCAASGYIFQISYMGWYRQAPGKEREFVAAISTGTSTYYADSVKGRFTISRDNAKNTVYLQMNSLKPEDTAVYYCAARGAGTIDGYRADEPGYYYWGQGTQVTVSS

SEQ ID NO: 12354 - protein, 126 aa, Artificial Sequence
  Chemically Synthesized
QVQLQESGGGLVQAGGSLRLSCAASGYIFYYQYMGWYRQAPGKEREFVAAISPGANTNYADSVKGRFTISRDNAKNTVYLQMNSLKPEDTAVYYCAAEQPSHNGYRHRGYPTLTYWGQGTQVTVSS

SEQ ID NO: 12355 - protein, 117 aa, Artificial Sequence
  Chemically Synthesized
QVQLQESGGGLVQAGGSLRLSCAASGSIFDPTYMGWYRQAPGKEREFLPVLITVLLPYADSVKGRFTISRDNAKNTVYLQMNSLKPEDTAVYYCAADGLSGVYLDYWGQGTQVTVSS

SEQ ID NO: 12356 - protein, 126 aa, Artificial Sequence
  Chemically Synthesized
QVQLQESGGGLVQAGGSLRLSCAASGTISQYWGMGWYRQAPGKEREFVAAITYGGNTNYADSVKGRFTISRDNAKNTVYLQMNSLKPEDTAVYYCAAAATVADWQFYYWLPHHQYWGQGTQVTVSS

SEQ ID NO: 12357 - protein, 124 aa, Artificial Sequence
  Chemically Synthesized
QVQLQESGGGLVQAGGSLRLSCAASGTIFFRMGWYRQAPGKERELVAAIDPGATTNYADSVKGRFTISRDNAKNTVYLQMNSLKPEDTAVYYCAAQYVTYPEGTIQGRNAYLYWGQGTQVTVSS

SEQ ID NO: 12358 - protein, 118 aa, Artificial Sequence
  Chemically Synthesized
QVQLQESGGGLVQAGGSLRLSCAASGTISEDVTMGWYRQAPGKERELVAAINVGATTYYADSVKGRFTISRDNAKNTVYLQMNSLKPEDTAVYYCAANRTFIYIHFYWGQGTQVTVSS

SEQ ID NO: 12359 - protein, 119 aa, Artificial Sequence
  Chemically Synthesized
QVQLQESGGGLVQAGGSLRLSCAASGSIFDNYEMGWYRQAPGKEREPLLISVVVPYADSVKGRFTISRDNAKNTVYLQMNSLKPEDTAVYYCAAYDTYSDTKYGPHGYWGQGTQVTVSS

SEQ ID NO: 12360 - protein, 119 aa, Artificial Sequence
  Chemically Synthesized
QVQLQESGGGLVQAGGSLRLSCAASGSISYDVLMGWYRQAPGKERELVATIDAGSYADSVKGRFTISRDNAKNTVYLQMNSLKPEDTAVYYCAAFELNPRVDVVDFDYWGQGTQVTVSS

SEQ ID NO: 12361 - protein, 121 aa, Artificial Sequence
  Chemically Synthesized
QVQLQESGGGLVQAGGSLRLSCAASGNISYSDGMGWYRQAPGKEREFVATIGAGTNTNYADSVKGRFTISRDNAKNTVYLQMNSLKPEDTAVYYCAVGTNTSTSVGNPCYWGQGTQVTVSS

SEQ ID NO: 12362 - protein, 126 aa, Artificial Sequence
  Chemically Synthesized
QVQLQESGGGLVQAGGSLRLSCAASGSISPYAWMGWYRQAPGKERELVASIGEGANTYYADSVKGRFTISRDNAKNTVYLQMNSLKPEDTAVYYCAVGDGYAYTHRRTAGYDFVYWGQGTQVTVSS

SEQ ID NO: 12363 - protein, 115 aa, Artificial Sequence
  Chemically Synthesized
QVQLQESGGGLVQAGGSLRLSCAASGNISVVRTMGWYRQAPGKEREFVATIYADSVKGRFTISRDNAKNTVYLQMNSLKPEDTAVYYCAAKGTAYLSQASDYYYWGQGTQVTVSS

SEQ ID NO: 12364 - protein, 122 aa, Artificial Sequence
  Chemically Synthesized
QVQLQESGGGLVQAGGSLRLSCAASGNIFQYRYMGWYRQAPGKERELVAGIALGGTTNYADSVKGRFTISRDNAKNTVYLQMNSLKPEDTAVYYCAVIGPSYLYYVDGFDYWGQGTQVTVSS

SEQ ID NO: 12365 - protein, 117 aa, Artificial Sequence
  Chemically Synthesized
QVQLQESGGGLVQAGGSLRLSCAASGTIFWYFMGWYRQAPGKEREFVAGIGLGTTTNYADSVKGRFTISRDNAKNTVYLQMNSLKPEDTAVYYCAVSAYGARYHTYWGQGTQVTVSS

SEQ ID NO: 12366 - protein, 118 aa, Artificial Sequence
  Chemically Synthesized
QVQLQESGGGLVQAGGSLRLSCAASGYIFFSRIMGWYRQAPGKEREFVAAIGEGTNTYYADSVKGRFTISRDNAKNTVYLQMNSLKPEDTAVYYCAVRSGWAHFLHYWGQGTQVTVSS

SEQ ID NO: 12367 - protein, 126 aa, Artificial Sequence
  Chemically Synthesized
QVQLQESGGGLVQAGGSLRLSCAASGSISTLLHMGWYRQAPGKEREFVAAIGYGSITYYADSVKGRFTISRDNAKNTVYLQMNSLKPEDTAVYYCAAWTDVDDINYNYDYWWFTYWGQGTQVTVSS

SEQ ID NO: 12368 - protein, 121 aa, Artificial Sequence
  Chemically Synthesized
QVQLQESGGGLVQAGGSLRLSCAASGNISRIIPMGWYRQAPGKEREFVASTVGAITNYADSVKGRFTISRDNAKNTVYLQMNSLKPEDTAVYYCAADRDSPYGWSRALWYWGQGTQVTVSS

SEQ ID NO: 12369 - protein, 118 aa, Artificial Sequence
  Chemically Synthesized
QVQLQESGGGLVQAGGSLRLSCAASGNISAYAEMGWYRQAPGKERELVATIAHGANTNYADSVKGRFTISRDNAKNTVYLQMNSLKPEDTAVYYCAVETDRRYPLAYWGQGTQVTVSS

SEQ ID NO: 12370 - protein, 110 aa, Artificial Sequence
  Chemically Synthesized
QVQLQESGGGLVQAGGSLRLSCAASGSISTFQDMGWYRQAPGKERELVAPYADSVKGRFTISRDNAKNTVYLQMNSLKPEDTAVYYCAAVASSLDYYDYWGQGTQVTVSS

SEQ ID NO: 12371 - protein, 126 aa, Artificial Sequence
  Chemically Synthesized
QVQLQESGGGLVQAGGSLRLSCAASGSIFPDYWMGWYRQAPGKEREFVASIAQGTSTYYADSVKGRFTISRDNAKNTVYLQMNSLKPEDTAVYYCAVYLSQGTDPDGVGRPDHGYWGQGTQVTVSS

SEQ ID NO: 12372 - protein, 122 aa, Artificial Sequence
  Chemically Synthesized
QVQLQESGGGLVQAGGSLRLSCAASGYIFDWYLMGWYRQAPGKEREFVASISYGGTTYYADSVKGRFTISRDNAKNTVYLQMNSLKPEDTAVYYCAVFAYDDVGTPRIHYYWGQGTQVTVSS

SEQ ID NO: 12373 - protein, 118 aa, Artificial Sequence
  Chemically Synthesized
QVQLQESGGGLVQAGGSLRLSCAASGTIFYRVRMGWYRQAPGKERELVAAISGGGNTYYADSVKGRFTISRDNAKNTVYLQMNSLKPEDTAVYYCAVYATGVRVHTYWGQGTQVTVSS

SEQ ID NO: 12374 - protein, 118 aa, Artificial Sequence
  Chemically Synthesized
QVQLQESGGGLVQAGGSLRLSCAASGSISRWGQMGWYRQAPGKERELVATINVGTNTYYADSVKGRFTISRDNAKNTVYLQMNSLKPEDTAVYYCAVHTWPYVWHQYWGQGTQVTVSS

SEQ ID NO: 12375 - protein, 122 aa, Artificial Sequence
  Chemically Synthesized
QVQLQESGGGLVQAGGSLRLSCAASGNISTYNYMGWYRQAPGKERELVATISDGAITYYADSVKGRFTISRDNAKNTVYLQMNSLKPEDTAVYYCAVINLATGYNSGRHDYWGQGTQVTVSS

SEQ ID NO: 12376 - protein, 118 aa, Artificial Sequence
  Chemically Synthesized
QVQLQESGGGLVQAGGSLRLSCAASGTISRYLLMGWYRQAPGKERELVAGIDYGSNTYYADSVKGRFTISRDNAKNTVYLQMNSLKPEDTAVYYCAVVRYYYIYLYYWGQGTQVTVSS

SEQ ID NO: 12377 - protein, 121 aa, Artificial Sequence
  Chemically Synthesized
QVQLQESGGGLVQAGGSLRLSCAASGSISDYTEMGWYRQAPGKEREFVAGIGGGANTNYADSVKGRFTISRDNAKNTVYLQMNSLKPEDTAVYYCAAVSRYNIDDPTHYYWGQGTQVTVSS

SEQ ID NO: 12378 - protein, 126 aa, Artificial Sequence
  Chemically Synthesized
QVQLQESGGGLVQAGGSLRLSCAASGSISDYLSMGWYRQAPGKEREFVASISTGGSTNYADSVKGRFTISRDNAKNTVYLQMNSLKPEDTAVYYCAAGWYYIGREQFVDRSYHVYWGQGTQVTVSS

SEQ ID NO: 12379 - protein, 118 aa, Artificial Sequence
  Chemically Synthesized
QVQLQESGGGLVQAGGSLRLSCAASGSIFTQYRMGWYRQAPGKEREFVASINYGANTNYADSVKGRFTISRDNAKNTVYLQMNSLKPEDTAVYYCAVYGKYFYTHYYWGQGTQVTVSS

SEQ ID NO: 12380 - protein, 118 aa, Artificial Sequence
  Chemically Synthesized
QVQLQESGGGLVQAGGSLRLSCAASGYISHWFWMGWYRQAPGKERELVASITYGANTYYADSVKGRFTISRDNAKNTVYLQMNSLKPEDTAVYYCAVYILGIARYYYWGQGTQVTVSS

SEQ ID NO: 12381 - protein, 126 aa, Artificial Sequence
  Chemically Synthesized
QVQLQESGGGLVQAGGSLRLSCAASGSISESSFMGWYRQAPGKEREFVAGIDQGGSTNYADSVKGRFTISRDNAKNTVYLQMNSLKPEDTAVYYCAARYVVGEQGYVYYAVGFTYWGQGTQVTVSS

SEQ ID NO: 12382 - protein, 118 aa, Artificial Sequence
  Chemically Synthesized
QVQLQESGGGLVQAGGSLRLSCAASGTIFATYGMGWYRQAPGKERELVATISYGTSTNYADSVKGRFTISRDNAKNTVYLQMNSLKPEDTAVYYCAVRKVAYIPYYYWGQGTQVTVSS

SEQ ID NO: 12383 - protein, 117 aa, Artificial Sequence
  Chemically Synthesized
QVQLQESGGGLVQAGGSLRLSCAASGYISSCGMGWYRQAPGKERELVAAITVGGITNYADSVKGRFTISRDNAKNTVYLQMNSLKPEDTAVYYCAAIAIYTRRLEYWGQGTQVTVSS

SEQ ID NO: 12384 - protein, 118 aa, Artificial Sequence
  Chemically Synthesized
QVQLQESGGGLVQAGGSLRLSCAASGYIFFPYYMGWYRQAPGKERELVATITNGATTNYADSVKGRFTISRDNAKNTVYLQMNSLKPEDTAVYYCAADEVYQVDHDYWGQGTQVTVSS

SEQ ID NO: 12385 - protein, 117 aa, Artificial Sequence
  Chemically Synthesized
QVQLQESGGGLVQAGGSLRLSCAASGSISAPPTMGWYRQAPGKEREFVAAINAGGTTYYADSVKGRFTISRDNAKNTVYLQMNSLKPEDTAVYYCAVYAGVYYFGYWGQGTQVTVSS

SEQ ID NO: 12386 - protein, 122 aa, Artificial Sequence
  Chemically Synthesized
QVQLQESGGGLVQAGGSLRLSCAASGYISGWTSMGWYRQAPGKERELVATISGGAITNYADSVKGRFTISRDNAKNTVYLQMNSLKPEDTAVYYCAAYYGPALYQFYLHPYWGQGTQVTVSS

SEQ ID NO: 12387 - protein, 118 aa, Artificial Sequence
  Chemically Synthesized
QVQLQESGGGLVQAGGSLRLSCAASGTIFSVGGMGWYRQAPGKERELVAGITSGSITYYADSVKGRFTISRDNAKNTVYLQMNSLKPEDTAVYYCAVIQYGRWTLVYWGQGTQVTVSS

SEQ ID NO: 12388 - protein, 117 aa, Artificial Sequence
  Chemically Synthesized
QVQLQESGGGLVQAGGSLRLSCAASGIFFPGSMGWYRQAPGKEREFVAAIAYGTTTYYADSVKGRFTISRDNAKNTVYLQMNSLKPEDTAVYYCAVQYLYPHALYYWGQGTQVTVSS

SEQ ID NO: 12389 - protein, 120 aa, Artificial Sequence
  Chemically Synthesized
QVQLQESGGGLVQAGGSLRLSCAASGTIFPSTMGWYRQAPGKEREFVATITPGVIPYADSVKGRFTISRDNAKNTVYLQMNSLKPEDTAVYYCAAVRTTAPGVSFPLGYWGQGTQVTVSS

SEQ ID NO: 12390 - protein, 116 aa, Artificial Sequence
  Chemically Synthesized
QVQLQESGGGLVQAGGSLRLSCAASGSIFRQDAMGWYRQAPGKERELVAGINTVLIPYADSVKGRFTISRDNAKNTVYLQMNSLKPEDTAVYYCAAQYGDRTVLYWGQGTQVTVSS

SEQ ID NO: 12391 - protein, 117 aa, Artificial Sequence
  Chemically Synthesized
QVQLQESGGGLVQAGGSLRLSCAASGTISGSPMGWYRQAPGKERELVAAITGGGSTNYADSVKGRFTISRDNAKNTVYLQMNSLKPEDTAVYYCAADKDHYDGFGYWGQGTQVTVSS

SEQ ID NO: 12392 - protein, 126 aa, Artificial Sequence
  Chemically Synthesized
QVQLQESGGGLVQAGGSLRLSCAASGSIFDPSWMGWYRQAPGKERELVASIDYGGITNYADSVKGRFTISRDNAKNTVYLQMNSLKPEDTAVYYCAVDYLKGSYYKDAILSLFIYWGQGTQVTVSS

SEQ ID NO: 12393 - protein, 125 aa, Artificial Sequence
  Chemically Synthesized
QVQLQESGGGLVQAGGSLRLSCAASGNISDTSFMGWYRQAPGKEREFVASIGLGASTNYADSVKGRFTISRDNAKNTVYLQMNSLKPEDTAVYYCAVATGSPGDRDSSNLSLLYWGQGTQVTVSS

SEQ ID NO: 12394 - protein, 122 aa, Artificial Sequence
  Chemically Synthesized
QVQLQESGGGLVQAGGSLRLSCAASGTIFWYPFMGWYRQAPGKERELVAGITYGTITYYADSVKGRFTISRDNAKNTVYLQMNSLKPEDTAVYYCAVGQYGYLITYPYYGYWGQGTQVTVSS

SEQ ID NO: 12395 - protein, 110 aa, Artificial Sequence
  Chemically Synthesized
QVQLQESGGGLVQAGGSLRLSCAASGYISAPYYMGWYRQAPGKEREFVASIGDGGITYYADSVKGRFTISRDNAKNTVYLQMNSLKPEDTAVYYCAASYWGQGTQVTVSS

SEQ ID NO: 12396 - protein, 122 aa, Artificial Sequence
  Chemically Synthesized
QVQLQESGGGLVQAGGSLRLSCAASGYISSAANMGWYRQAPGKEREFVASIASGTSTNYADSVKGRFTISRDNAKNTVYLQMNSLKPEDTAVYYCAVSWRDQRYDGEDHTYWGQGTQVTVSS

SEQ ID NO: 12397 - protein, 118 aa, Artificial Sequence
  Chemically Synthesized
QVQLQESGGGLVQAGGSLRLSCAASGNISGYWYMGWYRQAPGKERELVAGINEGANTNYADSVKGRFTISRDNAKNTVYLQMNSLKPEDTAVYYCAALYFYSGSHTYWGQGTQVTVSS

SEQ ID NO: 12398 - protein, 122 aa, Artificial Sequence
  Chemically Synthesized
QVQLQESGGGLVQAGGSLRLSCAASGTIFPGLVMGWYRQAPGKERELVATIGRGGTTYYADSVKGRFTISRDNAKNTVYLQMNSLKPEDTAVYYCAVPVPTYLRYFYPFNYWGQGTQVTVSS

SEQ ID NO: 12399 - protein, 121 aa, Artificial Sequence
  Chemically Synthesized
QVQLQESGGGLVQAGGSLRLSCAASGSISWADGMGWYRQAPGKEREFVAAINGGAIPYADSVKGRFTISRDNAKNTVYLQMNSLKPEDTAVYYCAAWLWDSTVIGADYGYWGQGTQVTVSS

SEQ ID NO: 12400 - protein, 126 aa, Artificial Sequence
  Chemically Synthesized
QVQLQESGGGLVQAGGSLRLSCAASGYIFDRRIMGWYRQAPGKEREFVAAINVGGITNYADSVKGRFTISRDNAKNTVYLQMNSLKPEDTAVYYCAVYYLLDATGPYPLVPTLGYWGQGTQVTVSS

SEQ ID NO: 12401 - protein, 122 aa, Artificial Sequence
  Chemically Synthesized
QVQLQESGGGLVQAGGSLRLSCAASGYISLLLGMGWYRQAPGKEREFVATIGQGAITNYADSVKGRFTISRDNAKNTVYLQMNSLKPEDTAVYYCAARVYDRNLYVFTFWYWGQGTQVTVSS

SEQ ID NO: 12402 - protein, 122 aa, Artificial Sequence
  Chemically Synthesized
QVQLQESGGGLVQAGGSLRLSCAASGSIFRDGYMGWYRQAPGKERELVAAIAVGASTNYADSVKGRFTISRDNAKNTVYLQMNSLKPEDTAVYYCAATFHYEYHVPGGHDYWGQGTQVTVSS

SEQ ID NO: 12403 - protein, 121 aa, Artificial Sequence
  Chemically Synthesized
QVQLQESGGGLVQAGGSLRLSCAASGSIFVYYSMGWYRQAPGKERELVAGIGYYADSVKGRFTISRDNAKNTVYLQMNSLKPEDTAVYYCAARYPYYHRWNGGRSRQLSYWGQGTQVTVSS

SEQ ID NO: 12404 - protein, 108 aa, Artificial Sequence
  Chemically Synthesized
QVQLQESGGGLVQAGGSLRLSCAASGSILLTTMGWYRQAPGKERELVATISYGTSTYYADSVKGRFTISRDNAKNTVYLQMNSLKPEDTAVYYCAAYWGQGTQVTVSS

SEQ ID NO: 12405 - protein, 118 aa, Artificial Sequence
  Chemically Synthesized
QVQLQESGGGLVQAGGSLRLSCAASGSIFYRTSMGWYRQAPGKEREFVAAIAIGTNTNYADSVKGRFTISRDNAKNTVYLQMNSLKPEDTAVYYCAVNTRARSLHPYWGQGTQVTVSS

SEQ ID NO: 12406 - protein, 118 aa, Artificial Sequence
  Chemically Synthesized
QVQLQESGGGLVQAGGSLRLSCAASGTISSSGYMGWYRQAPGKERELVATITYGGITYYADSVKGRFTISRDNAKNTVYLQMNSLKPEDTAVYYCAVYNQLVTFFRYWGQGTQVTVSS

SEQ ID NO: 12407 - protein, 118 aa, Artificial Sequence
  Chemically Synthesized
QVQLQESGGGLVQAGGSLRLSCAASGNISLPDGMGWYRQAPGKEREFVASISDGATTYYADSVKGRFTISRDNAKNTVYLQMNSLKPEDTAVYYCAAYDNGVGDHYYWGQGTQVTVSS

SEQ ID NO: 12408 - protein, 121 aa, Artificial Sequence
  Chemically Synthesized
QVQLQESGGGLVQAGGSLRLSCAASGSFLGTVMGWYRQAPGKERELVASIDAGGNTYYADSVKGRFTISRDNAKNTVYLQMNSLKPEDTAVYYCAAKDLNYDDAYYDYGYWGQGTQVTVSS

SEQ ID NO: 12409 - protein, 112 aa, Artificial Sequence
  Chemically Synthesized
QVQLQESGGGLVQAGGSLRLSCAASGNIFDLVAMGWYRQAPGKERELVAAIGPGGNTNYADSVKGRFTISRDNAKNTVYLQMNSLKPEDTAVYYCAVYDEYWGQGTQVTVSS

SEQ ID NO: 12410 - protein, 109 aa, Artificial Sequence
  Chemically Synthesized
QVQLQESGGGLVQAGGSLRLSCAASGNISTDLPMGWYRQAPGKERELVAAIDGGSNTNYADSVKGRFTISRDNAKNTVYLQMNSLKPEDTAVYYCAIYWGQGTQVTVSS

SEQ ID NO: 12411 - protein, 118 aa, Artificial Sequence
  Chemically Synthesized
QVQLQESGGGLVQAGGSLRLSCAASGNISQDHTMGWYRQAPGKEREFVAAIDYGGITYYADSVKGRFTISRDNAKNTVYLQMNSLKPEDTAVYYCAVQSNDRVSFDYWGQGTQVTVSS

SEQ ID NO: 12412 - protein, 121 aa, Artificial Sequence
  Chemically Synthesized
QVQLQESGGGLVQAGGSLRLSCAASGTISYYLMGWYRQAPGKERELVAGINLGGNTYYADSVKGRFTISRDNAKNTVYLQMNSLKPEDTAVYYCAVHWDVTRRRPYPYRYWGQGTQVTVSS

SEQ ID NO: 12413 - protein, 122 aa, Artificial Sequence
  Chemically Synthesized
QVQLQESGGGLVQAGGSLRLSCAASGSISPYNYMGWYRQAPGKEREFVAGIAGGTITYYADSVKGRFTISRDNAKNTVYLQMNSLKPEDTAVYYCAVVPWGDRYDYSRHAYWGQGTQVTVSS

SEQ ID NO: 12414 - protein, 121 aa, Artificial Sequence
  Chemically Synthesized
QVQLQESGGGLVQAGGSLRLSCAASGTIFDIDRMGWYRQAPGKERELVASINGGASTYYADSVKGRFTISRDNAKNTVYLQMNSLKPEDTAVYYCAADDDRTYRILAHLYWGQGTQVTVSS

SEQ ID NO: 12415 - protein, 121 aa, Artificial Sequence
  Chemically Synthesized
QVQLQESGGGLVQAGGSLRLSCAASGTILVVLMGWYRQAPGKERELVASITTGANTNYADSVKGRFTISRDNAKNTVYLQMNSLKPEDTAVYYCAAYGPNYVDGDYPLTYWGQGTQVTVSS

SEQ ID NO: 12416 - protein, 109 aa, Artificial Sequence
  Chemically Synthesized
QVQLQESGGGLVQAGGSLRLSCAASGTIFAGDMGWYRQAPGKERELVAAIARGANTNYADSVKGRFTISRDNAKNTVYLQMNSLKPEDTAVYYCAAIYWGQGTQVTVSS

SEQ ID NO: 12417 - protein, 121 aa, Artificial Sequence
  Chemically Synthesized
QVQLQESGGGLVQAGGSLRLSCAASGNIFTAAVMGWYRQAPGKEREFVAAISYGTITYYADSVKGRFTISRDNAKNTVYLQMNSLKPEDTAVYYCAASRPPVDRQSTVMYWGQGTQVTVSS

SEQ ID NO: 12418 - protein, 121 aa, Artificial Sequence
  Chemically Synthesized
QVQLQESGGGLVQAGGSLRLSCAASGSIFPLRTMGWYRQAPGKEREFVAAINSVLIPYADSVKGRFTISRDNAKNTVYLQMNSLKPEDTAVYYCAAGSWWQLPTAIVHSYWGQGTQVTVSS

SEQ ID NO: 12419 - protein, 126 aa, Artificial Sequence
  Chemically Synthesized
QVQLQESGGGLVQAGGSLRLSCAASGTIFHYPYMGWYRQAPGKERELVAAITDGSSTYYADSVKGRFTISRDNAKNTVYLQMNSLKPEDTAVYYCAVGPPTKIDTDYAGYYSHYYWGQGTQVTVSS

SEQ ID NO: 12420 - protein, 118 aa, Artificial Sequence
  Chemically Synthesized
QVQLQESGGGLVQAGGSLRLSCAASGSIFGGYGMGWYRQAPGKEREFVATINAGATTNYADSVKGRFTISRDNAKNTVYLQMNSLKPEDTAVYYCAVEPDPNWTLDYWGQGTQVTVSS

SEQ ID NO: 12421 - protein, 118 aa, Artificial Sequence
  Chemically Synthesized
QVQLQESGGGLVQAGGSLRLSCAASGNIFQRRYMGWYRQAPGKEREFVASIARGSTTNYADSVKGRFTISRDNAKNTVYLQMNSLKPEDTAVYYCAVPYYPYSWHWYWGQGTQVTVSS

SEQ ID NO: 12422 - protein, 125 aa, Artificial Sequence
  Chemically Synthesized
QVQLQESGGGLVQAGGSLRLSCAASGNISYTGMGWYRQAPGKEREFVASIDGGATTYYADSVKGRFTISRDNAKNTVYLQMNSLKPEDTAVYYCAAATGIPYHGPGGYDPPYGYWGQGTQVTVSS

SEQ ID NO: 12423 - protein, 117 aa, Artificial Sequence
  Chemically Synthesized
QVQLQESGGGLVQAGGSLRLSCAASGSIFDYIGMGWYRQAPGKEREFVATIAVGTNTYYADSVKGRFTISRDNAKNTVYLQMNSLKPEDTAVYYCAAAARNSDYDYWGQGTQVTVSS

SEQ ID NO: 12424 - protein, 118 aa, Artificial Sequence
  Chemically Synthesized
QVQLQESGGGLVQAGGSLRLSCAASGSISDPYGMGWYRQAPGKEREFVAAINGGGITYYADSVKGRFTISRDNAKNTVYLQMNSLKPEDTAVYYCAARYWYTQPHVYWGQGTQVTVSS

SEQ ID NO: 12425 - protein, 118 aa, Artificial Sequence
  Chemically Synthesized
QVQLQESGGGLVQAGGSLRLSCAASGSIFPGGAMGWYRQAPGKERELVATISPGASTNYADSVKGRFTISRDNAKNTVYLQMNSLKPEDTAVYYCAARKVGGNGHYYWGQGTQVTVSS

SEQ ID NO: 12426 - protein, 126 aa, Artificial Sequence
  Chemically Synthesized
QVQLQESGGGLVQAGGSLRLSCAASGYISDSSAMGWYRQAPGKERELVASIGLGATTNYADSVKGRFTISRDNAKNTVYLQMNSLKPEDTAVYYCAVEHYYSNYWLYLANRRHTYWGQGTQVTVSS

SEQ ID NO: 12427 - protein, 118 aa, Artificial Sequence
  Chemically Synthesized
QVQLQESGGGLVQAGGSLRLSCAASGNIFADQFMGWYRQAPGKEREFVAAINYGAITYYADSVKGRFTISRDNAKNTVYLQMNSLKPEDTAVYYCAVPRVRPTYFYYWGQGTQVTVSS

SEQ ID NO: 12428 - protein, 125 aa, Artificial Sequence
  Chemically Synthesized
QVQLQESGGGLVQAGGSLRLSCAASGSIFDSTMGWYRQAPGKERELVASIGRGASTNYADSVKGRFTISRDNAKNTVYLQMNSLKPEDTAVYYCAVIGAYVDWRTRGGHYAFDYWGQGTQVTVSS

SEQ ID NO: 12429 - protein, 118 aa, Artificial Sequence
  Chemically Synthesized
QVQLQESGGGLVQAGGSLRLSCAASGTISRPSAMGWYRQAPGKERELVATITSGTSTNYADSVKGRFTISRDNAKNTVYLQMNSLKPEDTAVYYCAALHHYGWTHYYWGQGTQVTVSS

SEQ ID NO: 12430 - protein, 118 aa, Artificial Sequence
  Chemically Synthesized
QVQLQESGGGLVQAGGSLRLSCAASGTIFTYLVMGWYRQAPGKERELVAGIGYGTITNYADSVKGRFTISRDNAKNTVYLQMNSLKPEDTAVYYCAARTAYRYHLGYWGQGTQVTVSS

SEQ ID NO: 12431 - protein, 117 aa, Artificial Sequence
  Chemically Synthesized
QVQLQESGGGLVQAGGSLRLSCAASGSISGKSMGWYRQAPGKERELVAAISSGATTYYADSVKGRFTISRDNAKNTVYLQMNSLKPEDTAVYYCAVDRWTYYSLWYWGQGTQVTVSS

SEQ ID NO: 12432 - protein, 115 aa, Artificial Sequence
  Chemically Synthesized
QVQLQESGGGLVQAGGSLRLSCAASGNIFARGRMGWYRQAPGKERELVAGIDSVVVPYADSVKGRFTISRDNAKNTVYLQMNSLKPEDTAVYYCASYYYWPFRYWGQGTQVTVSS

SEQ ID NO: 12433 - protein, 121 aa, Artificial Sequence
  Chemically Synthesized
QVQLQESGGGLVQAGGSLRLSCAASGTISDLEGMGWYRQAPGKEREFVATIDVGATTNYADSVKGRFTISRDNAKNTVYLQMNSLKPEDTAVYYCAATLYPGVSVLTTLYWGQGTQVTVSS

SEQ ID NO: 12434 - protein, 118 aa, Artificial Sequence
  Chemically Synthesized
QVQLQESGGGLVQAGGSLRLSCAASGTIFYAAYMGWYRQAPGKEREFVAAITDGAITNYADSVKGRFTISRDNAKNTVYLQMNSLKPEDTAVYYCAVTLYRGYWHGYWGQGTQVTVSS

SEQ ID NO: 12435 - protein, 121 aa, Artificial Sequence
  Chemically Synthesized
QVQLQESGGGLVQAGGSLRLSCAASGNISYYVDMGWYRQAPGKEREFVASITTGTSTYYADSVKGRFTISRDNAKNTVYLQMNSLKPEDTAVYYCAAGLAARWRSRGLRYWGQGTQVTVSS

SEQ ID NO: 12436 - protein, 122 aa, Artificial Sequence
  Chemically Synthesized
QVQLQESGGGLVQAGGSLRLSCAASGTISSLRYMGWYRQAPGKERELVAAISAGTITNYADSVKGRFTISRDNAKNTVYLQMNSLKPEDTAVYYCAAQYGDYVGYQIGHDYWGQGTQVTVSS

SEQ ID NO: 12437 - protein, 118 aa, Artificial Sequence
  Chemically Synthesized
QVQLQESGGGLVQAGGSLRLSCAASGYISRPAYMGWYRQAPGKEREFVAGIAEGTITNYADSVKGRFTISRDNAKNTVYLQMNSLKPEDTAVYYCAAVADIPWSYPYWGQGTQVTVSS

SEQ ID NO: 12438 - protein, 118 aa, Artificial Sequence
  Chemically Synthesized
QVQLQESGGGLVQAGGSLRLSCAASGNIFGSVYMGWYRQAPGKERELVAGISRGTTTNYADSVKGRFTISRDNAKNTVYLQMNSLKPEDTAVYYCAVYLRPSDNFGYWGQGTQVTVSS

SEQ ID NO: 12439 - protein, 126 aa, Artificial Sequence
  Chemically Synthesized
QVQLQESGGGLVQAGGSLRLSCAASGNISRPYVMGWYRQAPGKEREFVAGITYGTNTNYADSVKGRFTISRDNAKNTVYLQMNSLKPEDTAVYYCAVHQSYDNDGFQWGYWWHYYWGQGTQVTVSS

SEQ ID NO: 12440 - protein, 118 aa, Artificial Sequence
  Chemically Synthesized
QVQLQESGGGLVQAGGSLRLSCAASGSISYVNVMGWYRQAPGKERELVATIAAGGITNYADSVKGRFTISRDNAKNTVYLQMNSLKPEDTAVYYCAANNGTIVDHYYWGQGTQVTVSS

SEQ ID NO: 12441 - protein, 118 aa, Artificial Sequence
  Chemically Synthesized
QVQLQESGGGLVQAGGSLRLSCAASGSISRYAAMGWYRQAPGKEREFVATIGGGSSTYYADSVKGRFTISRDNAKNTVYLQMNSLKPEDTAVYYCAAPYDRSANLYYWGQGTQVTVSS

SEQ ID NO: 12442 - protein, 116 aa, Artificial Sequence
  Chemically Synthesized
QVQLQESGGGLVQAGGSLRLSCAASGTIFTDGVMGWYRQAPGKERELVASITYGGITNYADSVKGRFTISRDNAKNTVYLQMNSLKPEDTAVYYCAVPDSLLTFYWGQGTQVTVSS

SEQ ID NO: 12443 - protein, 118 aa, Artificial Sequence
  Chemically Synthesized
QVQLQESGGGLVQAGGSLRLSCAASGNISRVSQMGWYRQAPGKEREFVAGIGRGGSTYYADSVKGRFTISRDNAKNTVYLQMNSLKPEDTAVYYCAAYPWPWEGHPYWGQGTQVTVSS

SEQ ID NO: 12444 - protein, 115 aa, Artificial Sequence
  Chemically Synthesized
QVQLQESGGGLVQAGGSLRLSCAASGNISGFAYMGWYRQAPGKERELVATIDGGGNTNYADSVKGRFTISRDNAKNTVYLQMNSLKPEDTAVYYCAVRLLKVIYWGQGTQVTVSS

SEQ ID NO: 12445 - protein, 121 aa, Artificial Sequence
  Chemically Synthesized
QVQLQESGGGLVQAGGSLRLSCAASGNISRPWDMGWYRQAPGKEREFVASIDDGSSTNYADSVKGRFTISRDNAKNTVYLQMNSLKPEDTAVYYCAVDSVNRTVFRRFMYWGQGTQVTVSS

SEQ ID NO: 12446 - protein, 117 aa, Artificial Sequence
  Chemically Synthesized
QVQLQESGGGLVQAGGSLRLSCAASGTISPVGTMGWYRQAPGKEREFVASITYGSTTNYADSVKGRFTISRDNAKNTVYLQMNSLKPEDTAVYYCAADGYRDPHYYWGQGTQVTVSS

SEQ ID NO: 12447 - protein, 126 aa, Artificial Sequence
  Chemically Synthesized
QVQLQESGGGLVQAGGSLRLSCAASGTIFAPSQMGWYRQAPGKERELVASIGFGGSTNYADSVKGRFTISRDNAKNTVYLQMNSLKPEDTAVYYCAAVYYIPLYGDASLPYFLVYWGQGTQVTVSS

SEQ ID NO: 12448 - protein, 126 aa, Artificial Sequence
  Chemically Synthesized
QVQLQESGGGLVQAGGSLRLSCAASGNIFPGYYMGWYRQAPGKERELVAAIAPGTITNYADSVKGRFTISRDNAKNTVYLQMNSLKPEDTAVYYCAVAGGTYLRLPNTYNYDHAYWGQGTQVTVSS

SEQ ID NO: 12449 - protein, 118 aa, Artificial Sequence
  Chemically Synthesized
QVQLQESGGGLVQAGGSLRLSCAASGTIFYFRPMGWYRQAPGKEREFVAAINRGASTNYADSVKGRFTISRDNAKNTVYLQMNSLKPEDTAVYYCAAYGYYDGRYVYWGQGTQVTVSS

SEQ ID NO: 12450 - protein, 117 aa, Artificial Sequence
  Chemically Synthesized
QVQLQESGGGLVQAGGSLRLSCAASGNISIYYSMGWYRQAPGKERELVATISYGANTYYADSVKGRFTISRDNAKNTVYLQMNSLKPEDTAVYYCAVAGRWLLHAYWGQGTQVTVSS

SEQ ID NO: 12451 - protein, 115 aa, Artificial Sequence
  Chemically Synthesized
QVQLQESGGGLVQAGGSLRLSCAASGTIFVFAIMGWYRQAPGKERELVAGIAPGGITYYADSVKGRFTISRDNAKNTVYLQMNSLKPEDTAVYYCAVWYDAHKYWGQGTQVTVSS

SEQ ID NO: 12452 - protein, 118 aa, Artificial Sequence
  Chemically Synthesized
QVQLQESGGGLVQAGGSLRLSCAASGTISPPRYMGWYRQAPGKERELVAGIAYGTSTNYADSVKGRFTISRDNAKNTVYLQMNSLKPEDTAVYYCAAYYDIPYGLGYWGQGTQVTVSS

SEQ ID NO: 12453 - protein, 121 aa, Artificial Sequence
  Chemically Synthesized
QVQLQESGGGLVQAGGSLRLSCAASGYISAYLGMGWYRQAPGKERELVLVLVVVVLPYADSVKGRFTISRDNAKNTVYLQMNSLKPEDTAVYYCAARNPDYKSDAGYFGYWGQGTQVTVSS

SEQ ID NO: 12454 - protein, 117 aa, Artificial Sequence
  Chemically Synthesized
QVQLQESGGGLVQAGGSLRLSCAASGNISFGYYMGWYRQAPGKEREFVAAISIGTSTYYADSVKGRFTISRDNAKNTVYLQMNSLKPEDTAVYYCAARTGRPTDLYWGQGTQVTVSS

SEQ ID NO: 12455 - protein, 115 aa, Artificial Sequence
  Chemically Synthesized
QVQLQESGGGLVQAGGSLRLSCAASGTISSYLWMGWYRQAPGKEREFVASIDDGGNTYYADSVKGRFTISRDNAKNTVYLQMNSLKPEDTAVYYCAVVFSVRLYWGQGTQVTVSS

SEQ ID NO: 12456 - protein, 121 aa, Artificial Sequence
  Chemically Synthesized
QVQLQESGGGLVQAGGSLRLSCAASGTIFPRRKMGWYRQAPGKEREFVAGIDDGAITYYADSVKGRFTISRDNAKNTVYLQMNSLKPEDTAVYYCAAYPRGWRGSGRHRYWGQGTQVTVSS

SEQ ID NO: 12457 - protein, 122 aa, Artificial Sequence
  Chemically Synthesized
QVQLQESGGGLVQAGGSLRLSCAASGTISSAYVMGWYRQAPGKERELVAGITSGGSTNYADSVKGRFTISRDNAKNTVYLQMNSLKPEDTAVYYCAVGSPYYQLYRATYTYWGQGTQVTVSS

SEQ ID NO: 12458 - protein, 126 aa, Artificial Sequence
  Chemically Synthesized
QVQLQESGGGLVQAGGSLRLSCAASGTIFYDTSMGWYRQAPGKERELVATIASTVVLPYADSVKGRFTISRDNAKNTVYLQMNSLKPEDTAVYYCAALTELHYYYLFLVGDYYAYWGQGTQVTVSS

SEQ ID NO: 12459 - protein, 113 aa, Artificial Sequence
  Chemically Synthesized
QVQLQESGGGLVQAGGSLRLSCAASGSISAQDYMGWYRQAPGKERELYQYADSVKGRFTISRDNAKNTVYLQMNSLKPEDTAVYYCAVGGYPSDGRTDEHDYWGQGTQVTVSS

SEQ ID NO: 12460 - protein, 118 aa, Artificial Sequence
  Chemically Synthesized
QVQLQESGGGLVQAGGSLRLSCAASGTISGAPSMGWYRQAPGKEREFVAAISDGANTNYADSVKGRFTISRDNAKNTVYLQMNSLKPEDTAVYYCAVSRDSEDNHYYWGQGTQVTVSS

SEQ ID NO: 12461 - protein, 125 aa, Artificial Sequence
  Chemically Synthesized
QVQLQESGGGLVQAGGSLRLSCAASGYISRDRDMGWYRQAPGKERELVAGITGGTNTYYADSVKGRFTISRDNAKNTVYLQMNSLKPEDTAVYYCAAFDYRYVPEVTRSVLTFYWGQGTQVTVSS

SEQ ID NO: 12462 - protein, 117 aa, Artificial Sequence
  Chemically Synthesized
QVQLQESGGGLVQAGGSLRLSCAASGSISWIRDMGWYRQAPGKEREFVAGINYVVVPYADSVKGRFTISRDNAKNTVYLQMNSLKPEDTAVYYCAVTAGTAYGFSYWGQGTQVTVSS

SEQ ID NO: 12463 - protein, 116 aa, Artificial Sequence
  Chemically Synthesized
QVQLQESGGGLVQAGGSLRLSCAASGYIFYATMGWYRQAPGKEREFVAAIGRGGNTNYADSVKGRFTISRDNAKNTVYLQMNSLKPEDTAVYYCAVDTSWVSLFYWGQGTQVTVSS

SEQ ID NO: 12464 - protein, 122 aa, Artificial Sequence
  Chemically Synthesized
QVQLQESGGGLVQAGGSLRLSCAASGSIFWSFGMGWYRQAPGKEREFVASISAGGTTYYADSVKGRFTISRDNAKNTVYLQMNSLKPEDTAVYYCAAYRRGEPYTYDTLGYWGQGTQVTVSS

SEQ ID NO: 12465 - protein, 118 aa, Artificial Sequence
  Chemically Synthesized
QVQLQESGGGLVQAGGSLRLSCAASGNISSWINMGWYRQAPGKEREFVAAISIGTNTNYADSVKGRFTISRDNAKNTVYLQMNSLKPEDTAVYYCAAHKAPWLNLYYWGQGTQVTVSS

SEQ ID NO: 12466 - protein, 113 aa, Artificial Sequence
  Chemically Synthesized
QVQLQESGGGLVQAGGSLRLSCAASGSISSLNIMGWYRQAPGKERELVATIADGTITYYADSVKGRFTISRDNAKNTVYLQMNSLKPEDTAVYYCAVGHFGYWGQGTQVTVSS

SEQ ID NO: 12467 - protein, 116 aa, Artificial Sequence
  Chemically Synthesized
QVQLQESGGGLVQAGGSLRLSCAASGSIFRPFTMGWYRQAPGKEREFVAAINLGATTNYADSVKGRFTISRDNAKNTVYLQMNSLKPEDTAVYYCAAWPLYWSWYWGQGTQVTVSS

SEQ ID NO: 12468 - protein, 125 aa, Artificial Sequence
  Chemically Synthesized
QVQLQESGGGLVQAGGSLRLSCAASGTISGPYPMGWYRQAPGKEREFVAAIATGSTTYYADSVKGRFTISRDNAKNTVYLQMNSLKPEDTAVYYCAVVLRYTAPYQYWRYRYAYWGQGTQVTVSS

SEQ ID NO: 12469 - protein, 127 aa, Artificial Sequence
  Chemically Synthesized
QVQLQESGGGLVQAGGSLRLSCAASGNISSSYTGMGWYRQAPGKERELVAAINVGGITYYADSVKGRFTISRDNAKNTVYLQMNSLKPEDTAVYYCAVGSDYPFIGAQYYYQTLGYWGQGTQVTVSS

SEQ ID NO: 12470 - protein, 118 aa, Artificial Sequence
  Chemically Synthesized
QVQLQESGGGLVQAGGSLRLSCAASGTISSYDGMGWYRQAPGKEREFVATINAGGSTNYADSVKGRFTISRDNAKNTVYLQMNSLKPEDTAVYYCAADDYQSDFYGYWGQGTQVTVSS

SEQ ID NO: 12471 - protein, 117 aa, Artificial Sequence
  Chemically Synthesized
QVQLQESGGGLVQAGGSLRLSCAASGSISARRYMGWYRQAPGKERELVATITYGGTTNYADSVKGRFTISRDNAKNTVYLQMNSLKPEDTAVYYCAVYTLFTSVMYWGQGTQVTVSS

SEQ ID NO: 12472 - protein, 117 aa, Artificial Sequence
  Chemically Synthesized
QVQLQESGGGLVQAGGSLRLSCAASGNISPGWGMGWYRQAPGKERELVAAIGHGGSTNYADSVKGRFTISRDNAKNTVYLQMNSLKPEDTAVYYCAAWGESKFSMYWGQGTQVTVSS

SEQ ID NO: 12473 - protein, 111 aa, Artificial Sequence
  Chemically Synthesized
QVQLQESGGGLVQAGGSLRLSCAASGSIFQAAYMGWYRQAPGKERELVAAIDGGSNTYYADSVKGRFTISRDNAKNTVYLQMNSLKPEDTAVYYCAFLYYWGQGTQVTVSS

SEQ ID NO: 12474 - protein, 118 aa, Artificial Sequence
  Chemically Synthesized
QVQLQESGGGLVQAGGSLRLSCAASGTISWVFGMGWYRQAPGKEREFVATIAHGWYYQYADSVKGRFTISRDNAKNTVYLQMNSLKPEDTAVYYCAVYAYGYAWLSYWGQGTQVTVSS

SEQ ID NO: 12475 - protein, 122 aa, Artificial Sequence
  Chemically Synthesized
QVQLQESGGGLVQAGGSLRLSCAASGTIFAYYIMGWYRQAPGKEREFVAAITAGGTTNYADSVKGRFTISRDNAKNTVYLQMNSLKPEDTAVYYCAAPWALDYATQYGHSYWGQGTQVTVSS

SEQ ID NO: 12476 - protein, 118 aa, Artificial Sequence
  Chemically Synthesized
QVQLQESGGGLVQAGGSLRLSCAASGTISFLVPMGWYRQAPGKEREFVASISYGGNTYYADSVKGRFTISRDNAKNTVYLQMNSLKPEDTAVYYCAATFGIYRKHGYWGQGTQVTVSS

SEQ ID NO: 12477 - protein, 122 aa, Artificial Sequence
  Chemically Synthesized
QVQLQESGGGLVQAGGSLRLSCAASGTIFSFYDMGWYRQAPGKEREFVAGIDEGGSTYYADSVKGRFTISRDNAKNTVYLQMNSLKPEDTAVYYCAVGSYWVTTTWGYFVYWGQGTQVTVSS

SEQ ID NO: 12478 - protein, 120 aa, Artificial Sequence
  Chemically Synthesized
QVQLQESGGGLVQAGGSLRLSCAASGYIFAATMGWYRQAPGKERELVASIITVVIPYADSVKGRFTISRDNAKNTVYLQMNSLKPEDTAVYYCAVEGYYYVGGTADHDYWGQGTQVTVSS

SEQ ID NO: 12479 - protein, 118 aa, Artificial Sequence
  Chemically Synthesized
QVQLQESGGGLVQAGGSLRLSCAASGNISYREDMGWYRQAPGKEREFVAGISTGATTNYADSVKGRFTISRDNAKNTVYLQMNSLKPEDTAVYYCAVQIWWDPTFGYWGQGTQVTVSS

SEQ ID NO: 12480 - protein, 122 aa, Artificial Sequence
  Chemically Synthesized
QVQLQESGGGLVQAGGSLRLSCAASGNIFRQSEMGWYRQAPGKEREFVASIAYGTTTYYADSVKGRFTISRDNAKNTVYLQMNSLKPEDTAVYYCAADEADYRGRYPVYAYWGQGTQVTVSS

SEQ ID NO: 12481 - protein, 118 aa, Artificial Sequence
  Chemically Synthesized
QVQLQESGGGLVQAGGSLRLSCAASGTIFGVQNMGWYRQAPGKEREFVAAIDTGTTTYYADSVKGRFTISRDNAKNTVYLQMNSLKPEDTAVYYCAADALTIPYLGYWGQGTQVTVSS

SEQ ID NO: 12482 - protein, 118 aa, Artificial Sequence
  Chemically Synthesized
QVQLQESGGGLVQAGGSLRLSCAASGTISSTPIMGWYRQAPGKERELVAGIGYGASTNYADSVKGRFTISRDNAKNTVYLQMNSLKPEDTAVYYCAVERHAGHVHGYWGQGTQVTVSS

SEQ ID NO: 12483 - protein, 118 aa, Artificial Sequence
  Chemically Synthesized
QVQLQESGGGLVQAGGSLRLSCAASGNIFTAYIMGWYRQAPGKEREFVAGIADGGNTNYADSVKGRFTISRDNAKNTVYLQMNSLKPEDTAVYYCAAGTQGIGTYVYWGQGTQVTVSS

SEQ ID NO: 12484 - protein, 118 aa, Artificial Sequence
  Chemically Synthesized
QVQLQESGGGLVQAGGSLRLSCAASGSISSRKRMGWYRQAPGKEREFVAAIGRGGNTYYADSVKGRFTISRDNAKNTVYLQMNSLKPEDTAVYYCAAYTYPYFVHPYWGQGTQVTVSS

SEQ ID NO: 12485 - protein, 122 aa, Artificial Sequence
  Chemically Synthesized
QVQLQESGGGLVQAGGSLRLSCAASGNIFDDFPMGWYRQAPGKERELVATITGGSNTNYADSVKGRFTISRDNAKNTVYLQMNSLKPEDTAVYYCAADVDYNYNHGGYHYYWGQGTQVTVSS

SEQ ID NO: 12486 - protein, 121 aa, Artificial Sequence
  Chemically Synthesized
QVQLQESGGGLVQAGGSLRLSCAASGYIFYAYDMGWYRQAPGKEREFVAVLMVVVLPYADSVKGRFTISRDNAKNTVYLQMNSLKPEDTAVYYCAVGGYAYPQYAHYFGYWGQGTQVTVSS

SEQ ID NO: 12487 - protein, 118 aa, Artificial Sequence
  Chemically Synthesized
QVQLQESGGGLVQAGGSLRLSCAASGTIFYTRRMGWYRQAPGKERELVATIGAGANTYYADSVKGRFTISRDNAKNTVYLQMNSLKPEDTAVYYCAASYPRTWRHSYWGQGTQVTVSS

SEQ ID NO: 12488 - protein, 118 aa, Artificial Sequence
  Chemically Synthesized
QVQLQESGGGLVQAGGSLRLSCAASGSIFQTNTMGWYRQAPGKEREFVAGIDLGGNTNYADSVKGRFTISRDNAKNTVYLQMNSLKPEDTAVYYCAALVGGVYRFGYWGQGTQVTVSS

SEQ ID NO: 12489 - protein, 118 aa, Artificial Sequence
  Chemically Synthesized
QVQLQESGGGLVQAGGSLRLSCAASGSISEHDFMGWYRQAPGKERELVAAISYGGITYYADSVKGRFTISRDNAKNTVYLQMNSLKPEDTAVYYCAALPDDYGPHAYWGQGTQVTVSS

SEQ ID NO: 12490 - protein, 122 aa, Artificial Sequence
  Chemically Synthesized
QVQLQESGGGLVQAGGSLRLSCAASGSIFGDPYMGWYRQAPGKERELVATIDIGSSTNYADSVKGRFTISRDNAKNTVYLQMNSLKPEDTAVYYCAVGYLGSFTGDDGFGYWGQGTQVTVSS

SEQ ID NO: 12491 - protein, 118 aa, Artificial Sequence
  Chemically Synthesized
QVQLQESGGGLVQAGGSLRLSCAASGTISGYYFMGWYRQAPGKEREFVATIGAGTTTNYADSVKGRFTISRDNAKNTVYLQMNSLKPEDTAVYYCAVDHGPPRWFEYWGQGTQVTVSS

SEQ ID NO: 12492 - protein, 126 aa, Artificial Sequence
  Chemically Synthesized
QVQLQESGGGLVQAGGSLRLSCAASGYISPDIYMGWYRQAPGKERELVASIDLGTTTNYADSVKGRFTISRDNAKNTVYLQMNSLKPEDTAVYYCAAYETLVQHEYNWDRGRYDYWGQGTQVTVSS

SEQ ID NO: 12493 - protein, 125 aa, Artificial Sequence
  Chemically Synthesized
QVQLQESGGGLVQAGGSLRLSCAASGYIFPYFRMGWYRQAPGKEREFVATITDGGTTYYADSVKGRFTISRDNAKNTVYLQMNSLKPEDTAVYYCAAPSWADWIQPYIGVAHRYWGQGTQVTVSS

SEQ ID NO: 12494 - protein, 118 aa, Artificial Sequence
  Chemically Synthesized
QVQLQESGGGLVQAGGSLRLSCAASGTIFYQTAMGWYRQAPGKERELVAGIDDGSNTYYADSVKGRFTISRDNAKNTVYLQMNSLKPEDTAVYYCAVYGHGYVVFYYWGQGTQVTVSS

SEQ ID NO: 12495 - protein, 118 aa, Artificial Sequence
  Chemically Synthesized
QVQLQESGGGLVQAGGSLRLSCAASGTISPYLYMGWYRQAPGKERELVAAIDHGGTTYYADSVKGRFTISRDNAKNTVYLQMNSLKPEDTAVYYCAVSGYDTYYLPYWGQGTQVTVSS

SEQ ID NO: 12496 - protein, 121 aa, Artificial Sequence
  Chemically Synthesized
QVQLQESGGGLVQAGGSLRLSCAASGSISTDGMGWYRQAPGKERELVAGIGYGGNTYYADSVKGRFTISRDNAKNTVYLQMNSLKPEDTAVYYCAVYERRYDHTGRKHRYWGQGTQVTVSS

SEQ ID NO: 12497 - protein, 118 aa, Artificial Sequence
  Chemically Synthesized
QVQLQESGGGLVQAGGSLRLSCAASGYISPSYVMGWYRQAPGKERELVATIAYGTNTYYADSVKGRFTISRDNAKNTVYLQMNSLKPEDTAVYYCAAYPTAYERFAYWGQGTQVTVSS

SEQ ID NO: 12498 - protein, 117 aa, Artificial Sequence
  Chemically Synthesized
QVQLQESGGGLVQAGGSLRLSCAASGNISTYTMGWYRQAPGKERELVATIGQGANTNYADSVKGRFTISRDNAKNTVYLQMNSLKPEDTAVYYCAVDLRWLRAHRYWGQGTQVTVSS

SEQ ID NO: 12499 - protein, 118 aa, Artificial Sequence
  Chemically Synthesized
QVQLQESGGGLVQAGGSLRLSCAASGYISALNYMGWYRQAPGKERELVAAINIGANTNYADSVKGRFTISRDNAKNTVYLQMNSLKPEDTAVYYCAVSGYDGQDFYYWGQGTQVTVSS

SEQ ID NO: 12500 - protein, 125 aa, Artificial Sequence
  Chemically Synthesized
QVQLQESGGGLVQAGGSLRLSCAASGSISTRQAMGWYRQAPGKEREFVAGIGYGTSTYYADSVKGRFTISRDNAKNTVYLQMNSLKPEDTAVYYCAAREPDPQAWYGYTFDSIYWGQGTQVTVSS

SEQ ID NO: 12501 - protein, 117 aa, Artificial Sequence
  Chemically Synthesized
QVQLQESGGGLVQAGGSLRLSCAASGSIFPTLDMGWYRQAPGKERELVATIGRGAITYYADSVKGRFTISRDNAKNTVYLQMNSLKPEDTAVYYCAVSTRLTLLLYWGQGTQVTVSS

SEQ ID NO: 12502 - protein, 118 aa, Artificial Sequence
  Chemically Synthesized
QVQLQESGGGLVQAGGSLRLSCAASGSIFVRFAMGWYRQAPGKERELVAGIGGGSSTNYADSVKGRFTISRDNAKNTVYLQMNSLKPEDTAVYYCAVYIRDSYPLPYWGQGTQVTVSS

SEQ ID NO: 12503 - protein, 118 aa, Artificial Sequence
  Chemically Synthesized
QVQLQESGGGLVQAGGSLRLSCAASGSISFQAYMGWYRQAPGKERELVASINLGANTNYADSVKGRFTISRDNAKNTVYLQMNSLKPEDTAVYYCAAYHSARWGLHYWGQGTQVTVSS

SEQ ID NO: 12504 - protein, 117 aa, Artificial Sequence
  Chemically Synthesized
QVQLQESGGGLVQAGGSLRLSCAASGTISLHDMGWYRQAPGKERELVAGITYGAITNYADSVKGRFTISRDNAKNTVYLQMNSLKPEDTAVYYCAVLYFILLFLWYWGQGTQVTVSS

SEQ ID NO: 12505 - protein, 122 aa, Artificial Sequence
  Chemically Synthesized
QVQLQESGGGLVQAGGSLRLSCAASGTISYIGFMGWYRQAPGKERELVAGIDYGATTNYADSVKGRFTISRDNAKNTVYLQMNSLKPEDTAVYYCAAHPESGVRDYFDLLYWGQGTQVTVSS

SEQ ID NO: 12506 - protein, 118 aa, Artificial Sequence
  Chemically Synthesized
QVQLQESGGGLVQAGGSLRLSCAASGTISTRGVMGWYRQAPGKERELVATIDAGATTNYADSVKGRFTISRDNAKNTVYLQMNSLKPEDTAVYYCAVASVDPPLYLYWGQGTQVTVSS

SEQ ID NO: 12507 - protein, 118 aa, Artificial Sequence
  Chemically Synthesized
QVQLQESGGGLVQAGGSLRLSCAASGLYFLEIYMGWYRQAPGKEREFVAGISDGGITYYADSVKGRFTISRDNAKNTVYLQMNSLKPEDTAVYYCAVSRATSRYFSYWGQGTQVTVSS

SEQ ID NO: 12508 - protein, 118 aa, Artificial Sequence
  Chemically Synthesized
QVQLQESGGGLVQAGGSLRLSCAASGYISYHDTMGWYRQAPGKEREFVATIDLGSNTQYADSVKGRFTISRDNAKNTVYLQMNSLKPEDTAVYYCAVGYYSPLTLTYWGQGTQVTVSS

SEQ ID NO: 12509 - protein, 126 aa, Artificial Sequence
  Chemically Synthesized
QVQLQESGGGLVQAGGSLRLSCAASGNISNADSMGWYRQAPGKERELVAAISGGTNTYYADSVKGRFTISRDNAKNTVYLQMNSLKPEDTAVYYCAADVYKVLLSINQGDSIYDYWGQGTQVTVSS

SEQ ID NO: 12510 - protein, 118 aa, Artificial Sequence
  Chemically Synthesized
QVQLQESGGGLVQAGGSLRLSCAASGNIFEDDYMGWYRQAPGKERELVAGISDGSTTYYADSVKGRFTISRDNAKNTVYLQMNSLKPEDTAVYYCAVGVNNSSGLNYWGQGTQVTVSS

SEQ ID NO: 12511 - protein, 118 aa, Artificial Sequence
  Chemically Synthesized
QVQLQESGGGLVQAGGSLRLSCAASGSISHYPWMGWYRQAPGKEREFVAAIGLGSITNYADSVKGRFTISRDNAKNTVYLQMNSLKPEDTAVYYCAVGDFTDTVLGYWGQGTQVTVSS

SEQ ID NO: 12512 - protein, 121 aa, Artificial Sequence
  Chemically Synthesized
QVQLQESGGGLVQAGGSLRLSCAASGTISPSEGMGWYRQAPGKERELVAGIARGSTTYADSVKGRFTISRDNAKNTVYLQMNSLKPEDTAVYYCAVDYGAPGQVYLFHTYWGQGTQVTVSS

SEQ ID NO: 12513 - protein, 118 aa, Artificial Sequence
  Chemically Synthesized
QVQLQESGGGLVQAGGSLRLSCAASGTIFQGLKMGWYRQAPGKERELVASITDGATTYYADSVKGRFTISRDNAKNTVYLQMNSLKPEDTAVYYCAVRDIVNADHRYWGQGTQVTVSS

SEQ ID NO: 12514 - protein, 117 aa, Artificial Sequence
  Chemically Synthesized
QVQLQESGGGLVQAGGSLRLSCAASGSISRALGMGWYRQAPGKERELLPVLVTVVLPYADSVKGRFTISRDNAKNTVYLQMNSLKPEDTAVYYCAAYPSNQSPLDYWGQGTQVTVSS

SEQ ID NO: 12515 - protein, 118 aa, Artificial Sequence
  Chemically Synthesized
QVQLQESGGGLVQAGGSLRLSCAASGSISPPYVMGWYRQAPGKEREFVASIAYGSITYYADSVKGRFTISRDNAKNTVYLQMNSLKPEDTAVYYCAAPRIWYVPYTYWGQGTQVTVSS

SEQ ID NO: 12516 - protein, 122 aa, Artificial Sequence
  Chemically Synthesized
QVQLQESGGGLVQAGGSLRLSCAASGYISLPYYMGWYRQAPGKEREFVAGIAVGSNTNYADSVKGRFTISRDNAKNTVYLQMNSLKPEDTAVYYCAAALHTYLYAWGYHRYWGQGTQVTVSS

SEQ ID NO: 12517 - protein, 118 aa, Artificial Sequence
  Chemically Synthesized
QVQLQESGGGLVQAGGSLRLSCAASGYISYAEFMGWYRQAPGKERELVATIANGSTTNYADSVKGRFTISRDNAKNTVYLQMNSLKPEDTAVYYCAVPSGVSTVFYYWGQGTQVTVSS

SEQ ID NO: 12518 - protein, 126 aa, Artificial Sequence
  Chemically Synthesized
QVQLQESGGGLVQAGGSLRLSCAASGNIFYIVSMGWYRQAPGKERELVATITYGSNTNYADSVKGRFTISRDNAKNTVYLQMNSLKPEDTAVYYCAVQPYIYTYDPAGRLSYYEYWGQGTQVTVSS

SEQ ID NO: 12519 - protein, 117 aa, Artificial Sequence
  Chemically Synthesized
QVQLQESGGGLVQAGGSLRLSCAASGYIFRSLMGWYRQAPGKERELVASISRGSTTYYADSVKGRFTISRDNAKNTVYLQMNSLKPEDTAVYYCAVYWRYYTVHSYWGQGTQVTVSS

SEQ ID NO: 12520 - protein, 122 aa, Artificial Sequence
  Chemically Synthesized
QVQLQESGGGLVQAGGSLRLSCAASGSIFNSYDMGWYRQAPGKERELVAGINDGASTYYADSVKGRFTISRDNAKNTVYLQMNSLKPEDTAVYYCAVPYYQDIVWEFNHQYWGQGTQVTVSS

SEQ ID NO: 12521 - protein, 122 aa, Artificial Sequence
  Chemically Synthesized
QVQLQESGGGLVQAGGSLRLSCAASGTIFPPANMGWYRQAPGKEREFVAGIADGGSTYYADSVKGRFTISRDNAKNTVYLQMNSLKPEDTAVYYCAAAAPGGVYRHDGFYYWGQGTQVTVSS

SEQ ID NO: 12522 - protein, 118 aa, Artificial Sequence
  Chemically Synthesized
QVQLQESGGGLVQAGGSLRLSCAASGSIFGRLYMGWYRQAPGKERELVAAISYGGSTNYADSVKGRFTISRDNAKNTVYLQMNSLKPEDTAVYYCAAIKTDGYVHGYWGQGTQVTVSS

SEQ ID NO: 12523 - protein, 118 aa, Artificial Sequence
  Chemically Synthesized
QVQLQESGGGLVQAGGSLRLSCAASGSIFAHPQMGWYRQAPGKEREFVATIAGGAITYYADSVKGRFTISRDNAKNTVYLQMNSLKPEDTAVYYCAVGVFNFDNFGYWGQGTQVTVSS

SEQ ID NO: 12524 - protein, 126 aa, Artificial Sequence
  Chemically Synthesized
QVQLQESGGGLVQAGGSLRLSCAASGNIFPAIAMGWYRQAPGKEREFVASIASGGITNYADSVKGRFTISRDNAKNTVYLQMNSLKPEDTAVYYCAVRSADWVGYYGSAKFIYLYWGQGTQVTVSS

SEQ ID NO: 12525 - protein, 122 aa, Artificial Sequence
  Chemically Synthesized
QVQLQESGGGLVQAGGSLRLSCAASGYISDYSPMGWYRQAPGKEREFVASITAGTITYYADSVKGRFTISRDNAKNTVYLQMNSLKPEDTAVYYCAAWKHTRPAGSRAHPYWGQGTQVTVSS

SEQ ID NO: 12526 - protein, 122 aa, Artificial Sequence
  Chemically Synthesized
QVQLQESGGGLVQAGGSLRLSCAASGSIFDDDVMGWYRQAPGKERELVAGIDYGSSTYYADSVKGRFTISRDNAKNTVYLQMNSLKPEDTAVYYCAAPYYYKPVYYRIFDYWGQGTQVTVSS

SEQ ID NO: 12527 - protein, 118 aa, Artificial Sequence
  Chemically Synthesized
QVQLQESGGGLVQAGGSLRLSCAASGSISAPRTMGWYRQAPGKERELVATIADGTSTNYADSVKGRFTISRDNAKNTVYLQMNSLKPEDTAVYYCAAWSDPGVAHWYWGQGTQVTVSS

SEQ ID NO: 12528 - protein, 114 aa, Artificial Sequence
  Chemically Synthesized
QVQLQESGGGLVQAGGSLRLSCAASGSIFPRRGMGWYRQAPGKERELVASITDGTTTYYADSVKGRFTISRDNAKNTVYLQMNSLKPEDTAVYYCAAVASLPYWGQGTQVTVSS

SEQ ID NO: 12529 - protein, 118 aa, Artificial Sequence
  Chemically Synthesized
QVQLQESGGGLVQAGGSLRLSCAASGTISTTDHMGWYRQAPGKEREFVAAIGIGASTYYADSVKGRFTISRDNAKNTVYLQMNSLKPEDTAVYYCAAEPSDYAAYDYWGQGTQVTVSS

SEQ ID NO: 12530 - protein, 118 aa, Artificial Sequence
  Chemically Synthesized
QVQLQESGGGLVQAGGSLRLSCAASGSISDNTYMGWYRQAPGKERELVAGIASGATTNYADSVKGRFTISRDNAKNTVYLQMNSLKPEDTAVYYCAAVYRHYADLDYWGQGTQVTVSS

SEQ ID NO: 12531 - protein, 122 aa, Artificial Sequence
  Chemically Synthesized
QVQLQESGGGLVQAGGSLRLSCAASGNISAGLDMGWYRQAPGKERELVASIDLGGTTYYADSVKGRFTISRDNAKNTVYLQMNSLKPEDTAVYYCAAIDSYAYVVRYPHRYWGQGTQVTVSS

SEQ ID NO: 12532 - protein, 121 aa, Artificial Sequence
  Chemically Synthesized
QVQLQESGGGLVQAGGSLRLSCAASGSIFADQVMGWYRQAPGKERELVASINSGGTTNYADSVKGRFTISRDNAKNTVYLQMNSLKPEDTAVYYCAAREGDTSGTLLTFYWGQGTQVTVSS

SEQ ID NO: 12533 - protein, 119 aa, Artificial Sequence
  Chemically Synthesized
QVQLQESGGGLVQAGGSLRLSCAASGSISNDYTYMGWYRQAPGKERELVAAINAGTTTYYADSVKGRFTISRDNAKNTVYLQMNSLKPEDTAVYYCAAAYYAYLPLIYWGQGTQVTVSS

SEQ ID NO: 12534 - protein, 118 aa, Artificial Sequence
  Chemically Synthesized
QVQLQESGGGLVQAGGSLRLSCAASGNISSVIYMGWYRQAPGKEREFVAAISIGTNTNYADSVKGRFTISRDNAKNTVYLQMNSLKPEDTAVYYCAAYYDPPYDYPYWGQGTQVTVSS

SEQ ID NO: 12535 - protein, 118 aa, Artificial Sequence
  Chemically Synthesized
QVQLQESGGGLVQAGGSLRLSCAASGTISNLTYMGWYRQAPGKEREFVAAITGGATTYYADSVKGRFTISRDNAKNTVYLQMNSLKPEDTAVYYCAVSQGDLTIYLYWGQGTQVTVSS

SEQ ID NO: 12536 - protein, 123 aa, Artificial Sequence
  Chemically Synthesized
QVQLQESGGGLVQAGGSLRLSCAASGNISDHEYMGWYRQAPGKERELVASIGPGGTNTYYADSVKGRFTISRDNAKNTVYLQMNSLKPEDTAVYYCAVYTAGRYGYDHRHSYWGQGTQVTVSS

SEQ ID NO: 12537 - protein, 118 aa, Artificial Sequence
  Chemically Synthesized
QVQLQESGGGLVQAGGSLRLSCAASGSISSWLLMGWYRQAPGKERELVATISAGASTNYADSVKGRFTISRDNAKNTVYLQMNSLKPEDTAVYYCAAFAYPDQRYTYWGQGTQVTVSS

SEQ ID NO: 12538 - protein, 119 aa, Artificial Sequence
  Chemically Synthesized
QVQLQESGGGLVQAGGSLRLSCAASGSISPPDYMGWYRQAPGKERELVAGIATGSNTNYADSVKGRFTISRDNAKNTVYLQMNSLKPEDTAVYYCAVADYDDAGRDYYWGQGTQVTVSS

SEQ ID NO: 12539 - protein, 122 aa, Artificial Sequence
  Chemically Synthesized
QVQLQESGGGLVQAGGSLRLSCAASGTISLTYTMGWYRQAPGKEREFVAGIGQGTTTNYADSVKGRFTISRDNAKNTVYLQMNSLKPEDTAVYYCAVVRPNAYVALYLFNYWGQGTQVTVSS

SEQ ID NO: 12540 - protein, 122 aa, Artificial Sequence
  Chemically Synthesized
QVQLQESGGGLVQAGGSLRLSCAASGNIFYVTPMGWYRQAPGKEREFVAAIADGANTYYADSVKGRFTISRDNAKNTVYLQMNSLKPEDTAVYYCAVDGPDARNAPIGHYYWGQGTQVTVSS

SEQ ID NO: 12541 - protein, 126 aa, Artificial Sequence
  Chemically Synthesized
QVQLQESGGGLVQAGGSLRLSCAASGTIFPFSRMGWYRQAPGKERELVASIDAGATTNYADSVKGRFTISRDNAKNTVYLQMNSLKPEDTAVYYCAAQPVGSWPRRYDQDDALGYWGQGTQVTVSS

SEQ ID NO: 12542 - protein, 125 aa, Artificial Sequence
  Chemically Synthesized
QVQLQESGGGLVQAGGSLRLSCAASGTFFTVTMGWYRQAPGKEREFVASINNGTSTNYADSVKGRFTISRDNAKNTVYLQMNSLKPEDTAVYYCAAIDRYFDRDQRFRGWVHAYWGQGTQVTVSS

SEQ ID NO: 12543 - protein, 118 aa, Artificial Sequence
  Chemically Synthesized
QVQLQESGGGLVQAGGSLRLSCAASGNISHYDWMGWYRQAPGKERELVASISVGGTTYYADSVKGRFTISRDNAKNTVYLQMNSLKPEDTAVYYCAVAYYAESPYDYWGQGTQVTVSS

SEQ ID NO: 12544 - protein, 114 aa, Artificial Sequence
  Chemically Synthesized
QVQLQESGGGLVQAGGSLRLSCAASGSMGWYRQAPGKERELVAAISEGSTTYYADSVKGRFTISRDNAKNTVYLQMNSLKPEDTAVYYCAAYQHDDLGYYFYYWGQGTQVTVSS

SEQ ID NO: 12545 - protein, 117 aa, Artificial Sequence
  Chemically Synthesized
QVQLQESGGGLVQAGGSLRLSCAASGNISTYDYMGWYRQAPGKERELVATIGVGGNTYYADSVKGRFTISRDNAKNTVYLQMNSLKPEDTAVYYCAVLRYAQPFYYWGQGTQVTVSS

SEQ ID NO: 12546 - protein, 122 aa, Artificial Sequence
  Chemically Synthesized
QVQLQESGGGLVQAGGSLRLSCAASGYISTTYHMGWYRQAPGKERELVAAIAHGTTTNYADSVKGRFTISRDNAKNTVYLQMNSLKPEDTAVYYCAVGELSLRVLGDSHFYWGQGTQVTVSS

SEQ ID NO: 12547 - protein, 118 aa, Artificial Sequence
  Chemically Synthesized
QVQLQESGGGLVQAGGSLRLSCAASGSISAWYPMGWYRQAPGKEREFVAGITDGTTTNYADSVKGRFTISRDNAKNTVYLQMNSLKPEDTAVYYCAVRDYVLQHHGYWGQGTQVTVSS

SEQ ID NO: 12548 - protein, 122 aa, Artificial Sequence
  Chemically Synthesized
QVQLQESGGGLVQAGGSLRLSCAASGYIFGGYDMGWYRQAPGKERELVATISLGGSTNYADSVKGRFTISRDNAKNTVYLQMNSLKPEDTAVYYCAAYRTPDPWRDYYHLYWGQGTQVTVSS

SEQ ID NO: 12549 - protein, 120 aa, Artificial Sequence
  Chemically Synthesized
QVQLQESGGGLVQAGGSLRLSCAASGNIFVGDWMGWYRQAPGKEREFVASIASVVLPYADSVKGRFTISRDNAKNTVYLQMNSLKPEDTAVYYCAATVTLTVLNCVNFYWGQGTQVTVSS

SEQ ID NO: 12550 - protein, 122 aa, Artificial Sequence
  Chemically Synthesized
QVQLQESGGGLVQAGGSLRLSCAASGYISAYSLMGWYRQAPGKEREFVAAIDPGGITNYADSVKGRFTISRDNAKNTVYLQMNSLKPEDTAVYYCAAQAFVTDRSYSPHLYWGQGTQVTVSS

SEQ ID NO: 12551 - protein, 126 aa, Artificial Sequence
  Chemically Synthesized
QVQLQESGGGLVQAGGSLRLSCAASGSISGPHYMGWYRQAPGKEREFVATITRGGTTYYADSVKGRFTISRDNAKNTVYLQMNSLKPEDTAVYYCAVGDQYQVAYYVTYYSVLSYWGQGTQVTVSS

SEQ ID NO: 12552 - protein, 122 aa, Artificial Sequence
  Chemically Synthesized
QVQLQESGGGLVQAGGSLRLSCAASGTIFSQGRMGWYRQAPGKERELVATINYGTSTNYADSVKGRFTISRDNAKNTVYLQMNSLKPEDTAVYYCAADIHYQGSPRVVYAYWGQGTQVTVSS

SEQ ID NO: 12553 - protein, 118 aa, Artificial Sequence
  Chemically Synthesized
QVQLQESGGGLVQAGGSLRLSCAASGYIFGYYVMGWYRQAPGKERELVAGISAGGTTNYADSVKGRFTISRDNAKNTVYLQMNSLKPEDTAVYYCAARGATVDDFVYWGQGTQVTVSS

SEQ ID NO: 12554 - protein, 118 aa, Artificial Sequence
  Chemically Synthesized
QVQLQESGGGLVQAGGSLRLSCAASGYISDYHYMGWYRQAPGKEREFVAGIDSGGTTNYADSVKGRFTISRDNAKNTVYLQMNSLKPEDTAVYYCASTGDSLTLHYYWGQGTQVTVSS

SEQ ID NO: 12555 - protein, 117 aa, Artificial Sequence
  Chemically Synthesized
QVQLQESGGGLVQAGGSLRLSCAASGSIFYVGPMGWYRQAPGKERELVASIDYGASTYYADSVKGRFTISRDNAKNTVYLQMNSLKPEDTAVYYCAVSVTSAYHTYWGQGTQVTVSS

SEQ ID NO: 12556 - protein, 126 aa, Artificial Sequence
  Chemically Synthesized
QVQLQESGGGLVQAGGSLRLSCAASGNISDRIIMGWYRQAPGKERELVAAISPGTITYYADSVKGRFTISRDNAKNTVYLQMNSLKPEDTAVYYCAAWGTRHYGIALRDNAVFRYWGQGTQVTVSS

SEQ ID NO: 12557 - protein, 117 aa, Artificial Sequence
  Chemically Synthesized
QVQLQESGGGLVQAGGSLRLSCAASGTISSVDDMGWYRQAPGKEREFVPLLVSVLVPYADSVKGRFTISRDNAKNTVYLQMNSLKPEDTAVYYCAVDPFRRYGFAYWGQGTQVTVSS

SEQ ID NO: 12558 - protein, 117 aa, Artificial Sequence
  Chemically Synthesized
QVQLQESGGGLVQAGGSLRLSCAASGNISTPRYMGWYRQAPGKEREFVAGISQGSNTNYADSVKGRFTISRDNAKNTVYLQMNSLKPEDTAVYYCAVATVTVSTLYWGQGTQVTVSS

SEQ ID NO: 12559 - protein, 122 aa, Artificial Sequence
  Chemically Synthesized
QVQLQESGGGLVQAGGSLRLSCAASGTIFYPAIMGWYRQAPGKERELVAGIALGANTNYADSVKGRFTISRDNAKNTVYLQMNSLKPEDTAVYYCAALPIGLRIDRGSLGYWGQGTQVTVSS

SEQ ID NO: 12560 - protein, 117 aa, Artificial Sequence
  Chemically Synthesized
QVQLQESGGGLVQAGGSLRLSCAASGTISREPYMGWYRQAPGKEREFVAVLLTVLLPYADSVKGRFTISRDNAKNTVYLQMNSLKPEDTAVYYCAAWYSPPDVHYYWGQGTQVTVSS

SEQ ID NO: 12561 - protein, 117 aa, Artificial Sequence
  Chemically Synthesized
QVQLQESGGGLVQAGGSLRLSCAASGTIFFPSDMGWYRQAPGKEREFVAGIGSVLLPYADSVKGRFTISRDNAKNTVYLQMNSLKPEDTAVYYCAANESSSFDYLYWGQGTQVTVSS

SEQ ID NO: 12562 - protein, 121 aa, Artificial Sequence
  Chemically Synthesized
QVQLQESGGGLVQAGGSLRLSCAASGNIFDYSDMGWYRQAPGKEREFVAAISGGGITYYADSVKGRFTISRDNAKNTVYLQMNSLKPEDTAVYYCAVPSTLRTTLTSTLYWGQGTQVTVSS

SEQ ID NO: 12563 - protein, 118 aa, Artificial Sequence
  Chemically Synthesized
QVQLQESGGGLVQAGGSLRLSCAASGYISGHATMGWYRQAPGKERELVATIGLGSSTNYADSVKGRFTISRDNAKNTVYLQMNSLKPEDTAVYYCAAGTVGDIGLWYWGQGTQVTVSS

SEQ ID NO: 12564 - protein, 117 aa, Artificial Sequence
  Chemically Synthesized
QVQLQESGGGLVQAGGSLRLSCAASGSISYYTYMGWYRQAPGKEREFVAAIAYGTSTNYADSVKGRFTISRDNAKNTVYLQMNSLKPEDTAVYYCAAVRHYAGYHYWGQGTQVTVSS

SEQ ID NO: 12565 - protein, 122 aa, Artificial Sequence
  Chemically Synthesized
QVQLQESGGGLVQAGGSLRLSCAASGNISVDPYMGWYRQAPGKERELVATIGQGASTNYADSVKGRFTISRDNAKNTVYLQMNSLKPEDTAVYYCAAQAHYGAYTRSYHAYWGQGTQVTVSS

SEQ ID NO: 12566 - protein, 112 aa, Artificial Sequence
  Chemically Synthesized
QVQLQESGGGLVQAGGSLRLSCAASGNISPPYVMGWYRQAPGKERELVATITDGTNTNYADSVKGRFTISRDNAKNTVYLQMNSLKPEDTAVYYCAPDLDYWGQGTQVTVSS

SEQ ID NO: 12567 - protein, 125 aa, Artificial Sequence
  Chemically Synthesized
QVQLQESGGGLVQAGGSLRLSCAASGTISVDVSMGWYRQAPGKEREFVAGIGDGSTYYADSVKGRFTISRDNAKNTVYLQMNSLKPEDTAVYYCAVDHITGVTYARGRTTRYSYWGQGTQVTVSS

SEQ ID NO: 12568 - protein, 118 aa, Artificial Sequence
  Chemically Synthesized
QVQLQESGGGLVQAGGSLRLSCAASGTISYQHPMGWYRQAPGKEREFVASITDGASTNYADSVKGRFTISRDNAKNTVYLQMNSLKPEDTAVYYCAVRDTTANDLVYWGQGTQVTVSS

SEQ ID NO: 12569 - protein, 125 aa, Artificial Sequence
  Chemically Synthesized
QVQLQESGGGLVQAGGSLRLSCAASGNIFAVLFMGWYRQAPGKERELVATISYGGTTNYADSVKGRFTISRDNAKNTVYLQMNSLKPEDTAVYYCAVGYRPSLASLSRTLTSFYWGQGTQVTVSS

SEQ ID NO: 12570 - protein, 122 aa, Artificial Sequence
  Chemically Synthesized
QVQLQESGGGLVQAGGSLRLSCAASGTISDNAIMGWYRQAPGKEREFVASIAYGASTNYADSVKGRFTISRDNAKNTVYLQMNSLKPEDTAVYYCAAPGYDQHSDDWRHGYWGQGTQVTVSS

SEQ ID NO: 12571 - protein, 125 aa, Artificial Sequence
  Chemically Synthesized
QVQLQESGGGLVQAGGSLRLSCAASGNIFDGYGMGWYRQAPGKERELVASIDSVLLPYADSVKGRFTISRDNAKNTVYLQMNSLKPEDTAVYYCAVYGARAGQYIQQIDGRHYYWGQGTQVTVSS

SEQ ID NO: 12572 - protein, 118 aa, Artificial Sequence
  Chemically Synthesized
QVQLQESGGGLVQAGGSLRLSCAASGNIFDQSGMGWYRQAPGKEREFVAAITNGGSTNYADSVKGRFTISRDNAKNTVYLQMNSLKPEDTAVYYCAADYIPYGYHSYWGQGTQVTVSS

SEQ ID NO: 12573 - protein, 117 aa, Artificial Sequence
  Chemically Synthesized
QVQLQESGGGLVQAGGSLRLSCAASGSISWRDFMGWYRQAPGKERELVAAIGSGATTYYADSVKGRFTISRDNAKNTVYLQMNSLKPEDTAVYYCAVSTTLTTTLYWGQGTQVTVSS

SEQ ID NO: 12574 - protein, 124 aa, Artificial Sequence
  Chemically Synthesized
QVQLQESGGGLVQAGGSLRLSCAASGYISRAVMGWYRQAPGKEREFVAGINAGSIPYADSVKGRFTISRDNAKNTVYLQMNSLKPEDTAVYYCAVSRYLPAGVSVTYYNLHDYWGQGTQVTVSS

SEQ ID NO: 12575 - protein, 118 aa, Artificial Sequence
  Chemically Synthesized
QVQLQESGGGLVQAGGSLRLSCAASGTISQYTWMGWYRQAPGKERELVASISTGTSTNYADSVKGRFTISRDNAKNTVYLQMNSLKPEDTAVYYCAVYWTTDYRHYYWGQGTQVTVSS

SEQ ID NO: 12576 - protein, 126 aa, Artificial Sequence
  Chemically Synthesized
QVQLQESGGGLVQAGGSLRLSCAASGTISTSDIMGWYRQAPGKEREFVATIGYGSNTNYADSVKGRFTISRDNAKNTVYLQMNSLKPEDTAVYYCAAPWQYWDYWAVSLSNPHGYWGQGTQVTVSS

SEQ ID NO: 12577 - protein, 122 aa, Artificial Sequence
  Chemically Synthesized
QVQLQESGGGLVQAGGSLRLSCAASGYISIVGLMGWYRQAPGKERELVASINIGATTNYADSVKGRFTISRDNAKNTVYLQMNSLKPEDTAVYYCAVTYGAYWLEFQVYTYWGQGTQVTVSS

SEQ ID NO: 12578 - protein, 121 aa, Artificial Sequence
  Chemically Synthesized
QVQLQESGGGLVQAGGSLRLSCAASGSISDYFSMGWYRQAPGKEREFVAAISSVLLPYADSVKGRFTISRDNAKNTVYLQMNSLKPEDTAVYYCAADAYQDDAWSAGHRYWGQGTQVTVSS

SEQ ID NO: 12579 - protein, 114 aa, Artificial Sequence
  Chemically Synthesized
QVQLQESGGGLVQAGGSLRLSCAASGTMVMGWYRQAPGKERELVATIDRGGTTNYADSVKGRFTISRDNAKNTVYLQMNSLKPEDTAVYYCAVQSYDDYDLGYWGQGTQVTVSS

SEQ ID NO: 12580 - protein, 122 aa, Artificial Sequence
  Chemically Synthesized
QVQLQESGGGLVQAGGSLRLSCAASGSISDVYRMGWYRQAPGKEREFVAGIADGASTYYADSVKGRFTISRDNAKNTVYLQMNSLKPEDTAVYYCAAWRDLKRGQDDDLYYWGQGTQVTVSS

SEQ ID NO: 12581 - protein, 125 aa, Artificial Sequence
  Chemically Synthesized
QVQLQESGGGLVQAGGSLRLSCAASGLFLFTTMGWYRQAPGKEREFVASISYGTNTNYADSVKGRFTISRDNAKNTVYLQMNSLKPEDTAVYYCAVIGPTNDTYEYRDYYIHDYWGQGTQVTVSS

SEQ ID NO: 12582 - protein, 125 aa, Artificial Sequence
  Chemically Synthesized
QVQLQESGGGLVQAGGSLRLSCAASGTIFGKAMGWYRQAPGKERELVASIDYGSNTNYADSVKGRFTISRDNAKNTVYLQMNSLKPEDTAVYYCAVDWDGAYEWDQSEYFGLTYWGQGTQVTVSS

SEQ ID NO: 12583 - protein, 118 aa, Artificial Sequence
  Chemically Synthesized
QVQLQESGGGLVQAGGSLRLSCAASGNIFAEYGMGWYRQAPGKERELVAGIGYGGNTNYADSVKGRFTISRDNAKNTVYLQMNSLKPEDTAVYYCAALQLGDQVFDYWGQGTQVTVSS

SEQ ID NO: 12584 - protein, 117 aa, Artificial Sequence
  Chemically Synthesized
QVQLQESGGGLVQAGGSLRLSCAASGNISGYSMGWYRQAPGKERELVAGIAVGGSTNYADSVKGRFTISRDNAKNTVYLQMNSLKPEDTAVYYCAVGTNRLPVHVYWGQGTQVTVSS

SEQ ID NO: 12585 - protein, 117 aa, Artificial Sequence
  Chemically Synthesized
QVQLQESGGGLVQAGGSLRLSCAASGYIFHVHYMGWYRQAPGKERELVATIASVVIPYADSVKGRFTISRDNAKNTVYLQMNSLKPEDTAVYYCAVDYDAEDEHPYWGQGTQVTVSS

SEQ ID NO: 12586 - protein, 117 aa, Artificial Sequence
  Chemically Synthesized
QVQLQESGGGLVQAGGSLRLSCAASGYIFQRGDMGWYRQAPGKERELVAGINGGGITNYADSVKGRFTISRDNAKNTVYLQMNSLKPEDTAVYYCAVWYYDYALLYWGQGTQVTVSS

SEQ ID NO: 12587 - protein, 118 aa, Artificial Sequence
  Chemically Synthesized
QVQLQESGGGLVQAGGSLRLSCAASGTISPAAYMGWYRQAPGKEREFVATIDGGSITNYADSVKGRFTISRDNAKNTVYLQMNSLKPEDTAVYYCAVPQADLSRYYYWGQGTQVTVSS

SEQ ID NO: 12588 - protein, 118 aa, Artificial Sequence
  Chemically Synthesized
QVQLQESGGGLVQAGGSLRLSCAASGSIFYVTVMGWYRQAPGKEREFVATIDYGSNTNYADSVKGRFTISRDNAKNTVYLQMNSLKPEDTAVYYCAAVLQVDYYFVYWGQGTQVTVSS

SEQ ID NO: 12589 - protein, 118 aa, Artificial Sequence
  Chemically Synthesized
QVQLQESGGGLVQAGGSLRLSCAASGNISDPVQMGWYRQAPGKEREFVAGIGGGGITYYADSVKGRFTISRDNAKNTVYLQMNSLKPEDTAVYYCAVARYPPIDLIYWGQGTQVTVSS

SEQ ID NO: 12590 - protein, 118 aa, Artificial Sequence
  Chemically Synthesized
QVQLQESGGGLVQAGGSLRLSCAASGTIFTRLYMGWYRQAPGKEREFVATIDRGATTNYADSVKGRFTISRDNAKNTVYLQMNSLKPEDTAVYYCAVGYKFVVTLYYWGQGTQVTVSS

SEQ ID NO: 12591 - protein, 118 aa, Artificial Sequence
  Chemically Synthesized
QVQLQESGGGLVQAGGSLRLSCAASGSIFANDVMGWYRQAPGKEREFVAAIAVGTITYYADSVKGRFTISRDNAKNTVYLQMNSLKPEDTAVYYCAVEITNVLPHGYWGQGTQVTVSS

SEQ ID NO: 12592 - protein, 111 aa, Artificial Sequence
  Chemically Synthesized
QVQLQESGGGLVQAGGSLRLSCAASGTISSHRSMGWYRQAPGKEREFVAAITNGSSTNYADSVKGRFTISRDNAKNTVYLQMNSLKPEDTAVYYCALLGYWGQGTQVTVSS

SEQ ID NO: 12593 - protein, 125 aa, Artificial Sequence
  Chemically Synthesized
QVQLQESGGGLVQAGGSLRLSCAASGYISLNYVMGWYRQAPGKEREFVASITSGAITYYADSVKGRFTISRDNAKNTVYLQMNSLKPEDTAVYYCAARTRQGGIPVLKLEWYDYWGQGTQVTVSS

SEQ ID NO: 12594 - protein, 125 aa, Artificial Sequence
  Chemically Synthesized
QVQLQESGGGLVQAGGSLRLSCAASGSIFIYYSMGWYRQAPGKEREFVAGINNGGTTYYADSVKGRFTISRDNAKNTVYLQMNSLKPEDTAVYYCAAQASLLTTTWVLRVGVIYWGQGTQVTVSS

SEQ ID NO: 12595 - protein, 121 aa, Artificial Sequence
  Chemically Synthesized
QVQLQESGGGLVQAGGSLRLSCAASGNISTVHYMGWYRQAPGKEREFVATISGGSITYYADSVKGRFTISRDNAKNTVYLQMNSLKPEDTAVYYCAVVDNANVGSVTSFYWGQGTQVTVSS

SEQ ID NO: 12596 - protein, 121 aa, Artificial Sequence
  Chemically Synthesized
QVQLQESGGGLVQAGGSLRLSCAASGSIFKVYDMGWYRQAPGKERELVAGIGQGANTYYADSVKGRFTISRDNAKNTVYLQMNSLKPEDTAVYYCAAYYTGSTTGMTTIYWGQGTQVTVSS

SEQ ID NO: 12597 - protein, 118 aa, Artificial Sequence
  Chemically Synthesized
QVQLQESGGGLVQAGGSLRLSCAASGTIFYGRRMGWYRQAPGKEREFVAAIAYGSSTNYADSVKGRFTISRDNAKNTVYLQMNSLKPEDTAVYYCAVVGYGTPLFVYWGQGTQVTVSS

SEQ ID NO: 12598 - protein, 118 aa, Artificial Sequence
  Chemically Synthesized
QVQLQESGGGLVQAGGSLRLSCAASGSISDDDHMGWYRQAPGKERELVATITPGGSTYYADSVKGRFTISRDNAKNTVYLQMNSLKPEDTAVYYCAADSKDIWTHWYWGQGTQVTVSS

SEQ ID NO: 12599 - protein, 113 aa, Artificial Sequence
  Chemically Synthesized
QVQLQESGGGLVQAGGSLRLSCAASGNIFPRTYMGWYRQAPGKEREFVATITVGGTTNYADSVKGRFTISRDNAKNTVYLQMNSLKPEDTAVYYCAVYNHGYWGQGTQVTVSS

SEQ ID NO: 12600 - protein, 118 aa, Artificial Sequence
  Chemically Synthesized
QVQLQESGGGLVQAGGSLRLSCAASGTIFQQHDMGWYRQAPGKERELVAAIDPGTSTNYADSVKGRFTISRDNAKNTVYLQMNSLKPEDTAVYYCAASHGHWYTLGYWGQGTQVTVSS

SEQ ID NO: 12601 - protein, 122 aa, Artificial Sequence
  Chemically Synthesized
QVQLQESGGGLVQAGGSLRLSCAASGTIFLIGSMGWYRQAPGKERELVAAIAYGGTTNYADSVKGRFTISRDNAKNTVYLQMNSLKPEDTAVYYCAVPAGWYYLSRNRHYYWGQGTQVTVSS

SEQ ID NO: 12602 - protein, 110 aa, Artificial Sequence
  Chemically Synthesized
QVQLQESGGGLVQAGGSLRLSCAASGTISSYVYMGWYRQAPGKEREFVPLLIRVLVPYADSVKGRFTISRDNAKNTVYLQMNSLKPEDTAVYYCAYHQYWGQGTQVTVSS

SEQ ID NO: 12603 - protein, 122 aa, Artificial Sequence
  Chemically Synthesized
QVQLQESGGGLVQAGGSLRLSCAASGTIFYLHDMGWYRQAPGKEREFVATISYGSTTYYADSVKGRFTISRDNAKNTVYLQMNSLKPEDTAVYYCAVYVASQYQPPFDYAYWGQGTQVTVSS

SEQ ID NO: 12604 - protein, 118 aa, Artificial Sequence
  Chemically Synthesized
QVQLQESGGGLVQAGGSLRLSCAASGTIFRSGYMGWYRQAPGKERELVATINSGTSTYYADSVKGRFTISRDNAKNTVYLQMNSLKPEDTAVYYCAAGYVYRRSFIYWGQGTQVTVSS

SEQ ID NO: 12605 - protein, 126 aa, Artificial Sequence
  Chemically Synthesized
QVQLQESGGGLVQAGGSLRLSCAASGNIFLLYYMGWYRQAPGKERELVAAIAWGASTYYADSVKGRFTISRDNAKNTVYLQMNSLKPEDTAVYYCAAVGADTEIDYYGIYRFHDYWGQGTQVTVSS

SEQ ID NO: 12606 - protein, 119 aa, Artificial Sequence
  Chemically Synthesized
QVQLQESGGGLVQAGGSLRLSCAASGNISPHPDMGWYRQAPGKEREFVASIDVGATTNYADSVKGRFTISRDNAKNTVYLQMNSLKPEDTAVYYCAVAFRGTTTLVFYWGQGTQVTVSS

SEQ ID NO: 12607 - protein, 125 aa, Artificial Sequence
  Chemically Synthesized
QVQLQESGGGLVQAGGSLRLSCAASGTISQRRSMGWYRQAPGKERELVAAINSGSNTNYADSVKGRFTISRDNAKNTVYLQMNSLKPEDTAVYYCAALYVVDTQSPDQEARYHYWGQGTQVTVSS

SEQ ID NO: 12608 - protein, 118 aa, Artificial Sequence
  Chemically Synthesized
QVQLQESGGGLVQAGGSLRLSCAASGSISSAYYMGWYRQAPGKERELVATINHGASTNYADSVKGRFTISRDNAKNTVYLQMNSLKPEDTAVYYCAVNYNTPVDLGYWGQGTQVTVSS

SEQ ID NO: 12609 - protein, 126 aa, Artificial Sequence
  Chemically Synthesized
QVQLQESGGGLVQAGGSLRLSCAASGNISRPYVMGWYRQAPGKERELVASIARGGITYYADSVKGRFTISRDNAKNTVYLQMNSLKPEDTAVYYCAVAYFVVSLPYQYRRWYHGYWGQGTQVTVSS

SEQ ID NO: 12610 - protein, 121 aa, Artificial Sequence
  Chemically Synthesized
QVQLQESGGGLVQAGGSLRLSCAASGTIFSTTMGWYRQAPGKERELVAGIAVGGNTYYADSVKGRFTISRDNAKNTVYLQMNSLKPEDTAVYYCAAVYTGPRLREDAHFYWGQGTQVTVSS

SEQ ID NO: 12611 - protein, 121 aa, Artificial Sequence
  Chemically Synthesized
QVQLQESGGGLVQAGGSLRLSCAASGTISDRARMGWYRQAPGKERELVAGIDYGTSTNYADSVKGRFTISRDNAKNTVYLQMNSLKPEDTAVYYCAAPYQTASTTKKVMYWGQGTQVTVSS

SEQ ID NO: 12612 - protein, 117 aa, Artificial Sequence
  Chemically Synthesized
QVQLQESGGGLVQAGGSLRLSCAASGTISSVLMGWYRQAPGKERELVASISRGANTNYADSVKGRFTISRDNAKNTVYLQMNSLKPEDTAVYYCAVEDRYDYRHEYWGQGTQVTVSS

SEQ ID NO: 12613 - protein, 118 aa, Artificial Sequence
  Chemically Synthesized
QVQLQESGGGLVQAGGSLRLSCAASGYIFAYWSMGWYRQAPGKEREFVAAINGGGITYYADSVKGRFTISRDNAKNTVYLQMNSLKPEDTAVYYCAAIRRRTRQHVYWGQGTQVTVSS

SEQ ID NO: 12614 - protein, 118 aa, Artificial Sequence
  Chemically Synthesized
QVQLQESGGGLVQAGGSLRLSCAASGSIFTIDDMGWYRQAPGKERELVAGIDDGSNTNYADSVKGRFTISRDNAKNTVYLQMNSLKPEDTAVYYCAVIDLGRYYHLYWGQGTQVTVSS

SEQ ID NO: 12615 - protein, 116 aa, Artificial Sequence
  Chemically Synthesized
QVQLQESGGGLVQAGGSLRLSCAASGYIFGSRPMGWYRQAPGKERELVATITIGGTTNYADSVKGRFTISRDNAKNTVYLQMNSLKPEDTAVYYCAAYYLLILRYWGQGTQVTVSS

SEQ ID NO: 12616 - protein, 120 aa, Artificial Sequence
  Chemically Synthesized
QVQLQESGGGLVQAGGSLRLSCAASGYIFAVDWMGWYRQAPGKEREFVATIGGGTTTNYADSVKGRFTISRDNAKNTVYLQMNSLKPEDTAVYYCAAYGAGYRGTYFVYWGQGTQVTVSS

SEQ ID NO: 12617 - protein, 121 aa, Artificial Sequence
  Chemically Synthesized
QVQLQESGGGLVQAGGSLRLSCAASGNIFYDYQMGWYRQAPGKERELVAAIGSGTNTNYADSVKGRFTISRDNAKNTVYLQMNSLKPEDTAVYYCAVRWYYKPGYWSVYYWGQGTQVTVSS

SEQ ID NO: 12618 - protein, 120 aa, Artificial Sequence
  Chemically Synthesized
QVQLQESGGGLVQAGGSLRLSCAASGYIFGSYRVGMGWYRQAPGKEREFVAGISAGGITYYADSVKGRFTISRDNAKNTVYLQMNSLKPEDTAVYYCAVLPLYYLPYRYWGQGTQVTVSS

SEQ ID NO: 12619 - protein, 126 aa, Artificial Sequence
  Chemically Synthesized
QVQLQESGGGLVQAGGSLRLSCAASGTISDYTLMGWYRQAPGKERELVAAIAVGSNTNYADSVKGRFTISRDNAKNTVYLQMNSLKPEDTAVYYCAAATPGQDDTAWLIYYNHDYWGQGTQVTVSS

SEQ ID NO: 12620 - protein, 118 aa, Artificial Sequence
  Chemically Synthesized
QVQLQESGGGLVQAGGSLRLSCAASGYISYQPYMGWYRQAPGKERELVAAIAGGTTTYYADSVKGRFTISRDNAKNTVYLQMNSLKPEDTAVYYCAAIYNEGLGHYYWGQGTQVTVSS

SEQ ID NO: 12621 - protein, 117 aa, Artificial Sequence
  Chemically Synthesized
QVQLQESGGGLVQAGGSLRLSCAASGTISADRYMGWYRQAPGKEREFVATIAGVVLPYADSVKGRFTISRDNAKNTVYLQMNSLKPEDTAVYYCAVSRYIRYTHNYWGQGTQVTVSS

SEQ ID NO: 12622 - protein, 118 aa, Artificial Sequence
  Chemically Synthesized
QVQLQESGGGLVQAGGSLRLSCAASGTISAADSMGWYRQAPGKERELVAGITSVVVPYADSVKGRFTISRDNAKNTVYLQMNSLKPEDTAVYYCAATDYRSITDHYYWGQGTQVTVSS

SEQ ID NO: 12623 - protein, 112 aa, Artificial Sequence
  Chemically Synthesized
QVQLQESGGGLVQAGGSLRLSCAASGYIFHPRYMGWYRQAPGKEREFVASIDPGSNTNYADSVKGRFTISRDNAKNTVYLQMNSLKPEDTAVYYCASRYDYWGQGTQVTVSS

SEQ ID NO: 12624 - protein, 118 aa, Artificial Sequence
  Chemically Synthesized
QVQLQESGGGLVQAGGSLRLSCAASGSIFPTAYMGWYRQAPGKEREFVAGITSGAITYYADSVKGRFTISRDNAKNTVYLQMNSLKPEDTAVYYCAAYIWAVIKHEYWGQGTQVTVSS

SEQ ID NO: 12625 - protein, 122 aa, Artificial Sequence
  Chemically Synthesized
QVQLQESGGGLVQAGGSLRLSCAASGNISPRYYMGWYRQAPGKEREFVASISGGGITYYADSVKGRFTISRDNAKNTVYLQMNSLKPEDTAVYYCAVGSYPSNVYWSDHYYWGQGTQVTVSS

SEQ ID NO: 12626 - protein, 118 aa, Artificial Sequence
  Chemically Synthesized
QVQLQESGGGLVQAGGSLRLSCAASGSISYRGYMGWYRQAPGKERELVAAIGYGTSTYYADSVKGRFTISRDNAKNTVYLQMNSLKPEDTAVYYCAATYTVRTRLGYWGQGTQVTVSS

SEQ ID NO: 12627 - protein, 126 aa, Artificial Sequence
  Chemically Synthesized
QVQLQESGGGLVQAGGSLRLSCAASGTIFPDNVMGWYRQAPGKEREFVAAIDDGATTNYADSVKGRFTISRDNAKNTVYLQMNSLKPEDTAVYYCAVLYFNDDAYYGSGYQYHEYWGQGTQVTVSS

SEQ ID NO: 12628 - protein, 118 aa, Artificial Sequence
  Chemically Synthesized
QVQLQESGGGLVQAGGSLRLSCAASGTISRSTPMGWYRQAPGKEREFVAGISWGTITNYADSVKGRFTISRDNAKNTVYLQMNSLKPEDTAVYYCAAETDPLDVHHYWGQGTQVTVSS

SEQ ID NO: 12629 - protein, 113 aa, Artificial Sequence
  Chemically Synthesized
QVQLQESGGGLVQAGGSLRLSCAASGSISDVIPMGWYRQAPGKEREFVAAISQGSSTNYADSVKGRFTISRDNAKNTVYLQMNSLKPEDTAVYYCASRLLAYWGQGTQVTVSS

SEQ ID NO: 12630 - protein, 121 aa, Artificial Sequence
  Chemically Synthesized
QVQLQESGGGLVQAGGSLRLSCAASGTISPDDMGWYRQAPGKEREFVATISRGGSTNYADSVKGRFTISRDNAKNTVYLQMNSLKPEDTAVYYCAARIGDVTSYGYKYPYWGQGTQVTVSS

SEQ ID NO: 12631 - protein, 122 aa, Artificial Sequence
  Chemically Synthesized
QVQLQESGGGLVQAGGSLRLSCAASGSISRYNGMGWYRQAPGKEREFVAAITYGGNTNYADSVKGRFTISRDNAKNTVYLQMNSLKPEDTAVYYCAATYYGWLFQYLGHYYWGQGTQVTVSS

SEQ ID NO: 12632 - protein, 118 aa, Artificial Sequence
  Chemically Synthesized
QVQLQESGGGLVQAGGSLRLSCAASGSISYVYYMGWYRQAPGKEREFVASISYGGSTYYADSVKGRFTISRDNAKNTVYLQMNSLKPEDTAVYYCAVRDVDPYKHWYWGQGTQVTVSS

SEQ ID NO: 12633 - protein, 122 aa, Artificial Sequence
  Chemically Synthesized
QVQLQESGGGLVQAGGSLRLSCAASGTIFHGDKMGWYRQAPGKERELVASISAGTSTNYADSVKGRFTISRDNAKNTVYLQMNSLKPEDTAVYYCAVVYLDTIPQRYGLEYWGQGTQVTVSS

SEQ ID NO: 12634 - protein, 118 aa, Artificial Sequence
  Chemically Synthesized
QVQLQESGGGLVQAGGSLRLSCAASGYISDSNGMGWYRQAPGKERELVASIGQGGNTNYADSVKGRFTISRDNAKNTVYLQMNSLKPEDTAVYYCAVFHDEDDTHYYWGQGTQVTVSS

SEQ ID NO: 12635 - protein, 126 aa, Artificial Sequence
  Chemically Synthesized
QVQLQESGGGLVQAGGSLRLSCAASGTISTSTSMGWYRQAPGKERELVASIDAGGNTYYADSVKGRFTISRDNAKNTVYLQMNSLKPEDTAVYYCAVYYKYQAGPYYYLYYQHLYWGQGTQVTVSS

SEQ ID NO: 12636 - protein, 124 aa, Artificial Sequence
  Chemically Synthesized
QVQLQESGGGLVQAGGSLRLSCAASGNISQYAWMGWYRQAPGKERELVAGIGRGGNTYYADSVKGRFTISRDNAKNTVYLQMNSLKPEDTAVYYCAAQTPQYRTDGRYLYHAYWGQGTQVTVSS

SEQ ID NO: 12637 - protein, 121 aa, Artificial Sequence
  Chemically Synthesized
QVQLQESGGGLVQAGGSLRLSCAASGTISITGAMGWYRQAPGKERELVATIGEGASTNYADSVKGRFTISRDNAKNTVYLQMNSLKPEDTAVYYCAVQGINADDYSYSMYWGQGTQVTVSS

SEQ ID NO: 12638 - protein, 117 aa, Artificial Sequence
  Chemically Synthesized
QVQLQESGGGLVQAGGSLRLSCAASGTISYYSMGWYRQAPGKERELVASIGHGTNTNYADSVKGRFTISRDNAKNTVYLQMNSLKPEDTAVYYCAAWIDDSVYHRYWGQGTQVTVSS

SEQ ID NO: 12639 - protein, 118 aa, Artificial Sequence
  Chemically Synthesized
QVQLQESGGGLVQAGGSLRLSCAASGSISVDTYMGWYRQAPGKERELVATIDSGTNTNYADSVKGRFTISRDNAKNTVYLQMNSLKPEDTAVYYCAVWDEPYYYHYYWGQGTQVTVSS

SEQ ID NO: 12640 - protein, 117 aa, Artificial Sequence
  Chemically Synthesized
QVQLQESGGGLVQAGGSLRLSCAASGYISYDDGMGWYRQAPGKERELVAGIGTGATTNYADSVKGRFTISRDNAKNTVYLQMNSLKPEDTAVYYCAANPVPDPYSYWGQGTQVTVSS

SEQ ID NO: 12641 - protein, 122 aa, Artificial Sequence
  Chemically Synthesized
QVQLQESGGGLVQAGGSLRLSCAASGYIFPRDTMGWYRQAPGKERELVAGINQGGTTNYADSVKGRFTISRDNAKNTVYLQMNSLKPEDTAVYYCAVDNLAQDYVFYSLNYWGQGTQVTVSS

SEQ ID NO: 12642 - protein, 117 aa, Artificial Sequence
  Chemically Synthesized
QVQLQESGGGLVQAGGSLRLSCAASGNISWDFAMGWYRQAPGKERELVASLVTVLVPYADSVKGRFTISRDNAKNTVYLQMNSLKPEDTAVYYCAVQYAVDVIHFYWGQGTQVTVSS

SEQ ID NO: 12643 - protein, 126 aa, Artificial Sequence
  Chemically Synthesized
QVQLQESGGGLVQAGGSLRLSCAASGNIFVPRYMGWYRQAPGKERELVAGINAGSNTYYADSVKGRFTISRDNAKNTVYLQMNSLKPEDTAVYYCAVLDEPYRDGNAYVYDIYFYWGQGTQVTVSS

SEQ ID NO: 12644 - protein, 126 aa, Artificial Sequence
  Chemically Synthesized
QVQLQESGGGLVQAGGSLRLSCAASGNISLQGVMGWYRQAPGKEREFVATISRGSNTNYADSVKGRFTISRDNAKNTVYLQMNSLKPEDTAVYYCAVYYPVGYAGDYLDVYYFYYWGQGTQVTVSS

SEQ ID NO: 12645 - protein, 118 aa, Artificial Sequence
  Chemically Synthesized
QVQLQESGGGLVQAGGSLRLSCAASGNISDQRPMGWYRQAPGKEREFVASIGYGANTNYADSVKGRFTISRDNAKNTVYLQMNSLKPEDTAVYYCAVRPAGLYWHRYWGQGTQVTVSS

SEQ ID NO: 12646 - protein, 118 aa, Artificial Sequence
  Chemically Synthesized
QVQLQESGGGLVQAGGSLRLSCAASGTIFAQDNMGWYRQAPGKERELVAAISAGTSTYYADSVKGRFTISRDNAKNTVYLQMNSLKPEDTAVYYCAVYYVDEAYYPYWGQGTQVTVSS

SEQ ID NO: 12647 - protein, 125 aa, Artificial Sequence
  Chemically Synthesized
QVQLQESGGGLVQAGGSLRLSCAASGYIFFIRGMGWYRQAPGKERELVAAIASGGSTNYADSVKGRFTISRDNAKNTVYLQMNSLKPEDTAVYYCAAYTYRSTTTLVSGNVVLYWGQGTQVTVSS

SEQ ID NO: 12648 - protein, 125 aa, Artificial Sequence
  Chemically Synthesized
QVQLQESGGGLVQAGGSLRLSCAASGYISARNPMGWYRQAPGKEREFVAGIGRGASTYYADSVKGRFTISRDNAKNTVYLQMNSLKPEDTAVYYCAAIDDTNYGDPLDSSLLIYWGQGTQVTVSS

SEQ ID NO: 12649 - protein, 118 aa, Artificial Sequence
  Chemically Synthesized
QVQLQESGGGLVQAGGSLRLSCAASGNIFYTQTMGWYRQAPGKEREFVAAIAEGATTYYADSVKGRFTISRDNAKNTVYLQMNSLKPEDTAVYYCAVIHQSEYHHPYWGQGTQVTVSS

SEQ ID NO: 12650 - protein, 122 aa, Artificial Sequence
  Chemically Synthesized
QVQLQESGGGLVQAGGSLRLSCAASGNISSGDGMGWYRQAPGKERELVAAIDEGGNTYYADSVKGRFTISRDNAKNTVYLQMNSLKPEDTAVYYCAVDDSYYVYGDYSHDYWGQGTQVTVSS

SEQ ID NO: 12651 - protein, 117 aa, Artificial Sequence
  Chemically Synthesized
QVQLQESGGGLVQAGGSLRLSCAASGNIFFDDDMGWYRQAPGKERELVAGIDTGGTTYYADSVKGRFTISRDNAKNTVYLQMNSLKPEDTAVYYCAARQDVSVLLYWGQGTQVTVSS

SEQ ID NO: 12652 - protein, 110 aa, Artificial Sequence
  Chemically Synthesized
QVQLQESGGGLVQAGGSLRLSCAASGNIFVTYMGWYRQAPGKEREFVASISDGTSTYYADSVKGRFTISRDNAKNTVYLQMNSLKPEDTAVYYCAATFYWGQGTQVTVSS

SEQ ID NO: 12653 - protein, 117 aa, Artificial Sequence
  Chemically Synthesized
QVQLQESGGGLVQAGGSLRLSCAASGNISHQAYMGWYRQAPGKEREFVATIAVGTITYYADSVKGRFTISRDNAKNTVYLQMNSLKPEDTAVYYCAVDLTGQDDLYWGQGTQVTVSS

SEQ ID NO: 12654 - protein, 119 aa, Artificial Sequence
  Chemically Synthesized
QVQLQESGGGLVQAGGSLRLSCAASGYISIPWDMGWYRQAPGKERELVLVTCYYLYADSVKGRFTISRDNAKNTVYLQMNSLKPEDTAVYYCAVEYAYRPRPKWGLYYWGQGTQVTVSS

SEQ ID NO: 12655 - protein, 118 aa, Artificial Sequence
  Chemically Synthesized
QVQLQESGGGLVQAGGSLRLSCAASGTISSSIRMGWYRQAPGKERELVAAIANGGITYYADSVKGRFTISRDNAKNTVYLQMNSLKPEDTAVYYCAVVWEPSVTHYYWGQGTQVTVSS

SEQ ID NO: 12656 - protein, 112 aa, Artificial Sequence
  Chemically Synthesized
QVQLQESGGGLVQAGGSLRLSCAASGNISNSYYMGWYRQAPGKEREFVASIAGGGSTNYADSVKGRFTISRDNAKNTVYLQMNSLKPEDTAVYYCAFLPLYWGQGTQVTVSS

SEQ ID NO: 12657 - protein, 122 aa, Artificial Sequence
  Chemically Synthesized
QVQLQESGGGLVQAGGSLRLSCAASGYIFIRYYMGWYRQAPGKEREFVATISSGTTTYYADSVKGRFTISRDNAKNTVYLQMNSLKPEDTAVYYCAAGTKLLLWTLYLYRYWGQGTQVTVSS

SEQ ID NO: 12658 - protein, 122 aa, Artificial Sequence
  Chemically Synthesized
QVQLQESGGGLVQAGGSLRLSCAASGTIFDRDYMGWYRQAPGKERELVATISSGGITYYADSVKGRFTISRDNAKNTVYLQMNSLKPEDTAVYYCAADRDSIYYEGYRHGYWGQGTQVTVSS

SEQ ID NO: 12659 - protein, 118 aa, Artificial Sequence
  Chemically Synthesized
QVQLQESGGGLVQAGGSLRLSCAASGTISRWDLMGWYRQAPGKEREFVAGITSGSNTNYADSVKGRFTISRDNAKNTVYLQMNSLKPEDTAVYYCAVYRLTRTVHGYWGQGTQVTVSS

SEQ ID NO: 12660 - protein, 118 aa, Artificial Sequence
  Chemically Synthesized
QVQLQESGGGLVQAGGSLRLSCAASGTIFGGHSMGWYRQAPGKEREFVATIALGGTTNYADSVKGRFTISRDNAKNTVYLQMNSLKPEDTAVYYCAVLNADGILHRYWGQGTQVTVSS

SEQ ID NO: 12661 - protein, 110 aa, Artificial Sequence
  Chemically Synthesized
QVQLQESGGGLVQAGGSLRLSCAASGSISGYTAMGWYRQAPGKERELVATINSGTSTNYADSVKGRFTISRDNAKNTVYLQMNSLKPEDTAVYYCAVAYWGQGTQVTVSS

SEQ ID NO: 12662 - protein, 122 aa, Artificial Sequence
  Chemically Synthesized
QVQLQESGGGLVQAGGSLRLSCAASGNISLAWRMGWYRQAPGKEREFVATINFGGTTNYADSVKGRFTISRDNAKNTVYLQMNSLKPEDTAVYYCAVYVLAPYLYILSLRYWGQGTQVTVSS

SEQ ID NO: 12663 - protein, 113 aa, Artificial Sequence
  Chemically Synthesized
QVQLQESGGGLVQAGGSLRLSCAASGTISAHIIMGWYRQAPGKEREFVAGIDYGGTTNYADSVKGRFTISRDNAKNTVYLQMNSLKPEDTAVYYCAYTAYTYWGQGTQVTVSS

SEQ ID NO: 12664 - protein, 118 aa, Artificial Sequence
  Chemically Synthesized
QVQLQESGGGLVQAGGSLRLSCAASGNIFSQSGMGWYRQAPGKERELVAAIGRGGSTYYADSVKGRFTISRDNAKNTVYLQMNSLKPEDTAVYYCAVTAYDVGYFDYWGQGTQVTVSS

SEQ ID NO: 12665 - protein, 118 aa, Artificial Sequence
  Chemically Synthesized
QVQLQESGGGLVQAGGSLRLSCAASGSISTGTLMGWYRQAPGKERELVASIGDGTNTYYADSVKGRFTISRDNAKNTVYLQMNSLKPEDTAVYYCAANDDYGTYHDYWGQGTQVTVSS

SEQ ID NO: 12666 - protein, 116 aa, Artificial Sequence
  Chemically Synthesized
QVQLQESGGGLVQAGGSLRLSCAASGNISLYNYMGWYRQAPGKERELVAAISRGASTYYADSVKGRFTISRDNAKNTVYLQMNSLKPEDTAVYYCAAYITRYLDYWGQGTQVTVSS

SEQ ID NO: 12667 - protein, 122 aa, Artificial Sequence
  Chemically Synthesized
QVQLQESGGGLVQAGGSLRLSCAASGNISDLRVMGWYRQAPGKERELVAAINDGSSTYYADSVKGRFTISRDNAKNTVYLQMNSLKPEDTAVYYCAADLLYYDDTYSPHAYWGQGTQVTVSS

SEQ ID NO: 12668 - protein, 119 aa, Artificial Sequence
  Chemically Synthesized
QVQLQESGGGLVQAGGSLRLSCAASGTIFDDAGMGWYRQAPGKEREFVAGINSYGGITNYADSVKGRFTISRDNAKNTVYLQMNSLKPEDTAVYYCAVNVATLEDLGYWGQGTQVTVSS

SEQ ID NO: 12669 - protein, 118 aa, Artificial Sequence
  Chemically Synthesized
QVQLQESGGGLVQAGGSLRLSCAASGYISWFDAMGWYRQAPGKERELVASITYGATTYYADSVKGRFTISRDNAKNTVYLQMNSLKPEDTAVYYCAAVYYYRYYHPYWGQGTQVTVSS

SEQ ID NO: 12670 - protein, 117 aa, Artificial Sequence
  Chemically Synthesized
QVQLQESGGGLVQAGGSLRLSCAASGSISEVATMGWYRQAPGKERELVAAIDGGANTNYADSVKGRFTISRDNAKNTVYLQMNSLKPEDTAVYYCAAETRNRTTMYWGQGTQVTVSS

SEQ ID NO: 12671 - protein, 114 aa, Artificial Sequence
  Chemically Synthesized
QVQLQESGGGLVQAGGSLRLSCAASGSISIVYMGWYRQAPGKEREFVAAIGWGGTTYYADSVKGRFTISRDNAKNTVYLQMNSLKPEDTAVYYCAVYGYYHIYWGQGTQVTVSS

SEQ ID NO: 12672 - protein, 126 aa, Artificial Sequence
  Chemically Synthesized
QVQLQESGGGLVQAGGSLRLSCAASGNIFYVGGMGWYRQAPGKEREFVAAISVGTITNYADSVKGRFTISRDNAKNTVYLQMNSLKPEDTAVYYCAVTYGYTQYRGFQYDSDHRYWGQGTQVTVSS

SEQ ID NO: 12673 - protein, 125 aa, Artificial Sequence
  Chemically Synthesized
QVQLQESGGGLVQAGGSLRLSCAASGYIFAILDMGWYRQAPGKERELVAGIDDGSTTYYADSVKGRFTISRDNAKNTVYLQMNSLKPEDTAVYYCAVGGGPVDSVTVTSTTLIYWGQGTQVTVSS

SEQ ID NO: 12674 - protein, 118 aa, Artificial Sequence
  Chemically Synthesized
QVQLQESGGGLVQAGGSLRLSCAASGNISSADHMGWYRQAPGKEREFVATITEGSSTNYADSVKGRFTISRDNAKNTVYLQMNSLKPEDTAVYYCAVYYGYAGTHLYWGQGTQVTVSS

SEQ ID NO: 12675 - protein, 122 aa, Artificial Sequence
  Chemically Synthesized
QVQLQESGGGLVQAGGSLRLSCAASGSIFDQVTMGWYRQAPGKEREFVASITYGGTTNYADSVKGRFTISRDNAKNTVYLQMNSLKPEDTAVYYCAADWQAIGDKTYKFTYWGQGTQVTVSS

SEQ ID NO: 12676 - protein, 117 aa, Artificial Sequence
  Chemically Synthesized
QVQLQESGGGLVQAGGSLRLSCAASGSIFAYSMGWYRQAPGKERELVAGITDGSTTYYADSVKGRFTISRDNAKNTVYLQMNSLKPEDTAVYYCAVRAYVSDSYRYWGQGTQVTVSS

SEQ ID NO: 12677 - protein, 118 aa, Artificial Sequence
  Chemically Synthesized
QVQLQESGGGLVQAGGSLRLSCAASGSISDWAGMGWYRQAPGKERELVATIADGGSTNYADSVKGRFTISRDNAKNTVYLQMNSLKPEDTAVYYCAAGVAYYGDHGYWGQGTQVTVSS

SEQ ID NO: 12678 - protein, 117 aa, Artificial Sequence
  Chemically Synthesized
QVQLQESGGGLVQAGGSLRLSCAASGTIMGWYRQAPGKERELVATIGGGSNTYYADSVKGRFTISRDNAKNTVYLQMNSLKPEDTAVYYCAATYRQVGGGAHTHYYWGQGTQVTVSS

SEQ ID NO: 12679 - protein, 117 aa, Artificial Sequence
  Chemically Synthesized
QVQLQESGGGLVQAGGSLRLSCAASGSISPWGQMGWYRQAPGKEREFVATITRGTSQYADSVKGRFTISRDNAKNTVYLQMNSLKPEDTAVYYCAVYPSQYNLYSYWGQGTQVTVSS

SEQ ID NO: 12680 - protein, 121 aa, Artificial Sequence
  Chemically Synthesized
QVQLQESGGGLVQAGGSLRLSCAASGTIFRGSAMGWYRQAPGKEREFVAAIDYGTITNYADSVKGRFTISRDNAKNTVYLQMNSLKPEDTAVYYCAAYDHSLFTTVVSLYWGQGTQVTVSS

SEQ ID NO: 12681 - protein, 120 aa, Artificial Sequence
  Chemically Synthesized
QVQLQESGGGLVQAGGSLRLSCAASGSISPDSMGWYRQAPGKERELVAAIGTGGITYYADSVKGRFTISRDNAKNTVYLQMNSLKPEDTAVYYCAVLYRHELGPTPYPYWGQGTQVTVSS

SEQ ID NO: 12682 - protein, 118 aa, Artificial Sequence
  Chemically Synthesized
QVQLQESGGGLVQAGGSLRLSCAASGYISGNDPMGWYRQAPGKEREFVASIAWGGITNYADSVKGRFTISRDNAKNTVYLQMNSLKPEDTAVYYCAARSIAVRQLDYWGQGTQVTVSS

SEQ ID NO: 12683 - protein, 118 aa, Artificial Sequence
  Chemically Synthesized
QVQLQESGGGLVQAGGSLRLSCAASGSIFSDPYMGWYRQAPGKEREFVASIGAGGSTYYADSVKGRFTISRDNAKNTVYLQMNSLKPEDTAVYYCAATLYNGYQYRYWGQGTQVTVSS

SEQ ID NO: 12684 - protein, 118 aa, Artificial Sequence
  Chemically Synthesized
QVQLQESGGGLVQAGGSLRLSCAASGSIFGLASMGWYRQAPGKERELVASISPGGTTNYADSVKGRFTISRDNAKNTVYLQMNSLKPEDTAVYYCAAAYAYYLLHYYWGQGTQVTVSS

SEQ ID NO: 12685 - protein, 126 aa, Artificial Sequence
  Chemically Synthesized
QVQLQESGGGLVQAGGSLRLSCAASGNISWNYYMGWYRQAPGKERELVASINYGASTYYADSVKGRFTISRDNAKNTVYLQMNSLKPEDTAVYYCAVYSYDYYYFLDDQYRGYRYWGQGTQVTVSS

SEQ ID NO: 12686 - protein, 125 aa, Artificial Sequence
  Chemically Synthesized
QVQLQESGGGLVQAGGSLRLSCAASGTIFDSTSMGWYRQAPGKEREFVAGITSVVLPYADSVKGRFTISRDNAKNTVYLQMNSLKPEDTAVYYCAVVYGHTYGVGTHTSIWHSYWGQGTQVTVSS

SEQ ID NO: 12687 - protein, 121 aa, Artificial Sequence
  Chemically Synthesized
QVQLQESGGGLVQAGGSLRLSCAASGYISVWRYMGWYRQAPGKEREFVAAIVLVLVPYADSVKGRFTISRDNAKNTVYLQMNSLKPEDTAVYYCAAAVHNSGRQYLTYPYWGQGTQVTVSS

SEQ ID NO: 12688 - protein, 118 aa, Artificial Sequence
  Chemically Synthesized
QVQLQESGGGLVQAGGSLRLSCAASGNIFGGWVMGWYRQAPGKEREFVASITSGATTNYADSVKGRFTISRDNAKNTVYLQMNSLKPEDTAVYYCAASTRLYRTHGYWGQGTQVTVSS

SEQ ID NO: 12689 - protein, 125 aa, Artificial Sequence
  Chemically Synthesized
QVQLQESGGGLVQAGGSLRLSCAASGTIFDARVMGWYRQAPGKEREFVAAIGPGAITNYADSVKGRFTISRDNAKNTVYLQMNSLKPEDTAVYYCAVTTESQHASYYDGRPHQYWGQGTQVTVSS

SEQ ID NO: 12690 - protein, 121 aa, Artificial Sequence
  Chemically Synthesized
QVQLQESGGGLVQAGGSLRLSCAASGSISLLSMGWYRQAPGKEREFVATITYGAITNYADSVKGRFTISRDNAKNTVYLQMNSLKPEDTAVYYCAVWQRDDYDDRYVHAYWGQGTQVTVSS

SEQ ID NO: 12691 - protein, 117 aa, Artificial Sequence
  Chemically Synthesized
QVQLQESGGGLVQAGGSLRLSCAASGTIFGLLMGWYRQAPGKEREFVAAIDDGASTNYADSVKGRFTISRDNAKNTVYLQMNSLKPEDTAVYYCAVNGSGTFDLDYWGQGTQVTVSS

SEQ ID NO: 12692 - protein, 118 aa, Artificial Sequence
  Chemically Synthesized
QVQLQESGGGLVQAGGSLRLSCAASGYIFPSSYMGWYRQAPGKERELVASIGTGTNTNYADSVKGRFTISRDNAKNTVYLQMNSLKPEDTAVYYCAVYYGLPGRHYYWGQGTQVTVSS

SEQ ID NO: 12693 - protein, 126 aa, Artificial Sequence
  Chemically Synthesized
QVQLQESGGGLVQAGGSLRLSCAASGYISDLGDMGWYRQAPGKEREFVASIDSGGSTNYADSVKGRFTISRDNAKNTVYLQMNSLKPEDTAVYYCAALYIRYFSNDYTLPFGLVYWGQGTQVTVSS

SEQ ID NO: 12694 - protein, 118 aa, Artificial Sequence
  Chemically Synthesized
QVQLQESGGGLVQAGGSLRLSCAASGTIFYSAVMGWYRQAPGKEREFVATIAAGATTNYADSVKGRFTISRDNAKNTVYLQMNSLKPEDTAVYYCAAYKDSYVRYQYWGQGTQVTVSS

SEQ ID NO: 12695 - protein, 122 aa, Artificial Sequence
  Chemically Synthesized
QVQLQESGGGLVQAGGSLRLSCAASGTIFDYKVMGWYRQAPGKEREFVAGITWGASTYYADSVKGRFTISRDNAKNTVYLQMNSLKPEDTAVYYCAADAYEHSGIDRYHLYWGQGTQVTVSS

SEQ ID NO: 12696 - protein, 118 aa, Artificial Sequence
  Chemically Synthesized
QVQLQESGGGLVQAGGSLRLSCAASGTIFYAVPMGWYRQAPGKERELVAGIDGGSNTNYADSVKGRFTISRDNAKNTVYLQMNSLKPEDTAVYYCAADVPSNTRYGYWGQGTQVTVSS

SEQ ID NO: 12697 - protein, 122 aa, Artificial Sequence
  Chemically Synthesized
QVQLQESGGGLVQAGGSLRLSCAASGSIFGYPGMGWYRQAPGKEREFVAAISAGGITNYADSVKGRFTISRDNAKNTVYLQMNSLKPEDTAVYYCAVHNNHKGTRYRDHTYWGQGTQVTVSS

SEQ ID NO: 12698 - protein, 118 aa, Artificial Sequence
  Chemically Synthesized
QVQLQESGGGLVQAGGSLRLSCAASGNIFNYIGMGWYRQAPGKEREFVASITTGGTTNYADSVKGRFTISRDNAKNTVYLQMNSLKPEDTAVYYCAAADTSQYELIYWGQGTQVTVSS

SEQ ID NO: 12699 - protein, 113 aa, Artificial Sequence
  Chemically Synthesized
QVQLQESGGGLVQAGGSLRLSCAASGTIFDVYTMGWYRQAPGKERELVAAIGPGYADSVKGRFTISRDNAKNTVYLQMNSLKPEDTAVYYCAAWSGAYAYSYWGQGTQVTVSS

SEQ ID NO: 12700 - protein, 118 aa, Artificial Sequence
  Chemically Synthesized
QVQLQESGGGLVQAGGSLRLSCAASGTISVLVPMGWYRQAPGKERELVASITKGGTTNYADSVKGRFTISRDNAKNTVYLQMNSLKPEDTAVYYCAADGGVLSTYAYWGQGTQVTVSS

SEQ ID NO: 12701 - protein, 118 aa, Artificial Sequence
  Chemically Synthesized
QVQLQESGGGLVQAGGSLRLSCAASGTISDYDVMGWYRQAPGKERELVAAIAQGAITYYADSVKGRFTISRDNAKNTVYLQMNSLKPEDTAVYYCAAYPDDRDTFDYWGQGTQVTVSS

SEQ ID NO: 12702 - protein, 117 aa, Artificial Sequence
  Chemically Synthesized
QVQLQESGGGLVQAGGSLRLSCAASGSIFTHDDMGWYRQAPGKERELVASIGFGGSTYYADSVKGRFTISRDNAKNTVYLQMNSLKPEDTAVYYCAADTNDYSFFYWGQGTQVTVSS

SEQ ID NO: 12703 - protein, 120 aa, Artificial Sequence
  Chemically Synthesized
QVQLQESGGGLVQAGGSLRLSCAASGSIFGYDRMGWYRQAPGKERELVAAIADGGNTYADSVKGRFTISRDNAKNTVYLQMNSLKPEDTAVYYCAVYSSVRLTILCCIYWGQGTQVTVSS

SEQ ID NO: 12704 - protein, 121 aa, Artificial Sequence
  Chemically Synthesized
QVQLQESGGGLVQAGGSLRLSCAASGYISAADGMGWYRQAPGKERELVATIAEGANTNYADSVKGRFTISRDNAKNTVYLQMNSLKPEDTAVYYCAVDRSLVLKTFLTIYWGQGTQVTVSS

SEQ ID NO: 12705 - protein, 117 aa, Artificial Sequence
  Chemically Synthesized
QVQLQESGGGLVQAGGSLRLSCAASGYIFLLRPMGWYRQAPGKEREFVAGIADGGIPYADSVKGRFTISRDNAKNTVYLQMNSLKPEDTAVYYCAVDDYWGYRHEYWGQGTQVTVSS

SEQ ID NO: 12706 - protein, 117 aa, Artificial Sequence
  Chemically Synthesized
QVQLQESGGGLVQAGGSLRLSCAASGTIFSSRDMGWYRQAPGKERELVASIAGGGNTYYADSVKGRFTISRDNAKNTVYLQMNSLKPEDTAVYYCAAQWYVARVLYWGQGTQVTVSS

SEQ ID NO: 12707 - protein, 118 aa, Artificial Sequence
  Chemically Synthesized
QVQLQESGGGLVQAGGSLRLSCAASGSISSKVYMGWYRQAPGKERELVAAIGRGAITYYADSVKGRFTISRDNAKNTVYLQMNSLKPEDTAVYYCAAYKSATWWYKYWGQGTQVTVSS

SEQ ID NO: 12708 - protein, 121 aa, Artificial Sequence
  Chemically Synthesized
QVQLQESGGGLVQAGGSLRLSCAASGSIFPSGYMGWYRQAPGKEREFVAGISVGGITYYADSVKGRFTISRDNAKNTVYLQMNSLKPEDTAVYYCAAYWADRRPYRRHTYWGQGTQVTVSS

SEQ ID NO: 12709 - protein, 122 aa, Artificial Sequence
  Chemically Synthesized
QVQLQESGGGLVQAGGSLRLSCAASGTISDYTYMGWYRQAPGKEREFVAAIGWGAITLYADSVKGRFTISRDNAKNTVYLQMNSLKPEDTAVYYCAAQDYYYGLREYGLFYWGQGTQVTVSS

SEQ ID NO: 12710 - protein, 122 aa, Artificial Sequence
  Chemically Synthesized
QVQLQESGGGLVQAGGSLRLSCAASGTISERPAMGWYRQAPGKEREFVASINLGSNTNYADSVKGRFTISRDNAKNTVYLQMNSLKPEDTAVYYCAVVPSDPGKTPGYHTYWGQGTQVTVSS

SEQ ID NO: 12711 - protein, 126 aa, Artificial Sequence
  Chemically Synthesized
QVQLQESGGGLVQAGGSLRLSCAASGYISPYATMGWYRQAPGKEREFVAGIASGTTTNYADSVKGRFTISRDNAKNTVYLQMNSLKPEDTAVYYCAAPRRFEYVLLADYRVDHLYWGQGTQVTVSS

SEQ ID NO: 12712 - protein, 122 aa, Artificial Sequence
  Chemically Synthesized
QVQLQESGGGLVQAGGSLRLSCAASGSIFYNRTMGWYRQAPGKEREFVATIAYGTNTNYADSVKGRFTISRDNAKNTVYLQMNSLKPEDTAVYYCAVGQDRRGFSLVYLDYWGQGTQVTVSS

SEQ ID NO: 12713 - protein, 126 aa, Artificial Sequence
  Chemically Synthesized
QVQLQESGGGLVQAGGSLRLSCAASGSIFHSDGMGWYRQAPGKEREFVASINDGASTYYADSVKGRFTISRDNAKNTVYLQMNSLKPEDTAVYYCAVGDHGNWDRYYYNGRDLVYWGQGTQVTVSS

SEQ ID NO: 12714 - protein, 125 aa, Artificial Sequence
  Chemically Synthesized
QVQLQESGGGLVQAGGSLRLSCAASGYISQVYDMGWYRQAPGKERELVAAINGGAITYYADSVKGRFTISRDNAKNTVYLQMNSLKPEDTAVYYCAAGFDYVYVGYDKYDWHRYWGQGTQVTVSS

SEQ ID NO: 12715 - protein, 116 aa, Artificial Sequence
  Chemically Synthesized
QVQLQESGGGLVQAGGSLRLSCAASGTISDSTYMGWYRQAPGKERELVAAITVLVPYADSVKGRFTISRDNAKNTVYLQMNSLKPEDTAVYYCAAVDYNARLFAYWGQGTQVTVSS

SEQ ID NO: 12716 - protein, 118 aa, Artificial Sequence
  Chemically Synthesized
QVQLQESGGGLVQAGGSLRLSCAASGTISHYAGMGWYRQAPGKEREFVATIGSGSTTNYADSVKGRFTISRDNAKNTVYLQMNSLKPEDTAVYYCAVYTGYWSNFGYWGQGTQVTVSS

SEQ ID NO: 12717 - protein, 126 aa, Artificial Sequence
  Chemically Synthesized
QVQLQESGGGLVQAGGSLRLSCAASGTISGPTFMGWYRQAPGKERELVAAISYGSSTYYADSVKGRFTISRDNAKNTVYLQMNSLKPEDTAVYYCAVGIARYPRQPHAYHPQYPYWGQGTQVTVSS

SEQ ID NO: 12718 - protein, 122 aa, Artificial Sequence
  Chemically Synthesized
QVQLQESGGGLVQAGGSLRLSCAASGTISYYAYMGWYRQAPGKERELVASINSGATTYYADSVKGRFTISRDNAKNTVYLQMNSLKPEDTAVYYCAVQWYDLPESPNDHRYWGQGTQVTVSS

SEQ ID NO: 12719 - protein, 118 aa, Artificial Sequence
  Chemically Synthesized
QVQLQESGGGLVQAGGSLRLSCAASGSISPYSVMGWYRQAPGKEREFVATIARGATTNYADSVKGRFTISRDNAKNTVYLQMNSLKPEDTAVYYCAVVVTALTGHEYWGQGTQVTVSS

SEQ ID NO: 12720 - protein, 118 aa, Artificial Sequence
  Chemically Synthesized
QVQLQESGGGLVQAGGSLRLSCAASGSISDGRYMGWYRQAPGKERELVAAITDGTNTYYADSVKGRFTISRDNAKNTVYLQMNSLKPEDTAVYYCAVAYDRSKGYDYWGQGTQVTVSS

SEQ ID NO: 12721 - protein, 113 aa, Artificial Sequence
  Chemically Synthesized
QVQLQESGGGLVQAGGSLRLSCAASGLQMGWYRQAPGKERELVAAIAIGAITNYADSVKGRFTISRDNAKNTVYLQMNSLKPEDTAVYYCAVDQVYDGVHRYWGQGTQVTVSS

SEQ ID NO: 12722 - protein, 114 aa, Artificial Sequence
  Chemically Synthesized
QVQLQESGGGLVQAGGSLRLSCAASGNISYAYYMGWYRQAPGKEREFVAAIAPGASTYYADSVKGRFTISRDNAKNTVYLQMNSLKPEDTAVYYCAVDYFSLYWGQGTQVTVSS

SEQ ID NO: 12723 - protein, 122 aa, Artificial Sequence
  Chemically Synthesized
QVQLQESGGGLVQAGGSLRLSCAASGTISRALEMGWYRQAPGKEREFVATIGPGGTTNYADSVKGRFTISRDNAKNTVYLQMNSLKPEDTAVYYCAAEPQIGLYPYVEHYYWGQGTQVTVSS

SEQ ID NO: 12724 - protein, 126 aa, Artificial Sequence
  Chemically Synthesized
QVQLQESGGGLVQAGGSLRLSCAASGTIFRSTYMGWYRQAPGKERELVATINGGGITNYADSVKGRFTISRDNAKNTVYLQMNSLKPEDTAVYYCAADLAQIGDTLVYNGSYLNYWGQGTQVTVSS

SEQ ID NO: 12725 - protein, 118 aa, Artificial Sequence
  Chemically Synthesized
QVQLQESGGGLVQAGGSLRLSCAASGTISYALWMGWYRQAPGKEREFVAAINSGGTTYYADSVKGRFTISRDNAKNTVYLQMNSLKPEDTAVYYCAAATVRSYSHQYWGQGTQVTVSS

SEQ ID NO: 12726 - protein, 125 aa, Artificial Sequence
  Chemically Synthesized
QVQLQESGGGLVQAGGSLRLSCAASGNIFVQYNMGWYRQAPGKEREFVATISKGGTTNYADSVKGRFTISRDNAKNTVYLQMNSLKPEDTAVYYCAAYYIITVLDDDYYWDHDYWGQGTQVTVSS

SEQ ID NO: 12727 - protein, 118 aa, Artificial Sequence
  Chemically Synthesized
QVQLQESGGGLVQAGGSLRLSCAASGTISRRRAMGWYRQAPGKERELVAAINFGAITYYADSVKGRFTISRDNAKNTVYLQMNSLKPEDTAVYYCAVLYRAHRGHYYWGQGTQVTVSS

SEQ ID NO: 12728 - protein, 117 aa, Artificial Sequence
  Chemically Synthesized
QVQLQESGGGLVQAGGSLRLSCAASGTIFTRGAMGWYRQAPGKEREFVAAISGGTSTYADSVKGRFTISRDNAKNTVYLQMNSLKPEDTAVYYCAATLAVGRIFAYWGQGTQVTVSS

SEQ ID NO: 12729 - protein, 118 aa, Artificial Sequence
  Chemically Synthesized
QVQLQESGGGLVQAGGSLRLSCAASGYIFVDKYMGWYRQAPGKEREFVAAIGKGGNTNYADSVKGRFTISRDNAKNTVYLQMNSLKPEDTAVYYCAAGTYVYPTLSYWGQGTQVTVSS

SEQ ID NO: 12730 - protein, 126 aa, Artificial Sequence
  Chemically Synthesized
QVQLQESGGGLVQAGGSLRLSCAASGYIFDDYYMGWYRQAPGKEREFVAAIAYGSITNYADSVKGRFTISRDNAKNTVYLQMNSLKPEDTAVYYCAARNYVGNPDAPRFDYVLNYWGQGTQVTVSS

SEQ ID NO: 12731 - protein, 118 aa, Artificial Sequence
  Chemically Synthesized
QVQLQESGGGLVQAGGSLRLSCAASGYIFGLSYMGWYRQAPGKERELVAGIAGGATTYYADSVKGRFTISRDNAKNTVYLQMNSLKPEDTAVYYCAVGTSPDLTYGYWGQGTQVTVSS

SEQ ID NO: 12732 - protein, 118 aa, Artificial Sequence
  Chemically Synthesized
QVQLQESGGGLVQAGGSLRLSCAASGTISIDYDMGWYRQAPGKERELVATINRGANTNYADSVKGRFTISRDNAKNTVYLQMNSLKPEDTAVYYCAVAYKVDYAHDYWGQGTQVTVSS

SEQ ID NO: 12733 - protein, 118 aa, Artificial Sequence
  Chemically Synthesized
QVQLQESGGGLVQAGGSLRLSCAASGTISYTDEMGWYRQAPGKEREFVASISSGTTTYYADSVKGRFTISRDNAKNTVYLQMNSLKPEDTAVYYCAVYDADLYGLDYWGQGTQVTVSS

SEQ ID NO: 12734 - protein, 126 aa, Artificial Sequence
  Chemically Synthesized
QVQLQESGGGLVQAGGSLRLSCAASGYIFDAYSMGWYRQAPGKERELVAAIGTGGNTYYADSVKGRFTISRDNAKNTVYLQMNSLKPEDTAVYYCAAWWYGPEYTYGGGYGDHYYWGQGTQVTVSS

SEQ ID NO: 12735 - protein, 126 aa, Artificial Sequence
  Chemically Synthesized
QVQLQESGGGLVQAGGSLRLSCAASGTISAKDYMGWYRQAPGKERELVAAIAYGTSTYYADSVKGRFTISRDNAKNTVYLQMNSLKPEDTAVYYCAVIRARYGSYTYYDALGHGYWGQGTQVTVSS

SEQ ID NO: 12736 - protein, 109 aa, Artificial Sequence
  Chemically Synthesized
QVQLQESGGGLVQAGGSLRLSCAASGSIFDDYDMGWYRQAPGKEREFVATIAYGGNTYYADSVKGRFTISRDNAKNTVYLQMNSLKPEDTAVYYCAMYWGQGTQVTVSS

SEQ ID NO: 12737 - protein, 118 aa, Artificial Sequence
  Chemically Synthesized
QVQLQESGGGLVQAGGSLRLSCAASGTIFYVWGMGWYRQAPGKEREFVAGITQGTSTNYADSVKGRFTISRDNAKNTVYLQMNSLKPEDTAVYYCAVRRKLWPRLSYWGQGTQVTVSS

SEQ ID NO: 12738 - protein, 120 aa, Artificial Sequence
  Chemically Synthesized
QVQLQESGGGLVQAGGSLRLSCAASGTISTYSMGWYRQAPGKERELVATIAQGASTNYADSVKGRFTISRDNAKNTVYLQMNSLKPEDTAVYYCAVQTSTNVKSSSFFYWGQGTQVTVSS

SEQ ID NO: 12739 - protein, 122 aa, Artificial Sequence
  Chemically Synthesized
QVQLQESGGGLVQAGGSLRLSCAASGNIFLPRVMGWYRQAPGKEREFVAGINYGGSTNYADSVKGRFTISRDNAKNTVYLQMNSLKPEDTAVYYCAAGGYWYYRYDDRHNYWGQGTQVTVSS

SEQ ID NO: 12740 - protein, 121 aa, Artificial Sequence
  Chemically Synthesized
QVQLQESGGGLVQAGGSLRLSCAASGTISLTTYMGWYRQAPGKERELVAAISIGSTTYADSVKGRFTISRDNAKNTVYLQMNSLKPEDTAVYYCAAQYATPYYPDFYLNYWGQGTQVTVSS

SEQ ID NO: 12741 - protein, 118 aa, Artificial Sequence
  Chemically Synthesized
QVQLQESGGGLVQAGGSLRLSCAASGYIFLSWYMGWYRQAPGKEREFVATIGEGGTTYYADSVKGRFTISRDNAKNTVYLQMNSLKPEDTAVYYCAARYTTDGDHYYWGQGTQVTVSS

SEQ ID NO: 12742 - protein, 118 aa, Artificial Sequence
  Chemically Synthesized
QVQLQESGGGLVQAGGSLRLSCAASGYISAHIRMGWYRQAPGKERELVAAIGDGTSTYYADSVKGRFTISRDNAKNTVYLQMNSLKPEDTAVYYCAVPGSVRFLHQYWGQGTQVTVSS

SEQ ID NO: 12743 - protein, 126 aa, Artificial Sequence
  Chemically Synthesized
QVQLQESGGGLVQAGGSLRLSCAASGNISPGHVMGWYRQAPGKEREFVASISYGGSTNYADSVKGRFTISRDNAKNTVYLQMNSLKPEDTAVYYCAARGRRYSYQSPRWWNWHAYWGQGTQVTVSS

SEQ ID NO: 12744 - protein, 118 aa, Artificial Sequence
  Chemically Synthesized
QVQLQESGGGLVQAGGSLRLSCAASGYISGYPYMGWYRQAPGKEREFVATIAWGASTYYADSVKGRFTISRDNAKNTVYLQMNSLKPEDTAVYYCAVQGGYVLLYAYWGQGTQVTVSS

SEQ ID NO: 12745 - protein, 115 aa, Artificial Sequence
  Chemically Synthesized
QVQLQESGGGLVQAGGSLRLSCAASGTMLTTMGWYRQAPGKEREFVAGINYGASTNYADSVKGRFTISRDNAKNTVYLQMNSLKPEDTAVYYCAATDRSSDFCYWGQGTQVTVSS

SEQ ID NO: 12746 - protein, 116 aa, Artificial Sequence
  Chemically Synthesized
QVQLQESGGGLVQAGGSLRLSCAASGNIFYPHSMGWYRQAPGKERELLPLLVLVVLPYADSVKGRFTISRDNAKNTVYLQMNSLKPEDTAVYYCAAAFPNYSAFYWGQGTQVTVSS

SEQ ID NO: 12747 - protein, 126 aa, Artificial Sequence
  Chemically Synthesized
QVQLQESGGGLVQAGGSLRLSCAASGTISYGVKMGWYRQAPGKERELVASIDLGGSTYYADSVKGRFTISRDNAKNTVYLQMNSLKPEDTAVYYCAVKEGVYYPYRLHGYGYHHYWGQGTQVTVSS

SEQ ID NO: 12748 - protein, 118 aa, Artificial Sequence
  Chemically Synthesized
QVQLQESGGGLVQAGGSLRLSCAASGTIFSWREMGWYRQAPGKEREFVAAIDDGSNTYYADSVKGRFTISRDNAKNTVYLQMNSLKPEDTAVYYCAVEVRYRLDFIYWGQGTQVTVSS

SEQ ID NO: 12749 - protein, 122 aa, Artificial Sequence
  Chemically Synthesized
QVQLQESGGGLVQAGGSLRLSCAASGSIFYRRGMGWYRQAPGKERELVASINVGSSTNYADSVKGRFTISRDNAKNTVYLQMNSLKPEDTAVYYCAADHYPIYAEHSKLDYWGQGTQVTVSS

SEQ ID NO: 12750 - protein, 118 aa, Artificial Sequence
  Chemically Synthesized
QVQLQESGGGLVQAGGSLRLSCAASGNIFKRKTMGWYRQAPGKEREFVAGIGYGANTYYADSVKGRFTISRDNAKNTVYLQMNSLKPEDTAVYYCAAYPRNKRPLSYWGQGTQVTVSS

SEQ ID NO: 12751 - protein, 122 aa, Artificial Sequence
  Chemically Synthesized
QVQLQESGGGLVQAGGSLRLSCAASGYISLASYMGWYRQAPGKERELVATIGAGGTTNYADSVKGRFTISRDNAKNTVYLQMNSLKPEDTAVYYCAVLYRRAGRTYTYFDYWGQGTQVTVSS

SEQ ID NO: 12752 - protein, 118 aa, Artificial Sequence
  Chemically Synthesized
QVQLQESGGGLVQAGGSLRLSCAASGNISWYSYMGWYRQAPGKERELVAAIGRGSTTYYADSVKGRFTISRDNAKNTVYLQMNSLKPEDTAVYYCAAYYRTRARLPYWGQGTQVTVSS

SEQ ID NO: 12753 - protein, 117 aa, Artificial Sequence
  Chemically Synthesized
QVQLQESGGGLVQAGGSLRLSCAASGSITSLMGWYRQAPGKERELVASISIGSTTNYADSVKGRFTISRDNAKNTVYLQMNSLKPEDTAVYYCAAPYHTIFYLFDYWGQGTQVTVSS

SEQ ID NO: 12754 - protein, 117 aa, Artificial Sequence
  Chemically Synthesized
QVQLQESGGGLVQAGGSLRLSCAASGNIFYPVMGWYRQAPGKEREFVAAISDGTSTYYADSVKGRFTISRDNAKNTVYLQMNSLKPEDTAVYYCAAPYAYFTALDYWGQGTQVTVSS

SEQ ID NO: 12755 - protein, 121 aa, Artificial Sequence
  Chemically Synthesized
QVQLQESGGGLVQAGGSLRLSCAASGTISGVTSMGWYRQAPGKEREFVAAINGGGSTNYADSVKGRFTISRDNAKNTVYLQMNSLKPEDTAVYYCAAQTVDAYSTDDLSYWGQGTQVTVSS

SEQ ID NO: 12756 - protein, 122 aa, Artificial Sequence
  Chemically Synthesized
QVQLQESGGGLVQAGGSLRLSCAASGTISYDETMGWYRQAPGKERELVASITDGANTYYADSVKGRFTISRDNAKNTVYLQMNSLKPEDTAVYYCAVGVPNLARYDAYHFYWGQGTQVTVSS

SEQ ID NO: 12757 - protein, 126 aa, Artificial Sequence
  Chemically Synthesized
QVQLQESGGGLVQAGGSLRLSCAASGNIFGPAGMGWYRQAPGKERELVAAIGYGGSTNYADSVKGRFTISRDNAKNTVYLQMNSLKPEDTAVYYCAAYVPYTHEYHEGNHWYFSYWGQGTQVTVSS

SEQ ID NO: 12758 - protein, 113 aa, Artificial Sequence
  Chemically Synthesized
QVQLQESGGGLVQAGGSLRLSCAASGTIFLYDMGWYRQAPGKEREFVASIAPGGTTNYADSVKGRFTISRDNAKNTVYLQMNSLKPEDTAVYYCAVWYGHVYWGQGTQVTVSS

SEQ ID NO: 12759 - protein, 118 aa, Artificial Sequence
  Chemically Synthesized
QVQLQESGGGLVQAGGSLRLSCAASGTIFVSFVGMGWYRQAPGKERELVALLVRVVLPYADSVKGRFTISRDNAKNTVYLQMNSLKPEDTAVYYCAVYVYYVYRFFYWGQGTQVTVSS

SEQ ID NO: 12760 - protein, 123 aa, Artificial Sequence
  Chemically Synthesized
QVQLQESGGGLVQAGGSLRLSCAASGYISGSTAMGWYRQAPGKERELVASIADGATTYYADSVKGRFTISRDNAKNTVYLQMNSLKPEDTAVYYCAAIPLSAVWYLTHRLPYWGQGTQVTVSS

SEQ ID NO: 12761 - protein, 118 aa, Artificial Sequence
  Chemically Synthesized
QVQLQESGGGLVQAGGSLRLSCAASGNIFDRIYMGWYRQAPGKERELVAAISPGGITNYADSVKGRFTISRDNAKNTVYLQMNSLKPEDTAVYYCAVYIDVKPVHRYWGQGTQVTVSS

SEQ ID NO: 12762 - protein, 124 aa, Artificial Sequence
  Chemically Synthesized
QVQLQESGGGLVQAGGSLRLSCAASGSIFYRERMGWYRQAPGKEREFVAGIGRGANTNYADSVKGRFTISRDNAKNTVYLQMNSLKPEDTAVYYCAVEGTAGDYASGDGDFYYWGQGTQVTVSS

SEQ ID NO: 12763 - protein, 121 aa, Artificial Sequence
  Chemically Synthesized
QVQLQESGGGLVQAGGSLRLSCAASGNIFVSAMGWYRQAPGKERELVAAIAYGGSTNYADSVKGRFTISRDNAKNTVYLQMNSLKPEDTAVYYCAALAESSIRYNYPHRYWGQGTQVTVSS

SEQ ID NO: 12764 - protein, 118 aa, Artificial Sequence
  Chemically Synthesized
QVQLQESGGGLVQAGGSLRLSCAASGTIFGRRYMGWYRQAPGKERELVAAIGTGASTYYADSVKGRFTISRDNAKNTVYLQMNSLKPEDTAVYYCAVRYGDHRAFVYWGQGTQVTVSS

SEQ ID NO: 12765 - protein, 118 aa, Artificial Sequence
  Chemically Synthesized
QVQLQESGGGLVQAGGSLRLSCAASGNISDDSRMGWYRQAPGKERELVAGINYGATTYYADSVKGRFTISRDNAKNTVYLQMNSLKPEDTAVYYCAAAWYNYRGLTYWGQGTQVTVSS

SEQ ID NO: 12766 - protein, 124 aa, Artificial Sequence
  Chemically Synthesized
QVQLQESGGGLVQAGGSLRLSCAASGSIFIPAGMGWYRQAPGKERELVASIGLGANTNYADSVKGRFTISRDNAKNTVYLQMNSLKPEDTAVYYCAAPVIPDYVAGYLSWHDYWGQGTQVTVSS

SEQ ID NO: 12767 - protein, 125 aa, Artificial Sequence
  Chemically Synthesized
QVQLQESGGGLVQAGGSLRLSCAASGSISPAPYMGWYRQAPGKERELVAGIDDGASTYYADSVKGRFTISRDNAKNTVYLQMNSLKPEDTAVYYCAADSQPQFDYRLTHRGYAYWGQGTQVTVSS

SEQ ID NO: 12768 - protein, 116 aa, Artificial Sequence
  Chemically Synthesized
QVQLQESGGGLVQAGGSLRLSCAASGNISRIVYMGWYRQAPGKERELVAAITPGANTNYADSVKGRFTISRDNAKNTVYLQMNSLKPEDTAVYYCADKAWYPSIYWGQGTQVTVSS

SEQ ID NO: 12769 - protein, 118 aa, Artificial Sequence
  Chemically Synthesized
QVQLQESGGGLVQAGGSLRLSCAASGTISGPFDMGWYRQAPGKEREFVAGITVGGSTYYADSVKGRFTISRDNAKNTVYLQMNSLKPEDTAVYYCAASQGAYDGYGYWGQGTQVTVSS

SEQ ID NO: 12770 - protein, 118 aa, Artificial Sequence
  Chemically Synthesized
QVQLQESGGGLVQAGGSLRLSCAASGTISSDLRMGWYRQAPGKERELVAAIAPGGITNYADSVKGRFTISRDNAKNTVYLQMNSLKPEDTAVYYCAVPLISVLTTIYWGQGTQVTVSS

SEQ ID NO: 12771 - protein, 118 aa, Artificial Sequence
  Chemically Synthesized
QVQLQESGGGLVQAGGSLRLSCAASGNISYVFHMGWYRQAPGKEREFVAAIGVGATTNYADSVKGRFTISRDNAKNTVYLQMNSLKPEDTAVYYCAVNPQSYGGYGYWGQGTQVTVSS

SEQ ID NO: 12772 - protein, 118 aa, Artificial Sequence
  Chemically Synthesized
QVQLQESGGGLVQAGGSLRLSCAASGNISYYYYMGWYRQAPGKEREFVASIGQGAITNYADSVKGRFTISRDNAKNTVYLQMNSLKPEDTAVYYCAAYGSERRNLTYWGQGTQVTVSS

SEQ ID NO: 12773 - protein, 122 aa, Artificial Sequence
  Chemically Synthesized
QVQLQESGGGLVQAGGSLRLSCAASGTISGQNWMGWYRQAPGKERELVATIDGGSSTYYADSVKGRFTISRDNAKNTVYLQMNSLKPEDTAVYYCAVGHREEGSLQGGHPYWGQGTQVTVSS

SEQ ID NO: 12774 - protein, 118 aa, Artificial Sequence
  Chemically Synthesized
QVQLQESGGGLVQAGGSLRLSCAASGYISRRDVMGWYRQAPGKEREFVATITDGGNTNYADSVKGRFTISRDNAKNTVYLQMNSLKPEDTAVYYCAAQDGLSVDYGYWGQGTQVTVSS

SEQ ID NO: 12775 - protein, 126 aa, Artificial Sequence
  Chemically Synthesized
QVQLQESGGGLVQAGGSLRLSCAASGTIFADRDMGWYRQAPGKERELVAGIAEGATTYYADSVKGRFTISRDNAKNTVYLQMNSLKPEDTAVYYCAAPYTYDDYGYRGYQTDFDYWGQGTQVTVSS

SEQ ID NO: 12776 - protein, 122 aa, Artificial Sequence
  Chemically Synthesized
QVQLQESGGGLVQAGGSLRLSCAASGTISYYHYMGWYRQAPGKEREFVATIARGSSTNYADSVKGRFTISRDNAKNTVYLQMNSLKPEDTAVYYCAAVPTTREFPTYSHSYWGQGTQVTVSS

SEQ ID NO: 12777 - protein, 126 aa, Artificial Sequence
  Chemically Synthesized
QVQLQESGGGLVQAGGSLRLSCAASGTIFSYDYMGWYRQAPGKEREFVAGIARGSTTYYADSVKGRFTISRDNAKNTVYLQMNSLKPEDTAVYYCAVVTDVLTGHVWSLSYYFHYWGQGTQVTVSS

SEQ ID NO: 12778 - protein, 122 aa, Artificial Sequence
  Chemically Synthesized
QVQLQESGGGLVQAGGSLRLSCAASGYISRRAAMGWYRQAPGKERELVAAISAGGTTYYADSVKGRFTISRDNAKNTVYLQMNSLKPEDTAVYYCAAWHARNLGRADRHVYWGQGTQVTVSS

SEQ ID NO: 12779 - protein, 118 aa, Artificial Sequence
  Chemically Synthesized
QVQLQESGGGLVQAGGSLRLSCAASGTIFRAQYMGWYRQAPGKERELVASISNGTITYYADSVKGRFTISRDNAKNTVYLQMNSLKPEDTAVYYCAAGLPYGLLHSYWGQGTQVTVSS

SEQ ID NO: 12780 - protein, 118 aa, Artificial Sequence
  Chemically Synthesized
QVQLQESGGGLVQAGGSLRLSCAASGTIFPYYIMGWYRQAPGKERELVATISTGAITNYADSVKGRFTISRDNAKNTVYLQMNSLKPEDTAVYYCAVDYNWDGTHEYWGQGTQVTVSS

SEQ ID NO: 12781 - protein, 122 aa, Artificial Sequence
  Chemically Synthesized
QVQLQESGGGLVQAGGSLRLSCAASGNIFIYLQMGWYRQAPGKEREFVASITYGASTYYADSVKGRFTISRDNAKNTVYLQMNSLKPEDTAVYYCAVGGGLLSDPDIYHPYWGQGTQVTVSS

SEQ ID NO: 12782 - protein, 118 aa, Artificial Sequence
  Chemically Synthesized
QVQLQESGGGLVQAGGSLRLSCAASGYISGPYYMGWYRQAPGKEREFVATIDPGASTYYADSVKGRFTISRDNAKNTVYLQMNSLKPEDTAVYYCAAHNPLSDVHYYWGQGTQVTVSS

SEQ ID NO: 12783 - protein, 126 aa, Artificial Sequence
  Chemically Synthesized
QVQLQESGGGLVQAGGSLRLSCAASGNISPGYGMGWYRQAPGKEREFVATIDQGASTNYADSVKGRFTISRDNAKNTVYLQMNSLKPEDTAVYYCAVGLYRYYSTQYIILFYHDYWGQGTQVTVSS

SEQ ID NO: 12784 - protein, 118 aa, Artificial Sequence
  Chemically Synthesized
QVQLQESGGGLVQAGGSLRLSCAASGNISSTYGMGWYRQAPGKEREFVASIDKGANTYYADSVKGRFTISRDNAKNTVYLQMNSLKPEDTAVYYCAAYYNGYYPHNYWGQGTQVTVSS

SEQ ID NO: 12785 - protein, 118 aa, Artificial Sequence
  Chemically Synthesized
QVQLQESGGGLVQAGGSLRLSCAASGTIFLYYRMGWYRQAPGKEREFVATINIGGITYYADSVKGRFTISRDNAKNTVYLQMNSLKPEDTAVYYCAVRYGNFVYHRYWGQGTQVTVSS

SEQ ID NO: 12786 - protein, 117 aa, Artificial Sequence
  Chemically Synthesized
QVQLQESGGGLVQAGGSLRLSCAASGNISDVWMGWYRQAPGKERELVAAINGGGNTYYADSVKGRFTISRDNAKNTVYLQMNSLKPEDTAVYYCAVGVRYPTVFGYWGQGTQVTVSS

SEQ ID NO: 12787 - protein, 118 aa, Artificial Sequence
  Chemically Synthesized
QVQLQESGGGLVQAGGSLRLSCAASGTISWFYGMGWYRQAPGKERELVAGIDDRCYYLYADSVKGRFTISRDNAKNTVYLQMNSLKPEDTAVYYCAVRRRRYDSYLYWGQGTQVTVSS

SEQ ID NO: 12788 - protein, 122 aa, Artificial Sequence
  Chemically Synthesized
QVQLQESGGGLVQAGGSLRLSCAASGYISDYYYMGWYRQAPGKEREFVAAINDGSNTYYADSVKGRFTISRDNAKNTVYLQMNSLKPEDTAVYYCAAYVPQLSYLGRTFWYWGQGTQVTVSS

SEQ ID NO: 12789 - protein, 126 aa, Artificial Sequence
  Chemically Synthesized
QVQLQESGGGLVQAGGSLRLSCAASGNIFYYYDMGWYRQAPGKEREFVAAIDYGASTNYADSVKGRFTISRDNAKNTVYLQMNSLKPEDTAVYYCAVYTPYAGAYSHKLGRYYYYWGQGTQVTVSS

SEQ ID NO: 12790 - protein, 122 aa, Artificial Sequence
  Chemically Synthesized
QVQLQESGGGLVQAGGSLRLSCAASGTIFFDWDMGWYRQAPGKERELVATITEGATTNYADSVKGRFTISRDNAKNTVYLQMNSLKPEDTAVYYCAVTIAPDLYVFPGFGYWGQGTQVTVSS

SEQ ID NO: 12791 - protein, 126 aa, Artificial Sequence
  Chemically Synthesized
QVQLQESGGGLVQAGGSLRLSCAASGYISFSSVMGWYRQAPGKEREFVATIDQGTTTYYADSVKGRFTISRDNAKNTVYLQMNSLKPEDTAVYYCAVARQAPFTPPEGAAYSLGYWGQGTQVTVSS

SEQ ID NO: 12792 - protein, 114 aa, Artificial Sequence
  Chemically Synthesized
QVQLQESGGGLVQAGGSLRLSCAASGNIFLPSVMGWYRQAPGKERELVAAIAYGGITYYADSVKGRFTISRDNAKNTVYLQMNSLKPEDTAVYYCAARWNLKYWGQGTQVTVSS

SEQ ID NO: 12793 - protein, 117 aa, Artificial Sequence
  Chemically Synthesized
QVQLQESGGGLVQAGGSLRLSCAASGNISGESMGWYRQAPGKERELVATIAVGTSTNYADSVKGRFTISRDNAKNTVYLQMNSLKPEDTAVYYCAVVTYGNFGHIYWGQGTQVTVSS

SEQ ID NO: 12794 - protein, 122 aa, Artificial Sequence
  Chemically Synthesized
QVQLQESGGGLVQAGGSLRLSCAASGYISLSLFMGWYRQAPGKEREFVATIDPGAITNYADSVKGRFTISRDNAKNTVYLQMNSLKPEDTAVYYCAVRPYTDDLRYSDFAYWGQGTQVTVSS

SEQ ID NO: 12795 - protein, 126 aa, Artificial Sequence
  Chemically Synthesized
QVQLQESGGGLVQAGGSLRLSCAASGNIFPPLRMGWYRQAPGKERELVASITIGSITYYADSVKGRFTISRDNAKNTVYLQMNSLKPEDTAVYYCAVNQERPDDFLWYWVYGLNYWGQGTQVTVSS

SEQ ID NO: 12796 - protein, 122 aa, Artificial Sequence
  Chemically Synthesized
QVQLQESGGGLVQAGGSLRLSCAASGNISDQFLMGWYRQAPGKEREFVAAIGEGANTYYADSVKGRFTISRDNAKNTVYLQMNSLKPEDTAVYYCAVTAYWWDPRPSVLYYWGQGTQVTVSS

SEQ ID NO: 12797 - protein, 118 aa, Artificial Sequence
  Chemically Synthesized
QVQLQESGGGLVQAGGSLRLSCAASGNIFYNLGMGWYRQAPGKERELVASISDGGITNYADSVKGRFTISRDNAKNTVYLQMNSLKPEDTAVYYCAAYVPEVWRLDYWGQGTQVTVSS

SEQ ID NO: 12798 - protein, 126 aa, Artificial Sequence
  Chemically Synthesized
QVQLQESGGGLVQAGGSLRLSCAASGNIFRYQAMGWYRQAPGKEREFVAAIGYGSNTNYADSVKGRFTISRDNAKNTVYLQMNSLKPEDTAVYYCAVKQTRGYYDFRPTYARLRYWGQGTQVTVSS

SEQ ID NO: 12799 - protein, 119 aa, Artificial Sequence
  Chemically Synthesized
QVQLQESGGGLVQAGGSLRLSCAASGNFPGLMGWYRQAPGKEREFVAGISRGGNTYYADSVKGRFTISRDNAKNTVYLQMNSLKPEDTAVYYCAAHSGRYLYSKLCLYWGQGTQVTVSS

SEQ ID NO: 12800 - protein, 116 aa, Artificial Sequence
  Chemically Synthesized
QVQLQESGGGLVQAGGSLRLSCAASGSISGSYKMGWYRQAPGKEREFVAKYQYADSVKGRFTISRDNAKNTVYLQMNSLKPEDTAVYYCAVTLPVPGDAYLDYIYWGQGTQVTVSS

SEQ ID NO: 12801 - protein, 115 aa, Artificial Sequence
  Chemically Synthesized
QVQLQESGGGLVQAGGSLRLSCAASGNIFRYSIMGWYRQAPGKEREFVATIGPGTTTNYADSVKGRFTISRDNAKNTVYLQMNSLKPEDTAVYYCAAGVVKYIYWGQGTQVTVSS

SEQ ID NO: 12802 - protein, 122 aa, Artificial Sequence
  Chemically Synthesized
QVQLQESGGGLVQAGGSLRLSCAASGTISRRTQMGWYRQAPGKERELVASIAYGTNTNYADSVKGRFTISRDNAKNTVYLQMNSLKPEDTAVYYCAADLAPDYRKQDFHRYWGQGTQVTVSS

SEQ ID NO: 12803 - protein, 117 aa, Artificial Sequence
  Chemically Synthesized
QVQLQESGGGLVQAGGSLRLSCAASGNIFTRRRMGWYRQAPGKEREFVATITAGGITYYADSVKGRFTISRDNAKNTVYLQMNSLKPEDTAVYYCAVKRRRYTLYYWGQGTQVTVSS

SEQ ID NO: 12804 - protein, 126 aa, Artificial Sequence
  Chemically Synthesized
QVQLQESGGGLVQAGGSLRLSCAASGTISYYPWMGWYRQAPGKEREFVASIGVGSITNYADSVKGRFTISRDNAKNTVYLQMNSLKPEDTAVYYCAALTPHDFSNDAWYDYGLSYWGQGTQVTVSS

SEQ ID NO: 12805 - protein, 118 aa, Artificial Sequence
  Chemically Synthesized
QVQLQESGGGLVQAGGSLRLSCAASGSISPDRYMGWYRQAPGKEREFVASIAGGTNTYYADSVKGRFTISRDNAKNTVYLQMNSLKPEDTAVYYCAVVSTYNDGYFYWGQGTQVTVSS

SEQ ID NO: 12806 - protein, 126 aa, Artificial Sequence
  Chemically Synthesized
QVQLQESGGGLVQAGGSLRLSCAASGYIFSQYYMGWYRQAPGKEREFVAAIAFGTNTNYADSVKGRFTISRDNAKNTVYLQMNSLKPEDTAVYYCAVEDGYDGDRGDPYLRDHPYWGQGTQVTVSS

SEQ ID NO: 12807 - protein, 112 aa, Artificial Sequence
  Chemically Synthesized
QVQLQESGGGLVQAGGSLRLSCAASGYMGWYRQAPGKERELVAAIGYGSSTYYADSVKGRFTISRDNAKNTVYLQMNSLKPEDTAVYYCAALLYGLVYHQYWGQGTQVTVSS

SEQ ID NO: 12808 - protein, 122 aa, Artificial Sequence
  Chemically Synthesized
QVQLQESGGGLVQAGGSLRLSCAASGSISSGQLMGWYRQAPGKEREFVAAIGNGATTNYADSVKGRFTISRDNAKNTVYLQMNSLKPEDTAVYYCAVGYSNVQTRYLQHPYWGQGTQVTVSS

SEQ ID NO: 12809 - protein, 118 aa, Artificial Sequence
  Chemically Synthesized
QVQLQESGGGLVQAGGSLRLSCAASGSIFYDYYMGWYRQAPGKERELVATIGYGSTTYYADSVKGRFTISRDNAKNTVYLQMNSLKPEDTAVYYCAAYDPAADRFWYWGQGTQVTVSS

SEQ ID NO: 12810 - protein, 122 aa, Artificial Sequence
  Chemically Synthesized
QVQLQESGGGLVQAGGSLRLSCAASGYIFRYLRMGWYRQAPGKERELVAGISGGTTTYYADSVKGRFTISRDNAKNTVYLQMNSLKPEDTAVYYCAVYGYDQAPRGRHHAYWGQGTQVTVSS

SEQ ID NO: 12811 - protein, 118 aa, Artificial Sequence
  Chemically Synthesized
QVQLQESGGGLVQAGGSLRLSCAASGTISHPYYMGWYRQAPGKEREFVAAIDDGGSTNYADSVKGRFTISRDNAKNTVYLQMNSLKPEDTAVYYCAAERYGTEYLVYWGQGTQVTVSS

SEQ ID NO: 12812 - protein, 126 aa, Artificial Sequence
  Chemically Synthesized
QVQLQESGGGLVQAGGSLRLSCAASGTIFTIRNMGWYRQAPGKEREFVASIDLGGNTYYADSVKGRFTISRDNAKNTVYLQMNSLKPEDTAVYYCAVGRDYAGYTAYVYLPDLDYWGQGTQVTVSS

SEQ ID NO: 12813 - protein, 117 aa, Artificial Sequence
  Chemically Synthesized
QVQLQESGGGLVQAGGSLRLSCAASGTISDPWPMGWYRQAPGKERELVAAIGYGANTYYADSVKGRFTISRDNAKNTVYLQMNSLKPEDTAVYYCAASRDDVYLDYWGQGTQVTVSS

SEQ ID NO: 12814 - protein, 117 aa, Artificial Sequence
  Chemically Synthesized
QVQLQESGGGLVQAGGSLRLSCAASGNISYSTMGWYRQAPGKERELVATIGSGSTTNYADSVKGRFTISRDNAKNTVYLQMNSLKPEDTAVYYCAADVHTDPDHSYWGQGTQVTVSS

SEQ ID NO: 12815 - protein, 122 aa, Artificial Sequence
  Chemically Synthesized
QVQLQESGGGLVQAGGSLRLSCAASGYISDAGVMGWYRQAPGKEREFVATITGGGNTNYADSVKGRFTISRDNAKNTVYLQMNSLKPEDTAVYYCAVDARYPSTDENGHLYWGQGTQVTVSS

SEQ ID NO: 12816 - protein, 118 aa, Artificial Sequence
  Chemically Synthesized
QVQLQESGGGLVQAGGSLRLSCAASGNIFGYPQMGWYRQAPGKEREFVAAITTGTTTNYADSVKGRFTISRDNAKNTVYLQMNSLKPEDTAVYYCAVDDYQRGEHRYWGQGTQVTVSS

SEQ ID NO: 12817 - protein, 116 aa, Artificial Sequence
  Chemically Synthesized
QVQLQESGGGLVQAGGSLRLSCAASGNISRVDIMGWYRQAPGKEREFVAAISQGTTNYADSVKGRFTISRDNAKNTVYLQMNSLKPEDTAVYYCAAQSAYEYHAYWGQGTQVTVSS

SEQ ID NO: 12818 - protein, 121 aa, Artificial Sequence
  Chemically Synthesized
QVQLQESGGGLVQAGGSLRLSCAASGTISQGDGMGWYRQAPGKERELVATIAEGANTYYADSVKGRFTISRDNAKNTVYLQMNSLKPEDTAVYYCAARYLPHPGDVDRIYWGQGTQVTVSS

SEQ ID NO: 12819 - protein, 117 aa, Artificial Sequence
  Chemically Synthesized
QVQLQESGGGLVQAGGSLRLSCAASGNIFGVSMGWYRQAPGKERELVAAIGYGTSTNYADSVKGRFTISRDNAKNTVYLQMNSLKPEDTAVYYCAATERHFYDFQYWGQGTQVTVSS

SEQ ID NO: 12820 - protein, 118 aa, Artificial Sequence
  Chemically Synthesized
QVQLQESGGGLVQAGGSLRLSCAASGSIFAAPYMGWYRQAPGKEREFVAAISVGGSTYYADSVKGRFTISRDNAKNTVYLQMNSLKPEDTAVYYCAVGDQQVTRHRYWGQGTQVTVSS

SEQ ID NO: 12821 - protein, 122 aa, Artificial Sequence
  Chemically Synthesized
QVQLQESGGGLVQAGGSLRLSCAASGSISTYAYMGWYRQAPGKEREFVAAISYGGTTYYADSVKGRFTISRDNAKNTVYLQMNSLKPEDTAVYYCAARGTSQYPYPHNHDYWGQGTQVTVSS

SEQ ID NO: 12822 - protein, 122 aa, Artificial Sequence
  Chemically Synthesized
QVQLQESGGGLVQAGGSLRLSCAASGNIFVRGSMGWYRQAPGKEREFVAAIAPGASTYYADSVKGRFTISRDNAKNTVYLQMNSLKPEDTAVYYCAARRDEYDYYSYDHTYWGQGTQVTVSS

SEQ ID NO: 12823 - protein, 118 aa, Artificial Sequence
  Chemically Synthesized
QVQLQESGGGLVQAGGSLRLSCAASGTISFDAIMGWYRQAPGKERELVAGITAGGITNYADSVKGRFTISRDNAKNTVYLQMNSLKPEDTAVYYCAVISKQGYYYTYWGQGTQVTVSS

SEQ ID NO: 12824 - protein, 122 aa, Artificial Sequence
  Chemically Synthesized
QVQLQESGGGLVQAGGSLRLSCAASGTIFYYTRMGWYRQAPGKEREFVAGIAAGASTYYADSVKGRFTISRDNAKNTVYLQMNSLKPEDTAVYYCAVQPIWTYIPYRYHSYWGQGTQVTVSS

SEQ ID NO: 12825 - protein, 117 aa, Artificial Sequence
  Chemically Synthesized
QVQLQESGGGLVQAGGSLRLSCAASGNIFFIYGMGWYRQAPGKEREFVAAITSVLLPYADSVKGRFTISRDNAKNTVYLQMNSLKPEDTAVYYCAAGDADDAVFAYWGQGTQVTVSS

SEQ ID NO: 12826 - protein, 118 aa, Artificial Sequence
  Chemically Synthesized
QVQLQESGGGLVQAGGSLRLSCAASGTIFRTGGMGWYRQAPGKEREFVAGITVGAITNYADSVKGRFTISRDNAKNTVYLQMNSLKPEDTAVYYCAVYDYPIEYYAYWGQGTQVTVSS

SEQ ID NO: 12827 - protein, 118 aa, Artificial Sequence
  Chemically Synthesized
QVQLQESGGGLVQAGGSLRLSCAASGSISGDVSMGWYRQAPGKERELVAGIGYGGITYYADSVKGRFTISRDNAKNTVYLQMNSLKPEDTAVYYCAAHELTLDTHYYWGQGTQVTVSS

SEQ ID NO: 12828 - protein, 122 aa, Artificial Sequence
  Chemically Synthesized
QVQLQESGGGLVQAGGSLRLSCAASGSISGAYTMGWYRQAPGKERELVATITPGASTNYADSVKGRFTISRDNAKNTVYLQMNSLKPEDTAVYYCAVYYNTFVYGGGAYKYWGQGTQVTVSS

SEQ ID NO: 12829 - protein, 125 aa, Artificial Sequence
  Chemically Synthesized
QVQLQESGGGLVQAGGSLRLSCAASGSIFDQRRMGWYRQAPGKEREFVAGIDRGGITNYADSVKGRFTISRDNAKNTVYLQMNSLKPEDTAVYYCAAYVPTSLSYVLDSLLNIYWGQGTQVTVSS

SEQ ID NO: 12830 - protein, 122 aa, Artificial Sequence
  Chemically Synthesized
QVQLQESGGGLVQAGGSLRLSCAASGSISHFSYMGWYRQAPGKERELVAAIASGTSTYYADSVKGRFTISRDNAKNTVYLQMNSLKPEDTAVYYCAATPYVPDRYPDELAYWGQGTQVTVSS

SEQ ID NO: 12831 - protein, 126 aa, Artificial Sequence
  Chemically Synthesized
QVQLQESGGGLVQAGGSLRLSCAASGTISLGGVMGWYRQAPGKERELVASIDTGGITNYADSVKGRFTISRDNAKNTVYLQMNSLKPEDTAVYYCAALRGVRGYYPQSLAYWHPYWGQGTQVTVSS

SEQ ID NO: 12832 - protein, 118 aa, Artificial Sequence
  Chemically Synthesized
QVQLQESGGGLVQAGGSLRLSCAASGSISVIILMGWYRQAPGKEREFVATITYGATTYYADSVKGRFTISRDNAKNTVYLQMNSLKPEDTAVYYCAANVGTRWDLRYWGQGTQVTVSS

SEQ ID NO: 12833 - protein, 121 aa, Artificial Sequence
  Chemically Synthesized
QVQLQESGGGLVQAGGSLRLSCAASGSISTLLMGWYRQAPGKEREFVATIAYGGTTYYADSVKGRFTISRDNAKNTVYLQMNSLKPEDTAVYYCAAITHDYSDYAGDYTYWGQGTQVTVSS

SEQ ID NO: 12834 - protein, 117 aa, Artificial Sequence
  Chemically Synthesized
QVQLQESGGGLVQAGGSLRLSCAASGTIFTFGGMGWYRQAPGKEREFVAAITKGTSTNYADSVKGRFTISRDNAKNTVYLQMNSLKPEDTAVYYCAASYTSDRYSYWGQGTQVTVSS

SEQ ID NO: 12835 - protein, 127 aa, Artificial Sequence
  Chemically Synthesized
QVQLQESGGGLVQAGGSLRLSCAASGTIFVWYTMGWYRQAPGKERELVASIGYGGSTNYADSVKGRFTISRDNAKNTVYLQMNSLKPEDTAVYYCAVGSYAGGRTTYSDVWGPHVYWGQGTQVTVSS

SEQ ID NO: 12836 - protein, 118 aa, Artificial Sequence
  Chemically Synthesized
QVQLQESGGGLVQAGGSLRLSCAASGTISDGSFMGWYRQAPGKEREFVASIGYGGSTNYADSVKGRFTISRDNAKNTVYLQMNSLKPEDTAVYYCAALGYRYSIHKYWGQGTQVTVSS

SEQ ID NO: 12837 - protein, 108 aa, Artificial Sequence
  Chemically Synthesized
QVQLQESGGGLVQAGGSLRLSCAASGYISSSFMGWYRQAPGKERELVATMISVLLPYADSVKGRFTISRDNAKNTVYLQMNSLKPEDTAVYYCAFAYWGQGTQVTVSS

SEQ ID NO: 12838 - protein, 117 aa, Artificial Sequence
  Chemically Synthesized
QVQLQESGGGLVQAGGSLRLSCAASGTISGTTMGWYRQAPGKERELVATIDYGSTTNYADSVKGRFTISRDNAKNTVYLQMNSLKPEDTAVYYCAVPDGPALAFNYWGQGTQVTVSS

SEQ ID NO: 12839 - protein, 118 aa, Artificial Sequence
  Chemically Synthesized
QVQLQESGGGLVQAGGSLRLSCAASGTISYVRQMGWYRQAPGKERELVASIGTGGNTNYADSVKGRFTISRDNAKNTVYLQMNSLKPEDTAVYYCAAYNRYSDIHDYWGQGTQVTVSS

SEQ ID NO: 12840 - protein, 117 aa, Artificial Sequence
  Chemically Synthesized
QVQLQESGGGLVQAGGSLRLSCAASGTISRAPFMGWYRQAPGKEREFVAGISVGATTYADSVKGRFTISRDNAKNTVYLQMNSLKPEDTAVYYCAVRFERVYDYLYWGQGTQVTVSS

SEQ ID NO: 12841 - protein, 118 aa, Artificial Sequence
  Chemically Synthesized
QVQLQESGGGLVQAGGSLRLSCAASGSISAWYVMGWYRQAPGKERELVATIDIGSSTYYADSVKGRFTISRDNAKNTVYLQMNSLKPEDTAVYYCAAGVYAFYGLVYWGQGTQVTVSS

SEQ ID NO: 12842 - protein, 118 aa, Artificial Sequence
  Chemically Synthesized
QVQLQESGGGLVQAGGSLRLSCAASGSISTPAYMGWYRQAPGKERELVAGINRGGNTNYADSVKGRFTISRDNAKNTVYLQMNSLKPEDTAVYYCAAVHLSARDHVYWGQGTQVTVSS

SEQ ID NO: 12843 - protein, 117 aa, Artificial Sequence
  Chemically Synthesized
QVQLQESGGGLVQAGGSLRLSCAASGSISPTSWMGWYRQAPGKERELVATIDDGTITYYADSVKGRFTISRDNAKNTVYLQMNSLKPEDTAVYYCAVSDDSDYYHYWGQGTQVTVSS

SEQ ID NO: 12844 - protein, 122 aa, Artificial Sequence
  Chemically Synthesized
QVQLQESGGGLVQAGGSLRLSCAASGYIFVQTIMGWYRQAPGKEREFVAAITPGASTNYADSVKGRFTISRDNAKNTVYLQMNSLKPEDTAVYYCAVDDAAERHYGSAHYYWGQGTQVTVSS

SEQ ID NO: 12845 - protein, 121 aa, Artificial Sequence
  Chemically Synthesized
QVQLQESGGGLVQAGGSLRLSCAASGYIFFVLYMGWYRQAPGKEREFVAGITHGSNTNYADSVKGRFTISRDNAKNTVYLQMNSLKPEDTAVYYCAVYYYDYQPVAYHPYWGQGTQVTVSS

SEQ ID NO: 12846 - protein, 118 aa, Artificial Sequence
  Chemically Synthesized
QVQLQESGGGLVQAGGSLRLSCAASGSIFYSNRMGWYRQAPGKEREFVASIGYGTITYYADSVKGRFTISRDNAKNTVYLQMNSLKPEDTAVYYCAATQPITWGHWYWGQGTQVTVSS

SEQ ID NO: 12847 - protein, 121 aa, Artificial Sequence
  Chemically Synthesized
QVQLQESGGGLVQAGGSLRLSCAASGSISGPDMGWYRQAPGKEREFVAGISLGTNTNYADSVKGRFTISRDNAKNTVYLQMNSLKPEDTAVYYCAADYKQVFTFGSRYGYWGQGTQVTVSS

SEQ ID NO: 12848 - protein, 121 aa, Artificial Sequence
  Chemically Synthesized
QVQLQESGGGLVQAGGSLRLSCAASGNISYGDSMGWYRQAPGKEREFVASINVGTNTNYADSVKGRFTISRDNAKNTVYLQMNSLKPEDTAVYYCAADGPVDNRYPFHGYWGQGTQVTVSS

SEQ ID NO: 12849 - protein, 118 aa, Artificial Sequence
  Chemically Synthesized
QVQLQESGGGLVQAGGSLRLSCAASGNISGFTQMGWYRQAPGKERELVATIARGASTYYADSVKGRFTISRDNAKNTVYLQMNSLKPEDTAVYYCAVLQSTWVRYQYWGQGTQVTVSS

SEQ ID NO: 12850 - protein, 118 aa, Artificial Sequence
  Chemically Synthesized
QVQLQESGGGLVQAGGSLRLSCAASGNISSAYRMGWYRQAPGKEREFVATIAYGATTNYADSVKGRFTISRDNAKNTVYLQMNSLKPEDTAVYYCAAGDAYYTDLEYWGQGTQVTVSS

SEQ ID NO: 12851 - protein, 118 aa, Artificial Sequence
  Chemically Synthesized
QVQLQESGGGLVQAGGSLRLSCAASGYISYYYGMGWYRQAPGKEREFVATIDTGSTTNYADSVKGRFTISRDNAKNTVYLQMNSLKPEDTAVYYCAAGEYGWYPHEYWGQGTQVTVSS

SEQ ID NO: 12852 - protein, 118 aa, Artificial Sequence
  Chemically Synthesized
QVQLQESGGGLVQAGGSLRLSCAASGTISWAYSMGWYRQAPGKEREFVAGITAGASTNYADSVKGRFTISRDNAKNTVYLQMNSLKPEDTAVYYCAVYLRIGYPYFYWGQGTQVTVSS

SEQ ID NO: 12853 - protein, 122 aa, Artificial Sequence
  Chemically Synthesized
QVQLQESGGGLVQAGGSLRLSCAASGNIFYTYGMGWYRQAPGKEREFVATIDYGSNTNYADSVKGRFTISRDNAKNTVYLQMNSLKPEDTAVYYCAVGKTRIFRTFYVHYYWGQGTQVTVSS

SEQ ID NO: 12854 - protein, 117 aa, Artificial Sequence
  Chemically Synthesized
QVQLQESGGGLVQAGGSLRLSCAASGYISEGADMGWYRQAPGKEREFVAGINPGSNTYYADSVKGRFTISRDNAKNTVYLQMNSLKPEDTAVYYCAVYVISRKTLYWGQGTQVTVSS

SEQ ID NO: 12855 - protein, 118 aa, Artificial Sequence
  Chemically Synthesized
QVQLQESGGGLVQAGGSLRLSCAASGSISPDRIMGWYRQAPGKEREFVATISAGTNTNYADSVKGRFTISRDNAKNTVYLQMNSLKPEDTAVYYCAVYTSYRYPHKYWGQGTQVTVSS

SEQ ID NO: 12856 - protein, 126 aa, Artificial Sequence
  Chemically Synthesized
QVQLQESGGGLVQAGGSLRLSCAASGYIFLGYVMGWYRQAPGKEREFVASIGFGATTNYADSVKGRFTISRDNAKNTVYLQMNSLKPEDTAVYYCAVITYYFPYAWGTNGEPLWYWGQGTQVTVSS

SEQ ID NO: 12857 - protein, 122 aa, Artificial Sequence
  Chemically Synthesized
QVQLQESGGGLVQAGGSLRLSCAASGYISVSNYMGWYRQAPGKEREFVATIGSGGTTNYADSVKGRFTISRDNAKNTVYLQMNSLKPEDTAVYYCAAYGAQLADLPIGHGYWGQGTQVTVSS

SEQ ID NO: 12858 - protein, 113 aa, Artificial Sequence
  Chemically Synthesized
QVQLQESGGGLVQAGGSLRLSCAASGYYMGWYRQAPGKERELVATITNGGTTNYADSVKGRFTISRDNAKNTVYLQMNSLKPEDTAVYYCAARWYDRTYLGYWGQGTQVTVSS

SEQ ID NO: 12859 - protein, 126 aa, Artificial Sequence
  Chemically Synthesized
QVQLQESGGGLVQAGGSLRLSCAASGSIFEPVRMGWYRQAPGKEREFVASITYGGTTYYADSVKGRFTISRDNAKNTVYLQMNSLKPEDTAVYYCAVWYYVGPSDSAYDDQEHGYWGQGTQVTVSS

SEQ ID NO: 12860 - protein, 117 aa, Artificial Sequence
  Chemically Synthesized
QVQLQESGGGLVQAGGSLRLSCAASGTISLSSMGWYRQAPGKERELVAGIGQGTSTNYADSVKGRFTISRDNAKNTVYLQMNSLKPEDTAVYYCAVPSGSRYDYRYWGQGTQVTVSS

SEQ ID NO: 12861 - protein, 126 aa, Artificial Sequence
  Chemically Synthesized
QVQLQESGGGLVQAGGSLRLSCAASGNISRYEYMGWYRQAPGKERELVATISWGGSTYYADSVKGRFTISRDNAKNTVYLQMNSLKPEDTAVYYCAAWNDDSYDDSYYAIRYLRYWGQGTQVTVSS

SEQ ID NO: 12862 - protein, 118 aa, Artificial Sequence
  Chemically Synthesized
QVQLQESGGGLVQAGGSLRLSCAASGYIFILWYMGWYRQAPGKEREFVASITRGGITNYADSVKGRFTISRDNAKNTVYLQMNSLKPEDTAVYYCAALNSPQDYLGYWGQGTQVTVSS

SEQ ID NO: 12863 - protein, 118 aa, Artificial Sequence
  Chemically Synthesized
QVQLQESGGGLVQAGGSLRLSCAASGYISIPVHMGWYRQAPGKEREFVATIAWGGNTNYADSVKGRFTISRDNAKNTVYLQMNSLKPEDTAVYYCAAEEYDGDGHGYWGQGTQVTVSS

SEQ ID NO: 12864 - protein, 119 aa, Artificial Sequence
  Chemically Synthesized
QVQLQESGGGLVQAGGSLRLSCAASGYIFRRTYMGWYRQAPGKERELVAGIGPGSNTNYADSVKGRFTISRDNAKNTVYLQMNSLKPEDTAVYYCAVKRQWGNWGYAYWGQGTQVTVSS

SEQ ID NO: 12865 - protein, 121 aa, Artificial Sequence
  Chemically Synthesized
QVQLQESGGGLVQAGGSLRLSCAASGTISIRRPMGWYRQAPGKEREFVATISRGGTTNYADSVKGRFTISRDNAKNTVYLQMNSLKPEDTAVYYCAARDISFWNGTVLFYWGQGTQVTVSS

SEQ ID NO: 12866 - protein, 118 aa, Artificial Sequence
  Chemically Synthesized
QVQLQESGGGLVQAGGSLRLSCAASGNISAYNPMGWYRQAPGKEREFVAGINTGTTTYYADSVKGRFTISRDNAKNTVYLQMNSLKPEDTAVYYCAASRYDEPNHAYWGQGTQVTVSS

SEQ ID NO: 12867 - protein, 126 aa, Artificial Sequence
  Chemically Synthesized
QVQLQESGGGLVQAGGSLRLSCAASGTIFWPFIMGWYRQAPGKEREFVATINYGGNTYYADSVKGRFTISRDNAKNTVYLQMNSLKPEDTAVYYCAVWGDYYWQDASDWYQYYVYWGQGTQVTVSS

SEQ ID NO: 12868 - protein, 118 aa, Artificial Sequence
  Chemically Synthesized
QVQLQESGGGLVQAGGSLRLSCAASGNIFPSRYMGWYRQAPGKEREFVATINPGATTYYADSVKGRFTISRDNAKNTVYLQMNSLKPEDTAVYYCAAGSSGSDLHYYWGQGTQVTVSS

SEQ ID NO: 12869 - protein, 118 aa, Artificial Sequence
  Chemically Synthesized
QVQLQESGGGLVQAGGSLRLSCAASGTISGSDRMGWYRQAPGKEREFVATIDTGANTNYADSVKGRFTISRDNAKNTVYLQMNSLKPEDTAVYYCAVGTQYSAPFGYWGQGTQVTVSS

SEQ ID NO: 12870 - protein, 117 aa, Artificial Sequence
  Chemically Synthesized
QVQLQESGGGLVQAGGSLRLSCAASGSIFDTDDMGWYRQAPGKERELVGIGQGGITNYADSVKGRFTISRDNAKNTVYLQMNSLKPEDTAVYYCAAVDRTSLTYVYWGQGTQVTVSS

SEQ ID NO: 12871 - protein, 117 aa, Artificial Sequence
  Chemically Synthesized
QVQLQESGGGLVQAGGSLRLSCAASGNIFSSTMGWYRQAPGKERELVAGINLGTTTNYADSVKGRFTISRDNAKNTVYLQMNSLKPEDTAVYYCAVYYHYFLSYYYWGQGTQVTVSS

SEQ ID NO: 12872 - protein, 116 aa, Artificial Sequence
  Chemically Synthesized
QVQLQESGGGLVQAGGSLRLSCAASGTISSWYYMGWYRQAPGKERELVATIVVVVLPYADSVKGRFTISRDNAKNTVYLQMNSLKPEDTAVYYCALLRWTTFSFYWGQGTQVTVSS

SEQ ID NO: 12873 - protein, 118 aa, Artificial Sequence
  Chemically Synthesized
QVQLQESGGGLVQAGGSLRLSCAASGSISVSYVMGWYRQAPGKERELVAAIASGAITYYADSVKGRFTISRDNAKNTVYLQMNSLKPEDTAVYYCAVGSTYQYPHLYWGQGTQVTVSS

SEQ ID NO: 12874 - protein, 117 aa, Artificial Sequence
  Chemically Synthesized
QVQLQESGGGLVQAGGSLRLSCAASGTIFAELSMGWYRQAPGKEREFVAAIGLGSTTNYADSVKGRFTISRDNAKNTVYLQMNSLKPEDTAVYYCAVTGPSTLSIYWGQGTQVTVSS

SEQ ID NO: 12875 - protein, 122 aa, Artificial Sequence
  Chemically Synthesized
QVQLQESGGGLVQAGGSLRLSCAASGTIFVNPVMGWYRQAPGKEREFVATINDGTTTNYADSVKGRFTISRDNAKNTVYLQMNSLKPEDTAVYYCAVDDYPIGDRGYNYYYWGQGTQVTVSS

SEQ ID NO: 12876 - protein, 122 aa, Artificial Sequence
  Chemically Synthesized
QVQLQESGGGLVQAGGSLRLSCAASGSIFDYPDMGWYRQAPGKEREFVAGISKGGTTNYADSVKGRFTISRDNAKNTVYLQMNSLKPEDTAVYYCAARDSYWSTTYYQYLYWGQGTQVTVSS

SEQ ID NO: 12877 - protein, 122 aa, Artificial Sequence
  Chemically Synthesized
QVQLQESGGGLVQAGGSLRLSCAASGSISKYSYMGWYRQAPGKERELVAGITVGGNTYYADSVKGRFTISRDNAKNTVYLQMNSLKPEDTAVYYCAAYVRYPAWYRPGHWYWGQGTQVTVSS

SEQ ID NO: 12878 - protein, 118 aa, Artificial Sequence
  Chemically Synthesized
QVQLQESGGGLVQAGGSLRLSCAASGYIFYYYYMGWYRQAPGKEREFVAAIGYGTITYYADSVKGRFTISRDNAKNTVYLQMNSLKPEDTAVYYCAAGWTSQDSYIYWGQGTQVTVSS

SEQ ID NO: 12879 - protein, 122 aa, Artificial Sequence
  Chemically Synthesized
QVQLQESGGGLVQAGGSLRLSCAASGSISYDRIMGWYRQAPGKERELVATINHGGNTYYADSVKGRFTISRDNAKNTVYLQMNSLKPEDTAVYYCAVAYYYHETVSDGLSYWGQGTQVTVSS

SEQ ID NO: 12880 - protein, 118 aa, Artificial Sequence
  Chemically Synthesized
QVQLQESGGGLVQAGGSLRLSCAASGTISIAWYMGWYRQAPGKERELVAGIAYGASTYYADSVKGRFTISRDNAKNTVYLQMNSLKPEDTAVYYCAAYRTAYAGFDYWGQGTQVTVSS

SEQ ID NO: 12881 - protein, 117 aa, Artificial Sequence
  Chemically Synthesized
QVQLQESGGGLVQAGGSLRLSCAASGNISGLAYMGWYRQAPGKEREFVAGITGGATTNYADSVKGRFTISRDNAKNTVYLQMNSLKPEDTAVYYCAAHTISLLLIYWGQGTQVTVSS

SEQ ID NO: 12882 - protein, 122 aa, Artificial Sequence
  Chemically Synthesized
QVQLQESGGGLVQAGGSLRLSCAASGTIFDVYDMGWYRQAPGKEREFVASIGYGAITNYADSVKGRFTISRDNAKNTVYLQMNSLKPEDTAVYYCAVRYWYAYAPGAGYGYWGQGTQVTVSS

SEQ ID NO: 12883 - protein, 118 aa, Artificial Sequence
  Chemically Synthesized
QVQLQESGGGLVQAGGSLRLSCAASGSISYPYPMGWYRQAPGKERELVAGISIGGITYYADSVKGRFTISRDNAKNTVYLQMNSLKPEDTAVYYCAVHADAEGSHTYWGQGTQVTVSS

SEQ ID NO: 12884 - protein, 118 aa, Artificial Sequence
  Chemically Synthesized
QVQLQESGGGLVQAGGSLRLSCAASGTIFVRDIMGWYRQAPGKERELVAGIAYGTTTNYADSVKGRFTISRDNAKNTVYLQMNSLKPEDTAVYYCAVSALEDRRYFYWGQGTQVTVSS

SEQ ID NO: 12885 - protein, 122 aa, Artificial Sequence
  Chemically Synthesized
QVQLQESGGGLVQAGGSLRLSCAASGSISAATGMGWYRQAPGKERELVAGIDSGANTNYADSVKGRFTISRDNAKNTVYLQMNSLKPEDTAVYYCAVQREYDRYYYGYHDYWGQGTQVTVSS

SEQ ID NO: 12886 - protein, 122 aa, Artificial Sequence
  Chemically Synthesized
QVQLQESGGGLVQAGGSLRLSCAASGYIFRPLIMGWYRQAPGKEREFVASIDYGTNTYYADSVKGRFTISRDNAKNTVYLQMNSLKPEDTAVYYCAAVKRPAIRLADAHDYWGQGTQVTVSS

SEQ ID NO: 12887 - protein, 118 aa, Artificial Sequence
  Chemically Synthesized
QVQLQESGGGLVQAGGSLRLSCAASGYIFTYDTMGWYRQAPGKERELVAGINNGANTNYADSVKGRFTISRDNAKNTVYLQMNSLKPEDTAVYYCAVYGQSDVRHGYWGQGTQVTVSS

SEQ ID NO: 12888 - protein, 121 aa, Artificial Sequence
  Chemically Synthesized
QVQLQESGGGLVQAGGSLRLSCAASGTIFDADAMGWYRQAPGKEREFVAGITYGGNTYYADSVKGRFTISRDNAKNTVYLQMNSLKPEDTAVYYCAVGPVDGQSSLSLLYWGQGTQVTVSS

SEQ ID NO: 12889 - protein, 122 aa, Artificial Sequence
  Chemically Synthesized
QVQLQESGGGLVQAGGSLRLSCAASGTIFRYADMGWYRQAPGKERELVAAITYGTNTNYADSVKGRFTISRDNAKNTVYLQMNSLKPEDTAVYYCAAFDIYTNADDDTHLYWGQGTQVTVSS

SEQ ID NO: 12890 - protein, 122 aa, Artificial Sequence
  Chemically Synthesized
QVQLQESGGGLVQAGGSLRLSCAASGTISNDQNMGWYRQAPGKERELVATIGRGGTTYYADSVKGRFTISRDNAKNTVYLQMNSLKPEDTAVYYCAAAYDAGYVTEVQHVYWGQGTQVTVSS

SEQ ID NO: 12891 - protein, 118 aa, Artificial Sequence
  Chemically Synthesized
QVQLQESGGGLVQAGGSLRLSCAASGTIFYDGAMGWYRQAPGKERELVAGISAGSTTYYADSVKGRFTISRDNAKNTVYLQMNSLKPEDTAVYYCAAVDTPDYQHGYWGQGTQVTVSS

SEQ ID NO: 12892 - protein, 118 aa, Artificial Sequence
  Chemically Synthesized
QVQLQESGGGLVQAGGSLRLSCAASGNISSHYLMGWYRQAPGKERELVAAIAYGGSTYYADSVKGRFTISRDNAKNTVYLQMNSLKPEDTAVYYCAVTVSGSAAFSYWGQGTQVTVSS

SEQ ID NO: 12893 - protein, 118 aa, Artificial Sequence
  Chemically Synthesized
QVQLQESGGGLVQAGGSLRLSCAASGTISYAFYMGWYRQAPGKERELVAAIDFGAITNYADSVKGRFTISRDNAKNTVYLQMNSLKPEDTAVYYCAVLGNYYYYHYYWGQGTQVTVSS

SEQ ID NO: 12894 - protein, 126 aa, Artificial Sequence
  Chemically Synthesized
QVQLQESGGGLVQAGGSLRLSCAASGSIFQGQRMGWYRQAPGKEREFVAGIDRGATTYYADSVKGRFTISRDNAKNTVYLQMNSLKPEDTAVYYCAAYAYDTYYDGPYYGTGHSYWGQGTQVTVSS

SEQ ID NO: 12895 - protein, 119 aa, Artificial Sequence
  Chemically Synthesized
QVQLQESGGGLVQAGGSLRLSCAASGNISLRPDMGWYRQAPGKERELVAGINIGANTYYADSVKGRFTISRDNAKNTVYLQMNSLKPEDTAVYYCAVSGTPERDDFAYWGQGTQVTVSS

SEQ ID NO: 12896 - protein, 126 aa, Artificial Sequence
  Chemically Synthesized
QVQLQESGGGLVQAGGSLRLSCAASGYIFDGVVMGWYRQAPGKEREFVATIAQGTITYYADSVKGRFTISRDNAKNTVYLQMNSLKPEDTAVYYCAVDYNKHPQTDGAWNYVYQYWGQGTQVTVSS

SEQ ID NO: 12897 - protein, 126 aa, Artificial Sequence
  Chemically Synthesized
QVQLQESGGGLVQAGGSLRLSCAASGNIFVITDMGWYRQAPGKERELVASITGGGTTNYADSVKGRFTISRDNAKNTVYLQMNSLKPEDTAVYYCAADRLNGSPRRAYVSPFYDYWGQGTQVTVSS

SEQ ID NO: 12898 - protein, 126 aa, Artificial Sequence
  Chemically Synthesized
QVQLQESGGGLVQAGGSLRLSCAASGSISYDWTMGWYRQAPGKEREFVAGIDPGGTTYYADSVKGRFTISRDNAKNTVYLQMNSLKPEDTAVYYCAVLPVYARIYQWGYALAYRYWGQGTQVTVSS

SEQ ID NO: 12899 - protein, 114 aa, Artificial Sequence
  Chemically Synthesized
QVQLQESGGGLVQAGGSLRLSCAASGSIFYWGTMGWYRQAPGKEREFVASISYGATTNYADSVKGRFTISRDNAKNTVYLQMNSLKPEDTAVYYCAFHHYYLYWGQGTQVTVSS

SEQ ID NO: 12900 - protein, 124 aa, Artificial Sequence
  Chemically Synthesized
QVQLQESGGGLVQAGGSLRLSCAASGYIFYDTSMGWYRQAPGKEREFVASIAPGGITYYADSVKGRFTISRDNAKNTVYLQMNSLKPEDTAVYYCAVRDPGSTFWNRNRIHGYWGQGTQVTVSS

SEQ ID NO: 12901 - protein, 118 aa, Artificial Sequence
  Chemically Synthesized
QVQLQESGGGLVQAGGSLRLSCAASGYIFRSLPMGWYRQAPGKERELVAAIDAGSSTYYADSVKGRFTISRDNAKNTVYLQMNSLKPEDTAVYYCAVYVLPIVVFGYWGQGTQVTVSS

SEQ ID NO: 12902 - protein, 122 aa, Artificial Sequence
  Chemically Synthesized
QVQLQESGGGLVQAGGSLRLSCAASGTISVLANMGWYRQAPGKEREFVASIGQGAITNYADSVKGRFTISRDNAKNTVYLQMNSLKPEDTAVYYCAVQFFHYGRYVISLIYWGQGTQVTVSS

SEQ ID NO: 12903 - protein, 116 aa, Artificial Sequence
  Chemically Synthesized
QVQLQESGGGLVQAGGSLRLSCAASGTIFENFRMGWYRQAPGKERELVAAITYGSTTNYADSVKGRFTISRDNAKNTVYLQMNSLKPEDTAVYYCAAATGAYLDYWGQGTQVTVSS

SEQ ID NO: 12904 - protein, 122 aa, Artificial Sequence
  Chemically Synthesized
QVQLQESGGGLVQAGGSLRLSCAASGNISVYDHMGWYRQAPGKEREFVAAIDYGGNTNYADSVKGRFTISRDNAKNTVYLQMNSLKPEDTAVYYCAADQDLDNGSIDPYGYWGQGTQVTVSS

SEQ ID NO: 12905 - protein, 118 aa, Artificial Sequence
  Chemically Synthesized
QVQLQESGGGLVQAGGSLRLSCAASGTIFFPYHMGWYRQAPGKERELVAAINYGSITNYADSVKGRFTISRDNAKNTVYLQMNSLKPEDTAVYYCAVATWWYPSLSYWGQGTQVTVSS

SEQ ID NO: 12906 - protein, 122 aa, Artificial Sequence
  Chemically Synthesized
QVQLQESGGGLVQAGGSLRLSCAASGNIFYRNYMGWYRQAPGKEREFVAGISDGTSTYYADSVKGRFTISRDNAKNTVYLQMNSLKPEDTAVYYCAVDADILDADDLGLTYWGQGTQVTVSS

SEQ ID NO: 12907 - protein, 117 aa, Artificial Sequence
  Chemically Synthesized
QVQLQESGGGLVQAGGSLRLSCAASGTISEQTYMGWYRQAPGKERELVASISQGTTTNYADSVKGRFTISRDNAKNTVYLQMNSLKPEDTAVYYCAVQYHYLSCFYWGQGTQVTVSS

SEQ ID NO: 12908 - protein, 117 aa, Artificial Sequence
  Chemically Synthesized
QVQLQESGGGLVQAGGSLRLSCAASGSIFYLYYMGWYRQAPGKERELVAAIAVGTSTNYADSVKGRFTISRDNAKNTVYLQMNSLKPEDTAVYYCAVWGLYYYYSYWGQGTQVTVSS

SEQ ID NO: 12909 - protein, 122 aa, Artificial Sequence
  Chemically Synthesized
QVQLQESGGGLVQAGGSLRLSCAASGYIFSFRYMGWYRQAPGKERELVAAIDVGGITYYADSVKGRFTISRDNAKNTVYLQMNSLKPEDTAVYYCAVDLYDDSRYDDVHGYWGQGTQVTVSS

SEQ ID NO: 12910 - protein, 122 aa, Artificial Sequence
  Chemically Synthesized
QVQLQESGGGLVQAGGSLRLSCAASGTISDWPKMGWYRQAPGKEREFVAAIGYGTIQYADSVKGRFTISRDNAKNTVYLQMNSLKPEDTAVYYCAAGDYVTASVYVFSHDYWGQGTQVTVSS

SEQ ID NO: 12911 - protein, 126 aa, Artificial Sequence
  Chemically Synthesized
QVQLQESGGGLVQAGGSLRLSCAASGTIFSPSGMGWYRQAPGKEREFVAGINSGGSTYYADSVKGRFTISRDNAKNTVYLQMNSLKPEDTAVYYCAAYNPHGYAGGDDSFTQHDYWGQGTQVTVSS

SEQ ID NO: 12912 - protein, 118 aa, Artificial Sequence
  Chemically Synthesized
QVQLQESGGGLVQAGGSLRLSCAASGSIFPVIAMGWYRQAPGKERELVATINVGTTTYYADSVKGRFTISRDNAKNTVYLQMNSLKPEDTAVYYCAVPAYTTYRHSYWGQGTQVTVSS

SEQ ID NO: 12913 - protein, 118 aa, Artificial Sequence
  Chemically Synthesized
QVQLQESGGGLVQAGGSLRLSCAASGTIFDGPNMGWYRQAPGKEREFVAAIDRGATTYYADSVKGRFTISRDNAKNTVYLQMNSLKPEDTAVYYCAAYLSGYDVHYYWGQGTQVTVSS

SEQ ID NO: 12914 - protein, 115 aa, Artificial Sequence
  Chemically Synthesized
QVQLQESGGGLVQAGGSLRLSCAASGSIFVFDVMGWYRQAPGKEREFVASIGRGGTTYYADSVKGRFTISRDNAKNTVYLQMNSLKPEDTAVYYCAAQGYVHTYWGQGTQVTVSS

SEQ ID NO: 12915 - protein, 119 aa, Artificial Sequence
  Chemically Synthesized
QVQLQESGGGLVQAGGSLRLSCAASGYIFAYTYMGWYRQAPGKEREFVAAITYGANTYYADSVKGRFTISRDNAKNTVYLQMNSLKPEDTAVYYCAAVTYPGYGTYRYWGQGTQVTVSS

SEQ ID NO: 12916 - protein, 121 aa, Artificial Sequence
  Chemically Synthesized
QVQLQESGGGLVQAGGSLRLSCAASGTIFGYGYMGWYRQAPGKEREFVPVLLTVLLPYADSVKGRFTISRDNAKNTVYLQMNSLKPEDTAVYYCAAGTGGGLLDRLFLPYWGQGTQVTVSS

SEQ ID NO: 12917 - protein, 118 aa, Artificial Sequence
  Chemically Synthesized
QVQLQESGGGLVQAGGSLRLSCAASGTIFRDYSMGWYRQAPGKERELVAAIDSGGNTYYADSVKGRFTISRDNAKNTVYLQMNSLKPEDTAVYYCAAYGYSNLSYIYWGQGTQVTVSS

SEQ ID NO: 12918 - protein, 117 aa, Artificial Sequence
  Chemically Synthesized
QVQLQESGGGLVQAGGSLRLSCAASGNIFHSYMGWYRQAPGKERELVAAIAYGTSTYYADSVKGRFTISRDNAKNTVYLQMNSLKPEDTAVYYCAVDYRDEPPLDYWGQGTQVTVSS

SEQ ID NO: 12919 - protein, 126 aa, Artificial Sequence
  Chemically Synthesized
QVQLQESGGGLVQAGGSLRLSCAASGNISDYYFMGWYRQAPGKERELVASIDIGGITYYADSVKGRFTISRDNAKNTVYLQMNSLKPEDTAVYYCAVYYDLDDGRKDPDTYGFQYWGQGTQVTVSS

SEQ ID NO: 12920 - protein, 115 aa, Artificial Sequence
  Chemically Synthesized
QVQLQESGGGLVQAGGSLRLSCAASGNISVRYNMGWYRQAPGKERELVASMVVLPYADSVKGRFTISRDNAKNTVYLQMNSLKPEDTAVYYCAAYPLNGSAYDYWGQGTQVTVSS

SEQ ID NO: 12921 - protein, 125 aa, Artificial Sequence
  Chemically Synthesized
QVQLQESGGGLVQAGGSLRLSCAASGNISTYLYMGWYRQAPGKERELVATISPGGITNYADSVKGRFTISRDNAKNTVYLQMNSLKPEDTAVYYCAVLPAQSYAGLGRNYYHYYWGQGTQVTVSS

SEQ ID NO: 12922 - protein, 126 aa, Artificial Sequence
  Chemically Synthesized
QVQLQESGGGLVQAGGSLRLSCAASGTIFFIDTMGWYRQAPGKEREFVATIGHGSNTNYADSVKGRFTISRDNAKNTVYLQMNSLKPEDTAVYYCAAYQYGKLYGYADDVYLLFYWGQGTQVTVSS

SEQ ID NO: 12923 - protein, 122 aa, Artificial Sequence
  Chemically Synthesized
QVQLQESGGGLVQAGGSLRLSCAASGSIFVLTFMGWYRQAPGKEREFVAGIATGGITYYADSVKGRFTISRDNAKNTVYLQMNSLKPEDTAVYYCAADGWTGGTHYLQYAYWGQGTQVTVSS

SEQ ID NO: 12924 - protein, 121 aa, Artificial Sequence
  Chemically Synthesized
QVQLQESGGGLVQAGGSLRLSCAASGSISDGYDMGWYRQAPGKEREFVAAINDGASTNYADSVKGRFTISRDNAKNTVYLQMNSLKPEDTAVYYCAATFVGTRVTVTFIYWGQGTQVTVSS

SEQ ID NO: 12925 - protein, 118 aa, Artificial Sequence
  Chemically Synthesized
QVQLQESGGGLVQAGGSLRLSCAASGYIFPYSFMGWYRQAPGKERELVAGIGRGTNTNYADSVKGRFTISRDNAKNTVYLQMNSLKPEDTAVYYCAAWTYTDIAYDYWGQGTQVTVSS

SEQ ID NO: 12926 - protein, 126 aa, Artificial Sequence
  Chemically Synthesized
QVQLQESGGGLVQAGGSLRLSCAASGYIFRGYLMGWYRQAPGKERELVASITDGAITYYADSVKGRFTISRDNAKNTVYLQMNSLKPEDTAVYYCAVVVAYVLYTQSRTYINFYYWGQGTQVTVSS

SEQ ID NO: 12927 - protein, 117 aa, Artificial Sequence
  Chemically Synthesized
QVQLQESGGGLVQAGGSLRLSCAASGYISADRGMGWYRQAPGKEREFVAAIIGVLLPYADSVKGRFTISRDNAKNTVYLQMNSLKPEDTAVYYCAAGGLHGTPLYYWGQGTQVTVSS

SEQ ID NO: 12928 - protein, 122 aa, Artificial Sequence
  Chemically Synthesized
QVQLQESGGGLVQAGGSLRLSCAASGTIFNRSTMGWYRQAPGKERELVASISLGSSTYYADSVKGRFTISRDNAKNTVYLQMNSLKPEDTAVYYCAATVKGSRHILPYHIYWGQGTQVTVSS

SEQ ID NO: 12929 - protein, 117 aa, Artificial Sequence
  Chemically Synthesized
QVQLQESGGGLVQAGGSLRLSCAASGTIFTLSPMGWYRQAPGKERELVATMMTVLLPYADSVKGRFTISRDNAKNTVYLQMNSLKPEDTAVYYCAAVYRYNSVYTYWGQGTQVTVSS

SEQ ID NO: 12930 - protein, 121 aa, Artificial Sequence
  Chemically Synthesized
QVQLQESGGGLVQAGGSLRLSCAASGTIFDPTYMGWYRQAPGKEREFVAGISNGGTTYADSVKGRFTISRDNAKNTVYLQMNSLKPEDTAVYYCAAWPYLIFNSVDDHGYWGQGTQVTVSS

SEQ ID NO: 12931 - protein, 118 aa, Artificial Sequence
  Chemically Synthesized
QVQLQESGGGLVQAGGSLRLSCAASGYIFYFRPMGWYRQAPGKEREFVAGIGVGAITYYADSVKGRFTISRDNAKNTVYLQMNSLKPEDTAVYYCAARYPIVYGYAYWGQGTQVTVSS

SEQ ID NO: 12932 - protein, 122 aa, Artificial Sequence
  Chemically Synthesized
QVQLQESGGGLVQAGGSLRLSCAASGYISRTAQMGWYRQAPGKEREFVASIGDGASTYYADSVKGRFTISRDNAKNTVYLQMNSLKPEDTAVYYCAVYYTEAGLAAGWLGYWGQGTQVTVSS

SEQ ID NO: 12933 - protein, 122 aa, Artificial Sequence
  Chemically Synthesized
QVQLQESGGGLVQAGGSLRLSCAASGNISAAAYMGWYRQAPGKERELVAGIAYGGITYYADSVKGRFTISRDNAKNTVYLQMNSLKPEDTAVYYCAVWVDDVRYVGYVHYYWGQGTQVTVSS

SEQ ID NO: 12934 - protein, 126 aa, Artificial Sequence
  Chemically Synthesized
QVQLQESGGGLVQAGGSLRLSCAASGNIFDGQYMGWYRQAPGKERELVASIAYGATTNYADSVKGRFTISRDNAKNTVYLQMNSLKPEDTAVYYCAATPYKARYRTVDDDAQYYYWGQGTQVTVSS

SEQ ID NO: 12935 - protein, 125 aa, Artificial Sequence
  Chemically Synthesized
QVQLQESGGGLVQAGGSLRLSCAASGNISTVPFMGWYRQAPGKEREFVATIADGSNTNYADSVKGRFTISRDNAKNTVYLQMNSLKPEDTAVYYCAANGGQTHYSVVSHLLLSYWGQGTQVTVSS

SEQ ID NO: 12936 - protein, 126 aa, Artificial Sequence
  Chemically Synthesized
QVQLQESGGGLVQAGGSLRLSCAASGYISGDYAMGWYRQAPGKEREFVATITIGATTYYADSVKGRFTISRDNAKNTVYLQMNSLKPEDTAVYYCAARPYLGLDGRRVYYRGHYYWGQGTQVTVSS

SEQ ID NO: 12937 - protein, 125 aa, Artificial Sequence
  Chemically Synthesized
QVQLQESGGGLVQAGGSLRLSCAASGTIFYASPMGWYRQAPGKERELVATIANGTTTNYADSVKGRFTISRDNAKNTVYLQMNSLKPEDTAVYYCAATYANYPPAKSGTPYFAYWGQGTQVTVSS

SEQ ID NO: 12938 - protein, 122 aa, Artificial Sequence
  Chemically Synthesized
QVQLQESGGGLVQAGGSLRLSCAASGYISSRAYMGWYRQAPGKEREFVAAIADGAITYYADSVKGRFTISRDNAKNTVYLQMNSLKPEDTAVYYCAVDADYITGVSEYYDYWGQGTQVTVSS

SEQ ID NO: 12939 - protein, 117 aa, Artificial Sequence
  Chemically Synthesized
QVQLQESGGGLVQAGGSLRLSCAASGNIFNPIAMGWYRQAPGKEREFVAAISRVLIPYADSVKGRFTISRDNAKNTVYLQMNSLKPEDTAVYYCAVQTTQLLFLYYWGQGTQVTVSS

SEQ ID NO: 12940 - protein, 118 aa, Artificial Sequence
  Chemically Synthesized
QVQLQESGGGLVQAGGSLRLSCAASGNIFIQGVMGWYRQAPGKERELVAAIGTGTTTNYADSVKGRFTISRDNAKNTVYLQMNSLKPEDTAVYYCAAVYPTLDEYAYWGQGTQVTVSS

SEQ ID NO: 12941 - protein, 122 aa, Artificial Sequence
  Chemically Synthesized
QVQLQESGGGLVQAGGSLRLSCAASGNISWYTYMGWYRQAPGKEREFVATITIGAITYYADSVKGRFTISRDNAKNTVYLQMNSLKPEDTAVYYCAAGRVESVGPLTDYAYWGQGTQVTVSS

SEQ ID NO: 12942 - protein, 118 aa, Artificial Sequence
  Chemically Synthesized
QVQLQESGGGLVQAGGSLRLSCAASGNIFGGRAMGWYRQAPGKEREFVAAIDAGSSTYYADSVKGRFTISRDNAKNTVYLQMNSLKPEDTAVYYCAAQSDSDSYYPYWGQGTQVTVSS

SEQ ID NO: 12943 - protein, 122 aa, Artificial Sequence
  Chemically Synthesized
QVQLQESGGGLVQAGGSLRLSCAASGTISYLPYMGWYRQAPGKERELVAGIGTGANTYYADSVKGRFTISRDNAKNTVYLQMNSLKPEDTAVYYCAADFRTHNVIAYWFDYWGQGTQVTVSS

SEQ ID NO: 12944 - protein, 118 aa, Artificial Sequence
  Chemically Synthesized
QVQLQESGGGLVQAGGSLRLSCAASGNIFPEDVMGWYRQAPGKERELVATINSGTSTYYADSVKGRFTISRDNAKNTVYLQMNSLKPEDTAVYYCAVFVTYYQRYPYWGQGTQVTVSS

SEQ ID NO: 12945 - protein, 126 aa, Artificial Sequence
  Chemically Synthesized
QVQLQESGGGLVQAGGSLRLSCAASGNISAYDYMGWYRQAPGKEREFVASINTGSNTYYADSVKGRFTISRDNAKNTVYLQMNSLKPEDTAVYYCAVDTVGYPSDSWRYQDLHIYWGQGTQVTVSS

SEQ ID NO: 12946 - protein, 121 aa, Artificial Sequence
  Chemically Synthesized
QVQLQESGGGLVQAGGSLRLSCAASGNISAQWAMGWYRQAPGKERELVAGIAGGNTNYADSVKGRFTISRDNAKNTVYLQMNSLKPEDTAVYYCAADNYYYYIYFSFHRYWGQGTQVTVSS

SEQ ID NO: 12947 - protein, 118 aa, Artificial Sequence
  Chemically Synthesized
QVQLQESGGGLVQAGGSLRLSCAASGSIFTFRYMGWYRQAPGKERELVAGINLGGNTNYADSVKGRFTISRDNAKNTVYLQMNSLKPEDTAVYYCAVQRLSGLRLYYWGQGTQVTVSS

SEQ ID NO: 12948 - protein, 122 aa, Artificial Sequence
  Chemically Synthesized
QVQLQESGGGLVQAGGSLRLSCAASGSIFSDTWMGWYRQAPGKERELVATIDNGGSTYYADSVKGRFTISRDNAKNTVYLQMNSLKPEDTAVYYCAADFAYDDYTWRPHQYWGQGTQVTVSS

SEQ ID NO: 12949 - protein, 118 aa, Artificial Sequence
  Chemically Synthesized
QVQLQESGGGLVQAGGSLRLSCAASGTIFPSFVMGWYRQAPGKEREFVAAIDAGGTTNYADSVKGRFTISRDNAKNTVYLQMNSLKPEDTAVYYCAAVYAIYHNFPYWGQGTQVTVSS

SEQ ID NO: 12950 - protein, 122 aa, Artificial Sequence
  Chemically Synthesized
QVQLQESGGGLVQAGGSLRLSCAASGTISRPSPMGWYRQAPGKERELVATIGSGASTYYADSVKGRFTISRDNAKNTVYLQMNSLKPEDTAVYYCAVGYYTLLYTSVSFHYWGQGTQVTVSS

SEQ ID NO: 12951 - protein, 118 aa, Artificial Sequence
  Chemically Synthesized
QVQLQESGGGLVQAGGSLRLSCAASGTISGVGIMGWYRQAPGKEREFVAGITYGTITYYADSVKGRFTISRDNAKNTVYLQMNSLKPEDTAVYYCAVTRYPLFFYYYWGQGTQVTVSS

SEQ ID NO: 12952 - protein, 121 aa, Artificial Sequence
  Chemically Synthesized
QVQLQESGGGLVQAGGSLRLSCAASGNISNYAMGWYRQAPGKEREFVTTIDDGTSTYYADSVKGRFTISRDNAKNTVYLQMNSLKPEDTAVYYCAVDLYTPYYIYFQHFYWGQGTQVTVSS

SEQ ID NO: 12953 - protein, 118 aa, Artificial Sequence
  Chemically Synthesized
QVQLQESGGGLVQAGGSLRLSCAASGTIFYAYDMGWYRQAPGKERELVATIDGGAITNYADSVKGRFTISRDNAKNTVYLQMNSLKPEDTAVYYCAAGNTLYPRYPYWGQGTQVTVSS

SEQ ID NO: 12954 - protein, 122 aa, Artificial Sequence
  Chemically Synthesized
QVQLQESGGGLVQAGGSLRLSCAASGYIFKDQYMGWYRQAPGKEREFVASINDGTITYYADSVKGRFTISRDNAKNTVYLQMNSLKPEDTAVYYCAAGNDPYLPYADTYDYWGQGTQVTVSS

SEQ ID NO: 12955 - protein, 126 aa, Artificial Sequence
  Chemically Synthesized
QVQLQESGGGLVQAGGSLRLSCAASGTISAGYYMGWYRQAPGKERELVASIAWGATTNYADSVKGRFTISRDNAKNTVYLQMNSLKPEDTAVYYCAAYTNAYGTDVLRNTGYLYYWGQGTQVTVSS

SEQ ID NO: 12956 - protein, 118 aa, Artificial Sequence
  Chemically Synthesized
QVQLQESGGGLVQAGGSLRLSCAASGSISSIVIMGWYRQAPGKERELVAGITYGTTTYYADSVKGRFTISRDNAKNTVYLQMNSLKPEDTAVYYCAARRSSTGQHGYWGQGTQVTVSS

SEQ ID NO: 12957 - protein, 126 aa, Artificial Sequence
  Chemically Synthesized
QVQLQESGGGLVQAGGSLRLSCAASGSISDPWAMGWYRQAPGKERELVASIAPGGNTYYADSVKGRFTISRDNAKNTVYLQMNSLKPEDTAVYYCAVYPGIGHWGRFQVIDPYYYWGQGTQVTVSS

SEQ ID NO: 12958 - protein, 112 aa, Artificial Sequence
  Chemically Synthesized
QVQLQESGGGLVQAGGSLRLSCAASGTIFRSDNMGWYRQAPGKERELVAGITYADSVKGRFTISRDNAKNTVYLQMNSLKPEDTAVYYCAVHVYDWDNLGYWGQGTQVTVSS

SEQ ID NO: 12959 - protein, 117 aa, Artificial Sequence
  Chemically Synthesized
QVQLQESGGGLVQAGGSLRLSCAASGSIFQQESMGWYRQAPGKEREFVAGIDDGTSTNYADSVKGRFTISRDNAKNTVYLQMNSLKPEDTAVYYCAVPDNTRTVIYWGQGTQVTVSS

SEQ ID NO: 12960 - protein, 122 aa, Artificial Sequence
  Chemically Synthesized
QVQLQESGGGLVQAGGSLRLSCAASGSISYYDPMGWYRQAPGKEREFVAGINYGSNTNYADSVKGRFTISRDNAKNTVYLQMNSLKPEDTAVYYCAAGTHQDGRSTDGHPYWGQGTQVTVSS

SEQ ID NO: 12961 - protein, 118 aa, Artificial Sequence
  Chemically Synthesized
QVQLQESGGGLVQAGGSLRLSCAASGNIFGWYGMGWYRQAPGKERELVAAISWGGSTYYADSVKGRFTISRDNAKNTVYLQMNSLKPEDTAVYYCAARDLAYARHEYWGQGTQVTVSS

SEQ ID NO: 12962 - protein, 117 aa, Artificial Sequence
  Chemically Synthesized
QVQLQESGGGLVQAGGSLRLSCAASGTIFSYWMGWYRQAPGKERELVAAISYGAITNYADSVKGRFTISRDNAKNTVYLQMNSLKPEDTAVYYCAVTRLDYQGYAYWGQGTQVTVSS

SEQ ID NO: 12963 - protein, 122 aa, Artificial Sequence
  Chemically Synthesized
QVQLQESGGGLVQAGGSLRLSCAASGNISWYDWMGWYRQAPGKEREFVAAIDYGGNTYYADSVKGRFTISRDNAKNTVYLQMNSLKPEDTAVYYCAVSRGRKYSEDLTLSYWGQGTQVTVSS

SEQ ID NO: 12964 - protein, 118 aa, Artificial Sequence
  Chemically Synthesized
QVQLQESGGGLVQAGGSLRLSCAASGTISTDSYMGWYRQAPGKEREFVASIDAGSNTYYADSVKGRFTISRDNAKNTVYLQMNSLKPEDTAVYYCAVVGVSHSRLTYWGQGTQVTVSS

SEQ ID NO: 12965 - protein, 126 aa, Artificial Sequence
  Chemically Synthesized
QVQLQESGGGLVQAGGSLRLSCAASGYISTQSAMGWYRQAPGKERELVATITYGTTTYYADSVKGRFTISRDNAKNTVYLQMNSLKPEDTAVYYCAVDPTIAQRIDTYYYDILTYWGQGTQVTVSS

SEQ ID NO: 12966 - protein, 117 aa, Artificial Sequence
  Chemically Synthesized
QVQLQESGGGLVQAGGSLRLSCAASGYISQGSMGWYRQAPGKEREFVASISTGTSTNYADSVKGRFTISRDNAKNTVYLQMNSLKPEDTAVYYCAAAYLVAGQLYYWGQGTQVTVSS

SEQ ID NO: 12967 - protein, 118 aa, Artificial Sequence
  Chemically Synthesized
QVQLQESGGGLVQAGGSLRLSCAASGNIFRLVVMGWYRQAPGKERELVAAIAHGSITYYADSVKGRFTISRDNAKNTVYLQMNSLKPEDTAVYYCAVDDNPGRYLPYWGQGTQVTVSS

SEQ ID NO: 12968 - protein, 118 aa, Artificial Sequence
  Chemically Synthesized
QVQLQESGGGLVQAGGSLRLSCAASGYISRYYGMGWYRQAPGKEREFVAAISYGGITYYADSVKGRFTISRDNAKNTVYLQMNSLKPEDTAVYYCAASSPFYPSHYYWGQGTQVTVSS

SEQ ID NO: 12969 - protein, 117 aa, Artificial Sequence
  Chemically Synthesized
QVQLQESGGGLVQAGGSLRLSCAASGYISDTIDMGWYRQAPGKERELVATIGGGTTNYADSVKGRFTISRDNAKNTVYLQMNSLKPEDTAVYYCAVDAPWDAEHYYWGQGTQVTVSS

SEQ ID NO: 12970 - protein, 122 aa, Artificial Sequence
  Chemically Synthesized
QVQLQESGGGLVQAGGSLRLSCAASGYISAQSWMGWYRQAPGKEREFVAAITDGATTNYADSVKGRFTISRDNAKNTVYLQMNSLKPEDTAVYYCAADYRPGDGRYDDFPYWGQGTQVTVSS

SEQ ID NO: 12971 - protein, 122 aa, Artificial Sequence
  Chemically Synthesized
QVQLQESGGGLVQAGGSLRLSCAASGTIFPGYYMGWYRQAPGKEREFVATITDGGTTNYADSVKGRFTISRDNAKNTVYLQMNSLKPEDTAVYYCAVQYLSIYGESDGHRYWGQGTQVTVSS

SEQ ID NO: 12972 - protein, 120 aa, Artificial Sequence
  Chemically Synthesized
QVQLQESGGGLVQAGGSLRLSCAASGTIFWYGAMGWYRQAPGKERELVATIGAGSNTYYADSVKGRFTISRDNAKNTVYLQMNSLKPEDTAVYYCAAGRRYRGDSTTFYWGQGTQVTVSS

SEQ ID NO: 12973 - protein, 116 aa, Artificial Sequence
  Chemically Synthesized
QVQLQESGGGLVQAGGSLRLSCAASGTILVLLMGWYRQAPGKEREFVASIAWGGTTNYADSVKGRFTISRDNAKNTVYLQMNSLKPEDTAVYYCAATSAKYISLYWGQGTQVTVSS

SEQ ID NO: 12974 - protein, 122 aa, Artificial Sequence
  Chemically Synthesized
QVQLQESGGGLVQAGGSLRLSCAASGSISIYTYMGWYRQAPGKERELVATISGGGITNYADSVKGRFTISRDNAKNTVYLQMNSLKPEDTAVYYCAVYYTGGLGYAYQYAYWGQGTQVTVSS

SEQ ID NO: 12975 - protein, 121 aa, Artificial Sequence
  Chemically Synthesized
QVQLQESGGGLVQAGGSLRLSCAASGNIFAISYMGWYRQAPGKEREFVASIGYGAITNYADSVKGRFTISRDNAKNTVYLQMNSLKPEDTAVYYCAARNANHWDYSWLGYWGQGTQVTVSS

SEQ ID NO: 12976 - protein, 122 aa, Artificial Sequence
  Chemically Synthesized
QVQLQESGGGLVQAGGSLRLSCAASGTIFTYKDMGWYRQAPGKEREFVAAINVGGSNLYADSVKGRFTISRDNAKNTVYLQMNSLKPEDTAVYYCAARGDADHNSPDVLPYWGQGTQVTVSS

SEQ ID NO: 12977 - protein, 117 aa, Artificial Sequence
  Chemically Synthesized
QVQLQESGGGLVQAGGSLRLSCAASGNISSVVPMGWYRQAPGKEREFVASITDGASTNYADSVKGRFTISRDNAKNTVYLQMNSLKPEDTAVYYCAAGEYSLGCFYWGQGTQVTVSS

SEQ ID NO: 12978 - protein, 122 aa, Artificial Sequence
  Chemically Synthesized
QVQLQESGGGLVQAGGSLRLSCAASGNIFAYRYMGWYRQAPGKEREFVATITLGGSTNYADSVKGRFTISRDNAKNTVYLQMNSLKPEDTAVYYCAVPSVNPTNWLSRLDYWGQGTQVTVSS

SEQ ID NO: 12979 - protein, 116 aa, Artificial Sequence
  Chemically Synthesized
QVQLQESGGGLVQAGGSLRLSCAASGNISPSQRMGWYRQAPGKERELVAGISDGTNYADSVKGRFTISRDNAKNTVYLQMNSLKPEDTAVYYCAALVWGYLPYLYWGQGTQVTVSS

SEQ ID NO: 12980 - protein, 126 aa, Artificial Sequence
  Chemically Synthesized
QVQLQESGGGLVQAGGSLRLSCAASGSIFYPYSMGWYRQAPGKERELVATINFGSNTNYADSVKGRFTISRDNAKNTVYLQMNSLKPEDTAVYYCAVARRNYEGYRGYYTAQHGYWGQGTQVTVSS

SEQ ID NO: 12981 - protein, 125 aa, Artificial Sequence
  Chemically Synthesized
QVQLQESGGGLVQAGGSLRLSCAASGNISAYLDMGWYRQAPGKEREFVATIDPGTITYYADSVKGRFTISRDNAKNTVYLQMNSLKPEDTAVYYCAVSYVVVDSTPVYLDDSIYWGQGTQVTVSS

SEQ ID NO: 12982 - protein, 125 aa, Artificial Sequence
  Chemically Synthesized
QVQLQESGGGLVQAGGSLRLSCAASGTISDGQYMGWYRQAPGKERELVATIAHGSNTNYADSVKGRFTISRDNAKNTVYLQMNSLKPEDTAVYYCAVSLLLVLWLVSGGLLVMYWGQGTQVTVSS

SEQ ID NO: 12983 - protein, 118 aa, Artificial Sequence
  Chemically Synthesized
QVQLQESGGGLVQAGGSLRLSCAASGSISDQRIMGWYRQAPGKEREFVATIDEGATTNYADSVKGRFTISRDNAKNTVYLQMNSLKPEDTAVYYCAALRDLNGWHYYWGQGTQVTVSS

SEQ ID NO: 12984 - protein, 127 aa, Artificial Sequence
  Chemically Synthesized
QVQLQESGGGLVQAGGSLRLSCAASGTIFPYDDYMGWYRQAPGKEREFVAAIGQGGNTNYADSVKGRFTISRDNAKNTVYLQMNSLKPEDTAVYYCAVDDEYLYDTWVIDVPDYSYWGQGTQVTVSS

SEQ ID NO: 12985 - protein, 116 aa, Artificial Sequence
  Chemically Synthesized
QVQLQESGGGLVQAGGSLRLSCAASGTISYDSRMGWYRQAPGKEREFVAAIDTGGNTNYADSVKGRFTISRDNAKNTVYLQMNSLKPEDTAVYYCAVAAAYYHAYWGQGTQVTVSS

SEQ ID NO: 12986 - protein, 122 aa, Artificial Sequence
  Chemically Synthesized
QVQLQESGGGLVQAGGSLRLSCAASGNIFGDYSMGWYRQAPGKERELVAGIGEGSSTNYADSVKGRFTISRDNAKNTVYLQMNSLKPEDTAVYYCAVYGSWYVDITYYYVYWGQGTQVTVSS

SEQ ID NO: 12987 - protein, 117 aa, Artificial Sequence
  Chemically Synthesized
QVQLQESGGGLVQAGGSLRLSCAASGSIFPDSEMGWYRQAPGKERELVAGIGGGGITYYADSVKGRFTISRDNAKNTVYLQMNSLKPEDTAVYYCAVYDTVRLQQYWGQGTQVTVSS

SEQ ID NO: 12988 - protein, 126 aa, Artificial Sequence
  Chemically Synthesized
QVQLQESGGGLVQAGGSLRLSCAASGNIFVGANMGWYRQAPGKEREFVASITDGTTTNYADSVKGRFTISRDNAKNTVYLQMNSLKPEDTAVYYCAAPTEPRIWLDWYGQARYDYWGQGTQVTVSS

SEQ ID NO: 12989 - protein, 118 aa, Artificial Sequence
  Chemically Synthesized
QVQLQESGGGLVQAGGSLRLSCAASGTISSTIYMGWYRQAPGKEREFVASIAQGGNTNYADSVKGRFTISRDNAKNTVYLQMNSLKPEDTAVYYCAASDYASYVYWYWGQGTQVTVSS

SEQ ID NO: 12990 - protein, 126 aa, Artificial Sequence
  Chemically Synthesized
QVQLQESGGGLVQAGGSLRLSCAASGTISTSIEMGWYRQAPGKERELVAAISAGANTYYADSVKGRFTISRDNAKNTVYLQMNSLKPEDTAVYYCAAADSDYGSIVVQRDPPLSYWGQGTQVTVSS

SEQ ID NO: 12991 - protein, 125 aa, Artificial Sequence
  Chemically Synthesized
QVQLQESGGGLVQAGGSLRLSCAASGTISYYSTMGWYRQAPGKERELVAAITLGSNTYYADSVKGRFTISRDNAKNTVYLQMNSLKPEDTAVYYCAAPSFRTTGTVLTVNRLFYWGQGTQVTVSS

SEQ ID NO: 12992 - protein, 118 aa, Artificial Sequence
  Chemically Synthesized
QVQLQESGGGLVQAGGSLRLSCAASGTIFGLDYMGWYRQAPGKERELVAAITKGSNTYYADSVKGRFTISRDNAKNTVYLQMNSLKPEDTAVYYCAAQYYIDPSYQYWGQGTQVTVSS

SEQ ID NO: 12993 - protein, 118 aa, Artificial Sequence
  Chemically Synthesized
QVQLQESGGGLVQAGGSLRLSCAASGTIFAVSTMGWYRQAPGKEREFVAGIAYGASTYYADSVKGRFTISRDNAKNTVYLQMNSLKPEDTAVYYCAVTRNVYDVLAYWGQGTQVTVSS

SEQ ID NO: 12994 - protein, 118 aa, Artificial Sequence
  Chemically Synthesized
QVQLQESGGGLVQAGGSLRLSCAASGYISLAPFMGWYRQAPGKEREFVAAITAGGITYYADSVKGRFTISRDNAKNTVYLQMNSLKPEDTAVYYCAAVVGAATAFRYWGQGTQVTVSS

SEQ ID NO: 12995 - protein, 125 aa, Artificial Sequence
  Chemically Synthesized
QVQLQESGGGLVQAGGSLRLSCAASGNISGLQTMGWYRQAPGKEREFVATITYGSTTNYADSVKGRFTISRDNAKNTVYLQMNSLKPEDTAVYYCAVYPLSYRTVKSTTVWTMYWGQGTQVTVSS

SEQ ID NO: 12996 - protein, 115 aa, Artificial Sequence
  Chemically Synthesized
QVQLQESGGGLVQAGGSLRLSCAASGYISRDYFMGWYRQAPGKEREFVAAINSGTNTNYADSVKGRFTISRDNAKNTVYLQMNSLKPEDTAVYYCASYDYHHNYWGQGTQVTVSS

SEQ ID NO: 12997 - protein, 122 aa, Artificial Sequence
  Chemically Synthesized
QVQLQESGGGLVQAGGSLRLSCAASGSISTPYDMGWYRQAPGKEREFVAAINRGSSTYYADSVKGRFTISRDNAKNTVYLQMNSLKPEDTAVYYCAVGGWYVGVYRGLLTYWGQGTQVTVSS

SEQ ID NO: 12998 - protein, 118 aa, Artificial Sequence
  Chemically Synthesized
QVQLQESGGGLVQAGGSLRLSCAASGNIFAYNDMGWYRQAPGKERELVATIASGSNTYYADSVKGRFTISRDNAKNTVYLQMNSLKPEDTAVYYCAVVFDVGEDLYYWGQGTQVTVSS

SEQ ID NO: 12999 - protein, 112 aa, Artificial Sequence
  Chemically Synthesized
QVQLQESGGGLVQAGGSLRLSCAASGTISDWADMGWYRQAPGKEREFGTNTYYADSVKGRFTISRDNAKNTVYLQMNSLKPEDTAVYYCAVSGRYLTDLPYWGQGTQVTVSS

SEQ ID NO: 13000 - protein, 122 aa, Artificial Sequence
  Chemically Synthesized
QVQLQESGGGLVQAGGSLRLSCAASGSISGDLSMGWYRQAPGKEREFVATIGWGSSTNYADSVKGRFTISRDNAKNTVYLQMNSLKPEDTAVYYCAAVAWNRRFGADYHLYWGQGTQVTVSS

SEQ ID NO: 13001 - protein, 126 aa, Artificial Sequence
  Chemically Synthesized
QVQLQESGGGLVQAGGSLRLSCAASGNISESDTMGWYRQAPGKERELVATITDGGSTYYADSVKGRFTISRDNAKNTVYLQMNSLKPEDTAVYYCAVQRDGSVFPPTDGSDTLPYWGQGTQVTVSS

SEQ ID NO: 13002 - protein, 114 aa, Artificial Sequence
  Chemically Synthesized
QVQLQESGGGLVQAGGSLRLSCAASGNISNDRDMGWYRQAPGKEREFVAAINPGASTNYADSVKGRFTISRDNAKNTVYLQMNSLKPEDTAVYYCAVNSTCMYWGQGTQVTVSS

SEQ ID NO: 13003 - protein, 121 aa, Artificial Sequence
  Chemically Synthesized
QVQLQESGGGLVQAGGSLRLSCAASGYISYSDVMGWYRQAPGKEREFVATIGLGAITYYADSVKGRFTISRDNAKNTVYLQMNSLKPEDTAVYYCAVYDTVRLSYSDSLYWGQGTQVTVSS

SEQ ID NO: 13004 - protein, 121 aa, Artificial Sequence
  Chemically Synthesized
QVQLQESGGGLVQAGGSLRLSCAASGTISHRDGMGWYRQAPGKERELVASISDGTSTNYADSVKGRFTISRDNAKNTVYLQMNSLKPEDTAVYYCAVDSTNTTLVVTRIYWGQGTQVTVSS

SEQ ID NO: 13005 - protein, 118 aa, Artificial Sequence
  Chemically Synthesized
QVQLQESGGGLVQAGGSLRLSCAASGTIFDFDYMGWYRQAPGKEREFVATIAVGSITNYADSVKGRFTISRDNAKNTVYLQMNSLKPEDTAVYYCAVDDSFPYDFYYWGQGTQVTVSS

SEQ ID NO: 13006 - protein, 126 aa, Artificial Sequence
  Chemically Synthesized
QVQLQESGGGLVQAGGSLRLSCAASGNIFRIFEMGWYRQAPGKERELVAGIAGGATTYYADSVKGRFTISRDNAKNTVYLQMNSLKPEDTAVYYCAAQSEAADVGNGGYWGYFDYWGQGTQVTVSS

SEQ ID NO: 13007 - protein, 126 aa, Artificial Sequence
  Chemically Synthesized
QVQLQESGGGLVQAGGSLRLSCAASGNISRPDFMGWYRQAPGKERELVATIDGGGSTNYADSVKGRFTISRDNAKNTVYLQMNSLKPEDTAVYYCAAFYLPVTPARVNIWAQFGYWGQGTQVTVSS

SEQ ID NO: 13008 - protein, 126 aa, Artificial Sequence
  Chemically Synthesized
QVQLQESGGGLVQAGGSLRLSCAASGNIFYTAYMGWYRQAPGKERELVASIDVGTITNYADSVKGRFTISRDNAKNTVYLQMNSLKPEDTAVYYCAAIDNYYPYDPYKRDYFHAYWGQGTQVTVSS

SEQ ID NO: 13009 - protein, 122 aa, Artificial Sequence
  Chemically Synthesized
QVQLQESGGGLVQAGGSLRLSCAASGYIFARWWMGWYRQAPGKEREFVAAITRGASTYYADSVKGRFTISRDNAKNTVYLQMNSLKPEDTAVYYCAVVFETGSRRPRQFQYWGQGTQVTVSS

SEQ ID NO: 13010 - protein, 126 aa, Artificial Sequence
  Chemically Synthesized
QVQLQESGGGLVQAGGSLRLSCAASGNIFGVPYMGWYRQAPGKEREFVAAITYGGSTNYADSVKGRFTISRDNAKNTVYLQMNSLKPEDTAVYYCAVGYQEDPYWSQDTDGDYSYWGQGTQVTVSS

SEQ ID NO: 13011 - protein, 122 aa, Artificial Sequence
  Chemically Synthesized
QVQLQESGGGLVQAGGSLRLSCAASGYISTVDDMGWYRQAPGKERELVAAINYGTITNYADSVKGRFTISRDNAKNTVYLQMNSLKPEDTAVYYCAADIAGLTIDARDLWYWGQGTQVTVSS

SEQ ID NO: 13012 - protein, 126 aa, Artificial Sequence
  Chemically Synthesized
QVQLQESGGGLVQAGGSLRLSCAASGTIFPTGSMGWYRQAPGKEREFVASIDVGGNTYYADSVKGRFTISRDNAKNTVYLQMNSLKPEDTAVYYCAAIGASHRGAPVGSNWYLDYWGQGTQVTVSS

SEQ ID NO: 13013 - protein, 122 aa, Artificial Sequence
  Chemically Synthesized
QVQLQESGGGLVQAGGSLRLSCAASGYISYVYDMGWYRQAPGKEREFVAAIGYGGITNYADSVKGRFTISRDNAKNTVYLQMNSLKPEDTAVYYCAAHYVPEYPPRWGHGYWGQGTQVTVSS

SEQ ID NO: 13014 - protein, 122 aa, Artificial Sequence
  Chemically Synthesized
QVQLQESGGGLVQAGGSLRLSCAASGNISLGDDMGWYRQAPGKERELVAAIGIGANTYYADSVKGRFTISRDNAKNTVYLQMNSLKPEDTAVYYCAVYGQEAYIPYAGYYYWGQGTQVTVSS

SEQ ID NO: 13015 - protein, 121 aa, Artificial Sequence
  Chemically Synthesized
QVQLQESGGGLVQAGGSLRLSCAASGYISDSLMGWYRQAPGKERELVATITRGTTTNYADSVKGRFTISRDNAKNTVYLQMNSLKPEDTAVYYCAATPYRYNSLDTEFGYWGQGTQVTVSS

SEQ ID NO: 13016 - protein, 122 aa, Artificial Sequence
  Chemically Synthesized
QVQLQESGGGLVQAGGSLRLSCAASGSISELPRMGWYRQAPGKERELVAGITDGTSTNYADSVKGRFTISRDNAKNTVYLQMNSLKPEDTAVYYCAAYWWIYSYVFWFLPYWGQGTQVTVSS

SEQ ID NO: 13017 - protein, 118 aa, Artificial Sequence
  Chemically Synthesized
QVQLQESGGGLVQAGGSLRLSCAASGYISARDFMGWYRQAPGKEREFVATIDVPYADSVKGRFTISRDNAKNTVYLQMNSLKPEDTAVYYCAVYYDVDPAGASSHNYWGQGTQVTVSS

SEQ ID NO: 13018 - protein, 126 aa, Artificial Sequence
  Chemically Synthesized
QVQLQESGGGLVQAGGSLRLSCAASGTIFRYPGMGWYRQAPGKERELVAGIGSGTTTYYADSVKGRFTISRDNAKNTVYLQMNSLKPEDTAVYYCAVRYSDDYRYNDYYYYSLGYWGQGTQVTVSS

SEQ ID NO: 13019 - protein, 117 aa, Artificial Sequence
  Chemically Synthesized
QVQLQESGGGLVQAGGSLRLSCAASGTISDSTDMGWYRQAPGKERELVAAIAGGNTNYADSVKGRFTISRDNAKNTVYLQMNSLKPEDTAVYYCAADISSGPRFSYWGQGTQVTVSS

SEQ ID NO: 13020 - protein, 119 aa, Artificial Sequence
  Chemically Synthesized
QVQLQESGGGLVQAGGSLRLSCAASGTISVYGYMGWYRQAPGKERELVAGITFGTSYQYADSVKGRFTISRDNAKNTVYLQMNSLKPEDTAVYYCAVAYVSDGRPFTYWGQGTQVTVSS

SEQ ID NO: 13021 - protein, 122 aa, Artificial Sequence
  Chemically Synthesized
QVQLQESGGGLVQAGGSLRLSCAASGNISYEGDMGWYRQAPGKEREFVAAITPGGNTNYADSVKGRFTISRDNAKNTVYLQMNSLKPEDTAVYYCAAPQPSGPGWDVGFAYWGQGTQVTVSS

SEQ ID NO: 13022 - protein, 112 aa, Artificial Sequence
  Chemically Synthesized
QVQLQESGGGLVQAGGSLRLSCAASGSISRYVYMGWYRQAPGKEREFVAAISEGTSTYYADSVKGRFTISRDNAKNTVYLQMNSLKPEDTAVYYCAALRLYWGQGTQVTVSS

SEQ ID NO: 13023 - protein, 118 aa, Artificial Sequence
  Chemically Synthesized
QVQLQESGGGLVQAGGSLRLSCAASGNISYANYMGWYRQAPGKERELVASIDYGASTYYADSVKGRFTISRDNAKNTVYLQMNSLKPEDTAVYYCAAFPYGSQTLKYWGQGTQVTVSS

SEQ ID NO: 13024 - protein, 122 aa, Artificial Sequence
  Chemically Synthesized
QVQLQESGGGLVQAGGSLRLSCAASGTIFLGHMGWYRQAPGKEREFVAGISAGSNTNYADSVKGRFTISRDNAKNTVYLQMNSLKPEDTAVYYCAAYGAGIRAYVDYDHAYWGQGTQVTVSS

SEQ ID NO: 13025 - protein, 116 aa, Artificial Sequence
  Chemically Synthesized
QVQLQESGGGLVQAGGSLRLSCAASGSISAAGYMGWYRQAPGKEREFVATIVVVLLPYADSVKGRFTISRDNAKNTVYLQMNSLKPEDTAVYYCAVTEAGSAYRYWGQGTQVTVSS

SEQ ID NO: 13026 - protein, 120 aa, Artificial Sequence
  Chemically Synthesized
QVQLQESGGGLVQAGGSLRLSCAASGSISVPIYMGWYRQAPGKEREFVAAIGIGANTNYADSVKGRFTISRDNAKNTVYLQMNSLKPEDTAVYYCAVEGALRPDGRHSYWGQGTQVTVSS

SEQ ID NO: 13027 - protein, 118 aa, Artificial Sequence
  Chemically Synthesized
QVQLQESGGGLVQAGGSLRLSCAASGNIFDAYYMGWYRQAPGKEREFVATIGLGGNTNYADSVKGRFTISRDNAKNTVYLQMNSLKPEDTAVYYCAVRGTTNVDFRYWGQGTQVTVSS

SEQ ID NO: 13028 - protein, 121 aa, Artificial Sequence
  Chemically Synthesized
QVQLQESGGGLVQAGGSLRLSCAASGNISSLSMGWYRQAPGKEREFVAAINYGTNTYYADSVKGRFTISRDNAKNTVYLQMNSLKPEDTAVYYCAVSQWDIFGILYLFVYWGQGTQVTVSS

SEQ ID NO: 13029 - protein, 118 aa, Artificial Sequence
  Chemically Synthesized
QVQLQESGGGLVQAGGSLRLSCAASGNISWDRDMGWYRQAPGKEREFVATITDGSITYYADSVKGRFTISRDNAKNTVYLQMNSLKPEDTAVYYCAVIDHGPWFYYYWGQGTQVTVSS

SEQ ID NO: 13030 - protein, 126 aa, Artificial Sequence
  Chemically Synthesized
QVQLQESGGGLVQAGGSLRLSCAASGYISYYYIMGWYRQAPGKEREFVAGIAYGGIYQYADSVKGRFTISRDNAKNTVYLQMNSLKPEDTAVYYCAVPKLRYGPTAALSDGEHPYWGQGTQVTVSS

SEQ ID NO: 13031 - protein, 117 aa, Artificial Sequence
  Chemically Synthesized
QVQLQESGGGLVQAGGSLRLSCAASGSIFGPDEMGWYRQAPGKEREFVAAIGTVVVPYADSVKGRFTISRDNAKNTVYLQMNSLKPEDTAVYYCAVTIQNTGKLIYWGQGTQVTVSS

SEQ ID NO: 13032 - protein, 118 aa, Artificial Sequence
  Chemically Synthesized
QVQLQESGGGLVQAGGSLRLSCAASGYIFLRPYMGWYRQAPGKERELVAAITKGAITYYADSVKGRFTISRDNAKNTVYLQMNSLKPEDTAVYYCAVWSSGLDRLEYWGQGTQVTVSS

SEQ ID NO: 13033 - protein, 127 aa, Artificial Sequence
  Chemically Synthesized
QVQLQESGGGLVQAGGSLRLSCAASGNIFFTILMGWYRQAPGKEREFVASISDGGTTYYADSVKGRFTISRDNAKNTVYLQMNSLKPEDTAVYYCAVYTVWTRYYDGPARGYSHGYWGQGTQVTVSS

SEQ ID NO: 13034 - protein, 122 aa, Artificial Sequence
  Chemically Synthesized
QVQLQESGGGLVQAGGSLRLSCAASGNIFDPKPMGWYRQAPGKERELVAAIDEGATTNYADSVKGRFTISRDNAKNTVYLQMNSLKPEDTAVYYCAADQQYSEPEPYTHSYWGQGTQVTVSS

SEQ ID NO: 13035 - protein, 122 aa, Artificial Sequence
  Chemically Synthesized
QVQLQESGGGLVQAGGSLRLSCAASGNIFRDSYMGWYRQAPGKERELVAAISFGTTTYYADSVKGRFTISRDNAKNTVYLQMNSLKPEDTAVYYCAVVRRQYTTDYASHLYWGQGTQVTVSS

SEQ ID NO: 13036 - protein, 117 aa, Artificial Sequence
  Chemically Synthesized
QVQLQESGGGLVQAGGSLRLSCAASGSIFGIANMGWYRQAPGKERELVAGIDPGAITYYADSVKGRFTISRDNAKNTVYLQMNSLKPEDTAVYYCAVIDTTVTVMYWGQGTQVTVSS

SEQ ID NO: 13037 - protein, 118 aa, Artificial Sequence
  Chemically Synthesized
QVQLQESGGGLVQAGGSLRLSCAASGTIFDFTIMGWYRQAPGKEREFVASITAGGITNYADSVKGRFTISRDNAKNTVYLQMNSLKPEDTAVYYCAAIYGSPTAYSYWGQGTQVTVSS

SEQ ID NO: 13038 - protein, 110 aa, Artificial Sequence
  Chemically Synthesized
QVQLQESGGGLVQAGGSLRLSCAASGSISFYRTMGWYRQAPGKERELVAGISTGTSTYYADSVKGRFTISRDNAKNTVYLQMNSLKPEDTAVYYCAYFYWGQGTQVTVSS

SEQ ID NO: 13039 - protein, 118 aa, Artificial Sequence
  Chemically Synthesized
QVQLQESGGGLVQAGGSLRLSCAASGTISYLYYMGWYRQAPGKEREFVASIAYGGITNYADSVKGRFTISRDNAKNTVYLQMNSLKPEDTAVYYCAADYQPNGSLPYWGQGTQVTVSS

SEQ ID NO: 13040 - protein, 119 aa, Artificial Sequence
  Chemically Synthesized
QVQLQESGGGLVQAGGSLRLSCAASGTIFIGQFMGWYRQAPGKEREFVAGIAPGASTYYADSVKGRFTISRDNAKNTVYLQMNSLKPEDTAVYYCAVYPNTWAEYLFYWGQGTQVTVSS

SEQ ID NO: 13041 - protein, 122 aa, Artificial Sequence
  Chemically Synthesized
QVQLQESGGGLVQAGGSLRLSCAASGYISLSYYMGWYRQAPGKEREFVAAISNGTSTYYADSVKGRFTISRDNAKNTVYLQMNSLKPEDTAVYYCAAYWGWPRYSHTYHKYWGQGTQVTVSS

SEQ ID NO: 13042 - protein, 118 aa, Artificial Sequence
  Chemically Synthesized
QVQLQESGGGLVQAGGSLRLSCAASGYISDVKYMGWYRQAPGKEREFVASISGGGSTNYADSVKGRFTISRDNAKNTVYLQMNSLKPEDTAVYYCAAWGDTSYRHSYWGQGTQVTVSS

SEQ ID NO: 13043 - protein, 125 aa, Artificial Sequence
  Chemically Synthesized
QVQLQESGGGLVQAGGSLRLSCAASGTIFPIYDMGWYRQAPGKERELVAAIGLGATTYYADSVKGRFTISRDNAKNTVYLQMNSLKPEDTAVYYCAVTTTTFRVCRTGLVTLIYWGQGTQVTVSS

SEQ ID NO: 13044 - protein, 126 aa, Artificial Sequence
  Chemically Synthesized
QVQLQESGGGLVQAGGSLRLSCAASGNIFDLRDMGWYRQAPGKEREFVAAITSGTNTYYADSVKGRFTISRDNAKNTVYLQMNSLKPEDTAVYYCAAERQVWYAHYRGPEGAYRYWGQGTQVTVSS

SEQ ID NO: 13045 - protein, 122 aa, Artificial Sequence
  Chemically Synthesized
QVQLQESGGGLVQAGGSLRLSCAASGNISPNRDMGWYRQAPGKEREFVASITPGSITNYADSVKGRFTISRDNAKNTVYLQMNSLKPEDTAVYYCAVTYPVTVQYHSAFDYWGQGTQVTVSS

SEQ ID NO: 13046 - protein, 121 aa, Artificial Sequence
  Chemically Synthesized
QVQLQESGGGLVQAGGSLRLSCAASGNISYYSMGWYRQAPGKEREFVASIDDGSITNYADSVKGRFTISRDNAKNTVYLQMNSLKPEDTAVYYCAVTDGTEPYIQWRLPYWGQGTQVTVSS

SEQ ID NO: 13047 - protein, 118 aa, Artificial Sequence
  Chemically Synthesized
QVQLQESGGGLVQAGGSLRLSCAASGYISVGGVMGWYRQAPGKEREFVAAIDRGSNTYYADSVKGRFTISRDNAKNTVYLQMNSLKPEDTAVYYCAVTKWTRYVLLYWGQGTQVTVSS

SEQ ID NO: 13048 - protein, 116 aa, Artificial Sequence
  Chemically Synthesized
QVQLQESGGGLVQAGGSLRLSCAASGTISSESDMGWYRQAPGKEREFVAGITQGTITYYADSVKGRFTISRDNAKNTVYLQMNSLKPEDTAVYYCAAYYIDAYNYWGQGTQVTVSS

SEQ ID NO: 13049 - protein, 122 aa, Artificial Sequence
  Chemically Synthesized
QVQLQESGGGLVQAGGSLRLSCAASGSISVAYEMGWYRQAPGKERELVASIATGGSTYYADSVKGRFTISRDNAKNTVYLQMNSLKPEDTAVYYCAAEGHYTYHLDLHHWYWGQGTQVTVSS

SEQ ID NO: 13050 - protein, 122 aa, Artificial Sequence
  Chemically Synthesized
QVQLQESGGGLVQAGGSLRLSCAASGYISYYDMGWYRQAPGKEREFVAAISRGSNTYYADSVKGRFTISRDNAKNTVYLQMNSLKPEDTAVYYCAATPDTLAYGFLAPLPYWGQGTQVTVSS

SEQ ID NO: 13051 - protein, 121 aa, Artificial Sequence
  Chemically Synthesized
QVQLQESGGGLVQAGGSLRLSCAASGTISGLLYMGWYRQAPGKERELVPLLLTVVIPYADSVKGRFTISRDNAKNTVYLQMNSLKPEDTAVYYCAVDLDATVDSLTSHRYWGQGTQVTVSS

SEQ ID NO: 13052 - protein, 122 aa, Artificial Sequence
  Chemically Synthesized
QVQLQESGGGLVQAGGSLRLSCAASGSIFDSSNMGWYRQAPGKERELVAGITAGASTYYADSVKGRFTISRDNAKNTVYLQMNSLKPEDTAVYYCAAPPYYGSYDLEDHYYWGQGTQVTVSS

SEQ ID NO: 13053 - protein, 124 aa, Artificial Sequence
  Chemically Synthesized
QVQLQESGGGLVQAGGSLRLSCAASGNISYGVTMGWYRQAPGKEREFVASIARGATTYYADSVKGRFTISRDNAKNTVYLQMNSLKPEDTAVYYCAVVYVQLSYSAPYDDHDYWGQGTQVTVSS

SEQ ID NO: 13054 - protein, 118 aa, Artificial Sequence
  Chemically Synthesized
QVQLQESGGGLVQAGGSLRLSCAASGSISGRDAMGWYRQAPGKEREFVAAISRGGNTYYADSVKGRFTISRDNAKNTVYLQMNSLKPEDTAVYYCAAQDPYRSGLAYWGQGTQVTVSS

SEQ ID NO: 13055 - protein, 118 aa, Artificial Sequence
  Chemically Synthesized
QVQLQESGGGLVQAGGSLRLSCAASGTIFYVKSMGWYRQAPGKERELVASIAQGSNTYYADSVKGRFTISRDNAKNTVYLQMNSLKPEDTAVYYCAVPVAGYPPYLYWGQGTQVTVSS

SEQ ID NO: 13056 - protein, 122 aa, Artificial Sequence
  Chemically Synthesized
QVQLQESGGGLVQAGGSLRLSCAASGSIFVPPGMGWYRQAPGKEREFVASIDGGGTTNYADSVKGRFTISRDNAKNTVYLQMNSLKPEDTAVYYCAVDVYALYIAYADYPYWGQGTQVTVSS

SEQ ID NO: 13057 - protein, 122 aa, Artificial Sequence
  Chemically Synthesized
QVQLQESGGGLVQAGGSLRLSCAASGNISRYDVMGWYRQAPGKERELVATIAEGGSTYYADSVKGRFTISRDNAKNTVYLQMNSLKPEDTAVYYCAVAPYSPYHWTGWYYYWGQGTQVTVSS

SEQ ID NO: 13058 - protein, 118 aa, Artificial Sequence
  Chemically Synthesized
QVQLQESGGGLVQAGGSLRLSCAASGTISPPVYMGWYRQAPGKERELVAAINYGANTNYADSVKGRFTISRDNAKNTVYLQMNSLKPEDTAVYYCAVQGGKDYIYTYWGQGTQVTVSS

SEQ ID NO: 13059 - protein, 122 aa, Artificial Sequence
  Chemically Synthesized
QVQLQESGGGLVQAGGSLRLSCAASGNISFLDRMGWYRQAPGKERELVAGITVGTTTNYADSVKGRFTISRDNAKNTVYLQMNSLKPEDTAVYYCAVYYDDVYSYRIDYVYWGQGTQVTVSS

SEQ ID NO: 13060 - protein, 117 aa, Artificial Sequence
  Chemically Synthesized
QVQLQESGGGLVQAGGSLRLSCAASGYIFAYSMGWYRQAPGKERELVAGITDGASTNYADSVKGRFTISRDNAKNTVYLQMNSLKPEDTAVYYCAAVGGVVYGHGYWGQGTQVTVSS

SEQ ID NO: 13061 - protein, 118 aa, Artificial Sequence
  Chemically Synthesized
QVQLQESGGGLVQAGGSLRLSCAASGTISQNVYMGWYRQAPGKERELVASISTGGSTYYADSVKGRFTISRDNAKNTVYLQMNSLKPEDTAVYYCAALGWAYDHYYYWGQGTQVTVSS

SEQ ID NO: 13062 - protein, 118 aa, Artificial Sequence
  Chemically Synthesized
QVQLQESGGGLVQAGGSLRLSCAASGTISGGFIMGWYRQAPGKEREFVATITPGTSTYYADSVKGRFTISRDNAKNTVYLQMNSLKPEDTAVYYCAANTRFDFDLPYWGQGTQVTVSS

SEQ ID NO: 13063 - protein, 121 aa, Artificial Sequence
  Chemically Synthesized
QVQLQESGGGLVQAGGSLRLSCAASGNIFVGSYMGWYRQAPGKERELVAAISDGATTNYADSVKGRFTISRDNAKNTVYLQMNSLKPEDTAVYYCAVEVFRVTFTFTFMYWGQGTQVTVSS

SEQ ID NO: 13064 - protein, 118 aa, Artificial Sequence
  Chemically Synthesized
QVQLQESGGGLVQAGGSLRLSCAASGNISAADYMGWYRQAPGKERELVAAITDGGNTNYADSVKGRFTISRDNAKNTVYLQMNSLKPEDTAVYYCAVKNLHGVPHVYWGQGTQVTVSS

SEQ ID NO: 13065 - protein, 117 aa, Artificial Sequence
  Chemically Synthesized
QVQLQESGGGLVQAGGSLRLSCAASGSIFGTSDMGWYRQAPGKERELVAGINYGANTNYADSVKGRFTISRDNAKNTVYLQMNSLKPEDTAVYYCAVYSDNSNHQYWGQGTQVTVSS

SEQ ID NO: 13066 - protein, 122 aa, Artificial Sequence
  Chemically Synthesized
QVQLQESGGGLVQAGGSLRLSCAASGTISGHIYMGWYRQAPGKERELVAAINNGGITYYADSVKGRFTISRDNAKNTVYLQMNSLKPEDTAVYYCAAWKLDPQNNIRTHAYWGQGTQVTVSS

SEQ ID NO: 13067 - protein, 124 aa, Artificial Sequence
  Chemically Synthesized
QVQLQESGGGLVQAGGSLRLSCAASGNIFYWYAMGWYRQAPGKERELVASISYGTNTNYADSVKGRFTISRDNAKNTVYLQMNSLKPEDTAVYYCAVYYSTDDGGYVDVRHDYWGQGTQVTVSS

SEQ ID NO: 13068 - protein, 118 aa, Artificial Sequence
  Chemically Synthesized
QVQLQESGGGLVQAGGSLRLSCAASGNISDAIYMGWYRQAPGKEREFVAGIASGANTYYADSVKGRFTISRDNAKNTVYLQMNSLKPEDTAVYYCAVYYHHGLQYGYWGQGTQVTVSS

SEQ ID NO: 13069 - protein, 118 aa, Artificial Sequence
  Chemically Synthesized
QVQLQESGGGLVQAGGSLRLSCAASGNISYQSYMGWYRQAPGKEREFVAAINYGANTYYADSVKGRFTISRDNAKNTVYLQMNSLKPEDTAVYYCAAPNSSGRPHYYWGQGTQVTVSS

SEQ ID NO: 13070 - protein, 118 aa, Artificial Sequence
  Chemically Synthesized
QVQLQESGGGLVQAGGSLRLSCAASGTIFAWYGMGWYRQAPGKEREFVASITTGSITYYADSVKGRFTISRDNAKNTVYLQMNSLKPEDTAVYYCAAQDGVYARYRYWGQGTQVTVSS

SEQ ID NO: 13071 - protein, 121 aa, Artificial Sequence
  Chemically Synthesized
QVQLQESGGGLVQAGGSLRLSCAASGYISSSVMGWYRQAPGKERELVASIGDGTNTNYADSVKGRFTISRDNAKNTVYLQMNSLKPEDTAVYYCAAPGYGWPVYYIEFSYWGQGTQVTVSS

SEQ ID NO: 13072 - protein, 118 aa, Artificial Sequence
  Chemically Synthesized
QVQLQESGGGLVQAGGSLRLSCAASGYIFGFTAMGWYRQAPGKERELVAGIGEGANTNYADSVKGRFTISRDNAKNTVYLQMNSLKPEDTAVYYCAARVVRRDVHAYWGQGTQVTVSS

SEQ ID NO: 13073 - protein, 121 aa, Artificial Sequence
  Chemically Synthesized
QVQLQESGGGLVQAGGSLRLSCAASGYIFTGNYMGWYRQAPGKEREFVATINPGANTYYADSVKGRFTISRDNAKNTVYLQMNSLKPEDTAVYYCAAWLEDHGAYQHLHYWGQGTQVTVSS

SEQ ID NO: 13074 - protein, 116 aa, Artificial Sequence
  Chemically Synthesized
QVQLQESGGGLVQAGGSLRLSCAASGYISDRDLMGWYRQAPGKEREFVASIGTVDYLYADSVKGRFTISRDNAKNTVYLQMNSLKPEDTAVYYCAVADSPYRFLYWGQGTQVTVSS

SEQ ID NO: 13075 - protein, 118 aa, Artificial Sequence
  Chemically Synthesized
QVQLQESGGGLVQAGGSLRLSCAASGYISDVSRMGWYRQAPGKERELVAGISDGGNTYYADSVKGRFTISRDNAKNTVYLQMNSLKPEDTAVYYCAADRRDTGWHSYWGQGTQVTVSS

SEQ ID NO: 13076 - protein, 118 aa, Artificial Sequence
  Chemically Synthesized
QVQLQESGGGLVQAGGSLRLSCAASGSIFITGIMGWYRQAPGKERELVAAITTGAITYYADSVKGRFTISRDNAKNTVYLQMNSLKPEDTAVYYCAVGAPYSAELYYWGQGTQVTVSS

SEQ ID NO: 13077 - protein, 118 aa, Artificial Sequence
  Chemically Synthesized
QVQLQESGGGLVQAGGSLRLSCAASGTISIVSDMGWYRQAPGKERELVAGIARGGITYYADSVKGRFTISRDNAKNTVYLQMNSLKPEDTAVYYCAVYYIYATQHYYWGQGTQVTVSS

SEQ ID NO: 13078 - protein, 118 aa, Artificial Sequence
  Chemically Synthesized
QVQLQESGGGLVQAGGSLRLSCAASGTISQPVYMGWYRQAPGKEREFVAGIASGTTTNYADSVKGRFTISRDNAKNTVYLQMNSLKPEDTAVYYCAVPNDIGGVHVYWGQGTQVTVSS

SEQ ID NO: 13079 - protein, 117 aa, Artificial Sequence
  Chemically Synthesized
QVQLQESGGGLVQAGGSLRLSCAASGTIFGAQDMGWYRQAPGKEREFVAAIGQGTTTYYADSVKGRFTISRDNAKNTVYLQMNSLKPEDTAVYYCAVGKSTLLTFYWGQGTQVTVSS

SEQ ID NO: 13080 - protein, 117 aa, Artificial Sequence
  Chemically Synthesized
QVQLQESGGGLVQAGGSLRLSCAASGNISGVADMGWYRQAPGKERELVPLLLVVLLPYADSVKGRFTISRDNAKNTVYLQMNSLKPEDTAVYYCAAYYFFIYGHGYWGQGTQVTVSS

SEQ ID NO: 13081 - protein, 118 aa, Artificial Sequence
  Chemically Synthesized
QVQLQESGGGLVQAGGSLRLSCAASGTIFYQGPMGWYRQAPGKERELVAGITYGSSTNYADSVKGRFTISRDNAKNTVYLQMNSLKPEDTAVYYCAVAADGYVGHLYWGQGTQVTVSS

SEQ ID NO: 13082 - protein, 121 aa, Artificial Sequence
  Chemically Synthesized
QVQLQESGGGLVQAGGSLRLSCAASGSIFARHRMGWYRQAPGKEREFVATISYGANTNYADSVKGRFTISRDNAKNTVYLQMNSLKPEDTAVYYCAAPYQGPTYEYSILYWGQGTQVTVSS

SEQ ID NO: 13083 - protein, 123 aa, Artificial Sequence
  Chemically Synthesized
QVQLQESGGGLVQAGGSLRLSCAASGSFLCTLMGWYRQAPGKERELVAAIAPGSNTYYADSVKGRFTISRDNAKNTVYLQMNSLKPEDTAVYYCAADVDWYYRGPYYARHYYWGQGTQVTVSS

SEQ ID NO: 13084 - protein, 118 aa, Artificial Sequence
  Chemically Synthesized
QVQLQESGGGLVQAGGSLRLSCAASGNISGDQSMGWYRQAPGKERELVATIGDGSTTNYADSVKGRFTISRDNAKNTVYLQMNSLKPEDTAVYYCAATWYRTGVHAYWGQGTQVTVSS

SEQ ID NO: 13085 - protein, 109 aa, Artificial Sequence
  Chemically Synthesized
QVQLQESGGGLVQAGGSLRLSCAASGTISYWDGMGWYRQAPGKERELVATIAGGTTTNYADSVKGRFTISRDNAKNTVYLQMNSLKPEDTAVYYCAVYWGQGTQVTVSS

SEQ ID NO: 13086 - protein, 118 aa, Artificial Sequence
  Chemically Synthesized
QVQLQESGGGLVQAGGSLRLSCAASGYISLPYVMGWYRQAPGKERELVAAIGTGANTNYADSVKGRFTISRDNAKNTVYLQMNSLKPEDTAVYYCAVTGATEAVLDYWGQGTQVTVSS

SEQ ID NO: 13087 - protein, 122 aa, Artificial Sequence
  Chemically Synthesized
QVQLQESGGGLVQAGGSLRLSCAASGNIFGAGAMGWYRQAPGKEREFVATINEGAITNYADSVKGRFTISRDNAKNTVYLQMNSLKPEDTAVYYCAADGKEKYSHYADHAYWGQGTQVTVSS

SEQ ID NO: 13088 - protein, 117 aa, Artificial Sequence
  Chemically Synthesized
QVQLQESGGGLVQAGGSLRLSCAASGTIFAFRVMGWYRQAPGKEREFVASIGGGTNTYYADSVKGRFTISRDNAKNTVYLQMNSLKPEDTAVYYCAAYDSLTRTMYWGQGTQVTVSS

SEQ ID NO: 13089 - protein, 122 aa, Artificial Sequence
  Chemically Synthesized
QVQLQESGGGLVQAGGSLRLSCAASGNISTDVSMGWYRQAPGKEREFVAAIDTGSNTNYADSVKGRFTISRDNAKNTVYLQMNSLKPEDTAVYYCAVDAGDTRYILDNHYYWGQGTQVTVSS

SEQ ID NO: 13090 - protein, 118 aa, Artificial Sequence
  Chemically Synthesized
QVQLQESGGGLVQAGGSLRLSCAASGSISRTNAMGWYRQAPGKERELVASIGDGGSTYYADSVKGRFTISRDNAKNTVYLQMNSLKPEDTAVYYCAARYRDGVALAYWGQGTQVTVSS

SEQ ID NO: 13091 - protein, 122 aa, Artificial Sequence
  Chemically Synthesized
QVQLQESGGGLVQAGGSLRLSCAASGTISAYTSMGWYRQAPGKERELVAGIGKGGSTYYADSVKGRFTISRDNAKNTVYLQMNSLKPEDTAVYYCAVDPDLLPFDREIYEYWGQGTQVTVSS

SEQ ID NO: 13092 - protein, 122 aa, Artificial Sequence
  Chemically Synthesized
QVQLQESGGGLVQAGGSLRLSCAASGYIFRVPGMGWYRQAPGKERELVAGIDYGSTTNYADSVKGRFTISRDNAKNTVYLQMNSLKPEDTAVYYCAVVSDSRWNRHPGFPYWGQGTQVTVSS

SEQ ID NO: 13093 - protein, 118 aa, Artificial Sequence
  Chemically Synthesized
QVQLQESGGGLVQAGGSLRLSCAASGTISAPYYMGWYRQAPGKERELVASITYGSSTYYADSVKGRFTISRDNAKNTVYLQMNSLKPEDTAVYYCAVTGGGTYSHGYWGQGTQVTVSS

SEQ ID NO: 13094 - protein, 118 aa, Artificial Sequence
  Chemically Synthesized
QVQLQESGGGLVQAGGSLRLSCAASGNISPDLLMGWYRQAPGKERELVASITYGGSTYYADSVKGRFTISRDNAKNTVYLQMNSLKPEDTAVYYCAAARYYDYYTYYWGQGTQVTVSS

SEQ ID NO: 13095 - protein, 121 aa, Artificial Sequence
  Chemically Synthesized
QVQLQESGGGLVQAGGSLRLSCAASGNISYNYDMGWYRQAPGKEREFVAGIGAGGITYYADSVKGRFTISRDNAKNTVYLQMNSLKPEDTAVYYCAAYYLDGLYGYGLRYWGQGTQVTVSS

SEQ ID NO: 13096 - protein, 111 aa, Artificial Sequence
  Chemically Synthesized
QVQLQESGGGLVQAGGSLRLSCAASGLFLVNWMGWYRQAPGKEREFVATIDYGTITNYADSVKGRFTISRDNAKNTVYLQMNSLKPEDTAVYYCAAYLIYWGQGTQVTVSS

SEQ ID NO: 13097 - protein, 120 aa, Artificial Sequence
  Chemically Synthesized
QVQLQESGGGLVQAGGSLRLSCAASGNISASFMGWYRQAPGKEREFVASIDYGGSTYADSVKGRFTISRDNAKNTVYLQMNSLKPEDTAVYYCAVSQELGNHVDHRHRYWGQGTQVTVSS

SEQ ID NO: 13098 - protein, 122 aa, Artificial Sequence
  Chemically Synthesized
QVQLQESGGGLVQAGGSLRLSCAASGYIFGGSGMGWYRQAPGKERELVASISKGSSTNYADSVKGRFTISRDNAKNTVYLQMNSLKPEDTAVYYCAVLSTSYGGDAYRLFYWGQGTQVTVSS

SEQ ID NO: 13099 - protein, 121 aa, Artificial Sequence
  Chemically Synthesized
QVQLQESGGGLVQAGGSLRLSCAASGSIFYVIGMGWYRQAPGKEREFVAAISYGTTTNYADSVKGRFTISRDNAKNTVYLQMNSLKPEDTAVYYCAADTYLTSAISTCLYWGQGTQVTVSS

SEQ ID NO: 13100 - protein, 116 aa, Artificial Sequence
  Chemically Synthesized
QVQLQESGGGLVQAGGSLRLSCAASGSIFAHYGMGWYRQAPGKEREFVAAIGGGTSTYYADSVKGRFTISRDNAKNTVYLQMNSLKPEDTAVYYCAAYGYYDSTYWGQGTQVTVSS

SEQ ID NO: 13101 - protein, 118 aa, Artificial Sequence
  Chemically Synthesized
QVQLQESGGGLVQAGGSLRLSCAASGNISTFFYMGWYRQAPGKEREFVAGIGWGSNTNYADSVKGRFTISRDNAKNTVYLQMNSLKPEDTAVYYCAVTYRSVWDLYYWGQGTQVTVSS

SEQ ID NO: 13102 - protein, 118 aa, Artificial Sequence
  Chemically Synthesized
QVQLQESGGGLVQAGGSLRLSCAASGYISTFPDMGWYRQAPGKERELVATINLGGTTNYADSVKGRFTISRDNAKNTVYLQMNSLKPEDTAVYYCAVTSRHGGPYDYWGQGTQVTVSS

SEQ ID NO: 13103 - protein, 118 aa, Artificial Sequence
  Chemically Synthesized
QVQLQESGGGLVQAGGSLRLSCAASGTIFAPVYMGWYRQAPGKERELVASITWGGITYYADSVKGRFTISRDNAKNTVYLQMNSLKPEDTAVYYCAVVTYERTQFNYWGQGTQVTVSS

SEQ ID NO: 13104 - protein, 118 aa, Artificial Sequence
  Chemically Synthesized
QVQLQESGGGLVQAGGSLRLSCAASGTISSRAIMGWYRQAPGKERELVASIGTGASTYYADSVKGRFTISRDNAKNTVYLQMNSLKPEDTAVYYCAVYYLYDLEYDYWGQGTQVTVSS

SEQ ID NO: 13105 - protein, 126 aa, Artificial Sequence
  Chemically Synthesized
QVQLQESGGGLVQAGGSLRLSCAASGSIFHASTMGWYRQAPGKEREFVAGIDQGATTNYADSVKGRFTISRDNAKNTVYLQMNSLKPEDTAVYYCAVRDPQYIPDDSYTDVPLPYWGQGTQVTVSS

SEQ ID NO: 13106 - protein, 121 aa, Artificial Sequence
  Chemically Synthesized
QVQLQESGGGLVQAGGSLRLSCAASGSIFYLQFMGWYRQAPGKEREFVPLLLTVLLPYADSVKGRFTISRDNAKNTVYLQMNSLKPEDTAVYYCAVRIDQDYSSDQEPCYWGQGTQVTVSS

SEQ ID NO: 13107 - protein, 115 aa, Artificial Sequence
  Chemically Synthesized
QVQLQESGGGLVQAGGSLRLSCAASGYISRYRRMGWYRQAPGKERELVAGISYGASTYYADSVKGRFTISRDNAKNTVYLQMNSLKPEDTAVYYCASTTWDFRYWGQGTQVTVSS

SEQ ID NO: 13108 - protein, 118 aa, Artificial Sequence
  Chemically Synthesized
QVQLQESGGGLVQAGGSLRLSCAASGSISSYTLMGWYRQAPGKERELVAGIDYGSITYYADSVKGRFTISRDNAKNTVYLQMNSLKPEDTAVYYCAAHYAYVDRLRYWGQGTQVTVSS

SEQ ID NO: 13109 - protein, 117 aa, Artificial Sequence
  Chemically Synthesized
QVQLQESGGGLVQAGGSLRLSCAASGTISRDQSMGWYRQAPGKERELVAAIAYGGNTNYADSVKGRFTISRDNAKNTVYLQMNSLKPEDTAVYYCAALLTCGLTFYWGQGTQVTVSS

SEQ ID NO: 13110 - protein, 122 aa, Artificial Sequence
  Chemically Synthesized
QVQLQESGGGLVQAGGSLRLSCAASGTISYSNDMGWYRQAPGKERELVASITSGSTTNYADSVKGRFTISRDNAKNTVYLQMNSLKPEDTAVYYCAADYATPYDHDSYHPYWGQGTQVTVSS

SEQ ID NO: 13111 - protein, 118 aa, Artificial Sequence
  Chemically Synthesized
QVQLQESGGGLVQAGGSLRLSCAASGSISWYQPMGWYRQAPGKEREFVATIAKGGSTNYADSVKGRFTISRDNAKNTVYLQMNSLKPEDTAVYYCAVGDRYYVGFAYWGQGTQVTVSS

SEQ ID NO: 13112 - protein, 118 aa, Artificial Sequence
  Chemically Synthesized
QVQLQESGGGLVQAGGSLRLSCAASGTISHDTYMGWYRQAPGKERELVAAIAAGGSTYYADSVKGRFTISRDNAKNTVYLQMNSLKPEDTAVYYCAARYLSYYPLTYWGQGTQVTVSS

SEQ ID NO: 13113 - protein, 111 aa, Artificial Sequence
  Chemically Synthesized
QVQLQESGGGLVQAGGSLRLSCAASGSIFSNVFMGWYRQAPGKERELVATISDGSNTYYADSVKGRFTISRDNAKNTVYLQMNSLKPEDTAVYYCATVMYWGQGTQVTVSS

SEQ ID NO: 13114 - protein, 113 aa, Artificial Sequence
  Chemically Synthesized
QVQLQESGGGLVQAGGSLRLSCAASGNIFWPRYMGWYRQAPGKERELVAGITGGTTTYYADSVKGRFTISRDNAKNTVYLQMNSLKPEDTAVYYCAVYGLAYWGQGTQVTVSS

SEQ ID NO: 13115 - protein, 116 aa, Artificial Sequence
  Chemically Synthesized
QVQLQESGGGLVQAGGSLRLSCAASGTISYYAMGWYRQAPGKEREFVAGISTGGSTYYADSVKGRFTISRDNAKNTVYLQMNSLKPEDTAVYYCAVFSDADSALYWGQGTQVTVSS

SEQ ID NO: 13116 - protein, 125 aa, Artificial Sequence
  Chemically Synthesized
QVQLQESGGGLVQAGGSLRLSCAASGTISGYCMGWYRQAPGKERELVAGITYGSSTHYADSVKGRFTISRDNAKNTVYLQMNSLKPEDTAVYYCAVLRSVYYAFYHAPGGVHYYWGQGTQVTVSS

SEQ ID NO: 13117 - protein, 118 aa, Artificial Sequence
  Chemically Synthesized
QVQLQESGGGLVQAGGSLRLSCAASGNISWHHYMGWYRQAPGKERELVATINTGAITYYADSVKGRFTISRDNAKNTVYLQMNSLKPEDTAVYYCAVTTYVLGSYEYWGQGTQVTVSS

SEQ ID NO: 13118 - protein, 118 aa, Artificial Sequence
  Chemically Synthesized
QVQLQESGGGLVQAGGSLRLSCAASGTIFGTGGMGWYRQAPGKERELVAAIALGGNTNYADSVKGRFTISRDNAKNTVYLQMNSLKPEDTAVYYCAAVPYKGVSYWYWGQGTQVTVSS

SEQ ID NO: 13119 - protein, 118 aa, Artificial Sequence
  Chemically Synthesized
QVQLQESGGGLVQAGGSLRLSCAASGYISYTYSMGWYRQAPGKERELVASIGYGASTYYADSVKGRFTISRDNAKNTVYLQMNSLKPEDTAVYYCAAYAYDVDRYIYWGQGTQVTVSS

SEQ ID NO: 13120 - protein, 122 aa, Artificial Sequence
  Chemically Synthesized
QVQLQESGGGLVQAGGSLRLSCAASGYIFTYWVMGWYRQAPGKERELVATIGYGGNTYYADSVKGRFTISRDNAKNTVYLQMNSLKPEDTAVYYCAARRTDDITIWLNHEYWGQGTQVTVSS

SEQ ID NO: 13121 - protein, 118 aa, Artificial Sequence
  Chemically Synthesized
QVQLQESGGGLVQAGGSLRLSCAASGTISHYSDMGWYRQAPGKEREFVAGISQGGITYYADSVKGRFTISRDNAKNTVYLQMNSLKPEDTAVYYCAVYYRHDSDLYYWGQGTQVTVSS

SEQ ID NO: 13122 - protein, 118 aa, Artificial Sequence
  Chemically Synthesized
QVQLQESGGGLVQAGGSLRLSCAASGNIFIQYSMGWYRQAPGKERELVAAITYGGTTNYADSVKGRFTISRDNAKNTVYLQMNSLKPEDTAVYYCAAYYDTEYALDYWGQGTQVTVSS

SEQ ID NO: 13123 - protein, 121 aa, Artificial Sequence
  Chemically Synthesized
QVQLQESGGGLVQAGGSLRLSCAASGYISDVYGMGWYRQAPGKERELVATYSGCYYQYADSVKGRFTISRDNAKNTVYLQMNSLKPEDTAVYYCAVYTLKDDAYRWYFAYWGQGTQVTVSS

SEQ ID NO: 13124 - protein, 118 aa, Artificial Sequence
  Chemically Synthesized
QVQLQESGGGLVQAGGSLRLSCAASGSISTLDSMGWYRQAPGKEREFVAGISYGGNTNYADSVKGRFTISRDNAKNTVYLQMNSLKPEDTAVYYCAVDHYWYELHQYWGQGTQVTVSS

SEQ ID NO: 13125 - protein, 118 aa, Artificial Sequence
  Chemically Synthesized
QVQLQESGGGLVQAGGSLRLSCAASGNISIASVMGWYRQAPGKERELVATIAYGGITNYADSVKGRFTISRDNAKNTVYLQMNSLKPEDTAVYYCAVYLSTPFTYYYWGQGTQVTVSS

SEQ ID NO: 13126 - protein, 113 aa, Artificial Sequence
  Chemically Synthesized
QVQLQESGGGLVQAGGSLRLSCAASGNISHDWDMGWYRQAPGKERELVASINYGGTTYYADSVKGRFTISRDNAKNTVYLQMNSLKPEDTAVYYCAVQPYTYWGQGTQVTVSS

SEQ ID NO: 13127 - protein, 114 aa, Artificial Sequence
  Chemically Synthesized
QVQLQESGGGLVQAGGSLRLSCAASGYISRWRPMGWYRQAPGKERELVATIAPGGTTYYADSVKGRFTISRDNAKNTVYLQMNSLKPEDTAVYYCAWGYRLAYWGQGTQVTVSS

SEQ ID NO: 13128 - protein, 118 aa, Artificial Sequence
  Chemically Synthesized
QVQLQESGGGLVQAGGSLRLSCAASGTIFPADYMGWYRQAPGKERELVASIGRGGNTYYADSVKGRFTISRDNAKNTVYLQMNSLKPEDTAVYYCAVLAITGRLLIYWGQGTQVTVSS

SEQ ID NO: 13129 - protein, 121 aa, Artificial Sequence
  Chemically Synthesized
QVQLQESGGGLVQAGGSLRLSCAASGYISLSDVMGWYRQAPGKERELVAGITAGSNTYADSVKGRFTISRDNAKNTVYLQMNSLKPEDTAVYYCAVGSSGDSALPYGYRYWGQGTQVTVSS

SEQ ID NO: 13130 - protein, 112 aa, Artificial Sequence
  Chemically Synthesized
QVQLQESGGGLVQAGGSLRLSCAASGSIFSGWFMGWYRQAPGKEREFVAGISEGANTNYADSVKGRFTISRDNAKNTVYLQMNSLKPEDTAVYYCAWYHEYWGQGTQVTVSS

SEQ ID NO: 13131 - protein, 118 aa, Artificial Sequence
  Chemically Synthesized
QVQLQESGGGLVQAGGSLRLSCAASGTISGEWYMGWYRQAPGKERELVAGIAYGSNTYYADSVKGRFTISRDNAKNTVYLQMNSLKPEDTAVYYCAVRGWYFKSHRYWGQGTQVTVSS

SEQ ID NO: 13132 - protein, 117 aa, Artificial Sequence
  Chemically Synthesized
QVQLQESGGGLVQAGGSLRLSCAASGNISTKFYMGWYRQAPGKEREFVATIDDGSTTNYADSVKGRFTISRDNAKNTVYLQMNSLKPEDTAVYYCAALTVLNIGMYWGQGTQVTVSS

SEQ ID NO: 13133 - protein, 118 aa, Artificial Sequence
  Chemically Synthesized
QVQLQESGGGLVQAGGSLRLSCAASGNISYVRYMGWYRQAPGKERELVAAIAFGGSTNYADSVKGRFTISRDNAKNTVYLQMNSLKPEDTAVYYCAVDYQSDLGLVYWGQGTQVTVSS

SEQ ID NO: 13134 - protein, 122 aa, Artificial Sequence
  Chemically Synthesized
QVQLQESGGGLVQAGGSLRLSCAASGYIFCATQFMGWYRQAPGKEREFVATIGYDATTNYADSVKGRFTISRDNAKNTVYLQMNSLKPEDTAVYYCAVCTLVVLSTVTFMYWGQGTQVTVSS

SEQ ID NO: 13135 - protein, 122 aa, Artificial Sequence
  Chemically Synthesized
QVQLQESGGGLVQAGGSLRLSCAASGTISYTAHMGWYRQAPGKEREFVASITDGAITYYADSVKGRFTISRDNAKNTVYLQMNSLKPEDTAVYYCAVYTDEDYDYDGYHYYWGQGTQVTVSS

SEQ ID NO: 13136 - protein, 118 aa, Artificial Sequence
  Chemically Synthesized
QVQLQESGGGLVQAGGSLRLSCAASGSIFPYLRMGWYRQAPGKERELVATINPGANTNYADSVKGRFTISRDNAKNTVYLQMNSLKPEDTAVYYCAVRYYARYPHNYWGQGTQVTVSS

SEQ ID NO: 13137 - protein, 111 aa, Artificial Sequence
  Chemically Synthesized
QVQLQESGGGLVQAGGSLRLSCAASGSIFRPYYMGWYRQAPGKERELVAYQYADSVKGRFTISRDNAKNTVYLQMNSLKPEDTAVYYCAVLAIYTFDLGYWGQGTQVTVSS

SEQ ID NO: 13138 - protein, 118 aa, Artificial Sequence
  Chemically Synthesized
QVQLQESGGGLVQAGGSLRLSCAASGYISFVLGMGWYRQAPGKERELVASITRGTITNYADSVKGRFTISRDNAKNTVYLQMNSLKPEDTAVYYCAADPRNIWSHTYWGQGTQVTVSS

SEQ ID NO: 13139 - protein, 126 aa, Artificial Sequence
  Chemically Synthesized
QVQLQESGGGLVQAGGSLRLSCAASGNISLALSMGWYRQAPGKERELVASISPGASTYYADSVKGRFTISRDNAKNTVYLQMNSLKPEDTAVYYCAAYYLPDRTYDGLGVYRHDYWGQGTQVTVSS

SEQ ID NO: 13140 - protein, 117 aa, Artificial Sequence
  Chemically Synthesized
QVQLQESGGGLVQAGGSLRLSCAASGSISLDVFMGWYRQAPGKEREFVATIADGGTTYADSVKGRFTISRDNAKNTVYLQMNSLKPEDTAVYYCAVSYRINHYYRYWGQGTQVTVSS

SEQ ID NO: 13141 - protein, 118 aa, Artificial Sequence
  Chemically Synthesized
QVQLQESGGGLVQAGGSLRLSCAASGSISRATTMGWYRQAPGKEREFVASIAPGANTNYADSVKGRFTISRDNAKNTVYLQMNSLKPEDTAVYYCAAQVLNVYHSLYWGQGTQVTVSS

SEQ ID NO: 13142 - protein, 121 aa, Artificial Sequence
  Chemically Synthesized
QVQLQESGGGLVQAGGSLRLSCAASGSISGPYTMGWYRQAPGKERELVAAIADGAITYYADSVKGRFTISRDNAKNTVYLQMNSLKPEDTAVYYCAAIFDESFRRSSGLYWGQGTQVTVSS

SEQ ID NO: 13143 - protein, 126 aa, Artificial Sequence
  Chemically Synthesized
QVQLQESGGGLVQAGGSLRLSCAASGTIFWHTPMGWYRQAPGKERELVATISQGSNTNYADSVKGRFTISRDNAKNTVYLQMNSLKPEDTAVYYCAAQRRWKHYHWPYVRQDFVYWGQGTQVTVSS

SEQ ID NO: 13144 - protein, 113 aa, Artificial Sequence
  Chemically Synthesized
QVQLQESGGGLVQAGGSLRLSCAASGSIATMGWYRQAPGKERELVAGITSGGNTNYADSVKGRFTISRDNAKNTVYLQMNSLKPEDTAVYYCAADVPLSLVYWGQGTQVTVSS

SEQ ID NO: 13145 - protein, 118 aa, Artificial Sequence
  Chemically Synthesized
QVQLQESGGGLVQAGGSLRLSCAASGNISALFYMGWYRQAPGKERELVATISYGAITNYADSVKGRFTISRDNAKNTVYLQMNSLKPEDTAVYYCAANVWNDDALPYWGQGTQVTVSS

SEQ ID NO: 13146 - protein, 118 aa, Artificial Sequence
  Chemically Synthesized
QVQLQESGGGLVQAGGSLRLSCAASGYIFHYGEMGWYRQAPGKERELVAAIDLGASTNYADSVKGRFTISRDNAKNTVYLQMNSLKPEDTAVYYCAVQYGVTRNYTYWGQGTQVTVSS

SEQ ID NO: 13147 - protein, 122 aa, Artificial Sequence
  Chemically Synthesized
QVQLQESGGGLVQAGGSLRLSCAASGNIFDRNTMGWYRQAPGKERELVAGIDDGTSNQYADSVKGRFTISRDNAKNTVYLQMNSLKPEDTAVYYCAVTPYDTARYGSYHVYWGQGTQVTVSS

SEQ ID NO: 13148 - protein, 118 aa, Artificial Sequence
  Chemically Synthesized
QVQLQESGGGLVQAGGSLRLSCAASGTISDPAVMGWYRQAPGKERELVAGIDYGTNTYYADSVKGRFTISRDNAKNTVYLQMNSLKPEDTAVYYCAAFIYYDTALTYWGQGTQVTVSS

SEQ ID NO: 13149 - protein, 118 aa, Artificial Sequence
  Chemically Synthesized
QVQLQESGGGLVQAGGSLRLSCAASGYIFYPDYMGWYRQAPGKEREFVASITPGSITNYADSVKGRFTISRDNAKNTVYLQMNSLKPEDTAVYYCAAPSDRIILLRYWGQGTQVTVSS

SEQ ID NO: 13150 - protein, 126 aa, Artificial Sequence
  Chemically Synthesized
QVQLQESGGGLVQAGGSLRLSCAASGTISYGYYMGWYRQAPGKEREFVAGIAIGSITYYADSVKGRFTISRDNAKNTVYLQMNSLKPEDTAVYYCAVYNPDQYLSSYYYTWYYLYWGQGTQVTVSS

SEQ ID NO: 13151 - protein, 117 aa, Artificial Sequence
  Chemically Synthesized
QVQLQESGGGLVQAGGSLRLSCAASGSIFTRTMGWYRQAPGKERELVAGISHGASTYYADSVKGRFTISRDNAKNTVYLQMNSLKPEDTAVYYCAAGDLLSYPYHYWGQGTQVTVSS

SEQ ID NO: 13152 - protein, 117 aa, Artificial Sequence
  Chemically Synthesized
QVQLQESGGGLVQAGGSLRLSCAASGSIFYVNDMGWYRQAPGKERELVAGIDSGSTTYYADSVKGRFTISRDNAKNTVYLQMNSLKPEDTAVYYCAVSTYDRPFDYWGQGTQVTVSS

SEQ ID NO: 13153 - protein, 126 aa, Artificial Sequence
  Chemically Synthesized
QVQLQESGGGLVQAGGSLRLSCAASGTISYLFTMGWYRQAPGKEREFVATIAYGTSTYYADSVKGRFTISRDNAKNTVYLQMNSLKPEDTAVYYCAVGYNSSTYEQDSRYATLFYWGQGTQVTVSS

SEQ ID NO: 13154 - protein, 111 aa, Artificial Sequence
  Chemically Synthesized
QVQLQESGGGLVQAGGSLRLSCAASGSIFRQQTMGWYRQAPGKERELVAGISEGTSTYYADSVKGRFTISRDNAKNTVYLQMNSLKPEDTAVYYCALPSYWGQGTQVTVSS

SEQ ID NO: 13155 - protein, 118 aa, Artificial Sequence
  Chemically Synthesized
QVQLQESGGGLVQAGGSLRLSCAASGSISDYDLMGWYRQAPGKEREFVAAINFGSSTYYADSVKGRFTISRDNAKNTVYLQMNSLKPEDTAVYYCAAFPQYDPYHKYWGQGTQVTVSS

SEQ ID NO: 13156 - protein, 118 aa, Artificial Sequence
  Chemically Synthesized
QVQLQESGGGLVQAGGSLRLSCAASGSIFWRGYMGWYRQAPGKEREFVAAINDGAITYYADSVKGRFTISRDNAKNTVYLQMNSLKPEDTAVYYCAVDRNAGQTHQYWGQGTQVTVSS

SEQ ID NO: 13157 - protein, 118 aa, Artificial Sequence
  Chemically Synthesized
QVQLQESGGGLVQAGGSLRLSCAASGTISSDAFMGWYRQAPGKERELVAGIGYGSITNYADSVKGRFTISRDNAKNTVYLQMNSLKPEDTAVYYCAVRWPGSGYHSYWGQGTQVTVSS

SEQ ID NO: 13158 - protein, 110 aa, Artificial Sequence
  Chemically Synthesized
QVQLQESGGGLVQAGGSLRLSCAASGNIFYPSEMGWYRQAPGKERELVASIDDVVLPYADSVKGRFTISRDNAKNTVYLQMNSLKPEDTAVYYCAAVFYWGQGTQVTVSS

SEQ ID NO: 13159 - protein, 121 aa, Artificial Sequence
  Chemically Synthesized
QVQLQESGGGLVQAGGSLRLSCAASGSISYLPYMGWYRQAPGKEREFVATIDDGSTTNYADSVKGRFTISRDNAKNTVYLQMNSLKPEDTAVYYCAVTVSAATSLVRLIYWGQGTQVTVSS

SEQ ID NO: 13160 - protein, 117 aa, Artificial Sequence
  Chemically Synthesized
QVQLQESGGGLVQAGGSLRLSCAASGNISWAVDMGWYRQAPGKERELVAGIDDGTSTYYADSVKGRFTISRDNAKNTVYLQMNSLKPEDTAVYYCALLNTTCTVIYWGQGTQVTVSS

SEQ ID NO: 13161 - protein, 122 aa, Artificial Sequence
  Chemically Synthesized
QVQLQESGGGLVQAGGSLRLSCAASGNISNIRYMGWYRQAPGKERELVASITTGSSTYYADSVKGRFTISRDNAKNTVYLQMNSLKPEDTAVYYCAVRNYHNDGASSDLYYWGQGTQVTVSS

SEQ ID NO: 13162 - protein, 111 aa, Artificial Sequence
  Chemically Synthesized
QVQLQESGGGLVQAGGSLRLSCAASGYISRGWYMGWYRQAPGKERELVASIALGGNTYYADSVKGRFTISRDNAKNTVYLQMNSLKPEDTAVYYCALGMYWGQGTQVTVSS

SEQ ID NO: 13163 - protein, 125 aa, Artificial Sequence
  Chemically Synthesized
QVQLQESGGGLVQAGGSLRLSCAASGSIFPYDYMGWYRQAPGKEREFVAGIDPGTSTNYADSVKGRFTISRDNAKNTVYLQMNSLKPEDTAVYYCAADLVSNQYSFTSFTTLLYWGQGTQVTVSS

SEQ ID NO: 13164 - protein, 118 aa, Artificial Sequence
  Chemically Synthesized
QVQLQESGGGLVQAGGSLRLSCAASGYISSGYYMGWYRQAPGKERELVAAITGGTNTNYADSVKGRFTISRDNAKNTVYLQMNSLKPEDTAVYYCAARVRYHYRHAYWGQGTQVTVSS

SEQ ID NO: 13165 - protein, 125 aa, Artificial Sequence
  Chemically Synthesized
QVQLQESGGGLVQAGGSLRLSCAASGYIFSITYMGWYRQAPGKEREFVAAIGRGSNTYYADSVKGRFTISRDNAKNTVYLQMNSLKPEDTAVYYCAVRHYRGTYDGYGYRFHYYWGQGTQVTVSS

SEQ ID NO: 13166 - protein, 118 aa, Artificial Sequence
  Chemically Synthesized
QVQLQESGGGLVQAGGSLRLSCAASGTIFSYYYMGWYRQAPGKEREFVASIDTGGSTNYADSVKGRFTISRDNAKNTVYLQMNSLKPEDTAVYYCAARWDWYRRFLYWGQGTQVTVSS

SEQ ID NO: 13167 - protein, 125 aa, Artificial Sequence
  Chemically Synthesized
QVQLQESGGGLVQAGGSLRLSCAASGSIFWRRFMGWYRQAPGKERELLPVLLLVLVPYADSVKGRFTISRDNAKNTVYLQMNSLKPEDTAVYYCAVTGADEPWYDQVASNYFHYWGQGTQVTVSS

SEQ ID NO: 13168 - protein, 118 aa, Artificial Sequence
  Chemically Synthesized
QVQLQESGGGLVQAGGSLRLSCAASGYISAKWLMGWYRQAPGKEREFVAAIDDGAITYYADSVKGRFTISRDNAKNTVYLQMNSLKPEDTAVYYCAAIRYYYDRLLYWGQGTQVTVSS

SEQ ID NO: 13169 - protein, 122 aa, Artificial Sequence
  Chemically Synthesized
QVQLQESGGGLVQAGGSLRLSCAASGSIFLAGYMGWYRQAPGKERELVAAISEGAITNYADSVKGRFTISRDNAKNTVYLQMNSLKPEDTAVYYCAVYTQFQFRTFAYHSYWGQGTQVTVSS

SEQ ID NO: 13170 - protein, 121 aa, Artificial Sequence
  Chemically Synthesized
QVQLQESGGGLVQAGGSLRLSCAASGTISDVLAMGWYRQAPGKEREFVAAIARGTITYYADSVKGRFTISRDNAKNTVYLQMNSLKPEDTAVYYCAARTSSLLVSSTVIYWGQGTQVTVSS

SEQ ID NO: 13171 - protein, 118 aa, Artificial Sequence
  Chemically Synthesized
QVQLQESGGGLVQAGGSLRLSCAASGNIFWLFIMGWYRQAPGKEREFVAAIGAGGNTNYADSVKGRFTISRDNAKNTVYLQMNSLKPEDTAVYYCAVLAGGYDYLWYWGQGTQVTVSS

SEQ ID NO: 13172 - protein, 126 aa, Artificial Sequence
  Chemically Synthesized
QVQLQESGGGLVQAGGSLRLSCAASGSIFVVNDMGWYRQAPGKERELVAGIGLGTITNYADSVKGRFTISRDNAKNTVYLQMNSLKPEDTAVYYCAAYLEYQGGPGWNDEDEHVYWGQGTQVTVSS

SEQ ID NO: 13173 - protein, 117 aa, Artificial Sequence
  Chemically Synthesized
QVQLQESGGGLVQAGGSLRLSCAASGYISFRAMGWYRQAPGKERELVAAINYGTSTYYADSVKGRFTISRDNAKNTVYLQMNSLKPEDTAVYYCAVKLDVDSRFGYWGQGTQVTVSS

SEQ ID NO: 13174 - protein, 122 aa, Artificial Sequence
  Chemically Synthesized
QVQLQESGGGLVQAGGSLRLSCAASGTISDDGYMGWYRQAPGKEREFVAAIATGTNTNYADSVKGRFTISRDNAKNTVYLQMNSLKPEDTAVYYCAVATYHGGTGDADYVYWGQGTQVTVSS

SEQ ID NO: 13175 - protein, 121 aa, Artificial Sequence
  Chemically Synthesized
QVQLQESGGGLVQAGGSLRLSCAASGTIFIPYIMGWYRQAPGKERELVASIADGANTYYADSVKGRFTISRDNAKNTVYLQMNSLKPEDTAVYYCAAYYGRDNKRNTVMYWGQGTQVTVSS

SEQ ID NO: 13176 - protein, 117 aa, Artificial Sequence
  Chemically Synthesized
QVQLQESGGGLVQAGGSLRLSCAASGNILGLLMGWYRQAPGKEREFVAAISAGAITNYADSVKGRFTISRDNAKNTVYLQMNSLKPEDTAVYYCAVPHGQQTWHGYWGQGTQVTVSS

SEQ ID NO: 13177 - protein, 122 aa, Artificial Sequence
  Chemically Synthesized
QVQLQESGGGLVQAGGSLRLSCAASGTIFTYLDMGWYRQAPGKERELVATIDIGSSTYYADSVKGRFTISRDNAKNTVYLQMNSLKPEDTAVYYCAVYSRWRRFYGGGYIYWGQGTQVTVSS

SEQ ID NO: 13178 - protein, 117 aa, Artificial Sequence
  Chemically Synthesized
QVQLQESGGGLVQAGGSLRLSCAASGNISVVFNMGWYRQAPGKEREFVASIDYGGYQYADSVKGRFTISRDNAKNTVYLQMNSLKPEDTAVYYCAVRPSIYYDLTYWGQGTQVTVSS

SEQ ID NO: 13179 - protein, 119 aa, Artificial Sequence
  Chemically Synthesized
QVQLQESGGGLVQAGGSLRLSCAASGNISAFEYMGWYRQAPGKEREFVAAIGTGGSITNYADSVKGRFTISRDNAKNTVYLQMNSLKPEDTAVYYCAADDAWYFTHRYWGQGTQVTVSS

SEQ ID NO: 13180 - protein, 126 aa, Artificial Sequence
  Chemically Synthesized
QVQLQESGGGLVQAGGSLRLSCAASGNISLSLMGWYRQAPGKEREFVATINAGSNTNYADSVKGRFTISRDNAKNTVYLQMNSLKPEDTAVYYCAADQQIYTYYRVDLYLGVFGYWGQGTQVTVSS

SEQ ID NO: 13181 - protein, 125 aa, Artificial Sequence
  Chemically Synthesized
QVQLQESGGGLVQAGGSLRLSCAASGTISARAGMGWYRQAPGKERELVAGISGGTNTYYADSVKGRFTISRDNAKNTVYLQMNSLKPEDTAVYYCAAYITAQFTYPTTSTNVLYWGQGTQVTVSS

SEQ ID NO: 13182 - protein, 117 aa, Artificial Sequence
  Chemically Synthesized
QVQLQESGGGLVQAGGSLRLSCAASGNISYYSDMGWYRQAPGKEREFVATIGRGASTYYADSVKGRFTISRDNAKNTVYLQMNSLKPEDTAVYYCAVRPALARSMYWGQGTQVTVSS

SEQ ID NO: 13183 - protein, 126 aa, Artificial Sequence
  Chemically Synthesized
QVQLQESGGGLVQAGGSLRLSCAASGSISFFINMGWYRQAPGKERELVAAIALGGTTYYADSVKGRFTISRDNAKNTVYLQMNSLKPEDTAVYYCAVPQSGYGIATYSTNSPHYYWGQGTQVTVSS

SEQ ID NO: 13184 - protein, 121 aa, Artificial Sequence
  Chemically Synthesized
QVQLQESGGGLVQAGGSLRLSCAASGTIFGTYAMGWYRQAPGKEREFVAGIAIGSNTNYADSVKGRFTISRDNAKNTVYLQMNSLKPEDTAVYYCAVQPLTGYDNAGVHYWGQGTQVTVSS

SEQ ID NO: 13185 - protein, 122 aa, Artificial Sequence
  Chemically Synthesized
QVQLQESGGGLVQAGGSLRLSCAASGYISRYYRMGWYRQAPGKEREFVASIDDGSITNYADSVKGRFTISRDNAKNTVYLQMNSLKPEDTAVYYCAAVYLDYGYLIDAHEYWGQGTQVTVSS

SEQ ID NO: 13186 - protein, 126 aa, Artificial Sequence
  Chemically Synthesized
QVQLQESGGGLVQAGGSLRLSCAASGSIFTWHTMGWYRQAPGKERELVAAITYGSTTYYADSVKGRFTISRDNAKNTVYLQMNSLKPEDTAVYYCAVDDWPPRPHYRGDVSYHSYWGQGTQVTVSS

SEQ ID NO: 13187 - protein, 118 aa, Artificial Sequence
  Chemically Synthesized
QVQLQESGGGLVQAGGSLRLSCAASGYIFYSRAMGWYRQAPGKERELVAGIAVGSTTYYADSVKGRFTISRDNAKNTVYLQMNSLKPEDTAVYYCAAYGFDDYYFGYWGQGTQVTVSS

SEQ ID NO: 13188 - protein, 118 aa, Artificial Sequence
  Chemically Synthesized
QVQLQESGGGLVQAGGSLRLSCAASGTISNTAYMGWYRQAPGKERELVAAISYGSSTYYADSVKGRFTISRDNAKNTVYLQMNSLKPEDTAVYYCAAYNIYWGEHYYWGQGTQVTVSS

SEQ ID NO: 13189 - protein, 126 aa, Artificial Sequence
  Chemically Synthesized
QVQLQESGGGLVQAGGSLRLSCAASGTIFHYDYMGWYRQAPGKEREFVASIAYGAITYYADSVKGRFTISRDNAKNTVYLQMNSLKPEDTAVYYCAVNPGQDGYIPYRFTDHFYYWGQGTQVTVSS

SEQ ID NO: 13190 - protein, 118 aa, Artificial Sequence
  Chemically Synthesized
QVQLQESGGGLVQAGGSLRLSCAASGSISQQTDMGWYRQAPGKERELVAAINGGTTTNYADSVKGRFTISRDNAKNTVYLQMNSLKPEDTAVYYCAVQEARSPGFYYWGQGTQVTVSS

SEQ ID NO: 13191 - protein, 122 aa, Artificial Sequence
  Chemically Synthesized
QVQLQESGGGLVQAGGSLRLSCAASGNIFHYANMGWYRQAPGKERELVASIDTGSNTNYADSVKGRFTISRDNAKNTVYLQMNSLKPEDTAVYYCAVATTGLRGAEGWHPYWGQGTQVTVSS

SEQ ID NO: 13192 - protein, 122 aa, Artificial Sequence
  Chemically Synthesized
QVQLQESGGGLVQAGGSLRLSCAASGTISVGLTMGWYRQAPGKERELVAGITVGANTYYADSVKGRFTISRDNAKNTVYLQMNSLKPEDTAVYYCAVDYGLGAPPDTRLWYWGQGTQVTVSS

SEQ ID NO: 13193 - protein, 118 aa, Artificial Sequence
  Chemically Synthesized
QVQLQESGGGLVQAGGSLRLSCAASGNIFYAPRMGWYRQAPGKEREFVASIATGASTNYADSVKGRFTISRDNAKNTVYLQMNSLKPEDTAVYYCAALAYWGLPLWYWGQGTQVTVSS

SEQ ID NO: 13194 - protein, 118 aa, Artificial Sequence
  Chemically Synthesized
QVQLQESGGGLVQAGGSLRLSCAASGTISNNANMGWYRQAPGKERELVATISGGSNTYYADSVKGRFTISRDNAKNTVYLQMNSLKPEDTAVYYCAVYATSDGPHPYWGQGTQVTVSS

SEQ ID NO: 13195 - protein, 122 aa, Artificial Sequence
  Chemically Synthesized
QVQLQESGGGLVQAGGSLRLSCAASGSISEYYDMGWYRQAPGKERELVAAITEGGITYYADSVKGRFTISRDNAKNTVYLQMNSLKPEDTAVYYCAADDVSSYEYSSGYSYWGQGTQVTVSS

SEQ ID NO: 13196 - protein, 125 aa, Artificial Sequence
  Chemically Synthesized
QVQLQESGGGLVQAGGSLRLSCAASGNIFAALYMGWYRQAPGKERELVAGINGGSITYYADSVKGRFTISRDNAKNTVYLQMNSLKPEDTAVYYCAVQDTSVLLTLTTTSLTLYWGQGTQVTVSS

SEQ ID NO: 13197 - protein, 109 aa, Artificial Sequence
  Chemically Synthesized
QVQLQESGGGLVQAGGSLRLSCAASGNISTVTMGWYRQAPGKERELVAAIGYGASTYYADSVKGRFTISRDNAKNTVYLQMNSLKPEDTAVYYCAVSYWGQGTQVTVSS

SEQ ID NO: 13198 - protein, 112 aa, Artificial Sequence
  Chemically Synthesized
QVQLQESGGGLVQAGGSLRLSCAASGTISDDNTMGWYRQAPGKERELVAGIADGTINLYADSVKGRFTISRDNAKNTVYLQMNSLKPEDTAVYYCAVRICYWGQGTQVTVSS

SEQ ID NO: 13199 - protein, 122 aa, Artificial Sequence
  Chemically Synthesized
QVQLQESGGGLVQAGGSLRLSCAASGTISRTRIMGWYRQAPGKEREFVAAITYGTITYYADSVKGRFTISRDNAKNTVYLQMNSLKPEDTAVYYCAVRLYAYYGDPVSLYYWGQGTQVTVSS

SEQ ID NO: 13200 - protein, 122 aa, Artificial Sequence
  Chemically Synthesized
QVQLQESGGGLVQAGGSLRLSCAASGYISLQSRMGWYRQAPGKEREFVAAIGYGANTYYADSVKGRFTISRDNAKNTVYLQMNSLKPEDTAVYYCAAEADNRYVTGRGYYYWGQGTQVTVSS

SEQ ID NO: 13201 - protein, 122 aa, Artificial Sequence
  Chemically Synthesized
QVQLQESGGGLVQAGGSLRLSCAASGSISWAVGMGWYRQAPGKERELVAGISQGGTTYYADSVKGRFTISRDNAKNTVYLQMNSLKPEDTAVYYCAAFASPTNSYAPHHYYWGQGTQVTVSS

SEQ ID NO: 13202 - protein, 118 aa, Artificial Sequence
  Chemically Synthesized
QVQLQESGGGLVQAGGSLRLSCAASGNISRGDDMGWYRQAPGKERELVASISSGTSTYYADSVKGRFTISRDNAKNTVYLQMNSLKPEDTAVYYCAVDEGRYQGYWYWGQGTQVTVSS

SEQ ID NO: 13203 - protein, 118 aa, Artificial Sequence
  Chemically Synthesized
QVQLQESGGGLVQAGGSLRLSCAASGTISFSQPMGWYRQAPGKEREFVATITLGSTTYYADSVKGRFTISRDNAKNTVYLQMNSLKPEDTAVYYCAVNYARDPYYGYWGQGTQVTVSS

SEQ ID NO: 13204 - protein, 118 aa, Artificial Sequence
  Chemically Synthesized
QVQLQESGGGLVQAGGSLRLSCAASGNIFRNSRMGWYRQAPGKEREFVATIGDGGNTYYADSVKGRFTISRDNAKNTVYLQMNSLKPEDTAVYYCAVYRTDDPYFPYWGQGTQVTVSS

SEQ ID NO: 13205 - protein, 126 aa, Artificial Sequence
  Chemically Synthesized
QVQLQESGGGLVQAGGSLRLSCAASGTIFLGAVMGWYRQAPGKERELVAGINEGGNTYYADSVKGRFTISRDNAKNTVYLQMNSLKPEDTAVYYCAVYQGYDPDRDTVRIRGHSYWGQGTQVTVSS

SEQ ID NO: 13206 - protein, 122 aa, Artificial Sequence
  Chemically Synthesized
QVQLQESGGGLVQAGGSLRLSCAASGSISRPVYMGWYRQAPGKERELVASIAVGGITNYADSVKGRFTISRDNAKNTVYLQMNSLKPEDTAVYYCAVYPYGTVPGPYLFTYWGQGTQVTVSS

SEQ ID NO: 13207 - protein, 118 aa, Artificial Sequence
  Chemically Synthesized
QVQLQESGGGLVQAGGSLRLSCAASGNISYWPGMGWYRQAPGKEREFVAGINFGGNTNYADSVKGRFTISRDNAKNTVYLQMNSLKPEDTAVYYCAVRLGTTDGLAYWGQGTQVTVSS

SEQ ID NO: 13208 - protein, 122 aa, Artificial Sequence
  Chemically Synthesized
QVQLQESGGGLVQAGGSLRLSCAASGSISRGIGMGWYRQAPGKERELVAAITLGWYYQYADSVKGRFTISRDNAKNTVYLQMNSLKPEDTAVYYCAARYWWGQLFNTQLYYWGQGTQVTVSS

SEQ ID NO: 13209 - protein, 123 aa, Artificial Sequence
  Chemically Synthesized
QVQLQESGGGLVQAGGSLRLSCAASGSISWAHVMGWYRQAPGKERELVAAIAIGTTTNYADSVKGRFTISRDNAKNTVYLQMNSLKPEDTAVYYCAVGYSGYNGYGERGYRYWGQGTQVTVSS

SEQ ID NO: 13210 - protein, 118 aa, Artificial Sequence
  Chemically Synthesized
QVQLQESGGGLVQAGGSLRLSCAASGYIFGHVNMGWYRQAPGKEREFVATISNGGNTYYADSVKGRFTISRDNAKNTVYLQMNSLKPEDTAVYYCAAWPDLYYYHYYWGQGTQVTVSS

SEQ ID NO: 13211 - protein, 120 aa, Artificial Sequence
  Chemically Synthesized
QVQLQESGGGLVQAGGSLRLSCAASGTISELYDMGWYRQAPGKERELVAAIAVGTTTYYADSVKGRFTISRDNAKNTVYLQMNSLKPEDTAVYYCAAYIDQKSAYGTIYWGQGTQVTVSS

SEQ ID NO: 13212 - protein, 120 aa, Artificial Sequence
  Chemically Synthesized
QVQLQESGGGLVQAGGSLRLSCAASGNIFDYTGMGWYRQAPGKERELVAAIDTGALQYADSVKGRFTISRDNAKNTVYLQMNSLKPEDTAVYYCAADPTWIYDSRLTIYWGQGTQVTVSS

SEQ ID NO: 13213 - protein, 116 aa, Artificial Sequence
  Chemically Synthesized
QVQLQESGGGLVQAGGSLRLSCAASGSISDEYYMGWYRQAPGKERELVAAITTVLIPYADSVKGRFTISRDNAKNTVYLQMNSLKPEDTAVYYCAAAYRLVHSIYWGQGTQVTVSS

SEQ ID NO: 13214 - protein, 126 aa, Artificial Sequence
  Chemically Synthesized
QVQLQESGGGLVQAGGSLRLSCAASGNISGSDAMGWYRQAPGKERELVAGISNGGSTYYADSVKGRFTISRDNAKNTVYLQMNSLKPEDTAVYYCAVNAEYDYVDDSYDYLDLYYWGQGTQVTVSS

SEQ ID NO: 13215 - protein, 117 aa, Artificial Sequence
  Chemically Synthesized
QVQLQESGGGLVQAGGSLRLSCAASGTISAALWMGWYRQAPGKEREFVALLMVVLLPYADSVKGRFTISRDNAKNTVYLQMNSLKPEDTAVYYCAVLRYIYGAHRYWGQGTQVTVSS

SEQ ID NO: 13216 - protein, 122 aa, Artificial Sequence
  Chemically Synthesized
QVQLQESGGGLVQAGGSLRLSCAASGSIFSYNVMGWYRQAPGKERELVASIGTGSTTYYADSVKGRFTISRDNAKNTVYLQMNSLKPEDTAVYYCAARHSWYHRADARYYYWGQGTQVTVSS

SEQ ID NO: 13217 - protein, 122 aa, Artificial Sequence
  Chemically Synthesized
QVQLQESGGGLVQAGGSLRLSCAASGNISPPSLMGWYRQAPGKEREFVAAINNGANTNYADSVKGRFTISRDNAKNTVYLQMNSLKPEDTAVYYCAARYVEGSWKVYGHRYWGQGTQVTVSS

SEQ ID NO: 13218 - protein, 122 aa, Artificial Sequence
  Chemically Synthesized
QVQLQESGGGLVQAGGSLRLSCAASGTIFTVGGMGWYRQAPGKERELVATITDGGITYYADSVKGRFTISRDNAKNTVYLQMNSLKPEDTAVYYCAVRLQRTVPVYKYLYYWGQGTQVTVSS

SEQ ID NO: 13219 - protein, 117 aa, Artificial Sequence
  Chemically Synthesized
QVQLQESGGGLVQAGGSLRLSCAASGTISRTVMGWYRQAPGKEREFVASIGYGATTNYADSVKGRFTISRDNAKNTVYLQMNSLKPEDTAVYYCAVDDTWSSTLTYWGQGTQVTVSS

SEQ ID NO: 13220 - protein, 121 aa, Artificial Sequence
  Chemically Synthesized
QVQLQESGGGLVQAGGSLRLSCAASGSISQLATMGWYRQAPGKERELVASIGTGTSTYYADSVKGRFTISRDNAKNTVYLQMNSLKPEDTAVYYCAAGGYGASARYQHRYWGQGTQVTVSS

SEQ ID NO: 13221 - protein, 118 aa, Artificial Sequence
  Chemically Synthesized
QVQLQESGGGLVQAGGSLRLSCAASGTISYAQSMGWYRQAPGKERELVAGIASGATTYYADSVKGRFTISRDNAKNTVYLQMNSLKPEDTAVYYCAAYYGGDDYHLYWGQGTQVTVSS

SEQ ID NO: 13222 - protein, 118 aa, Artificial Sequence
  Chemically Synthesized
QVQLQESGGGLVQAGGSLRLSCAASGNISESSSMGWYRQAPGKEREFVAGISHGTTTNYADSVKGRFTISRDNAKNTVYLQMNSLKPEDTAVYYCAVGPYEAVYFRYWGQGTQVTVSS

SEQ ID NO: 13223 - protein, 126 aa, Artificial Sequence
  Chemically Synthesized
QVQLQESGGGLVQAGGSLRLSCAASGNIFGSLRMGWYRQAPGKERELVASITVGGSTNYADSVKGRFTISRDNAKNTVYLQMNSLKPEDTAVYYCAVYYASPDGDLSRYVNLHIYWGQGTQVTVSS

SEQ ID NO: 13224 - protein, 122 aa, Artificial Sequence
  Chemically Synthesized
QVQLQESGGGLVQAGGSLRLSCAASGNIFGHQAMGWYRQAPGKEREFVAGITSGTNTNYADSVKGRFTISRDNAKNTVYLQMNSLKPEDTAVYYCAVDLFQYGEAFRDFDYWGQGTQVTVSS

SEQ ID NO: 13225 - protein, 122 aa, Artificial Sequence
  Chemically Synthesized
QVQLQESGGGLVQAGGSLRLSCAASGTISGDFIMGWYRQAPGKEREFVAAIDAGGTTNYADSVKGRFTISRDNAKNTVYLQMNSLKPEDTAVYYCAAYHSDRYADGNVHSYWGQGTQVTVSS

SEQ ID NO: 13226 - protein, 118 aa, Artificial Sequence
  Chemically Synthesized
QVQLQESGGGLVQAGGSLRLSCAASGTISRLGVMGWYRQAPGKERELVAAITRGGSTYYADSVKGRFTISRDNAKNTVYLQMNSLKPEDTAVYYCAVRSVKYRYYFYWGQGTQVTVSS

SEQ ID NO: 13227 - protein, 118 aa, Artificial Sequence
  Chemically Synthesized
QVQLQESGGGLVQAGGSLRLSCAASGTISQQTNMGWYRQAPGKEREFVAAISYGTNTNYADSVKGRFTISRDNAKNTVYLQMNSLKPEDTAVYYCAAILWDRGYHYYWGQGTQVTVSS

SEQ ID NO: 13228 - protein, 118 aa, Artificial Sequence
  Chemically Synthesized
QVQLQESGGGLVQAGGSLRLSCAASGNISADQRMGWYRQAPGKEREFVAGITTGGTTYYADSVKGRFTISRDNAKNTVYLQMNSLKPEDTAVYYCAVVGYYLGWHGYWGQGTQVTVSS

SEQ ID NO: 13229 - protein, 118 aa, Artificial Sequence
  Chemically Synthesized
QVQLQESGGGLVQAGGSLRLSCAASGTIFVPTDMGWYRQAPGKEREFVATITSGGNTYYADSVKGRFTISRDNAKNTVYLQMNSLKPEDTAVYYCAARYNPIRRFAYWGQGTQVTVSS

SEQ ID NO: 13230 - protein, 118 aa, Artificial Sequence
  Chemically Synthesized
QVQLQESGGGLVQAGGSLRLSCAASGTIFKSANMGWYRQAPGKERELVAGINDGTNTNYADSVKGRFTISRDNAKNTVYLQMNSLKPEDTAVYYCAAYTYDGRHHGYWGQGTQVTVSS

SEQ ID NO: 13231 - protein, 118 aa, Artificial Sequence
  Chemically Synthesized
QVQLQESGGGLVQAGGSLRLSCAASGSISSYSGMGWYRQAPGKERELVAGINYGTSTYYADSVKGRFTISRDNAKNTVYLQMNSLKPEDTAVYYCAVYDQYGPPHSYWGQGTQVTVSS

SEQ ID NO: 13232 - protein, 118 aa, Artificial Sequence
  Chemically Synthesized
QVQLQESGGGLVQAGGSLRLSCAASGTISGAYWMGWYRQAPGKERELVAAIDAGTSTNYADSVKGRFTISRDNAKNTVYLQMNSLKPEDTAVYYCAVYYRLDVHHPYWGQGTQVTVSS

SEQ ID NO: 13233 - protein, 117 aa, Artificial Sequence
  Chemically Synthesized
QVQLQESGGGLVQAGGSLRLSCAASGNISHSGLMGWYRQAPGKEREFVAAIADGGTTYYADSVKGRFTISRDNAKNTVYLQMNSLKPEDTAVYYCAAARRIAYHWYWGQGTQVTVSS

SEQ ID NO: 13234 - protein, 122 aa, Artificial Sequence
  Chemically Synthesized
QVQLQESGGGLVQAGGSLRLSCAASGYISRSYGMGWYRQAPGKEREFVATIDIGGTTNYADSVKGRFTISRDNAKNTVYLQMNSLKPEDTAVYYCAANDIRGGELYDDLDYWGQGTQVTVSS

SEQ ID NO: 13235 - protein, 118 aa, Artificial Sequence
  Chemically Synthesized
QVQLQESGGGLVQAGGSLRLSCAASGNISRVDAMGWYRQAPGKEREFVATIDSGSNTNYADSVKGRFTISRDNAKNTVYLQMNSLKPEDTAVYYCAVAGRRRYHYYYWGQGTQVTVSS

SEQ ID NO: 13236 - protein, 121 aa, Artificial Sequence
  Chemically Synthesized
QVQLQESGGGLVQAGGSLRLSCAASGYFSAVRMGWYRQAPGKEREFVAAIGDGANTYYADSVKGRFTISRDNAKNTVYLQMNSLKPEDTAVYYCAVSHDFDDYYDTDFDYWGQGTQVTVSS

SEQ ID NO: 13237 - protein, 116 aa, Artificial Sequence
  Chemically Synthesized
QVQLQESGGGLVQAGGSLRLSCAASGYISVGSDMGWYRQAPGKERELVAAISDGSNTYYADSVKGRFTISRDNAKNTVYLQMNSLKPEDTAVYYCAAYHPDRDLYWGQGTQVTVSS

SEQ ID NO: 13238 - protein, 125 aa, Artificial Sequence
  Chemically Synthesized
QVQLQESGGGLVQAGGSLRLSCAASGYISWHLFMGWYRQAPGKERELVAGIDGGSSTYADSVKGRFTISRDNAKNTVYLQMNSLKPEDTAVYYCAVRDRDAITQPYAGRVNFRYWGQGTQVTVSS

SEQ ID NO: 13239 - protein, 122 aa, Artificial Sequence
  Chemically Synthesized
QVQLQESGGGLVQAGGSLRLSCAASGTIFNDTVMGWYRQAPGKEREFVATINVGAITYYADSVKGRFTISRDNAKNTVYLQMNSLKPEDTAVYYCAVSRYEYGSDADDHSYWGQGTQVTVSS

SEQ ID NO: 13240 - protein, 122 aa, Artificial Sequence
  Chemically Synthesized
QVQLQESGGGLVQAGGSLRLSCAASGNIFYVNRMGWYRQAPGKERELVAAIAYGSSTNYADSVKGRFTISRDNAKNTVYLQMNSLKPEDTAVYYCAAIAYQQGDSNRYHGYWGQGTQVTVSS

SEQ ID NO: 13241 - protein, 126 aa, Artificial Sequence
  Chemically Synthesized
QVQLQESGGGLVQAGGSLRLSCAASGTISRATSMGWYRQAPGKERELVAAITVGAITNYADSVKGRFTISRDNAKNTVYLQMNSLKPEDTAVYYCAAIYNGPQRPSSGYVSYLYYWGQGTQVTVSS

SEQ ID NO: 13242 - protein, 118 aa, Artificial Sequence
  Chemically Synthesized
QVQLQESGGGLVQAGGSLRLSCAASGYISYPTGMGWYRQAPGKERELVASISPGGNTNYADSVKGRFTISRDNAKNTVYLQMNSLKPEDTAVYYCAAGYYFGQNHPYWGQGTQVTVSS

SEQ ID NO: 13243 - protein, 122 aa, Artificial Sequence
  Chemically Synthesized
QVQLQESGGGLVQAGGSLRLSCAASGYIFLRWAMGWYRQAPGKEREFVAGITVGGTTNYADSVKGRFTISRDNAKNTVYLQMNSLKPEDTAVYYCAVRDQSYSGQISTHSYWGQGTQVTVSS

SEQ ID NO: 13244 - protein, 115 aa, Artificial Sequence
  Chemically Synthesized
QVQLQESGGGLVQAGGSLRLSCAASGTIFYYYYMGWYRQAPGKERELVAAINYGSSTYYADSVKGRFTISRDNAKNTVYLQMNSLKPEDTAVYYCAATRRKHTYWGQGTQVTVSS

SEQ ID NO: 13245 - protein, 118 aa, Artificial Sequence
  Chemically Synthesized
QVQLQESGGGLVQAGGSLRLSCAASGTISYRDIMGWYRQAPGKEREFVATITDGAITNYADSVKGRFTISRDNAKNTVYLQMNSLKPEDTAVYYCAVVWWDADWYGYWGQGTQVTVSS

SEQ ID NO: 13246 - protein, 122 aa, Artificial Sequence
  Chemically Synthesized
QVQLQESGGGLVQAGGSLRLSCAASGYISAGSNMGWYRQAPGKERELVAGITGGGITNYADSVKGRFTISRDNAKNTVYLQMNSLKPEDTAVYYCAAYRDILRTYRKALFYWGQGTQVTVSS

SEQ ID NO: 13247 - protein, 120 aa, Artificial Sequence
  Chemically Synthesized
QVQLQESGGGLVQAGGSLRLSCAASGNISYAEAMGWYRQAPGKERELVASIAIGTSTYYADSVKGRFTISRDNAKNTVYLQMNSLKPEDTAVYYCAVGNQALYRYYHSYWGQGTQVTVSS

SEQ ID NO: 13248 - protein, 118 aa, Artificial Sequence
  Chemically Synthesized
QVQLQESGGGLVQAGGSLRLSCAASGTIFQRGGMGWYRQAPGKEREFVAGINHGAITNYADSVKGRFTISRDNAKNTVYLQMNSLKPEDTAVYYCAVYWFNANYHYYWGQGTQVTVSS

SEQ ID NO: 13249 - protein, 126 aa, Artificial Sequence
  Chemically Synthesized
QVQLQESGGGLVQAGGSLRLSCAASGNISRHLAMGWYRQAPGKEREFVAGIDHGGITNYADSVKGRFTISRDNAKNTVYLQMNSLKPEDTAVYYCAVTAGPDYINYGLKYGSYYYWGQGTQVTVSS

SEQ ID NO: 13250 - protein, 117 aa, Artificial Sequence
  Chemically Synthesized
QVQLQESGGGLVQAGGSLRLSCAASGTISSTVMGWYRQAPGKERELVAAISGGGTTYYADSVKGRFTISRDNAKNTVYLQMNSLKPEDTAVYYCAVYTYIQGRHLYWGQGTQVTVSS

SEQ ID NO: 13251 - protein, 122 aa, Artificial Sequence
  Chemically Synthesized
QVQLQESGGGLVQAGGSLRLSCAASGNIFSSYVMGWYRQAPGKERELVASINKGTITYYADSVKGRFTISRDNAKNTVYLQMNSLKPEDTAVYYCAAAVIYYVLGPVYLDYWGQGTQVTVSS

SEQ ID NO: 13252 - protein, 118 aa, Artificial Sequence
  Chemically Synthesized
QVQLQESGGGLVQAGGSLRLSCAASGYISYLLTMGWYRQAPGKERELVASITGGASTYYADSVKGRFTISRDNAKNTVYLQMNSLKPEDTAVYYCAARVYYRQYFAYWGQGTQVTVSS

SEQ ID NO: 13253 - protein, 118 aa, Artificial Sequence
  Chemically Synthesized
QVQLQESGGGLVQAGGSLRLSCAASGNISRRDNMGWYRQAPGKEREFVAAITVGGTTNYADSVKGRFTISRDNAKNTVYLQMNSLKPEDTAVYYCAAVYYDRGHHHYWGQGTQVTVSS

SEQ ID NO: 13254 - protein, 126 aa, Artificial Sequence
  Chemically Synthesized
QVQLQESGGGLVQAGGSLRLSCAASGSIFPTIVMGWYRQAPGKEREFVATITLGSSTNYADSVKGRFTISRDNAKNTVYLQMNSLKPEDTAVYYCAVFDYTKHYHGSFDGVYHSYWGQGTQVTVSS

SEQ ID NO: 13255 - protein, 126 aa, Artificial Sequence
  Chemically Synthesized
QVQLQESGGGLVQAGGSLRLSCAASGTISKSLAMGWYRQAPGKEREFVASISYGTTTNYADSVKGRFTISRDNAKNTVYLQMNSLKPEDTAVYYCAVVDTGRTYHGYGGGLYHYYWGQGTQVTVSS

SEQ ID NO: 13256 - protein, 118 aa, Artificial Sequence
  Chemically Synthesized
QVQLQESGGGLVQAGGSLRLSCAASGTISPASSMGWYRQAPGKEREFVAAINDGGTTNYADSVKGRFTISRDNAKNTVYLQMNSLKPEDTAVYYCAAIKYRGAYFGYWGQGTQVTVSS

SEQ ID NO: 13257 - protein, 118 aa, Artificial Sequence
  Chemically Synthesized
QVQLQESGGGLVQAGGSLRLSCAASGNISVIIGMGWYRQAPGKEREFVATISFGTNTNYADSVKGRFTISRDNAKNTVYLQMNSLKPEDTAVYYCAATAHSERWYGYWGQGTQVTVSS

SEQ ID NO: 13258 - protein, 119 aa, Artificial Sequence
  Chemically Synthesized
QVQLQESGGGLVQAGGSLRLSCAASGSISQVVAMGWYRQAPGKEREFVAGINAGGAITNYADSVKGRFTISRDNAKNTVYLQMNSLKPEDTAVYYCAAIYFDRAVHAYWGQGTQVTVSS

SEQ ID NO: 13259 - protein, 122 aa, Artificial Sequence
  Chemically Synthesized
QVQLQESGGGLVQAGGSLRLSCAASGTISAYRYMGWYRQAPGKEREFVAGIDDGTSTNYADSVKGRFTISRDNAKNTVYLQMNSLKPEDTAVYYCAAVWHTTGDHGGWLGYWGQGTQVTVSS

SEQ ID NO: 13260 - protein, 122 aa, Artificial Sequence
  Chemically Synthesized
QVQLQESGGGLVQAGGSLRLSCAASGSISGAAWMGWYRQAPGKEREFVASIAAGGNTNYADSVKGRFTISRDNAKNTVYLQMNSLKPEDTAVYYCAAWVRPQSPPQRNHPYWGQGTQVTVSS

SEQ ID NO: 13261 - protein, 122 aa, Artificial Sequence
  Chemically Synthesized
QVQLQESGGGLVQAGGSLRLSCAASGYIFQRWFMGWYRQAPGKEREFVAGINSGSNTNYADSVKGRFTISRDNAKNTVYLQMNSLKPEDTAVYYCAVITRGYRYSTTYHWYWGQGTQVTVSS

SEQ ID NO: 13262 - protein, 121 aa, Artificial Sequence
  Chemically Synthesized
QVQLQESGGGLVQAGGSLRLSCAASGYIFADNEMGWYRQAPGKERELVATIDAGGSTNYADSVKGRFTISRDNAKNTVYLQMNSLKPEDTAVYYCAADYNDARSLVTTMYWGQGTQVTVSS

SEQ ID NO: 13263 - protein, 120 aa, Artificial Sequence
  Chemically Synthesized
QVQLQESGGGLVQAGGSLRLSCAASGTISARPMGWYRQAPGKERELVPVLLSVLLPYADSVKGRFTISRDNAKNTVYLQMNSLKPEDTAVYYCAAYDARYGVDGGYHVYWGQGTQVTVSS

SEQ ID NO: 13264 - protein, 118 aa, Artificial Sequence
  Chemically Synthesized
QVQLQESGGGLVQAGGSLRLSCAASGTIFATVYMGWYRQAPGKEREFVASITYGSNTYYADSVKGRFTISRDNAKNTVYLQMNSLKPEDTAVYYCAVRIVRSRDHEYWGQGTQVTVSS

SEQ ID NO: 13265 - protein, 118 aa, Artificial Sequence
  Chemically Synthesized
QVQLQESGGGLVQAGGSLRLSCAASGSISTTRRMGWYRQAPGKERELVAAIAYGGITYYADSVKGRFTISRDNAKNTVYLQMNSLKPEDTAVYYCAVGRYYSFLFNYWGQGTQVTVSS

SEQ ID NO: 13266 - protein, 118 aa, Artificial Sequence
  Chemically Synthesized
QVQLQESGGGLVQAGGSLRLSCAASGTISYIYVMGWYRQAPGKEREFVAAIAEGGITYYADSVKGRFTISRDNAKNTVYLQMNSLKPEDTAVYYCAAYTPNSSLLLYWGQGTQVTVSS

SEQ ID NO: 13267 - protein, 118 aa, Artificial Sequence
  Chemically Synthesized
QVQLQESGGGLVQAGGSLRLSCAASGYISNPADMGWYRQAPGKEREFVAGIGRGGSTNYADSVKGRFTISRDNAKNTVYLQMNSLKPEDTAVYYCAAVSRSYGLHYYWGQGTQVTVSS

SEQ ID NO: 13268 - protein, 118 aa, Artificial Sequence
  Chemically Synthesized
QVQLQESGGGLVQAGGSLRLSCAASGYIFFTPYMGWYRQAPGKERELVASINGGTTTNYADSVKGRFTISRDNAKNTVYLQMNSLKPEDTAVYYCAVLGYQSRWYYYWGQGTQVTVSS

SEQ ID NO: 13269 - protein, 116 aa, Artificial Sequence
  Chemically Synthesized
QVQLQESGGGLVQAGGSLRLSCAASGSISTAGAMGWYRQAPGKEREFVANGGANTNYADSVKGRFTISRDNAKNTVYLQMNSLKPEDTAVYYCAAIYGVRPYHAYWGQGTQVTVSS

SEQ ID NO: 13270 - protein, 117 aa, Artificial Sequence
  Chemically Synthesized
QVQLQESGGGLVQAGGSLRLSCAASGYFSAGYMGWYRQAPGKERELVAGITDGSTTNYADSVKGRFTISRDNAKNTVYLQMNSLKPEDTAVYYCAADAAYRLYLQYWGQGTQVTVSS

SEQ ID NO: 13271 - protein, 120 aa, Artificial Sequence
  Chemically Synthesized
QVQLQESGGGLVQAGGSLRLSCAASGNISQGGAMGWYRQAPGKEREFVAGIANGSITNYADSVKGRFTISRDNAKNTVYLQMNSLKPEDTAVYYCAAVRRHGGGSYLYYWGQGTQVTVSS

SEQ ID NO: 13272 - protein, 116 aa, Artificial Sequence
  Chemically Synthesized
QVQLQESGGGLVQAGGSLRLSCAASGLFLLSTMGWYRQAPGKEREFVAGIGDGATTNYADSVKGRFTISRDNAKNTVYLQMNSLKPEDTAVYYCAVRYYPQSRMYWGQGTQVTVSS

SEQ ID NO: 13273 - protein, 118 aa, Artificial Sequence
  Chemically Synthesized
QVQLQESGGGLVQAGGSLRLSCAASGTISGLYVMGWYRQAPGKEREFVAGISDGSTTNYADSVKGRFTISRDNAKNTVYLQMNSLKPEDTAVYYCAVGQVAGLYFDYWGQGTQVTVSS

SEQ ID NO: 13274 - protein, 118 aa, Artificial Sequence
  Chemically Synthesized
QVQLQESGGGLVQAGGSLRLSCAASGSISTYFNMGWYRQAPGKEREFVAAISYGASTNYADSVKGRFTISRDNAKNTVYLQMNSLKPEDTAVYYCAATSYDGQWHGYWGQGTQVTVSS

SEQ ID NO: 13275 - protein, 118 aa, Artificial Sequence
  Chemically Synthesized
QVQLQESGGGLVQAGGSLRLSCAASGNIFLRYSMGWYRQAPGKEREFVAGIGIGGTTNYADSVKGRFTISRDNAKNTVYLQMNSLKPEDTAVYYCAAVFRDIQYYYYWGQGTQVTVSS

SEQ ID NO: 13276 - protein, 122 aa, Artificial Sequence
  Chemically Synthesized
QVQLQESGGGLVQAGGSLRLSCAASGTISPIWSMGWYRQAPGKERELVAGIDGGTTTNYADSVKGRFTISRDNAKNTVYLQMNSLKPEDTAVYYCAVDYVYETGDESSLDYWGQGTQVTVSS

SEQ ID NO: 13277 - protein, 116 aa, Artificial Sequence
  Chemically Synthesized
QVQLQESGGGLVQAGGSLRLSCAASGYIFDSSLMGWYRQAPGKEREFVAITEGGTTYYADSVKGRFTISRDNAKNTVYLQMNSLKPEDTAVYYCAVVKVTTTRIYWGQGTQVTVSS

SEQ ID NO: 13278 - protein, 126 aa, Artificial Sequence
  Chemically Synthesized
QVQLQESGGGLVQAGGSLRLSCAASGTIFFLYSMGWYRQAPGKERELVAGIDDGASTYYADSVKGRFTISRDNAKNTVYLQMNSLKPEDTAVYYCAADVRYPLYLYLLTVSALVYWGQGTQVTVSS

SEQ ID NO: 13279 - protein, 120 aa, Artificial Sequence
  Chemically Synthesized
QVQLQESGGGLVQAGGSLRLSCAASGSIFWAYVMGWYRQAPGKEREFVASISYGASTYYADSVKGRFTISRDNAKNTVYLQMNSLKPEDTAVYYCAVLYPGQLRFVHGYWGQGTQVTVSS

SEQ ID NO: 13280 - protein, 117 aa, Artificial Sequence
  Chemically Synthesized
QVQLQESGGGLVQAGGSLRLSCAASGSIFSYPIMGWYRQAPGKERELVATIGYGSSTNYADSVKGRFTISRDNAKNTVYLQMNSLKPEDTAVYYCAARGYWYRHWYWGQGTQVTVSS

SEQ ID NO: 13281 - protein, 118 aa, Artificial Sequence
  Chemically Synthesized
QVQLQESGGGLVQAGGSLRLSCAASGTIFAQLYMGWYRQAPGKERELVASISTGGNTNYADSVKGRFTISRDNAKNTVYLQMNSLKPEDTAVYYCAAVQGASPHYWYWGQGTQVTVSS

SEQ ID NO: 13282 - protein, 121 aa, Artificial Sequence
  Chemically Synthesized
QVQLQESGGGLVQAGGSLRLSCAASGNIFYATMGWYRQAPGKEREFVAAIGGGASTNYADSVKGRFTISRDNAKNTVYLQMNSLKPEDTAVYYCAALAVDHDSYAPYHYYWGQGTQVTVSS

SEQ ID NO: 13283 - protein, 126 aa, Artificial Sequence
  Chemically Synthesized
QVQLQESGGGLVQAGGSLRLSCAASGNISWDYVMGWYRQAPGKEREFVAAIAVGGSTNYADSVKGRFTISRDNAKNTVYLQMNSLKPEDTAVYYCAAVDVALDGDRNTRWRRHYYWGQGTQVTVSS

SEQ ID NO: 13284 - protein, 126 aa, Artificial Sequence
  Chemically Synthesized
QVQLQESGGGLVQAGGSLRLSCAASGYIFLGGYMGWYRQAPGKERELVAAISDGSITYYADSVKGRFTISRDNAKNTVYLQMNSLKPEDTAVYYCAAYRIVLYRGGADHGDVHGYWGQGTQVTVSS

SEQ ID NO: 13285 - protein, 117 aa, Artificial Sequence
  Chemically Synthesized
QVQLQESGGGLVQAGGSLRLSCAASGNIFGATAMGWYRQAPGKEREFVAAIAHGGTNYADSVKGRFTISRDNAKNTVYLQMNSLKPEDTAVYYCAALVYVTRYYGYWGQGTQVTVSS

SEQ ID NO: 13286 - protein, 125 aa, Artificial Sequence
  Chemically Synthesized
QVQLQESGGGLVQAGGSLRLSCAASGTISPSDRMGWYRQAPGKERELVAGINIGSNTYYADSVKGRFTISRDNAKNTVYLQMNSLKPEDTAVYYCAANIRQNDPVYYPDYWGMYWGQGTQVTVSS

SEQ ID NO: 13287 - protein, 122 aa, Artificial Sequence
  Chemically Synthesized
QVQLQESGGGLVQAGGSLRLSCAASGYISPYSYMGWYRQAPGKEREFVATIGPGASTNYADSVKGRFTISRDNAKNTVYLQMNSLKPEDTAVYYCAALTHTYGGRYGYFVYWGQGTQVTVSS

SEQ ID NO: 13288 - protein, 117 aa, Artificial Sequence
  Chemically Synthesized
QVQLQESGGGLVQAGGSLRLSCAASGNISYASRMGWYRQAPGKEREFVAAISTGTTYYADSVKGRFTISRDNAKNTVYLQMNSLKPEDTAVYYCAVLERGQDWHYYWGQGTQVTVSS

SEQ ID NO: 13289 - protein, 121 aa, Artificial Sequence
  Chemically Synthesized
QVQLQESGGGLVQAGGSLRLSCAASGTISSISMGWYRQAPGKEREFVATIGRGGITNYADSVKGRFTISRDNAKNTVYLQMNSLKPEDTAVYYCAASYTDSYYDSGPHLYWGQGTQVTVSS

SEQ ID NO: 13290 - protein, 118 aa, Artificial Sequence
  Chemically Synthesized
QVQLQESGGGLVQAGGSLRLSCAASGSISDAVIMGWYRQAPGKEREFVASIDQGGTTYYADSVKGRFTISRDNAKNTVYLQMNSLKPEDTAVYYCAAERTNYPTLPYWGQGTQVTVSS

SEQ ID NO: 13291 - protein, 122 aa, Artificial Sequence
  Chemically Synthesized
QVQLQESGGGLVQAGGSLRLSCAASGYISSRVYMGWYRQAPGKERELVAAINYGAITYYADSVKGRFTISRDNAKNTVYLQMNSLKPEDTAVYYCAVYQGRYPRWRLYHPYWGQGTQVTVSS

SEQ ID NO: 13292 - protein, 126 aa, Artificial Sequence
  Chemically Synthesized
QVQLQESGGGLVQAGGSLRLSCAASGSISYSHLMGWYRQAPGKEREFVAAIGNGTSTNYADSVKGRFTISRDNAKNTVYLQMNSLKPEDTAVYYCAAIANNVDYGPQAHGRYHYYWGQGTQVTVSS

SEQ ID NO: 13293 - protein, 126 aa, Artificial Sequence
  Chemically Synthesized
QVQLQESGGGLVQAGGSLRLSCAASGNISDLYAMGWYRQAPGKEREFVAAIAEGATTNYADSVKGRFTISRDNAKNTVYLQMNSLKPEDTAVYYCAVAYFHTDPTDTRRKKTHYYWGQGTQVTVSS

SEQ ID NO: 13294 - protein, 118 aa, Artificial Sequence
  Chemically Synthesized
QVQLQESGGGLVQAGGSLRLSCAASGTIFGRWYMGWYRQAPGKEREFVASIAYGGNTNYADSVKGRFTISRDNAKNTVYLQMNSLKPEDTAVYYCAVKRYFDARYSYWGQGTQVTVSS

SEQ ID NO: 13295 - protein, 112 aa, Artificial Sequence
  Chemically Synthesized
QVQLQESGGGLVQAGGSLRLSCAASGYISNDYAMGWYRQAPGKEREFVAAISTGAITNYADSVKGRFTISRDNAKNTVYLQMNSLKPEDTAVYYCAYSHGYWGQGTQVTVSS

SEQ ID NO: 13296 - protein, 122 aa, Artificial Sequence
  Chemically Synthesized
QVQLQESGGGLVQAGGSLRLSCAASGSIFAWTTMGWYRQAPGKERELVAAITLGSITYYADSVKGRFTISRDNAKNTVYLQMNSLKPEDTAVYYCAVLSRYPSLSDYSLGYWGQGTQVTVSS

SEQ ID NO: 13297 - protein, 118 aa, Artificial Sequence
  Chemically Synthesized
QVQLQESGGGLVQAGGSLRLSCAASGTISDAKAMGWYRQAPGKEREFVAGINLGGNTNYADSVKGRFTISRDNAKNTVYLQMNSLKPEDTAVYYCAVGAYKDRWLIYWGQGTQVTVSS

SEQ ID NO: 13298 - protein, 118 aa, Artificial Sequence
  Chemically Synthesized
QVQLQESGGGLVQAGGSLRLSCAASGTISKDPSMGWYRQAPGKEREFIAGIGKGSITYYADSVKGRFTISRDNAKNTVYLQMNSLKPEDTAVYYCAAYEYYGGYHGYWGQGTQVTVSS

SEQ ID NO: 13299 - protein, 122 aa, Artificial Sequence
  Chemically Synthesized
QVQLQESGGGLVQAGGSLRLSCAASGSIFYWYAMGWYRQAPGKEREFVAGISRGTTTNYADSVKGRFTISRDNAKNTVYLQMNSLKPEDTAVYYCAAVLLKGRVGSSSHFYWGQGTQVTVSS

SEQ ID NO: 13300 - protein, 125 aa, Artificial Sequence
  Chemically Synthesized
QVQLQESGGGLVQAGGSLRLSCAASGNISYFGNMGWYRQAPGKEREFVAGITSGGITNYADSVKGRFTISRDNAKNTVYLQMNSLKPEDTAVYYCAAVAWQDFPYDTDGRWHYYWGQGTQVTVSS

SEQ ID NO: 13301 - protein, 117 aa, Artificial Sequence
  Chemically Synthesized
QVQLQESGGGLVQAGGSLRLSCAASGTIFGTSMGWYRQAPGKEREFVAGITDGSSTYYADSVKGRFTISRDNAKNTVYLQMNSLKPEDTAVYYCAVGHRPEQVHYYWGQGTQVTVSS

SEQ ID NO: 13302 - protein, 126 aa, Artificial Sequence
  Chemically Synthesized
QVQLQESGGGLVQAGGSLRLSCAASGNISTTSGMGWYRQAPGKEREFVAGISPGGTTNYADSVKGRFTISRDNAKNTVYLQMNSLKPEDTAVYYCAVEKDDLSRRVDVSFTEFDYWGQGTQVTVSS

SEQ ID NO: 13303 - protein, 118 aa, Artificial Sequence
  Chemically Synthesized
QVQLQESGGGLVQAGGSLRLSCAASGYISRYDFMGWYRQAPGKEREFVAAITRGSTTNYADSVKGRFTISRDNAKNTVYLQMNSLKPEDTAVYYCAALRHERRWFSYWGQGTQVTVSS

SEQ ID NO: 13304 - protein, 118 aa, Artificial Sequence
  Chemically Synthesized
QVQLQESGGGLVQAGGSLRLSCAASGSISLVRYMGWYRQAPGKEREFVATISTGANTYYADSVKGRFTISRDNAKNTVYLQMNSLKPEDTAVYYCAVDVPYTAYHPYWGQGTQVTVSS

SEQ ID NO: 13305 - protein, 118 aa, Artificial Sequence
  Chemically Synthesized
QVQLQESGGGLVQAGGSLRLSCAASGTISGTYNMGWYRQAPGKEREFVAGIAAGSTTNYADSVKGRFTISRDNAKNTVYLQMNSLKPEDTAVYYCAAVYYLRVPHGYWGQGTQVTVSS

SEQ ID NO: 13306 - protein, 116 aa, Artificial Sequence
  Chemically Synthesized
QVQLQESGGGLVQAGGSLRLSCAASGTISSDIYMGWYRQAPGKEREFVAGITHGTTTYYADSVKGRFTISRDNAKNTVYLQMNSLKPEDTAVYYCAANDSVDYGYWGQGTQVTVSS

SEQ ID NO: 13307 - protein, 118 aa, Artificial Sequence
  Chemically Synthesized
QVQLQESGGGLVQAGGSLRLSCAASGNISTLYDMGWYRQAPGKEREFVATINHGASTYYADSVKGRFTISRDNAKNTVYLQMNSLKPEDTAVYYCAAQSYEIANLRYWGQGTQVTVSS

SEQ ID NO: 13308 - protein, 122 aa, Artificial Sequence
  Chemically Synthesized
QVQLQESGGGLVQAGGSLRLSCAASGYISGEYIMGWYRQAPGKERELVAGIGTGGTTNYADSVKGRFTISRDNAKNTVYLQMNSLKPEDTAVYYCAALSAVVYGDRQRHYYWGQGTQVTVSS

SEQ ID NO: 13309 - protein, 118 aa, Artificial Sequence
  Chemically Synthesized
QVQLQESGGGLVQAGGSLRLSCAASGSIFALVYMGWYRQAPGKEREFVAAIGYGANTNYADSVKGRFTISRDNAKNTVYLQMNSLKPEDTAVYYCAASGPKTGYFAYWGQGTQVTVSS

SEQ ID NO: 13310 - protein, 122 aa, Artificial Sequence
  Chemically Synthesized
QVQLQESGGGLVQAGGSLRLSCAASGYIFLRYPMGWYRQAPGKEREFVASISLGASTYYADSVKGRFTISRDNAKNTVYLQMNSLKPEDTAVYYCAVWSTAVTNYGGALRYWGQGTQVTVSS

SEQ ID NO: 13311 - protein, 122 aa, Artificial Sequence
  Chemically Synthesized
QVQLQESGGGLVQAGGSLRLSCAASGTISRQYIMGWYRQAPGKEREFVASIDYGSTTYYADSVKGRFTISRDNAKNTVYLQMNSLKPEDTAVYYCAAAVYDRSALRGYLAYWGQGTQVTVSS

SEQ ID NO: 13312 - protein, 126 aa, Artificial Sequence
  Chemically Synthesized
QVQLQESGGGLVQAGGSLRLSCAASGNISYRYNMGWYRQAPGKEREFVAGINGGSTTNYADSVKGRFTISRDNAKNTVYLQMNSLKPEDTAVYYCAALYSRAYYDRPAVDRSYYYWGQGTQVTVSS

SEQ ID NO: 13313 - protein, 123 aa, Artificial Sequence
  Chemically Synthesized
QVQLQESGGGLVQAGGSLRLSCAASGSISHSYSMGWYRQAPGKEREFVASIGYGGTTNYADSVKGRFTISRDNAKNTVYLQMNSLKPEDTAVYYCAAVANGSGARNRGYLYYWGQGTQVTVSS

SEQ ID NO: 13314 - protein, 118 aa, Artificial Sequence
  Chemically Synthesized
QVQLQESGGGLVQAGGSLRLSCAASGNISGPTYMGWYRQAPGKEREFVAAIAYGSNTNYADSVKGRFTISRDNAKNTVYLQMNSLKPEDTAVYYCAAIYAVSPIHWYWGQGTQVTVSS

SEQ ID NO: 13315 - protein, 118 aa, Artificial Sequence
  Chemically Synthesized
QVQLQESGGGLVQAGGSLRLSCAASGTISSDYVMGWYRQAPGKERELVASINPGSSTNYADSVKGRFTISRDNAKNTVYLQMNSLKPEDTAVYYCAALYAYRTYFYYWGQGTQVTVSS

SEQ ID NO: 13316 - protein, 118 aa, Artificial Sequence
  Chemically Synthesized
QVQLQESGGGLVQAGGSLRLSCAASGNISDVSNMGWYRQAPGKEREFVAAIGYGGNTYYADSVKGRFTISRDNAKNTVYLQMNSLKPEDTAVYYCAAVDYYPIVHGYWGQGTQVTVSS

SEQ ID NO: 13317 - protein, 118 aa, Artificial Sequence
  Chemically Synthesized
QVQLQESGGGLVQAGGSLRLSCAASGSISQGAAMGWYRQAPGKEREFVAGINAGGNTYYADSVKGRFTISRDNAKNTVYLQMNSLKPEDTAVYYCAAYVYNSGHLYYWGQGTQVTVSS

SEQ ID NO: 13318 - protein, 126 aa, Artificial Sequence
  Chemically Synthesized
QVQLQESGGGLVQAGGSLRLSCAASGTIFPPQGMGWYRQAPGKEREFVAAIDYGGNTNYADSVKGRFTISRDNAKNTVYLQMNSLKPEDTAVYYCAVLSKGYLTDYSYGRKFHWYWGQGTQVTVSS

SEQ ID NO: 13319 - protein, 118 aa, Artificial Sequence
  Chemically Synthesized
QVQLQESGGGLVQAGGSLRLSCAASGSISSWGWMGWYRQAPGKEREFVAAISTGATTNYADSVKGRFTISRDNAKNTVYLQMNSLKPEDTAVYYCAAIVKRYQYFWYWGQGTQVTVSS

SEQ ID NO: 13320 - protein, 122 aa, Artificial Sequence
  Chemically Synthesized
QVQLQESGGGLVQAGGSLRLSCAASGNISAESYMGWYRQAPGKEREFVASITVGGSTNYADSVKGRFTISRDNAKNTVYLQMNSLKPEDTAVYYCAAVTGALVQSRKYYFYWGQGTQVTVSS

SEQ ID NO: 13321 - protein, 118 aa, Artificial Sequence
  Chemically Synthesized
QVQLQESGGGLVQAGGSLRLSCAASGNIFQLYKMGWYRQAPGKEREFVASIADGTTTNYADSVKGRFTISRDNAKNTVYLQMNSLKPEDTAVYYCAALYWYPVWLYYWGQGTQVTVSS

SEQ ID NO: 13322 - protein, 122 aa, Artificial Sequence
  Chemically Synthesized
QVQLQESGGGLVQAGGSLRLSCAASGNISGLTGMGWYRQAPGKEREFVAAIDVGSNTNYADSVKGRFTISRDNAKNTVYLQMNSLKPEDTAVYYCAAIGVDYATYNGVFGYWGQGTQVTVSS

SEQ ID NO: 13323 - protein, 118 aa, Artificial Sequence
  Chemically Synthesized
QVQLQESGGGLVQAGGSLRLSCAASGTISRYRYMGWYRQAPGKERELVATINTGSTTNYADSVKGRFTISRDNAKNTVYLQMNSLKPEDTAVYYCAARYASVFYFYYWGQGTQVTVSS

SEQ ID NO: 13324 - protein, 122 aa, Artificial Sequence
  Chemically Synthesized
QVQLQESGGGLVQAGGSLRLSCAASGTIFRVVSMGWYRQAPGKERELVASISYGGNTNYADSVKGRFTISRDNAKNTVYLQMNSLKPEDTAVYYCAAVGRYHYDRNRIHYYWGQGTQVTVSS

SEQ ID NO: 13325 - protein, 117 aa, Artificial Sequence
  Chemically Synthesized
QVQLQESGGGLVQAGGSLRLSCAASGTISRRENMGWYRQAPGKERELVPLLMTVLVPYADSVKGRFTISRDNAKNTVYLQMNSLKPEDTAVYYCAVPFKDYHELFYWGQGTQVTVSS

SEQ ID NO: 13326 - protein, 118 aa, Artificial Sequence
  Chemically Synthesized
QVQLQESGGGLVQAGGSLRLSCAASGTIFGWGSMGWYRQAPGKERELVATISTGTITNYADSVKGRFTISRDNAKNTVYLQMNSLKPEDTAVYYCAAVDRQQLELVYWGQGTQVTVSS

SEQ ID NO: 13327 - protein, 126 aa, Artificial Sequence
  Chemically Synthesized
QVQLQESGGGLVQAGGSLRLSCAASGSISQYPSMGWYRQAPGKEREFVAAITQGASTNYADSVKGRFTISRDNAKNTVYLQMNSLKPEDTAVYYCAAYEYNRERTLWGYTPHHYYWGQGTQVTVSS

SEQ ID NO: 13328 - protein, 118 aa, Artificial Sequence
  Chemically Synthesized
QVQLQESGGGLVQAGGSLRLSCAASGYISSKASMGWYRQAPGKEREFVAAIALGTITNYADSVKGRFTISRDNAKNTVYLQMNSLKPEDTAVYYCAAVAYTRPRHYYWGQGTQVTVSS

SEQ ID NO: 13329 - protein, 122 aa, Artificial Sequence
  Chemically Synthesized
QVQLQESGGGLVQAGGSLRLSCAASGTIFYLANMGWYRQAPGKEREFVAAITGGSITNYADSVKGRFTISRDNAKNTVYLQMNSLKPEDTAVYYCAALYRYLRDRYYYHHYWGQGTQVTVSS

SEQ ID NO: 13330 - protein, 118 aa, Artificial Sequence
  Chemically Synthesized
QVQLQESGGGLVQAGGSLRLSCAASGTIFNLYYMGWYRQAPGKERELVAAISFGSSTYYADSVKGRFTISRDNAKNTVYLQMNSLKPEDTAVYYCAAAYQGDYSYYYWGQGTQVTVSS

SEQ ID NO: 13331 - protein, 118 aa, Artificial Sequence
  Chemically Synthesized
QVQLQESGGGLVQAGGSLRLSCAASGSISYRIYMGWYRQAPGKEREFVAAIAAGGTTNYADSVKGRFTISRDNAKNTVYLQMNSLKPEDTAVYYCAALVDYPLWHYYWGQGTQVTVSS

SEQ ID NO: 13332 - protein, 126 aa, Artificial Sequence
  Chemically Synthesized
QVQLQESGGGLVQAGGSLRLSCAASGTISYVYAMGWYRQAPGKERELVAAIDSGANTNYADSVKGRFTISRDNAKNTVYLQMNSLKPEDTAVYYCAAVLDGVYADKEQRGRRHGYWGQGTQVTVSS

SEQ ID NO: 13333 - protein, 118 aa, Artificial Sequence
  Chemically Synthesized
QVQLQESGGGLVQAGGSLRLSCAASGTIFAYFRMGWYRQAPGKEREFVAAIDAGTNTYYADSVKGRFTISRDNAKNTVYLQMNSLKPEDTAVYYCAAILQAGGWHYYWGQGTQVTVSS

SEQ ID NO: 13334 - protein, 118 aa, Artificial Sequence
  Chemically Synthesized
QVQLQESGGGLVQAGGSLRLSCAASGSIFSDIYMGWYRQAPGKEREFVASITQGGSTNYADSVKGRFTISRDNAKNTVYLQMNSLKPEDTAVYYCAAWYPWQYVYDYWGQGTQVTVSS

SEQ ID NO: 13335 - protein, 122 aa, Artificial Sequence
  Chemically Synthesized
QVQLQESGGGLVQAGGSLRLSCAASGSISYRRYMGWYRQAPGKEREFVATIDRGTITNYADSVKGRFTISRDNAKNTVYLQMNSLKPEDTAVYYCAAAYSSRGGYYRRHHYWGQGTQVTVSS

SEQ ID NO: 13336 - protein, 126 aa, Artificial Sequence
  Chemically Synthesized
QVQLQESGGGLVQAGGSLRLSCAASGSISHSWGMGWYRQAPGKEREFVASIDQGGTTNYADSVKGRFTISRDNAKNTVYLQMNSLKPEDTAVYYCAVVSWAKRRGLRPQRDDLGYWGQGTQVTVSS

SEQ ID NO: 13337 - protein, 122 aa, Artificial Sequence
  Chemically Synthesized
QVQLQESGGGLVQAGGSLRLSCAASGYISPDAAMGWYRQAPGKEREFVATINYGATTNYADSVKGRFTISRDNAKNTVYLQMNSLKPEDTAVYYCAVVTRAFGTRRDWHWYWGQGTQVTVSS

SEQ ID NO: 13338 - protein, 118 aa, Artificial Sequence
  Chemically Synthesized
QVQLQESGGGLVQAGGSLRLSCAASGTISKRVYMGWYRQAPGKERELVAGINNGTNTNYADSVKGRFTISRDNAKNTVYLQMNSLKPEDTAVYYCAAAVFYKRWYAYWGQGTQVTVSS

SEQ ID NO: 13339 - protein, 116 aa, Artificial Sequence
  Chemically Synthesized
QVQLQESGGGLVQAGGSLRLSCAASGNIFYTTAMGWYRQAPGKEREFVAGIADGSNTNYADSVKGRFTISRDNAKNTVYLQMNSLKPEDTAVYYCAVYLSYHHYYWGQGTQVTVSS

SEQ ID NO: 13340 - protein, 122 aa, Artificial Sequence
  Chemically Synthesized
QVQLQESGGGLVQAGGSLRLSCAASGYISAVAYMGWYRQAPGKERELVASINRGSITNYADSVKGRFTISRDNAKNTVYLQMNSLKPEDTAVYYCAAADSTYGKWPYDHAYWGQGTQVTVSS

SEQ ID NO: 13341 - protein, 122 aa, Artificial Sequence
  Chemically Synthesized
QVQLQESGGGLVQAGGSLRLSCAASGSISTATIMGWYRQAPGKEREFVASIDPGGNTNYADSVKGRFTISRDNAKNTVYLQMNSLKPEDTAVYYCAALNIVAEVDYRYHWYWGQGTQVTVSS

SEQ ID NO: 13342 - protein, 121 aa, Artificial Sequence
  Chemically Synthesized
QVQLQESGGGLVQAGGSLRLSCAASGYIFDRDAMGWYRQAPGKEREFVAAIGSGASTNYADSVKGRFTISRDNAKNTVYLQMNSLKPEDTAVYYCAATSRQGARATHLYYWGQGTQVTVSS

SEQ ID NO: 13343 - protein, 118 aa, Artificial Sequence
  Chemically Synthesized
QVQLQESGGGLVQAGGSLRLSCAASGYIFSDYLMGWYRQAPGKEREFVAGIGNGANTNYADSVKGRFTISRDNAKNTVYLQMNSLKPEDTAVYYCAVLDWTAYRHWYWGQGTQVTVSS

SEQ ID NO: 13344 - protein, 126 aa, Artificial Sequence
  Chemically Synthesized
QVQLQESGGGLVQAGGSLRLSCAASGNISYLGYMGWYRQAPGKERELVATIGYGSITNYADSVKGRFTISRDNAKNTVYLQMNSLKPEDTAVYYCAAWYATDDAVYRVYYGYHYYWGQGTQVTVSS

SEQ ID NO: 13345 - protein, 118 aa, Artificial Sequence
  Chemically Synthesized
QVQLQESGGGLVQAGGSLRLSCAASGNISDRRAMGWYRQAPGKERELVAGINAGSITYYADSVKGRFTISRDNAKNTVYLQMNSLKPEDTAVYYCAALLDNYHDLYYWGQGTQVTVSS

SEQ ID NO: 13346 - protein, 126 aa, Artificial Sequence
  Chemically Synthesized
QVQLQESGGGLVQAGGSLRLSCAASGSISSVRYMGWYRQAPGKEREFVAGINHGTSTNYADSVKGRFTISRDNAKNTVYLQMNSLKPEDTAVYYCAARHYRYDIWTISRVRQFFYWGQGTQVTVSS

SEQ ID NO: 13347 - protein, 118 aa, Artificial Sequence
  Chemically Synthesized
QVQLQESGGGLVQAGGSLRLSCAASGSISGRIYMGWYRQAPGKEREFVASIASGGNTNYADSVKGRFTISRDNAKNTVYLQMNSLKPEDTAVYYCAVAAIGEAHLYYWGQGTQVTVSS

SEQ ID NO: 13348 - protein, 120 aa, Artificial Sequence
  Chemically Synthesized
QVQLQESGGGLVQAGGSLRLSCAASGTISGGYFMGWYRQAPGKEREFVAAINGGSSTNYADSVKGRFTISRDNAKNTVYLQMNSLKPEDTAVYYCAAVGWYYGRGYHGYWGQGTQVTVSS

SEQ ID NO: 13349 - protein, 126 aa, Artificial Sequence
  Chemically Synthesized
QVQLQESGGGLVQAGGSLRLSCAASGSISYFSTMGWYRQAPGKERELVAGISAGATTNYADSVKGRFTISRDNAKNTVYLQMNSLKPEDTAVYYCAALYYVSPRQDTATGVWHHYWGQGTQVTVSS

SEQ ID NO: 13350 - protein, 122 aa, Artificial Sequence
  Chemically Synthesized
QVQLQESGGGLVQAGGSLRLSCAASGTIFNPSSMGWYRQAPGKEREFVAAIAGGGITNYADSVKGRFTISRDNAKNTVYLQMNSLKPEDTAVYYCAALWNRHTLHRPYHYYWGQGTQVTVSS

SEQ ID NO: 13351 - protein, 115 aa, Artificial Sequence
  Chemically Synthesized
QVQLQESGGGLVQAGGSLRLSCAASGNISAGPFMGWYRQAPGKERELVAGIDTGSTTYYADSVKGRFTISRDNAKNTVYLQMNSLKPEDTAVYYCAARTGDYNYWGQGTQVTVSS

SEQ ID NO: 13352 - protein, 126 aa, Artificial Sequence
  Chemically Synthesized
QVQLQESGGGLVQAGGSLRLSCAASGSIFGDISMGWYRQAPGKEREFVATIAGGSNTNYADSVKGRFTISRDNAKNTVYLQMNSLKPEDTAVYYCAAVDKGQDRQFPYRVFRLYYWGQGTQVTVSS

SEQ ID NO: 13353 - protein, 118 aa, Artificial Sequence
  Chemically Synthesized
QVQLQESGGGLVQAGGSLRLSCAASGNISRARYMGWYRQAPGKEREFVASIADGASTNYADSVKGRFTISRDNAKNTVYLQMNSLKPEDTAVYYCAALTYISGYHFYWGQGTQVTVSS

SEQ ID NO: 13354 - protein, 118 aa, Artificial Sequence
  Chemically Synthesized
QVQLQESGGGLVQAGGSLRLSCAASGYISTRSYMGWYRQAPGKEREFVATISSGGTTYYADSVKGRFTISRDNAKNTVYLQMNSLKPEDTAVYYCAAVTWPAPYHYYWGQGTQVTVSS

SEQ ID NO: 13355 - protein, 122 aa, Artificial Sequence
  Chemically Synthesized
QVQLQESGGGLVQAGGSLRLSCAASGTISPTYRMGWYRQAPGKEREFVASIAYGGITNYADSVKGRFTISRDNAKNTVYLQMNSLKPEDTAVYYCAVLDTVWSNRAVWHWYWGQGTQVTVSS

SEQ ID NO: 13356 - protein, 118 aa, Artificial Sequence
  Chemically Synthesized
QVQLQESGGGLVQAGGSLRLSCAASGNISAGYIMGWYRQAPGKEREFVAGIGSGAITNYADSVKGRFTISRDNAKNTVYLQMNSLKPEDTAVYYCAVLFKRKDWHGYWGQGTQVTVSS

SEQ ID NO: 13357 - protein, 118 aa, Artificial Sequence
  Chemically Synthesized
QVQLQESGGGLVQAGGSLRLSCAASGNISGKDAMGWYRQAPGKEREFVAGINYGSNTNYADSVKGRFTISRDNAKNTVYLQMNSLKPEDTAVYYCAALYSGGGLHYYWGQGTQVTVSS

SEQ ID NO: 13358 - protein, 118 aa, Artificial Sequence
  Chemically Synthesized
QVQLQESGGGLVQAGGSLRLSCAASGSISRIVVMGWYRQAPGKEREFVAAIDQGTNTNYADSVKGRFTISRDNAKNTVYLQMNSLKPEDTAVYYCAVTYWDDYWFYYWGQGTQVTVSS

SEQ ID NO: 13359 - protein, 117 aa, Artificial Sequence
  Chemically Synthesized
QVQLQESGGGLVQAGGSLRLSCAASGNIFPFSMGWYRQAPGKEREFVATISDGTTTYYADSVKGRFTISRDNAKNTVYLQMNSLKPEDTAVYYCAATPQNVATHAYWGQGTQVTVSS

SEQ ID NO: 13360 - protein, 122 aa, Artificial Sequence
  Chemically Synthesized
QVQLQESGGGLVQAGGSLRLSCAASGTISVRVYMGWYRQAPGKERELVATIGSGGSTNYADSVKGRFTISRDNAKNTVYLQMNSLKPEDTAVYYCAARIRYGYYVYPQHYYWGQGTQVTVSS

SEQ ID NO: 13361 - protein, 122 aa, Artificial Sequence
  Chemically Synthesized
QVQLQESGGGLVQAGGSLRLSCAASGTISASYYMGWYRQAPGKEREFVAAINYGASTNYADSVKGRFTISRDNAKNTVYLQMNSLKPEDTAVYYCAAIVPSEFDRGGYLYYWGQGTQVTVSS

SEQ ID NO: 13362 - protein, 122 aa, Artificial Sequence
  Chemically Synthesized
QVQLQESGGGLVQAGGSLRLSCAASGSISAYVYMGWYRQAPGKERELVASIGYGSTTYYADSVKGRFTISRDNAKNTVYLQMNSLKPEDTAVYYCAVHTGFSTYYFFRHAYWGQGTQVTVSS

SEQ ID NO: 13363 - protein, 122 aa, Artificial Sequence
  Chemically Synthesized
QVQLQESGGGLVQAGGSLRLSCAASGNIFRAQGMGWYRQAPGKEREFVASITSGGSTYYADSVKGRFTISRDNAKNTVYLQMNSLKPEDTAVYYCAARAGYYGAIPYRLRYWGQGTQVTVSS

SEQ ID NO: 13364 - protein, 118 aa, Artificial Sequence
  Chemically Synthesized
QVQLQESGGGLVQAGGSLRLSCAASGNIFRGANMGWYRQAPGKEREFVASISTGANTNYADSVKGRFTISRDNAKNTVYLQMNSLKPEDTAVYYCAAIYRTVTYHSYWGQGTQVTVSS

SEQ ID NO: 13365 - protein, 118 aa, Artificial Sequence
  Chemically Synthesized
QVQLQESGGGLVQAGGSLRLSCAASGTISGLYFMGWYRQAPGKEREFVAAIDLGGTTYYADSVKGRFTISRDNAKNTVYLQMNSLKPEDTAVYYCAVQEVEDGEFGYWGQGTQVTVSS

SEQ ID NO: 13366 - protein, 118 aa, Artificial Sequence
  Chemically Synthesized
QVQLQESGGGLVQAGGSLRLSCAASGNIFYPAKMGWYRQAPGKEREFVAGISRGGITNYADSVKGRFTISRDNAKNTVYLQMNSLKPEDTAVYYCAAVRYDRGWHFYWGQGTQVTVSS

SEQ ID NO: 13367 - protein, 118 aa, Artificial Sequence
  Chemically Synthesized
QVQLQESGGGLVQAGGSLRLSCAASGSIFYLEYMGWYRQAPGKERELVASINLGATTNYADSVKGRFTISRDNAKNTVYLQMNSLKPEDTAVYYCAAYLYRYAQYRYWGQGTQVTVSS

SEQ ID NO: 13368 - protein, 118 aa, Artificial Sequence
  Chemically Synthesized
QVQLQESGGGLVQAGGSLRLSCAASGSISSYIAMGWYRQAPGKEREFVASITIGSNTNYADSVKGRFTISRDNAKNTVYLQMNSLKPEDTAVYYCAAIRYVVLYYYYWGQGTQVTVSS

SEQ ID NO: 13369 - protein, 126 aa, Artificial Sequence
  Chemically Synthesized
QVQLQESGGGLVQAGGSLRLSCAASGTISDWFDMGWYRQAPGKERELVAGINTGASTNYADSVKGRFTISRDNAKNTVYLQMNSLKPEDTAVYYCAVYRDDRAYDYSGTYGLHDYWGQGTQVTVSS

SEQ ID NO: 13370 - protein, 122 aa, Artificial Sequence
  Chemically Synthesized
QVQLQESGGGLVQAGGSLRLSCAASGTIFGDYVMGWYRQAPGKEREFVAGITSGSNTYYADSVKGRFTISRDNAKNTVYLQMNSLKPEDTAVYYCAAYTYDGAFVITTYGYWGQGTQVTVSS

SEQ ID NO: 13371 - protein, 118 aa, Artificial Sequence
  Chemically Synthesized
QVQLQESGGGLVQAGGSLRLSCAASGSIFRSYPMGWYRQAPGKEREFVAAIDFGAITYYADSVKGRFTISRDNAKNTVYLQMNSLKPEDTAVYYCAAFSDSYRGLDYWGQGTQVTVSS

SEQ ID NO: 13372 - protein, 118 aa, Artificial Sequence
  Chemically Synthesized
QVQLQESGGGLVQAGGSLRLSCAASGYISVSAYMGWYRQAPGKEREFVASISAGGSTNYADSVKGRFTISRDNAKNTVYLQMNSLKPEDTAVYYCAAATSGVGAFDYWGQGTQVTVSS

SEQ ID NO: 13373 - protein, 115 aa, Artificial Sequence
  Chemically Synthesized
QVQLQESGGGLVQAGGSLRLSCAASGNIFYNAFMGWYRQAPGKEREFVAAISVGASTYYADSVKGRFTISRDNAKNTVYLQMNSLKPEDTAVYYCAGRSNVLDYWGQGTQVTVSS

SEQ ID NO: 13374 - protein, 118 aa, Artificial Sequence
  Chemically Synthesized
QVQLQESGGGLVQAGGSLRLSCAASGTISLSYYMGWYRQAPGKEREFVAGITGGTTTNYADSVKGRFTISRDNAKNTVYLQMNSLKPEDTAVYYCAAYSTYHPSYDYWGQGTQVTVSS

SEQ ID NO: 13375 - protein, 117 aa, Artificial Sequence
  Chemically Synthesized
QVQLQESGGGLVQAGGSLRLSCAASGNISSDDMGWYRQAPGKEREFVAAINAGAITNYADSVKGRFTISRDNAKNTVYLQMNSLKPEDTAVYYCAADAPLIYLHYYWGQGTQVTVSS

SEQ ID NO: 13376 - protein, 121 aa, Artificial Sequence
  Chemically Synthesized
QVQLQESGGGLVQAGGSLRLSCAASGNIFYPRYMGWYRQAPGKERELLPLLVRVVLPYADSVKGRFTISRDNAKNTVYLQMNSLKPEDTAVYYCAVDRQYNRYSLRYHFYWGQGTQVTVSS

SEQ ID NO: 13377 - protein, 122 aa, Artificial Sequence
  Chemically Synthesized
QVQLQESGGGLVQAGGSLRLSCAASGYISPDVSMGWYRQAPGKERELVAGIGWGGSTYYADSVKGRFTISRDNAKNTVYLQMNSLKPEDTAVYYCAALLDRAIDIGYGLDYWGQGTQVTVSS

SEQ ID NO: 13378 - protein, 119 aa, Artificial Sequence
  Chemically Synthesized
QVQLQESGGGLVQAGGSLRLSCAASGTIFTDLYMGWYRQAPGKEREFVAGIAYGTNTYYADSVKGRFTISRDNAKNTVYLQMNSLKPEDTAVYYCAVFAWYHLPFLDYWGQGTQVTVSS

SEQ ID NO: 13379 - protein, 118 aa, Artificial Sequence
  Chemically Synthesized
QVQLQESGGGLVQAGGSLRLSCAASGNISWNSVMGWYRQAPGKEREFVASIGAGGITNYADSVKGRFTISRDNAKNTVYLQMNSLKPEDTAVYYCAVEEPDNALLSYWGQGTQVTVSS

SEQ ID NO: 13380 - protein, 122 aa, Artificial Sequence
  Chemically Synthesized
QVQLQESGGGLVQAGGSLRLSCAASGSISAYHGMGWYRQAPGKEREFVAGITTGASTYYADSVKGRFTISRDNAKNTVYLQMNSLKPEDTAVYYCAALTAYDQPRFYVHVYWGQGTQVTVSS

SEQ ID NO: 13381 - protein, 118 aa, Artificial Sequence
  Chemically Synthesized
QVQLQESGGGLVQAGGSLRLSCAASGSIFFIRVMGWYRQAPGKEREFVASIGAGTTTYYADSVKGRFTISRDNAKNTVYLQMNSLKPEDTAVYYCAAYLRRGYDFLYWGQGTQVTVSS

SEQ ID NO: 13382 - protein, 122 aa, Artificial Sequence
  Chemically Synthesized
QVQLQESGGGLVQAGGSLRLSCAASGSISAYVGMGWYRQAPGKEREFVAAITQGTNTYYADSVKGRFTISRDNAKNTVYLQMNSLKPEDTAVYYCAVPRYIFRGGGYALAYWGQGTQVTVSS

SEQ ID NO: 13383 - protein, 117 aa, Artificial Sequence
  Chemically Synthesized
QVQLQESGGGLVQAGGSLRLSCAASGTISGLQCMGWYRQAPGKEREFVASIADGSTTNYADSVKGRFTISRDNAKNTVYLQMNSLKPEDTAVYYCAVDARYISTIYWGQGTQVTVSS

SEQ ID NO: 13384 - protein, 117 aa, Artificial Sequence
  Chemically Synthesized
QVQLQESGGGLVQAGGSLRLSCAASGTISSSHYMGWYRQAPGKEREFVASIATGAITNYADSVKGRFTISRDNAKNTVYLQMNSLKPEDTAVYYCAVAASLRTLFYWGQGTQVTVSS

SEQ ID NO: 13385 - protein, 121 aa, Artificial Sequence
  Chemically Synthesized
QVQLQESGGGLVQAGGSLRLSCAASGNIFAGNSMGWYRQAPGKERELLPVLVLVLLPYADSVKGRFTISRDNAKNTVYLQMNSLKPEDTAVYYCAVDNYGSRYRYERHTYWGQGTQVTVSS

SEQ ID NO: 13386 - protein, 126 aa, Artificial Sequence
  Chemically Synthesized
QVQLQESGGGLVQAGGSLRLSCAASGNISPHYGMGWYRQAPGKEREFVAGIAPGSSTYYADSVKGRFTISRDNAKNTVYLQMNSLKPEDTAVYYCAAVLARYRHDNLSPYYYYRYWGQGTQVTVSS

SEQ ID NO: 13387 - protein, 120 aa, Artificial Sequence
  Chemically Synthesized
QVQLQESGGGLVQAGGSLRLSCAASGTISYPNPMGWYRQAPGKERELPVLVKVVIPYADSVKGRFTISRDNAKNTVYLQMNSLKPEDTAVYYCAVGIDFITFIYGSYDYWGQGTQVTVSS

SEQ ID NO: 13388 - protein, 122 aa, Artificial Sequence
  Chemically Synthesized
QVQLQESGGGLVQAGGSLRLSCAASGSISVRYYMGWYRQAPGKEREFVAAIDYGTTTNYADSVKGRFTISRDNAKNTVYLQMNSLKPEDTAVYYCAVIVRGHTSDGGWHFYWGQGTQVTVSS

SEQ ID NO: 13389 - protein, 121 aa, Artificial Sequence
  Chemically Synthesized
QVQLQESGGGLVQAGGSLRLSCAASGSIFYYDMGWYRQAPGKERELVAAIASGSTTYYADSVKGRFTISRDNAKNTVYLQMNSLKPEDTAVYYCAAVTRYDDYPYTRHQYWGQGTQVTVSS

SEQ ID NO: 13390 - protein, 118 aa, Artificial Sequence
  Chemically Synthesized
QVQLQESGGGLVQAGGSLRLSCAASGYISPYGPMGWYRQAPGKERELVATIGWGANTYYADSVKGRFTISRDNAKNTVYLQMNSLKPEDTAVYYCAVWYRRYYLFPYWGQGTQVTVSS

SEQ ID NO: 13391 - protein, 118 aa, Artificial Sequence
  Chemically Synthesized
QVQLQESGGGLVQAGGSLRLSCAASGNIFTRKYMGWYRQAPGKEREFVATIDYGSTTYYADSVKGRFTISRDNAKNTVYLQMNSLKPEDTAVYYCAVVGLTVNYHVYWGQGTQVTVSS

SEQ ID NO: 13392 - protein, 121 aa, Artificial Sequence
  Chemically Synthesized
QVQLQESGGGLVQAGGSLRLSCAASGNIFRLYGMGWYRQAPGKERELVAAIAAGSTYYADSVKGRFTISRDNAKNTVYLQMNSLKPEDTAVYYCAAKWYYQWYDLTRHGYWGQGTQVTVSS

SEQ ID NO: 13393 - protein, 118 aa, Artificial Sequence
  Chemically Synthesized
QVQLQESGGGLVQAGGSLRLSCAASGYISAAVVMGWYRQAPGKEREFVAGIAHGANTYYADSVKGRFTISRDNAKNTVYLQMNSLKPEDTAVYYCAVYAWPSGSYDYWGQGTQVTVSS

SEQ ID NO: 13394 - protein, 118 aa, Artificial Sequence
  Chemically Synthesized
QVQLQESGGGLVQAGGSLRLSCAASGNISADGYMGWYRQAPGKERELVATISYGASTNYADSVKGRFTISRDNAKNTVYLQMNSLKPEDTAVYYCAAGLVSSHTHRYWGQGTQVTVSS

SEQ ID NO: 13395 - protein, 126 aa, Artificial Sequence
  Chemically Synthesized
QVQLQESGGGLVQAGGSLRLSCAASGNISPSQIMGWYRQAPGKERELVAGITTGSNTYYADSVKGRFTISRDNAKNTVYLQMNSLKPEDTAVYYCAAVIRGIYSGVTVRGYWFYYWGQGTQVTVSS

SEQ ID NO: 13396 - protein, 125 aa, Artificial Sequence
  Chemically Synthesized
QVQLQESGGGLVQAGGSLRLSCAASGYISSNVMGWYRQAPGKEREFVAGITRGGSTNYADSVKGRFTISRDNAKNTVYLQMNSLKPEDTAVYYCAAILTDIAGAQKITSVYHWYWGQGTQVTVSS

SEQ ID NO: 13397 - protein, 118 aa, Artificial Sequence
  Chemically Synthesized
QVQLQESGGGLVQAGGSLRLSCAASGTISNTWYMGWYRQAPGKEREFVAGIASGASTYYADSVKGRFTISRDNAKNTVYLQMNSLKPEDTAVYYCAVIYPYRTGHDYWGQGTQVTVSS

SEQ ID NO: 13398 - protein, 117 aa, Artificial Sequence
  Chemically Synthesized
QVQLQESGGGLVQAGGSLRLSCAASGNISPLDIMGWYRQAPGKEREFVAAIDFGSTTYYADSVKGRFTISRDNAKNTVYLQMNSLKPEDTAVYYCAVTWTSKRSLYWGQGTQVTVSS

SEQ ID NO: 13399 - protein, 126 aa, Artificial Sequence
  Chemically Synthesized
QVQLQESGGGLVQAGGSLRLSCAASGYIFRLATMGWYRQAPGKEREFVAGITSGGNTNYADSVKGRFTISRDNAKNTVYLQMNSLKPEDTAVYYCAAIEQLAYDRAYRGTYTFHYWGQGTQVTVSS

SEQ ID NO: 13400 - protein, 117 aa, Artificial Sequence
  Chemically Synthesized
QVQLQESGGGLVQAGGSLRLSCAASGNIFTKPMGWYRQAPGKERELVASIGGGSNTNYADSVKGRFTISRDNAKNTVYLQMNSLKPEDTAVYYCAVTNATIGVLTYWGQGTQVTVSS

SEQ ID NO: 13401 - protein, 117 aa, Artificial Sequence
  Chemically Synthesized
QVQLQESGGGLVQAGGSLRLSCAASGSISFAGRMGWYRQAPGKEREFVAGIDTVVLPYADSVKGRFTISRDNAKNTVYLQMNSLKPEDTAVYYCAADTTVGSTLGYWGQGTQVTVSS

SEQ ID NO: 13402 - protein, 118 aa, Artificial Sequence
  Chemically Synthesized
QVQLQESGGGLVQAGGSLRLSCAASGTISDASMGWYRQAPGKERELVASIDGGTNTYYADSVKGRFTISRDNAKNTVYLQMNSLKPEDTAVYYCAAYDAWSDRGHYYWGQGTQVTVSS

SEQ ID NO: 13403 - protein, 118 aa, Artificial Sequence
  Chemically Synthesized
QVQLQESGGGLVQAGGSLRLSCAASGNIFYYLGMGWYRQAPGKERELVAAINHGTSTNYADSVKGRFTISRDNAKNTVYLQMNSLKPEDTAVYYCAAEVRKTQYFYYWGQGTQVTVSS

SEQ ID NO: 13404 - protein, 107 aa, Artificial Sequence
  Chemically Synthesized
QVQLQESGGGLVQAGGSLRLSCAASGYWSMGWYRQAPGKERELVATIGDGGTTNYADSVKGRFTISRDNAKNTVYLQMNSLKPEDTAVYYCAYYSYWGQGTQVTVSS

SEQ ID NO: 13405 - protein, 125 aa, Artificial Sequence
  Chemically Synthesized
QVQLQESGGGLVQAGGSLRLSCAASGNIFLASMGWYRQAPGKERELVATITTGGNTNYADSVKGRFTISRDNAKNTVYLQMNSLKPEDTAVYYCAAEGYPFLTDGVGINRRHDYWGQGTQVTVSS

SEQ ID NO: 13406 - protein, 118 aa, Artificial Sequence
  Chemically Synthesized
QVQLQESGGGLVQAGGSLRLSCAASGYIFTLTDMGWYRQAPGKEREFVAGIGDGTSTYYADSVKGRFTISRDNAKNTVYLQMNSLKPEDTAVYYCAVGLFRYYGYYYWGQGTQVTVSS

SEQ ID NO: 13407 - protein, 115 aa, Artificial Sequence
  Chemically Synthesized
QVQLQESGGGLVQAGGSLRLSCAASGNISSSGMGWYRQAPGKERELVATITRGSSTNYADSVKGRFTISRDNAKNTVYLQMNSLKPEDTAVYYCAVPVVYHHAYWGQGTQVTVSS

SEQ ID NO: 13408 - protein, 118 aa, Artificial Sequence
  Chemically Synthesized
QVQLQESGGGLVQAGGSLRLSCAASGNIFYQQSMGWYRQAPGKERELVAAITYGGSTYYADSVKGRFTISRDNAKNTVYLQMNSLKPEDTAVYYCAADDHVNVPLRYWGQGTQVTVSS

SEQ ID NO: 13409 - protein, 118 aa, Artificial Sequence
  Chemically Synthesized
QVQLQESGGGLVQAGGSLRLSCAASGYIFTAVDMGWYRQAPGKERELVAGIALGTSTNYADSVKGRFTISRDNAKNTVYLQMNSLKPEDTAVYYCAVQNGNHRYYRYWGQGTQVTVSS

SEQ ID NO: 13410 - protein, 118 aa, Artificial Sequence
  Chemically Synthesized
QVQLQESGGGLVQAGGSLRLSCAASGTISRLTYMGWYRQAPGKEREFVATIGSGSSTNYADSVKGRFTISRDNAKNTVYLQMNSLKPEDTAVYYCAATYYDPSTHPYWGQGTQVTVSS

SEQ ID NO: 13411 - protein, 126 aa, Artificial Sequence
  Chemically Synthesized
QVQLQESGGGLVQAGGSLRLSCAASGTIFGYWPYMGWYRQAPGKERELVASISTGGTTYADSVKGRFTISRDNAKNTVYLQMNSLKPEDTAVYYCAVDAYGPYTDSYYLGGYLPYWGQGTQVTVSS

SEQ ID NO: 13412 - protein, 121 aa, Artificial Sequence
  Chemically Synthesized
QVQLQESGGGLVQAGGSLRLSCAASGTISRGPDMGWYRQAPGKEREFVAGIGVGGSTYYADSVKGRFTISRDNAKNTVYLQMNSLKPEDTAVYYCAAYETLRLVTTWFFYWGQGTQVTVSS

SEQ ID NO: 13413 - protein, 124 aa, Artificial Sequence
  Chemically Synthesized
QVQLQESGGGLVQAGGSLRLSCAASGSIFGSLYMGWYRQAPGKEREFVATIDGGGTTYYADSVKGRFTISRDNAKNTVYLQMNSLKPEDTAVYYCAVKAGAGSYPRGEQAYPYWGQGTQVTVSS

SEQ ID NO: 13414 - protein, 121 aa, Artificial Sequence
  Chemically Synthesized
QVQLQESGGGLVQAGGSLRLSCAASGYISSSYYMGWYRQAPGKEREFVAGINGANTYYADSVKGRFTISRDNAKNTVYLQMNSLKPEDTAVYYCAVDYYYRWGRLDRFFYWGQGTQVTVSS

SEQ ID NO: 13415 - protein, 126 aa, Artificial Sequence
  Chemically Synthesized
QVQLQESGGGLVQAGGSLRLSCAASGNIFERIYMGWYRQAPGKERELVAAIGVGANTYYADSVKGRFTISRDNAKNTVYLQMNSLKPEDTAVYYCAAAYASASRAEPLDLKAFGYWGQGTQVTVSS

SEQ ID NO: 13416 - protein, 116 aa, Artificial Sequence
  Chemically Synthesized
QVQLQESGGGLVQAGGSLRLSCAASGNISGRNMGWYRQAPGKEREFVASITAGATTYYADSVKGRFTISRDNAKNTVYLQMNSLKPEDTAVYYCAAYGEVDGSMYWGQGTQVTVSS

SEQ ID NO: 13417 - protein, 118 aa, Artificial Sequence
  Chemically Synthesized
QVQLQESGGGLVQAGGSLRLSCAASGYISSEQTMGWYRQAPGKEREFVAGIAFGSITYYADSVKGRFTISRDNAKNTVYLQMNSLKPEDTAVYYCAAFRNVQAGHPYWGQGTQVTVSS

SEQ ID NO: 13418 - protein, 121 aa, Artificial Sequence
  Chemically Synthesized
QVQLQESGGGLVQAGGSLRLSCAASGTISSSLMGWYRQAPGKERELVASIDYGYYYQYADSVKGRFTISRDNAKNTVYLQMNSLKPEDTAVYYCAADYGSSYLSSTYYGYWGQGTQVTVSS

SEQ ID NO: 13419 - protein, 118 aa, Artificial Sequence
  Chemically Synthesized
QVQLQESGGGLVQAGGSLRLSCAASGTIFPSYYMGWYRQAPGKERELVAAIAGGTTTNYADSVKGRFTISRDNAKNTVYLQMNSLKPEDTAVYYCAADRSFQKFYRYWGQGTQVTVSS

SEQ ID NO: 13420 - protein, 117 aa, Artificial Sequence
  Chemically Synthesized
QVQLQESGGGLVQAGGSLRLSCAASGNIFYTFVMGWYRQAPGKERELVASISLGSSTNYADSVKGRFTISRDNAKNTVYLQMNSLKPEDTAVYYCAVDISITLLFYWGQGTQVTVSS

SEQ ID NO: 13421 - protein, 118 aa, Artificial Sequence
  Chemically Synthesized
QVQLQESGGGLVQAGGSLRLSCAASGTISPGRSMGWYRQAPGKERELVAGIAFGANTYYADSVKGRFTISRDNAKNTVYLQMNSLKPEDTAVYYCAAKFYPYHSFYYWGQGTQVTVSS

SEQ ID NO: 13422 - protein, 126 aa, Artificial Sequence
  Chemically Synthesized
QVQLQESGGGLVQAGGSLRLSCAASGTISWPYTMGWYRQAPGKERELVAGITGGTNTNYADSVKGRFTISRDNAKNTVYLQMNSLKPEDTAVYYCAVRGETPYGYAYYAGLGHSYWGQGTQVTVSS

SEQ ID NO: 13423 - protein, 122 aa, Artificial Sequence
  Chemically Synthesized
QVQLQESGGGLVQAGGSLRLSCAASGSIFAPYSMGWYRQAPGKEREFVATIDHGTTTNYADSVKGRFTISRDNAKNTVYLQMNSLKPEDTAVYYCAVHDRHSRKDTGYLGYWGQGTQVTVSS

SEQ ID NO: 13424 - protein, 118 aa, Artificial Sequence
  Chemically Synthesized
QVQLQESGGGLVQAGGSLRLSCAASGNISRDDDMGWYRQAPGKEREFVASIGLGTITYYADSVKGRFTISRDNAKNTVYLQMNSLKPEDTAVYYCAAVGYAYEWHVYWGQGTQVTVSS

SEQ ID NO: 13425 - protein, 122 aa, Artificial Sequence
  Chemically Synthesized
QVQLQESGGGLVQAGGSLRLSCAASGNISGYSVMGWYRQAPGKERELVASIDNGGTTYYADSVKGRFTISRDNAKNTVYLQMNSLKPEDTAVYYCAAWLYRAWYTLAGHEYWGQGTQVTVSS

SEQ ID NO: 13426 - protein, 118 aa, Artificial Sequence
  Chemically Synthesized
QVQLQESGGGLVQAGGSLRLSCAASGSISGAYIMGWYRQAPGKERELVATINIGSNTNYADSVKGRFTISRDNAKNTVYLQMNSLKPEDTAVYYCAAYRKWYWYHRYWGQGTQVTVSS

SEQ ID NO: 13427 - protein, 108 aa, Artificial Sequence
  Chemically Synthesized
QVQLQESGGGLVQAGGSLRLSCAASGTISWYAVMGWYRQAPGKEREFVAGYADSVKGRFTISRDNAKNTVYLQMNSLKPEDTAVYYCAVAHAYYHPYWGQGTQVTVSS

SEQ ID NO: 13428 - protein, 118 aa, Artificial Sequence
  Chemically Synthesized
QVQLQESGGGLVQAGGSLRLSCAASGTIFGRGYMGWYRQAPGKERELVATIGPGGNTYYADSVKGRFTISRDNAKNTVYLQMNSLKPEDTAVYYCAAYYFRANYHYYWGQGTQVTVSS

SEQ ID NO: 13429 - protein, 118 aa, Artificial Sequence
  Chemically Synthesized
QVQLQESGGGLVQAGGSLRLSCAASGYIFRYGGMGWYRQAPGKEREFVAAITRGGITYYADSVKGRFTISRDNAKNTVYLQMNSLKPEDTAVYYCAVYRHRYKDLSYWGQGTQVTVSS

SEQ ID NO: 13430 - protein, 118 aa, Artificial Sequence
  Chemically Synthesized
QVQLQESGGGLVQAGGSLRLSCAASGSIFWAYHMGWYRQAPGKERELVATITLGTSTNYADSVKGRFTISRDNAKNTVYLQMNSLKPEDTAVYYCAVSYRYTLYHPYWGQGTQVTVSS

SEQ ID NO: 13431 - protein, 119 aa, Artificial Sequence
  Chemically Synthesized
QVQLQESGGGLVQAGGSLRLSCAASGSISPADYMGWYRQAPGKEREFVAGMVVLPYADSVKGRFTISRDNAKNTVYLQMNSLKPEDTAVYYCAVPALGEYQAYDDHYYWGQGTQVTVSS

SEQ ID NO: 13432 - protein, 119 aa, Artificial Sequence
  Chemically Synthesized
QVQLQESGGGLVQAGGSLRLSCAASGNIFRILGMGWYRQAPGKEREFVAAIGPGGGITYYADSVKGRFTISRDNAKNTVYLQMNSLKPEDTAVYYCAVSLPYRYWFRYWGQGTQVTVSS

SEQ ID NO: 13433 - protein, 119 aa, Artificial Sequence
  Chemically Synthesized
QVQLQESGGGLVQAGGSLRLSCAASGTIFNLWSMGWYRQAPGKEREFVATITLGTTTNYADSVKGRFTISRDNAKNTVYLQMNSLKPEDTAVYYCAVGVIPYRVLLIYWGQGTQVTVSS

SEQ ID NO: 13434 - protein, 120 aa, Artificial Sequence
  Chemically Synthesized
QVQLQESGGGLVQAGGSLRLSCAASGTIFGYYTMGWYRQAPGKEREFVATIDDGSTNYADSVKGRFTISRDNAKNTVYLQMNSLKPEDTAVYYCAVRRAYDGVGSPYDYWGQGTQVTVSS

SEQ ID NO: 13435 - protein, 126 aa, Artificial Sequence
  Chemically Synthesized
QVQLQESGGGLVQAGGSLRLSCAASGNISDRYIMGWYRQAPGKERELVAGITYGSTTYYADSVKGRFTISRDNAKNTVYLQMNSLKPEDTAVYYCAVSDVVSPYAGRDPYDYLDYWGQGTQVTVSS

SEQ ID NO: 13436 - protein, 118 aa, Artificial Sequence
  Chemically Synthesized
QVQLQESGGGLVQAGGSLRLSCAASGNIFDWRHMGWYRQAPGKEREFVAGINYGGSTYYADSVKGRFTISRDNAKNTVYLQMNSLKPEDTAVYYCAADTPVDTFYHYWGQGTQVTVSS

SEQ ID NO: 13437 - protein, 122 aa, Artificial Sequence
  Chemically Synthesized
QVQLQESGGGLVQAGGSLRLSCAASGNISHVYPMGWYRQAPGKERELVASINYGGTTYYADSVKGRFTISRDNAKNTVYLQMNSLKPEDTAVYYCAVYYQPIQQLRVIHAYWGQGTQVTVSS

SEQ ID NO: 13438 - protein, 126 aa, Artificial Sequence
  Chemically Synthesized
QVQLQESGGGLVQAGGSLRLSCAASGYIFRPSVMGWYRQAPGKEREFVATIAVGTTTNYADSVKGRFTISRDNAKNTVYLQMNSLKPEDTAVYYCAANHRYWHGYYYSLFGYYSYWGQGTQVTVSS

SEQ ID NO: 13439 - protein, 122 aa, Artificial Sequence
  Chemically Synthesized
QVQLQESGGGLVQAGGSLRLSCAASGTISDWDYMGWYRQAPGKERELVAAIGQGGNTYYADSVKGRFTISRDNAKNTVYLQMNSLKPEDTAVYYCAVAYASPYLYLLYLYYWGQGTQVTVSS

SEQ ID NO: 13440 - protein, 117 aa, Artificial Sequence
  Chemically Synthesized
QVQLQESGGGLVQAGGSLRLSCAASGTISKSLGMGWYRQAPGKERELVAACLRWYYQYADSVKGRFTISRDNAKNTVYLQMNSLKPEDTAVYYCAADDRAFGSHYYWGQGTQVTVSS

SEQ ID NO: 13441 - protein, 125 aa, Artificial Sequence
  Chemically Synthesized
QVQLQESGGGLVQAGGSLRLSCAASGNIFTIWYMGWYRQAPGKERELVASMVWVVLPYADSVKGRFTISRDNAKNTVYLQMNSLKPEDTAVYYCAVDTYPKGRDSYGASYSLLYWGQGTQVTVSS

SEQ ID NO: 13442 - protein, 122 aa, Artificial Sequence
  Chemically Synthesized
QVQLQESGGGLVQAGGSLRLSCAASGYISIPNTMGWYRQAPGKERELVATIAYGASTYYADSVKGRFTISRDNAKNTVYLQMNSLKPEDTAVYYCAVDVFVTSRSYYVHLYWGQGTQVTVSS

SEQ ID NO: 13443 - protein, 122 aa, Artificial Sequence
  Chemically Synthesized
QVQLQESGGGLVQAGGSLRLSCAASGTIFPHDSMGWYRQAPGKERELVAGITDGATTNYADSVKGRFTISRDNAKNTVYLQMNSLKPEDTAVYYCAAAVWYFYDTSLKHRYWGQGTQVTVSS

SEQ ID NO: 13444 - protein, 126 aa, Artificial Sequence
  Chemically Synthesized
QVQLQESGGGLVQAGGSLRLSCAASGNISYYQTMGWYRQAPGKEREFVAAIGTGGTTYYADSVKGRFTISRDNAKNTVYLQMNSLKPEDTAVYYCAVWTSVRFVSYRYTPYTHRYWGQGTQVTVSS

SEQ ID NO: 13445 - protein, 117 aa, Artificial Sequence
  Chemically Synthesized
QVQLQESGGGLVQAGGSLRLSCAASGNIFRRVMGWYRQAPGKEREFVATIGYGGTTYYADSVKGRFTISRDNAKNTVYLQMNSLKPEDTAVYYCAAYNVLFPDFWYWGQGTQVTVSS

SEQ ID NO: 13446 - protein, 113 aa, Artificial Sequence
  Chemically Synthesized
QVQLQESGGGLVQAGGSLRLSCAASGTISLDGAMGWYRQAPGKEREFVATINYGATTNYADSVKGRFTISRDNAKNTVYLQMNSLKPEDTAVYYCASLGHLYWGQGTQVTVSS

SEQ ID NO: 13447 - protein, 126 aa, Artificial Sequence
  Chemically Synthesized
QVQLQESGGGLVQAGGSLRLSCAASGYIFDSGYMGWYRQAPGKEREFVAGISNGTSTNYADSVKGRFTISRDNAKNTVYLQMNSLKPEDTAVYYCAVSDRKYYRRWVTFLYNLNYWGQGTQVTVSS

SEQ ID NO: 13448 - protein, 118 aa, Artificial Sequence
  Chemically Synthesized
QVQLQESGGGLVQAGGSLRLSCAASGYIFQDDWMGWYRQAPGKEREFVAGITYGTITNYADSVKGRFTISRDNAKNTVYLQMNSLKPEDTAVYYCAVDYQAGYAHGYWGQGTQVTVSS

SEQ ID NO: 13449 - protein, 122 aa, Artificial Sequence
  Chemically Synthesized
QVQLQESGGGLVQAGGSLRLSCAASGTIFRAYYMGWYRQAPGKERELVASISRGTSTYYADSVKGRFTISRDNAKNTVYLQMNSLKPEDTAVYYCAANVRGVYTYGSDYRYWGQGTQVTVSS

SEQ ID NO: 13450 - protein, 126 aa, Artificial Sequence
  Chemically Synthesized
QVQLQESGGGLVQAGGSLRLSCAASGNISYYYAMGWYRQAPGKERELVAGITVGGITNYADSVKGRFTISRDNAKNTVYLQMNSLKPEDTAVYYCAVSQYPGYADQDQWRGLHYYWGQGTQVTVSS

SEQ ID NO: 13451 - protein, 116 aa, Artificial Sequence
  Chemically Synthesized
QVQLQESGGGLVQAGGSLRLSCAASGNIFYASMGWYRQAPGKERELVATIGGGSTNYADSVKGRFTISRDNAKNTVYLQMNSLKPEDTAVYYCAAFVTVLYQHSYWGQGTQVTVSS

SEQ ID NO: 13452 - protein, 122 aa, Artificial Sequence
  Chemically Synthesized
QVQLQESGGGLVQAGGSLRLSCAASGTIFVVRYMGWYRQAPGKEREFVAAIAVGATTYYADSVKGRFTISRDNAKNTVYLQMNSLKPEDTAVYYCAAYYDVSGYPRFDHGYWGQGTQVTVSS

SEQ ID NO: 13453 - protein, 118 aa, Artificial Sequence
  Chemically Synthesized
QVQLQESGGGLVQAGGSLRLSCAASGSISVVVYMGWYRQAPGKEREFVASINTGGITNYADSVKGRFTISRDNAKNTVYLQMNSLKPEDTAVYYCAAQSRADATFAYWGQGTQVTVSS

SEQ ID NO: 13454 - protein, 125 aa, Artificial Sequence
  Chemically Synthesized
QVQLQESGGGLVQAGGSLRLSCAASGTISSLTMGWYRQAPGKEREFVASIGDGTSTNYADSVKGRFTISRDNAKNTVYLQMNSLKPEDTAVYYCAVDVEGWDDDYARYATNYLYWGQGTQVTVSS

SEQ ID NO: 13455 - protein, 125 aa, Artificial Sequence
  Chemically Synthesized
QVQLQESGGGLVQAGGSLRLSCAASGNIFKVIYMGWYRQAPGKERELVATIAYGTNTNYADSVKGRFTISRDNAKNTVYLQMNSLKPEDTAVYYCAACTTVVVLTSTITRGFMYWGQGTQVTVSS

SEQ ID NO: 13456 - protein, 122 aa, Artificial Sequence
  Chemically Synthesized
QVQLQESGGGLVQAGGSLRLSCAASGSISSGYQMGWYRQAPGKERELVAGIGGGSITYYADSVKGRFTISRDNAKNTVYLQMNSLKPEDTAVYYCAVPDAFLEPPGITHDYWGQGTQVTVSS

SEQ ID NO: 13457 - protein, 118 aa, Artificial Sequence
  Chemically Synthesized
QVQLQESGGGLVQAGGSLRLSCAASGNIFYADSMGWYRQAPGKEREFVATIADGASTYYADSVKGRFTISRDNAKNTVYLQMNSLKPEDTAVYYCAALWYFYPWLYYWGQGTQVTVSS

SEQ ID NO: 13458 - protein, 117 aa, Artificial Sequence
  Chemically Synthesized
QVQLQESGGGLVQAGGSLRLSCAASGYIFGDTYMGWYRQAPGKERELVATIGFGASTYYADSVKGRFTISRDNAKNTVYLQMNSLKPEDTAVYYCAARSTRCLPCYWGQGTQVTVSS

SEQ ID NO: 13459 - protein, 122 aa, Artificial Sequence
  Chemically Synthesized
QVQLQESGGGLVQAGGSLRLSCAASGNISYGDTMGWYRQAPGKERELVAAISIGTITNYADSVKGRFTISRDNAKNTVYLQMNSLKPEDTAVYYCAVRLPTTVLDSQQHAYWGQGTQVTVSS

SEQ ID NO: 13460 - protein, 117 aa, Artificial Sequence
  Chemically Synthesized
QVQLQESGGGLVQAGGSLRLSCAASGNISEVADMGWYRQAPGKEREFVAGIGYGTSTYYADSVKGRFTISRDNAKNTVYLQMNSLKPEDTAVYYCAVIDGADRLYYWGQGTQVTVSS

SEQ ID NO: 13461 - protein, 122 aa, Artificial Sequence
  Chemically Synthesized
QVQLQESGGGLVQAGGSLRLSCAASGYIFGIRNMGWYRQAPGKERELVASISYGGNTNYADSVKGRFTISRDNAKNTVYLQMNSLKPEDTAVYYCAVWRYGYTSWRYDHVYWGQGTQVTVSS

SEQ ID NO: 13462 - protein, 117 aa, Artificial Sequence
  Chemically Synthesized
QVQLQESGGGLVQAGGSLRLSCAASGYIFWPNFMGWYRQAPGKEREFVASIGHYYYLYADSVKGRFTISRDNAKNTVYLQMNSLKPEDTAVYYCAAGYPNSDHFWYWGQGTQVTVSS

SEQ ID NO: 13463 - protein, 122 aa, Artificial Sequence
  Chemically Synthesized
QVQLQESGGGLVQAGGSLRLSCAASGYISWYGVMGWYRQAPGKEREFVAAIDYGTTTYYADSVKGRFTISRDNAKNTVYLQMNSLKPEDTAVYYCAADWGPFIDYQYNLPYWGQGTQVTVSS

SEQ ID NO: 13464 - protein, 120 aa, Artificial Sequence
  Chemically Synthesized
QVQLQESGGGLVQAGGSLRLSCAASGSISDYRPMGWYRQAPGKEREFVAAIDLGTNTNYADSVKGRFTISRDNAKNTVYLQMNSLKPEDTAVYYCAVIATQAGVIPLGYWGQGTQVTVSS

SEQ ID NO: 13465 - protein, 126 aa, Artificial Sequence
  Chemically Synthesized
QVQLQESGGGLVQAGGSLRLSCAASGTISYVTAMGWYRQAPGKERELVAGIDYGSNTNYADSVKGRFTISRDNAKNTVYLQMNSLKPEDTAVYYCAVYYRYWRDLYILDDHYLAYWGQGTQVTVSS

SEQ ID NO: 13466 - protein, 118 aa, Artificial Sequence
  Chemically Synthesized
QVQLQESGGGLVQAGGSLRLSCAASGTISGVYFMGWYRQAPGKERELVAGIDKGTTTNYADSVKGRFTISRDNAKNTVYLQMNSLKPEDTAVYYCAAVYGYRSGHVYWGQGTQVTVSS

SEQ ID NO: 13467 - protein, 118 aa, Artificial Sequence
  Chemically Synthesized
QVQLQESGGGLVQAGGSLRLSCAASGTISIGRGMGWYRQAPGKERELVATIADGTTTYYADSVKGRFTISRDNAKNTVYLQMNSLKPEDTAVYYCAVSTDSQGTLGYWGQGTQVTVSS

SEQ ID NO: 13468 - protein, 118 aa, Artificial Sequence
  Chemically Synthesized
QVQLQESGGGLVQAGGSLRLSCAASGNISRWSYMGWYRQAPGKEREFVATITIGTNTNYADSVKGRFTISRDNAKNTVYLQMNSLKPEDTAVYYCAASRLYTLYFDYWGQGTQVTVSS

SEQ ID NO: 13469 - protein, 118 aa, Artificial Sequence
  Chemically Synthesized
QVQLQESGGGLVQAGGSLRLSCAASGTISFTRYMGWYRQAPGKERELVATITYGTTTYYADSVKGRFTISRDNAKNTVYLQMNSLKPEDTAVYYCAVDYLGDYYHYYWGQGTQVTVSS

SEQ ID NO: 13470 - protein, 122 aa, Artificial Sequence
  Chemically Synthesized
QVQLQESGGGLVQAGGSLRLSCAASGTISYLYGMGWYRQAPGKEREFVASIARGTSTNYADSVKGRFTISRDNAKNTVYLQMNSLKPEDTAVYYCAAEGRTEDRRILLAWYWGQGTQVTVSS

SEQ ID NO: 13471 - protein, 126 aa, Artificial Sequence
  Chemically Synthesized
QVQLQESGGGLVQAGGSLRLSCAASGNISVYYSMGWYRQAPGKEREFVAAINPGGNTYYADSVKGRFTISRDNAKNTVYLQMNSLKPEDTAVYYCAVHLEPSFDKDKYNDARLDYWGQGTQVTVSS

SEQ ID NO: 13472 - protein, 118 aa, Artificial Sequence
  Chemically Synthesized
QVQLQESGGGLVQAGGSLRLSCAASGYISQRFDMGWYRQAPGKEREFVATISAGSNTNYADSVKGRFTISRDNAKNTVYLQMNSLKPEDTAVYYCAVLQDGGVELPYWGQGTQVTVSS

SEQ ID NO: 13473 - protein, 126 aa, Artificial Sequence
  Chemically Synthesized
QVQLQESGGGLVQAGGSLRLSCAASGSISYARVMGWYRQAPGKEREFVAGINGGATTNYADSVKGRFTISRDNAKNTVYLQMNSLKPEDTAVYYCAVGRRVLGEHHTVPHHAHTYWGQGTQVTVSS

SEQ ID NO: 13474 - protein, 118 aa, Artificial Sequence
  Chemically Synthesized
QVQLQESGGGLVQAGGSLRLSCAASGNIFAISRMGWYRQAPGKERELVATISKGGNTNYADSVKGRFTISRDNAKNTVYLQMNSLKPEDTAVYYCAARASLRRYFWYWGQGTQVTVSS

SEQ ID NO: 13475 - protein, 121 aa, Artificial Sequence
  Chemically Synthesized
QVQLQESGGGLVQAGGSLRLSCAASGTISWIGYMGWYRQAPGKEREFVAAINRGGTTNYADSVKGRFTISRDNAKNTVYLQMNSLKPEDTAVYYCAATYRRYVPRGYHRYWGQGTQVTVSS

SEQ ID NO: 13476 - protein, 116 aa, Artificial Sequence
  Chemically Synthesized
QVQLQESGGGLVQAGGSLRLSCAASGSIFGRYIMGWYRQAPGKEREFVASINGGGTTNYADSVKGRFTISRDNAKNTVYLQMNSLKPEDTAVYYCAAIFGADHTYWGQGTQVTVSS

SEQ ID NO: 13477 - protein, 122 aa, Artificial Sequence
  Chemically Synthesized
QVQLQESGGGLVQAGGSLRLSCAASGYISRRYYMGWYRQAPGKERELVAAITRGGITNYADSVKGRFTISRDNAKNTVYLQMNSLKPEDTAVYYCAVRPTHVLGWGRDHAYWGQGTQVTVSS

SEQ ID NO: 13478 - protein, 122 aa, Artificial Sequence
  Chemically Synthesized
QVQLQESGGGLVQAGGSLRLSCAASGTISVQDGMGWYRQAPGKEREFVAAIGIGGNTNYADSVKGRFTISRDNAKNTVYLQMNSLKPEDTAVYYCAVLEEDPAYTGPGYRYWGQGTQVTVSS

SEQ ID NO: 13479 - protein, 121 aa, Artificial Sequence
  Chemically Synthesized
QVQLQESGGGLVQAGGSLRLSCAASGTISCTTMGWYRQAPGKEREFVATIARGGITNYADSVKGRFTISRDNAKNTVYLQMNSLKPEDTAVYYCAAVYDVTYNFNGLYPYWGQGTQVTVSS

SEQ ID NO: 13480 - protein, 110 aa, Artificial Sequence
  Chemically Synthesized
QVQLQESGGGLVQAGGSLRLSCAASGYISQYIYMGWYRQAPGKERELVAPYADSVKGRFTISRDNAKNTVYLQMNSLKPEDTAVYYCAAYRIDVRAYYYWGQGTQVTVSS

SEQ ID NO: 13481 - protein, 116 aa, Artificial Sequence
  Chemically Synthesized
QVQLQESGGGLVQAGGSLRLSCAASGTIFRTYWMGWYRQAPGKEREFVASIGVGASTNYADSVKGRFTISRDNAKNTVYLQMNSLKPEDTAVYYCAYHWWALHQYWGQGTQVTVSS

SEQ ID NO: 13482 - protein, 122 aa, Artificial Sequence
  Chemically Synthesized
QVQLQESGGGLVQAGGSLRLSCAASGTIFRYPNMGWYRQAPGKERELVAGITVGTNTNYADSVKGRFTISRDNAKNTVYLQMNSLKPEDTAVYYCAAGHDYRYRYYSSHDYWGQGTQVTVSS

SEQ ID NO: 13483 - protein, 118 aa, Artificial Sequence
  Chemically Synthesized
QVQLQESGGGLVQAGGSLRLSCAASGNISASAYMGWYRQAPGKEREFVAAISTGTITYYADSVKGRFTISRDNAKNTVYLQMNSLKPEDTAVYYCAALPTYRYIYGYWGQGTQVTVSS

SEQ ID NO: 13484 - protein, 122 aa, Artificial Sequence
  Chemically Synthesized
QVQLQESGGGLVQAGGSLRLSCAASGNISHNSWMGWYRQAPGKERELVATISYGTSTNYADSVKGRFTISRDNAKNTVYLQMNSLKPEDTAVYYCAVDANSSYLLWNQFSYWGQGTQVTVSS

SEQ ID NO: 13485 - protein, 122 aa, Artificial Sequence
  Chemically Synthesized
QVQLQESGGGLVQAGGSLRLSCAASGSIFVRYDMGWYRQAPGKERELVASIAVGSNTNYADSVKGRFTISRDNAKNTVYLQMNSLKPEDTAVYYCAALYGYEGHGRGVFYYWGQGTQVTVSS

SEQ ID NO: 13486 - protein, 108 aa, Artificial Sequence
  Chemically Synthesized
QVQLQESGGGLVQAGGSLRLSCAASGTILTTVMGWYRQAPGKEREFVASIDGGANTNYADSVKGRFTISRDNAKNTVYLQMNSLKPEDTAVYYCALYWGQGTQVTVSS

SEQ ID NO: 13487 - protein, 119 aa, Artificial Sequence
  Chemically Synthesized
QVQLQESGGGLVQAGGSLRLSCAASGNIFRYEPMGWYRQAPGKERELVATIASGASTYYADSVKGRFTISRDNAKNTVYLQMNSLKPEDTAVYYCAVGPWFYGGVYGYWGQGTQVTVSS

SEQ ID NO: 13488 - protein, 118 aa, Artificial Sequence
  Chemically Synthesized
QVQLQESGGGLVQAGGSLRLSCAASGNIFYDIFMGWYRQAPGKERELVAGINAGAKYLYADSVKGRFTISRDNAKNTVYLQMNSLKPEDTAVYYCAVQTYQGSEHRYWGQGTQVTVSS

SEQ ID NO: 13489 - protein, 122 aa, Artificial Sequence
  Chemically Synthesized
QVQLQESGGGLVQAGGSLRLSCAASGSIFDYVVMGWYRQAPGKERELVAAIGVGSTTYYADSVKGRFTISRDNAKNTVYLQMNSLKPEDTAVYYCAVKGTAYGIGYDEHWYWGQGTQVTVSS

SEQ ID NO: 13490 - protein, 126 aa, Artificial Sequence
  Chemically Synthesized
QVQLQESGGGLVQAGGSLRLSCAASGYISGYSRMGWYRQAPGKEREFVASINYGGNTYYADSVKGRFTISRDNAKNTVYLQMNSLKPEDTAVYYCAVRYQSYRYRGPAVTRLYWYWGQGTQVTVSS

SEQ ID NO: 13491 - protein, 118 aa, Artificial Sequence
  Chemically Synthesized
QVQLQESGGGLVQAGGSLRLSCAASGNIFDDTDMGWYRQAPGKERELVATISGGATTYYADSVKGRFTISRDNAKNTVYLQMNSLKPEDTAVYYCAVYTLALHDHDYWGQGTQVTVSS

SEQ ID NO: 13492 - protein, 117 aa, Artificial Sequence
  Chemically Synthesized
QVQLQESGGGLVQAGGSLRLSCAASGTISVNRAMGWYRQAPGKEREFVAGITDGTITYYADSVKGRFTISRDNAKNTVYLQMNSLKPEDTAVYYCAAYTYYSFLIYWGQGTQVTVSS

SEQ ID NO: 13493 - protein, 115 aa, Artificial Sequence
  Chemically Synthesized
QVQLQESGGGLVQAGGSLRLSCAASGTISRRYLMGWYRQAPGKERELVAGIATGGITYYADSVKGRFTISRDNAKNTVYLQMNSLKPEDTAVYYCAVRRYLFTYWGQGTQVTVSS

SEQ ID NO: 13494 - protein, 118 aa, Artificial Sequence
  Chemically Synthesized
QVQLQESGGGLVQAGGSLRLSCAASGSISLAYAMGWYRQAPGKERELVATITYGGTTYYADSVKGRFTISRDNAKNTVYLQMNSLKPEDTAVYYCAVDARDLRYLGYWGQGTQVTVSS

SEQ ID NO: 13495 - protein, 118 aa, Artificial Sequence
  Chemically Synthesized
QVQLQESGGGLVQAGGSLRLSCAASGTIFPYWAMGWYRQAPGKEREFVATITRGGTTYYADSVKGRFTISRDNAKNTVYLQMNSLKPEDTAVYYCAANRRNWAGLGYWGQGTQVTVSS

SEQ ID NO: 13496 - protein, 126 aa, Artificial Sequence
  Chemically Synthesized
QVQLQESGGGLVQAGGSLRLSCAASGNISGKYVMGWYRQAPGKEREFVAAIDYGTITYYADSVKGRFTISRDNAKNTVYLQMNSLKPEDTAVYYCAAGGTLRDGQWDQPGLTLLYWGQGTQVTVSS

SEQ ID NO: 13497 - protein, 118 aa, Artificial Sequence
  Chemically Synthesized
QVQLQESGGGLVQAGGSLRLSCAASGSISSYNHSMGWYRQAPGKEREFVATIANGANTNYADSVKGRFTISRDNAKNTVYLQMNSLKPEDTAVYYCAVDVASVVLMYWGQGTQVTVSS

SEQ ID NO: 13498 - protein, 122 aa, Artificial Sequence
  Chemically Synthesized
QVQLQESGGGLVQAGGSLRLSCAASGNISYPRYMGWYRQAPGKERELVAAIDHGGITNYADSVKGRFTISRDNAKNTVYLQMNSLKPEDTAVYYCAAGGARRRYYYPILRYWGQGTQVTVSS

SEQ ID NO: 13499 - protein, 117 aa, Artificial Sequence
  Chemically Synthesized
QVQLQESGGGLVQAGGSLRLSCAASGSIFGLQIMGWYRQAPGKERELVAGIGYGGNTYYADSVKGRFTISRDNAKNTVYLQMNSLKPEDTAVYYCAQWIGRDVHDYWGQGTQVTVSS

SEQ ID NO: 13500 - protein, 118 aa, Artificial Sequence
  Chemically Synthesized
QVQLQESGGGLVQAGGSLRLSCAASGSISRRTVMGWYRQAPGKEREFVAAINFGATTYYADSVKGRFTISRDNAKNTVYLQMNSLKPEDTAVYYCAAWRRGPAWYAYWGQGTQVTVSS

SEQ ID NO: 13501 - protein, 125 aa, Artificial Sequence
  Chemically Synthesized
QVQLQESGGGLVQAGGSLRLSCAASGTIFQDLPMGWYRQAPGKERELVASISYGSTYYADSVKGRFTISRDNAKNTVYLQMNSLKPEDTAVYYCAVGYYYLIYSGIPVLSALEYWGQGTQVTVSS

SEQ ID NO: 13502 - protein, 118 aa, Artificial Sequence
  Chemically Synthesized
QVQLQESGGGLVQAGGSLRLSCAASGSISYSYEMGWYRQAPGKEREFVATIGYGAITNYADSVKGRFTISRDNAKNTVYLQMNSLKPEDTAVYYCAAVLDDTVWYYYWGQGTQVTVSS

SEQ ID NO: 13503 - protein, 118 aa, Artificial Sequence
  Chemically Synthesized
QVQLQESGGGLVQAGGSLRLSCAASGSIFEYTTMGWYRQAPGKERELVASIAHGGNTYYADSVKGRFTISRDNAKNTVYLQMNSLKPEDTAVYYCAAVRPPIAHHVYWGQGTQVTVSS

SEQ ID NO: 13504 - protein, 117 aa, Artificial Sequence
  Chemically Synthesized
QVQLQESGGGLVQAGGSLRLSCAASGTISSAPMGWYRQAPGKEREFVASIGEGGITYYADSVKGRFTISRDNAKNTVYLQMNSLKPEDTAVYYCAVLYAPSTVYDYWGQGTQVTVSS

SEQ ID NO: 13505 - protein, 116 aa, Artificial Sequence
  Chemically Synthesized
QVQLQESGGGLVQAGGSLRLSCAASGSIFGLIIMGWYRQAPGKERELVATISAGATTNYADSVKGRFTISRDNAKNTVYLQMNSLKPEDTAVYYCAAYYYRWLDYWGQGTQVTVSS

SEQ ID NO: 13506 - protein, 118 aa, Artificial Sequence
  Chemically Synthesized
QVQLQESGGGLVQAGGSLRLSCAASGSISDTGPMGWYRQAPGKEREFVATIGYGTNTNYADSVKGRFTISRDNAKNTVYLQMNSLKPEDTAVYYCAVSFDDYGDYPYWGQGTQVTVSS

SEQ ID NO: 13507 - protein, 110 aa, Artificial Sequence
  Chemically Synthesized
QVQLQESGGGLVQAGGSLRLSCAASGSISTGYSMGWYRQAPGKEREFVATIGGGGSTYYADSVKGRFTISRDNAKNTVYLQMNSLKPEDTAVYYCAVFYWGQGTQVTVSS

SEQ ID NO: 13508 - protein, 126 aa, Artificial Sequence
  Chemically Synthesized
QVQLQESGGGLVQAGGSLRLSCAASGYISYPSSMGWYRQAPGKERELVATIATGGITNYADSVKGRFTISRDNAKNTVYLQMNSLKPEDTAVYYCAAIPTRDSESIGDSGTGHVYWGQGTQVTVSS

SEQ ID NO: 13509 - protein, 122 aa, Artificial Sequence
  Chemically Synthesized
QVQLQESGGGLVQAGGSLRLSCAASGTIFRPTAMGWYRQAPGKERELVAAITWGTNTYYADSVKGRFTISRDNAKNTVYLQMNSLKPEDTAVYYCAVAYGYQYRVDSTYTYWGQGTQVTVSS

SEQ ID NO: 13510 - protein, 122 aa, Artificial Sequence
  Chemically Synthesized
QVQLQESGGGLVQAGGSLRLSCAASGYIFDGDYMGWYRQAPGKERELVAGIDRGASTYYADSVKGRFTISRDNAKNTVYLQMNSLKPEDTAVYYCAVPYAKPALLADLHGYWGQGTQVTVSS

SEQ ID NO: 13511 - protein, 122 aa, Artificial Sequence
  Chemically Synthesized
QVQLQESGGGLVQAGGSLRLSCAASGSIFTIPSMGWYRQAPGKEREFVAAIAQGTSTYYADSVKGRFTISRDNAKNTVYLQMNSLKPEDTAVYYCAARERRGSDRILSFWYWGQGTQVTVSS

SEQ ID NO: 13512 - protein, 125 aa, Artificial Sequence
  Chemically Synthesized
QVQLQESGGGLVQAGGSLRLSCAASGSISIDYIMGWYRQAPGKERELVATINYGGTTYYADSVKGRFTISRDNAKNTVYLQMNSLKPEDTAVYYCAVVYWRSISYYGRYYSHYYWGQGTQVTVSS

SEQ ID NO: 13513 - protein, 117 aa, Artificial Sequence
  Chemically Synthesized
QVQLQESGGGLVQAGGSLRLSCAASGNIFGSALMGWYRQAPGKEREFVAAISDGAIPYADSVKGRFTISRDNAKNTVYLQMNSLKPEDTAVYYCAASGVPTVAHRYWGQGTQVTVSS

SEQ ID NO: 13514 - protein, 118 aa, Artificial Sequence
  Chemically Synthesized
QVQLQESGGGLVQAGGSLRLSCAASGYISWYGGMGWYRQAPGKEREFVAGIARGSTTYYADSVKGRFTISRDNAKNTVYLQMNSLKPEDTAVYYCAVIHRRGGLHWYWGQGTQVTVSS

SEQ ID NO: 13515 - protein, 125 aa, Artificial Sequence
  Chemically Synthesized
QVQLQESGGGLVQAGGSLRLSCAASGYIFVDVYMGWYRQAPGKEREFVAAINTGANTYYADSVKGRFTISRDNAKNTVYLQMNSLKPEDTAVYYCAADIWLNCTLRPDRNPVSYWGQGTQVTVSS

SEQ ID NO: 13516 - protein, 118 aa, Artificial Sequence
  Chemically Synthesized
QVQLQESGGGLVQAGGSLRLSCAASGSIFLISNMGWYRQAPGKERELVASINWGSTTYYADSVKGRFTISRDNAKNTVYLQMNSLKPEDTAVYYCAVYISTPRRYYYWGQGTQVTVSS

SEQ ID NO: 13517 - protein, 118 aa, Artificial Sequence
  Chemically Synthesized
QVQLQESGGGLVQAGGSLRLSCAASGSISDDDYMGWYRQAPGKEREFVASIDYGANTYYADSVKGRFTISRDNAKNTVYLQMNSLKPEDTAVYYCAVPYNLAHYHRYWGQGTQVTVSS

SEQ ID NO: 13518 - protein, 114 aa, Artificial Sequence
  Chemically Synthesized
QVQLQESGGGLVQAGGSLRLSCAASGYIYMGWYRQAPGKERELVATIATGTTTNYADSVKGRFTISRDNAKNTVYLQMNSLKPEDTAVYYCAVWRVTNRGHPYWGQGTQVTVSS

SEQ ID NO: 13519 - protein, 117 aa, Artificial Sequence
  Chemically Synthesized
QVQLQESGGGLVQAGGSLRLSCAASGNIFYYGTMGWYRQAPGKERELVASISYGTNTYYADSVKGRFTISRDNAKNTVYLQMNSLKPEDTAVYYCAAYYDINSLLYWGQGTQVTVSS

SEQ ID NO: 13520 - protein, 126 aa, Artificial Sequence
  Chemically Synthesized
QVQLQESGGGLVQAGGSLRLSCAASGTIFIWSIMGWYRQAPGKERELVATINLGTSTNYADSVKGRFTISRDNAKNTVYLQMNSLKPEDTAVYYCAASIVPSLDIYPVYAYDLVYWGQGTQVTVSS

SEQ ID NO: 13521 - protein, 121 aa, Artificial Sequence
  Chemically Synthesized
QVQLQESGGGLVQAGGSLRLSCAASGNISPFRMGWYRQAPGKERELVAAISWGGNTNYADSVKGRFTISRDNAKNTVYLQMNSLKPEDTAVYYCAVSAVAQVRYYDSYGYWGQGTQVTVSS

SEQ ID NO: 13522 - protein, 122 aa, Artificial Sequence
  Chemically Synthesized
QVQLQESGGGLVQAGGSLRLSCAASGYIFLDRGMGWYRQAPGKEREFVAAISFGANTYYADSVKGRFTISRDNAKNTVYLQMNSLKPEDTAVYYCAVRVYAQNYRGAGHRYWGQGTQVTVSS

SEQ ID NO: 13523 - protein, 118 aa, Artificial Sequence
  Chemically Synthesized
QVQLQESGGGLVQAGGSLRLSCAASGNISGQQGMGWYRQAPGKERELVAGITGGGTTYYADSVKGRFTISRDNAKNTVYLQMNSLKPEDTAVYYCAAPPITGPGLFYWGQGTQVTVSS

SEQ ID NO: 13524 - protein, 116 aa, Artificial Sequence
  Chemically Synthesized
QVQLQESGGGLVQAGGSLRLSCAASGYIFDSRPMGWYRQAPGKEREFVAAIGGGSNTYYADSVKGRFTISRDNAKNTVYLQMNSLKPEDTAVYYCAAFRHYRRVYWGQGTQVTVSS

SEQ ID NO: 13525 - protein, 118 aa, Artificial Sequence
  Chemically Synthesized
QVQLQESGGGLVQAGGSLRLSCAASGSISVLDYMGWYRQAPGKERELVAAISDGTSTNYADSVKGRFTISRDNAKNTVYLQMNSLKPEDTAVYYCAVTDADVGYHPYWGQGTQVTVSS

SEQ ID NO: 13526 - protein, 118 aa, Artificial Sequence
  Chemically Synthesized
QVQLQESGGGLVQAGGSLRLSCAASGSIFAWYYMGWYRQAPGKEREFVAGISRGGITYYADSVKGRFTISRDNAKNTVYLQMNSLKPEDTAVYYCAAVHVVHSYYYYWGQGTQVTVSS

SEQ ID NO: 13527 - protein, 121 aa, Artificial Sequence
  Chemically Synthesized
QVQLQESGGGLVQAGGSLRLSCAASGSISQYTTMGWYRQAPGKEREFVPVLITVVVPYADSVKGRFTISRDNAKNTVYLQMNSLKPEDTAVYYCAAIDKSLYANGWEYIYWGQGTQVTVSS

SEQ ID NO: 13528 - protein, 118 aa, Artificial Sequence
  Chemically Synthesized
QVQLQESGGGLVQAGGSLRLSCAASGTISYSIDMGWYRQAPGKEREFVAGIANGAITYYADSVKGRFTISRDNAKNTVYLQMNSLKPEDTAVYYCAALFYIYTPLYYWGQGTQVTVSS

SEQ ID NO: 13529 - protein, 118 aa, Artificial Sequence
  Chemically Synthesized
QVQLQESGGGLVQAGGSLRLSCAASGNISPTIGMGWYRQAPGKEREFVATIDAGSITNYADSVKGRFTISRDNAKNTVYLQMNSLKPEDTAVYYCAASTYQAPSLYYWGQGTQVTVSS

SEQ ID NO: 13530 - protein, 122 aa, Artificial Sequence
  Chemically Synthesized
QVQLQESGGGLVQAGGSLRLSCAASGTISYQQGMGWYRQAPGKEREFVAAITRGSITNYADSVKGRFTISRDNAKNTVYLQMNSLKPEDTAVYYCAVWVPTQRWYWRGYRYWGQGTQVTVSS

SEQ ID NO: 13531 - protein, 122 aa, Artificial Sequence
  Chemically Synthesized
QVQLQESGGGLVQAGGSLRLSCAASGYISQHYGMGWYRQAPGKEREFVASIGGGTNTNYADSVKGRFTISRDNAKNTVYLQMNSLKPEDTAVYYCAARYYTAEYRLNTHKYWGQGTQVTVSS

SEQ ID NO: 13532 - protein, 118 aa, Artificial Sequence
  Chemically Synthesized
QVQLQESGGGLVQAGGSLRLSCAASGSISGFLYMGWYRQAPGKERELVAAISYGTSTNYADSVKGRFTISRDNAKNTVYLQMNSLKPEDTAVYYCAVYGYEYRYHYYWGQGTQVTVSS

SEQ ID NO: 13533 - protein, 119 aa, Artificial Sequence
  Chemically Synthesized
QVQLQESGGGLVQAGGSLRLSCAASGSIFPGYVMGWYRQAPGKEREFVAAINRGGNTNYADSVKGRFTISRDNAKNTVYLQMNSLKPEDTAVYYCAVTQYGFWVRYNYWGQGTQVTVSS

SEQ ID NO: 13534 - protein, 118 aa, Artificial Sequence
  Chemically Synthesized
QVQLQESGGGLVQAGGSLRLSCAASGSIFRQYYMGWYRQAPGKEREFVATITSGANTNYADSVKGRFTISRDNAKNTVYLQMNSLKPEDTAVYYCAVYRVRAYTYDYWGQGTQVTVSS

SEQ ID NO: 13535 - protein, 126 aa, Artificial Sequence
  Chemically Synthesized
QVQLQESGGGLVQAGGSLRLSCAASGTISDVTFMGWYRQAPGKEREFVAAIGRGGTTNYADSVKGRFTISRDNAKNTVYLQMNSLKPEDTAVYYCAAAGPDVQQKAKRVSITYLYWGQGTQVTVSS

SEQ ID NO: 13536 - protein, 125 aa, Artificial Sequence
  Chemically Synthesized
QVQLQESGGGLVQAGGSLRLSCAASGTISDYDDMGWYRQAPGKERELVASIADGTTTNYADSVKGRFTISRDNAKNTVYLQMNSLKPEDTAVYYCAVYTDYNDVDSAGYGSTMYWGQGTQVTVSS

SEQ ID NO: 13537 - protein, 114 aa, Artificial Sequence
  Chemically Synthesized
QVQLQESGGGLVQAGGSLRLSCAASGNISWYITMGWYRQAPGKEREFVAGITYGATTNYADSVKGRFTISRDNAKNTVYLQMNSLKPEDTAVYYCASVLNFDYWGQGTQVTVSS

SEQ ID NO: 13538 - protein, 122 aa, Artificial Sequence
  Chemically Synthesized
QVQLQESGGGLVQAGGSLRLSCAASGNIFTYYFMGWYRQAPGKERELVATIGYGTTTYYADSVKGRFTISRDNAKNTVYLQMNSLKPEDTAVYYCAVWRRWDWRYVGHHVYWGQGTQVTVSS

SEQ ID NO: 13539 - protein, 121 aa, Artificial Sequence
  Chemically Synthesized
QVQLQESGGGLVQAGGSLRLSCAASGYISSVLMGWYRQAPGKEREFVASITNGSSTYYADSVKGRFTISRDNAKNTVYLQMNSLKPEDTAVYYCAVYTYQTARGGVPFYYWGQGTQVTVSS

SEQ ID NO: 13540 - protein, 122 aa, Artificial Sequence
  Chemically Synthesized
QVQLQESGGGLVQAGGSLRLSCAASGNISAYTNMGWYRQAPGKERELVAGINYGSNTYYADSVKGRFTISRDNAKNTVYLQMNSLKPEDTAVYYCAVAPPYVVPPVWYFTYWGQGTQVTVSS

SEQ ID NO: 13541 - protein, 122 aa, Artificial Sequence
  Chemically Synthesized
QVQLQESGGGLVQAGGSLRLSCAASGTISNSAYMGWYRQAPGKEREFVAAIAVGSSTYYADSVKGRFTISRDNAKNTVYLQMNSLKPEDTAVYYCAVRKWRYWRTHYTHTYWGQGTQVTVSS

SEQ ID NO: 13542 - protein, 118 aa, Artificial Sequence
  Chemically Synthesized
QVQLQESGGGLVQAGGSLRLSCAASGYISRRGVMGWYRQAPGKERELVAGIDRGASTYYADSVKGRFTISRDNAKNTVYLQMNSLKPEDTAVYYCAARRGLYYPLVYWGQGTQVTVSS

SEQ ID NO: 13543 - protein, 126 aa, Artificial Sequence
  Chemically Synthesized
QVQLQESGGGLVQAGGSLRLSCAASGTISGTVIMGWYRQAPGKERELVAAIGFGGNTYYADSVKGRFTISRDNAKNTVYLQMNSLKPEDTAVYYCAADYADNIVADLASAQIHQYWGQGTQVTVSS

SEQ ID NO: 13544 - protein, 118 aa, Artificial Sequence
  Chemically Synthesized
QVQLQESGGGLVQAGGSLRLSCAASGNISVKTYMGWYRQAPGKERELVASITTGANTNYADSVKGRFTISRDNAKNTVYLQMNSLKPEDTAVYYCAAFYNTKIVFDYWGQGTQVTVSS

SEQ ID NO: 13545 - protein, 118 aa, Artificial Sequence
  Chemically Synthesized
QVQLQESGGGLVQAGGSLRLSCAASGSISYAHAMGWYRQAPGKERELVAGISRGGTTYYADSVKGRFTISRDNAKNTVYLQMNSLKPEDTAVYYCAVATRYSDSLVYWGQGTQVTVSS

SEQ ID NO: 13546 - protein, 122 aa, Artificial Sequence
  Chemically Synthesized
QVQLQESGGGLVQAGGSLRLSCAASGNIFPTIAMGWYRQAPGKEREFVAGIGYGASTYYADSVKGRFTISRDNAKNTVYLQMNSLKPEDTAVYYCAVYKYYYYGSRQQHWYWGQGTQVTVSS

SEQ ID NO: 13547 - protein, 118 aa, Artificial Sequence
  Chemically Synthesized
QVQLQESGGGLVQAGGSLRLSCAASGNIFYSYKMGWYRQAPGKERELVASINDGATTYYADSVKGRFTISRDNAKNTVYLQMNSLKPEDTAVYYCAVGTISYGTYRYWGQGTQVTVSS

SEQ ID NO: 13548 - protein, 118 aa, Artificial Sequence
  Chemically Synthesized
QVQLQESGGGLVQAGGSLRLSCAASGTIFPRPYMGWYRQAPGKERELVAAISHGGNTYYADSVKGRFTISRDNAKNTVYLQMNSLKPEDTAVYYCAVWWFRVIYHVYWGQGTQVTVSS

SEQ ID NO: 13549 - protein, 122 aa, Artificial Sequence
  Chemically Synthesized
QVQLQESGGGLVQAGGSLRLSCAASGNISDYADMGWYRQAPGKEREFVASINVGANTYYADSVKGRFTISRDNAKNTVYLQMNSLKPEDTAVYYCAVYDSSTGVGYVWLFYWGQGTQVTVSS

SEQ ID NO: 13550 - protein, 126 aa, Artificial Sequence
  Chemically Synthesized
QVQLQESGGGLVQAGGSLRLSCAASGTISSAGVMGWYRQAPGKEREFVASINRGTTTYYADSVKGRFTISRDNAKNTVYLQMNSLKPEDTAVYYCAVLIQYGGPRDHVGYRKHRYWGQGTQVTVSS

SEQ ID NO: 13551 - protein, 118 aa, Artificial Sequence
  Chemically Synthesized
QVQLQESGGGLVQAGGSLRLSCAASGTISYTYSMGWYRQAPGKEREFVAGIARGGSTYYADSVKGRFTISRDNAKNTVYLQMNSLKPEDTAVYYCAARYWVARRHYYWGQGTQVTVSS

SEQ ID NO: 13552 - protein, 118 aa, Artificial Sequence
  Chemically Synthesized
QVQLQESGGGLVQAGGSLRLSCAASGTIFPETYMGWYRQAPGKERELVAAIALGTNTYYADSVKGRFTISRDNAKNTVYLQMNSLKPEDTAVYYCAVRRRYYRYYYYWGQGTQVTVSS

SEQ ID NO: 13553 - protein, 118 aa, Artificial Sequence
  Chemically Synthesized
QVQLQESGGGLVQAGGSLRLSCAASGYISPYQDMGWYRQAPGKERELVASITYGGNTNYADSVKGRFTISRDNAKNTVYLQMNSLKPEDTAVYYCAVYHVRRYRHAYWGQGTQVTVSS

SEQ ID NO: 13554 - protein, 117 aa, Artificial Sequence
  Chemically Synthesized
QVQLQESGGGLVQAGGSLRLSCAASGYIFAGDLMGWYRQAPGKERELVAAIDRGATTYYADSVKGRFTISRDNAKNTVYLQMNSLKPEDTAVYYCAAIKRYRRYAYWGQGTQVTVSS

SEQ ID NO: 13555 - protein, 126 aa, Artificial Sequence
  Chemically Synthesized
QVQLQESGGGLVQAGGSLRLSCAASGTISYASLMGWYRQAPGKERELVATITSGATTYYADSVKGRFTISRDNAKNTVYLQMNSLKPEDTAVYYCAADYYRTVVWWSTFTSYYDYWGQGTQVTVSS

SEQ ID NO: 13556 - protein, 118 aa, Artificial Sequence
  Chemically Synthesized
QVQLQESGGGLVQAGGSLRLSCAASGTISELEDMGWYRQAPGKERELVATIAQGGSTNYADSVKGRFTISRDNAKNTVYLQMNSLKPEDTAVYYCAVGGGYDRYFDYWGQGTQVTVSS

SEQ ID NO: 13557 - protein, 126 aa, Artificial Sequence
  Chemically Synthesized
QVQLQESGGGLVQAGGSLRLSCAASGTIFYGDTMGWYRQAPGKERELVAAIDLGGNTNYADSVKGRFTISRDNAKNTVYLQMNSLKPEDTAVYYCAAYGVVDSFWNEYLGADHGYWGQGTQVTVSS

SEQ ID NO: 13558 - protein, 110 aa, Artificial Sequence
  Chemically Synthesized
QVQLQESGGGLVQAGGSLRLSCAASGYISGIFGMGWYRQAPGKERELVAGIDTGATTNYADSVKGRFTISRDNAKNTVYLQMNSLKPEDTAVYYCAVCYWGQGTQVTVSS

SEQ ID NO: 13559 - protein, 121 aa, Artificial Sequence
  Chemically Synthesized
QVQLQESGGGLVQAGGSLRLSCAASGTISYELSMGWYRQAPGKEREFVATITRGIIPYADSVKGRFTISRDNAKNTVYLQMNSLKPEDTAVYYCAADQSKSLLPYIYHAYWGQGTQVTVSS

SEQ ID NO: 13560 - protein, 112 aa, Artificial Sequence
  Chemically Synthesized
QVQLQESGGGLVQAGGSLRLSCAASGYIFVYDYMGWYRQAPGKEREFVAGISLGASTYYADSVKGRFTISRDNAKNTVYLQMNSLKPEDTAVYYCADDLYYWGQGTQVTVSS

SEQ ID NO: 13561 - protein, 123 aa, Artificial Sequence
  Chemically Synthesized
QVQLQESGGGLVQAGGSLRLSCAASGTISPHYTMGWYRQAPGKERELVASINAGGNTNYADSVKGRFTISRDNAKNTVYLQMNSLKPEDTAVYYCAVDAESNGLDDTDYHSYWGQGTQVTVSS

SEQ ID NO: 13562 - protein, 126 aa, Artificial Sequence
  Chemically Synthesized
QVQLQESGGGLVQAGGSLRLSCAASGTISYHHAMGWYRQAPGKEREFVATIGNGTNTNYADSVKGRFTISRDNAKNTVYLQMNSLKPEDTAVYYCAVGLNTIREEQAVPYGGLPYWGQGTQVTVSS

SEQ ID NO: 13563 - protein, 118 aa, Artificial Sequence
  Chemically Synthesized
QVQLQESGGGLVQAGGSLRLSCAASGSIFGEHWMGWYRQAPGKEREFVATITIGTITNYADSVKGRFTISRDNAKNTVYLQMNSLKPEDTAVYYCAVANYGGLRLYYWGQGTQVTVSS

SEQ ID NO: 13564 - protein, 118 aa, Artificial Sequence
  Chemically Synthesized
QVQLQESGGGLVQAGGSLRLSCAASGSIFRGGQMGWYRQAPGKERELVATIDGGGTTNYADSVKGRFTISRDNAKNTVYLQMNSLKPEDTAVYYCAASYREANNLPYWGQGTQVTVSS

SEQ ID NO: 13565 - protein, 118 aa, Artificial Sequence
  Chemically Synthesized
QVQLQESGGGLVQAGGSLRLSCAASGTIFRREYMGWYRQAPGKERELVATISAGGTTYYADSVKGRFTISRDNAKNTVYLQMNSLKPEDTAVYYCAAVPYHVSPFPYWGQGTQVTVSS

SEQ ID NO: 13566 - protein, 126 aa, Artificial Sequence
  Chemically Synthesized
QVQLQESGGGLVQAGGSLRLSCAASGTISYVLHMGWYRQAPGKERELVAAINYGTNTYYADSVKGRFTISRDNAKNTVYLQMNSLKPEDTAVYYCAAASRKVYYGYSGYRRRHVYWGQGTQVTVSS

SEQ ID NO: 13567 - protein, 126 aa, Artificial Sequence
  Chemically Synthesized
QVQLQESGGGLVQAGGSLRLSCAASGSISLDFLMGWYRQAPGKEREFVAAIGYGGITYYADSVKGRFTISRDNAKNTVYLQMNSLKPEDTAVYYCAAYYRHWGPYDDAREGYYSYWGQGTQVTVSS

SEQ ID NO: 13568 - protein, 118 aa, Artificial Sequence
  Chemically Synthesized
QVQLQESGGGLVQAGGSLRLSCAASGYIFYRKSMGWYRQAPGKEREFVATIGTGTSTYYADSVKGRFTISRDNAKNTVYLQMNSLKPEDTAVYYCAARLPYDQRLDYWGQGTQVTVSS

SEQ ID NO: 13569 - protein, 113 aa, Artificial Sequence
  Chemically Synthesized
QVQLQESGGGLVQAGGSLRLSCAASGYIFFSHYMGWYRQAPGKEREFVASIAQYADSVKGRFTISRDNAKNTVYLQMNSLKPEDTAVYYCAVDDSRVRTFEYWGQGTQVTVSS

SEQ ID NO: 13570 - protein, 111 aa, Artificial Sequence
  Chemically Synthesized
QVQLQESGGGLVQAGGSLRLSCAASGSIFYDQTMGWYRQAPGKERELVATIDYGATTNYADSVKGRFTISRDNAKNTVYLQMNSLKPEDTAVYYCAATMYWGQGTQVTVSS

SEQ ID NO: 13571 - protein, 126 aa, Artificial Sequence
  Chemically Synthesized
QVQLQESGGGLVQAGGSLRLSCAASGNISDYAIMGWYRQAPGKERELVATISSGGNTNYADSVKGRFTISRDNAKNTVYLQMNSLKPEDTAVYYCAVRLPYGFKYFRWTYAGHFYWGQGTQVTVSS

SEQ ID NO: 13572 - protein, 122 aa, Artificial Sequence
  Chemically Synthesized
QVQLQESGGGLVQAGGSLRLSCAASGYISDFYYMGWYRQAPGKERELVAAITFGGTTYYADSVKGRFTISRDNAKNTVYLQMNSLKPEDTAVYYCAAYYNSVTPGGTHHLYWGQGTQVTVSS

SEQ ID NO: 13573 - protein, 121 aa, Artificial Sequence
  Chemically Synthesized
QVQLQESGGGLVQAGGSLRLSCAASGTISVSLMGWYRQAPGKERELVAGISPGATTYYADSVKGRFTISRDNAKNTVYLQMNSLKPEDTAVYYCAVYARGILDADDHFVYWGQGTQVTVSS

SEQ ID NO: 13574 - protein, 126 aa, Artificial Sequence
  Chemically Synthesized
QVQLQESGGGLVQAGGSLRLSCAASGNIFGYTVMGWYRQAPGKERELVATINPGANTYYADSVKGRFTISRDNAKNTVYLQMNSLKPEDTAVYYCAAREYVDSYARGYASTWHAYWGQGTQVTVSS

SEQ ID NO: 13575 - protein, 122 aa, Artificial Sequence
  Chemically Synthesized
QVQLQESGGGLVQAGGSLRLSCAASGYIFRARRMGWYRQAPGKEREFVAGIAAGSNTNYADSVKGRFTISRDNAKNTVYLQMNSLKPEDTAVYYCAVYYRQYQANRFYHRYWGQGTQVTVSS

SEQ ID NO: 13576 - protein, 118 aa, Artificial Sequence
  Chemically Synthesized
QVQLQESGGGLVQAGGSLRLSCAASGYIFYPVIMGWYRQAPGKERELVATINRGTITNYADSVKGRFTISRDNAKNTVYLQMNSLKPEDTAVYYCAAGYWKRNNYGYWGQGTQVTVSS

SEQ ID NO: 13577 - protein, 117 aa, Artificial Sequence
  Chemically Synthesized
QVQLQESGGGLVQAGGSLRLSCAASGTIFQFVYMGWYRQAPGKERELVAGIGRGTSTYYADSVKGRFTISRDNAKNTVYLQMNSLKPEDTAVYYCAAKKWRRGLRYWGQGTQVTVSS

SEQ ID NO: 13578 - protein, 122 aa, Artificial Sequence
  Chemically Synthesized
QVQLQESGGGLVQAGGSLRLSCAASGTIFTGGKMGWYRQAPGKERELVAGIGNGTITNYADSVKGRFTISRDNAKNTVYLQMNSLKPEDTAVYYCAAGLEADWDVSYPLEYWGQGTQVTVSS

SEQ ID NO: 13579 - protein, 118 aa, Artificial Sequence
  Chemically Synthesized
QVQLQESGGGLVQAGGSLRLSCAASGNISWTRAMGWYRQAPGKERELVAGINRGASTYYADSVKGRFTISRDNAKNTVYLQMNSLKPEDTAVYYCAVDHRNHFIFRYWGQGTQVTVSS

SEQ ID NO: 13580 - protein, 118 aa, Artificial Sequence
  Chemically Synthesized
QVQLQESGGGLVQAGGSLRLSCAASGTISSYDFMGWYRQAPGKEREFVATIATGSNTYYADSVKGRFTISRDNAKNTVYLQMNSLKPEDTAVYYCAVKYSGTGRHRYWGQGTQVTVSS

SEQ ID NO: 13581 - protein, 118 aa, Artificial Sequence
  Chemically Synthesized
QVQLQESGGGLVQAGGSLRLSCAASGTIFVIDWMGWYRQAPGKEREFVATITGGANTNYADSVKGRFTISRDNAKNTVYLQMNSLKPEDTAVYYCAADDRSRYFLYYWGQGTQVTVSS

SEQ ID NO: 13582 - protein, 118 aa, Artificial Sequence
  Chemically Synthesized
QVQLQESGGGLVQAGGSLRLSCAASGTIFAPYVMGWYRQAPGKERELVATIGFGTSTNYADSVKGRFTISRDNAKNTVYLQMNSLKPEDTAVYYCAVWPQLSWNLAYWGQGTQVTVSS

SEQ ID NO: 13583 - protein, 122 aa, Artificial Sequence
  Chemically Synthesized
QVQLQESGGGLVQAGGSLRLSCAASGYISYSVYMGWYRQAPGKERELVATINTGTNTNYADSVKGRFTISRDNAKNTVYLQMNSLKPEDTAVYYCAVPFDTDRYDPNVLDYWGQGTQVTVSS

SEQ ID NO: 13584 - protein, 118 aa, Artificial Sequence
  Chemically Synthesized
QVQLQESGGGLVQAGGSLRLSCAASGYIFTRPKMGWYRQAPGKEREFVASIGRGTTTYYADSVKGRFTISRDNAKNTVYLQMNSLKPEDTAVYYCAAATYYSYRYSYWGQGTQVTVSS

SEQ ID NO: 13585 - protein, 118 aa, Artificial Sequence
  Chemically Synthesized
QVQLQESGGGLVQAGGSLRLSCAASGTIFYYYYMGWYRQAPGKEREFVAAINRGTSTNYADSVKGRFTISRDNAKNTVYLQMNSLKPEDTAVYYCAVARYRYYSHVYWGQGTQVTVSS

SEQ ID NO: 13586 - protein, 118 aa, Artificial Sequence
  Chemically Synthesized
QVQLQESGGGLVQAGGSLRLSCAASGYISQYIRMGWYRQAPGKERELVASIDYGGNTNYADSVKGRFTISRDNAKNTVYLQMNSLKPEDTAVYYCAADAYTDIDLDYWGQGTQVTVSS

SEQ ID NO: 13587 - protein, 125 aa, Artificial Sequence
  Chemically Synthesized
QVQLQESGGGLVQAGGSLRLSCAASGSIFPSSMGWYRQAPGKEREFVAAIAGGSSTNYADSVKGRFTISRDNAKNTVYLQMNSLKPEDTAVYYCAVYYSYDQGYAGGGDHYLNYWGQGTQVTVSS

SEQ ID NO: 13588 - protein, 126 aa, Artificial Sequence
  Chemically Synthesized
QVQLQESGGGLVQAGGSLRLSCAASGTIFAYKPMGWYRQAPGKEREFVAAIGYGGTTYYADSVKGRFTISRDNAKNTVYLQMNSLKPEDTAVYYCAVYAAVYRRDVRGDRPWYTYWGQGTQVTVSS

SEQ ID NO: 13589 - protein, 118 aa, Artificial Sequence
  Chemically Synthesized
QVQLQESGGGLVQAGGSLRLSCAASGYISVATTMGWYRQAPGKEREFVAGIAEGGTTYYADSVKGRFTISRDNAKNTVYLQMNSLKPEDTAVYYCAVWVNYFYGLYYWGQGTQVTVSS

SEQ ID NO: 13590 - protein, 118 aa, Artificial Sequence
  Chemically Synthesized
QVQLQESGGGLVQAGGSLRLSCAASGSIFWRQIMGWYRQAPGKEREFVAAITVGGTTYYADSVKGRFTISRDNAKNTVYLQMNSLKPEDTAVYYCAARRSSSRGHVYWGQGTQVTVSS

SEQ ID NO: 13591 - protein, 117 aa, Artificial Sequence
  Chemically Synthesized
QVQLQESGGGLVQAGGSLRLSCAASGYISSSSMGWYRQAPGKERELVAGITAGGITNYADSVKGRFTISRDNAKNTVYLQMNSLKPEDTAVYYCAVRAGYYDALLYWGQGTQVTVSS

SEQ ID NO: 13592 - protein, 125 aa, Artificial Sequence
  Chemically Synthesized
QVQLQESGGGLVQAGGSLRLSCAASGYIFGFTVMGWYRQAPGKERELVAAITPGGNTNYADSVKGRFTISRDNAKNTVYLQMNSLKPEDTAVYYCAVDRYHKSWLRYGPYPFRYWGQGTQVTVSS

SEQ ID NO: 13593 - protein, 122 aa, Artificial Sequence
  Chemically Synthesized
QVQLQESGGGLVQAGGSLRLSCAASGSISRHRRMGWYRQAPGKERELVAGINFGTITYYADSVKGRFTISRDNAKNTVYLQMNSLKPEDTAVYYCAAVRGYPYPYWGTHGYWGQGTQVTVSS

SEQ ID NO: 13594 - protein, 118 aa, Artificial Sequence
  Chemically Synthesized
QVQLQESGGGLVQAGGSLRLSCAASGNIFYYRPMGWYRQAPGKEREFVAAIGRGANTNYADSVKGRFTISRDNAKNTVYLQMNSLKPEDTAVYYCAAKTRYFYHHLYWGQGTQVTVSS

SEQ ID NO: 13595 - protein, 118 aa, Artificial Sequence
  Chemically Synthesized
QVQLQESGGGLVQAGGSLRLSCAASGTIFRPRYMGWYRQAPGKERELVASINYGGNTYYADSVKGRFTISRDNAKNTVYLQMNSLKPEDTAVYYCAAYGLYYYPYIYWGQGTQVTVSS

SEQ ID NO: 13596 - protein, 118 aa, Artificial Sequence
  Chemically Synthesized
QVQLQESGGGLVQAGGSLRLSCAASGNIFYRYYMGWYRQAPGKERELVAAITYGGNTYYADSVKGRFTISRDNAKNTVYLQMNSLKPEDTAVYYCAVPVRWRSSFVYWGQGTQVTVSS

SEQ ID NO: 13597 - protein, 122 aa, Artificial Sequence
  Chemically Synthesized
QVQLQESGGGLVQAGGSLRLSCAASGYISQDWYMGWYRQAPGKERELVAGIATGAITNYADSVKGRFTISRDNAKNTVYLQMNSLKPEDTAVYYCAVWSTDTYQEYLHLNYWGQGTQVTVSS

SEQ ID NO: 13598 - protein, 126 aa, Artificial Sequence
  Chemically Synthesized
QVQLQESGGGLVQAGGSLRLSCAASGNISRTRPMGWYRQAPGKERELVAGIARGTSTYYADSVKGRFTISRDNAKNTVYLQMNSLKPEDTAVYYCAVFGWRPRGQYGYYGVSHYYWGQGTQVTVSS

SEQ ID NO: 13599 - protein, 118 aa, Artificial Sequence
  Chemically Synthesized
QVQLQESGGGLVQAGGSLRLSCAASGTISSGYRMGWYRQAPGKEREFVATINGGTITNYADSVKGRFTISRDNAKNTVYLQMNSLKPEDTAVYYCAVYRYRRDSLRYWGQGTQVTVSS

SEQ ID NO: 13600 - protein, 118 aa, Artificial Sequence
  Chemically Synthesized
QVQLQESGGGLVQAGGSLRLSCAASGYIFGPHNMGWYRQAPGKERELVAAITSGGTTYYADSVKGRFTISRDNAKNTVYLQMNSLKPEDTAVYYCAVRRYWTWSYWYWGQGTQVTVSS

SEQ ID NO: 13601 - protein, 121 aa, Artificial Sequence
  Chemically Synthesized
QVQLQESGGGLVQAGGSLRLSCAASGSISVPLMGWYRQAPGKEREFVAGIAAGSNTYYADSVKGRFTISRDNAKNTVYLQMNSLKPEDTAVYYCAVSYQSSPRGAYSLGYWGQGTQVTVSS

SEQ ID NO: 13602 - protein, 118 aa, Artificial Sequence
  Chemically Synthesized
QVQLQESGGGLVQAGGSLRLSCAASGTIFFGRRMGWYRQAPGKEREFVASIGWGTITYYADSVKGRFTISRDNAKNTVYLQMNSLKPEDTAVYYCAARGYAGARFAYWGQGTQVTVSS

SEQ ID NO: 13603 - protein, 127 aa, Artificial Sequence
  Chemically Synthesized
QVQLQESGGGLVQAGGSLRLSCAASGTISGPPYMGWYRQAPGKEREFVATITSGTNTYYADSVKGRFTISRDNAKNTVYLQMNSLKPEDTAVYYCAVVTYFPGDDRVTYTYRSHRYWGQGTQVTVSS

SEQ ID NO: 13604 - protein, 118 aa, Artificial Sequence
  Chemically Synthesized
QVQLQESGGGLVQAGGSLRLSCAASGNISSRYLMGWYRQAPGKEREFVAGINYGTNTYYADSVKGRFTISRDNAKNTVYLQMNSLKPEDTAVYYCAAGLLYRGRLKYWGQGTQVTVSS

SEQ ID NO: 13605 - protein, 126 aa, Artificial Sequence
  Chemically Synthesized
QVQLQESGGGLVQAGGSLRLSCAASGSISQYYVMGWYRQAPGKEREFVASITQGSITYYADSVKGRFTISRDNAKNTVYLQMNSLKPEDTAVYYCAFTVVGTKVTVLRVLVLTFYWGQGTQVTVSS

SEQ ID NO: 13606 - protein, 118 aa, Artificial Sequence
  Chemically Synthesized
QVQLQESGGGLVQAGGSLRLSCAASGNIFSYSAMGWYRQAPGKERELVAAITPGGITYYADSVKGRFTISRDNAKNTVYLQMNSLKPEDTAVYYCAAPLAGLLPYPYWGQGTQVTVSS

SEQ ID NO: 13607 - protein, 118 aa, Artificial Sequence
  Chemically Synthesized
QVQLQESGGGLVQAGGSLRLSCAASGTIFYWYDMGWYRQAPGKEREFVAAIAIGTNTNYADSVKGRFTISRDNAKNTVYLQMNSLKPEDTAVYYCAAAATAGSNHWYWGQGTQVTVSS

SEQ ID NO: 13608 - protein, 122 aa, Artificial Sequence
  Chemically Synthesized
QVQLQESGGGLVQAGGSLRLSCAASGSIFYRWTMGWYRQAPGKERELVATITHGTSTYYADSVKGRFTISRDNAKNTVYLQMNSLKPEDTAVYYCAVASYAWGYRRTPHTYWGQGTQVTVSS

SEQ ID NO: 13609 - protein, 120 aa, Artificial Sequence
  Chemically Synthesized
QVQLQESGGGLVQAGGSLRLSCAASGYISTHGIMGWYRQAPGKERELVAGITQGSSTYYADSVKGRFTISRDNAKNTVYLQMNSLKPEDTAVYYCAWYVKLNPGVYLVYWGQGTQVTVSS

SEQ ID NO: 13610 - protein, 118 aa, Artificial Sequence
  Chemically Synthesized
QVQLQESGGGLVQAGGSLRLSCAASGYISKPDDMGWYRQAPGKEREFVAGINRGANTYYADSVKGRFTISRDNAKNTVYLQMNSLKPEDTAVYYCAVPLYDDGAHYYWGQGTQVTVSS

SEQ ID NO: 13611 - protein, 118 aa, Artificial Sequence
  Chemically Synthesized
QVQLQESGGGLVQAGGSLRLSCAASGYISYVYTMGWYRQAPGKERELVATIGQGANTYYADSVKGRFTISRDNAKNTVYLQMNSLKPEDTAVYYCAVDIRDTKALRYWGQGTQVTVSS

SEQ ID NO: 13612 - protein, 118 aa, Artificial Sequence
  Chemically Synthesized
QVQLQESGGGLVQAGGSLRLSCAASGSIFAAYTMGWYRQAPGKEREFVAAINVGGSTYYADSVKGRFTISRDNAKNTVYLQMNSLKPEDTAVYYCAVTYKPYNYHVYWGQGTQVTVSS

SEQ ID NO: 13613 - protein, 122 aa, Artificial Sequence
  Chemically Synthesized
QVQLQESGGGLVQAGGSLRLSCAASGTIFWQVSMGWYRQAPGKERELVATIAYGGTTYYADSVKGRFTISRDNAKNTVYLQMNSLKPEDTAVYYCAVTLYIDADYDYWYDYWGQGTQVTVSS

SEQ ID NO: 13614 - protein, 118 aa, Artificial Sequence
  Chemically Synthesized
QVQLQESGGGLVQAGGSLRLSCAASGTIFRATYMGWYRQAPGKEREFVASIGGGANTNYADSVKGRFTISRDNAKNTVYLQMNSLKPEDTAVYYCAAYLIRSWRHVYWGQGTQVTVSS

SEQ ID NO: 13615 - protein, 118 aa, Artificial Sequence
  Chemically Synthesized
QVQLQESGGGLVQAGGSLRLSCAASGSIFYRRVMGWYRQAPGKEREFVAAITRGGNTYYADSVKGRFTISRDNAKNTVYLQMNSLKPEDTAVYYCAVGHPYLYRYGYWGQGTQVTVSS

SEQ ID NO: 13616 - protein, 118 aa, Artificial Sequence
  Chemically Synthesized
QVQLQESGGGLVQAGGSLRLSCAASGNISLRVQMGWYRQAPGKEREFVASISRGAITNYADSVKGRFTISRDNAKNTVYLQMNSLKPEDTAVYYCAAYTWYRYTHYYWGQGTQVTVSS

SEQ ID NO: 13617 - protein, 122 aa, Artificial Sequence
  Chemically Synthesized
QVQLQESGGGLVQAGGSLRLSCAASGNIFTPRYMGWYRQAPGKERELVAGISYGGTTYYADSVKGRFTISRDNAKNTVYLQMNSLKPEDTAVYYCAVPELGYPRFVYDFGYWGQGTQVTVSS

SEQ ID NO: 13618 - protein, 118 aa, Artificial Sequence
  Chemically Synthesized
QVQLQESGGGLVQAGGSLRLSCAASGNIFGRRSMGWYRQAPGKEREFVAAIAYGGSTNYADSVKGRFTISRDNAKNTVYLQMNSLKPEDTAVYYCAAYYRYRGHLVYWGQGTQVTVSS

SEQ ID NO: 13619 - protein, 126 aa, Artificial Sequence
  Chemically Synthesized
QVQLQESGGGLVQAGGSLRLSCAASGYISYHDRMGWYRQAPGKEREFVATISWGSITYYADSVKGRFTISRDNAKNTVYLQMNSLKPEDTAVYYCAVSGSVWRPYWIGQGGWHFYWGQGTQVTVSS

SEQ ID NO: 13620 - protein, 116 aa, Artificial Sequence
  Chemically Synthesized
QVQLQESGGGLVQAGGSLRLSCAASGNISGVRRMGWYRQAPGKEREFVASIGRGATTYYADSVKGRFTISRDNAKNTVYLQMNSLKPEDTAVYYCAARYYRGYYYWGQGTQVTVSS

SEQ ID NO: 13621 - protein, 121 aa, Artificial Sequence
  Chemically Synthesized
QVQLQESGGGLVQAGGSLRLSCAASGSIFDSKGMGWYRQAPGKEREFVAGITGGGNTNYADSVKGRFTISRDNAKNTVYLQMNSLKPEDTAVYYCAARNAGLYLLNATLYWGQGTQVTVSS

SEQ ID NO: 13622 - protein, 122 aa, Artificial Sequence
  Chemically Synthesized
QVQLQESGGGLVQAGGSLRLSCAASGSISATRVMGWYRQAPGKEREFVATIDDGTTTNYADSVKGRFTISRDNAKNTVYLQMNSLKPEDTAVYYCAVTGPRYAVPGHYHDYWGQGTQVTVSS

SEQ ID NO: 13623 - protein, 121 aa, Artificial Sequence
  Chemically Synthesized
QVQLQESGGGLVQAGGSLRLSCAASGTISDSRYMGWYRQAPGKEREFVAGISTGTNTYYADSVKGRFTISRDNAKNTVYLQMNSLKPEDTAVYYCAVPYTTHSPTADHRYWGQGTQVTVSS

SEQ ID NO: 13624 - protein, 118 aa, Artificial Sequence
  Chemically Synthesized
QVQLQESGGGLVQAGGSLRLSCAASGTIFYGTNMGWYRQAPGKERELVAGINAGATTYYADSVKGRFTISRDNAKNTVYLQMNSLKPEDTAVYYCAVVPQQLWNHGYWGQGTQVTVSS

SEQ ID NO: 13625 - protein, 122 aa, Artificial Sequence
  Chemically Synthesized
QVQLQESGGGLVQAGGSLRLSCAASGTIFNYAGMGWYRQAPGKEREFVAAITRGGITNYADSVKGRFTISRDNAKNTVYLQMNSLKPEDTAVYYCAVKPHGGYYPGYIFGYWGQGTQVTVSS

SEQ ID NO: 13626 - protein, 121 aa, Artificial Sequence
  Chemically Synthesized
QVQLQESGGGLVQAGGSLRLSCAASGTISYDDYMGWYRQAPGKEREFVATIARGSSTYYADSVKGRFTISRDNAKNTVYLQMNSLKPEDTAVYYCAVQSTVWTTTLLTLYWGQGTQVTVSS

SEQ ID NO: 13627 - protein, 116 aa, Artificial Sequence
  Chemically Synthesized
QVQLQESGGGLVQAGGSLRLSCAASGYFLFLTMGWYRQAPGKEREFVAGINVGTTTYYADSVKGRFTISRDNAKNTVYLQMNSLKPEDTAVYYCAVIEGYTGSFYWGQGTQVTVSS

SEQ ID NO: 13628 - protein, 118 aa, Artificial Sequence
  Chemically Synthesized
QVQLQESGGGLVQAGGSLRLSCAASGSISDWSIMGWYRQAPGKEREFVAAISYGSITYYADSVKGRFTISRDNAKNTVYLQMNSLKPEDTAVYYCAVFWSRGSGLEYWGQGTQVTVSS

SEQ ID NO: 13629 - protein, 122 aa, Artificial Sequence
  Chemically Synthesized
QVQLQESGGGLVQAGGSLRLSCAASGTISTTGYMGWYRQAPGKERELVATIGAGASTNYADSVKGRFTISRDNAKNTVYLQMNSLKPEDTAVYYCAAYGYHLSGCLHLLCYWGQGTQVTVSS

SEQ ID NO: 13630 - protein, 112 aa, Artificial Sequence
  Chemically Synthesized
QVQLQESGGGLVQAGGSLRLSCAASGNIFHGDPMGWYRQAPGKERELVASIGSVLVPYADSVKGRFTISRDNAKNTVYLQMNSLKPEDTAVYYCAVVTVFYWGQGTQVTVSS

SEQ ID NO: 13631 - protein, 121 aa, Artificial Sequence
  Chemically Synthesized
QVQLQESGGGLVQAGGSLRLSCAASGNIFGEPGMGWYRQAPGKERELVASIDDGTTPYADSVKGRFTISRDNAKNTVYLQMNSLKPEDTAVYYCAADEQYDYRSSVAYRYWGQGTQVTVSS

SEQ ID NO: 13632 - protein, 117 aa, Artificial Sequence
  Chemically Synthesized
QVQLQESGGGLVQAGGSLRLSCAASGNISRRSMGWYRQAPGKERELVATIAAGGITNYADSVKGRFTISRDNAKNTVYLQMNSLKPEDTAVYYCAVRHFPDRIFPYWGQGTQVTVSS

SEQ ID NO: 13633 - protein, 122 aa, Artificial Sequence
  Chemically Synthesized
QVQLQESGGGLVQAGGSLRLSCAASGYISEVYAMGWYRQAPGKEREFVAAIADGSTTNYADSVKGRFTISRDNAKNTVYLQMNSLKPEDTAVYYCAVVKARRQASRGFHQYWGQGTQVTVSS

SEQ ID NO: 13634 - protein, 122 aa, Artificial Sequence
  Chemically Synthesized
QVQLQESGGGLVQAGGSLRLSCAASGNIFPVYGMGWYRQAPGKERELVAGINEGGTTYYADSVKGRFTISRDNAKNTVYLQMNSLKPEDTAVYYCAVRVYYTSTGRRRHRYWGQGTQVTVSS

SEQ ID NO: 13635 - protein, 121 aa, Artificial Sequence
  Chemically Synthesized
QVQLQESGGGLVQAGGSLRLSCAASGTISYTQGMGWYRQAPGKERELVASIDRGTTNYADSVKGRFTISRDNAKNTVYLQMNSLKPEDTAVYYCAVWYPYAYKNDYYLQYWGQGTQVTVSS

SEQ ID NO: 13636 - protein, 114 aa, Artificial Sequence
  Chemically Synthesized
QVQLQESGGGLVQAGGSLRLSCAASGYISASAYMGWYRQAPGKERELVASISYGGSTNYADSVKGRFTISRDNAKNTVYLQMNSLKPEDTAVYYCAAAGSHDYWGQGTQVTVSS

SEQ ID NO: 13637 - protein, 115 aa, Artificial Sequence
  Chemically Synthesized
QVQLQESGGGLVQAGGSLRLSCAASGTIFDSQIMGWYRQAPGKERELGNTNYADSVKGRFTISRDNAKNTVYLQMNSLKPEDTAVYYCAAHDGDLTRVYGDYYYWGQGTQVTVSS

SEQ ID NO: 13638 - protein, 118 aa, Artificial Sequence
  Chemically Synthesized
QVQLQESGGGLVQAGGSLRLSCAASGSISEPQDMGWYRQAPGKEREFVAAINDGSNTYYADSVKGRFTISRDNAKNTVYLQMNSLKPEDTAVYYCAAYRTVWDDFTYWGQGTQVTVSS

SEQ ID NO: 13639 - protein, 122 aa, Artificial Sequence
  Chemically Synthesized
QVQLQESGGGLVQAGGSLRLSCAASGNISPPWGMGWYRQAPGKERELVATIDTGGNTNYADSVKGRFTISRDNAKNTVYLQMNSLKPEDTAVYYCAVVARDEPSVTTALQYWGQGTQVTVSS

SEQ ID NO: 13640 - protein, 117 aa, Artificial Sequence
  Chemically Synthesized
QVQLQESGGGLVQAGGSLRLSCAASGYIFQLDQMGWYRQAPGKERELVAAINPGAITYYADSVKGRFTISRDNAKNTVYLQMNSLKPEDTAVYYCAVDPSSTSTIYWGQGTQVTVSS

SEQ ID NO: 13641 - protein, 121 aa, Artificial Sequence
  Chemically Synthesized
QVQLQESGGGLVQAGGSLRLSCAASGTIFDTNYMGWYRQAPGKERELVATIADGGTTNYADSVKGRFTISRDNAKNTVYLQMNSLKPEDTAVYYCAVNSTYDYTWAYDFYWGQGTQVTVSS

SEQ ID NO: 13642 - protein, 118 aa, Artificial Sequence
  Chemically Synthesized
QVQLQESGGGLVQAGGSLRLSCAASGTIFNIPSMGWYRQAPGKEREFVAGITGGANTNYADSVKGRFTISRDNAKNTVYLQMNSLKPEDTAVYYCAAVRYGGDVHTYWGQGTQVTVSS

SEQ ID NO: 13643 - protein, 118 aa, Artificial Sequence
  Chemically Synthesized
QVQLQESGGGLVQAGGSLRLSCAASGNISHPGYMGWYRQAPGKEREFVASIATGANTNYADSVKGRFTISRDNAKNTVYLQMNSLKPEDTAVYYCAVNAVYSVPYFYWGQGTQVTVSS

SEQ ID NO: 13644 - protein, 121 aa, Artificial Sequence
  Chemically Synthesized
QVQLQESGGGLVQAGGSLRLSCAASGTISLSRAMGWYRQAPGKERELVAAISDGTNTYYADSVKGRFTISRDNAKNTVYLQMNSLKPEDTAVYYCAADYAVGNDGTTNMYWGQGTQVTVSS

SEQ ID NO: 13645 - protein, 118 aa, Artificial Sequence
  Chemically Synthesized
QVQLQESGGGLVQAGGSLRLSCAASGSISTPYAMGWYRQAPGKERELVATISYGGTTYYADSVKGRFTISRDNAKNTVYLQMNSLKPEDTAVYYCAVDTVDQDHLAYWGQGTQVTVSS

SEQ ID NO: 13646 - protein, 126 aa, Artificial Sequence
  Chemically Synthesized
QVQLQESGGGLVQAGGSLRLSCAASGNISDIHPMGWYRQAPGKEREFVASITGGTNTYYADSVKGRFTISRDNAKNTVYLQMNSLKPEDTAVYYCAAHKYPPDGTIPIWYYYHFYWGQGTQVTVSS

SEQ ID NO: 13647 - protein, 117 aa, Artificial Sequence
  Chemically Synthesized
QVQLQESGGGLVQAGGSLRLSCAASGSIFRTRQMGWYRQAPGKERELVATINDGANTNYADSVKGRFTISRDNAKNTVYLQMNSLKPEDTAVYYCAVTLTTTNSMYWGQGTQVTVSS

SEQ ID NO: 13648 - protein, 115 aa, Artificial Sequence
  Chemically Synthesized
QVQLQESGGGLVQAGGSLRLSCAASGNIFNVDDMGWYRQAPGKEREPLLVTVLLLYADSVKGRFTISRDNAKNTVYLQMNSLKPEDTAVYYCAVRIFIYYYFTYWGQGTQVTVSS

SEQ ID NO: 13649 - protein, 120 aa, Artificial Sequence
  Chemically Synthesized
QVQLQESGGGLVQAGGSLRLSCAASGTISAGYYMGWYRQAPGKERELVAGITYGTNTYYADSVKGRFTISRDNAKNTVYLQMNSLKPEDTAVYYCAVLTSRTLTTTLLYWGQGTQVTVSS

SEQ ID NO: 13650 - protein, 121 aa, Artificial Sequence
  Chemically Synthesized
QVQLQESGGGLVQAGGSLRLSCAASGTISGAGDMGWYRQAPGKEREFVAAIDTGATTNYADSVKGRFTISRDNAKNTVYLQMNSLKPEDTAVYYCAADQHLLTSVTLRFYWGQGTQVTVSS

SEQ ID NO: 13651 - protein, 118 aa, Artificial Sequence
  Chemically Synthesized
QVQLQESGGGLVQAGGSLRLSCAASGSISGEYYMGWYRQAPGKERELVAAITYGSITNYADSVKGRFTISRDNAKNTVYLQMNSLKPEDTAVYYCAVDPRADGDHAYWGQGTQVTVSS

SEQ ID NO: 13652 - protein, 122 aa, Artificial Sequence
  Chemically Synthesized
QVQLQESGGGLVQAGGSLRLSCAASGNIFVGDNMGWYRQAPGKEREFVATIGWGGNTYYADSVKGRFTISRDNAKNTVYLQMNSLKPEDTAVYYCAAGPQVASNSRAPFDYWGQGTQVTVSS

SEQ ID NO: 13653 - protein, 118 aa, Artificial Sequence
  Chemically Synthesized
QVQLQESGGGLVQAGGSLRLSCAASGSIFNYLEMGWYRQAPGKERELVASITGGTTTNYADSVKGRFTISRDNAKNTVYLQMNSLKPEDTAVYYCAVEYPVYHRFAYWGQGTQVTVSS

SEQ ID NO: 13654 - protein, 116 aa, Artificial Sequence
  Chemically Synthesized
QVQLQESGGGLVQAGGSLRLSCAASGTISTYMGWYRQAPGKEREFVATISDGGNTNYADSVKGRFTISRDNAKNTVYLQMNSLKPEDTAVYYCAVLADVYPLLTYWGQGTQVTVSS

SEQ ID NO: 13655 - protein, 126 aa, Artificial Sequence
  Chemically Synthesized
QVQLQESGGGLVQAGGSLRLSCAASGNISIWEDMGWYRQAPGKEREFVAGINSGTSTYYADSVKGRFTISRDNAKNTVYLQMNSLKPEDTAVYYCAADILSYAWYWRIDYPSFAYWGQGTQVTVSS

SEQ ID NO: 13656 - protein, 117 aa, Artificial Sequence
  Chemically Synthesized
QVQLQESGGGLVQAGGSLRLSCAASGTISQADGMGWYRQAPGKERELVASIDSGGNTNYADSVKGRFTISRDNAKNTVYLQMNSLKPEDTAVYYCAASPARTTVLYWGQGTQVTVSS

SEQ ID NO: 13657 - protein, 125 aa, Artificial Sequence
  Chemically Synthesized
QVQLQESGGGLVQAGGSLRLSCAASGNIFTRDDMGWYRQAPGKERELVASISYGTTTYYADSVKGRFTISRDNAKNTVYLQMNSLKPEDTAVYYCAATLSVYFIHAAYWQRYYYWGQGTQVTVSS

SEQ ID NO: 13658 - protein, 117 aa, Artificial Sequence
  Chemically Synthesized
QVQLQESGGGLVQAGGSLRLSCAASGNISGGYMGWYRQAPGKEREFVAAINLGASTNYADSVKGRFTISRDNAKNTVYLQMNSLKPEDTAVYYCAVPPSSYPTYDYWGQGTQVTVSS

SEQ ID NO: 13659 - protein, 118 aa, Artificial Sequence
  Chemically Synthesized
QVQLQESGGGLVQAGGSLRLSCAASGNISRYLSMGWYRQAPGKERELVAAIGQGAITNYADSVKGRFTISRDNAKNTVYLQMNSLKPEDTAVYYCAAETGHYWVYTYWGQGTQVTVSS

SEQ ID NO: 13660 - protein, 118 aa, Artificial Sequence
  Chemically Synthesized
QVQLQESGGGLVQAGGSLRLSCAASGYISHPAYMGWYRQAPGKERELVASITEGTTTYYADSVKGRFTISRDNAKNTVYLQMNSLKPEDTAVYYCAVHGYYTDNHSYWGQGTQVTVSS

SEQ ID NO: 13661 - protein, 122 aa, Artificial Sequence
  Chemically Synthesized
QVQLQESGGGLVQAGGSLRLSCAASGTIFLDDLMGWYRQAPGKERELVAAIGGGSRYQYADSVKGRFTISRDNAKNTVYLQMNSLKPEDTAVYYCAVNYRHYFYGYDDLTYWGQGTQVTVSS

SEQ ID NO: 13662 - protein, 117 aa, Artificial Sequence
  Chemically Synthesized
QVQLQESGGGLVQAGGSLRLSCAASGYGMGWYRQAPGKERELVATIDTGASTNYADSVKGRFTISRDNAKNTVYLQMNSLKPEDTAVYYCAVGVSLDVTVPTNHYYWGQGTQVTVSS

SEQ ID NO: 13663 - protein, 117 aa, Artificial Sequence
  Chemically Synthesized
QVQLQESGGGLVQAGGSLRLSCAASGTISSIYDMGWYRQAPGKEREFVAGINPGAIPYADSVKGRFTISRDNAKNTVYLQMNSLKPEDTAVYYCAVAYDYQYYHDYWGQGTQVTVSS

SEQ ID NO: 13664 - protein, 118 aa, Artificial Sequence
  Chemically Synthesized
QVQLQESGGGLVQAGGSLRLSCAASGYISYFGDMGWYRQAPGKEREFVAGIGHGSSTNYADSVKGRFTISRDNAKNTVYLQMNSLKPEDTAVYYCAVVYLVVDSHGYWGQGTQVTVSS

SEQ ID NO: 13665 - protein, 118 aa, Artificial Sequence
  Chemically Synthesized
QVQLQESGGGLVQAGGSLRLSCAASGYIFVTDGMGWYRQAPGKEREFVAGISDGTSTNYADSVKGRFTISRDNAKNTVYLQMNSLKPEDTAVYYCAVYSYRYHGFSYWGQGTQVTVSS

SEQ ID NO: 13666 - protein, 122 aa, Artificial Sequence
  Chemically Synthesized
QVQLQESGGGLVQAGGSLRLSCAASGSISDWIIMGWYRQAPGKERELVAAISIGGTTYYADSVKGRFTISRDNAKNTVYLQMNSLKPEDTAVYYCAVNIGGQRTAGGDHAYWGQGTQVTVSS

SEQ ID NO: 13667 - protein, 122 aa, Artificial Sequence
  Chemically Synthesized
QVQLQESGGGLVQAGGSLRLSCAASGYIFYRADMGWYRQAPGKEREFVATIDYGGSTNYADSVKGRFTISRDNAKNTVYLQMNSLKPEDTAVYYCAVPWDYPQTYKGHYDYWGQGTQVTVSS

SEQ ID NO: 13668 - protein, 117 aa, Artificial Sequence
  Chemically Synthesized
QVQLQESGGGLVQAGGSLRLSCAASGSISRTTYMGWYRQAPGKERELVASLLTVLIPYADSVKGRFTISRDNAKNTVYLQMNSLKPEDTAVYYCAAVQSAWHEYLYWGQGTQVTVSS

SEQ ID NO: 13669 - protein, 118 aa, Artificial Sequence
  Chemically Synthesized
QVQLQESGGGLVQAGGSLRLSCAASGYISAWIKMGWYRQAPGKERELVAAIAGGGSTNYADSVKGRFTISRDNAKNTVYLQMNSLKPEDTAVYYCAVGDISYALHAYWGQGTQVTVSS

SEQ ID NO: 13670 - protein, 125 aa, Artificial Sequence
  Chemically Synthesized
QVQLQESGGGLVQAGGSLRLSCAASGTIFDGGNMGWYRQAPGKERELVAGIASVVLPYADSVKGRFTISRDNAKNTVYLQMNSLKPEDTAVYYCAAGTDYDDGDTEPQYGYLEYWGQGTQVTVSS

SEQ ID NO: 13671 - protein, 116 aa, Artificial Sequence
  Chemically Synthesized
QVQLQESGGGLVQAGGSLRLSCAASGTISYGKFMGWYRQAPGKERELVATITNYADSVKGRFTISRDNAKNTVYLQMNSLKPEDTAVYYCAAPYYYYGDYPATLYWGQGTQVTVSS

SEQ ID NO: 13672 - protein, 116 aa, Artificial Sequence
  Chemically Synthesized
QVQLQESGGGLVQAGGSLRLSCAASGTISAMTMGWYRQAPGKERELVAAINTGSITNYADSVKGRFTISRDNAKNTVYLQMNSLKPEDTAVYYCAVVQTSNVVIYWGQGTQVTVSS

SEQ ID NO: 13673 - protein, 125 aa, Artificial Sequence
  Chemically Synthesized
QVQLQESGGGLVQAGGSLRLSCAASGYISRFTMGWYRQAPGKEREFVAAINDGGTTNYADSVKGRFTISRDNAKNTVYLQMNSLKPEDTAVYYCAARATVDYTYGGDSYGSHYYWGQGTQVTVSS

SEQ ID NO: 13674 - protein, 118 aa, Artificial Sequence
  Chemically Synthesized
QVQLQESGGGLVQAGGSLRLSCAASGYISGLSSMGWYRQAPGKERELVATISHGTSTNYADSVKGRFTISRDNAKNTVYLQMNSLKPEDTAVYYCAVGRRDVRDYSYWGQGTQVTVSS

SEQ ID NO: 13675 - protein, 118 aa, Artificial Sequence
  Chemically Synthesized
QVQLQESGGGLVQAGGSLRLSCAASGNIFYDTFMGWYRQAPGKERELVAAISKGASTNYADSVKGRFTISRDNAKNTVYLQMNSLKPEDTAVYYCAARYDKYYPYDYWGQGTQVTVSS

SEQ ID NO: 13676 - protein, 118 aa, Artificial Sequence
  Chemically Synthesized
QVQLQESGGGLVQAGGSLRLSCAASGYISTDSYMGWYRQAPGKERELVASIGLGGSTYYADSVKGRFTISRDNAKNTVYLQMNSLKPEDTAVYYCAAYGNTRDYHQYWGQGTQVTVSS

SEQ ID NO: 13677 - protein, 120 aa, Artificial Sequence
  Chemically Synthesized
QVQLQESGGGLVQAGGSLRLSCAASGNISPLAYMGWYRQAPGKERELVASIDTGTNTNYADSVKGRFTISRDNAKNTVYLQMNSLKPEDTAVYYCAAYIVVADGFAYWYWGQGTQVTVSS

SEQ ID NO: 13678 - protein, 118 aa, Artificial Sequence
  Chemically Synthesized
QVQLQESGGGLVQAGGSLRLSCAASGYIFFPWSMGWYRQAPGKERELVAAIGGGAITNYADSVKGRFTISRDNAKNTVYLQMNSLKPEDTAVYYCAAQRSPGDYLGYWGQGTQVTVSS

SEQ ID NO: 13679 - protein, 114 aa, Artificial Sequence
  Chemically Synthesized
QVQLQESGGGLVQAGGSLRLSCAASGTIFFSEIMGWYRQAPGKERELVASITGGTTTNYADSVKGRFTISRDNAKNTVYLQMNSLKPEDTAVYYCAVGELYGYWGQGTQVTVSS

SEQ ID NO: 13680 - protein, 112 aa, Artificial Sequence
  Chemically Synthesized
QVQLQESGGGLVQAGGSLRLSCAASGYMGWYRQAPGKERELVAAIAYGSNTNYADSVKGRFTISRDNAKNTVYLQMNSLKPEDTAVYYCAADDDKSARHLYWGQGTQVTVSS

SEQ ID NO: 13681 - protein, 122 aa, Artificial Sequence
  Chemically Synthesized
QVQLQESGGGLVQAGGSLRLSCAASGYIFAYHTMGWYRQAPGKERELVAGIAGGGTTNYADSVKGRFTISRDNAKNTVYLQMNSLKPEDTAVYYCAAYPDTYTGQGFYLPYWGQGTQVTVSS

SEQ ID NO: 13682 - protein, 116 aa, Artificial Sequence
  Chemically Synthesized
QVQLQESGGGLVQAGGSLRLSCAASGYISHYLIMGWYRQAPGKERELVAAIGYGAITYYADSVKGRFTISRDNAKNTVYLQMNSLKPEDTAVYYCAVTYQGRLDYWGQGTQVTVSS

SEQ ID NO: 13683 - protein, 114 aa, Artificial Sequence
  Chemically Synthesized
QVQLQESGGGLVQAGGSLRLSCAASGSISSLAVMGWYRQAPGKERELVAAIARGATTNYADSVKGRFTISRDNAKNTVYLQMNSLKPEDTAVYYCAVRYTDEYWGQGTQVTVSS

SEQ ID NO: 13684 - protein, 117 aa, Artificial Sequence
  Chemically Synthesized
QVQLQESGGGLVQAGGSLRLSCAASGNISRFSWMGWYRQAPGKERELVATITPGGITNYADSVKGRFTISRDNAKNTVYLQMNSLKPEDTAVYYCAVPVDDRSTLYWGQGTQVTVSS

SEQ ID NO: 13685 - protein, 121 aa, Artificial Sequence
  Chemically Synthesized
QVQLQESGGGLVQAGGSLRLSCAASGNIFTSTYMGWYRQAPGKERELVATIAQGGNTYYADSVKGRFTISRDNAKNTVYLQMNSLKPEDTAVYYCAVAVERGQSLCCSMYWGQGTQVTVSS

SEQ ID NO: 13686 - protein, 108 aa, Artificial Sequence
  Chemically Synthesized
QVQLQESGGGLVQAGGSLRLSCAASGSICCMGWYRQAPGKEREFVAAIGWGTSTNYADSVKGRFTISRDNAKNTVYLQMNSLKPEDTAVYYCAYLLYWGQGTQVTVSS

SEQ ID NO: 13687 - protein, 125 aa, Artificial Sequence
  Chemically Synthesized
QVQLQESGGGLVQAGGSLRLSCAASGTIFGDQWMGWYRQAPGKERELVAGIDSVLVPYADSVKGRFTISRDNAKNTVYLQMNSLKPEDTAVYYCAVRHADQVRVARITRYTHKYWGQGTQVTVSS

SEQ ID NO: 13688 - protein, 118 aa, Artificial Sequence
  Chemically Synthesized
QVQLQESGGGLVQAGGSLRLSCAASGTISYKWSMGWYRQAPGKEREFVATIDFGGNTYYADSVKGRFTISRDNAKNTVYLQMNSLKPEDTAVYYCAVNIRVNDDLGYWGQGTQVTVSS

SEQ ID NO: 13689 - protein, 122 aa, Artificial Sequence
  Chemically Synthesized
QVQLQESGGGLVQAGGSLRLSCAASGSISHTDIMGWYRQAPGKERELVATIGEGSITYYADSVKGRFTISRDNAKNTVYLQMNSLKPEDTAVYYCAAFAYGTRYVLSWLTYWGQGTQVTVSS

SEQ ID NO: 13690 - protein, 118 aa, Artificial Sequence
  Chemically Synthesized
QVQLQESGGGLVQAGGSLRLSCAASGTISSDYYMGWYRQAPGKEREFVAAIGYGTSTNYADSVKGRFTISRDNAKNTVYLQMNSLKPEDTAVYYCAVWIDAYYSFEYWGQGTQVTVSS

SEQ ID NO: 13691 - protein, 122 aa, Artificial Sequence
  Chemically Synthesized
QVQLQESGGGLVQAGGSLRLSCAASGTISNALYMGWYRQAPGKEREFVAGIDYGAITYYADSVKGRFTISRDNAKNTVYLQMNSLKPEDTAVYYCAAQYYRDDYADDTLKYWGQGTQVTVSS

SEQ ID NO: 13692 - protein, 117 aa, Artificial Sequence
  Chemically Synthesized
QVQLQESGGGLVQAGGSLRLSCAASGYIFHYDDMGWYRQAPGKEREFVATIGVGSTTNYADSVKGRFTISRDNAKNTVYLQMNSLKPEDTAVYYCAVWPFATSVMYWGQGTQVTVSS

SEQ ID NO: 13693 - protein, 118 aa, Artificial Sequence
  Chemically Synthesized
QVQLQESGGGLVQAGGSLRLSCAASGTISGYHYMGWYRQAPGKERELVASISSGGITNYADSVKGRFTISRDNAKNTVYLQMNSLKPEDTAVYYCAAHLYQYPYLQYWGQGTQVTVSS

SEQ ID NO: 13694 - protein, 118 aa, Artificial Sequence
  Chemically Synthesized
QVQLQESGGGLVQAGGSLRLSCAASGYISDHGPMGWYRQAPGKEREFVATIGPGSSTYYADSVKGRFTISRDNAKNTVYLQMNSLKPEDTAVYYCAVYDYRAWYLYYWGQGTQVTVSS

SEQ ID NO: 13695 - protein, 118 aa, Artificial Sequence
  Chemically Synthesized
QVQLQESGGGLVQAGGSLRLSCAASGNIFYPFIMGWYRQAPGKERELVATIGYGGTTYYADSVKGRFTISRDNAKNTVYLQMNSLKPEDTAVYYCAVPYTTISYHVYWGQGTQVTVSS

SEQ ID NO: 13696 - protein, 115 aa, Artificial Sequence
  Chemically Synthesized
QVQLQESGGGLVQAGGSLRLSCAASGSISDNGDMGWYRQAPGKERELVASITVGSNTYYADSVKGRFTISRDNAKNTVYLQMNSLKPEDTAVYYCAAVTLVFYYWGQGTQVTVSS

SEQ ID NO: 13697 - protein, 126 aa, Artificial Sequence
  Chemically Synthesized
QVQLQESGGGLVQAGGSLRLSCAASGYISSNSYMGWYRQAPGKEREFVAAISSGTNTYYADSVKGRFTISRDNAKNTVYLQMNSLKPEDTAVYYCAAEGGWYPDGYASAGKVHPYWGQGTQVTVSS

SEQ ID NO: 13698 - protein, 117 aa, Artificial Sequence
  Chemically Synthesized
QVQLQESGGGLVQAGGSLRLSCAASGSIFGGSMGWYRQAPGKEREFVATIGLGTSTYYADSVKGRFTISRDNAKNTVYLQMNSLKPEDTAVYYCAAREDGDGGYYYWGQGTQVTVSS

SEQ ID NO: 13699 - protein, 118 aa, Artificial Sequence
  Chemically Synthesized
QVQLQESGGGLVQAGGSLRLSCAASGNIFDSLAMGWYRQAPGKEREFVATIGPGAITYYADSVKGRFTISRDNAKNTVYLQMNSLKPEDTAVYYCAALSWSRRGLYYWGQGTQVTVSS

SEQ ID NO: 13700 - protein, 126 aa, Artificial Sequence
  Chemically Synthesized
QVQLQESGGGLVQAGGSLRLSCAASGTIFDRSIMGWYRQAPGKERELVATITYGTNTNYADSVKGRFTISRDNAKNTVYLQMNSLKPEDTAVYYCAVYAWRRNGGGAYYYRRFWYWGQGTQVTVSS

SEQ ID NO: 13701 - protein, 122 aa, Artificial Sequence
  Chemically Synthesized
QVQLQESGGGLVQAGGSLRLSCAASGNISPLYFMGWYRQAPGKEREFVASIDPGASTYYADSVKGRFTISRDNAKNTVYLQMNSLKPEDTAVYYCAVELDSKYSYYWWHTYWGQGTQVTVSS

SEQ ID NO: 13702 - protein, 117 aa, Artificial Sequence
  Chemically Synthesized
QVQLQESGGGLVQAGGSLRLSCAASGTISLWSGMGWYRQAPGKEREFVASIDQGGITYADSVKGRFTISRDNAKNTVYLQMNSLKPEDTAVYYCAAYWDVSDGHRYWGQGTQVTVSS

SEQ ID NO: 13703 - protein, 118 aa, Artificial Sequence
  Chemically Synthesized
QVQLQESGGGLVQAGGSLRLSCAASGNISGLRLMGWYRQAPGKERELVAAISYGGNTYYADSVKGRFTISRDNAKNTVYLQMNSLKPEDTAVYYCAAFDFRGRVFVYWGQGTQVTVSS

SEQ ID NO: 13704 - protein, 123 aa, Artificial Sequence
  Chemically Synthesized
QVQLQESGGGLVQAGGSLRLSCAASGTISPNTGMGWYRQAPGKERELVAAIAGGGNTNYADSVKGRFTISRDNAKNTVYLQMNSLKPEDTAVYYCAVVFPDKGAYDVSVHQYWGQGTQVTVSS

SEQ ID NO: 13705 - protein, 117 aa, Artificial Sequence
  Chemically Synthesized
QVQLQESGGGLVQAGGSLRLSCAASGSISDTQGMGWYRQAPGKEREFVASITKGANTYYADSVKGRFTISRDNAKNTVYLQMNSLKPEDTAVYYCAARGPSYSTFYWGQGTQVTVSS

SEQ ID NO: 13706 - protein, 122 aa, Artificial Sequence
  Chemically Synthesized
QVQLQESGGGLVQAGGSLRLSCAASGTIFQSGVMGWYRQAPGKEREFVAAISYGGNTYYADSVKGRFTISRDNAKNTVYLQMNSLKPEDTAVYYCAVPLDQINPIYWDYYYWGQGTQVTVSS

SEQ ID NO: 13707 - protein, 118 aa, Artificial Sequence
  Chemically Synthesized
QVQLQESGGGLVQAGGSLRLSCAASGYISSIDFMGWYRQAPGKERELVAGIAEGANTYYADSVKGRFTISRDNAKNTVYLQMNSLKPEDTAVYYCAVWSGVSYALEYWGQGTQVTVSS

SEQ ID NO: 13708 - protein, 117 aa, Artificial Sequence
  Chemically Synthesized
QVQLQESGGGLVQAGGSLRLSCAASGSIFTAVLMGWYRQAPGKEREFVASIGIVLVPYADSVKGRFTISRDNAKNTVYLQMNSLKPEDTAVYYCAAATRNVVDHYYWGQGTQVTVSS

SEQ ID NO: 13709 - protein, 118 aa, Artificial Sequence
  Chemically Synthesized
QVQLQESGGGLVQAGGSLRLSCAASGSIFSRYYMGWYRQAPGKEREFVASINYGSTTYYADSVKGRFTISRDNAKNTVYLQMNSLKPEDTAVYYCAADDARDTLLWYWGQGTQVTVSS

SEQ ID NO: 13710 - protein, 121 aa, Artificial Sequence
  Chemically Synthesized
QVQLQESGGGLVQAGGSLRLSCAASGSIFYTQVMGWYRQAPGKERELVAAIGDGGSTNYADSVKGRFTISRDNAKNTVYLQMNSLKPEDTAVYYCAVGSLDSTTWTRTMYWGQGTQVTVSS

SEQ ID NO: 13711 - protein, 117 aa, Artificial Sequence
  Chemically Synthesized
QVQLQESGGGLVQAGGSLRLSCAASGSISQYAYMGWYRQAPGKERELVATISDVLVPYADSVKGRFTISRDNAKNTVYLQMNSLKPEDTAVYYCAVFRTYVGGYRYWGQGTQVTVSS

SEQ ID NO: 13712 - protein, 118 aa, Artificial Sequence
  Chemically Synthesized
QVQLQESGGGLVQAGGSLRLSCAASGTIFDVEYMGWYRQAPGKEREFVAAISFGAITYYADSVKGRFTISRDNAKNTVYLQMNSLKPEDTAVYYCAAYPDYRDTFDYWGQGTQVTVSS

SEQ ID NO: 13713 - protein, 122 aa, Artificial Sequence
  Chemically Synthesized
QVQLQESGGGLVQAGGSLRLSCAASGYISYYDNMGWYRQAPGKERELVAAIAGGGSTNYADSVKGRFTISRDNAKNTVYLQMNSLKPEDTAVYYCAVVLPTRSPDGNGLPYWGQGTQVTVSS

SEQ ID NO: 13714 - protein, 117 aa, Artificial Sequence
  Chemically Synthesized
QVQLQESGGGLVQAGGSLRLSCAASGTIFYQYYMGWYRQAPGKERELVATITGGANTNYADSVKGRFTISRDNAKNTVYLQMNSLKPEDTAVYYCAASLCTLTLFYWGQGTQVTVSS

SEQ ID NO: 13715 - protein, 120 aa, Artificial Sequence
  Chemically Synthesized
QVQLQESGGGLVQAGGSLRLSCAASGYISGWRMGWYRQAPGKEREFVAAIGGGATTNYADSVKGRFTISRDNAKNTVYLQMNSLKPEDTAVYYCAVILLLTCRTLGRFYWGQGTQVTVSS

SEQ ID NO: 13716 - protein, 117 aa, Artificial Sequence
  Chemically Synthesized
QVQLQESGGGLVQAGGSLRLSCAASGTISYLNMGWYRQAPGKERELVATIDDGSNTNYADSVKGRFTISRDNAKNTVYLQMNSLKPEDTAVYYCAAYRYGQYYFDYWGQGTQVTVSS

SEQ ID NO: 13717 - protein, 126 aa, Artificial Sequence
  Chemically Synthesized
QVQLQESGGGLVQAGGSLRLSCAASGNIFSLQYMGWYRQAPGKERELVATIGPGTTTNYADSVKGRFTISRDNAKNTVYLQMNSLKPEDTAVYYCAVAIDASRIYRTYGHADYSYWGQGTQVTVSS

SEQ ID NO: 13718 - protein, 122 aa, Artificial Sequence
  Chemically Synthesized
QVQLQESGGGLVQAGGSLRLSCAASGYIFDYDDMGWYRQAPGKEREFVATIARGTNTNYADSVKGRFTISRDNAKNTVYLQMNSLKPEDTAVYYCAAETAHVGHFSAYHPYWGQGTQVTVSS

SEQ ID NO: 13719 - protein, 118 aa, Artificial Sequence
  Chemically Synthesized
QVQLQESGGGLVQAGGSLRLSCAASGYISDPYYMGWYRQAPGKEREFVATIAYGSTTNYADSVKGRFTISRDNAKNTVYLQMNSLKPEDTAVYYCAVTYLGIDDYQYWGQGTQVTVSS

SEQ ID NO: 13720 - protein, 116 aa, Artificial Sequence
  Chemically Synthesized
QVQLQESGGGLVQAGGSLRLSCAASGTISDYDVMGWYRQAPGKERELVAAIAQGAITYYADSVKGRFTISRDNAKNTVYLQMNSLKPEDTAVYYCAVVDPQYHIYWGQGTQVTVSS

SEQ ID NO: 13721 - protein, 118 aa, Artificial Sequence
  Chemically Synthesized
QVQLQESGGGLVQAGGSLRLSCAASGTIFTHSYMGWYRQAPGKERELVASITTGSNTYYADSVKGRFTISRDNAKNTVYLQMNSLKPEDTAVYYCAVDVAVRWLFYYWGQGTQVTVSS

SEQ ID NO: 13722 - protein, 117 aa, Artificial Sequence
  Chemically Synthesized
QVQLQESGGGLVQAGGSLRLSCAASGYIFTSTFMGWYRQAPGKEREFVATIADGGTTNYADSVKGRFTISRDNAKNTVYLQMNSLKPEDTAVYYCAVDNGERISYYWGQGTQVTVSS

SEQ ID NO: 13723 - protein, 126 aa, Artificial Sequence
  Chemically Synthesized
QVQLQESGGGLVQAGGSLRLSCAASGNISPSFDMGWYRQAPGKERELVATIAGGASTYYADSVKGRFTISRDNAKNTVYLQMNSLKPEDTAVYYCAATYVEFRPYYADTFVAHQYWGQGTQVTVSS

SEQ ID NO: 13724 - protein, 118 aa, Artificial Sequence
  Chemically Synthesized
QVQLQESGGGLVQAGGSLRLSCAASGSISNGYYMGWYRQAPGKERELVAAIDRGATTNYADSVKGRFTISRDNAKNTVYLQMNSLKPEDTAVYYCAAYVFATYSFQYWGQGTQVTVSS

SEQ ID NO: 13725 - protein, 126 aa, Artificial Sequence
  Chemically Synthesized
QVQLQESGGGLVQAGGSLRLSCAASGNISSGDDMGWYRQAPGKERELVATINYGASTYYADSVKGRFTISRDNAKNTVYLQMNSLKPEDTAVYYCAATVRLFDPLRDDVGYGLDYWGQGTQVTVSS

SEQ ID NO: 13726 - protein, 118 aa, Artificial Sequence
  Chemically Synthesized
QVQLQESGGGLVQAGGSLRLSCAASGNIFRSLGMGWYRQAPGKERELVAAITAGGNTYYADSVKGRFTISRDNAKNTVYLQMNSLKPEDTAVYYCAVADNVLNGFRYWGQGTQVTVSS

SEQ ID NO: 13727 - protein, 117 aa, Artificial Sequence
  Chemically Synthesized
QVQLQESGGGLVQAGGSLRLSCAASGTIFYSFMGWYRQAPGKEREFVATIDDGANTYYADSVKGRFTISRDNAKNTVYLQMNSLKPEDTAVYYCAVAIGGVLSLVYWGQGTQVTVSS

SEQ ID NO: 13728 - protein, 125 aa, Artificial Sequence
  Chemically Synthesized
QVQLQESGGGLVQAGGSLRLSCAASGNISGVRMGWYRQAPGKEREFVAGIGYGSSTNYADSVKGRFTISRDNAKNTVYLQMNSLKPEDTAVYYCAAVTPYSDTYGQFLYSDHRYWGQGTQVTVSS

SEQ ID NO: 13729 - protein, 124 aa, Artificial Sequence
  Chemically Synthesized
QVQLQESGGGLVQAGGSLRLSCAASGNISHPRYMGWYRQAPGKEREFVATIDSGTNYADSVKGRFTISRDNAKNTVYLQMNSLKPEDTAVYYCAADDHYDYYLTLGGLNTHYYWGQGTQVTVSS

SEQ ID NO: 13730 - protein, 118 aa, Artificial Sequence
  Chemically Synthesized
QVQLQESGGGLVQAGGSLRLSCAASGNISSYVYMGWYRQAPGKERELVASINPGAITNYADSVKGRFTISRDNAKNTVYLQMNSLKPEDTAVYYCAVYDGNWSYHYYWGQGTQVTVSS

SEQ ID NO: 13731 - protein, 117 aa, Artificial Sequence
  Chemically Synthesized
QVQLQESGGGLVQAGGSLRLSCAASGNISVLYDMGWYRQAPGKERELVALVSVLLPYADSVKGRFTISRDNAKNTVYLQMNSLKPEDTAVYYCAAYQGYDYDSHKYWGQGTQVTVSS

SEQ ID NO: 13732 - protein, 118 aa, Artificial Sequence
  Chemically Synthesized
QVQLQESGGGLVQAGGSLRLSCAASGSIFYAFYMGWYRQAPGKERELVASITQGSNTYYADSVKGRFTISRDNAKNTVYLQMNSLKPEDTAVYYCAVLTGDVSTLPYWGQGTQVTVSS

SEQ ID NO: 13733 - protein, 122 aa, Artificial Sequence
  Chemically Synthesized
QVQLQESGGGLVQAGGSLRLSCAASGYIFWSAYMGWYRQAPGKEREFVASITLGTSTYYADSVKGRFTISRDNAKNTVYLQMNSLKPEDTAVYYCAASSKTGLYDIAQFEYWGQGTQVTVSS

SEQ ID NO: 13734 - protein, 118 aa, Artificial Sequence
  Chemically Synthesized
QVQLQESGGGLVQAGGSLRLSCAASGNIFYYVTMGWYRQAPGKEREFVAAIGSGSITNYADSVKGRFTISRDNAKNTVYLQMNSLKPEDTAVYYCAVWGIAYYVYGYWGQGTQVTVSS

SEQ ID NO: 13735 - protein, 118 aa, Artificial Sequence
  Chemically Synthesized
QVQLQESGGGLVQAGGSLRLSCAASGYISGITDMGWYRQAPGKEREFVAGIGGGSSTYYADSVKGRFTISRDNAKNTVYLQMNSLKPEDTAVYYCAADRTSGLTLDYWGQGTQVTVSS

SEQ ID NO: 13736 - protein, 111 aa, Artificial Sequence
  Chemically Synthesized
QVQLQESGGGLVQAGGSLRLSCAASGTISNNVRMGWYRQAPGKEREFVAGINGGTNTYYADSVKGRFTISRDNAKNTVYLQMNSLKPEDTAVYYCAAPYYWGQGTQVTVSS

SEQ ID NO: 13737 - protein, 118 aa, Artificial Sequence
  Chemically Synthesized
QVQLQESGGGLVQAGGSLRLSCAASGSIFITYRMGWYRQAPGKERELVATIDIGASTNYADSVKGRFTISRDNAKNTVYLQMNSLKPEDTAVYYCAVVANSQSGYDYWGQGTQVTVSS

SEQ ID NO: 13738 - protein, 117 aa, Artificial Sequence
  Chemically Synthesized
QVQLQESGGGLVQAGGSLRLSCAASGNIMGWYRQAPGKERELVATISTGGTTNYADSVKGRFTISRDNAKNTVYLQMNSLKPEDTAVYYCAAGAATQYYGYIDLYYWGQGTQVTVSS

SEQ ID NO: 13739 - protein, 117 aa, Artificial Sequence
  Chemically Synthesized
QVQLQESGGGLVQAGGSLRLSCAASGNIFRYGVMGWYRQAPGKEREFVPVLMTVLLPYADSVKGRFTISRDNAKNTVYLQMNSLKPEDTAVYYCAADYASNVGYDYWGQGTQVTVSS

SEQ ID NO: 13740 - protein, 122 aa, Artificial Sequence
  Chemically Synthesized
QVQLQESGGGLVQAGGSLRLSCAASGNIFDSIVMGWYRQAPGKERELVASISQGGNTNYADSVKGRFTISRDNAKNTVYLQMNSLKPEDTAVYYCAVSSRGFGGYATYHTYWGQGTQVTVSS

SEQ ID NO: 13741 - protein, 118 aa, Artificial Sequence
  Chemically Synthesized
QVQLQESGGGLVQAGGSLRLSCAASGTIFHYAGMGWYRQAPGKEREFVAGIAYGTITNYADSVKGRFTISRDNAKNTVYLQMNSLKPEDTAVYYCAVDRYRYSFHDYWGQGTQVTVSS

SEQ ID NO: 13742 - protein, 118 aa, Artificial Sequence
  Chemically Synthesized
QVQLQESGGGLVQAGGSLRLSCAASGSISGNYRMGWYRQAPGKERELVAAITDGGNTNYADSVKGRFTISRDNAKNTVYLQMNSLKPEDTAVYYCAVWTAYGYPFVYWGQGTQVTVSS

SEQ ID NO: 13743 - protein, 110 aa, Artificial Sequence
  Chemically Synthesized
QVQLQESGGGLVQAGGSLRLSCAASGNIFADAYMGWYRQAPGKERELVAGIDTGGITYYADSVKGRFTISRDNAKNTVYLQMNSLKPEDTAVYYCAACYWGQGTQVTVSS

SEQ ID NO: 13744 - protein, 118 aa, Artificial Sequence
  Chemically Synthesized
QVQLQESGGGLVQAGGSLRLSCAASGSIFTDLKMGWYRQAPGKEREFVAAIAGGAITYYADSVKGRFTISRDNAKNTVYLQMNSLKPEDTAVYYCAAAVYPPVPFYYWGQGTQVTVSS

SEQ ID NO: 13745 - protein, 118 aa, Artificial Sequence
  Chemically Synthesized
QVQLQESGGGLVQAGGSLRLSCAASGYISFSRYMGWYRQAPGKERELVASIDIGGITNYADSVKGRFTISRDNAKNTVYLQMNSLKPEDTAVYYCAVVSFVAYELTYWGQGTQVTVSS

SEQ ID NO: 13746 - protein, 118 aa, Artificial Sequence
  Chemically Synthesized
QVQLQESGGGLVQAGGSLRLSCAASGSISDRADMGWYRQAPGKEREFVASIGYGGSTNYADSVKGRFTISRDNAKNTVYLQMNSLKPEDTAVYYCAVLVGEWYFHYYWGQGTQVTVSS

SEQ ID NO: 13747 - protein, 118 aa, Artificial Sequence
  Chemically Synthesized
QVQLQESGGGLVQAGGSLRLSCAASGYIFVYRGMGWYRQAPGKEREFVAAINRGANTYYADSVKGRFTISRDNAKNTVYLQMNSLKPEDTAVYYCAVYQQSNAYFYYWGQGTQVTVSS

SEQ ID NO: 13748 - protein, 126 aa, Artificial Sequence
  Chemically Synthesized
QVQLQESGGGLVQAGGSLRLSCAASGNISASGVMGWYRQAPGKERELVAAIDNGTITNYADSVKGRFTISRDNAKNTVYLQMNSLKPEDTAVYYCAVSYSLDGKRLSPSEKWYGYWGQGTQVTVSS

SEQ ID NO: 13749 - protein, 126 aa, Artificial Sequence
  Chemically Synthesized
QVQLQESGGGLVQAGGSLRLSCAASGTISDGYLMGWYRQAPGKEREFVASIDGGGNTYYADSVKGRFTISRDNAKNTVYLQMNSLKPEDTAVYYCAVQRAGDSPAGDDPGGRYGYWGQGTQVTVSS

SEQ ID NO: 13750 - protein, 121 aa, Artificial Sequence
  Chemically Synthesized
QVQLQESGGGLVQAGGSLRLSCAASGSIFPYDMGWYRQAPGKEREFVATINRGTITNYADSVKGRFTISRDNAKNTVYLQMNSLKPEDTAVYYCAANNPDSEQGSIWFGYWGQGTQVTVSS

SEQ ID NO: 13751 - protein, 125 aa, Artificial Sequence
  Chemically Synthesized
QVQLQESGGGLVQAGGSLRLSCAASGNISNRGYMGWYRQAPGKEREFVAGITYGGTTYYADSVKGRFTISRDNAKNTVYLQMNSLKPEDTAVYYCAVIRVTTFRLRFGTLLTMYWGQGTQVTVSS

SEQ ID NO: 13752 - protein, 116 aa, Artificial Sequence
  Chemically Synthesized
QVQLQESGGGLVQAGGSLRLSCAASGYISYGLYMGWYRQAPGKERELVATITTGGITNYADSVKGRFTISRDNAKNTVYLQMNSLKPEDTAVYYCAVNWVALRSYWGQGTQVTVSS

SEQ ID NO: 13753 - protein, 120 aa, Artificial Sequence
  Chemically Synthesized
QVQLQESGGGLVQAGGSLRLSCAASGSIFPRLFMGWYRQAPGKEREFVAAMTVLVPYADSVKGRFTISRDNAKNTVYLQMNSLKPEDTAVYYCAVEPRWFSYVSAALAYWGQGTQVTVSS

SEQ ID NO: 13754 - protein, 118 aa, Artificial Sequence
  Chemically Synthesized
QVQLQESGGGLVQAGGSLRLSCAASGSISHTQYMGWYRQAPGKERELVAGIDYGSTTNYADSVKGRFTISRDNAKNTVYLQMNSLKPEDTAVYYCAVVVGAGGYLAYWGQGTQVTVSS

SEQ ID NO: 13755 - protein, 118 aa, Artificial Sequence
  Chemically Synthesized
QVQLQESGGGLVQAGGSLRLSCAASGNIFSHEYMGWYRQAPGKEREFVATIDGGGSTYYADSVKGRFTISRDNAKNTVYLQMNSLKPEDTAVYYCAVDYLPELDFIYWGQGTQVTVSS

SEQ ID NO: 13756 - protein, 109 aa, Artificial Sequence
  Chemically Synthesized
QVQLQESGGGLVQAGGSLRLSCAASGTISDPSDMGWYRQAPGKEREFVASIARGEYYQYADSVKGRFTISRDNAKNTVYLQMNSLKPEDTAVYYCAVYWGQGTQVTVSS

SEQ ID NO: 13757 - protein, 111 aa, Artificial Sequence
  Chemically Synthesized
QVQLQESGGGLVQAGGSLRLSCAASGSISDTHAMGWYRQAPGKEREFVVLPYADSVKGRFTISRDNAKNTVYLQMNSLKPEDTAVYYCAARDNYDERLNYWGQGTQVTVSS

SEQ ID NO: 13758 - protein, 118 aa, Artificial Sequence
  Chemically Synthesized
QVQLQESGGGLVQAGGSLRLSCAASGTISGPSYMGWYRQAPGKEREFVAAINGGSTTNYADSVKGRFTISRDNAKNTVYLQMNSLKPEDTAVYYCAVVYVNDPYLQYWGQGTQVTVSS

SEQ ID NO: 13759 - protein, 118 aa, Artificial Sequence
  Chemically Synthesized
QVQLQESGGGLVQAGGSLRLSCAASGSISKRDIMGWYRQAPGKERELVAAIAFGGNTYYADSVKGRFTISRDNAKNTVYLQMNSLKPEDTAVYYCAAVLYGDVYLQYWGQGTQVTVSS

SEQ ID NO: 13760 - protein, 118 aa, Artificial Sequence
  Chemically Synthesized
QVQLQESGGGLVQAGGSLRLSCAASGTISYPGYMGWYRQAPGKEREFVAAIAGGASTYYADSVKGRFTISRDNAKNTVYLQMNSLKPEDTAVYYCAAVLYGDVYLQYWGQGTQVTVSS

SEQ ID NO: 13761 - protein, 118 aa, Artificial Sequence
  Chemically Synthesized
QVQLQESGGGLVQAGGSLRLSCAASGTISGPSYMGWYRQAPGKEREFVAAINGGSTTNYADSVKGRFTISRDNAKNTVYLQMNSLKPEDTAVYYCAAETFKDEYHDYWGQGTQVTVSS

SEQ ID NO: 13762 - protein, 118 aa, Artificial Sequence
  Chemically Synthesized
QVQLQESGGGLVQAGGSLRLSCAASGTISGPSYMGWYRQAPGKEREFVAAINGGSTTNYADSVKGRFTISRDNAKNTVYLQMNSLKPEDTAVYYCAAILKDQYYHQYWGQGTQVTVSS

SEQ ID NO: 13763 - protein, 118 aa, Artificial Sequence
  Chemically Synthesized
QVQLQESGGGLVQAGGSLRLSCAASGTISGPSYMGWYRQAPGKEREFVAAINGGSTTNYADSVKGRFTISRDNAKNTVYLQMNSLKPEDTAVYYCAATPYQDGYLEYWGQGTQVTVSS

SEQ ID NO: 13764 - protein, 118 aa, Artificial Sequence
  Chemically Synthesized
QVQLQESGGGLVQAGGSLRLSCAASGSISKRDIMGWYRQAPGKERELVAAIAFGGNTYYADSVKGRFTISRDNAKNTVYLQMNSLKPEDTAVYYCAAETFKDEYHDYWGQGTQVTVSS

SEQ ID NO: 13765 - protein, 118 aa, Artificial Sequence
  Chemically Synthesized
QVQLQESGGGLVQAGGSLRLSCAASGTISYPGYMGWYRQAPGKEREFVAAIAGGASTYYADSVKGRFTISRDNAKNTVYLQMNSLKPEDTAVYYCAVVYVNDPYLQYWGQGTQVTVSS

SEQ ID NO: 13766 - protein, 118 aa, Artificial Sequence
  Chemically Synthesized
QVQLQESGGGLVQAGGSLRLSCAASGYISEVPVMGWYRQAPGKEREFVAGIAYGANTNYADSVKGRFTISRDNAKNTVYLQMNSLKPEDTAVYYCAAVLYGDVYLQYWGQGTQVTVSS

SEQ ID NO: 13767 - protein, 118 aa, Artificial Sequence
  Chemically Synthesized
QVQLQESGGGLVQAGGSLRLSCAASGTISGALFMGWYRQAPGKERELVAAIDYGSITYYADSVKGRFTISRDNAKNTVYLQMNSLKPEDTAVYYCAAVLYGDVYLQYWGQGTQVTVSS

SEQ ID NO: 13768 - protein, 118 aa, Artificial Sequence
  Chemically Synthesized
QVQLQESGGGLVQAGGSLRLSCAASGSISKRDIMGWYRQAPGKERELVAAIAFGGNTYYADSVKGRFTISRDNAKNTVYLQMNSLKPEDTAVYYCAATPYQDGYLEYWGQGTQVTVSS

SEQ ID NO: 13769 - protein, 118 aa, Artificial Sequence
  Chemically Synthesized
QVQLQESGGGLVQAGGSLRLSCAASGTISGPSYMGWYRQAPGKERELVAAIAFGGNTYYADSVKGRFTISRDNAKNTVYLQMNSLKPEDTAVYYCAVVYVNDPYLQYWGQGTQVTVSS

SEQ ID NO: 13770 - protein, 118 aa, Artificial Sequence
  Chemically Synthesized
QVQLQESGGGLVQAGGSLRLSCAASGSISKRDIMGWYRQAPGKERELVAAIAFGGNTYYADSVKGRFTISRDNAKNTVYLQMNSLKPEDTAVYYCAAILKDQYYHQYWGQGTQVTVSS

SEQ ID NO: 13771 - protein, 118 aa, Artificial Sequence
  Chemically Synthesized
QVQLQESGGGLVQAGGSLRLSCAASGSISKRDIMGWYRQAPGKEREFVAAINGGSTTNYADSVKGRFTISRDNAKNTVYLQMNSLKPEDTAVYYCAAVLYGDVYLQYWGQGTQVTVSS

SEQ ID NO: 13772 - protein, 118 aa, Artificial Sequence
  Chemically Synthesized
QVQLQESGGGLVQAGGSLRLSCAASGYISEVPVMGWYRQAPGKEREFVAGIAYGANTNYADSVKGRFTISRDNAKNTVYLQMNSLKPEDTAVYYCAVVYVNDPYLQYWGQGTQVTVSS

SEQ ID NO: 13773 - protein, 118 aa, Artificial Sequence
  Chemically Synthesized
QVQLQESGGGLVQAGGSLRLSCAASGTISGALFMGWYRQAPGKERELVAAIDYGSITYYADSVKGRFTISRDNAKNTVYLQMNSLKPEDTAVYYCAVVYVNDPYLQYWGQGTQVTVSS

SEQ ID NO: 13774 - protein, 118 aa, Artificial Sequence
  Chemically Synthesized
QVQLQESGGGLVQAGGSLRLSCAASGTISGPSYMGWYRQAPGKEREFVAAIAGGASTYYADSVKGRFTISRDNAKNTVYLQMNSLKPEDTAVYYCAAETFKDEYHDYWGQGTQVTVSS

SEQ ID NO: 13775 - protein, 118 aa, Artificial Sequence
  Chemically Synthesized
QVQLQESGGGLVQAGGSLRLSCAASGTISYPGYMGWYRQAPGKEREFVAAINGGSTTNYADSVKGRFTISRDNAKNTVYLQMNSLKPEDTAVYYCAAVLYGDVYLQYWGQGTQVTVSS

SEQ ID NO: 13776 - protein, 118 aa, Artificial Sequence
  Chemically Synthesized
QVQLQESGGGLVQAGGSLRLSCAASGTISYPGYMGWYRQAPGKEREFVAAIAGGASTYYADSVKGRFTISRDNAKNTVYLQMNSLKPEDTAVYYCAAILKDQYYHQYWGQGTQVTVSS

SEQ ID NO: 13777 - protein, 118 aa, Artificial Sequence
  Chemically Synthesized
QVQLQESGGGLVQAGGSLRLSCAASGTISGALFMGWYRQAPGKERELVAAIDYGSITYYADSVKGRFTISRDNAKNTVYLQMNSLKPEDTAVYYCAAETFKDEYHDYWGQGTQVTVSS

SEQ ID NO: 13778 - protein, 118 aa, Artificial Sequence
  Chemically Synthesized
QVQLQESGGGLVQAGGSLRLSCAASGYISEVPVMGWYRQAPGKEREFVAGIAYGANTNYADSVKGRFTISRDNAKNTVYLQMNSLKPEDTAVYYCAAETFKDEYHDYWGQGTQVTVSS

SEQ ID NO: 13779 - protein, 118 aa, Artificial Sequence
  Chemically Synthesized
QVQLQESGGGLVQAGGSLRLSCAASGTISYPGYMGWYRQAPGKEREFVAAIAGGASTYYADSVKGRFTISRDNAKNTVYLQMNSLKPEDTAVYYCAATPYQDGYLEYWGQGTQVTVSS

SEQ ID NO: 13780 - protein, 118 aa, Artificial Sequence
  Chemically Synthesized
QVQLQESGGGLVQAGGSLRLSCAASGTISGPSYMGWYRQAPGKEREFVAGIAYGANTNYADSVKGRFTISRDNAKNTVYLQMNSLKPEDTAVYYCAAILKDQYYHQYWGQGTQVTVSS

SEQ ID NO: 13781 - protein, 118 aa, Artificial Sequence
  Chemically Synthesized
QVQLQESGGGLVQAGGSLRLSCAASGTISGALFMGWYRQAPGKERELVAAIDYGSITYYADSVKGRFTISRDNAKNTVYLQMNSLKPEDTAVYYCAAILKDQYYHQYWGQGTQVTVSS

SEQ ID NO: 13782 - protein, 118 aa, Artificial Sequence
  Chemically Synthesized
QVQLQESGGGLVQAGGSLRLSCAASGTISGALFMGWYRQAPGKERELVAAIAFGGNTYYADSVKGRFTISRDNAKNTVYLQMNSLKPEDTAVYYCAVVYVNDPYLQYWGQGTQVTVSS

SEQ ID NO: 13783 - protein, 118 aa, Artificial Sequence
  Chemically Synthesized
QVQLQESGGGLVQAGGSLRLSCAASGTISYPGYMGWYRQAPGKERELVAAIAFGGNTYYADSVKGRFTISRDNAKNTVYLQMNSLKPEDTAVYYCAVVYVNDPYLQYWGQGTQVTVSS

SEQ ID NO: 13784 - protein, 118 aa, Artificial Sequence
  Chemically Synthesized
QVQLQESGGGLVQAGGSLRLSCAASGTISGALFMGWYRQAPGKEREFVAAINGGSTTNYADSVKGRFTISRDNAKNTVYLQMNSLKPEDTAVYYCAAVLYGDVYLQYWGQGTQVTVSS

SEQ ID NO: 13785 - protein, 118 aa, Artificial Sequence
  Chemically Synthesized
QVQLQESGGGLVQAGGSLRLSCAASGYISEVPVMGWYRQAPGKEREFVAAINGGSTTNYADSVKGRFTISRDNAKNTVYLQMNSLKPEDTAVYYCAAVLYGDVYLQYWGQGTQVTVSS

SEQ ID NO: 13786 - protein, 118 aa, Artificial Sequence
  Chemically Synthesized
QVQLQESGGGLVQAGGSLRLSCAASGTISGPSYMGWYRQAPGKERELVAAIDYGSITYYADSVKGRFTISRDNAKNTVYLQMNSLKPEDTAVYYCAATPYQDGYLEYWGQGTQVTVSS

SEQ ID NO: 13787 - protein, 118 aa, Artificial Sequence
  Chemically Synthesized
QVQLQESGGGLVQAGGSLRLSCAASGSISKRDIMGWYRQAPGKERELVAAIDYGSITYYADSVKGRFTISRDNAKNTVYLQMNSLKPEDTAVYYCAATPYQDGYLEYWGQGTQVTVSS

SEQ ID NO: 13788 - protein, 118 aa, Artificial Sequence
  Chemically Synthesized
QVQLQESGGGLVQAGGSLRLSCAASGSISKRDIMGWYRQAPGKEREFVAGIAYGANTNYADSVKGRFTISRDNAKNTVYLQMNSLKPEDTAVYYCAAILKDQYYHQYWGQGTQVTVSS

SEQ ID NO: 13789 - protein, 118 aa, Artificial Sequence
  Chemically Synthesized
QVQLQESGGGLVQAGGSLRLSCAASGTIFRYYSMGWYRQAPGKERELVASIGIGSTTYYADSVKGRFTISRDNAKNTVYLQMNSLKPEDTAVYYCAAFNNSSPALFYWGQGTQVTVSS

SEQ ID NO: 13790 - protein, 118 aa, Artificial Sequence
  Chemically Synthesized
QVQLQESGGGLVQAGGSLRLSCAASGYISEVPVMGWYRQAPGKERELVAAIAFGGNTYYADSVKGRFTISRDNAKNTVYLQMNSLKPEDTAVYYCAVVYVNDPYLQYWGQGTQVTVSS

SEQ ID NO: 13791 - protein, 118 aa, Artificial Sequence
  Chemically Synthesized
QVQLQESGGGLVQAGGSLRLSCAASGSISKRDIMGWYRQAPGKERELVAAIAFGGNTYYADSVKGRFTISRDNAKNTVYLQMNSLKPEDTAVYYCAVYYANDAVHVYWGQGTQVTVSS

SEQ ID NO: 13792 - protein, 118 aa, Artificial Sequence
  Chemically Synthesized
QVQLQESGGGLVQAGGSLRLSCAASGSISKRDIMGWYRQAPGKERELVAAINGGSTTNYADSVKGRFTISRDNAKNTVYLQMNSLKPEDTAVYYCAAVLYGDVYLQYWGQGTQVTVSS

SEQ ID NO: 13793 - protein, 122 aa, Artificial Sequence
  Chemically Synthesized
QVQLQESGGGLVQAGGSLRLSCAASGTISGPSYMGWYRQAPGKEREFVAAINGGSTTNYADSVKGRFTISRDNAKNTVYLQMNSLKPEDTAVYYCAADPYYNKTPGYTLGYWGQGTQVTVSS

SEQ ID NO: 13794 - protein, 118 aa, Artificial Sequence
  Chemically Synthesized
QVQLQESGGGLVQAGGSLRLSCAASGSISKRDIMGWYRQAPGKERELVAAIAFGGNTYYADSVKGRFTISRDNAKNTVYLQMNSLKPEDTAVYYCAVVLYGDVYLQYWGQGTQVTVSS

SEQ ID NO: 13795 - protein, 118 aa, Artificial Sequence
  Chemically Synthesized
QVQLQESGGGLVQAGGSLRLSCAASGYISEVPVMGWYRQAPGKEREFVAAIAGGASTYYADSVKGRFTISRDNAKNTVYLQMNSLKPEDTAVYYCAAETFKDEYHDYWGQGTQVTVSS

SEQ ID NO: 13796 - protein, 118 aa, Artificial Sequence
  Chemically Synthesized
QVQLQESGGGLVQAGGSLRLSCAASGTISDTSGMGWYRQAPGKEREFVAAISRGGNTYYADSVKGRFTISRDNAKNTVYLQMNSLKPEDTAVYYCAAVLYGDVYLQYWGQGTQVTVSS

SEQ ID NO: 13797 - protein, 122 aa, Artificial Sequence
  Chemically Synthesized
QVQLQESGGGLVQAGGSLRLSCAASGSISKRDIMGWYRQAPGKERELVAAIAFGGNTYYADSVKGRFTISRDNAKNTVYLQMNSLKPEDTAVYYCAADPYYNKTPGYTLGYWGQGTQVTVSS

SEQ ID NO: 13798 - protein, 118 aa, Artificial Sequence
  Chemically Synthesized
QVQLQESGGGLVQAGGSLRLSCAASGTISGPSYMGWYRQAPGKEREFVAAIAFGGNTYYADSVKGRFTISRDNAKNTVYLQMNSLKPEDTAVYYCAVVYVNDPYLQYWGQGTQVTVSS

SEQ ID NO: 13799 - protein, 118 aa, Artificial Sequence
  Chemically Synthesized
QVQLQESGGGLVQAGGSLRLSCAASGTISTVVAMGWYRQAPGKERELVAAIDAGASTNYADSVKGRFTISRDNAKNTVYLQMNSLKPEDTAVYYCAVARVRLVHHPYWGQGTQVTVSS

SEQ ID NO: 13800 - protein, 109 aa, Artificial Sequence
  Chemically Synthesized
QVQLQESGGGLVQAGGSLRLSCAASGSISVGQGMGWYRQAPGKEREFVAGIGHGTITNYADSVKGRFTISRDNAKNTVYLQMNSLKPEDTAVYYCAGYWGQGTQVTVSS

SEQ ID NO: 13801 - protein, 118 aa, Artificial Sequence
  Chemically Synthesized
QVQLQESGGGLVQAGGSLRLSCAASGTISYPYVMGWYRQAPGKERELVASISDGGTTNYADSVKGRFTISRDNAKNTVYLQMNSLKPEDTAVYYCAVPFYPLTSLQYWGQGTQVTVSS

SEQ ID NO: 13802 - protein, 118 aa, Artificial Sequence
  Chemically Synthesized
QVQLQESGGGLVQAGGSLRLSCAASGTISRYGIMGWYRQAPGKERELVAAISVGANTYYADSVKGRFTISRDNAKNTVYLQMNSLKPEDTAVYYCAVYTKRRTSYGYWGQGTQVTVSS

SEQ ID NO: 13803 - protein, 127 aa, Artificial Sequence
  Chemically Synthesized
QVQLQESGGGLVQAGGSLRLSCAASGSIFRTSIMGWYRQAPGKEREFVAAITPGGITYYADSVKGRFTISRDNAKNTVYLQMNSLKPEDTAVYYCAVDAYDKSDAIHDRDGRQHDYWGQGTQVTVSS

SEQ ID NO: 13804 - protein, 121 aa, Artificial Sequence
  Chemically Synthesized
QVQLQESGGGLVQAGGSLRLSCAASGTIFQFDFMGWYRQAPGKERELLPVLVLVVLPYADSVKGRFTISRDNAKNTVYLQMNSLKPEDTAVYYCAVGAYYAPYLDREFFYWGQGTQVTVSS

SEQ ID NO: 13805 - protein, 125 aa, Artificial Sequence
  Chemically Synthesized
QVQLQESGGGLVQAGGSLRLSCAASGSIFGSYTMGWYRQAPGKERELLPVLLLVLLPYADSVKGRFTISRDNAKNTVYLQMNSLKPEDTAVYYCAAVGDQFPWYDVQYLGRHSYWGQGTQVTVSS

SEQ ID NO: 13806 - protein, 110 aa, Artificial Sequence
  Chemically Synthesized
QVQLQESGGGLVQAGGSLRLSCAASGSISGSPFMGWYRQAPGKERELVATIDRGGTTYYADSVKGRFTISRDNAKNTVYLQMNSLKPEDTAVYYCAVIYWGQGTQVTVSS

SEQ ID NO: 13807 - protein, 126 aa, Artificial Sequence
  Chemically Synthesized
QVQLQESGGGLVQAGGSLRLSCAASGNISGYWYMGWYRQAPGKERELVATISDGGTTYYADSVKGRFTISRDNAKNTVYLQMNSLKPEDTAVYYCAVIYADWGGRHYSYPAYLVYWGQGTQVTVSS

SEQ ID NO: 13808 - protein, 118 aa, Artificial Sequence
  Chemically Synthesized
QVQLQESGGGLVQAGGSLRLSCAASGTIFARIVMGWYRQAPGKERELVAAIAAGATTYYADSVKGRFTISRDNAKNTVYLQMNSLKPEDTAVYYCAAESYSDDKLGYWGQGTQVTVSS

SEQ ID NO: 13809 - protein, 117 aa, Artificial Sequence
  Chemically Synthesized
QVQLQESGGGLVQAGGSLRLSCAASGSIFHYSMGWYRQAPGKEREFVAGIGYGTTTNYADSVKGRFTISRDNAKNTVYLQMNSLKPEDTAVYYCAAYPGYNFEFAYWGQGTQVTVSS

SEQ ID NO: 13810 - protein, 116 aa, Artificial Sequence
  Chemically Synthesized
QVQLQESGGGLVQAGGSLRLSCAASGNISNYPTMGWYRQAPGKERELVAAISTGATTNYADSVKGRFTISRDNAKNTVYLQMNSLKPEDTAVYYCAVRNFAGHYYWGQGTQVTVSS

SEQ ID NO: 13811 - protein, 122 aa, Artificial Sequence
  Chemically Synthesized
QVQLQESGGGLVQAGGSLRLSCAASGYISPRVGMGWYRQAPGKERELVAGIAFGGTTNYADSVKGRFTISRDNAKNTVYLQMNSLKPEDTAVYYCAVGYYVSTHAYDSLVYWGQGTQVTVSS

SEQ ID NO: 13812 - protein, 118 aa, Artificial Sequence
  Chemically Synthesized
QVQLQESGGGLVQAGGSLRLSCAASGYISAAASMGWYRQAPGKERELVASIDAGGNTNYADSVKGRFTISRDNAKNTVYLQMNSLKPEDTAVYYCAVADPGGYYLWYWGQGTQVTVSS

SEQ ID NO: 13813 - protein, 118 aa, Artificial Sequence
  Chemically Synthesized
QVQLQESGGGLVQAGGSLRLSCAASGNISLRSVMGWYRQAPGKEREFVATITYGASTYYADSVKGRFTISRDNAKNTVYLQMNSLKPEDTAVYYCAAEQYYFPWFPYWGQGTQVTVSS

SEQ ID NO: 13814 - protein, 118 aa, Artificial Sequence
  Chemically Synthesized
QVQLQESGGGLVQAGGSLRLSCAASGTIFRIGYMGWYRQAPGKEREFVAAIGHGATTYYADSVKGRFTISRDNAKNTVYLQMNSLKPEDTAVYYCAVLVGKLFTYTYWGQGTQVTVSS

SEQ ID NO: 13815 - protein, 118 aa, Artificial Sequence
  Chemically Synthesized
QVQLQESGGGLVQAGGSLRLSCAASGYIFSYLIMGWYRQAPGKEREFVASITLGTTTYYADSVKGRFTISRDNAKNTVYLQMNSLKPEDTAVYYCAAVQLSHVYFQYWGQGTQVTVSS

SEQ ID NO: 13816 - protein, 118 aa, Artificial Sequence
  Chemically Synthesized
QVQLQESGGGLVQAGGSLRLSCAASGNIFPRPSMGWYRQAPGKERELVASIDSGGTTNYADSVKGRFTISRDNAKNTVYLQMNSLKPEDTAVYYCAVGVLYTDYFGYWGQGTQVTVSS

SEQ ID NO: 13817 - protein, 118 aa, Artificial Sequence
  Chemically Synthesized
QVQLQESGGGLVQAGGSLRLSCAASGTISSRDVMGWYRQAPGKEREFVAGINTGTTTYYADSVKGRFTISRDNAKNTVYLQMNSLKPEDTAVYYCAVYGGDVTVFVYWGQGTQVTVSS

SEQ ID NO: 13818 - protein, 117 aa, Artificial Sequence
  Chemically Synthesized
QVQLQESGGGLVQAGGSLRLSCAASGSISTSRMGWYRQAPGKEREFVATISQGTITNYADSVKGRFTISRDNAKNTVYLQMNSLKPEDTAVYYCAAWRWFYAALFYWGQGTQVTVSS

SEQ ID NO: 13819 - protein, 118 aa, Artificial Sequence
  Chemically Synthesized
QVQLQESGGGLVQAGGSLRLSCAASGTISGVAAMGWYRQAPGKEREFVAGINHGATTYYADSVKGRFTISRDNAKNTVYLQMNSLKPEDTAVYYCAADIFDDYIFYYWGQGTQVTVSS

SEQ ID NO: 13820 - protein, 118 aa, Artificial Sequence
  Chemically Synthesized
QVQLQESGGGLVQAGGSLRLSCAASGTIFTLRFMGWYRQAPGKEREFVAAIANGSITNYADSVKGRFTISRDNAKNTVYLQMNSLKPEDTAVYYCAASYVYIPGYSYWGQGTQVTVSS

SEQ ID NO: 13821 - protein, 115 aa, Artificial Sequence
  Chemically Synthesized
QVQLQESGGGLVQAGGSLRLSCAASGNISAYALMGWYRQAPGKEREFVAAITDGGNTYYADSVKGRFTISRDNAKNTVYLQMNSLKPEDTAVYYCAASADGHDYWGQGTQVTVSS

SEQ ID NO: 13822 - protein, 124 aa, Artificial Sequence
  Chemically Synthesized
QVQLQESGGGLVQAGGSLRLSCAASGTIFYWSMGWYRQAPGKEREFVAAISYGTITYYADSVKGRFTISRDNAKNTVYLQMNSLKPEDTAVYYCAVFGPPDGLEYSTTSRSSYWGQGTQVTVSS

SEQ ID NO: 13823 - protein, 110 aa, Artificial Sequence
  Chemically Synthesized
QVQLQESGGGLVQAGGSLRLSCAASGYISRDIRMGWYRQAPGKEREFVATIGSGATTNYADSVKGRFTISRDNAKNTVYLQMNSLKPEDTAVYYCATIYWGQGTQVTVSS

SEQ ID NO: 13824 - protein, 118 aa, Artificial Sequence
  Chemically Synthesized
QVQLQESGGGLVQAGGSLRLSCAASGNIFPYRVMGWYRQAPGKERELVAAITRGSTTNYADSVKGRFTISRDNAKNTVYLQMNSLKPEDTAVYYCAVRPRTYYLFTYWGQGTQVTVSS

SEQ ID NO: 13825 - protein, 117 aa, Artificial Sequence
  Chemically Synthesized
QVQLQESGGGLVQAGGSLRLSCAASGSIFDDFLMGWYRQAPGKEREFVATIGYGSNTNYADSVKGRFTISRDNAKNTVYLQMNSLKPEDTAVYYCAAETGLTVVMYWGQGTQVTVSS

SEQ ID NO: 13826 - protein, 120 aa, Artificial Sequence
  Chemically Synthesized
QVQLQESGGGLVQAGGSLRLSCAASGYIFFWFVMGWYRQAPGKERELVATISVGGITYYADSVKGRFTISRDNAKNTVYLQMNSLKPEDTAVYYCAVYVRDQYYPYHYYWGQGTQVTVSS

SEQ ID NO: 13827 - protein, 118 aa, Artificial Sequence
  Chemically Synthesized
QVQLQESGGGLVQAGGSLRLSCAASGNISPTDYMGWYRQAPGKERELVAGIATGGITYYADSVKGRFTISRDNAKNTVYLQMNSLKPEDTAVYYCAVNGSYGFHYGYWGQGTQVTVSS

SEQ ID NO: 13828 - protein, 118 aa, Artificial Sequence
  Chemically Synthesized
QVQLQESGGGLVQAGGSLRLSCAASGTISATTYMGWYRQAPGKERELVAAIAYGTNTNYADSVKGRFTISRDNAKNTVYLQMNSLKPEDTAVYYCAADNSKVPFYDYWGQGTQVTVSS

SEQ ID NO: 13829 - protein, 118 aa, Artificial Sequence
  Chemically Synthesized
QVQLQESGGGLVQAGGSLRLSCAASGYIFPGPDMGWYRQAPGKERELVATIGTGSNTNYADSVKGRFTISRDNAKNTVYLQMNSLKPEDTAVYYCAVVTSLDQSYPYWGQGTQVTVSS

SEQ ID NO: 13830 - protein, 122 aa, Artificial Sequence
  Chemically Synthesized
QVQLQESGGGLVQAGGSLRLSCAASGYISRGYVMGWYRQAPGKEREFVAAIGAGASTYYADSVKGRFTISRDNAKNTVYLQMNSLKPEDTAVYYCAVRSYRNHTLYGYHRYWGQGTQVTVSS

SEQ ID NO: 13831 - protein, 125 aa, Artificial Sequence
  Chemically Synthesized
QVQLQESGGGLVQAGGSLRLSCAASGTISYPTYMGWYRQAPGKERELVATIDYGTTTYYADSVKGRFTISRDNAKNTVYLQMNSLKPEDTAVYYCAAYDWYRDLAGGYAGTYPYWGQGTQVTVSS

SEQ ID NO: 13832 - protein, 116 aa, Artificial Sequence
  Chemically Synthesized
QVQLQESGGGLVQAGGSLRLSCAASGNISVDLRMGWYRQAPGKERELVATISSGGTTYYADSVKGRFTISRDNAKNTVYLQMNSLKPEDTAVYYCAVPPDARHVYWGQGTQVTVSS

SEQ ID NO: 13833 - protein, 122 aa, Artificial Sequence
  Chemically Synthesized
QVQLQESGGGLVQAGGSLRLSCAASGSIFVRRYMGWYRQAPGKEREFVAAINGGASTNYADSVKGRFTISRDNAKNTVYLQMNSLKPEDTAVYYCAANVTGQRDSWRYLRYWGQGTQVTVSS

SEQ ID NO: 13834 - protein, 122 aa, Artificial Sequence
  Chemically Synthesized
QVQLQESGGGLVQAGGSLRLSCAASGNIFGFYRMGWYRQAPGKERELVASISVGGSTNYADSVKGRFTISRDNAKNTVYLQMNSLKPEDTAVYYCAARPPYRVEFALFHWYWGQGTQVTVSS

SEQ ID NO: 13835 - protein, 124 aa, Artificial Sequence
  Chemically Synthesized
QVQLQESGGGLVQAGGSLRLSCAASGYISGRYYMGWYRQAPGKERELVAAISYGSTTYYADSVKGRFTISRDNAKNTVYLQMNSLKPEDTAVYYCAVTLTYATYDYWDAGYYYWGQGTQVTVSS

SEQ ID NO: 13836 - protein, 117 aa, Artificial Sequence
  Chemically Synthesized
QVQLQESGGGLVQAGGSLRLSCAASGNIFETYYMGWYRQAPGKERELVASISIGGSTNYADSVKGRFTISRDNAKNTVYLQMNSLKPEDTAVYYCAAYLYLQSQLYWGQGTQVTVSS

SEQ ID NO: 13837 - protein, 118 aa, Artificial Sequence
  Chemically Synthesized
QVQLQESGGGLVQAGGSLRLSCAASGSISADDTMGWYRQAPGKEREFVAAINAGATTYYADSVKGRFTISRDNAKNTVYLQMNSLKPEDTAVYYCAAIAIPYTGLYYWGQGTQVTVSS

SEQ ID NO: 13838 - protein, 118 aa, Artificial Sequence
  Chemically Synthesized
QVQLQESGGGLVQAGGSLRLSCAASGNIFRYSIMGWYRQAPGKEREFVASIANGTNTNYADSVKGRFTISRDNAKNTVYLQMNSLKPEDTAVYYCAALKGGHRYHWYWGQGTQVTVSS

SEQ ID NO: 13839 - protein, 111 aa, Artificial Sequence
  Chemically Synthesized
QVQLQESGGGLVQAGGSLRLSCAASGSIMGWYRQAPGKEREFVAAINYGTNLYADSVKGRFTISRDNAKNTVYLQMNSLKPEDTAVYYCAAGIYSTFSIYWGQGTQVTVSS

SEQ ID NO: 13840 - protein, 122 aa, Artificial Sequence
  Chemically Synthesized
QVQLQESGGGLVQAGGSLRLSCAASGYIFNRWYMGWYRQAPGKERELVASIDRGGITNYADSVKGRFTISRDNAKNTVYLQMNSLKPEDTAVYYCAAVPRRRPWTNTAHPYWGQGTQVTVSS

SEQ ID NO: 13841 - protein, 118 aa, Artificial Sequence
  Chemically Synthesized
QVQLQESGGGLVQAGGSLRLSCAASGTIFADPYMGWYRQAPGKERELVAAIAVGTSTNYADSVKGRFTISRDNAKNTVYLQMNSLKPEDTAVYYCAVGYPHGTGYYYWGQGTQVTVSS

SEQ ID NO: 13842 - protein, 122 aa, Artificial Sequence
  Chemically Synthesized
QVQLQESGGGLVQAGGSLRLSCAASGNISDVTAMGWYRQAPGKERELVAGISDGGTTNYADSVKGRFTISRDNAKNTVYLQMNSLKPEDTAVYYCAVFEPVNAPRGTPHTYWGQGTQVTVSS

SEQ ID NO: 13843 - protein, 118 aa, Artificial Sequence
  Chemically Synthesized
QVQLQESGGGLVQAGGSLRLSCAASGTISLTYSMGWYRQAPGKEREFVAAINSGGNTNYADSVKGRFTISRDNAKNTVYLQMNSLKPEDTAVYYCAALVRLKSYLAYWGQGTQVTVSS

SEQ ID NO: 13844 - protein, 122 aa, Artificial Sequence
  Chemically Synthesized
QVQLQESGGGLVQAGGSLRLSCAASGNIFRAGTMGWYRQAPGKEREFVAGISIGASTYYADSVKGRFTISRDNAKNTVYLQMNSLKPEDTAVYYCAATNYEYNYPAGWHYYWGQGTQVTVSS

SEQ ID NO: 13845 - protein, 125 aa, Artificial Sequence
  Chemically Synthesized
QVQLQESGGGLVQAGGSLRLSCAASGYILTFGMGWYRQAPGKERELVATITYGTSTYYADSVKGRFTISRDNAKNTVYLQMNSLKPEDTAVYYCAAYYSNLPWAGGYGLPTYVYWGQGTQVTVSS

SEQ ID NO: 13846 - protein, 125 aa, Artificial Sequence
  Chemically Synthesized
QVQLQESGGGLVQAGGSLRLSCAASGTISADRVMGWYRQAPGKEREFVAAISDGGSTNYADSVKGRFTISRDNAKNTVYLQMNSLKPEDTAVYYCAVQTYGVDVYQDEPPGLHYWGQGTQVTVSS

SEQ ID NO: 13847 - protein, 118 aa, Artificial Sequence
  Chemically Synthesized
QVQLQESGGGLVQAGGSLRLSCAASGTISGTRYMGWYRQAPGKERELVASIAQGTSTYYADSVKGRFTISRDNAKNTVYLQMNSLKPEDTAVYYCAAYWSDDYDHAYWGQGTQVTVSS

SEQ ID NO: 13848 - protein, 126 aa, Artificial Sequence
  Chemically Synthesized
QVQLQESGGGLVQAGGSLRLSCAASGYISFGYGMGWYRQAPGKERELVATIAPGAITYYADSVKGRFTISRDNAKNTVYLQMNSLKPEDTAVYYCAVYLNYPAYNASPPYLGHVYWGQGTQVTVSS

SEQ ID NO: 13849 - protein, 118 aa, Artificial Sequence
  Chemically Synthesized
QVQLQESGGGLVQAGGSLRLSCAASGTISVGINMGWYRQAPGKEREFVATISPGGITNYADSVKGRFTISRDNAKNTVYLQMNSLKPEDTAVYYCAVAYNTHPQHDYWGQGTQVTVSS

SEQ ID NO: 13850 - protein, 118 aa, Artificial Sequence
  Chemically Synthesized
QVQLQESGGGLVQAGGSLRLSCAASGTISVAVVMGWYRQAPGKEREFVAGITYGAITNYADSVKGRFTISRDNAKNTVYLQMNSLKPEDTAVYYCAAVDQSGRALFYWGQGTQVTVSS

SEQ ID NO: 13851 - protein, 122 aa, Artificial Sequence
  Chemically Synthesized
QVQLQESGGGLVQAGGSLRLSCAASGTIFTVYTMGWYRQAPGKERELVAGISHGTSTYYADSVKGRFTISRDNAKNTVYLQMNSLKPEDTAVYYCAAYSWTDWFGELYHDYWGQGTQVTVSS

SEQ ID NO: 13852 - protein, 116 aa, Artificial Sequence
  Chemically Synthesized
QVQLQESGGGLVQAGGSLRLSCAASGTISEVRAMGWYRQAPGKEREFVAGIGVGAITNYADSVKGRFTISRDNAKNTVYLQMNSLKPEDTAVYYCAAVARGYFYYWGQGTQVTVSS

SEQ ID NO: 13853 - protein, 117 aa, Artificial Sequence
  Chemically Synthesized
QVQLQESGGGLVQAGGSLRLSCAASGNIFDSGRMGWYRQAPGKERELVAGIDYGSTTNYADSVKGRFTISRDNAKNTVYLQMNSLKPEDTAVYYCAAIYWFSDSIYWGQGTQVTVSS

SEQ ID NO: 13854 - protein, 121 aa, Artificial Sequence
  Chemically Synthesized
QVQLQESGGGLVQAGGSLRLSCAASGNISGNQDMGWYRQAPGKEREFVAAIGPGGSTNYADSVKGRFTISRDNAKNTVYLQMNSLKPEDTAVYYCAVQQYRVRARDTLMYWGQGTQVTVSS

SEQ ID NO: 13855 - protein, 122 aa, Artificial Sequence
  Chemically Synthesized
QVQLQESGGGLVQAGGSLRLSCAASGNIFDPTAMGWYRQAPGKERELVASINTGATTYYADSVKGRFTISRDNAKNTVYLQMNSLKPEDTAVYYCAVYDRSGTPAYFPYDYWGQGTQVTVSS

SEQ ID NO: 13856 - protein, 118 aa, Artificial Sequence
  Chemically Synthesized
QVQLQESGGGLVQAGGSLRLSCAASGYISKPLGMGWYRQAPGKEREFVAAINLGTSTYYADSVKGRFTISRDNAKNTVYLQMNSLKPEDTAVYYCAARYYYGYNHTYWGQGTQVTVSS

SEQ ID NO: 13857 - protein, 118 aa, Artificial Sequence
  Chemically Synthesized
QVQLQESGGGLVQAGGSLRLSCAASGNISVRGAMGWYRQAPGKEREFVATISLGASTYYADSVKGRFTISRDNAKNTVYLQMNSLKPEDTAVYYCAVYYVLRDTLYYWGQGTQVTVSS

SEQ ID NO: 13858 - protein, 117 aa, Artificial Sequence
  Chemically Synthesized
QVQLQESGGGLVQAGGSLRLSCAASGTISAINTMGWYRQAPGKERELVAVLVLVLLPYADSVKGRFTISRDNAKNTVYLQMNSLKPEDTAVYYCAVGDPFWYVHAYWGQGTQVTVSS

SEQ ID NO: 13859 - protein, 122 aa, Artificial Sequence
  Chemically Synthesized
QVQLQESGGGLVQAGGSLRLSCAASGSISLDTVMGWYRQAPGKEREFVASINNGSSTNYADSVKGRFTISRDNAKNTVYLQMNSLKPEDTAVYYCAVDIARYGYYRVYHGYWGQGTQVTVSS

SEQ ID NO: 13860 - protein, 126 aa, Artificial Sequence
  Chemically Synthesized
QVQLQESGGGLVQAGGSLRLSCAASGSISYFYTMGWYRQAPGKERELVASINSVLLPYADSVKGRFTISRDNAKNTVYLQMNSLKPEDTAVYYCAAYDGYDYDDQYTTERGDLRYWGQGTQVTVSS

SEQ ID NO: 13861 - protein, 118 aa, Artificial Sequence
  Chemically Synthesized
QVQLQESGGGLVQAGGSLRLSCAASGNIFVQRYMGWYRQAPGKEREFVAGITNGSSTYYADSVKGRFTISRDNAKNTVYLQMNSLKPEDTAVYYCAVGEYDGYRFLYWGQGTQVTVSS

SEQ ID NO: 13862 - protein, 118 aa, Artificial Sequence
  Chemically Synthesized
QVQLQESGGGLVQAGGSLRLSCAASGTISRSPRMGWYRQAPGKEREFVAGISYGGTTYYADSVKGRFTISRDNAKNTVYLQMNSLKPEDTAVYYCAAPVAELGGHGYWGQGTQVTVSS

SEQ ID NO: 13863 - protein, 118 aa, Artificial Sequence
  Chemically Synthesized
QVQLQESGGGLVQAGGSLRLSCAASGTIFRGLFMGWYRQAPGKEREFVASIAPGGITYYADSVKGRFTISRDNAKNTVYLQMNSLKPEDTAVYYCAVYVNYTTYHSYWGQGTQVTVSS

SEQ ID NO: 13864 - protein, 110 aa, Artificial Sequence
  Chemically Synthesized
QVQLQESGGGLVQAGGSLRLSCAASGYISDPGRMGWYRQAPGKERELVATISLGSSTNYADSVKGRFTISRDNAKNTVYLQMNSLKPEDTAVYYCAADYWGQGTQVTVSS

SEQ ID NO: 13865 - protein, 117 aa, Artificial Sequence
  Chemically Synthesized
QVQLQESGGGLVQAGGSLRLSCAASGTISNIYYMGWYRQAPGKEREFVALLMLVLIPYADSVKGRFTISRDNAKNTVYLQMNSLKPEDTAVYYCAVSVGYYPYHDYWGQGTQVTVSS

SEQ ID NO: 13866 - protein, 126 aa, Artificial Sequence
  Chemically Synthesized
QVQLQESGGGLVQAGGSLRLSCAASGSISQPSEMGWYRQAPGKEREFVAAISSGTSTNYADSVKGRFTISRDNAKNTVYLQMNSLKPEDTAVYYCAVEASAQDTDYFSRVAILYYWGQGTQVTVSS

SEQ ID NO: 13867 - protein, 117 aa, Artificial Sequence
  Chemically Synthesized
QVQLQESGGGLVQAGGSLRLSCAASGSIFYRVEMGWYRQAPGKERELVATITKGLLPYADSVKGRFTISRDNAKNTVYLQMNSLKPEDTAVYYCAVRHLPPVDYYYWGQGTQVTVSS

SEQ ID NO: 13868 - protein, 121 aa, Artificial Sequence
  Chemically Synthesized
QVQLQESGGGLVQAGGSLRLSCAASGSIFVLSMGWYRQAPGKEREFVAGIDTGTSTYYADSVKGRFTISRDNAKNTVYLQMNSLKPEDTAVYYCAVVTYGGYDGRYDHDYWGQGTQVTVSS

SEQ ID NO: 13869 - protein, 125 aa, Artificial Sequence
  Chemically Synthesized
QVQLQESGGGLVQAGGSLRLSCAASGSISSPYYMGWYRQAPGKEREFVAAIGDGATTYYADSVKGRFTISRDNAKNTVYLQMNSLKPEDTAVYYCAVYVDGGTASWYDDGYYAYWGQGTQVTVSS

SEQ ID NO: 13870 - protein, 118 aa, Artificial Sequence
  Chemically Synthesized
QVQLQESGGGLVQAGGSLRLSCAASGNISLVDRMGWYRQAPGKEREFVASIGNGGNTYYADSVKGRFTISRDNAKNTVYLQMNSLKPEDTAVYYCAAASYNNTTLWYWGQGTQVTVSS

SEQ ID NO: 13871 - protein, 118 aa, Artificial Sequence
  Chemically Synthesized
QVQLQESGGGLVQAGGSLRLSCAASGSIFTDDVMGWYRQAPGKEREFVAGIAYGAITYYADSVKGRFTISRDNAKNTVYLQMNSLKPEDTAVYYCAAWYQYKPAYYYWGQGTQVTVSS

SEQ ID NO: 13872 - protein, 126 aa, Artificial Sequence
  Chemically Synthesized
QVQLQESGGGLVQAGGSLRLSCAASGSIFNYNRMGWYRQAPGKEREFVATIGLGGSTYYADSVKGRFTISRDNAKNTVYLQMNSLKPEDTAVYYCAAYWWGVNYRWEVFKYDHRYWGQGTQVTVSS

SEQ ID NO: 13873 - protein, 118 aa, Artificial Sequence
  Chemically Synthesized
QVQLQESGGGLVQAGGSLRLSCAASGTISYRPSMGWYRQAPGKERELVATITAGGITNYADSVKGRFTISRDNAKNTVYLQMNSLKPEDTAVYYCAVLYLVQVQLSYWGQGTQVTVSS

SEQ ID NO: 13874 - protein, 118 aa, Artificial Sequence
  Chemically Synthesized
QVQLQESGGGLVQAGGSLRLSCAASGNIFRIYYMGWYRQAPGKEREFVATISIGATTNYADSVKGRFTISRDNAKNTVYLQMNSLKPEDTAVYYCAAGGWYRYRHVYWGQGTQVTVSS

SEQ ID NO: 13875 - protein, 116 aa, Artificial Sequence
  Chemically Synthesized
QVQLQESGGGLVQAGGSLRLSCAASGYISSYDMGWYRQAPGKEREFVASIATVVVPYADSVKGRFTISRDNAKNTVYLQMNSLKPEDTAVYYCAALYAYYYVHPYWGQGTQVTVSS

SEQ ID NO: 13876 - protein, 122 aa, Artificial Sequence
  Chemically Synthesized
QVQLQESGGGLVQAGGSLRLSCAASGYISGYYIMGWYRQAPGKERELVASIDLGGTTNYADSVKGRFTISRDNAKNTVYLQMNSLKPEDTAVYYCAVNVYYNWLNDEPHDYWGQGTQVTVSS

SEQ ID NO: 13877 - protein, 118 aa, Artificial Sequence
  Chemically Synthesized
QVQLQESGGGLVQAGGSLRLSCAASGTIFAFGIMGWYRQAPGKERELVAGISYGGSTNYADSVKGRFTISRDNAKNTVYLQMNSLKPEDTAVYYCAVQVTSDYIHYYWGQGTQVTVSS

SEQ ID NO: 13878 - protein, 118 aa, Artificial Sequence
  Chemically Synthesized
QVQLQESGGGLVQAGGSLRLSCAASGSISELYLMGWYRQAPGKERELVAGINSGGITYYADSVKGRFTISRDNAKNTVYLQMNSLKPEDTAVYYCAVVDVWDYRYDYWGQGTQVTVSS

SEQ ID NO: 13879 - protein, 122 aa, Artificial Sequence
  Chemically Synthesized
QVQLQESGGGLVQAGGSLRLSCAASGYIFTEYSMGWYRQAPGKEREFVASIAYGANTYYADSVKGRFTISRDNAKNTVYLQMNSLKPEDTAVYYCAADRQAGPWDVYEHPYWGQGTQVTVSS

SEQ ID NO: 13880 - protein, 121 aa, Artificial Sequence
  Chemically Synthesized
QVQLQESGGGLVQAGGSLRLSCAASGTIFYANDMGWYRQAPGKEREFVATINPGSITYYADSVKGRFTISRDNAKNTVYLQMNSLKPEDTAVYYCAALYRSSRNTCVLMYWGQGTQVTVSS

SEQ ID NO: 13881 - protein, 121 aa, Artificial Sequence
  Chemically Synthesized
QVQLQESGGGLVQAGGSLRLSCAASGYISWYRSMGWYRQAPGKEREFVAALVSVLLPYADSVKGRFTISRDNAKNTVYLQMNSLKPEDTAVYYCAVQDQYISGPYYYFGYWGQGTQVTVSS

SEQ ID NO: 13882 - protein, 117 aa, Artificial Sequence
  Chemically Synthesized
QVQLQESGGGLVQAGGSLRLSCAASGSIFPYPQMGWYRQAPGKERELLPVLLRVLIPYADSVKGRFTISRDNAKNTVYLQMNSLKPEDTAVYYCAAEYDASDYHAYWGQGTQVTVSS

SEQ ID NO: 13883 - protein, 118 aa, Artificial Sequence
  Chemically Synthesized
QVQLQESGGGLVQAGGSLRLSCAASGSIFYDNTMGWYRQAPGKERELVAGIAPGASTNYADSVKGRFTISRDNAKNTVYLQMNSLKPEDTAVYYCAAIRTFLSYLYYWGQGTQVTVSS

SEQ ID NO: 13884 - protein, 118 aa, Artificial Sequence
  Chemically Synthesized
QVQLQESGGGLVQAGGSLRLSCAASGTIFYFELMGWYRQAPGKERELVAAITDGGSTYYADSVKGRFTISRDNAKNTVYLQMNSLKPEDTAVYYCAVVTYERYGHDYWGQGTQVTVSS

SEQ ID NO: 13885 - protein, 117 aa, Artificial Sequence
  Chemically Synthesized
QVQLQESGGGLVQAGGSLRLSCAASGTIFYDSYMGWYRQAPGKEREFVASIDYGGNTNYADSVKGRFTISRDNAKNTVYLQMNSLKPEDTAVYYCAVYWTSPYVHYWGQGTQVTVSS

SEQ ID NO: 13886 - protein, 126 aa, Artificial Sequence
  Chemically Synthesized
QVQLQESGGGLVQAGGSLRLSCAASGYISSYVDMGWYRQAPGKERELVATITGGSTTNYADSVKGRFTISRDNAKNTVYLQMNSLKPEDTAVYYCAVWDAYRYGYSGPDTTPHDYWGQGTQVTVSS

SEQ ID NO: 13887 - protein, 117 aa, Artificial Sequence
  Chemically Synthesized
QVQLQESGGGLVQAGGSLRLSCAASGTISDLYYMGWYRQAPGKEREFVAAIAVGTNTYYADSVKGRFTISRDNAKNTVYLQMNSLKPEDTAVYYCAVDVSTTVTFYWGQGTQVTVSS

SEQ ID NO: 13888 - protein, 126 aa, Artificial Sequence
  Chemically Synthesized
QVQLQESGGGLVQAGGSLRLSCAASGYISYITPMGWYRQAPGKERELVASIGTGSNTNYADSVKGRFTISRDNAKNTVYLQMNSLKPEDTAVYYCAVWSYVYLWPSFLGTYLYYYWGQGTQVTVSS

SEQ ID NO: 13889 - protein, 118 aa, Artificial Sequence
  Chemically Synthesized
QVQLQESGGGLVQAGGSLRLSCAASGSISYVDPMGWYRQAPGKERELVAAINGGASTNYADSVKGRFTISRDNAKNTVYLQMNSLKPEDTAVYYCAVVTWDGDSHDYWGQGTQVTVSS

SEQ ID NO: 13890 - protein, 120 aa, Artificial Sequence
  Chemically Synthesized
QVQLQESGGGLVQAGGSLRLSCAASGYISLSRIMGWYRQAPGKEREFVASIGDGTSTNYADSVKGRFTISRDNAKNTVYLQMNSLKPEDTAVYYCAQDYNDGYQGWHAYWGQGTQVTVSS

SEQ ID NO: 13891 - protein, 122 aa, Artificial Sequence
  Chemically Synthesized
QVQLQESGGGLVQAGGSLRLSCAASGSISRVAGMGWYRQAPGKERELVAAIAVGGSTYYADSVKGRFTISRDNAKNTVYLQMNSLKPEDTAVYYCAVGYRERTRGPWKFLYWGQGTQVTVSS

SEQ ID NO: 13892 - protein, 122 aa, Artificial Sequence
  Chemically Synthesized
QVQLQESGGGLVQAGGSLRLSCAASGNISRGARMGWYRQAPGKERELVASIGYGASTNYADSVKGRFTISRDNAKNTVYLQMNSLKPEDTAVYYCAARRFLDREKGRTLSYWGQGTQVTVSS

SEQ ID NO: 13893 - protein, 121 aa, Artificial Sequence
  Chemically Synthesized
QVQLQESGGGLVQAGGSLRLSCAASGNISDRQAMGWYRQAPGKEREFVAAISYGGSTYYADSVKGRFTISRDNAKNTVYLQMNSLKPEDTAVYYCAVTYLESYYWYDLFYWGQGTQVTVSS

SEQ ID NO: 13894 - protein, 123 aa, Artificial Sequence
  Chemically Synthesized
QVQLQESGGGLVQAGGSLRLSCAASGTISSSLVMGWYRQAPGKEREFVATISPGSNTYYADSVKGRFTISRDNAKNTVYLQMNSLKPEDTAVYYCAVHPDRYPYRNYALFGYWGQGTQVTVSS

SEQ ID NO: 13895 - protein, 118 aa, Artificial Sequence
  Chemically Synthesized
QVQLQESGGGLVQAGGSLRLSCAASGNISRARDMGWYRQAPGKEREFVAAITSGAITYYADSVKGRFTISRDNAKNTVYLQMNSLKPEDTAVYYCAVRPFRGYYFRYWGQGTQVTVSS

SEQ ID NO: 13896 - protein, 123 aa, Artificial Sequence
  Chemically Synthesized
QVQLQESGGGLVQAGGSLRLSCAASGNIFDSEDMGWYRQAPGKERELVLLTVLIPYADSVKGRFTISRDNAKNTVYLQMNSLKPEDTAVYYCAAATERPATITWWTADLHYYWGQGTQVTVSS

SEQ ID NO: 13897 - protein, 122 aa, Artificial Sequence
  Chemically Synthesized
QVQLQESGGGLVQAGGSLRLSCAASGYIFLYLLMGWYRQAPGKERELVASITYGSSTYYADSVKGRFTISRDNAKNTVYLQMNSLKPEDTAVYYCAVWSGPEQWYEPPFYYWGQGTQVTVSS

SEQ ID NO: 13898 - protein, 122 aa, Artificial Sequence
  Chemically Synthesized
QVQLQESGGGLVQAGGSLRLSCAASGSISRVAGMGWYRQAPGKERELVASIGYGASTNYADSVKGRFTISRDNAKNTVYLQMNSLKPEDTAVYYCAVGYRERTRGPWKFLYWGQGTQVTVSS

SEQ ID NO: 13899 - protein, 118 aa, Artificial Sequence
  Chemically Synthesized
QVQLQESGGGLVQAGGSLRLSCAASGYISDSYIMGWYRQAPGKERELVASIGAGGITYYADSVKGRFTISRDNAKNTVYLQMNSLKPEDTAVYYCAVDGAATVYHLYWGQGTQVTVSS

SEQ ID NO: 13900 - protein, 121 aa, Artificial Sequence
  Chemically Synthesized
QVQLQESGGGLVQAGGSLRLSCAASGSISSTNDMGWYRQAPGKERELVAGITTGAITYYADSVKGRFTISRDNAKNTVYLQMNSLKPEDTAVYYCAVVIYELAPTDYHSYWGQGTQVTVSS

SEQ ID NO: 13901 - protein, 122 aa, Artificial Sequence
  Chemically Synthesized
QVQLQESGGGLVQAGGSLRLSCAASGNISRGARMGWYRQAPGKERELVASIGYGASTNYADSVKGRFTISRDNAKNTVYLQMNSLKPEDTAVYYCAAYYQPPRWKSTPHRYWGQGTQVTVSS

SEQ ID NO: 13902 - protein, 121 aa, Artificial Sequence
  Chemically Synthesized
QVQLQESGGGLVQAGGSLRLSCAASGTISGTKTMGWYRQAPGKEREFVAGISAGGITYYADSVKGRFTISRDNAKNTVYLQMNSLKPEDTAVYYCAVDYQAAAHTDGHRYWGQGTQVTVSS

SEQ ID NO: 13903 - protein, 121 aa, Artificial Sequence
  Chemically Synthesized
QVQLQESGGGLVQAGGSLRLSCAASGTIFQKYYMGWYRQAPGKERELVAAIDPGGTTYYADSVKGRFTISRDNAKNTVYLQMNSLKPEDTAVYYCAAEADGQTDTTLFMYWGQGTQVTVSS

SEQ ID NO: 13904 - protein, 118 aa, Artificial Sequence
  Chemically Synthesized
QVQLQESGGGLVQAGGSLRLSCAASGYISYKQYMGWYRQAPGKERELVAAINDGSNTYYADSVKGRFTISRDNAKNTVYLQMNSLKPEDTAVYYCAAYGYGDRSFQYWGQGTQVTVSS

SEQ ID NO: 13905 - protein, 122 aa, Artificial Sequence
  Chemically Synthesized
QVQLQESGGGLVQAGGSLRLSCAASGYISYWASMGWYRQAPGKERELVAGINTGGNTYYADSVKGRFTISRDNAKNTVYLQMNSLKPEDTAVYYCAVGYRERTRGPWKFLYWGQGTQVTVSS

SEQ ID NO: 13906 - protein, 118 aa, Artificial Sequence
  Chemically Synthesized
QVQLQESGGGLVQAGGSLRLSCAASGNISRGARMGWYRQAPGKERELVASIGYGASTNYADSVKGRFTISRDNAKNTVYLQMNSLKPEDTAVYYCAVAQKRPRRLYYWGQGTQVTVSS

SEQ ID NO: 13907 - protein, 117 aa, Artificial Sequence
  Chemically Synthesized
QVQLQESGGGLVQAGGSLRLSCAASGSIFIRLTMGWYRQAPGKERELVAYADSVKGRFTISRDNAKNTVYLQMNSLKPEDTAVYYCAAFLIYWLGEVGVYAWLHAYWGQGTQVTVSS

SEQ ID NO: 13908 - protein, 118 aa, Artificial Sequence
  Chemically Synthesized
QVQLQESGGGLVQAGGSLRLSCAASGTIFVIGDMGWYRQAPGKEREFVASIGVGSNTNYADSVKGRFTISRDNAKNTVYLQMNSLKPEDTAVYYCAADNPSDAYHNYWGQGTQVTVSS

SEQ ID NO: 13909 - protein, 122 aa, Artificial Sequence
  Chemically Synthesized
QVQLQESGGGLVQAGGSLRLSCAASGNIFDTFVMGWYRQAPGKERELVAGISFGASTYYADSVKGRFTISRDNAKNTVYLQMNSLKPEDTAVYYCAVGYRERTRGPWKFLYWGQGTQVTVSS

SEQ ID NO: 13910 - protein, 115 aa, Artificial Sequence
  Chemically Synthesized
QVQLQESGGGLVQAGGSLRLSCAASGNIFYLPYMGWYRQAPGKERELVASIAYGTTTYYADSVKGRFTISRDNAKNTVYLQMNSLKPEDTAVYYCAAYVAQHGYWGQGTQVTVSS

SEQ ID NO: 13911 - protein, 118 aa, Artificial Sequence
  Chemically Synthesized
QVQLQESGGGLVQAGGSLRLSCAASGSIFNRAAMGWYRQAPGKEREFVATIAVGTTTNYADSVKGRFTISRDNAKNTVYLQMNSLKPEDTAVYYCAASWRGLYRHYYWGQGTQVTVSS

SEQ ID NO: 13912 - protein, 122 aa, Artificial Sequence
  Chemically Synthesized
QVQLQESGGGLVQAGGSLRLSCAASGNISRGARMGWYRQAPGKERELVASIGYGASTNYADSVKGRFTISRDNAKNTVYLQMNSLKPEDTAVYYCAAHWYWRDNPRYRHAYWGQGTQVTVSS

SEQ ID NO: 13913 - protein, 118 aa, Artificial Sequence
  Chemically Synthesized
QVQLQESGGGLVQAGGSLRLSCAASGTIFYDAVMGWYRQAPGKERELVAAIAYGGNTNYADSVKGRFTISRDNAKNTVYLQMNSLKPEDTAVYYCAAIGTTNKAYYYWGQGTQVTVSS

SEQ ID NO: 13914 - protein, 118 aa, Artificial Sequence
  Chemically Synthesized
QVQLQESGGGLVQAGGSLRLSCAASGNISRGARMGWYRQAPGKERELVASIGYGASTNYADSVKGRFTISRDNAKNTVYLQMNSLKPEDTAVYYCAVDITRRYSHGYWGQGTQVTVSS

SEQ ID NO: 13915 - protein, 126 aa, Artificial Sequence
  Chemically Synthesized
QVQLQESGGGLVQAGGSLRLSCAASGTISLYGTMGWYRQAPGKERELVAGIAPGGTTYYADSVKGRFTISRDNAKNTVYLQMNSLKPEDTAVYYCAADYRRDWRSFRYAGTWFDYWGQGTQVTVSS

SEQ ID NO: 13916 - protein, 118 aa, Artificial Sequence
  Chemically Synthesized
QVQLQESGGGLVQAGGSLRLSCAASGNIFYYRPMGWYRQAPGKERELVATIDAGGITYYADSVKGRFTISRDNAKNTVYLQMNSLKPEDTAVYYCAAQHWVYAGYGYWGQGTQVTVSS

SEQ ID NO: 13917 - protein, 115 aa, Artificial Sequence
  Chemically Synthesized
QVQLQESGGGLVQAGGSLRLSCAASGSIFASYRMGWYRQAPGKERELVATIGYGATTNYADSVKGRFTISRDNAKNTVYLQMNSLKPEDTAVYYCAVDRYRRFYWGQGTQVTVSS

SEQ ID NO: 13918 - protein, 118 aa, Artificial Sequence
  Chemically Synthesized
QVQLQESGGGLVQAGGSLRLSCAASGYIFGRIQMGWYRQAPGKEREFVAGITDGSSTYYADSVKGRFTISRDNAKNTVYLQMNSLKPEDTAVYYCAALTYARGYHAYWGQGTQVTVSS

SEQ ID NO: 13919 - protein, 118 aa, Artificial Sequence
  Chemically Synthesized
QVQLQESGGGLVQAGGSLRLSCAASGSISPIYVMGWYRQAPGKEREFVASIGYGTNTNYADSVKGRFTISRDNAKNTVYLQMNSLKPEDTAVYYCAVVWYDSTYYYYWGQGTQVTVSS

SEQ ID NO: 13920 - protein, 125 aa, Artificial Sequence
  Chemically Synthesized
QVQLQESGGGLVQAGGSLRLSCAASGTISETLMGWYRQAPGKERELVASISRGSSTNYADSVKGRFTISRDNAKNTVYLQMNSLKPEDTAVYYCAAYVNSDYQEYLLEFDDYYYWGQGTQVTVSS

SEQ ID NO: 13921 - protein, 118 aa, Artificial Sequence
  Chemically Synthesized
QVQLQESGGGLVQAGGSLRLSCAASGSISTVLYMGWYRQAPGKEREFVAAIGTGGTTNYADSVKGRFTISRDNAKNTVYLQMNSLKPEDTAVYYCAAVIYLELYYYYWGQGTQVTVSS

SEQ ID NO: 13922 - protein, 122 aa, Artificial Sequence
  Chemically Synthesized
QVQLQESGGGLVQAGGSLRLSCAASGNISRLIKMGWYRQAPGKERELVAGIASGTITNYADSVKGRFTISRDNAKNTVYLQMNSLKPEDTAVYYCAVYTLPADNFAWTLDYWGQGTQVTVSS

SEQ ID NO: 13923 - protein, 123 aa, Artificial Sequence
  Chemically Synthesized
QVQLQESGGGLVQAGGSLRLSCAASGTIFGVGWMGWYRQAPGKERELVAAISWGGITYYADSVKGRFTISRDNAKNTVYLQMNSLKPEDTAVYYCAADWYDSFVSYLAQLDYWGQGTQVTVSS

SEQ ID NO: 13924 - protein, 121 aa, Artificial Sequence
  Chemically Synthesized
QVQLQESGGGLVQAGGSLRLSCAASGSILTGLMGWYRQAPGKERELVAGIDAGGNTYYADSVKGRFTISRDNAKNTVYLQMNSLKPEDTAVYYCAVYYGYDVYGDGGHRYWGQGTQVTVSS

SEQ ID NO: 13925 - protein, 118 aa, Artificial Sequence
  Chemically Synthesized
QVQLQESGGGLVQAGGSLRLSCAASGSISVDSAMGWYRQAPGKEREFVATIGVGASTYYADSVKGRFTISRDNAKNTVYLQMNSLKPEDTAVYYCAADAYSRATSFYWGQGTQVTVSS

SEQ ID NO: 13926 - protein, 125 aa, Artificial Sequence
  Chemically Synthesized
QVQLQESGGGLVQAGGSLRLSCAASGYISITKAMGWYRQAPGKEREFVATIDVGSSTNYADSVKGRFTISRDNAKNTVYLQMNSLKPEDTAVYYCAVAASQYGYGSGDDGSNMYWGQGTQVTVSS

SEQ ID NO: 13927 - protein, 118 aa, Artificial Sequence
  Chemically Synthesized
QVQLQESGGGLVQAGGSLRLSCAASGYISWSFVMGWYRQAPGKERELVAGIAYGSSTNYADSVKGRFTISRDNAKNTVYLQMNSLKPEDTAVYYCAAIYVEAYYFTYWGQGTQVTVSS

SEQ ID NO: 13928 - protein, 118 aa, Artificial Sequence
  Chemically Synthesized
QVQLQESGGGLVQAGGSLRLSCAASGNISDYGPMGWYRQAPGKERELVASIAYGGNTYYADSVKGRFTISRDNAKNTVYLQMNSLKPEDTAVYYCAVAIYFVHWHGYWGQGTQVTVSS

SEQ ID NO: 13929 - protein, 118 aa, Artificial Sequence
  Chemically Synthesized
QVQLQESGGGLVQAGGSLRLSCAASGSISGTSYMGWYRQAPGKEREFVASISVGAITNYADSVKGRFTISRDNAKNTVYLQMNSLKPEDTAVYYCAAIGYYDQWYYYWGQGTQVTVSS

SEQ ID NO: 13930 - protein, 126 aa, Artificial Sequence
  Chemically Synthesized
QVQLQESGGGLVQAGGSLRLSCAASGTISQGQDMGWYRQAPGKEREFVAGIGGGTSTYYADSVKGRFTISRDNAKNTVYLQMNSLKPEDTAVYYCAVDPDGDYDTAWSGTYFLYYWGQGTQVTVSS

SEQ ID NO: 13931 - protein, 118 aa, Artificial Sequence
  Chemically Synthesized
QVQLQESGGGLVQAGGSLRLSCAASGSIFPDVSMGWYRQAPGKEREFVATISVGGITYYADSVKGRFTISRDNAKNTVYLQMNSLKPEDTAVYYCAVARPFPDDYHYWGQGTQVTVSS

SEQ ID NO: 13932 - protein, 122 aa, Artificial Sequence
  Chemically Synthesized
QVQLQESGGGLVQAGGSLRLSCAASGNISRTQRMGWYRQAPGKEREFVAAINVGSTTYYADSVKGRFTISRDNAKNTVYLQMNSLKPEDTAVYYCAARAVGVQYHPTAHYYWGQGTQVTVSS

SEQ ID NO: 13933 - protein, 126 aa, Artificial Sequence
  Chemically Synthesized
QVQLQESGGGLVQAGGSLRLSCAASGNISYRRPMGWYRQAPGKEREFVATISYGSNTNYADSVKGRFTISRDNAKNTVYLQMNSLKPEDTAVYYCAAWYDRSYVIQYDQSVYHPYWGQGTQVTVSS

SEQ ID NO: 13934 - protein, 121 aa, Artificial Sequence
  Chemically Synthesized
QVQLQESGGGLVQAGGSLRLSCAASGTFLRLTMGWYRQAPGKERELVASIGDGSSTNYADSVKGRFTISRDNAKNTVYLQMNSLKPEDTAVYYCAAGRAATDVTDYAYSYWGQGTQVTVSS

SEQ ID NO: 13935 - protein, 122 aa, Artificial Sequence
  Chemically Synthesized
QVQLQESGGGLVQAGGSLRLSCAASGNIFRIQGMGWYRQAPGKEREFVAGISYGSSTNYADSVKGRFTISRDNAKNTVYLQMNSLKPEDTAVYYCAVLVQGNPSYRARLGYWGQGTQVTVSS

SEQ ID NO: 13936 - protein, 122 aa, Artificial Sequence
  Chemically Synthesized
QVQLQESGGGLVQAGGSLRLSCAASGNISTWYAMGWYRQAPGKEREFVASIADGASTYYADSVKGRFTISRDNAKNTVYLQMNSLKPEDTAVYYCAALLLSKWYQYPYYHYWGQGTQVTVSS

SEQ ID NO: 13937 - protein, 118 aa, Artificial Sequence
  Chemically Synthesized
QVQLQESGGGLVQAGGSLRLSCAASGYISPKPHMGWYRQAPGKERELVAAIAVGGTTNYADSVKGRFTISRDNAKNTVYLQMNSLKPEDTAVYYCAVYYDPYHGYYYWGQGTQVTVSS

SEQ ID NO: 13938 - protein, 118 aa, Artificial Sequence
  Chemically Synthesized
QVQLQESGGGLVQAGGSLRLSCAASGSIFLDYIMGWYRQAPGKEREFVAAIGVGATTNYADSVKGRFTISRDNAKNTVYLQMNSLKPEDTAVYYCAALSKREAGHYYWGQGTQVTVSS

SEQ ID NO: 13939 - protein, 113 aa, Artificial Sequence
  Chemically Synthesized
QVQLQESGGGLVQAGGSLRLSCAASGTIFGQKHMGWYRQAPGKEREFVATITYGSTTYYADSVKGRFTISRDNAKNTVYLQMNSLKPEDTAVYYCAWLPSFYWGQGTQVTVSS

SEQ ID NO: 13940 - protein, 122 aa, Artificial Sequence
  Chemically Synthesized
QVQLQESGGGLVQAGGSLRLSCAASGNIFHPRYMGWYRQAPGKEREFVASIDQGGITNYADSVKGRFTISRDNAKNTVYLQMNSLKPEDTAVYYCAVVGTLYYGPQRYHHYWGQGTQVTVSS

SEQ ID NO: 13941 - protein, 117 aa, Artificial Sequence
  Chemically Synthesized
QVQLQESGGGLVQAGGSLRLSCAASGNISPYYYMGWYRQAPGKERELVATIDDGATTNYADSVKGRFTISRDNAKNTVYLQMNSLKPEDTAVYYCAAYGQSPASYYWGQGTQVTVSS

SEQ ID NO: 13942 - protein, 121 aa, Artificial Sequence
  Chemically Synthesized
QVQLQESGGGLVQAGGSLRLSCAASGTFLFSTMGWYRQAPGKEREFVATISYGANTNYADSVKGRFTISRDNAKNTVYLQMNSLKPEDTAVYYCAAVDPSDYYDDYGHNYWGQGTQVTVSS

SEQ ID NO: 13943 - protein, 118 aa, Artificial Sequence
  Chemically Synthesized
QVQLQESGGGLVQAGGSLRLSCAASGNISPVTIMGWYRQAPGKEREFVATISLGTTTNYADSVKGRFTISRDNAKNTVYLQMNSLKPEDTAVYYCAAVTYHTRYYYYWGQGTQVTVSS

SEQ ID NO: 13944 - protein, 118 aa, Artificial Sequence
  Chemically Synthesized
QVQLQESGGGLVQAGGSLRLSCAASGNISLFYSMGWYRQAPGKERELVAGIDSGGSTNYADSVKGRFTISRDNAKNTVYLQMNSLKPEDTAVYYCAVLIQLSRYHFYWGQGTQVTVSS

SEQ ID NO: 13945 - protein, 117 aa, Artificial Sequence
  Chemically Synthesized
QVQLQESGGGLVQAGGSLRLSCAASGSIFTLLMGWYRQAPGKERELVASISYGSNTYYADSVKGRFTISRDNAKNTVYLQMNSLKPEDTAVYYCAAGVFSALGHWYWGQGTQVTVSS

SEQ ID NO: 13946 - protein, 118 aa, Artificial Sequence
  Chemically Synthesized
QVQLQESGGGLVQAGGSLRLSCAASGNIFRAAIMGWYRQAPGKEREFVASIGDGGNTNYADSVKGRFTISRDNAKNTVYLQMNSLKPEDTAVYYCAVIYHLLGYHHYWGQGTQVTVSS

SEQ ID NO: 13947 - protein, 124 aa, Artificial Sequence
  Chemically Synthesized
QVQLQESGGGLVQAGGSLRLSCAASGYIFRYASMGWYRQAPGKERELVASITHGGTTNYADSVKGRFTISRDNAKNTVYLQMNSLKPEDTAVYYCAVYGAGDDTYPYTLFHYYWGQGTQVTVSS

SEQ ID NO: 13948 - protein, 118 aa, Artificial Sequence
  Chemically Synthesized
QVQLQESGGGLVQAGGSLRLSCAASGTIFYQLAMGWYRQAPGKEREFVAGINYGANTNYADSVKGRFTISRDNAKNTVYLQMNSLKPEDTAVYYCAAIYYDGDLHYYWGQGTQVTVSS

SEQ ID NO: 13949 - protein, 118 aa, Artificial Sequence
  Chemically Synthesized
QVQLQESGGGLVQAGGSLRLSCAASGTISAELYMGWYRQAPGKEREFVATIANGTITNYADSVKGRFTISRDNAKNTVYLQMNSLKPEDTAVYYCAASLYDGHWHGYWGQGTQVTVSS

SEQ ID NO: 13950 - protein, 121 aa, Artificial Sequence
  Chemically Synthesized
QVQLQESGGGLVQAGGSLRLSCAASGTIFYNFSMGWYRQAPGKEREFVAGIGLGGNTNYADSVKGRFTISRDNAKNTVYLQMNSLKPEDTAVYYCAAVRTVRVQNEDLYYWGQGTQVTVSS

SEQ ID NO: 13951 - protein, 115 aa, Artificial Sequence
  Chemically Synthesized
QVQLQESGGGLVQAGGSLRLSCAASGNISLYFDMGWYRQAPGKEREFVAGISDGTITNYADSVKGRFTISRDNAKNTVYLQMNSLKPEDTAVYYCAVVYATTIYWGQGTQVTVSS

SEQ ID NO: 13952 - protein, 118 aa, Artificial Sequence
  Chemically Synthesized
QVQLQESGGGLVQAGGSLRLSCAASGSIFYVSDMGWYRQAPGKERELVASIDGGATTNYADSVKGRFTISRDNAKNTVYLQMNSLKPEDTAVYYCAANPETYRTHQYWGQGTQVTVSS

SEQ ID NO: 13953 - protein, 118 aa, Artificial Sequence
  Chemically Synthesized
QVQLQESGGGLVQAGGSLRLSCAASGTISILRYMGWYRQAPGKEREFVAAITVGSSTNYADSVKGRFTISRDNAKNTVYLQMNSLKPEDTAVYYCAAIDAAGPLHGYWGQGTQVTVSS

SEQ ID NO: 13954 - protein, 118 aa, Artificial Sequence
  Chemically Synthesized
QVQLQESGGGLVQAGGSLRLSCAASGSIFYGYWMGWYRQAPGKERELVAAISSGGTTNYADSVKGRFTISRDNAKNTVYLQMNSLKPEDTAVYYCAVSADDGRYHYYWGQGTQVTVSS

SEQ ID NO: 13955 - protein, 122 aa, Artificial Sequence
  Chemically Synthesized
QVQLQESGGGLVQAGGSLRLSCAASGNISPTLTMGWYRQAPGKERELVASISAGASTYYADSVKGRFTISRDNAKNTVYLQMNSLKPEDTAVYYCAVQAAIRARGGAYFTYWGQGTQVTVSS

SEQ ID NO: 13956 - protein, 122 aa, Artificial Sequence
  Chemically Synthesized
QVQLQESGGGLVQAGGSLRLSCAASGNISLPKHMGWYRQAPGKEREFVAGIGIGGTTNYADSVKGRFTISRDNAKNTVYLQMNSLKPEDTAVYYCAALINYRDSEYGWHWYWGQGTQVTVSS

SEQ ID NO: 13957 - protein, 118 aa, Artificial Sequence
  Chemically Synthesized
QVQLQESGGGLVQAGGSLRLSCAASGTIFGKVYMGWYRQAPGKERELVASIGLGGITYYADSVKGRFTISRDNAKNTVYLQMNSLKPEDTAVYYCAVDYVYSTKLRYWGQGTQVTVSS

SEQ ID NO: 13958 - protein, 118 aa, Artificial Sequence
  Chemically Synthesized
QVQLQESGGGLVQAGGSLRLSCAASGTISDQVDMGWYRQAPGKERELVAAIDRGSTTYYADSVKGRFTISRDNAKNTVYLQMNSLKPEDTAVYYCAVVTADGKLHLYWGQGTQVTVSS

SEQ ID NO: 13959 - protein, 122 aa, Artificial Sequence
  Chemically Synthesized
QVQLQESGGGLVQAGGSLRLSCAASGTISLITVMGWYRQAPGKEREFVAAIADGTNTNYADSVKGRFTISRDNAKNTVYLQMNSLKPEDTAVYYCAAINAYQPRYERRHVYWGQGTQVTVSS

SEQ ID NO: 13960 - protein, 116 aa, Artificial Sequence
  Chemically Synthesized
QVQLQESGGGLVQAGGSLRLSCAASGTISDQVDMGWYRQAPGKERELVAAIDRGSTTYYADSVKGRFTISRDNAKNTVYLQMNSLKPEDTAVYYCAATLRSTLIYWGQGTQVTVSS

SEQ ID NO: 13961 - protein, 122 aa, Artificial Sequence
  Chemically Synthesized
QVQLQESGGGLVQAGGSLRLSCAASGSIFQYDTMGWYRQAPGKEREFVAAISTGTNTNYADSVKGRFTISRDNAKNTVYLQMNSLKPEDTAVYYCAAINAYQPRYERRHVYWGQGTQVTVSS

SEQ ID NO: 13962 - protein, 122 aa, Artificial Sequence
  Chemically Synthesized
QVQLQESGGGLVQAGGSLRLSCAASGSIFSGGAMGWYRQAPGKEREFVAAITGGANTNYADSVKGRFTISRDNAKNTVYLQMNSLKPEDTAVYYCAAINAYQPRYERRHVYWGQGTQVTVSS

SEQ ID NO: 13963 - protein, 122 aa, Artificial Sequence
  Chemically Synthesized
QVQLQESGGGLVQAGGSLRLSCAASGTISDQVDMGWYRQAPGKERELVAAIDRGSTTYYADSVKGRFTISRDNAKNTVYLQMNSLKPEDTAVYYCAAINADQPRYERRHVYWGQGTQVTVSS

SEQ ID NO: 13964 - protein, 122 aa, Artificial Sequence
  Chemically Synthesized
QVQLQESGGGLVQAGGSLRLSCAASGNISGHDDMGWYRQAPGKEREFVATIAPGSSTYYADSVKGRFTISRDNAKNTVYLQMNSLKPEDTAVYYCAAINAYQPRYERRHVYWGQGTQVTVSS

SEQ ID NO: 13965 - protein, 117 aa, Artificial Sequence
  Chemically Synthesized
QVQLQESGGGLVQAGGSLRLSCAASGTISDQVDMGWYRQAPGKERELVAAIDRGSTTYYADSVKGRFTISRDNAKNTVYLQMNSLKPEDTAVYYCAATGSTTGLMYWGQGTQVTVSS

SEQ ID NO: 13966 - protein, 122 aa, Artificial Sequence
  Chemically Synthesized
QVQLQESGGGLVQAGGSLRLSCAASGSIFHIWGMGWYRQAPGKEREFVATIAYGTNTYYADSVKGRFTISRDNAKNTVYLQMNSLKPEDTAVYYCAAINAYQPRYERRHVYWGQGTQVTVSS

SEQ ID NO: 13967 - protein, 122 aa, Artificial Sequence
  Chemically Synthesized
QVQLQESGGGLVQAGGSLRLSCAASGTISDQVDMGWYRQAPGKERELVAAIDRGSTTSYADSVKGRFTISRDNAKNTVYLQMNSLKPEDTAVYYCAAINAYQPRYERRHVYWGQGTQVTVSS

SEQ ID NO: 13968 - protein, 108 aa, Artificial Sequence
  Chemically Synthesized
QVQLQESGGGLVQAGGSLRLSCAASGTIFTLLMGWYRQAPGKEREFVATIGYGATTYYADSVKGRFTISRDNAKNTVYLQMNSLKPEDTAVYYCAVYWGQGTQVTVSS

SEQ ID NO: 13969 - protein, 126 aa, Artificial Sequence
  Chemically Synthesized
QVQLQESGGGLVQAGGSLRLSCAASGNIFVINSMGWYRQAPGKEREFVAAITDGSNTYYADSVKGRFTISRDNAKNTVYLQMNSLKPEDTAVYYCAVYIYPQDTTVTTHYAGLPYWGQGTQVTVSS

SEQ ID NO: 13970 - protein, 122 aa, Artificial Sequence
  Chemically Synthesized
QVQLQESGGGLVQAGGSLRLSCAASGTISTPHYMGWYRQAPGKERELVASIGIGGTTYYADSVKGRFTISRDNAKNTVYLQMNSLKPEDTAVYYCAVADDFRPYGYDDFTYWGQGTQVTVSS

SEQ ID NO: 13971 - protein, 111 aa, Artificial Sequence
  Chemically Synthesized
QVQLQESGGGLVQAGGSLRLSCAASGTIFQASMGWYRQAPGKERELVAAIDTGGSTYYADSVKGRFTISRDNAKNTVYLQMNSLKPEDTAVYYCAVRSCYWGQGTQVTVSS

SEQ ID NO: 13972 - protein, 121 aa, Artificial Sequence
  Chemically Synthesized
QVQLQESGGGLVQAGGSLRLSCAASGTIFYAYVMGWYRQAPGKEREFVAGINYVVIPYADSVKGRFTISRDNAKNTVYLQMNSLKPEDTAVYYCAAGLDQDVPGYYDHSYWGQGTQVTVSS

SEQ ID NO: 13973 - protein, 118 aa, Artificial Sequence
  Chemically Synthesized
QVQLQESGGGLVQAGGSLRLSCAASGNISTFFAMGWYRQAPGKERELVAAIDRGATTNYADSVKGRFTISRDNAKNTVYLQMNSLKPEDTAVYYCAATGRDAQSYKYWGQGTQVTVSS

SEQ ID NO: 13974 - protein, 121 aa, Artificial Sequence
  Chemically Synthesized
QVQLQESGGGLVQAGGSLRLSCAASGIFFRLTMGWYRQAPGKERELVASIAYGGNTYYADSVKGRFTISRDNAKNTVYLQMNSLKPEDTAVYYCAALDRVGAVALIYHFYWGQGTQVTVSS

SEQ ID NO: 13975 - protein, 126 aa, Artificial Sequence
  Chemically Synthesized
QVQLQESGGGLVQAGGSLRLSCAASGNIFTNRYMGWYRQAPGKERELVATITVGAITYYADSVKGRFTISRDNAKNTVYLQMNSLKPEDTAVYYCAAVGPKANLYFFVSDGDYQYWGQGTQVTVSS

SEQ ID NO: 13976 - protein, 109 aa, Artificial Sequence
  Chemically Synthesized
QVQLQESGGGLVQAGGSLRLSCAASGTISTVTGMGWYRQAPGKERELVATIADGTITNYADSVKGRFTISRDNAKNTVYLQMNSLKPEDTAVYYCAAYWGQGTQVTVSS

SEQ ID NO: 13977 - protein, 122 aa, Artificial Sequence
  Chemically Synthesized
QVQLQESGGGLVQAGGSLRLSCAASGSISYPLGMGWYRQAPGKEREFVAGIDSGTNTNYADSVKGRFTISRDNAKNTVYLQMNSLKPEDTAVYYCAVYDGGDDRDTYPHYYWGQGTQVTVSS

SEQ ID NO: 13978 - protein, 118 aa, Artificial Sequence
  Chemically Synthesized
QVQLQESGGGLVQAGGSLRLSCAASGSISGQGTMGWYRQAPGKEREFVAAIGQGASTNYADSVKGRFTISRDNAKNTVYLQMNSLKPEDTAVYYCAALYVLADYYRYWGQGTQVTVSS

SEQ ID NO: 13979 - protein, 117 aa, Artificial Sequence
  Chemically Synthesized
QVQLQESGGGLVQAGGSLRLSCAASGYISGGNYMGWYRQAPGKEREFVATITNGTSTNYADSVKGRFTISRDNAKNTVYLQMNSLKPEDTAVYYCALLTCVGSSFYWGQGTQVTVSS

SEQ ID NO: 13980 - protein, 118 aa, Artificial Sequence
  Chemically Synthesized
QVQLQESGGGLVQAGGSLRLSCAASGNISYPRRMGWYRQAPGKERELVATIAGGGTTYYADSVKGRFTISRDNAKNTVYLQMNSLKPEDTAVYYCAAVRYYRPQLLYWGQGTQVTVSS

SEQ ID NO: 13981 - protein, 114 aa, Artificial Sequence
  Chemically Synthesized
QVQLQESGGGLVQAGGSLRLSCAASGTISDRQYMGWYRQAPGKERELVAAINIGSSTNYADSVKGRFTISRDNAKNTVYLQMNSLKPEDTAVYYCARRYGYRYWGQGTQVTVSS

SEQ ID NO: 13982 - protein, 118 aa, Artificial Sequence
  Chemically Synthesized
QVQLQESGGGLVQAGGSLRLSCAASGNISDIHYMGWYRQAPGKEREFVAAINSGGTTYYADSVKGRFTISRDNAKNTVYLQMNSLKPEDTAVYYCAAQTYSDEYHAYWGQGTQVTVSS

SEQ ID NO: 13983 - protein, 126 aa, Artificial Sequence
  Chemically Synthesized
QVQLQESGGGLVQAGGSLRLSCAASGNISDSFYMGWYRQAPGKEREFVAAIGSGGSTYYADSVKGRFTISRDNAKNTVYLQMNSLKPEDTAVYYCAVTPDIIPFTYRGAYIPYYYWGQGTQVTVSS

SEQ ID NO: 13984 - protein, 115 aa, Artificial Sequence
  Chemically Synthesized
QVQLQESGGGLVQAGGSLRLSCAASGNISSDLGMGWYRQAPGKEREFVAAIDDGTTTNYADSVKGRFTISRDNAKNTVYLQMNSLKPEDTAVYYCAVSDPYLLYWGQGTQVTVSS

SEQ ID NO: 13985 - protein, 117 aa, Artificial Sequence
  Chemically Synthesized
QVQLQESGGGLVQAGGSLRLSCAASGYISYTLVMGWYRQAPGKEREFVAAISFGGITYYADSVKGRFTISRDNAKNTVYLQMNSLKPEDTAVYYCAAIDYVLASLYWGQGTQVTVSS

SEQ ID NO: 13986 - protein, 118 aa, Artificial Sequence
  Chemically Synthesized
QVQLQESGGGLVQAGGSLRLSCAASGTISRRWLMGWYRQAPGKERELVAGITIGANTNYADSVKGRFTISRDNAKNTVYLQMNSLKPEDTAVYYCAAPYVYYGTHGYWGQGTQVTVSS

SEQ ID NO: 13987 - protein, 122 aa, Artificial Sequence
  Chemically Synthesized
QVQLQESGGGLVQAGGSLRLSCAASGYIFDQSYMGWYRQAPGKEREFVAGIGHGGITNYADSVKGRFTISRDNAKNTVYLQMNSLKPEDTAVYYCAVIYYQSGTAGIVYQYWGQGTQVTVSS

SEQ ID NO: 13988 - protein, 121 aa, Artificial Sequence
  Chemically Synthesized
QVQLQESGGGLVQAGGSLRLSCAASGSIFGLLDMGWYRQAPGKEREFVASISEGSTTYYADSVKGRFTISRDNAKNTVYLQMNSLKPEDTAVYYCAADQGLEDFPSTLMYWGQGTQVTVSS

SEQ ID NO: 13989 - protein, 126 aa, Artificial Sequence
  Chemically Synthesized
QVQLQESGGGLVQAGGSLRLSCAASGNISPYVDMGWYRQAPGKEREFVAGINRGTNTYYADSVKGRFTISRDNAKNTVYLQMNSLKPEDTAVYYCAAKTHYLEYIAYYGYWHFSYWGQGTQVTVSS

SEQ ID NO: 13990 - protein, 122 aa, Artificial Sequence
  Chemically Synthesized
QVQLQESGGGLVQAGGSLRLSCAASGYIFSTDFMGWYRQAPGKEREFVAGIDVGASTYYADSVKGRFTISRDNAKNTVYLQMNSLKPEDTAVYYCAVQNYYKYSQTGQHEYWGQGTQVTVSS

SEQ ID NO: 13991 - protein, 118 aa, Artificial Sequence
  Chemically Synthesized
QVQLQESGGGLVQAGGSLRLSCAASGNIFPSDRMGWYRQAPGKERELVAGISYGTTTYYADSVKGRFTISRDNAKNTVYLQMNSLKPEDTAVYYCAVGPRIGWTYWYWGQGTQVTVSS

SEQ ID NO: 13992 - protein, 111 aa, Artificial Sequence
  Chemically Synthesized
QVQLQESGGGLVQAGGSLRLSCAASGSISIAVYMGWYRQAPGKEREFVAGIAYGGNTYYADSVKGRFTISRDNAKNTVYLQMNSLKPEDTAVYYCAYHAYWGQGTQVTVSS

SEQ ID NO: 13993 - protein, 122 aa, Artificial Sequence
  Chemically Synthesized
QVQLQESGGGLVQAGGSLRLSCAASGSISVDGYMGWYRQAPGKERELVATINGGANTNYADSVKGRFTISRDNAKNTVYLQMNSLKPEDTAVYYCAVPDWYYDDVYFTLGYWGQGTQVTVSS

SEQ ID NO: 13994 - protein, 122 aa, Artificial Sequence
  Chemically Synthesized
QVQLQESGGGLVQAGGSLRLSCAASGSISHRRFMGWYRQAPGKEREFVATIDTGSSTNYADSVKGRFTISRDNAKNTVYLQMNSLKPEDTAVYYCAVRDIHYTNHWRYYWYWGQGTQVTVSS

SEQ ID NO: 13995 - protein, 118 aa, Artificial Sequence
  Chemically Synthesized
QVQLQESGGGLVQAGGSLRLSCAASGTISEQTYMGWYRQAPGKERELVASIGPGSSTNYADSVKGRFTISRDNAKNTVYLQMNSLKPEDTAVYYCAAKHRTVWPFSYWGQGTQVTVSS

SEQ ID NO: 13996 - protein, 122 aa, Artificial Sequence
  Chemically Synthesized
QVQLQESGGGLVQAGGSLRLSCAASGTISTLYTMGWYRQAPGKEREFVAGITDGSSTYYADSVKGRFTISRDNAKNTVYLQMNSLKPEDTAVYYCASTDTFRRYTWDGYYYWGQGTQVTVSS

SEQ ID NO: 13997 - protein, 117 aa, Artificial Sequence
  Chemically Synthesized
QVQLQESGGGLVQAGGSLRLSCAASGSISTDGYMGWYRQAPGKERELVAGIAYGAITNYADSVKGRFTISRDNAKNTVYLQMNSLKPEDTAVYYCAVWYLGGDPLYWGQGTQVTVSS

SEQ ID NO: 13998 - protein, 118 aa, Artificial Sequence
  Chemically Synthesized
QVQLQESGGGLVQAGGSLRLSCAASGNIFLTYVMGWYRQAPGKEREFVAGITGGTSTNYADSVKGRFTISRDNAKNTVYLQMNSLKPEDTAVYYCAVKQYWDDIHYYWGQGTQVTVSS

SEQ ID NO: 13999 - protein, 121 aa, Artificial Sequence
  Chemically Synthesized
QVQLQESGGGLVQAGGSLRLSCAASGNISRIADMGWYRQAPGKEREFVAGISDGANTYYADSVKGRFTISRDNAKNTVYLQMNSLKPEDTAVYYCAVDSGTILRRVTNIYWGQGTQVTVSS

SEQ ID NO: 14000 - protein, 118 aa, Artificial Sequence
  Chemically Synthesized
QVQLQESGGGLVQAGGSLRLSCAASGYISVDGYMGWYRQAPGKERELVAAITDGGITYYADSVKGRFTISRDNAKNTVYLQMNSLKPEDTAVYYCAAYPRAVDDYGYWGQGTQVTVSS

SEQ ID NO: 14001 - protein, 124 aa, Artificial Sequence
  Chemically Synthesized
QVQLQESGGGLVQAGGSLRLSCAASGSISDDMGWYRQAPGKERELVAGINNGTSTNYADSVKGRFTISRDNAKNTVYLQMNSLKPEDTAVYYCAVTYAKADSYYHQYQRLHAYWGQGTQVTVSS

SEQ ID NO: 14002 - protein, 126 aa, Artificial Sequence
  Chemically Synthesized
QVQLQESGGGLVQAGGSLRLSCAASGYISYIPIMGWYRQAPGKEREFVAGIDYGANTYYADSVKGRFTISRDNAKNTVYLQMNSLKPEDTAVYYCAVQYNDPGDRSDSAGGLYTYWGQGTQVTVSS

SEQ ID NO: 14003 - protein, 118 aa, Artificial Sequence
  Chemically Synthesized
QVQLQESGGGLVQAGGSLRLSCAASGNIFLDATMGWYRQAPGKEREFVAAIDQGGTTNYADSVKGRFTISRDNAKNTVYLQMNSLKPEDTAVYYCAVGRNNGVTFDYWGQGTQVTVSS

SEQ ID NO: 14004 - protein, 126 aa, Artificial Sequence
  Chemically Synthesized
QVQLQESGGGLVQAGGSLRLSCAASGTIFDDDDMGWYRQAPGKEREFVAGIGLGTNTNYADSVKGRFTISRDNAKNTVYLQMNSLKPEDTAVYYCAAQISQYEDWYVAIGTHHTYWGQGTQVTVSS

SEQ ID NO: 14005 - protein, 126 aa, Artificial Sequence
  Chemically Synthesized
QVQLQESGGGLVQAGGSLRLSCAASGTISYPYSMGWYRQAPGKEREFVAAITYGGTTNYADSVKGRFTISRDNAKNTVYLQMNSLKPEDTAVYYCAVVYFSSEVRDNYSVRVHAYWGQGTQVTVSS

SEQ ID NO: 14006 - protein, 118 aa, Artificial Sequence
  Chemically Synthesized
QVQLQESGGGLVQAGGSLRLSCAASGTIFGREKMGWYRQAPGKEREFVASITFGGNTNYADSVKGRFTISRDNAKNTVYLQMNSLKPEDTAVYYCAATYDDRDEYYYWGQGTQVTVSS

SEQ ID NO: 14007 - protein, 118 aa, Artificial Sequence
  Chemically Synthesized
QVQLQESGGGLVQAGGSLRLSCAASGSIFEPVYMGWYRQAPGKERELVATIDSGANTYYADSVKGRFTISRDNAKNTVYLQMNSLKPEDTAVYYCAADWDVPYYHYYWGQGTQVTVSS

SEQ ID NO: 14008 - protein, 118 aa, Artificial Sequence
  Chemically Synthesized
QVQLQESGGGLVQAGGSLRLSCAASGSIFPLDYMGWYRQAPGKERELVAAINSGASTYYADSVKGRFTISRDNAKNTVYLQMNSLKPEDTAVYYCAVDYFDVEDHAYWGQGTQVTVSS

SEQ ID NO: 14009 - protein, 126 aa, Artificial Sequence
  Chemically Synthesized
QVQLQESGGGLVQAGGSLRLSCAASGTIFDAGPMGWYRQAPGKEREFVASIDGGSTTNYADSVKGRFTISRDNAKNTVYLQMNSLKPEDTAVYYCAADAYATYQLYLLRYYRFGYWGQGTQVTVSS

SEQ ID NO: 14010 - protein, 118 aa, Artificial Sequence
  Chemically Synthesized
QVQLQESGGGLVQAGGSLRLSCAASGTIFVQWWMGWYRQAPGKEREFVAAISDGGITYYADSVKGRFTISRDNAKNTVYLQMNSLKPEDTAVYYCAVEDSYYVDHAYWGQGTQVTVSS

SEQ ID NO: 14011 - protein, 118 aa, Artificial Sequence
  Chemically Synthesized
QVQLQESGGGLVQAGGSLRLSCAASGYISYPWLMGWYRQAPGKERELVAAIGVGATTNYADSVKGRFTISRDNAKNTVYLQMNSLKPEDTAVYYCAAYYWQDAEHTYWGQGTQVTVSS

SEQ ID NO: 14012 - protein, 118 aa, Artificial Sequence
  Chemically Synthesized
QVQLQESGGGLVQAGGSLRLSCAASGTISQYRPMGWYRQAPGKERELVAAIGRGSSTYYADSVKGRFTISRDNAKNTVYLQMNSLKPEDTAVYYCAVDGYRDQYFYYWGQGTQVTVSS

SEQ ID NO: 14013 - protein, 127 aa, Artificial Sequence
  Chemically Synthesized
QVQLQESGGGLVQAGGSLRLSCAASGTISALVGVMGWYRQAPGKEREFVATIGGGGSTYYADSVKGRFTISRDNAKNTVYLQMNSLKPEDTAVYYCAVKAFTWYPSGSQDSVRYEYWGQGTQVTVSS

SEQ ID NO: 14014 - protein, 118 aa, Artificial Sequence
  Chemically Synthesized
QVQLQESGGGLVQAGGSLRLSCAASGSISPDYLMGWYRQAPGKERELVAAIDYGGITYYADSVKGRFTISRDNAKNTVYLQMNSLKPEDTAVYYCAAPRRYGPTHTYWGQGTQVTVSS

SEQ ID NO: 14015 - protein, 118 aa, Artificial Sequence
  Chemically Synthesized
QVQLQESGGGLVQAGGSLRLSCAASGTIFYYLIMGWYRQAPGKERELVAAISWGGNTNYADSVKGRFTISRDNAKNTVYLQMNSLKPEDTAVYYCAANRPDRWVYPYWGQGTQVTVSS

SEQ ID NO: 14016 - protein, 118 aa, Artificial Sequence
  Chemically Synthesized
QVQLQESGGGLVQAGGSLRLSCAASGNISGIITMGWYRQAPGKERELVAGISLGATTYYADSVKGRFTISRDNAKNTVYLQMNSLKPEDTAVYYCAVILGGNTSYDYWGQGTQVTVSS

SEQ ID NO: 14017 - protein, 118 aa, Artificial Sequence
  Chemically Synthesized
QVQLQESGGGLVQAGGSLRLSCAASGNIFVGRYMGWYRQAPGKEREFVASIAVGSTTNYADSVKGRFTISRDNAKNTVYLQMNSLKPEDTAVYYCAVEDGFYNDLAYWGQGTQVTVSS

SEQ ID NO: 14018 - protein, 122 aa, Artificial Sequence
  Chemically Synthesized
QVQLQESGGGLVQAGGSLRLSCAASGTIFQYYYMGWYRQAPGKERELVATIGGGTTTNYADSVKGRFTISRDNAKNTVYLQMNSLKPEDTAVYYCAADKVQAGVYVTIYPYWGQGTQVTVSS

SEQ ID NO: 14019 - protein, 110 aa, Artificial Sequence
  Chemically Synthesized
QVQLQESGGGLVQAGGSLRLSCAASGNIFYAAHMGWYRQAPGKERELVASITRGTSTYYADSVKGRFTISRDNAKNTVYLQMNSLKPEDTAVYYCAASYWGQGTQVTVSS

SEQ ID NO: 14020 - protein, 122 aa, Artificial Sequence
  Chemically Synthesized
QVQLQESGGGLVQAGGSLRLSCAASGYISVTYYMGWYRQAPGKEREFVATIDLGGTTNYADSVKGRFTISRDNAKNTVYLQMNSLKPEDTAVYYCAARTSNVTGYAHYLAYWGQGTQVTVSS

SEQ ID NO: 14021 - protein, 122 aa, Artificial Sequence
  Chemically Synthesized
QVQLQESGGGLVQAGGSLRLSCAASGYISQFDVMGWYRQAPGKERELVAAIADGGTTYYADSVKGRFTISRDNAKNTVYLQMNSLKPEDTAVYYCAGVSDLDSRRYAVHRYWGQGTQVTVSS

SEQ ID NO: 14022 - protein, 117 aa, Artificial Sequence
  Chemically Synthesized
QVQLQESGGGLVQAGGSLRLSCAASGLFLVTVMGWYRQAPGKEREFVATITGGGNTNYADSVKGRFTISRDNAKNTVYLQMNSLKPEDTAVYYCAADEGKPYLHYYWGQGTQVTVSS

SEQ ID NO: 14023 - protein, 117 aa, Artificial Sequence
  Chemically Synthesized
QVQLQESGGGLVQAGGSLRLSCAASGTFLFVLMGWYRQAPGKERELVAGIAYGATTYYADSVKGRFTISRDNAKNTVYLQMNSLKPEDTAVYYCAVNATRARSLPYWGQGTQVTVSS

SEQ ID NO: 14024 - protein, 121 aa, Artificial Sequence
  Chemically Synthesized
QVQLQESGGGLVQAGGSLRLSCAASGTISIGSYMGWYRQAPGKERELVASISAGGITYYADSVKGRFTISRDNAKNTVYLQMNSLKPEDTAVYYCAVYYYPYWDFRDSMYWGQGTQVTVSS

SEQ ID NO: 14025 - protein, 122 aa, Artificial Sequence
  Chemically Synthesized
QVQLQESGGGLVQAGGSLRLSCAASGSISVPTAMGWYRQAPGKERELVASISDGTITNYADSVKGRFTISRDNAKNTVYLQMNSLKPEDTAVYYCAAWTFPYYYVEFTFYYWGQGTQVTVSS

SEQ ID NO: 14026 - protein, 118 aa, Artificial Sequence
  Chemically Synthesized
QVQLQESGGGLVQAGGSLRLSCAASGYIFGEAFMGWYRQAPGKERELVAAITSGSNTYYADSVKGRFTISRDNAKNTVYLQMNSLKPEDTAVYYCAATEGGFASYYYWGQGTQVTVSS

SEQ ID NO: 14027 - protein, 125 aa, Artificial Sequence
  Chemically Synthesized
QVQLQESGGGLVQAGGSLRLSCAASGYIFTYDAMGWYRQAPGKERELVAAIGYGATTYADSVKGRFTISRDNAKNTVYLQMNSLKPEDTAVYYCAVHDNWGLDKRSGYDTQHVYWGQGTQVTVSS

SEQ ID NO: 14028 - protein, 122 aa, Artificial Sequence
  Chemically Synthesized
QVQLQESGGGLVQAGGSLRLSCAASGNISSDSYMGWYRQAPGKEREFVASIAVGTSTYYADSVKGRFTISRDNAKNTVYLQMNSLKPEDTAVYYCAVTAYTPTGYHDDYYYWGQGTQVTVSS

SEQ ID NO: 14029 - protein, 118 aa, Artificial Sequence
  Chemically Synthesized
QVQLQESGGGLVQAGGSLRLSCAASGTISPNWIMGWYRQAPGKEREFVASISIGSSTYYADSVKGRFTISRDNAKNTVYLQMNSLKPEDTAVYYCAVHLPYYWYYDYWGQGTQVTVSS

SEQ ID NO: 14030 - protein, 117 aa, Artificial Sequence
  Chemically Synthesized
QVQLQESGGGLVQAGGSLRLSCAASGTISLYPKMGWYRQAPGKEREFVASIDIGTTTNYADSVKGRFTISRDNAKNTVYLQMNSLKPEDTAVYYCALVLWTLSCIYWGQGTQVTVSS

SEQ ID NO: 14031 - protein, 122 aa, Artificial Sequence
  Chemically Synthesized
QVQLQESGGGLVQAGGSLRLSCAASGYISQNAHMGWYRQAPGKEREFVAAITFGSNTYYADSVKGRFTISRDNAKNTVYLQMNSLKPEDTAVYYCAVYSPIYDAQTDRFAYWGQGTQVTVSS

SEQ ID NO: 14032 - protein, 126 aa, Artificial Sequence
  Chemically Synthesized
QVQLQESGGGLVQAGGSLRLSCAASGYISYYAYMGWYRQAPGKERELVAGIDVGASTNYADSVKGRFTISRDNAKNTVYLQMNSLKPEDTAVYYCAAWDQRPYEDSDTGAIYHYYWGQGTQVTVSS

SEQ ID NO: 14033 - protein, 118 aa, Artificial Sequence
  Chemically Synthesized
QVQLQESGGGLVQAGGSLRLSCAASGTISDSNYMGWYRQAPGKERELVATIGDGGNTNYADSVKGRFTISRDNAKNTVYLQMNSLKPEDTAVYYCAAREYGGYPHEYWGQGTQVTVSS

SEQ ID NO: 14034 - protein, 118 aa, Artificial Sequence
  Chemically Synthesized
QVQLQESGGGLVQAGGSLRLSCAASGNISQNVYMGWYRQAPGKEREFVATITGGTITYYADSVKGRFTISRDNAKNTVYLQMNSLKPEDTAVYYCAAGSGGDITYHYWGQGTQVTVSS

SEQ ID NO: 14035 - protein, 126 aa, Artificial Sequence
  Chemically Synthesized
QVQLQESGGGLVQAGGSLRLSCAASGSIFYVYDMGWYRQAPGKEREFVAAITDGSITNYADSVKGRFTISRDNAKNTVYLQMNSLKPEDTAVYYCAARGLKGLRWLWVPSGFHSYWGQGTQVTVSS

SEQ ID NO: 14036 - protein, 118 aa, Artificial Sequence
  Chemically Synthesized
QVQLQESGGGLVQAGGSLRLSCAASGYISRRYDMGWYRQAPGKERELVATIAVGTTTNYADSVKGRFTISRDNAKNTVYLQMNSLKPEDTAVYYCAVDNATHRTLYYWGQGTQVTVSS

SEQ ID NO: 14037 - protein, 122 aa, Artificial Sequence
  Chemically Synthesized
QVQLQESGGGLVQAGGSLRLSCAASGSISGAPYMGWYRQAPGKEREFVASIGYGAITYYADSVKGRFTISRDNAKNTVYLQMNSLKPEDTAVYYCAAQRSGGGGIYPQHYYWGQGTQVTVSS

SEQ ID NO: 14038 - protein, 122 aa, Artificial Sequence
  Chemically Synthesized
QVQLQESGGGLVQAGGSLRLSCAASGNISRWRPMGWYRQAPGKEREFVAGIGYGSTTYYADSVKGRFTISRDNAKNTVYLQMNSLKPEDTAVYYCAAGGLSALLYAYALVYWGQGTQVTVSS

SEQ ID NO: 14039 - protein, 124 aa, Artificial Sequence
  Chemically Synthesized
QVQLQESGGGLVQAGGSLRLSCAASGNIFAYASMGWYRQAPGKEREFVASITYGSTTYYADSVKGRFTISRDNAKNTVYLQMNSLKPEDTAVYYCAVPDTQTNDVDYVYPSSYWGQGTQVTVSS

SEQ ID NO: 14040 - protein, 122 aa, Artificial Sequence
  Chemically Synthesized
QVQLQESGGGLVQAGGSLRLSCAASGNIFPDDGMGWYRQAPGKEREFVATISNGSSTNYADSVKGRFTISRDNAKNTVYLQMNSLKPEDTAVYYCAVDDYEGRDLWEYLGYWGQGTQVTVSS

SEQ ID NO: 14041 - protein, 126 aa, Artificial Sequence
  Chemically Synthesized
QVQLQESGGGLVQAGGSLRLSCAASGTISYTYVMGWYRQAPGKEREFVAAIDSGTNTYYADSVKGRFTISRDNAKNTVYLQMNSLKPEDTAVYYCAVDAIDYGYHYTQYDTLYYYWGQGTQVTVSS

SEQ ID NO: 14042 - protein, 118 aa, Artificial Sequence
  Chemically Synthesized
QVQLQESGGGLVQAGGSLRLSCAASGTIFILTLMGWYRQAPGKEREFVAGIAYGGSTNYADSVKGRFTISRDNAKNTVYLQMNSLKPEDTAVYYCAALIRGDAYFYYWGQGTQVTVSS

SEQ ID NO: 14043 - protein, 118 aa, Artificial Sequence
  Chemically Synthesized
QVQLQESGGGLVQAGGSLRLSCAASGTISAPNYMGWYRQAPGKEREFVAGITLGGITNYADSVKGRFTISRDNAKNTVYLQMNSLKPEDTAVYYCAVYAADSVDYRYWGQGTQVTVSS

SEQ ID NO: 14044 - protein, 126 aa, Artificial Sequence
  Chemically Synthesized
QVQLQESGGGLVQAGGSLRLSCAASGYISHTDYMGWYRQAPGKERELVASITVGTNTNYADSVKGRFTISRDNAKNTVYLQMNSLKPEDTAVYYCAVVARTLQYYISGPSRIHAYWGQGTQVTVSS

SEQ ID NO: 14045 - protein, 117 aa, Artificial Sequence
  Chemically Synthesized
QVQLQESGGGLVQAGGSLRLSCAASGNIFYKDDMGWYRQAPGKEREFVASMMKVLVPYADSVKGRFTISRDNAKNTVYLQMNSLKPEDTAVYYCAAYDTADYPLTYWGQGTQVTVSS

SEQ ID NO: 14046 - protein, 118 aa, Artificial Sequence
  Chemically Synthesized
QVQLQESGGGLVQAGGSLRLSCAASGTIFDVAGMGWYRQAPGKERELVAGISYGTSTNYADSVKGRFTISRDNAKNTVYLQMNSLKPEDTAVYYCAVRKLYALPFTYWGQGTQVTVSS

SEQ ID NO: 14047 - protein, 117 aa, Artificial Sequence
  Chemically Synthesized
QVQLQESGGGLVQAGGSLRLSCAASGNISRTTYMGWYRQAPGKERELVAAIDTVLLPYADSVKGRFTISRDNAKNTVYLQMNSLKPEDTAVYYCAVYQYNPESYPYWGQGTQVTVSS

SEQ ID NO: 14048 - protein, 110 aa, Artificial Sequence
  Chemically Synthesized
QVQLQESGGGLVQAGGSLRLSCAASGTISGRENMGWYRQAPGKEREFVASIGVGSSTYYADSVKGRFTISRDNAKNTVYLQMNSLKPEDTAVYYCAADYWGQGTQVTVSS

SEQ ID NO: 14049 - protein, 125 aa, Artificial Sequence
  Chemically Synthesized
QVQLQESGGGLVQAGGSLRLSCAASGSISYPYYMGWYRQAPGKERELVATIDDGGSTYYADSVKGRFTISRDNAKNTVYLQMNSLKPEDTAVYYCAVRYVQYYIYDDYYTILTYWGQGTQVTVSS

SEQ ID NO: 14050 - protein, 126 aa, Artificial Sequence
  Chemically Synthesized
QVQLQESGGGLVQAGGSLRLSCAASGNIFIFLLMGWYRQAPGKEREFVAAIDAGTITNYADSVKGRFTISRDNAKNTVYLQMNSLKPEDTAVYYCAAVEYTGGAYDAYYPRGYPYWGQGTQVTVSS

SEQ ID NO: 14051 - protein, 126 aa, Artificial Sequence
  Chemically Synthesized
QVQLQESGGGLVQAGGSLRLSCAASGNISNTLSMGWYRQAPGKEREFVAGIAWGATTNYADSVKGRFTISRDNAKNTVYLQMNSLKPEDTAVYYCAARYYYRRGADRRPRPYLRYWGQGTQVTVSS

SEQ ID NO: 14052 - protein, 122 aa, Artificial Sequence
  Chemically Synthesized
QVQLQESGGGLVQAGGSLRLSCAASGTISTQDLMGWYRQAPGKERELVATISDGSNTYYADSVKGRFTISRDNAKNTVYLQMNSLKPEDTAVYYCAVGAGRWYPWDLYYAYWGQGTQVTVSS

SEQ ID NO: 14053 - protein, 122 aa, Artificial Sequence
  Chemically Synthesized
QVQLQESGGGLVQAGGSLRLSCAASGSISERGLMGWYRQAPGKERELVAAIDKGSITNYADSVKGRFTISRDNAKNTVYLQMNSLKPEDTAVYYCAATGVLANFAFDGHYYWGQGTQVTVSS

SEQ ID NO: 14054 - protein, 114 aa, Artificial Sequence
  Chemically Synthesized
QVQLQESGGGLVQAGGSLRLSCAASGYISGETVMGWYRQAPGKEREFVAAIGSVVLPYADSVKGRFTISRDNAKNTVYLQMNSLKPEDTAVYYCARAYGSVIYWGQGTQVTVSS

SEQ ID NO: 14055 - protein, 118 aa, Artificial Sequence
  Chemically Synthesized
QVQLQESGGGLVQAGGSLRLSCAASGTISTSYDMGWYRQAPGKERELVATIDYGTITYYADSVKGRFTISRDNAKNTVYLQMNSLKPEDTAVYYCAAPFIGYADLPYWGQGTQVTVSS

SEQ ID NO: 14056 - protein, 118 aa, Artificial Sequence
  Chemically Synthesized
QVQLQESGGGLVQAGGSLRLSCAASGTISRYRYMGWYRQAPGKERELVATISYGGNTYYADSVKGRFTISRDNAKNTVYLQMNSLKPEDTAVYYCAVVPIYRRNLYYWGQGTQVTVSS

SEQ ID NO: 14057 - protein, 111 aa, Artificial Sequence
  Chemically Synthesized
QVQLQESGGGLVQAGGSLRLSCAASGNISVYSGMGWYRQAPGKEREFVASIDAPGSTTYYADSVKGRFTISRDNAKNTVYLQMNSLKPEDTAVYYCAHLYWGQGTQVTVSS

SEQ ID NO: 14058 - protein, 122 aa, Artificial Sequence
  Chemically Synthesized
QVQLQESGGGLVQAGGSLRLSCAASGTIFWRASMGWYRQAPGKEREFVATIDGGANTNYADSVKGRFTISRDNAKNTVYLQMNSLKPEDTAVYYCAVDTALVRTPSYPLVYWGQGTQVTVSS

SEQ ID NO: 14059 - protein, 118 aa, Artificial Sequence
  Chemically Synthesized
QVQLQESGGGLVQAGGSLRLSCAASGSISRGGDMGWYRQAPGKEREFVASISQGGTTYYADSVKGRFTISRDNAKNTVYLQMNSLKPEDTAVYYCAVGILSPERFYYWGQGTQVTVSS

SEQ ID NO: 14060 - protein, 118 aa, Artificial Sequence
  Chemically Synthesized
QVQLQESGGGLVQAGGSLRLSCAASGNIFQYQEMGWYRQAPGKEREFVAAIGVGANTYYADSVKGRFTISRDNAKNTVYLQMNSLKPEDTAVYYCAATGHEDHTYAYWGQGTQVTVSS

SEQ ID NO: 14061 - protein, 111 aa, Artificial Sequence
  Chemically Synthesized
QVQLQESGGGLVQAGGSLRLSCAASGSISTWGDMGWYRQAPGKERELVAAISSGGNTNYADSVKGRFTISRDNAKNTVYLQMNSLKPEDTAVYYCANSFYWGQGTQVTVSS

SEQ ID NO: 14062 - protein, 122 aa, Artificial Sequence
  Chemically Synthesized
QVQLQESGGGLVQAGGSLRLSCAASGSIFVFSVMGWYRQAPGKERELVASINYGGTTNYADSVKGRFTISRDNAKNTVYLQMNSLKPEDTAVYYCAAIGNWPSTDDYDHRYWGQGTQVTVSS

SEQ ID NO: 14063 - protein, 118 aa, Artificial Sequence
  Chemically Synthesized
QVQLQESGGGLVQAGGSLRLSCAASGYIFSRVAMGWYRQAPGKEREFVAGIGGGANTYYADSVKGRFTISRDNAKNTVYLQMNSLKPEDTAVYYCAAAGIALNYLPYWGQGTQVTVSS

SEQ ID NO: 14064 - protein, 122 aa, Artificial Sequence
  Chemically Synthesized
QVQLQESGGGLVQAGGSLRLSCAASGYIFTHDYMGWYRQAPGKEREFVAAIDLGGSTNYADSVKGRFTISRDNAKNTVYLQMNSLKPEDTAVYYCAARLARLATGYIYFWYWGQGTQVTVSS

SEQ ID NO: 14065 - protein, 118 aa, Artificial Sequence
  Chemically Synthesized
QVQLQESGGGLVQAGGSLRLSCAASGNISSYSAMGWYRQAPGKEREFVAAISFGGNTNYADSVKGRFTISRDNAKNTVYLQMNSLKPEDTAVYYCAVISSTNSSHVYWGQGTQVTVSS

SEQ ID NO: 14066 - protein, 126 aa, Artificial Sequence
  Chemically Synthesized
QVQLQESGGGLVQAGGSLRLSCAASGNIFPRDDMGWYRQAPGKERELVAAITRGTITYYADSVKGRFTISRDNAKNTVYLQMNSLKPEDTAVYYCAVYPPYSGTKPYYYLDRHAYWGQGTQVTVSS

SEQ ID NO: 14067 - protein, 121 aa, Artificial Sequence
  Chemically Synthesized
QVQLQESGGGLVQAGGSLRLSCAASGTISLRGSMGWYRQAPGKERELVASISRGATTNYADSVKGRFTISRDNAKNTVYLQMNSLKPEDTAVYYCAVLRRVAYLWRGHDYWGQGTQVTVSS

SEQ ID NO: 14068 - protein, 116 aa, Artificial Sequence
  Chemically Synthesized
QVQLQESGGGLVQAGGSLRLSCAASGYISANYDMGWYRQAPGKEREFVATIPYADSVKGRFTISRDNAKNTVYLQMNSLKPEDTAVYYCAVGNRTQTVLRYHYPYWGQGTQVTVSS

SEQ ID NO: 14069 - protein, 117 aa, Artificial Sequence
  Chemically Synthesized
QVQLQESGGGLVQAGGSLRLSCAASGTIFIPGQMGWYRQAPGKERELVATINGGSTTNYADSVKGRFTISRDNAKNTVYLQMNSLKPEDTAVYYCAAVGAWYLPLYWGQGTQVTVSS

SEQ ID NO: 14070 - protein, 122 aa, Artificial Sequence
  Chemically Synthesized
QVQLQESGGGLVQAGGSLRLSCAASGTIFPWYDMGWYRQAPGKERELVASIAQGSNTNYADSVKGRFTISRDNAKNTVYLQMNSLKPEDTAVYYCAVLSTGDYDRTDELSYWGQGTQVTVSS

SEQ ID NO: 14071 - protein, 123 aa, Artificial Sequence
  Chemically Synthesized
QVQLQESGGGLVQAGGSLRLSCAASGTISPFYNMGWYRQAPGKEREFVASIDVGGITNYADSVKGRFTISRDNAKNTVYLQMNSLKPEDTAVYYCAANVPLYDTWREYPYVYWGQGTQVTVSS

SEQ ID NO: 14072 - protein, 120 aa, Artificial Sequence
  Chemically Synthesized
QVQLQESGGGLVQAGGSLRLSCAASGSIFYYGYMGWYRQAPGKERELVAAISLGGSTNYADSVKGRFTISRDNAKNTVYLQMNSLKPEDTAVYYCAYYLPSVLRVWFRYWGQGTQVTVSS

SEQ ID NO: 14073 - protein, 118 aa, Artificial Sequence
  Chemically Synthesized
QVQLQESGGGLVQAGGSLRLSCAASGNIFRTRTMGWYRQAPGKERELVAGINFGGSTNYADSVKGRFTISRDNAKNTVYLQMNSLKPEDTAVYYCAVYYGWGTYHLYWGQGTQVTVSS

SEQ ID NO: 14074 - protein, 118 aa, Artificial Sequence
  Chemically Synthesized
QVQLQESGGGLVQAGGSLRLSCAASGTISYRRVMGWYRQAPGKERELVAAIAAGSNTNYADSVKGRFTISRDNAKNTVYLQMNSLKPEDTAVYYCAAPYSVVAPHPYWGQGTQVTVSS

SEQ ID NO: 14075 - protein, 117 aa, Artificial Sequence
  Chemically Synthesized
QVQLQESGGGLVQAGGSLRLSCAASGYIFYRTDMGWYRQAPGKEREFVAAINAGTNTYYADSVKGRFTISRDNAKNTVYLQMNSLKPEDTAVYYCAVHIYPKSTLYWGQGTQVTVSS

SEQ ID NO: 14076 - protein, 126 aa, Artificial Sequence
  Chemically Synthesized
QVQLQESGGGLVQAGGSLRLSCAASGSISKGVGMGWYRQAPGKERELVAGIDSGSSTYYADSVKGRFTISRDNAKNTVYLQMNSLKPEDTAVYYCAVIYNTSGNQDGAGYWVHGYWGQGTQVTVSS

SEQ ID NO: 14077 - protein, 116 aa, Artificial Sequence
  Chemically Synthesized
QVQLQESGGGLVQAGGSLRLSCAASGSIFSDYDMGWYRQAPGKERELVAGTGYYYLYADSVKGRFTISRDNAKNTVYLQMNSLKPEDTAVYYCAAGRQSQGDHYYWGQGTQVTVSS

SEQ ID NO: 14078 - protein, 118 aa, Artificial Sequence
  Chemically Synthesized
QVQLQESGGGLVQAGGSLRLSCAASGYISHVSPMGWYRQAPGKERELVAGINEGGNTYYADSVKGRFTISRDNAKNTVYLQMNSLKPEDTAVYYCAVHYARRANHYYWGQGTQVTVSS

SEQ ID NO: 14079 - protein, 113 aa, Artificial Sequence
  Chemically Synthesized
QVQLQESGGGLVQAGGSLRLSCAASGYIFSDLVMGWYRQAPGKEREFVATIAGGSSTNYADSVKGRFTISRDNAKNTVYLQMNSLKPEDTAVYYCALLLPWYWGQGTQVTVSS

SEQ ID NO: 14080 - protein, 118 aa, Artificial Sequence
  Chemically Synthesized
QVQLQESGGGLVQAGGSLRLSCAASGNISAHTAMGWYRQAPGKERELVAAIGIGSITNYADSVKGRFTISRDNAKNTVYLQMNSLKPEDTAVYYCAAPAVRPEGLPYWGQGTQVTVSS

SEQ ID NO: 14081 - protein, 118 aa, Artificial Sequence
  Chemically Synthesized
QVQLQESGGGLVQAGGSLRLSCAASGSIFWQSDMGWYRQAPGKEREFVAAIGIGSITNYADSVKGRFTISRDNAKNTVYLQMNSLKPEDTAVYYCAADNSYYVLFPYWGQGTQVTVSS

SEQ ID NO: 14082 - protein, 121 aa, Artificial Sequence
  Chemically Synthesized
QVQLQESGGGLVQAGGSLRLSCAASGTISRTYYMGWYRQAPGKERELVATIDVGTNTNYADSVKGRFTISRDNAKNTVYLQMNSLKPEDTAVYYCAAKLFTFFWKHRYYYWGQGTQVTVSS

SEQ ID NO: 14083 - protein, 118 aa, Artificial Sequence
  Chemically Synthesized
QVQLQESGGGLVQAGGSLRLSCAASGTIFLGDYMGWYRQAPGKERELVATIAFGGSTYYADSVKGRFTISRDNAKNTVYLQMNSLKPEDTAVYYCAVWPGYKRRHTYWGQGTQVTVSS

SEQ ID NO: 14084 - protein, 117 aa, Artificial Sequence
  Chemically Synthesized
QVQLQESGGGLVQAGGSLRLSCAASGLFLTLVMGWYRQAPGKERELVAGITYGSTTYYADSVKGRFTISRDNAKNTVYLQMNSLKPEDTAVYYCAASYAGYPYYNYWGQGTQVTVSS

SEQ ID NO: 14085 - protein, 118 aa, Artificial Sequence
  Chemically Synthesized
QVQLQESGGGLVQAGGSLRLSCAASGTIFLDSWMGWYRQAPGKERELVAAINNGGTTYYADSVKGRFTISRDNAKNTVYLQMNSLKPEDTAVYYCAVAERYYPDHAYWGQGTQVTVSS

SEQ ID NO: 14086 - protein, 118 aa, Artificial Sequence
  Chemically Synthesized
QVQLQESGGGLVQAGGSLRLSCAASGSIFYAVYMGWYRQAPGKEREFVATIAGGTITYYADSVKGRFTISRDNAKNTVYLQMNSLKPEDTAVYYCAVSYYIDVYLYYWGQGTQVTVSS

SEQ ID NO: 14087 - protein, 118 aa, Artificial Sequence
  Chemically Synthesized
QVQLQESGGGLVQAGGSLRLSCAASGNIFWTIAMGWYRQAPGKERELVASISLGGITNYADSVKGRFTISRDNAKNTVYLQMNSLKPEDTAVYYCAAPWLPWTVFPYWGQGTQVTVSS

SEQ ID NO: 14088 - protein, 118 aa, Artificial Sequence
  Chemically Synthesized
QVQLQESGGGLVQAGGSLRLSCAASGTIFHPYGMGWYRQAPGKEREFVAGIAWGTSTNYADSVKGRFTISRDNAKNTVYLQMNSLKPEDTAVYYCAVFYPSQNAFGYWGQGTQVTVSS

SEQ ID NO: 14089 - protein, 122 aa, Artificial Sequence
  Chemically Synthesized
QVQLQESGGGLVQAGGSLRLSCAASGTIFDDSTMGWYRQAPGKERELVASIAYGASTNYADSVKGRFTISRDNAKNTVYLQMNSLKPEDTAVYYCAVGAQVDTDYTPSYFYWGQGTQVTVSS

SEQ ID NO: 14090 - protein, 122 aa, Artificial Sequence
  Chemically Synthesized
QVQLQESGGGLVQAGGSLRLSCAASGTIFDWTRMGWYRQAPGKERELVAAIAWGATTNYADSVKGRFTISRDNAKNTVYLQMNSLKPEDTAVYYCAAYYEVGSNHGYSYIYWGQGTQVTVSS

SEQ ID NO: 14091 - protein, 118 aa, Artificial Sequence
  Chemically Synthesized
QVQLQESGGGLVQAGGSLRLSCAASGYISPSSDMGWYRQAPGKERELVAGIASGTSTNYADSVKGRFTISRDNAKNTVYLQMNSLKPEDTAVYYCAVYNASRDGYEYWGQGTQVTVSS

SEQ ID NO: 14092 - protein, 118 aa, Artificial Sequence
  Chemically Synthesized
QVQLQESGGGLVQAGGSLRLSCAASGYISLSSPMGWYRQAPGKERELVATIDWGTSTNYADSVKGRFTISRDNAKNTVYLQMNSLKPEDTAVYYCAAQQYADPDHAYWGQGTQVTVSS

SEQ ID NO: 14093 - protein, 122 aa, Artificial Sequence
  Chemically Synthesized
QVQLQESGGGLVQAGGSLRLSCAASGYISRLYGMGWYRQAPGKERELVATIGTGAITYYADSVKGRFTISRDNAKNTVYLQMNSLKPEDTAVYYCAADSPFTGDGYVPLIYWGQGTQVTVSS

SEQ ID NO: 14094 - protein, 111 aa, Artificial Sequence
  Chemically Synthesized
QVQLQESGGGLVQAGGSLRLSCAASGTISAYPMGWYRQAPGKEREFVAGIDLGGITYYADSVKGRFTISRDNAKNTVYLQMNSLKPEDTAVYYCAVLLIYWGQGTQVTVSS

SEQ ID NO: 14095 - protein, 118 aa, Artificial Sequence
  Chemically Synthesized
QVQLQESGGGLVQAGGSLRLSCAASGTIFGADNMGWYRQAPGKERELVATITDGSITYYADSVKGRFTISRDNAKNTVYLQMNSLKPEDTAVYYCAAYYVGEAYHAYWGQGTQVTVSS

SEQ ID NO: 14096 - protein, 118 aa, Artificial Sequence
  Chemically Synthesized
QVQLQESGGGLVQAGGSLRLSCAASGYIFGLAIMGWYRQAPGKERELVASITSGSITYYADSVKGRFTISRDNAKNTVYLQMNSLKPEDTAVYYCAVDRVYRYAHDYWGQGTQVTVSS

SEQ ID NO: 14097 - protein, 119 aa, Artificial Sequence
  Chemically Synthesized
QVQLQESGGGLVQAGGSLRLSCAASGTIFRARSMGWYRQAPGKERELVASIGGGASTYYADSVKGRFTISRDNAKNTVYLQMNSLKPEDTAVYYCAVVERAYGAWFYYWGQGTQVTVSS

SEQ ID NO: 14098 - protein, 118 aa, Artificial Sequence
  Chemically Synthesized
QVQLQESGGGLVQAGGSLRLSCAASGTIFLTLFMGWYRQAPGKERELVASITYGTITNYADSVKGRFTISRDNAKNTVYLQMNSLKPEDTAVYYCAVVSDRDEWLNYWGQGTQVTVSS

SEQ ID NO: 14099 - protein, 122 aa, Artificial Sequence
  Chemically Synthesized
QVQLQESGGGLVQAGGSLRLSCAASGYIFQSYYMGWYRQAPGKEREFVASINGGSITNYADSVKGRFTISRDNAKNTVYLQMNSLKPEDTAVYYCAVARADPYDQQGWLYYWGQGTQVTVSS

SEQ ID NO: 14100 - protein, 118 aa, Artificial Sequence
  Chemically Synthesized
QVQLQESGGGLVQAGGSLRLSCAASGTIFNGTHMGWYRQAPGKEREFVAAIAYGTNTYYADSVKGRFTISRDNAKNTVYLQMNSLKPEDTAVYYCAAYYVFIGFHGYWGQGTQVTVSS

SEQ ID NO: 14101 - protein, 120 aa, Artificial Sequence
  Chemically Synthesized
QVQLQESGGGLVQAGGSLRLSCAASGNISSLYGMGWYRQAPGKEREFVAAIGGGSTYYADSVKGRFTISRDNAKNTVYLQMNSLKPEDTAVYYCAAVYVGKQVVFSTIYWGQGTQVTVSS

SEQ ID NO: 14102 - protein, 122 aa, Artificial Sequence
  Chemically Synthesized
QVQLQESGGGLVQAGGSLRLSCAASGNIFAYPLMGWYRQAPGKERELVAGIAGGGSTYYADSVKGRFTISRDNAKNTVYLQMNSLKPEDTAVYYCAVLYYRPPGRYWYYTYWGQGTQVTVSS

SEQ ID NO: 14103 - protein, 122 aa, Artificial Sequence
  Chemically Synthesized
QVQLQESGGGLVQAGGSLRLSCAASGYIFEAFTMGWYRQAPGKERELVAAIDTGGITYYADSVKGRFTISRDNAKNTVYLQMNSLKPEDTAVYYCAAVSYGHDESDYLLDYWGQGTQVTVSS

SEQ ID NO: 14104 - protein, 118 aa, Artificial Sequence
  Chemically Synthesized
QVQLQESGGGLVQAGGSLRLSCAASGSIFGFIHMGWYRQAPGKERELVASIGSGTSTYYADSVKGRFTISRDNAKNTVYLQMNSLKPEDTAVYYCAVQFDGVDFLHYWGQGTQVTVSS

SEQ ID NO: 14105 - protein, 116 aa, Artificial Sequence
  Chemically Synthesized
QVQLQESGGGLVQAGGSLRLSCAASGNISSGDLMGWYRQAPGKEREFVAAIGDGTSTYYADSVKGRFTISRDNAKNTVYLQMNSLKPEDTAVYYCAVYQKYRFPYWGQGTQVTVSS

SEQ ID NO: 14106 - protein, 118 aa, Artificial Sequence
  Chemically Synthesized
QVQLQESGGGLVQAGGSLRLSCAASGTIFVPHYMGWYRQAPGKERELVATIDIGASTYYADSVKGRFTISRDNAKNTVYLQMNSLKPEDTAVYYCAVRYPDSVGHQYWGQGTQVTVSS

SEQ ID NO: 14107 - protein, 122 aa, Artificial Sequence
  Chemically Synthesized
QVQLQESGGGLVQAGGSLRLSCAASGTISGVGAMGWYRQAPGKEREFVAGIDQGGNTYYADSVKGRFTISRDNAKNTVYLQMNSLKPEDTAVYYCAASDAYHNWAVNDLGYWGQGTQVTVSS

SEQ ID NO: 14108 - protein, 116 aa, Artificial Sequence
  Chemically Synthesized
QVQLQESGGGLVQAGGSLRLSCAASGTISQYDWMGWYRQAPGKERELVATIASGASTNYADSVKGRFTISRDNAKNTVYLQMNSLKPEDTAVYYCAVYQGVDHRYWGQGTQVTVSS

SEQ ID NO: 14109 - protein, 118 aa, Artificial Sequence
  Chemically Synthesized
QVQLQESGGGLVQAGGSLRLSCAASGSIFIQFDMGWYRQAPGKEREFVAGITYGTSTNYADSVKGRFTISRDNAKNTVYLQMNSLKPEDTAVYYCAVATWGYYWFNYWGQGTQVTVSS

SEQ ID NO: 14110 - protein, 118 aa, Artificial Sequence
  Chemically Synthesized
QVQLQESGGGLVQAGGSLRLSCAASGTISHRGSMGWYRQAPGKEREFVAGISYGASTYYADSVKGRFTISRDNAKNTVYLQMNSLKPEDTAVYYCAAYYNDTDNHQYWGQGTQVTVSS

SEQ ID NO: 14111 - protein, 122 aa, Artificial Sequence
  Chemically Synthesized
QVQLQESGGGLVQAGGSLRLSCAASGSIFFPGYMGWYRQAPGKERELVASIDHGTNTNYADSVKGRFTISRDNAKNTVYLQMNSLKPEDTAVYYCAADVPVNYYDVAVHYYWGQGTQVTVSS

SEQ ID NO: 14112 - protein, 126 aa, Artificial Sequence
  Chemically Synthesized
QVQLQESGGGLVQAGGSLRLSCAASGTIFRYRRMGWYRQAPGKEREFVAGISRGSITNYADSVKGRFTISRDNAKNTVYLQMNSLKPEDTAVYYCAVNSWGTYGTAVLSSRYLSYWGQGTQVTVSS

SEQ ID NO: 14113 - protein, 122 aa, Artificial Sequence
  Chemically Synthesized
QVQLQESGGGLVQAGGSLRLSCAASGYIFGANDMGWYRQAPGKERELVAGIGYGTITYYADSVKGRFTISRDNAKNTVYLQMNSLKPEDTAVYYCAALRRSDNVDLYDHSYWGQGTQVTVSS

SEQ ID NO: 14114 - protein, 122 aa, Artificial Sequence
  Chemically Synthesized
QVQLQESGGGLVQAGGSLRLSCAASGNISDVYYMGWYRQAPGKEREFVATIDSGTSTYYADSVKGRFTISRDNAKNTVYLQMNSLKPEDTAVYYCAVQAISREQIGVPFAYWGQGTQVTVSS

SEQ ID NO: 14115 - protein, 124 aa, Artificial Sequence
  Chemically Synthesized
QVQLQESGGGLVQAGGSLRLSCAASGYISYYVIMGWYRQAPGKEREFVAAIGDGGTYADSVKGRFTISRDNAKNTVYLQMNSLKPEDTAVYYCAVNALFKVSYSTGRGYVFYYWGQGTQVTVSS

SEQ ID NO: 14116 - protein, 118 aa, Artificial Sequence
  Chemically Synthesized
QVQLQESGGGLVQAGGSLRLSCAASGSIFVYWPMGWYRQAPGKERELVATIDDGGSTYYADSVKGRFTISRDNAKNTVYLQMNSLKPEDTAVYYCAVPVWLSVTFSYWGQGTQVTVSS

SEQ ID NO: 14117 - protein, 122 aa, Artificial Sequence
  Chemically Synthesized
QVQLQESGGGLVQAGGSLRLSCAASGSISPIEWMGWYRQAPGKERELVAAIADGGNTYYADSVKGRFTISRDNAKNTVYLQMNSLKPEDTAVYYCAVDYDWDDGHFYYHYYWGQGTQVTVSS

SEQ ID NO: 14118 - protein, 117 aa, Artificial Sequence
  Chemically Synthesized
QVQLQESGGGLVQAGGSLRLSCAASGYIFYSSVMGWYRQAPGKERELVASIDRCYYQYADSVKGRFTISRDNAKNTVYLQMNSLKPEDTAVYYCAASQDDTGDLGYWGQGTQVTVSS

SEQ ID NO: 14119 - protein, 117 aa, Artificial Sequence
  Chemically Synthesized
QVQLQESGGGLVQAGGSLRLSCAASGTIFWQSYMGWYRQAPGKEREFVAAISVGATTKYADSVKGRFTISRDNAKNTVYLQMNSLKPEDTAVYYCAAYQSTTVCFYWGQGTQVTVSS

SEQ ID NO: 14120 - protein, 121 aa, Artificial Sequence
  Chemically Synthesized
QVQLQESGGGLVQAGGSLRLSCAASGSIFAYRQMGWYRQAPGKEREFVASIDTGGSTNYADSVKGRFTISRDNAKNTVYLQMNSLKPEDTAVYYCAALRRPYPLHNFLLYWGQGTQVTVSS

SEQ ID NO: 14121 - protein, 116 aa, Artificial Sequence
  Chemically Synthesized
QVQLQESGGGLVQAGGSLRLSCAASGNISTLMGWYRQAPGKERELVASISSGTTTYYADSVKGRFTISRDNAKNTVYLQMNSLKPEDTAVYYCAVTYGRVGPYWYWGQGTQVTVSS

SEQ ID NO: 14122 - protein, 118 aa, Artificial Sequence
  Chemically Synthesized
QVQLQESGGGLVQAGGSLRLSCAASGTIFVRATMGWYRQAPGKERELVASIDYGGSTNYADSVKGRFTISRDNAKNTVYLQMNSLKPEDTAVYYCAAEIDRDRQYTYWGQGTQVTVSS

SEQ ID NO: 14123 - protein, 121 aa, Artificial Sequence
  Chemically Synthesized
QVQLQESGGGLVQAGGSLRLSCAASGTIFALNNMGWYRQAPGKEREFVAAIADGVLPYADSVKGRFTISRDNAKNTVYLQMNSLKPEDTAVYYCAVQSAPWALYPYKHGYWGQGTQVTVSS

SEQ ID NO: 14124 - protein, 117 aa, Artificial Sequence
  Chemically Synthesized
QVQLQESGGGLVQAGGSLRLSCAASGTISDDRFMGWYRQAPGKERELVATIDNGTITNYADSVKGRFTISRDNAKNTVYLQMNSLKPEDTAVYYCAVISTSVVLIYWGQGTQVTVSS

SEQ ID NO: 14125 - protein, 118 aa, Artificial Sequence
  Chemically Synthesized
QVQLQESGGGLVQAGGSLRLSCAASGTIFTGYTMGWYRQAPGKERELVATISYGSTTYYADSVKGRFTISRDNAKNTVYLQMNSLKPEDTAVYYCAAWYLSSKSHSYWGQGTQVTVSS

SEQ ID NO: 14126 - protein, 117 aa, Artificial Sequence
  Chemically Synthesized
QVQLQESGGGLVQAGGSLRLSCAASGTIFGQGVMGWYRQAPGKEREFVAAINEGTNTNYADSVKGRFTISRDNAKNTVYLQMNSLKPEDTAVYYCAVYDGVSDHYYWGQGTQVTVSS

SEQ ID NO: 14127 - protein, 126 aa, Artificial Sequence
  Chemically Synthesized
QVQLQESGGGLVQAGGSLRLSCAASGNIFYYRYMGWYRQAPGKEREFVAAITVGGSTNYADSVKGRFTISRDNAKNTVYLQMNSLKPEDTAVYYCAARRPWKYYRTHPTYNDYRYWGQGTQVTVSS

SEQ ID NO: 14128 - protein, 126 aa, Artificial Sequence
  Chemically Synthesized
QVQLQESGGGLVQAGGSLRLSCAASGYIFYLAYMGWYRQAPGKERELVASINGGSNTNYADSVKGRFTISRDNAKNTVYLQMNSLKPEDTAVYYCAARFYRRHGYNSFYHDTYSYWGQGTQVTVSS

SEQ ID NO: 14129 - protein, 122 aa, Artificial Sequence
  Chemically Synthesized
QVQLQESGGGLVQAGGSLRLSCAASGYIFYPLYMGWYRQAPGKEREFVASITSGANTNYADSVKGRFTISRDNAKNTVYLQMNSLKPEDTAVYYCAAGRRGGWYTYRYYAYWGQGTQVTVSS

SEQ ID NO: 14130 - protein, 117 aa, Artificial Sequence
  Chemically Synthesized
QVQLQESGGGLVQAGGSLRLSCAASGTISGDYGMGWYRQAPGKERELVAGISLGYYQYADSVKGRFTISRDNAKNTVYLQMNSLKPEDTAVYYCAAYYIYLVWHDYWGQGTQVTVSS

SEQ ID NO: 14131 - protein, 118 aa, Artificial Sequence
  Chemically Synthesized
QVQLQESGGGLVQAGGSLRLSCAASGYIFLLPNMGWYRQAPGKERELVATIGAGGTTNYADSVKGRFTISRDNAKNTVYLQMNSLKPEDTAVYYCAAFYIGYSVFGYWGQGTQVTVSS

SEQ ID NO: 14132 - protein, 126 aa, Artificial Sequence
  Chemically Synthesized
QVQLQESGGGLVQAGGSLRLSCAASGSIFDTHSMGWYRQAPGKERELVASISEGTSTYYADSVKGRFTISRDNAKNTVYLQMNSLKPEDTAVYYCAVYYAPYEARQLRQTPHFDYWGQGTQVTVSS

SEQ ID NO: 14133 - protein, 122 aa, Artificial Sequence
  Chemically Synthesized
QVQLQESGGGLVQAGGSLRLSCAASGSIFVTQRMGWYRQAPGKERELVASIDRGSTTYYADSVKGRFTISRDNAKNTVYLQMNSLKPEDTAVYYCAAHYAYWFRSQRRHGYWGQGTQVTVSS

SEQ ID NO: 14134 - protein, 113 aa, Artificial Sequence
  Chemically Synthesized
QVQLQESGGGLVQAGGSLRLSCAASGSIFPSSPMGWYRQAPGKEREFVAVVVPYADSVKGRFTISRDNAKNTVYLQMNSLKPEDTAVYYCAASVRAPTTFYYWGQGTQVTVSS

SEQ ID NO: 14135 - protein, 122 aa, Artificial Sequence
  Chemically Synthesized
QVQLQESGGGLVQAGGSLRLSCAASGSISLTRSMGWYRQAPGKERELVASIARGAITYYADSVKGRFTISRDNAKNTVYLQMNSLKPEDTAVYYCAVRRWYYNTGGFWHYYWGQGTQVTVSS

SEQ ID NO: 14136 - protein, 119 aa, Artificial Sequence
  Chemically Synthesized
QVQLQESGGGLVQAGGSLRLSCAASGTIFPVERMGWYRQAPGKEREFVAGIDGGTSTNYADSVKGRFTISRDNAKNTVYLQMNSLKPEDTAVYYCAARSLRTLTIRLYWGQGTQVTVSS

SEQ ID NO: 14137 - protein, 118 aa, Artificial Sequence
  Chemically Synthesized
QVQLQESGGGLVQAGGSLRLSCAASGSIFGRSYMGWYRQAPGKERELVAAITRGSNTNYADSVKGRFTISRDNAKNTVYLQMNSLKPEDTAVYYCAVVRKWFGTYWYWGQGTQVTVSS

SEQ ID NO: 14138 - protein, 125 aa, Artificial Sequence
  Chemically Synthesized
QVQLQESGGGLVQAGGSLRLSCAASGSIFKPHRMGWYRQAPGKEREFVASIDGGSTTYYADSVKGRFTISRDNAKNTVYLQMNSLKPEDTAVYYCAARTRTRQWLAHGRPYYRYWGQGTQVTVSS

SEQ ID NO: 14139 - protein, 119 aa, Artificial Sequence
  Chemically Synthesized
QVQLQESGGGLVQAGGSLRLSCAASGNISTGLDMGWYRQAPGKERELVASITGGATTYYADSVKGRFTISRDNAKNTVYLQMNSLKPEDTAVYYCAAYIDAYSANHNYWGQGTQVTVSS

SEQ ID NO: 14140 - protein, 122 aa, Artificial Sequence
  Chemically Synthesized
QVQLQESGGGLVQAGGSLRLSCAASGNISRFTYMGWYRQAPGKERELVAAISYGASTYYADSVKGRFTISRDNAKNTVYLQMNSLKPEDTAVYYCAAYRPSRWHARDPYLYWGQGTQVTVSS

SEQ ID NO: 14141 - protein, 109 aa, Artificial Sequence
  Chemically Synthesized
QVQLQESGGGLVQAGGSLRLSCAASGNIFSYYAMGWYRQAPGKERELVAGISQGSTTYYADSVKGRFTISRDNAKNTVYLQMNSLKPEDTAVYYCAIYWGQGTQVTVSS

SEQ ID NO: 14142 - protein, 118 aa, Artificial Sequence
  Chemically Synthesized
QVQLQESGGGLVQAGGSLRLSCAASGNIFDFSDMGWYRQAPGKERELVASIDFGGNTYYADSVKGRFTISRDNAKNTVYLQMNSLKPEDTAVYYCAALEYWQHYLRYWGQGTQVTVSS

SEQ ID NO: 14143 - protein, 118 aa, Artificial Sequence
  Chemically Synthesized
QVQLQESGGGLVQAGGSLRLSCAASGYIFTPYSMGWYRQAPGKEREFVAAITYGGSTNYADSVKGRFTISRDNAKNTVYLQMNSLKPEDTAVYYCAVRTISIWYLSYWGQGTQVTVSS

SEQ ID NO: 14144 - protein, 118 aa, Artificial Sequence
  Chemically Synthesized
QVQLQESGGGLVQAGGSLRLSCAASGNIFWLNSMGWYRQAPGKEREFVAAIAYGSNTYYADSVKGRFTISRDNAKNTVYLQMNSLKPEDTAVYYCAVYRYIYPGHSYWGQGTQVTVSS

SEQ ID NO: 14145 - protein, 126 aa, Artificial Sequence
  Chemically Synthesized
QVQLQESGGGLVQAGGSLRLSCAASGTIFWWTYMGWYRQAPGKERELVAAINYGAITNYADSVKGRFTISRDNAKNTVYLQMNSLKPEDTAVYYCAVDQWVPYLLYGNPPDVHEYWGQGTQVTVSS

SEQ ID NO: 14146 - protein, 118 aa, Artificial Sequence
  Chemically Synthesized
QVQLQESGGGLVQAGGSLRLSCAASGSISGTLIMGWYRQAPGKERELVATIDFGTNTNYADSVKGRFTISRDNAKNTVYLQMNSLKPEDTAVYYCAAGPWWGQHFLYWGQGTQVTVSS

SEQ ID NO: 14147 - protein, 117 aa, Artificial Sequence
  Chemically Synthesized
QVQLQESGGGLVQAGGSLRLSCAASGYIFERGYMGWYRQAPGKEREFVATIGDGSTTYYADSVKGRFTISRDNAKNTVYLQMNSLKPEDTAVYYCAVWNTGRGIMYWGQGTQVTVSS

SEQ ID NO: 14148 - protein, 122 aa, Artificial Sequence
  Chemically Synthesized
QVQLQESGGGLVQAGGSLRLSCAASGTISHDAGMGWYRQAPGKEREFVAAIADGSSTNYADSVKGRFTISRDNAKNTVYLQMNSLKPEDTAVYYCAVAYGDVARYSGLLGYWGQGTQVTVSS

SEQ ID NO: 14149 - protein, 125 aa, Artificial Sequence
  Chemically Synthesized
QVQLQESGGGLVQAGGSLRLSCAASGNISGWHTMGWYRQAPGKERELVASIAYGTITYYADSVKGRFTISRDNAKNTVYLQMNSLKPEDTAVYYCAVGRTDELSRYFHLAVHSYWGQGTQVTVSS

SEQ ID NO: 14150 - protein, 118 aa, Artificial Sequence
  Chemically Synthesized
QVQLQESGGGLVQAGGSLRLSCAASGSIFPLAYMGWYRQAPGKEREFVATITDGSNTNYADSVKGRFTISRDNAKNTVYLQMNSLKPEDTAVYYCAVVTYDDLGYGYWGQGTQVTVSS

SEQ ID NO: 14151 - protein, 121 aa, Artificial Sequence
  Chemically Synthesized
QVQLQESGGGLVQAGGSLRLSCAASGTIFGTSLMGWYRQAPGKEREFVAGIGLGASTNYADSVKGRFTISRDNAKNTVYLQMNSLKPEDTAVYYCAADYWIGQYGAYHWYWGQGTQVTVSS

SEQ ID NO: 14152 - protein, 118 aa, Artificial Sequence
  Chemically Synthesized
QVQLQESGGGLVQAGGSLRLSCAASGNISDDEVMGWYRQAPGKEREFVAGIANGTTTYYADSVKGRFTISRDNAKNTVYLQMNSLKPEDTAVYYCAVDTGVTPSFYYWGQGTQVTVSS

SEQ ID NO: 14153 - protein, 122 aa, Artificial Sequence
  Chemically Synthesized
QVQLQESGGGLVQAGGSLRLSCAASGNIFYYDYMGWYRQAPGKERELVATIAFGGITYYADSVKGRFTISRDNAKNTVYLQMNSLKPEDTAVYYCAVGYVDYNALAPPYGYWGQGTQVTVSS

SEQ ID NO: 14154 - protein, 118 aa, Artificial Sequence
  Chemically Synthesized
QVQLQESGGGLVQAGGSLRLSCAASGYIFGFKTMGWYRQAPGKERELVATIGDGGTTNYADSVKGRFTISRDNAKNTVYLQMNSLKPEDTAVYYCAVDYAYYSYLAYWGQGTQVTVSS

SEQ ID NO: 14155 - protein, 118 aa, Artificial Sequence
  Chemically Synthesized
QVQLQESGGGLVQAGGSLRLSCAASGNIFDEGRMGWYRQAPGKERELVATINDGTNTNYADSVKGRFTISRDNAKNTVYLQMNSLKPEDTAVYYCAAAYRASLGHGYWGQGTQVTVSS

SEQ ID NO: 14156 - protein, 118 aa, Artificial Sequence
  Chemically Synthesized
QVQLQESGGGLVQAGGSLRLSCAASGTIFKPVVMGWYRQAPGKEREFVASINVGATTNYADSVKGRFTISRDNAKNTVYLQMNSLKPEDTAVYYCAVYYPYIVKLSYWGQGTQVTVSS

SEQ ID NO: 14157 - protein, 122 aa, Artificial Sequence
  Chemically Synthesized
QVQLQESGGGLVQAGGSLRLSCAASGYIFTFGSMGWYRQAPGKEREFVAAINGGSTTNYADSVKGRFTISRDNAKNTVYLQMNSLKPEDTAVYYCAVYIWDAVLADVTHAYWGQGTQVTVSS

SEQ ID NO: 14158 - protein, 118 aa, Artificial Sequence
  Chemically Synthesized
QVQLQESGGGLVQAGGSLRLSCAASGSIFHYYSMGWYRQAPGKERELVAAIASGGSTNYADSVKGRFTISRDNAKNTVYLQMNSLKPEDTAVYYCAVFSSIDLSLIYWGQGTQVTVSS

SEQ ID NO: 14159 - protein, 116 aa, Artificial Sequence
  Chemically Synthesized
QVQLQESGGGLVQAGGSLRLSCAASGYISVGFSMGWYRQAPGKERELVAAITYGTTTNYADSVKGRFTISRDNAKNTVYLQMNSLKPEDTAVYYCAATVWTVPLYWGQGTQVTVSS

SEQ ID NO: 14160 - protein, 118 aa, Artificial Sequence
  Chemically Synthesized
QVQLQESGGGLVQAGGSLRLSCAASGYISFINYMGWYRQAPGKEREFVASISDGGSTNYADSVKGRFTISRDNAKNTVYLQMNSLKPEDTAVYYCAAYNSLDTTYAYWGQGTQVTVSS

SEQ ID NO: 14161 - protein, 118 aa, Artificial Sequence
  Chemically Synthesized
QVQLQESGGGLVQAGGSLRLSCAASGTIFDWRFMGWYRQAPGKEREFVASITNGGNTNYADSVKGRFTISRDNAKNTVYLQMNSLKPEDTAVYYCAVADVYQYHHVYWGQGTQVTVSS

SEQ ID NO: 14162 - protein, 118 aa, Artificial Sequence
  Chemically Synthesized
QVQLQESGGGLVQAGGSLRLSCAASGNISTTLFMGWYRQAPGKERELVAAIDWGASTYYADSVKGRFTISRDNAKNTVYLQMNSLKPEDTAVYYCAVAANTIDTLGYWGQGTQVTVSS

SEQ ID NO: 14163 - protein, 122 aa, Artificial Sequence
  Chemically Synthesized
QVQLQESGGGLVQAGGSLRLSCAASGNIFNSYWMGWYRQAPGKEREFVAAIDFGSNTYYADSVKGRFTISRDNAKNTVYLQMNSLKPEDTAVYYCAVRYTYWLGFWGAFPYWGQGTQVTVSS

SEQ ID NO: 14164 - protein, 126 aa, Artificial Sequence
  Chemically Synthesized
QVQLQESGGGLVQAGGSLRLSCAASGTIFGAYLMGWYRQAPGKEREFVASINVGGNTYYADSVKGRFTISRDNAKNTVYLQMNSLKPEDTAVYYCAAAFRHYDWTDDSRVYYHLYWGQGTQVTVSS

SEQ ID NO: 14165 - protein, 122 aa, Artificial Sequence
  Chemically Synthesized
QVQLQESGGGLVQAGGSLRLSCAASGSIFGRHYMGWYRQAPGKEREFVAAINRGGNTNYADSVKGRFTISRDNAKNTVYLQMNSLKPEDTAVYYCAVYYPWHAYYKHSLKYWGQGTQVTVSS

SEQ ID NO: 14166 - protein, 121 aa, Artificial Sequence
  Chemically Synthesized
QVQLQESGGGLVQAGGSLRLSCAASGTISGWGDMGWYRQAPGKERELVASISGGTLPYADSVKGRFTISRDNAKNTVYLQMNSLKPEDTAVYYCAVDDADYVGSPPLFGYWGQGTQVTVSS

SEQ ID NO: 14167 - protein, 118 aa, Artificial Sequence
  Chemically Synthesized
QVQLQESGGGLVQAGGSLRLSCAASGTIFVHTYMGWYRQAPGKEREFVAGIGYGTTTYYADSVKGRFTISRDNAKNTVYLQMNSLKPEDTAVYYCAAVYGYYNGHDYWGQGTQVTVSS

SEQ ID NO: 14168 - protein, 118 aa, Artificial Sequence
  Chemically Synthesized
QVQLQESGGGLVQAGGSLRLSCAASGTISRYGVMGWYRQAPGKEREFVASITHGTSTNYADSVKGRFTISRDNAKNTVYLQMNSLKPEDTAVYYCAVGVRRVRWHVYWGQGTQVTVSS

SEQ ID NO: 14169 - protein, 121 aa, Artificial Sequence
  Chemically Synthesized
QVQLQESGGGLVQAGGSLRLSCAASGNISTDDWMGWYRQAPGKERELVAAIAVGTNTYADSVKGRFTISRDNAKNTVYLQMNSLKPEDTAVYYCAAHYATNYSTGESHRYWGQGTQVTVSS

SEQ ID NO: 14170 - protein, 113 aa, Artificial Sequence
  Chemically Synthesized
QVQLQESGGGLVQAGGSLRLSCAASGYIFFRDYMGWYRQAPGKEREFVAGITFGGNTNYADSVKGRFTISRDNAKNTVYLQMNSLKPEDTAVYYCAADDYVYWGQGTQVTVSS

SEQ ID NO: 14171 - protein, 122 aa, Artificial Sequence
  Chemically Synthesized
QVQLQESGGGLVQAGGSLRLSCAASGTIFYAPFMGWYRQAPGKEREFVATIGYGGTTYYADSVKGRFTISRDNAKNTVYLQMNSLKPEDTAVYYCAVDAWTDDEDPTYLIYWGQGTQVTVSS

SEQ ID NO: 14172 - protein, 118 aa, Artificial Sequence
  Chemically Synthesized
QVQLQESGGGLVQAGGSLRLSCAASGSISAYPWMGWYRQAPGKERELVATIDFGSSTNYADSVKGRFTISRDNAKNTVYLQMNSLKPEDTAVYYCAAYESTQYAHTYWGQGTQVTVSS

SEQ ID NO: 14173 - protein, 118 aa, Artificial Sequence
  Chemically Synthesized
QVQLQESGGGLVQAGGSLRLSCAASGSISVGWDMGWYRQAPGKERELVAGIGDGGTTNYADSVKGRFTISRDNAKNTVYLQMNSLKPEDTAVYYCAADQQSSVHHLYWGQGTQVTVSS

SEQ ID NO: 14174 - protein, 126 aa, Artificial Sequence
  Chemically Synthesized
QVQLQESGGGLVQAGGSLRLSCAASGTIFKAYDMGWYRQAPGKERELVASITVGSITNYADSVKGRFTISRDNAKNTVYLQMNSLKPEDTAVYYCAVWGDTAYGRRGGAHYNHDYWGQGTQVTVSS

SEQ ID NO: 14175 - protein, 118 aa, Artificial Sequence
  Chemically Synthesized
QVQLQESGGGLVQAGGSLRLSCAASGTIFRQIGMGWYRQAPGKEREFVAGIGSGGSTNYADSVKGRFTISRDNAKNTVYLQMNSLKPEDTAVYYCAAHRAGDDIYSYWGQGTQVTVSS

SEQ ID NO: 14176 - protein, 122 aa, Artificial Sequence
  Chemically Synthesized
QVQLQESGGGLVQAGGSLRLSCAASGYISRGHYMGWYRQAPGKERELVASITIGASTNYADSVKGRFTISRDNAKNTVYLQMNSLKPEDTAVYYCAVYYWHYASPYAHLTYWGQGTQVTVSS

SEQ ID NO: 14177 - protein, 111 aa, Artificial Sequence
  Chemically Synthesized
QVQLQESGGGLVQAGGSLRLSCAASGSIFPSDSMGWYRQAPGKERELVATISDGGNTYYADSVKGRFTISRDNAKNTVYLQMNSLKPEDTAVYYCAVHGYWGQGTQVTVSS

SEQ ID NO: 14178 - protein, 118 aa, Artificial Sequence
  Chemically Synthesized
QVQLQESGGGLVQAGGSLRLSCAASGNISWYYDMGWYRQAPGKEREFVATIATGTITYYADSVKGRFTISRDNAKNTVYLQMNSLKPEDTAVYYCAAYPINHTWYPYWGQGTQVTVSS

SEQ ID NO: 14179 - protein, 122 aa, Artificial Sequence
  Chemically Synthesized
QVQLQESGGGLVQAGGSLRLSCAASGNIFPSNTMGWYRQAPGKEREFVATIGYGATTNYADSVKGRFTISRDNAKNTVYLQMNSLKPEDTAVYYCAVSDANTGYYQDSLFYWGQGTQVTVSS

SEQ ID NO: 14180 - protein, 114 aa, Artificial Sequence
  Chemically Synthesized
QVQLQESGGGLVQAGGSLRLSCAASGSNSMGWYRQAPGKERELVAGIGSGATTYYADSVKGRFTISRDNAKNTVYLQMNSLKPEDTAVYYCAARNPYLNWLAYWGQGTQVTVSS

SEQ ID NO: 14181 - protein, 126 aa, Artificial Sequence
  Chemically Synthesized
QVQLQESGGGLVQAGGSLRLSCAASGNIFSTLVMGWYRQAPGKERELVAAIGYGTNTYYADSVKGRFTISRDNAKNTVYLQMNSLKPEDTAVYYCAARYIYPHNAYNPYLHRYYYWGQGTQVTVSS

SEQ ID NO: 14182 - protein, 117 aa, Artificial Sequence
  Chemically Synthesized
QVQLQESGGGLVQAGGSLRLSCAASGNISYYYDMGWYRQAPGKERELVATISRGTNTNYADSVKGRFTISRDNAKNTVYLQMNSLKPEDTAVYYCAVSDVTRTTMYWGQGTQVTVSS

SEQ ID NO: 14183 - protein, 112 aa, Artificial Sequence
  Chemically Synthesized
QVQLQESGGGLVQAGGSLRLSCAASGYIFPAPAMGWYRQAPGKEREFVASITQGTSTNYADSVKGRFTISRDNAKNTVYLQMNSLKPEDTAVYYCAVQPPYWGQGTQVTVSS

SEQ ID NO: 14184 - protein, 120 aa, Artificial Sequence
  Chemically Synthesized
QVQLQESGGGLVQAGGSLRLSCAASGYISADSRMGWYRQAPGKEREFVAGIDRGATYADSVKGRFTISRDNAKNTVYLQMNSLKPEDTAVYYCAARIEDGGEYWDPHYYWGQGTQVTVSS

SEQ ID NO: 14185 - protein, 117 aa, Artificial Sequence
  Chemically Synthesized
QVQLQESGGGLVQAGGSLRLSCAASGYISGDEFMGWYRQAPGKERELVAGISVGAITYYADSVKGRFTISRDNAKNTVYLQMNSLKPEDTAVYYCAAVWEIESSIYWGQGTQVTVSS

SEQ ID NO: 14186 - protein, 122 aa, Artificial Sequence
  Chemically Synthesized
QVQLQESGGGLVQAGGSLRLSCAASGSISDYGVMGWYRQAPGKEREFVATINAGGTTNYADSVKGRFTISRDNAKNTVYLQMNSLKPEDTAVYYCAVYERRGNYYPIYLYYWGQGTQVTVSS

SEQ ID NO: 14187 - protein, 117 aa, Artificial Sequence
  Chemically Synthesized
QVQLQESGGGLVQAGGSLRLSCAASGTIFYESMGWYRQAPGKERELVATITDGTSTNYADSVKGRFTISRDNAKNTVYLQMNSLKPEDTAVYYCAVIIIPLYNLTYWGQGTQVTVSS

SEQ ID NO: 14188 - protein, 118 aa, Artificial Sequence
  Chemically Synthesized
QVQLQESGGGLVQAGGSLRLSCAASGTIFRTRFMGWYRQAPGKERELVASIGPGSTTNYADSVKGRFTISRDNAKNTVYLQMNSLKPEDTAVYYCAAIVGRLGNLQYWGQGTQVTVSS

SEQ ID NO: 14189 - protein, 126 aa, Artificial Sequence
  Chemically Synthesized
QVQLQESGGGLVQAGGSLRLSCAASGTIFLTWGMGWYRQAPGKERELVAAITQGATTNYADSVKGRFTISRDNAKNTVYLQMNSLKPEDTAVYYCAVWQSQLQDDSYFTSTDHQYWGQGTQVTVSS

SEQ ID NO: 14190 - protein, 126 aa, Artificial Sequence
  Chemically Synthesized
QVQLQESGGGLVQAGGSLRLSCAASGTIFRNYTMGWYRQAPGKERELVASIGPGTITYYADSVKGRFTISRDNAKNTVYLQMNSLKPEDTAVYYCAVRPDDGSWWIDRGQVDLIYWGQGTQVTVSS

SEQ ID NO: 14191 - protein, 118 aa, Artificial Sequence
  Chemically Synthesized
QVQLQESGGGLVQAGGSLRLSCAASGYISYHWPMGWYRQAPGKERELVAAITVGSITYYADSVKGRFTISRDNAKNTVYLQMNSLKPEDTAVYYCAVGLYAPYRHRYWGQGTQVTVSS

SEQ ID NO: 14192 - protein, 118 aa, Artificial Sequence
  Chemically Synthesized
QVQLQESGGGLVQAGGSLRLSCAASGSISILYSMGWYRQAPGKERELVATIAAGSTTYYADSVKGRFTISRDNAKNTVYLQMNSLKPEDTAVYYCAVPYDIVQYLAYWGQGTQVTVSS

SEQ ID NO: 14193 - protein, 118 aa, Artificial Sequence
  Chemically Synthesized
QVQLQESGGGLVQAGGSLRLSCAASGTIFDPYYMGWYRQAPGKEREFVAAIAYGAITYYADSVKGRFTISRDNAKNTVYLQMNSLKPEDTAVYYCAANEPYFTYHDYWGQGTQVTVSS

SEQ ID NO: 14194 - protein, 122 aa, Artificial Sequence
  Chemically Synthesized
QVQLQESGGGLVQAGGSLRLSCAASGNIFVGGYMGWYRQAPGKERELVAAISYGASTYYADSVKGRFTISRDNAKNTVYLQMNSLKPEDTAVYYCAVSYGADQEDLDIFRYWGQGTQVTVSS

SEQ ID NO: 14195 - protein, 116 aa, Artificial Sequence
  Chemically Synthesized
QVQLQESGGGLVQAGGSLRLSCAASGYISEWLYMGWYRQAPGKEREFVASIDAYADSVKGRFTISRDNAKNTVYLQMNSLKPEDTAVYYCAVFDGDQPQYVALSYWGQGTQVTVSS

SEQ ID NO: 14196 - protein, 118 aa, Artificial Sequence
  Chemically Synthesized
QVQLQESGGGLVQAGGSLRLSCAASGTIFWLYGMGWYRQAPGKEREFVATIARGSSTYYADSVKGRFTISRDNAKNTVYLQMNSLKPEDTAVYYCAAYYSTYIRHSYWGQGTQVTVSS

SEQ ID NO: 14197 - protein, 122 aa, Artificial Sequence
  Chemically Synthesized
QVQLQESGGGLVQAGGSLRLSCAASGNIFATPDMGWYRQAPGKEREFVAGISTGGITYYADSVKGRFTISRDNAKNTVYLQMNSLKPEDTAVYYCAAGGRSEYRQVRSLYYWGQGTQVTVSS

SEQ ID NO: 14198 - protein, 118 aa, Artificial Sequence
  Chemically Synthesized
QVQLQESGGGLVQAGGSLRLSCAASGSIFRTPAMGWYRQAPGKERELVATISYGTITNYADSVKGRFTISRDNAKNTVYLQMNSLKPEDTAVYYCAADRGRRTGYAYWGQGTQVTVSS

SEQ ID NO: 14199 - protein, 121 aa, Artificial Sequence
  Chemically Synthesized
QVQLQESGGGLVQAGGSLRLSCAASGTISYSGYMGWYRQAPGKEREFVATIASGSSTYYADSVKGRFTISRDNAKNTVYLQMNSLKPEDTAVYYCAAYANLAYLYSTVMYWGQGTQVTVSS

SEQ ID NO: 14200 - protein, 124 aa, Artificial Sequence
  Chemically Synthesized
QVQLQESGGGLVQAGGSLRLSCAASGTISLYHDMGWYRQAPGKEREFVAAIDGGNTYYADSVKGRFTISRDNAKNTVYLQMNSLKPEDTAVYYCAANELVRTVTNLVTRVTMYWGQGTQVTVSS

SEQ ID NO: 14201 - protein, 122 aa, Artificial Sequence
  Chemically Synthesized
QVQLQESGGGLVQAGGSLRLSCAASGTISTISYMGWYRQAPGKEREFVAAINYGSITYYADSVKGRFTISRDNAKNTVYLQMNSLKPEDTAVYYCAVDRPEDVARYDDHWYWGQGTQVTVSS

SEQ ID NO: 14202 - protein, 118 aa, Artificial Sequence
  Chemically Synthesized
QVQLQESGGGLVQAGGSLRLSCAASGSISYVPIMGWYRQAPGKEREFVAAIADGTITYYADSVKGRFTISRDNAKNTVYLQMNSLKPEDTAVYYCAVYIYYDDYYDYWGQGTQVTVSS

SEQ ID NO: 14203 - protein, 117 aa, Artificial Sequence
  Chemically Synthesized
QVQLQESGGGLVQAGGSLRLSCAASGTIFFTGHMGWYRQAPGKERELVATIGYGSSTNYADSVKGRFTISRDNAKNTVYLQMNSLKPEDTAVYYCAAAGYSTRTIYWGQGTQVTVSS

SEQ ID NO: 14204 - protein, 117 aa, Artificial Sequence
  Chemically Synthesized
QVQLQESGGGLVQAGGSLRLSCAASGTIFHTPYMGWYRQAPGKEREFVATIAYGTNTYYADSVKGRFTISRDNAKNTVYLQMNSLKPEDTAVYYCAALDVTLRTMYWGQGTQVTVSS

SEQ ID NO: 14205 - protein, 118 aa, Artificial Sequence
  Chemically Synthesized
QVQLQESGGGLVQAGGSLRLSCAASGYIFQSQYMGWYRQAPGKERELVAAIGYGTTTNYADSVKGRFTISRDNAKNTVYLQMNSLKPEDTAVYYCAVWDYVVYGHDYWGQGTQVTVSS

SEQ ID NO: 14206 - protein, 118 aa, Artificial Sequence
  Chemically Synthesized
QVQLQESGGGLVQAGGSLRLSCAASGTIFRPFLMGWYRQAPGKEREFVATIAYGGTTYYADSVKGRFTISRDNAKNTVYLQMNSLKPEDTAVYYCAVVYYGGGVHRYWGQGTQVTVSS

SEQ ID NO: 14207 - protein, 118 aa, Artificial Sequence
  Chemically Synthesized
QVQLQESGGGLVQAGGSLRLSCAASGTISGYIGMGWYRQAPGKEREFVASINTGSTTYYADSVKGRFTISRDNAKNTVYLQMNSLKPEDTAVYYCAARSWDKRTHPYWGQGTQVTVSS

SEQ ID NO: 14208 - protein, 122 aa, Artificial Sequence
  Chemically Synthesized
QVQLQESGGGLVQAGGSLRLSCAASGSISWRSKMGWYRQAPGKERELVAGISYGSTTNYADSVKGRFTISRDNAKNTVYLQMNSLKPEDTAVYYCAVDRGYVGRIAHYFDYWGQGTQVTVSS

SEQ ID NO: 14209 - protein, 114 aa, Artificial Sequence
  Chemically Synthesized
QVQLQESGGGLVQAGGSLRLSCAASGNIFANIVMGWYRQAPGKERELVIGVVVPYADSVKGRFTISRDNAKNTVYLQMNSLKPEDTAVYYCAVNGGDYTFLRYWGQGTQVTVSS

SEQ ID NO: 14210 - protein, 122 aa, Artificial Sequence
  Chemically Synthesized
QVQLQESGGGLVQAGGSLRLSCAASGSISDFITMGWYRQAPGKERELVAGITLGGTTYYADSVKGRFTISRDNAKNTVYLQMNSLKPEDTAVYYCAVARRYRFPVTVSHYYWGQGTQVTVSS

SEQ ID NO: 14211 - protein, 118 aa, Artificial Sequence
  Chemically Synthesized
QVQLQESGGGLVQAGGSLRLSCAASGTISVLDRMGWYRQAPGKERELVAGIAYGANTYYADSVKGRFTISRDNAKNTVYLQMNSLKPEDTAVYYCAVLPGYSSPYFYWGQGTQVTVSS

SEQ ID NO: 14212 - protein, 122 aa, Artificial Sequence
  Chemically Synthesized
QVQLQESGGGLVQAGGSLRLSCAASGTIFVGYGMGWYRQAPGKEREFVASIDRGGNTYYADSVKGRFTISRDNAKNTVYLQMNSLKPEDTAVYYCAAISFDQLRWSDDHYYWGQGTQVTVSS

SEQ ID NO: 14213 - protein, 122 aa, Artificial Sequence
  Chemically Synthesized
QVQLQESGGGLVQAGGSLRLSCAASGSISPVRDMGWYRQAPGKERELVAAIDRGTTTYYADSVKGRFTISRDNAKNTVYLQMNSLKPEDTAVYYCAVTSYYPAYYDNPFSYWGQGTQVTVSS

SEQ ID NO: 14214 - protein, 118 aa, Artificial Sequence
  Chemically Synthesized
QVQLQESGGGLVQAGGSLRLSCAASGYISYVYVMGWYRQAPGKEREFVASIGDGTSTYYADSVKGRFTISRDNAKNTVYLQMNSLKPEDTAVYYCAVARPDPGAFGYWGQGTQVTVSS

SEQ ID NO: 14215 - protein, 122 aa, Artificial Sequence
  Chemically Synthesized
QVQLQESGGGLVQAGGSLRLSCAASGSISYSLYMGWYRQAPGKERELVATIDLGGTTYYADSVKGRFTISRDNAKNTVYLQMNSLKPEDTAVYYCAVYYETDGYEYLQHTYWGQGTQVTVSS

SEQ ID NO: 14216 - protein, 120 aa, Artificial Sequence
  Chemically Synthesized
QVQLQESGGGLVQAGGSLRLSCAASGYISWGRMGWYRQAPGKERELVATIAIGGTTNYADSVKGRFTISRDNAKNTVYLQMNSLKPEDTAVYYCAAYRRDYGGWLYFDYWGQGTQVTVSS

SEQ ID NO: 14217 - protein, 118 aa, Artificial Sequence
  Chemically Synthesized
QVQLQESGGGLVQAGGSLRLSCAASGNIFSDDKMGWYRQAPGKEREFVASIGYGTTTYYADSVKGRFTISRDNAKNTVYLQMNSLKPEDTAVYYCAVVPRPWSGYDYWGQGTQVTVSS

SEQ ID NO: 14218 - protein, 118 aa, Artificial Sequence
  Chemically Synthesized
QVQLQESGGGLVQAGGSLRLSCAASGNISGPKIMGWYRQAPGKEREFVAGISSGGITNYADSVKGRFTISRDNAKNTVYLQMNSLKPEDTAVYYCAADDNYQYPYRYWGQGTQVTVSS

SEQ ID NO: 14219 - protein, 118 aa, Artificial Sequence
  Chemically Synthesized
QVQLQESGGGLVQAGGSLRLSCAASGSIFYIVVMGWYRQAPGKERELVATIAKGTTTYYADSVKGRFTISRDNAKNTVYLQMNSLKPEDTAVYYCAALWNIDGAYSYWGQGTQVTVSS

SEQ ID NO: 14220 - protein, 126 aa, Artificial Sequence
  Chemically Synthesized
QVQLQESGGGLVQAGGSLRLSCAASGSISATTSMGWYRQAPGKEREFVAGITQGSTTNYADSVKGRFTISRDNAKNTVYLQMNSLKPEDTAVYYCAATDEDKGDYADTSYYPHLYWGQGTQVTVSS

SEQ ID NO: 14221 - protein, 121 aa, Artificial Sequence
  Chemically Synthesized
QVQLQESGGGLVQAGGSLRLSCAASGNISFAAYMGWYRQAPGKEREFVAAIVRVVLPYADSVKGRFTISRDNAKNTVYLQMNSLKPEDTAVYYCAVGFDDPRYSDGYLDYWGQGTQVTVSS

SEQ ID NO: 14222 - protein, 118 aa, Artificial Sequence
  Chemically Synthesized
QVQLQESGGGLVQAGGSLRLSCAASGSIFDYDLMGWYRQAPGKERELVAAIAYGATTYYADSVKGRFTISRDNAKNTVYLQMNSLKPEDTAVYYCAAYIDGTWHHDYWGQGTQVTVSS

SEQ ID NO: 14223 - protein, 122 aa, Artificial Sequence
  Chemically Synthesized
QVQLQESGGGLVQAGGSLRLSCAASGNISYYAVMGWYRQAPGKEREFVASIAGGGTTYYADSVKGRFTISRDNAKNTVYLQMNSLKPEDTAVYYCAVPDVRLLLYNAYHYYWGQGTQVTVSS

SEQ ID NO: 14224 - protein, 127 aa, Artificial Sequence
  Chemically Synthesized
QVQLQESGGGLVQAGGSLRLSCAASGSISDPAGMGWYRQAPGKERELVASITWGSNTNYADSVKGRFTISRDNAKNTVYLQMNSLKPEDTAVYYCAAGLYGDQGSFDADLYRVFIYWGQGTQVTVSS

SEQ ID NO: 14225 - protein, 118 aa, Artificial Sequence
  Chemically Synthesized
QVQLQESGGGLVQAGGSLRLSCAASGTIFTLSVMGWYRQAPGKERELVATIARGASTYYADSVKGRFTISRDNAKNTVYLQMNSLKPEDTAVYYCAATESPSLYLTYWGQGTQVTVSS

SEQ ID NO: 14226 - protein, 118 aa, Artificial Sequence
  Chemically Synthesized
QVQLQESGGGLVQAGGSLRLSCAASGNIFPEYNMGWYRQAPGKEREFVAAINDGATTYYADSVKGRFTISRDNAKNTVYLQMNSLKPEDTAVYYCAVGYWIAGYLGYWGQGTQVTVSS

SEQ ID NO: 14227 - protein, 122 aa, Artificial Sequence
  Chemically Synthesized
QVQLQESGGGLVQAGGSLRLSCAASGYISWLYLMGWYRQAPGKERELVASIDDGGNTYYADSVKGRFTISRDNAKNTVYLQMNSLKPEDTAVYYCAADITIQGGTVVGHTYWGQGTQVTVSS

SEQ ID NO: 14228 - protein, 122 aa, Artificial Sequence
  Chemically Synthesized
QVQLQESGGGLVQAGGSLRLSCAASGNISYPYRMGWYRQAPGKERELVAAIAGGGITNYADSVKGRFTISRDNAKNTVYLQMNSLKPEDTAVYYCAAERSPPEPPNYYHTYWGQGTQVTVSS

SEQ ID NO: 14229 - protein, 122 aa, Artificial Sequence
  Chemically Synthesized
QVQLQESGGGLVQAGGSLRLSCAASGNISWLRYMGWYRQAPGKEREFVAAIGFGGNTYYADSVKGRFTISRDNAKNTVYLQMNSLKPEDTAVYYCAAIYGADYSYDLEFVYWGQGTQVTVSS

SEQ ID NO: 14230 - protein, 118 aa, Artificial Sequence
  Chemically Synthesized
QVQLQESGGGLVQAGGSLRLSCAASGTIFSQDDMGWYRQAPGKEREFVATITDGSITNYADSVKGRFTISRDNAKNTVYLQMNSLKPEDTAVYYCAADPPYAYALDYWGQGTQVTVSS

SEQ ID NO: 14231 - protein, 117 aa, Artificial Sequence
  Chemically Synthesized
QVQLQESGGGLVQAGGSLRLSCAASGSISRDSYMGWYRQAPGKERELVAGIAKGTSTYYADSVKGRFTISRDNAKNTVYLQMNSLKPEDTAVYYCAVPTGPDSLIYWGQGTQVTVSS

SEQ ID NO: 14232 - protein, 121 aa, Artificial Sequence
  Chemically Synthesized
QVQLQESGGGLVQAGGSLRLSCAASGNIFETFRMGWYRQAPGKERELVATIGNGASTNYADSVKGRFTISRDNAKNTVYLQMNSLKPEDTAVYYCAVGLPDTYASSGRIYWGQGTQVTVSS

SEQ ID NO: 14233 - protein, 117 aa, Artificial Sequence
  Chemically Synthesized
QVQLQESGGGLVQAGGSLRLSCAASGTISGTDYMGWYRQAPGKERELVAGIAYGSSTNYADSVKGRFTISRDNAKNTVYLQMNSLKPEDTAVYYCAVPQDYSVTLYWGQGTQVTVSS

SEQ ID NO: 14234 - protein, 122 aa, Artificial Sequence
  Chemically Synthesized
QVQLQESGGGLVQAGGSLRLSCAASGYISYPWKMGWYRQAPGKERELVATITHGTTTNYADSVKGRFTISRDNAKNTVYLQMNSLKPEDTAVYYCAADNGTPGVEQDYLDYWGQGTQVTVSS

SEQ ID NO: 14235 - protein, 119 aa, Artificial Sequence
  Chemically Synthesized
QVQLQESGGGLVQAGGSLRLSCAASGNISLPDYMGWYRQAPGKEREFVATIARGTSTNYADSVKGRFTISRDNAKNTVYLQMNSLKPEDTAVYYCAVVYRDRVNGHDYWGQGTQVTVSS

SEQ ID NO: 14236 - protein, 124 aa, Artificial Sequence
  Chemically Synthesized
QVQLQESGGGLVQAGGSLRLSCAASGTISRQTHMGWYRQAPGKERELVATIAKGSTTYYADSVKGRFTISRDNAKNTVYLQMNSLKPEDTAVYYCAADQEAWDDWHVYVVHLYWGQGTQVTVSS

SEQ ID NO: 14237 - protein, 126 aa, Artificial Sequence
  Chemically Synthesized
QVQLQESGGGLVQAGGSLRLSCAASGTIFLGGPMGWYRQAPGKERELVASIDTGGNTNYADSVKGRFTISRDNAKNTVYLQMNSLKPEDTAVYYCAVAGPIVGYAGDDVPYPYGYWGQGTQVTVSS

SEQ ID NO: 14238 - protein, 122 aa, Artificial Sequence
  Chemically Synthesized
QVQLQESGGGLVQAGGSLRLSCAASGNISWDGYMGWYRQAPGKEREFVAAIGYGTSTYYADSVKGRFTISRDNAKNTVYLQMNSLKPEDTAVYYCAVAAWGYGDNYPYYEYWGQGTQVTVSS

SEQ ID NO: 14239 - protein, 117 aa, Artificial Sequence
  Chemically Synthesized
QVQLQESGGGLVQAGGSLRLSCAASGYISDIRMGWYRQAPGKERELVAGITRGATTYYADSVKGRFTISRDNAKNTVYLQMNSLKPEDTAVYYCAAAVIDGPYYYYWGQGTQVTVSS

SEQ ID NO: 14240 - protein, 120 aa, Artificial Sequence
  Chemically Synthesized
QVQLQESGGGLVQAGGSLRLSCAASGTISPRGVMGWYRQAPGKEREFVAAITYGGSTNYADSVKGRFTISRDNAKNTVYLQMNSLKPEDTAVYYCAAKYPDQSGYDYWYWGQGTQVTVSS

SEQ ID NO: 14241 - protein, 114 aa, Artificial Sequence
  Chemically Synthesized
QVQLQESGGGLVQAGGSLRLSCAASGTIFDTYDMGWYRQAPGKERELVASIDIGGITYYADSVKGRFTISRDNAKNTVYLQMNSLKPEDTAVYYCAVVGTLAYWGQGTQVTVSS

SEQ ID NO: 14242 - protein, 117 aa, Artificial Sequence
  Chemically Synthesized
QVQLQESGGGLVQAGGSLRLSCAASGSISLLYMGWYRQAPGKERELVAGIAPGTTTYYADSVKGRFTISRDNAKNTVYLQMNSLKPEDTAVYYCAVYAYTRTYYVYWGQGTQVTVSS

SEQ ID NO: 14243 - protein, 118 aa, Artificial Sequence
  Chemically Synthesized
QVQLQESGGGLVQAGGSLRLSCAASGTISNFYRMGWYRQAPGKEREFVAAINYGTITNYADSVKGRFTISRDNAKNTVYLQMNSLKPEDTAVYYCAAQPVKNSQYRYWGQGTQVTVSS

SEQ ID NO: 14244 - protein, 126 aa, Artificial Sequence
  Chemically Synthesized
QVQLQESGGGLVQAGGSLRLSCAASGTIFGYFVMGWYRQAPGKEREFVAAITVGGITYYADSVKGRFTISRDNAKNTVYLQMNSLKPEDTAVYYCAVPIGVRYQELVYWSSAHDYWGQGTQVTVSS

SEQ ID NO: 14245 - protein, 115 aa, Artificial Sequence
  Chemically Synthesized
QVQLQESGGGLVQAGGSLRLSCAASGYIFWYYDMGWYRQAPGKEREFVAAISYGANYLYADSVKGRFTISRDNAKNTVYLQMNSLKPEDTAVYYCAANSSLYYYWGQGTQVTVSS

SEQ ID NO: 14246 - protein, 118 aa, Artificial Sequence
  Chemically Synthesized
QVQLQESGGGLVQAGGSLRLSCAASGNIFPVADMGWYRQAPGKERELVAGIAVGTSTYYADSVKGRFTISRDNAKNTVYLQMNSLKPEDTAVYYCAAFFRYPGAHRYWGQGTQVTVSS

SEQ ID NO: 14247 - protein, 118 aa, Artificial Sequence
  Chemically Synthesized
QVQLQESGGGLVQAGGSLRLSCAASGYISYQFTMGWYRQAPGKERELVATINAGSTTNYADSVKGRFTISRDNAKNTVYLQMNSLKPEDTAVYYCAVYEYDRYAHYYWGQGTQVTVSS

SEQ ID NO: 14248 - protein, 118 aa, Artificial Sequence
  Chemically Synthesized
QVQLQESGGGLVQAGGSLRLSCAASGNIFKSVYMGWYRQAPGKEREFVAGISEGASTNYADSVKGRFTISRDNAKNTVYLQMNSLKPEDTAVYYCAVDWWQLQYHPYWGQGTQVTVSS

SEQ ID NO: 14249 - protein, 117 aa, Artificial Sequence
  Chemically Synthesized
QVQLQESGGGLVQAGGSLRLSCAASGSISTPRRMGWYRQAPGKERELVAGINAGTITNYADSVKGRFTISRDNAKNTVYLQMNSLKPEDTAVYYCAVARRYWRVIYWGQGTQVTVSS

SEQ ID NO: 14250 - protein, 118 aa, Artificial Sequence
  Chemically Synthesized
QVQLQESGGGLVQAGGSLRLSCAASGNISNIIVMGWYRQAPGKERELVATITTGTSTNYADSVKGRFTISRDNAKNTVYLQMNSLKPEDTAVYYCAVVTTDQAYYVYWGQGTQVTVSS

SEQ ID NO: 14251 - protein, 121 aa, Artificial Sequence
  Chemically Synthesized
QVQLQESGGGLVQAGGSLRLSCAASGTISPYAYMGWYRQAPGKERELLPVLVTVVLPYADSVKGRFTISRDNAKNTVYLQMNSLKPEDTAVYYCAVIYADPWYVQFYYYYWGQGTQVTVSS

SEQ ID NO: 14252 - protein, 117 aa, Artificial Sequence
  Chemically Synthesized
QVQLQESGGGLVQAGGSLRLSCAASGTISTIDAMGWYRQAPGKERELVATIDDGLIPYADSVKGRFTISRDNAKNTVYLQMNSLKPEDTAVYYCAVRGLGDDDYYYWGQGTQVTVSS

SEQ ID NO: 14253 - protein, 118 aa, Artificial Sequence
  Chemically Synthesized
QVQLQESGGGLVQAGGSLRLSCAASGTISGRPYMGWYRQAPGKEREFVASIAYGGNTNYADSVKGRFTISRDNAKNTVYLQMNSLKPEDTAVYYCAAGEDLDGRHHYWGQGTQVTVSS

SEQ ID NO: 14254 - protein, 126 aa, Artificial Sequence
  Chemically Synthesized
QVQLQESGGGLVQAGGSLRLSCAASGTISGYPSMGWYRQAPGKERELVAGITAGTNTNYADSVKGRFTISRDNAKNTVYLQMNSLKPEDTAVYYCAAYLPADYTTHDDGVYPHDYWGQGTQVTVSS

SEQ ID NO: 14255 - protein, 112 aa, Artificial Sequence
  Chemically Synthesized
QVQLQESGGGLVQAGGSLRLSCAASGYIFDDEVMGWYRQAPGKERELVASIALGSNTNYADSVKGRFTISRDNAKNTVYLQMNSLKPEDTAVYYCAAYYPYWGQGTQVTVSS

SEQ ID NO: 14256 - protein, 118 aa, Artificial Sequence
  Chemically Synthesized
QVQLQESGGGLVQAGGSLRLSCAASGTISPEYIMGWYRQAPGKEREFVATIGSGGITYYADSVKGRFTISRDNAKNTVYLQMNSLKPEDTAVYYCAAHGAGAVRHDYWGQGTQVTVSS

SEQ ID NO: 14257 - protein, 115 aa, Artificial Sequence
  Chemically Synthesized
QVQLQESGGGLVQAGGSLRLSCAASGTISSTCMGWYRQAPGKERELVAGISAVVLPYADSVKGRFTISRDNAKNTVYLQMNSLKPEDTAVYYCAVDRYTDEFVYWGQGTQVTVSS

SEQ ID NO: 14258 - protein, 118 aa, Artificial Sequence
  Chemically Synthesized
QVQLQESGGGLVQAGGSLRLSCAASGNISYYSFMGWYRQAPGKEREFVAGISYGANTLYADSVKGRFTISRDNAKNTVYLQMNSLKPEDTAVYYCAAGWREDYAFSYWGQGTQVTVSS

SEQ ID NO: 14259 - protein, 118 aa, Artificial Sequence
  Chemically Synthesized
QVQLQESGGGLVQAGGSLRLSCAASGSISVGFVMGWYRQAPGKERELVAAIGPGGITNYADSVKGRFTISRDNAKNTVYLQMNSLKPEDTAVYYCAADLRVYSFHFYWGQGTQVTVSS

SEQ ID NO: 14260 - protein, 118 aa, Artificial Sequence
  Chemically Synthesized
QVQLQESGGGLVQAGGSLRLSCAASGTIFGGYVMGWYRQAPGKERELVATITQGTTTYYADSVKGRFTISRDNAKNTVYLQMNSLKPEDTAVYYCAVVGNFYSGYSYWGQGTQVTVSS

SEQ ID NO: 14261 - protein, 118 aa, Artificial Sequence
  Chemically Synthesized
QVQLQESGGGLVQAGGSLRLSCAASGYISVPYLMGWYRQAPGKERELVATITYGGITNYADSVKGRFTISRDNAKNTVYLQMNSLKPEDTAVYYCAAWIGTWRAHVYWGQGTQVTVSS

SEQ ID NO: 14262 - protein, 121 aa, Artificial Sequence
  Chemically Synthesized
QVQLQESGGGLVQAGGSLRLSCAASGNILLLLMGWYRQAPGKERELVASIAPGASTNYADSVKGRFTISRDNAKNTVYLQMNSLKPEDTAVYYCAAQGFWLEPAWYHYPYWGQGTQVTVSS

SEQ ID NO: 14263 - protein, 125 aa, Artificial Sequence
  Chemically Synthesized
QVQLQESGGGLVQAGGSLRLSCAASGTISQAYDMGWYRQAPGKEREFVATIGPGANTYYADSVKGRFTISRDNAKNTVYLQMNSLKPEDTAVYYCAVIDPYYADDETTRYLSMYWGQGTQVTVSS

SEQ ID NO: 14264 - protein, 126 aa, Artificial Sequence
  Chemically Synthesized
QVQLQESGGGLVQAGGSLRLSCAASGSISDLDVMGWYRQAPGKERELVATINTGGSTYYADSVKGRFTISRDNAKNTVYLQMNSLKPEDTAVYYCAVYVVPDVLSNVNYTYGLDYWGQGTQVTVSS

SEQ ID NO: 14265 - protein, 117 aa, Artificial Sequence
  Chemically Synthesized
QVQLQESGGGLVQAGGSLRLSCAASGTISYGYYMGWYRQAPGKERELVAAIADGGTTNYADSVKGRFTISRDNAKNTVYLQMNSLKPEDTAVYYCAVYGDTNFFYYWGQGTQVTVSS

SEQ ID NO: 14266 - protein, 121 aa, Artificial Sequence
  Chemically Synthesized
QVQLQESGGGLVQAGGSLRLSCAASGTIFTLLMGWYRQAPGKEREFVAGINYGSNTYYADSVKGRFTISRDNAKNTVYLQMNSLKPEDTAVYYCAVDPGWVYAQGKDYGYWGQGTQVTVSS

SEQ ID NO: 14267 - protein, 122 aa, Artificial Sequence
  Chemically Synthesized
QVQLQESGGGLVQAGGSLRLSCAASGNIFYVTNMGWYRQAPGKERELVATITGGASTYYADSVKGRFTISRDNAKNTVYLQMNSLKPEDTAVYYCAVLSYWYGNGPVLHGYWGQGTQVTVSS

SEQ ID NO: 14268 - protein, 118 aa, Artificial Sequence
  Chemically Synthesized
QVQLQESGGGLVQAGGSLRLSCAASGNIFSVYPMGWYRQAPGKEREFVAAIGIGGITYYADSVKGRFTISRDNAKNTVYLQMNSLKPEDTAVYYCAVYRDAVGDYLYWGQGTQVTVSS

SEQ ID NO: 14269 - protein, 122 aa, Artificial Sequence
  Chemically Synthesized
QVQLQESGGGLVQAGGSLRLSCAASGYISAVTDMGWYRQAPGKERELVASIDKGTSTNYADSVKGRFTISRDNAKNTVYLQMNSLKPEDTAVYYCAVDYPVPRYPDGVYPYWGQGTQVTVSS

SEQ ID NO: 14270 - protein, 126 aa, Artificial Sequence
  Chemically Synthesized
QVQLQESGGGLVQAGGSLRLSCAASGTIFTSYYMGWYRQAPGKEREFVATINGGAITYYADSVKGRFTISRDNAKNTVYLQMNSLKPEDTAVYYCAAADGWNVYSDKDLIILHDYWGQGTQVTVSS

SEQ ID NO: 14271 - protein, 126 aa, Artificial Sequence
  Chemically Synthesized
QVQLQESGGGLVQAGGSLRLSCAASGYISYYADMGWYRQAPGKERELVATITTGGTTNYADSVKGRFTISRDNAKNTVYLQMNSLKPEDTAVYYCAVQVQDDGYAYYDDNYSFGYWGQGTQVTVSS

SEQ ID NO: 14272 - protein, 122 aa, Artificial Sequence
  Chemically Synthesized
QVQLQESGGGLVQAGGSLRLSCAASGNIFALYEMGWYRQAPGKERELVAAINYGSITNYADSVKGRFTISRDNAKNTVYLQMNSLKPEDTAVYYCAASAASYSLRHEDHFYWGQGTQVTVSS

SEQ ID NO: 14273 - protein, 117 aa, Artificial Sequence
  Chemically Synthesized
QVQLQESGGGLVQAGGSLRLSCAASGTISNSTMGWYRQAPGKEREFVATITAGGTTYYADSVKGRFTISRDNAKNTVYLQMNSLKPEDTAVYYCAAAVWRQRGHYYWGQGTQVTVSS

SEQ ID NO: 14274 - protein, 118 aa, Artificial Sequence
  Chemically Synthesized
QVQLQESGGGLVQAGGSLRLSCAASGTISYDIYMGWYRQAPGKERELVASIASGTSTYYADSVKGRFTISRDNAKNTVYLQMNSLKPEDTAVYYCAALVGNLYPLGYWGQGTQVTVSS

SEQ ID NO: 14275 - protein, 122 aa, Artificial Sequence
  Chemically Synthesized
QVQLQESGGGLVQAGGSLRLSCAASGSIFDYDDMGWYRQAPGKEREFVATIATGANTNYADSVKGRFTISRDNAKNTVYLQMNSLKPEDTAVYYCAVTDYSASRYWKGYYYWGQGTQVTVSS

SEQ ID NO: 14276 - protein, 124 aa, Artificial Sequence
  Chemically Synthesized
QVQLQESGGGLVQAGGSLRLSCAASGNIFPPWSMGWYRQAPGKERELVPVLVTVVVPYADSVKGRFTISRDNAKNTVYLQMNSLKPEDTAVYYCAATSDQDISGSLYVGQLWYWGQGTQVTVSS

SEQ ID NO: 14277 - protein, 125 aa, Artificial Sequence
  Chemically Synthesized
QVQLQESGGGLVQAGGSLRLSCAASGYISSYLLMGWYRQAPGKEREFVAAITAGALPYADSVKGRFTISRDNAKNTVYLQMNSLKPEDTAVYYCAVYDRYNPYDVVQPPNLHRYWGQGTQVTVSS

SEQ ID NO: 14278 - protein, 118 aa, Artificial Sequence
  Chemically Synthesized
QVQLQESGGGLVQAGGSLRLSCAASGSISYPGYMGWYRQAPGKERELVAAIGYGANTYYADSVKGRFTISRDNAKNTVYLQMNSLKPEDTAVYYCAVYNNDYLHHAYWGQGTQVTVSS

SEQ ID NO: 14279 - protein, 118 aa, Artificial Sequence
  Chemically Synthesized
QVQLQESGGGLVQAGGSLRLSCAASGTIFYAALMGWYRQAPGKERELVASITGGTTTYYADSVKGRFTISRDNAKNTVYLQMNSLKPEDTAVYYCAVTQPDPLVLDYWGQGTQVTVSS

SEQ ID NO: 14280 - protein, 121 aa, Artificial Sequence
  Chemically Synthesized
QVQLQESGGGLVQAGGSLRLSCAASGTISAGYAMGWYRQAPGKERELVASIDNGASTNYADSVKGRFTISRDNAKNTVYLQMNSLKPEDTAVYYCAVHQDSLSKLLTVMYWGQGTQVTVSS

SEQ ID NO: 14281 - protein, 123 aa, Artificial Sequence
  Chemically Synthesized
QVQLQESGGGLVQAGGSLRLSCAASGYIFSNIAMGWYRQAPGKEREFVAAIDYGANTYYADSVKGRFTISRDNAKNTVYLQMNSLKPEDTAVYYCAVDHAADAYESYDDHYYWGQGTQVTVSS

SEQ ID NO: 14282 - protein, 118 aa, Artificial Sequence
  Chemically Synthesized
QVQLQESGGGLVQAGGSLRLSCAASGNISWRDMGWYRQAPGKERELVATITYGGTTNYADSVKGRFTISRDNAKNTVYLQMNSLKPEDTAVYYCAAFPDYLVYDYSYWGQGTQVTVSS

SEQ ID NO: 14283 - protein, 122 aa, Artificial Sequence
  Chemically Synthesized
QVQLQESGGGLVQAGGSLRLSCAASGTISRLDGMGWYRQAPGKEREFVASINSGGTTYYADSVKGRFTISRDNAKNTVYLQMNSLKPEDTAVYYCAVQGDYSTPYRTFYWYWGQGTQVTVSS

SEQ ID NO: 14284 - protein, 121 aa, Artificial Sequence
  Chemically Synthesized
QVQLQESGGGLVQAGGSLRLSCAASGYISGYYDMGWYRQAPGKEREFVASISQGTNTNYADSVKGRFTISRDNAKNTVYLQMNSLKPEDTAVYYCAAYWLLSCYLACLSYWGQGTQVTVSS

SEQ ID NO: 14285 - protein, 122 aa, Artificial Sequence
  Chemically Synthesized
QVQLQESGGGLVQAGGSLRLSCAASGTISGYHYMGWYRQAPGKERELVASITGGSSTYYADSVKGRFTISRDNAKNTVYLQMNSLKPEDTAVYYCAVAFDSYTPVHYPLSYWGQGTQVTVSS

SEQ ID NO: 14286 - protein, 115 aa, Artificial Sequence
  Chemically Synthesized
QVQLQESGGGLVQAGGSLRLSCAASGNISYGGWMGWYRQAPGKEREFVASITPGGTTNYADSVKGRFTISRDNAKNTVYLQMNSLKPEDTAVYYCAVVTTSSLYWGQGTQVTVSS

SEQ ID NO: 14287 - protein, 118 aa, Artificial Sequence
  Chemically Synthesized
QVQLQESGGGLVQAGGSLRLSCAASGTIFGDGYMGWYRQAPGKERELVAGIGAGTNTNYADSVKGRFTISRDNAKNTVYLQMNSLKPEDTAVYYCAARDTNGYLHVYWGQGTQVTVSS

SEQ ID NO: 14288 - protein, 117 aa, Artificial Sequence
  Chemically Synthesized
QVQLQESGGGLVQAGGSLRLSCAASGNISKAGTMGWYRQAPGKERELVATIAQGANTYYADSVKGRFTISRDNAKNTVYLQMNSLKPEDTAVYYCAAGTPSRQSMYWGQGTQVTVSS

SEQ ID NO: 14289 - protein, 125 aa, Artificial Sequence
  Chemically Synthesized
QVQLQESGGGLVQAGGSLRLSCAASGTIFDWEMGWYRQAPGKERELVASINTGGTTNYADSVKGRFTISRDNAKNTVYLQMNSLKPEDTAVYYCAAYHNGDYRDLVIYFRDYRYWGQGTQVTVSS

SEQ ID NO: 14290 - protein, 110 aa, Artificial Sequence
  Chemically Synthesized
QVQLQESGGGLVQAGGSLRLSCAASGNIFTYAQMGWYRQAPGKEREFVAAISEGAITYYADSVKGRFTISRDNAKNTVYLQMNSLKPEDTAVYYCAHVYWGQGTQVTVSS

SEQ ID NO: 14291 - protein, 122 aa, Artificial Sequence
  Chemically Synthesized
QVQLQESGGGLVQAGGSLRLSCAASGNIFSQYVMGWYRQAPGKERELVAAIGHGASTYYADSVKGRFTISRDNAKNTVYLQMNSLKPEDTAVYYCAALGYADYSYEYSLGYWGQGTQVTVSS

SEQ ID NO: 14292 - protein, 120 aa, Artificial Sequence
  Chemically Synthesized
QVQLQESGGGLVQAGGSLRLSCAASGNIFDYYFMGWYRQAPGKERELVAGYLYADSVKGRFTISRDNAKNTVYLQMNSLKPEDTAVYYCAAYSDSYYHGTLAADTQHRYWGQGTQVTVSS

SEQ ID NO: 14293 - protein, 122 aa, Artificial Sequence
  Chemically Synthesized
QVQLQESGGGLVQAGGSLRLSCAASGTISGWDYMGWYRQAPGKEREFVATIGPGGSTNYADSVKGRFTISRDNAKNTVYLQMNSLKPEDTAVYYCAAQRYITERVPYSYTYWGQGTQVTVSS

SEQ ID NO: 14294 - protein, 118 aa, Artificial Sequence
  Chemically Synthesized
QVQLQESGGGLVQAGGSLRLSCAASGTIFLIAYMGWYRQAPGKEREFVAGINGGAITNYADSVKGRFTISRDNAKNTVYLQMNSLKPEDTAVYYCAVYFYDRYTHRYWGQGTQVTVSS

SEQ ID NO: 14295 - protein, 122 aa, Artificial Sequence
  Chemically Synthesized
QVQLQESGGGLVQAGGSLRLSCAASGSISQDRAMGWYRQAPGKERELVASITYGGSTNYADSVKGRFTISRDNAKNTVYLQMNSLKPEDTAVYYCAAPTPWYDYYTGDYDYWGQGTQVTVSS

SEQ ID NO: 14296 - protein, 126 aa, Artificial Sequence
  Chemically Synthesized
QVQLQESGGGLVQAGGSLRLSCAASGTISGTLYMGWYRQAPGKEREFVASIATGGNTNYADSVKGRFTISRDNAKNTVYLQMNSLKPEDTAVYYCAAYHLYDAYVVRRDHGGYGYWGQGTQVTVSS

SEQ ID NO: 14297 - protein, 118 aa, Artificial Sequence
  Chemically Synthesized
QVQLQESGGGLVQAGGSLRLSCAASGTIFGDPFMGWYRQAPGKEREFVATISQGTNTNYADSVKGRFTISRDNAKNTVYLQMNSLKPEDTAVYYCAVHDYHSYEHGYWGQGTQVTVSS

SEQ ID NO: 14298 - protein, 126 aa, Artificial Sequence
  Chemically Synthesized
QVQLQESGGGLVQAGGSLRLSCAASGTISRVVGMGWYRQAPGKEREFVAAINAGSSTYYADSVKGRFTISRDNAKNTVYLQMNSLKPEDTAVYYCAAIQAKSQYSPASGKLRHSYWGQGTQVTVSS

SEQ ID NO: 14299 - protein, 126 aa, Artificial Sequence
  Chemically Synthesized
QVQLQESGGGLVQAGGSLRLSCAASGNISNITNMGWYRQAPGKERELVAAIGIGAITNYADSVKGRFTISRDNAKNTVYLQMNSLKPEDTAVYYCAVGVTKSLWLFAYYITPHDYWGQGTQVTVSS

SEQ ID NO: 14300 - protein, 116 aa, Artificial Sequence
  Chemically Synthesized
QVQLQESGGGLVQAGGSLRLSCAASGNIFRSSPMGWYRQAPGKERELVAAIARGAITYYADSVKGRFTISRDNAKNTVYLQMNSLKPEDTAVYYCAVAPSYRVGYWGQGTQVTVSS

SEQ ID NO: 14301 - protein, 117 aa, Artificial Sequence
  Chemically Synthesized
QVQLQESGGGLVQAGGSLRLSCAASGSISVVPYMGWYRQAPGKEREFVASINWGTNTNYADSVKGRFTISRDNAKNTVYLQMNSLKPEDTAVYYCAVKLVTRTLMYWGQGTQVTVSS

SEQ ID NO: 14302 - protein, 122 aa, Artificial Sequence
  Chemically Synthesized
QVQLQESGGGLVQAGGSLRLSCAASGNIFGWEHMGWYRQAPGKERELVASINSGTNTNYADSVKGRFTISRDNAKNTVYLQMNSLKPEDTAVYYCAAYWDYPYVRHIPYKYWGQGTQVTVSS

SEQ ID NO: 14303 - protein, 126 aa, Artificial Sequence
  Chemically Synthesized
QVQLQESGGGLVQAGGSLRLSCAASGTISDFYWMGWYRQAPGKERELVATIAQGSITNYADSVKGRFTISRDNAKNTVYLQMNSLKPEDTAVYYCAVYQAILSPDDSWIPWGHAYWGQGTQVTVSS

SEQ ID NO: 14304 - protein, 120 aa, Artificial Sequence
  Chemically Synthesized
QVQLQESGGGLVQAGGSLRLSCAASGYISRYYGMGWYRQAPGKERELVAGIGRGTSTNYADSVKGRFTISRDNAKNTVYLQMNSLKPEDTAVYYCAVYASYWPGRGQDYWGQGTQVTVSS

SEQ ID NO: 14305 - protein, 121 aa, Artificial Sequence
  Chemically Synthesized
QVQLQESGGGLVQAGGSLRLSCAASGYISWDDYMGWYRQAPGKEREFVALLVKVVVPYADSVKGRFTISRDNAKNTVYLQMNSLKPEDTAVYYCAVIVYYAATGYLQHDYWGQGTQVTVSS

SEQ ID NO: 14306 - protein, 117 aa, Artificial Sequence
  Chemically Synthesized
QVQLQESGGGLVQAGGSLRLSCAASGTISAWYTMGWYRQAPGKEREFVATINAGTTTNYADSVKGRFTISRDNAKNTVYLQMNSLKPEDTAVYYCAVRDESLGHDYWGQGTQVTVSS

SEQ ID NO: 14307 - protein, 116 aa, Artificial Sequence
  Chemically Synthesized
QVQLQESGGGLVQAGGSLRLSCAASGNISSERIMGWYRQAPGKEREFVASLITVLLPYADSVKGRFTISRDNAKNTVYLQMNSLKPEDTAVYYCAVIVDYNDSLYWGQGTQVTVSS

SEQ ID NO: 14308 - protein, 122 aa, Artificial Sequence
  Chemically Synthesized
QVQLQESGGGLVQAGGSLRLSCAASGTISIDLTMGWYRQAPGKERELVASIGAGSTTYYADSVKGRFTISRDNAKNTVYLQMNSLKPEDTAVYYCAAIDWGFRLYDVYYGYWGQGTQVTVSS

SEQ ID NO: 14309 - protein, 121 aa, Artificial Sequence
  Chemically Synthesized
QVQLQESGGGLVQAGGSLRLSCAASGTISLDADMGWYRQAPGKERELVATIASVLLPYADSVKGRFTISRDNAKNTVYLQMNSLKPEDTAVYYCAVSSGDYPIDTRYHGYWGQGTQVTVSS

SEQ ID NO: 14310 - protein, 122 aa, Artificial Sequence
  Chemically Synthesized
QVQLQESGGGLVQAGGSLRLSCAASGYISSWDDMGWYRQAPGKEREFVASINVGASTLYADSVKGRFTISRDNAKNTVYLQMNSLKPEDTAVYYCAAAYNIEYHRVNQYDYWGQGTQVTVSS

SEQ ID NO: 14311 - protein, 122 aa, Artificial Sequence
  Chemically Synthesized
QVQLQESGGGLVQAGGSLRLSCAASGYISVGKYMGWYRQAPGKEREFVASISRGSSTNYADSVKGRFTISRDNAKNTVYLQMNSLKPEDTAVYYCAAWGDGRGATWLKHWYWGQGTQVTVSS

SEQ ID NO: 14312 - protein, 122 aa, Artificial Sequence
  Chemically Synthesized
QVQLQESGGGLVQAGGSLRLSCAASGTIFGVDGMGWYRQAPGKEREFVATISPGSSTNYADSVKGRFTISRDNAKNTVYLQMNSLKPEDTAVYYCAVLSVSQELFVYRYGYWGQGTQVTVSS

SEQ ID NO: 14313 - protein, 117 aa, Artificial Sequence
  Chemically Synthesized
QVQLQESGGGLVQAGGSLRLSCAASGTISRYTLMGWYRQAPGKERELVAAIADGATTNYADSVKGRFTISRDNAKNTVYLQMNSLKPEDTAVYYCAVGGTTSDLVYWGQGTQVTVSS

SEQ ID NO: 14314 - protein, 117 aa, Artificial Sequence
  Chemically Synthesized
QVQLQESGGGLVQAGGSLRLSCAASGSIFLYDYMGWYRQAPGKEREFVATITEGSTTNYADSVKGRFTISRDNAKNTVYLQMNSLKPEDTAVYYCAVGDGGLRYLYWGQGTQVTVSS

SEQ ID NO: 14315 - protein, 118 aa, Artificial Sequence
  Chemically Synthesized
QVQLQESGGGLVQAGGSLRLSCAASGNISVRLDMGWYRQAPGKEREFVAGINWGTSTYYADSVKGRFTISRDNAKNTVYLQMNSLKPEDTAVYYCAAVGTGPAFHSYWGQGTQVTVSS

SEQ ID NO: 14316 - protein, 118 aa, Artificial Sequence
  Chemically Synthesized
QVQLQESGGGLVQAGGSLRLSCAASGTISHYDRMGWYRQAPGKEREFVAAITDGGNTYYADSVKGRFTISRDNAKNTVYLQMNSLKPEDTAVYYCAVSPAYVFGLVYWGQGTQVTVSS

SEQ ID NO: 14317 - protein, 122 aa, Artificial Sequence
  Chemically Synthesized
QVQLQESGGGLVQAGGSLRLSCAASGYISIFLIMGWYRQAPGKEREFVAAINYGGNTYYADSVKGRFTISRDNAKNTVYLQMNSLKPEDTAVYYCAADDAWRVKDTVRHVYWGQGTQVTVSS

SEQ ID NO: 14318 - protein, 118 aa, Artificial Sequence
  Chemically Synthesized
QVQLQESGGGLVQAGGSLRLSCAASGTIFEYDWMGWYRQAPGKERELVAGIAFGTNTYYADSVKGRFTISRDNAKNTVYLQMNSLKPEDTAVYYCATRRYGSERYLYWGQGTQVTVSS

SEQ ID NO: 14319 - protein, 122 aa, Artificial Sequence
  Chemically Synthesized
QVQLQESGGGLVQAGGSLRLSCAASGTISQYHEMGWYRQAPGKERELVAGIGYGATTNYADSVKGRFTISRDNAKNTVYLQMNSLKPEDTAVYYCAVYYDRGHYVDYVYPYWGQGTQVTVSS

SEQ ID NO: 14320 - protein, 118 aa, Artificial Sequence
  Chemically Synthesized
QVQLQESGGGLVQAGGSLRLSCAASGYIFRHAGMGWYRQAPGKERELVAGIGLGATTYYADSVKGRFTISRDNAKNTVYLQMNSLKPEDTAVYYCAAYGSRPILYDYWGQGTQVTVSS

SEQ ID NO: 14321 - protein, 122 aa, Artificial Sequence
  Chemically Synthesized
QVQLQESGGGLVQAGGSLRLSCAASGTISHPAVMGWYRQAPGKERELVAGIGRGTTTYYADSVKGRFTISRDNAKNTVYLQMNSLKPEDTAVYYCAVHLTSIHQNYFWYRYWGQGTQVTVSS

SEQ ID NO: 14322 - protein, 122 aa, Artificial Sequence
  Chemically Synthesized
QVQLQESGGGLVQAGGSLRLSCAASGNISTSDQMGWYRQAPGKERELVASITFGSNTNYADSVKGRFTISRDNAKNTVYLQMNSLKPEDTAVYYCAVPYDRFQSRRGSLYYWGQGTQVTVSS

SEQ ID NO: 14323 - protein, 118 aa, Artificial Sequence
  Chemically Synthesized
QVQLQESGGGLVQAGGSLRLSCAASGYIFGLLAMGWYRQAPGKEREFVATISNGTNTNYADSVKGRFTISRDNAKNTVYLQMNSLKPEDTAVYYCAAYRTHFGDYDYWGQGTQVTVSS

SEQ ID NO: 14324 - protein, 121 aa, Artificial Sequence
  Chemically Synthesized
QVQLQESGGGLVQAGGSLRLSCAASGYIFYFPYMGWYRQAPGKERELVAAIAYGTNTNYADSVKGRFTISRDNAKNTVYLQMNSLKPEDTAVYYCAVIVERAFYQRDRMYWGQGTQVTVSS

SEQ ID NO: 14325 - protein, 122 aa, Artificial Sequence
  Chemically Synthesized
QVQLQESGGGLVQAGGSLRLSCAASGTISNHTTMGWYRQAPGKEREFVAAITYGGNTNYADSVKGRFTISRDNAKNTVYLQMNSLKPEDTAVYYCAVPGQYDAPRGTLHDYWGQGTQVTVSS

SEQ ID NO: 14326 - protein, 121 aa, Artificial Sequence
  Chemically Synthesized
QVQLQESGGGLVQAGGSLRLSCAASGTISYSDYMGWYRQAPGKEREFVATINYGGTPYADSVKGRFTISRDNAKNTVYLQMNSLKPEDTAVYYCAVFGHAGIYDFWFYQYWGQGTQVTVSS

SEQ ID NO: 14327 - protein, 118 aa, Artificial Sequence
  Chemically Synthesized
QVQLQESGGGLVQAGGSLRLSCAASGNISVLDYMGWYRQAPGKERELVAAIAYGGSTYYADSVKGRFTISRDNAKNTVYLQMNSLKPEDTAVYYCAVDRDGIKYHKYWGQGTQVTVSS

SEQ ID NO: 14328 - protein, 121 aa, Artificial Sequence
  Chemically Synthesized
QVQLQESGGGLVQAGGSLRLSCAASGTISVAGMGWYRQAPGKEREFVAAISYGGSTNYADSVKGRFTISRDNAKNTVYLQMNSLKPEDTAVYYCAAWPFADDDVIQYYQYWGQGTQVTVSS

SEQ ID NO: 14329 - protein, 117 aa, Artificial Sequence
  Chemically Synthesized
QVQLQESGGGLVQAGGSLRLSCAASGYISDSLMGWYRQAPGKEREFVAGISHGSTTYYADSVKGRFTISRDNAKNTVYLQMNSLKPEDTAVYYCAAAYYNLWAYSYWGQGTQVTVSS

SEQ ID NO: 14330 - protein, 118 aa, Artificial Sequence
  Chemically Synthesized
QVQLQESGGGLVQAGGSLRLSCAASGYISRGRVMGWYRQAPGKEREFVAAITTGATTNYADSVKGRFTISRDNAKNTVYLQMNSLKPEDTAVYYCAVAQWYSYSHGYWGQGTQVTVSS

SEQ ID NO: 14331 - protein, 126 aa, Artificial Sequence
  Chemically Synthesized
QVQLQESGGGLVQAGGSLRLSCAASGTIFYYYAMGWYRQAPGKEREFVAGIAYGGSTYYADSVKGRFTISRDNAKNTVYLQMNSLKPEDTAVYYCAADYYLNHYTYGYYGLGLAYWGQGTQVTVSS

SEQ ID NO: 14332 - protein, 126 aa, Artificial Sequence
  Chemically Synthesized
QVQLQESGGGLVQAGGSLRLSCAASGTIFNGLLMGWYRQAPGKERELVAGINAGATTNYADSVKGRFTISRDNAKNTVYLQMNSLKPEDTAVYYCAVHPFDRYPKGFFPHYIHYYWGQGTQVTVSS

SEQ ID NO: 14333 - protein, 118 aa, Artificial Sequence
  Chemically Synthesized
QVQLQESGGGLVQAGGSLRLSCAASGTISYLDTMGWYRQAPGKERELVASINFGGTTYYADSVKGRFTISRDNAKNTVYLQMNSLKPEDTAVYYCAVQTDTYFEFYYWGQGTQVTVSS

SEQ ID NO: 14334 - protein, 120 aa, Artificial Sequence
  Chemically Synthesized
QVQLQESGGGLVQAGGSLRLSCAASGSIFGLTMGWYRQAPGKERELVASIGSVLVPYADSVKGRFTISRDNAKNTVYLQMNSLKPEDTAVYYCAATVRTEIFSIDPLYYWGQGTQVTVSS

SEQ ID NO: 14335 - protein, 126 aa, Artificial Sequence
  Chemically Synthesized
QVQLQESGGGLVQAGGSLRLSCAASGTIFDGSTMGWYRQAPGKEREFVAAISKGGNTNYADSVKGRFTISRDNAKNTVYLQMNSLKPEDTAVYYCAAVTQTRWTQQVDLSPRHQYWGQGTQVTVSS

SEQ ID NO: 14336 - protein, 110 aa, Artificial Sequence
  Chemically Synthesized
QVQLQESGGGLVQAGGSLRLSCAASGNIFGDTVMGWYRQAPGKEREFVATIDLGTSTYYADSVKGRFTISRDNAKNTVYLQMNSLKPEDTAVYYCAAIYWGQGTQVTVSS

SEQ ID NO: 14337 - protein, 122 aa, Artificial Sequence
  Chemically Synthesized
QVQLQESGGGLVQAGGSLRLSCAASGTIFQRYDMGWYRQAPGKERELVATITYGASTNYADSVKGRFTISRDNAKNTVYLQMNSLKPEDTAVYYCAVYNSRFHYWWYPHTYWGQGTQVTVSS

SEQ ID NO: 14338 - protein, 118 aa, Artificial Sequence
  Chemically Synthesized
QVQLQESGGGLVQAGGSLRLSCAASGSIFAWDGMGWYRQAPGKERELVRVVIPYADSVKGRFTISRDNAKNTVYLQMNSLKPEDTAVYYCAVYYYGYSNFWYDYFGYWGQGTQVTVSS

SEQ ID NO: 14339 - protein, 120 aa, Artificial Sequence
  Chemically Synthesized
QVQLQESGGGLVQAGGSLRLSCAASGNISSLSRMGWYRQAPGKERELVATIDVGGTTYYADSVKGRFTISRDNAKNTVYLQMNSLKPEDTAVYYCAVRDLWFVQTDSYYWGQGTQVTVSS

SEQ ID NO: 14340 - protein, 118 aa, Artificial Sequence
  Chemically Synthesized
QVQLQESGGGLVQAGGSLRLSCAASGYISRFGRMGWYRQAPGKEREFVAGIDSGSNTYYADSVKGRFTISRDNAKNTVYLQMNSLKPEDTAVYYCAAFYGYQVYLDYWGQGTQVTVSS

SEQ ID NO: 14341 - protein, 116 aa, Artificial Sequence
  Chemically Synthesized
QVQLQESGGGLVQAGGSLRLSCAASGNISQSLPMGWYRQAPGKERELVATLVRVVLPYADSVKGRFTISRDNAKNTVYLQMNSLKPEDTAVYYCAAVVTFGSCIYWGQGTQVTVSS

SEQ ID NO: 14342 - protein, 118 aa, Artificial Sequence
  Chemically Synthesized
QVQLQESGGGLVQAGGSLRLSCAASGSISYDSTMGWYRQAPGKERELVAGISSGGITYYADSVKGRFTISRDNAKNTVYLQMNSLKPEDTAVYYCAVNTNDRYSFAYWGQGTQVTVSS

SEQ ID NO: 14343 - protein, 121 aa, Artificial Sequence
  Chemically Synthesized
QVQLQESGGGLVQAGGSLRLSCAASGTISPHGDMGWYRQAPGKERELVAAITDGSNTNYADSVKGRFTISRDNAKNTVYLQMNSLKPEDTAVYYCAAGSVPYYPGASNMYWGQGTQVTVSS

SEQ ID NO: 14344 - protein, 118 aa, Artificial Sequence
  Chemically Synthesized
QVQLQESGGGLVQAGGSLRLSCAASGNIFPLGYMGWYRQAPGKERELVATIDAGGITNYADSVKGRFTISRDNAKNTVYLQMNSLKPEDTAVYYCAVGGFGADIFGYWGQGTQVTVSS

SEQ ID NO: 14345 - protein, 114 aa, Artificial Sequence
  Chemically Synthesized
QVQLQESGGGLVQAGGSLRLSCAASGNISPSGFMGWYRQAPGKEREFVATIAEGGITNYADSVKGRFTISRDNAKNTVYLQMNSLKPEDTAVYYCAVGHFHLYWGQGTQVTVSS

SEQ ID NO: 14346 - protein, 126 aa, Artificial Sequence
  Chemically Synthesized
QVQLQESGGGLVQAGGSLRLSCAASGSISRYINMGWYRQAPGKEREFVATIGTGSSTNYADSVKGRFTISRDNAKNTVYLQMNSLKPEDTAVYYCAARIYENRTYYWRDFTWLYYWGQGTQVTVSS

SEQ ID NO: 14347 - protein, 125 aa, Artificial Sequence
  Chemically Synthesized
QVQLQESGGGLVQAGGSLRLSCAASGTISYPPDMGWYRQAPGKEREFVASIDDGGNTYYADSVKGRFTISRDNAKNTVYLQMNSLKPEDTAVYYCAVRLLASCRTTSRVSGTLYWGQGTQVTVSS

SEQ ID NO: 14348 - protein, 118 aa, Artificial Sequence
  Chemically Synthesized
QVQLQESGGGLVQAGGSLRLSCAASGSIFRTVYMGWYRQAPGKERELVAAIGSGGNTYYADSVKGRFTISRDNAKNTVYLQMNSLKPEDTAVYYCAAVTYYRYWYYYWGQGTQVTVSS

SEQ ID NO: 14349 - protein, 118 aa, Artificial Sequence
  Chemically Synthesized
QVQLQESGGGLVQAGGSLRLSCAASGSIFRYVDMGWYRQAPGKERELVAGIAVGGNTYYADSVKGRFTISRDNAKNTVYLQMNSLKPEDTAVYYCAVYNYPNDRHVYWGQGTQVTVSS

SEQ ID NO: 14350 - protein, 116 aa, Artificial Sequence
  Chemically Synthesized
QVQLQESGGGLVQAGGSLRLSCAASGNISYRMGWYRQAPGKERELVASIGGGSTTNYADSVKGRFTISRDNAKNTVYLQMNSLKPEDTAVYYCAAGEQDGNSFTYWGQGTQVTVSS

SEQ ID NO: 14351 - protein, 118 aa, Artificial Sequence
  Chemically Synthesized
QVQLQESGGGLVQAGGSLRLSCAASGSISQLYGMGWYRQAPGKEREFVAAIAYGGTTYYADSVKGRFTISRDNAKNTVYLQMNSLKPEDTAVYYCAAVTDYYYLHVYWGQGTQVTVSS

SEQ ID NO: 14352 - protein, 121 aa, Artificial Sequence
  Chemically Synthesized
QVQLQESGGGLVQAGGSLRLSCAASGNIFPYYAMGWYRQAPGKERELVAGINAGANTNYADSVKGRFTISRDNAKNTVYLQMNSLKPEDTAVYYCAVTQYTYGFPDASFYWGQGTQVTVSS

SEQ ID NO: 14353 - protein, 118 aa, Artificial Sequence
  Chemically Synthesized
QVQLQESGGGLVQAGGSLRLSCAASGNISKDDDMGWYRQAPGKEREFVATITAGSTTYYADSVKGRFTISRDNAKNTVYLQMNSLKPEDTAVYYCAARGVVRVYHSYWGQGTQVTVSS

SEQ ID NO: 14354 - protein, 126 aa, Artificial Sequence
  Chemically Synthesized
QVQLQESGGGLVQAGGSLRLSCAASGNIFVGSYMGWYRQAPGKERELVAAIDQGGNTNYADSVKGRFTISRDNAKNTVYLQMNSLKPEDTAVYYCAVDRDDTATGFYLGDIALGYWGQGTQVTVSS

SEQ ID NO: 14355 - protein, 114 aa, Artificial Sequence
  Chemically Synthesized
QVQLQESGGGLVQAGGSLRLSCAASGTIFFYDNMGWYRQAPGKEREFVAGIADGGNTNYADSVKGRFTISRDNAKNTVYLQMNSLKPEDTAVYYCAVTTSTMYWGQGTQVTVSS

SEQ ID NO: 14356 - protein, 121 aa, Artificial Sequence
  Chemically Synthesized
QVQLQESGGGLVQAGGSLRLSCAASGYISVRVDMGWYRQAPGKERELVATINKGASTNYADSVKGRFTISRDNAKNTVYLQMNSLKPEDTAVYYCAVDSTVLTLLTLTIYWGQGTQVTVSS

SEQ ID NO: 14357 - protein, 118 aa, Artificial Sequence
  Chemically Synthesized
QVQLQESGGGLVQAGGSLRLSCAASGTIFAGSHMGWYRQAPGKERELVAGIDRGGSTYYADSVKGRFTISRDNAKNTVYLQMNSLKPEDTAVYYCAARDDTQYIYYYWGQGTQVTVSS

SEQ ID NO: 14358 - protein, 122 aa, Artificial Sequence
  Chemically Synthesized
QVQLQESGGGLVQAGGSLRLSCAASGTISRFLDMGWYRQAPGKERELVASIGAGSNTYYADSVKGRFTISRDNAKNTVYLQMNSLKPEDTAVYYCAARREGGSTATGQHRYWGQGTQVTVSS

SEQ ID NO: 14359 - protein, 122 aa, Artificial Sequence
  Chemically Synthesized
QVQLQESGGGLVQAGGSLRLSCAASGTIFNAASMGWYRQAPGKERELVATIDDGTITYYADSVKGRFTISRDNAKNTVYLQMNSLKPEDTAVYYCAVPQIAQRGFGRTFYYWGQGTQVTVSS

SEQ ID NO: 14360 - protein, 122 aa, Artificial Sequence
  Chemically Synthesized
QVQLQESGGGLVQAGGSLRLSCAASGTISIRRVMGWYRQAPGKEREFVAAIAYGSSTNYADSVKGRFTISRDNAKNTVYLQMNSLKPEDTAVYYCAAYTGHAPGYVPNYLYWGQGTQVTVSS

SEQ ID NO: 14361 - protein, 121 aa, Artificial Sequence
  Chemically Synthesized
QVQLQESGGGLVQAGGSLRLSCAASGSISGRGRMGWYRQAPGKERELVASIGTGGTTYYADSVKGRFTISRDNAKNTVYLQMNSLKPEDTAVYYCAAATFYIYSTVSLIYWGQGTQVTVSS

SEQ ID NO: 14362 - protein, 122 aa, Artificial Sequence
  Chemically Synthesized
QVQLQESGGGLVQAGGSLRLSCAASGYISWYYGMGWYRQAPGKEREFVASISGGGTTNYADSVKGRFTISRDNAKNTVYLQMNSLKPEDTAVYYCAVSGFDDYGNDDYHVYWGQGTQVTVSS

SEQ ID NO: 14363 - protein, 126 aa, Artificial Sequence
  Chemically Synthesized
QVQLQESGGGLVQAGGSLRLSCAASGNIFRGAVMGWYRQAPGKERELVATITYGGITYYADSVKGRFTISRDNAKNTVYLQMNSLKPEDTAVYYCAVEYYQVWYGPLYPSVDHQYWGQGTQVTVSS

SEQ ID NO: 14364 - protein, 118 aa, Artificial Sequence
  Chemically Synthesized
QVQLQESGGGLVQAGGSLRLSCAASGSISYGWIMGWYRQAPGKEREFVASITGGAITYYADSVKGRFTISRDNAKNTVYLQMNSLKPEDTAVYYCAVYRNDFDAYDYWGQGTQVTVSS

SEQ ID NO: 14365 - protein, 118 aa, Artificial Sequence
  Chemically Synthesized
QVQLQESGGGLVQAGGSLRLSCAASGTISYAYVMGWYRQAPGKEREFVAAIDYGSTTNYADSVKGRFTISRDNAKNTVYLQMNSLKPEDTAVYYCAVVARDWDQFDYWGQGTQVTVSS

SEQ ID NO: 14366 - protein, 118 aa, Artificial Sequence
  Chemically Synthesized
QVQLQESGGGLVQAGGSLRLSCAASGSIFDQYWMGWYRQAPGKEREFVASINYGSTTNYADSVKGRFTISRDNAKNTVYLQMNSLKPEDTAVYYCAAWAYNFDDYDYWGQGTQVTVSS

SEQ ID NO: 14367 - protein, 111 aa, Artificial Sequence
  Chemically Synthesized
QVQLQESGGGLVQAGGSLRLSCAASGNISTDVVMGWYRQAPGKEREFVAGIDSGTTTNYADSVKGRFTISRDNAKNTVYLQMNSLKPEDTAVYYCAGHAYWGQGTQVTVSS

SEQ ID NO: 14368 - protein, 118 aa, Artificial Sequence
  Chemically Synthesized
QVQLQESGGGLVQAGGSLRLSCAASGNISGVVFMGWYRQAPGKERELVAAIDWGASTYYADSVKGRFTISRDNAKNTVYLQMNSLKPEDTAVYYCAAWLYRRVEHDYWGQGTQVTVSS

SEQ ID NO: 14369 - protein, 122 aa, Artificial Sequence
  Chemically Synthesized
QVQLQESGGGLVQAGGSLRLSCAASGTISQSRNMGWYRQAPGKERELVASIGVGSTTNYADSVKGRFTISRDNAKNTVYLQMNSLKPEDTAVYYCAVHTTVNSRYALYHDYWGQGTQVTVSS

SEQ ID NO: 14370 - protein, 118 aa, Artificial Sequence
  Chemically Synthesized
QVQLQESGGGLVQAGGSLRLSCAASGSISDDYYMGWYRQAPGKEREFVATIDYGGTTYYADSVKGRFTISRDNAKNTVYLQMNSLKPEDTAVYYCAVIAYAWYEYDYWGQGTQVTVSS

SEQ ID NO: 14371 - protein, 116 aa, Artificial Sequence
  Chemically Synthesized
QVQLQESGGGLVQAGGSLRLSCAASGNISQEMGWYRQAPGKEREFVAGISGGTITYYADSVKGRFTISRDNAKNTVYLQMNSLKPEDTAVYYCAADVGAYLDLGYWGQGTQVTVSS

SEQ ID NO: 14372 - protein, 125 aa, Artificial Sequence
  Chemically Synthesized
QVQLQESGGGLVQAGGSLRLSCAASGSIFEDADMGWYRQAPGKEREFVAAIGDGSTTYYADSVKGRFTISRDNAKNTVYLQMNSLKPEDTAVYYCAANTSCTCSTTLSGCLVFYWGQGTQVTVSS

SEQ ID NO: 14373 - protein, 118 aa, Artificial Sequence
  Chemically Synthesized
QVQLQESGGGLVQAGGSLRLSCAASGYISPHYEMGWYRQAPGKEREFVASITSGGITNYADSVKGRFTISRDNAKNTVYLQMNSLKPEDTAVYYCAVYYLYYDDFLYWGQGTQVTVSS

SEQ ID NO: 14374 - protein, 121 aa, Artificial Sequence
  Chemically Synthesized
QVQLQESGGGLVQAGGSLRLSCAASGSIFPFTAMGWYRQAPGKERELVASIDYGASTNYADSVKGRFTISRDNAKNTVYLQMNSLKPEDTAVYYCAVRQAYSFTTLVTFYWGQGTQVTVSS

SEQ ID NO: 14375 - protein, 122 aa, Artificial Sequence
  Chemically Synthesized
QVQLQESGGGLVQAGGSLRLSCAASGYISAAGVMGWYRQAPGKERELVAAINDGGNTYYADSVKGRFTISRDNAKNTVYLQMNSLKPEDTAVYYCAVVDAKDTYRDLIYRYWGQGTQVTVSS

SEQ ID NO: 14376 - protein, 126 aa, Artificial Sequence
  Chemically Synthesized
QVQLQESGGGLVQAGGSLRLSCAASGTIFADYGMGWYRQAPGKEREFVATIAPGGTTNYADSVKGRFTISRDNAKNTVYLQMNSLKPEDTAVYYCAAYPYDSTSSLEDGAYDYAYWGQGTQVTVSS

SEQ ID NO: 14377 - protein, 118 aa, Artificial Sequence
  Chemically Synthesized
QVQLQESGGGLVQAGGSLRLSCAASGSISYTGSMGWYRQAPGKERELVAAIAYGASTYYADSVKGRFTISRDNAKNTVYLQMNSLKPEDTAVYYCAVDDPDYVAFGYWGQGTQVTVSS

SEQ ID NO: 14378 - protein, 122 aa, Artificial Sequence
  Chemically Synthesized
QVQLQESGGGLVQAGGSLRLSCAASGSISIPYFMGWYRQAPGKEREFVAAIASGGNTYYADSVKGRFTISRDNAKNTVYLQMNSLKPEDTAVYYCAAQGKDRYVGNNAHYYWGQGTQVTVSS

SEQ ID NO: 14379 - protein, 121 aa, Artificial Sequence
  Chemically Synthesized
QVQLQESGGGLVQAGGSLRLSCAASGYISSVTMGWYRQAPGKEREFVAGIDGGSITNYADSVKGRFTISRDNAKNTVYLQMNSLKPEDTAVYYCAADTDSYYDITIYFAYWGQGTQVTVSS

SEQ ID NO: 14380 - protein, 122 aa, Artificial Sequence
  Chemically Synthesized
QVQLQESGGGLVQAGGSLRLSCAASGYISEVADMGWYRQAPGKERELVAAISDGSNTNYADSVKGRFTISRDNAKNTVYLQMNSLKPEDTAVYYCAAVTGYWRDDLENYFYWGQGTQVTVSS

SEQ ID NO: 14381 - protein, 122 aa, Artificial Sequence
  Chemically Synthesized
QVQLQESGGGLVQAGGSLRLSCAASGYIFLRKGMGWYRQAPGKERELVASIAQGGNTNYADSVKGRFTISRDNAKNTVYLQMNSLKPEDTAVYYCAAIYAWSQQWLDQHWYWGQGTQVTVSS

SEQ ID NO: 14382 - protein, 126 aa, Artificial Sequence
  Chemically Synthesized
QVQLQESGGGLVQAGGSLRLSCAASGTISVYGFMGWYRQAPGKERELVAAIGYGSSTYYADSVKGRFTISRDNAKNTVYLQMNSLKPEDTAVYYCAAWGESGDGYPFEDYYYHGYWGQGTQVTVSS

SEQ ID NO: 14383 - protein, 121 aa, Artificial Sequence
  Chemically Synthesized
QVQLQESGGGLVQAGGSLRLSCAASGNFLVRSMGWYRQAPGKEREFVASIAYGGSTNYADSVKGRFTISRDNAKNTVYLQMNSLKPEDTAVYYCAADRWNQWYQRTQFEYWGQGTQVTVSS

SEQ ID NO: 14384 - protein, 122 aa, Artificial Sequence
  Chemically Synthesized
QVQLQESGGGLVQAGGSLRLSCAASGSISLTGYMGWYRQAPGKERELVATINGGSNTNYADSVKGRFTISRDNAKNTVYLQMNSLKPEDTAVYYCAAYIGYDAYAFTDLGYWGQGTQVTVSS

SEQ ID NO: 14385 - protein, 118 aa, Artificial Sequence
  Chemically Synthesized
QVQLQESGGGLVQAGGSLRLSCAASGTIFGVSLMGWYRQAPGKERELVATINPGGTTYYADSVKGRFTISRDNAKNTVYLQMNSLKPEDTAVYYCAVAYWPIFLHQYWGQGTQVTVSS

SEQ ID NO: 14386 - protein, 118 aa, Artificial Sequence
  Chemically Synthesized
QVQLQESGGGLVQAGGSLRLSCAASGTIFSLQYMGWYRQAPGKEREFVAAIGYGGITNYADSVKGRFTISRDNAKNTVYLQMNSLKPEDTAVYYCAARTETTRYYIYWGQGTQVTVSS

SEQ ID NO: 14387 - protein, 122 aa, Artificial Sequence
  Chemically Synthesized
QVQLQESGGGLVQAGGSLRLSCAASGSIFDDYRMGWYRQAPGKERELVAAINDGSSTYYADSVKGRFTISRDNAKNTVYLQMNSLKPEDTAVYYCAALPTGVRHTYDILYYWGQGTQVTVSS

SEQ ID NO: 14388 - protein, 116 aa, Artificial Sequence
  Chemically Synthesized
QVQLQESGGGLVQAGGSLRLSCAASGTISSELSMGWYRQAPGKERELLPVLVLVLVPYADSVKGRFTISRDNAKNTVYLQMNSLKPEDTAVYYCAARYDSVIVMYWGQGTQVTVSS

SEQ ID NO: 14389 - protein, 117 aa, Artificial Sequence
  Chemically Synthesized
QVQLQESGGGLVQAGGSLRLSCAASGNISDYDGMGWYRQAPGKEREFVASIAWGTNTNYADSVKGRFTISRDNAKNTVYLQMNSLKPEDTAVYYCAVLPYRRDHRYWGQGTQVTVSS

SEQ ID NO: 14390 - protein, 122 aa, Artificial Sequence
  Chemically Synthesized
QVQLQESGGGLVQAGGSLRLSCAASGSIFVGLTMGWYRQAPGKERELVAAIGVGGSTNYADSVKGRFTISRDNAKNTVYLQMNSLKPEDTAVYYCAADRYGDTYDDYVHDYWGQGTQVTVSS

SEQ ID NO: 14391 - protein, 118 aa, Artificial Sequence
  Chemically Synthesized
QVQLQESGGGLVQAGGSLRLSCAASGTISYRYYMGWYRQAPGKEREFVAGIDDGGNTYYADSVKGRFTISRDNAKNTVYLQMNSLKPEDTAVYYCAAGDSGYRLFKYWGQGTQVTVSS

SEQ ID NO: 14392 - protein, 117 aa, Artificial Sequence
  Chemically Synthesized
QVQLQESGGGLVQAGGSLRLSCAASGSIFTTTMGWYRQAPGKEREFVAGINGGGTTNYADSVKGRFTISRDNAKNTVYLQMNSLKPEDTAVYYCAVTDTRYLYLRYWGQGTQVTVSS

SEQ ID NO: 14393 - protein, 118 aa, Artificial Sequence
  Chemically Synthesized
QVQLQESGGGLVQAGGSLRLSCAASGTIFGYRNMGWYRQAPGKERELVASINGGSSTNYADSVKGRFTISRDNAKNTVYLQMNSLKPEDTAVYYCAVRNYVYRLHVYWGQGTQVTVSS

SEQ ID NO: 14394 - protein, 118 aa, Artificial Sequence
  Chemically Synthesized
QVQLQESGGGLVQAGGSLRLSCAASGSIFWLYNMGWYRQAPGKERELVATITNGTITYYADSVKGRFTISRDNAKNTVYLQMNSLKPEDTAVYYCAVEGYRRDVYLYWGQGTQVTVSS

SEQ ID NO: 14395 - protein, 118 aa, Artificial Sequence
  Chemically Synthesized
QVQLQESGGGLVQAGGSLRLSCAASGNIFWGKLMGWYRQAPGKEREFVAGIARGTNTYYADSVKGRFTISRDNAKNTVYLQMNSLKPEDTAVYYCAARRVWVGPLGYWGQGTQVTVSS

SEQ ID NO: 14396 - protein, 117 aa, Artificial Sequence
  Chemically Synthesized
QVQLQESGGGLVQAGGSLRLSCAASGTIFDVAAMGWYRQAPGKERELVAGIAAGGNTNYADSVKGRFTISRDNAKNTVYLQMNSLKPEDTAVYYCAAGVLLSVLSYWGQGTQVTVSS

SEQ ID NO: 14397 - protein, 122 aa, Artificial Sequence
  Chemically Synthesized
QVQLQESGGGLVQAGGSLRLSCAASGSISGAGDMGWYRQAPGKEREFVAAIATGGSTYYADSVKGRFTISRDNAKNTVYLQMNSLKPEDTAVYYCAVDIWVGYDGGGSLDYWGQGTQVTVSS

SEQ ID NO: 14398 - protein, 118 aa, Artificial Sequence
  Chemically Synthesized
QVQLQESGGGLVQAGGSLRLSCAASGTIFDVVYMGWYRQAPGKEREFVAGIALGSSTNYADSVKGRFTISRDNAKNTVYLQMNSLKPEDTAVYYCAAHYYAPPYLLYWGQGTQVTVSS

SEQ ID NO: 14399 - protein, 115 aa, Artificial Sequence
  Chemically Synthesized
QVQLQESGGGLVQAGGSLRLSCAASGNISPGEMGWYRQAPGKERELVATITGGGNTNYADSVKGRFTISRDNAKNTVYLQMNSLKPEDTAVYYCALSTSTVLFYWGQGTQVTVSS

SEQ ID NO: 14400 - protein, 123 aa, Artificial Sequence
  Chemically Synthesized
QVQLQESGGGLVQAGGSLRLSCAASGTISRTHYMGWYRQAPGKEREFVATIAFGGSTNYADSVKGRFTISRDNAKNTVYLQMNSLKPEDTAVYYCAVYQDLVGAGAPAIFAYWGQGTQVTVSS

SEQ ID NO: 14401 - protein, 126 aa, Artificial Sequence
  Chemically Synthesized
QVQLQESGGGLVQAGGSLRLSCAASGTISDLVPMGWYRQAPGKEREFVAGISYGGITYYADSVKGRFTISRDNAKNTVYLQMNSLKPEDTAVYYCAVHNPYSYYYPDQGYSTHDYWGQGTQVTVSS

SEQ ID NO: 14402 - protein, 118 aa, Artificial Sequence
  Chemically Synthesized
QVQLQESGGGLVQAGGSLRLSCAASGTIFIGVYMGWYRQAPGKEREFVATISYGGSTYYADSVKGRFTISRDNAKNTVYLQMNSLKPEDTAVYYCAVDGIIHSAFGYWGQGTQVTVSS

SEQ ID NO: 14403 - protein, 122 aa, Artificial Sequence
  Chemically Synthesized
QVQLQESGGGLVQAGGSLRLSCAASGSISAQYPMGWYRQAPGKERELVATISTGGSTNYADSVKGRFTISRDNAKNTVYLQMNSLKPEDTAVYYCAALKYCRQPVATALLYWGQGTQVTVSS

SEQ ID NO: 14404 - protein, 122 aa, Artificial Sequence
  Chemically Synthesized
QVQLQESGGGLVQAGGSLRLSCAASGNISVRPGMGWYRQAPGKEREFVASITYGGNTYYADSVKGRFTISRDNAKNTVYLQMNSLKPEDTAVYYCAVYDWRDDVGPVAYDYWGQGTQVTVSS

SEQ ID NO: 14405 - protein, 122 aa, Artificial Sequence
  Chemically Synthesized
QVQLQESGGGLVQAGGSLRLSCAASGSIFQDDVMGWYRQAPGKERELVATIAQGTITYYADSVKGRFTISRDNAKNTVYLQMNSLKPEDTAVYYCAAQAPVDSYPIDGHYYWGQGTQVTVSS

SEQ ID NO: 14406 - protein, 118 aa, Artificial Sequence
  Chemically Synthesized
QVQLQESGGGLVQAGGSLRLSCAASGTISPPGFMGWYRQAPGKEREFVASIAGGSSTYYADSVKGRFTISRDNAKNTVYLQMNSLKPEDTAVYYCAVYWYLDSYYYYWGQGTQVTVSS

SEQ ID NO: 14407 - protein, 118 aa, Artificial Sequence
  Chemically Synthesized
QVQLQESGGGLVQAGGSLRLSCAASGNIFYSPWMGWYRQAPGKERELVASIASGTNTYYADSVKGRFTISRDNAKNTVYLQMNSLKPEDTAVYYCAALPDYIKDHDYWGQGTQVTVSS

SEQ ID NO: 14408 - protein, 122 aa, Artificial Sequence
  Chemically Synthesized
QVQLQESGGGLVQAGGSLRLSCAASGNISSYADMGWYRQAPGKERELVAGIDDGGTTNYADSVKGRFTISRDNAKNTVYLQMNSLKPEDTAVYYCAASTDSYLVYDSVFTYWGQGTQVTVSS

SEQ ID NO: 14409 - protein, 122 aa, Artificial Sequence
  Chemically Synthesized
QVQLQESGGGLVQAGGSLRLSCAASGTIFVGSKMGWYRQAPGKERELVASIDPGSITNYADSVKGRFTISRDNAKNTVYLQMNSLKPEDTAVYYCAAEYPDNVIPPYFFQYWGQGTQVTVSS

SEQ ID NO: 14410 - protein, 113 aa, Artificial Sequence
  Chemically Synthesized
QVQLQESGGGLVQAGGSLRLSCAASGNIFATPFMGWYRQAPGKEREFVAGIGVGASTYYADSVKGRFTISRDNAKNTVYLQMNSLKPEDTAVYYCAVTVLFYWGQGTQVTVSS

SEQ ID NO: 14411 - protein, 118 aa, Artificial Sequence
  Chemically Synthesized
QVQLQESGGGLVQAGGSLRLSCAASGYISSPRYMGWYRQAPGKEREFVATITLGASTYYADSVKGRFTISRDNAKNTVYLQMNSLKPEDTAVYYCAVGIAAGHAFAYWGQGTQVTVSS

SEQ ID NO: 14412 - protein, 118 aa, Artificial Sequence
  Chemically Synthesized
QVQLQESGGGLVQAGGSLRLSCAASGYISAYTDMGWYRQAPGKERELVAGISGGSITNYADSVKGRFTISRDNAKNTVYLQMNSLKPEDTAVYYCAATALRPGYFDYWGQGTQVTVSS

SEQ ID NO: 14413 - protein, 122 aa, Artificial Sequence
  Chemically Synthesized
QVQLQESGGGLVQAGGSLRLSCAASGTISSGLYMGWYRQAPGKERELVASINAGSTTYYADSVKGRFTISRDNAKNTVYLQMNSLKPEDTAVYYCAVAPRTYNGGVGFFIYWGQGTQVTVSS

SEQ ID NO: 14414 - protein, 122 aa, Artificial Sequence
  Chemically Synthesized
QVQLQESGGGLVQAGGSLRLSCAASGYISTYPIMGWYRQAPGKERELVAGITHGTTTYYADSVKGRFTISRDNAKNTVYLQMNSLKPEDTAVYYCAANVPSPRKLRYSFAYWGQGTQVTVSS

SEQ ID NO: 14415 - protein, 118 aa, Artificial Sequence
  Chemically Synthesized
QVQLQESGGGLVQAGGSLRLSCAASGSISRGTGMGWYRQAPGKERELVATIAPGGNTNYADSVKGRFTISRDNAKNTVYLQMNSLKPEDTAVYYCAAGDYYTGYHGYWGQGTQVTVSS

SEQ ID NO: 14416 - protein, 118 aa, Artificial Sequence
  Chemically Synthesized
QVQLQESGGGLVQAGGSLRLSCAASGNISDWYYMGWYRQAPGKERELVASINSGSNTNYADSVKGRFTISRDNAKNTVYLQMNSLKPEDTAVYYCAAVDGWPYYLAYWGQGTQVTVSS

SEQ ID NO: 14417 - protein, 117 aa, Artificial Sequence
  Chemically Synthesized
QVQLQESGGGLVQAGGSLRLSCAASGNISFVDLMGWYRQAPGKERELVAAISYGAITNYADSVKGRFTISRDNAKNTVYLQMNSLKPEDTAVYYCAVPYGVYWYAYWGQGTQVTVSS

SEQ ID NO: 14418 - protein, 117 aa, Artificial Sequence
  Chemically Synthesized
QVQLQESGGGLVQAGGSLRLSCAASGYIFGRVFMGWYRQAPGKEREFVASISYGGNTNYADSVKGRFTISRDNAKNTVYLQMNSLKPEDTAVYYCAAARRTVTFPYWGQGTQVTVSS

SEQ ID NO: 14419 - protein, 122 aa, Artificial Sequence
  Chemically Synthesized
QVQLQESGGGLVQAGGSLRLSCAASGYISYGDDMGWYRQAPGKERELVATINQGGSTYYADSVKGRFTISRDNAKNTVYLQMNSLKPEDTAVYYCAAWTVTPRNGWIAFLYWGQGTQVTVSS

SEQ ID NO: 14420 - protein, 117 aa, Artificial Sequence
  Chemically Synthesized
QVQLQESGGGLVQAGGSLRLSCAASGSIFASEMGWYRQAPGKEREFVASIDAGGSTYYADSVKGRFTISRDNAKNTVYLQMNSLKPEDTAVYYCAAHRDVDYTYGYWGQGTQVTVSS

SEQ ID NO: 14421 - protein, 126 aa, Artificial Sequence
  Chemically Synthesized
QVQLQESGGGLVQAGGSLRLSCAASGTIFWAYKMGWYRQAPGKERELVASISFGSNTNYADSVKGRFTISRDNAKNTVYLQMNSLKPEDTAVYYCAAQRDRYDYLLYVAQWGYDYWGQGTQVTVSS

SEQ ID NO: 14422 - protein, 127 aa, Artificial Sequence
  Chemically Synthesized
QVQLQESGGGLVQAGGSLRLSCAASGSISWDSNMGWYRQAPGKERELVATIADGAITNYADSVKGRFTISRDNAKNTVYLQMNSLKPEDTAVYYCAVRLLTDLRVWYPWIVDYLQYWGQGTQVTVSS

SEQ ID NO: 14423 - protein, 122 aa, Artificial Sequence
  Chemically Synthesized
QVQLQESGGGLVQAGGSLRLSCAASGYISPLYIMGWYRQAPGKERELVATITRGGITNYADSVKGRFTISRDNAKNTVYLQMNSLKPEDTAVYYCAVDSDYATTRTVSLRYWGQGTQVTVSS

SEQ ID NO: 14424 - protein, 126 aa, Artificial Sequence
  Chemically Synthesized
QVQLQESGGGLVQAGGSLRLSCAASGNIFYPNYMGWYRQAPGKEREFVAAITRGATTYYADSVKGRFTISRDNAKNTVYLQMNSLKPEDTAVYYCAVYWLHYLAFDVYDYDVYHYWGQGTQVTVSS

SEQ ID NO: 14425 - protein, 121 aa, Artificial Sequence
  Chemically Synthesized
QVQLQESGGGLVQAGGSLRLSCAASGNIFNGDAMGWYRQAPGKERELVAAIGWGTNTNYADSVKGRFTISRDNAKNTVYLQMNSLKPEDTAVYYCAVLAYRRVTSVTHPYWGQGTQVTVSS

SEQ ID NO: 14426 - protein, 118 aa, Artificial Sequence
  Chemically Synthesized
QVQLQESGGGLVQAGGSLRLSCAASGTIFPWAPMGWYRQAPGKEREFVAAISDGWYYQYADSVKGRFTISRDNAKNTVYLQMNSLKPEDTAVYYCAARWDRYLNHQYWGQGTQVTVSS

SEQ ID NO: 14427 - protein, 118 aa, Artificial Sequence
  Chemically Synthesized
QVQLQESGGGLVQAGGSLRLSCAASGNIFGRRYMGWYRQAPGKEREFVAAINSGTTTYYADSVKGRFTISRDNAKNTVYLQMNSLKPEDTAVYYCAAGTYWIKFHSYWGQGTQVTVSS

SEQ ID NO: 14428 - protein, 118 aa, Artificial Sequence
  Chemically Synthesized
QVQLQESGGGLVQAGGSLRLSCAASGYISLTWSMGWYRQAPGKEREFVAGIAVGATTYYADSVKGRFTISRDNAKNTVYLQMNSLKPEDTAVYYCAVWDDYYRDYAYWGQGTQVTVSS

SEQ ID NO: 14429 - protein, 118 aa, Artificial Sequence
  Chemically Synthesized
QVQLQESGGGLVQAGGSLRLSCAASGNISYGDGMGWYRQAPGKEREFVATINDGGNTYYADSVKGRFTISRDNAKNTVYLQMNSLKPEDTAVYYCAAISYDIDFYAYWGQGTQVTVSS

SEQ ID NO: 14430 - protein, 117 aa, Artificial Sequence
  Chemically Synthesized
QVQLQESGGGLVQAGGSLRLSCAASGIFLTVTMGWYRQAPGKEREFVASIASGSSTYYADSVKGRFTISRDNAKNTVYLQMNSLKPEDTAVYYCAVVYLTSYDHSYWGQGTQVTVSS

SEQ ID NO: 14431 - protein, 122 aa, Artificial Sequence
  Chemically Synthesized
QVQLQESGGGLVQAGGSLRLSCAASGYISTPIPMGWYRQAPGKEREFVAGISYGSITNYADSVKGRFTISRDNAKNTVYLQMNSLKPEDTAVYYCAARYWSLEPNQYYHDYWGQGTQVTVSS

SEQ ID NO: 14432 - protein, 111 aa, Artificial Sequence
  Chemically Synthesized
QVQLQESGGGLVQAGGSLRLSCAASGYISYLTRMGWYRQAPGKERELVAAIDSVVYADSVKGRFTISRDNAKNTVYLQMNSLKPEDTAVYYCAAHAYYNYWGQGTQVTVSS

SEQ ID NO: 14433 - protein, 126 aa, Artificial Sequence
  Chemically Synthesized
QVQLQESGGGLVQAGGSLRLSCAASGNISYYSAMGWYRQAPGKEREFVAAIADGANTYYADSVKGRFTISRDNAKNTVYLQMNSLKPEDTAVYYCAVPYLVGHLKYRYGERYFGYWGQGTQVTVSS

SEQ ID NO: 14434 - protein, 122 aa, Artificial Sequence
  Chemically Synthesized
QVQLQESGGGLVQAGGSLRLSCAASGTIFSDSAMGWYRQAPGKERELVATIDAGGSTYYADSVKGRFTISRDNAKNTVYLQMNSLKPEDTAVYYCAVQNYPLFYYVYIHQYWGQGTQVTVSS

SEQ ID NO: 14435 - protein, 114 aa, Artificial Sequence
  Chemically Synthesized
QVQLQESGGGLVQAGGSLRLSCAASGNIFNDPYMGWYRQAPGKERELVAGIAPGSNTNYADSVKGRFTISRDNAKNTVYLQMNSLKPEDTAVYYCAARDYFYYWGQGTQVTVSS

SEQ ID NO: 14436 - protein, 122 aa, Artificial Sequence
  Chemically Synthesized
QVQLQESGGGLVQAGGSLRLSCAASGSISDIYPMGWYRQAPGKERELVAAIATGGITNYADSVKGRFTISRDNAKNTVYLQMNSLKPEDTAVYYCAAYDYYIVDAGQFHVYWGQGTQVTVSS

SEQ ID NO: 14437 - protein, 125 aa, Artificial Sequence
  Chemically Synthesized
QVQLQESGGGLVQAGGSLRLSCAASGNISPSRAMGWYRQAPGKEREFVATINIGGNTYYADSVKGRFTISRDNAKNTVYLQMNSLKPEDTAVYYCAAYPQSSNSYLYYYDLAHYWGQGTQVTVSS

SEQ ID NO: 14438 - protein, 118 aa, Artificial Sequence
  Chemically Synthesized
QVQLQESGGGLVQAGGSLRLSCAASGYISVPNNMGWYRQAPGKERELVAGISNGAITYYADSVKGRFTISRDNAKNTVYLQMNSLKPEDTAVYYCAAGWYGAYDYDYWGQGTQVTVSS

SEQ ID NO: 14439 - protein, 118 aa, Artificial Sequence
  Chemically Synthesized
QVQLQESGGGLVQAGGSLRLSCAASGTISDDLWMGWYRQAPGKEREFVAAISTGGSTYYADSVKGRFTISRDNAKNTVYLQMNSLKPEDTAVYYCAVASDYNYSHDYWGQGTQVTVSS

SEQ ID NO: 14440 - protein, 118 aa, Artificial Sequence
  Chemically Synthesized
QVQLQESGGGLVQAGGSLRLSCAASGSISQDGAMGWYRQAPGKEREFVAAITFGGTTYYADSVKGRFTISRDNAKNTVYLQMNSLKPEDTAVYYCAATDLDDEWHDYWGQGTQVTVSS

SEQ ID NO: 14441 - protein, 118 aa, Artificial Sequence
  Chemically Synthesized
QVQLQESGGGLVQAGGSLRLSCAASGTISLSLDMGWYRQAPGKEREFVAAIAAGGNTYYADSVKGRFTISRDNAKNTVYLQMNSLKPEDTAVYYCAAAHRYRYDLDYWGQGTQVTVSS

SEQ ID NO: 14442 - protein, 117 aa, Artificial Sequence
  Chemically Synthesized
QVQLQESGGGLVQAGGSLRLSCAASGYISYYYAMGWYRQAPGKEREFVAAITQGTSTYADSVKGRFTISRDNAKNTVYLQMNSLKPEDTAVYYCAARSEPYDDLPYWGQGTQVTVSS

SEQ ID NO: 14443 - protein, 122 aa, Artificial Sequence
  Chemically Synthesized
QVQLQESGGGLVQAGGSLRLSCAASGNISVTADMGWYRQAPGKEREFVASIAVGGNTYYADSVKGRFTISRDNAKNTVYLQMNSLKPEDTAVYYCAVRDGGGASRAYFYVYWGQGTQVTVSS

SEQ ID NO: 14444 - protein, 118 aa, Artificial Sequence
  Chemically Synthesized
QVQLQESGGGLVQAGGSLRLSCAASGYISSRADMGWYRQAPGKEREFVAAIADGTSTYYADSVKGRFTISRDNAKNTVYLQMNSLKPEDTAVYYCAAYVPSRYPYDYWGQGTQVTVSS

SEQ ID NO: 14445 - protein, 122 aa, Artificial Sequence
  Chemically Synthesized
QVQLQESGGGLVQAGGSLRLSCAASGNISHQADMGWYRQAPGKEREFVAAIADGTITYYADSVKGRFTISRDNAKNTVYLQMNSLKPEDTAVYYCAATVAISYDRDLYYDYWGQGTQVTVSS

SEQ ID NO: 14446 - protein, 114 aa, Artificial Sequence
  Chemically Synthesized
QVQLQESGGGLVQAGGSLRLSCAASGTIFYQHVMGWYRQAPGKEREFVAGISLGGITYYADSVKGRFTISRDNAKNTVYLQMNSLKPEDTAVYYCAALSTTFYWGQGTQVTVSS

SEQ ID NO: 14447 - protein, 118 aa, Artificial Sequence
  Chemically Synthesized
QVQLQESGGGLVQAGGSLRLSCAASGSISLSYDMGWYRQAPGKEREFVAAIANGAITYYADSVKGRFTISRDNAKNTVYLQMNSLKPEDTAVYYCAATYDSSTAHDYWGQGTQVTVSS

SEQ ID NO: 14448 - protein, 109 aa, Artificial Sequence
  Chemically Synthesized
QVQLQESGGGLVQAGGSLRLSCAASGYISGTRYMGWYRQAPGKERELVASISPGASTYYADSVKGRFTISRDNAKNTVYLQMNSLKPEDTAVYYCAIYWGQGTQVTVSS

SEQ ID NO: 14449 - protein, 126 aa, Artificial Sequence
  Chemically Synthesized
QVQLQESGGGLVQAGGSLRLSCAASGYIFYGYYMGWYRQAPGKEREFVASINEGGNTNYADSVKGRFTISRDNAKNTVYLQMNSLKPEDTAVYYCAVYAISGVSRGYDPLINYYYWGQGTQVTVSS

SEQ ID NO: 14450 - protein, 121 aa, Artificial Sequence
  Chemically Synthesized
QVQLQESGGGLVQAGGSLRLSCAASGNISGLYSMGWYRQAPGKEREFVATIDGGGITYYADSVKGRFTISRDNAKNTVYLQMNSLKPEDTAVYYCAADSYSYGDGEDLLYWGQGTQVTVSS

SEQ ID NO: 14451 - protein, 122 aa, Artificial Sequence
  Chemically Synthesized
QVQLQESGGGLVQAGGSLRLSCAASGNIFRQGIMGWYRQAPGKEREFVAAINYGGTTNYADSVKGRFTISRDNAKNTVYLQMNSLKPEDTAVYYCAVIYLAYQILRTAYYYWGQGTQVTVSS

SEQ ID NO: 14452 - protein, 119 aa, Artificial Sequence
  Chemically Synthesized
QVQLQESGGGLVQAGGSLRLSCAASGSISRPDPMGWYRQAPGKERELVATITQGANTNYADSVKGRFTISRDNAKNTVYLQMNSLKPEDTAVYYCAVRTTGTYDPFYYWGQGTQVTVSS

SEQ ID NO: 14453 - protein, 122 aa, Artificial Sequence
  Chemically Synthesized
QVQLQESGGGLVQAGGSLRLSCAASGNIFSGPAMGWYRQAPGKERELVAAITSGSTTYYADSVKGRFTISRDNAKNTVYLQMNSLKPEDTAVYYCAAHLYGGSTYSEGLFYWGQGTQVTVSS

SEQ ID NO: 14454 - protein, 118 aa, Artificial Sequence
  Chemically Synthesized
QVQLQESGGGLVQAGGSLRLSCAASGTIFSVLGMGWYRQAPGKEREFVAAIDDGTITNYADSVKGRFTISRDNAKNTVYLQMNSLKPEDTAVYYCAAADPRWQRLKYWGQGTQVTVSS

SEQ ID NO: 14455 - protein, 118 aa, Artificial Sequence
  Chemically Synthesized
QVQLQESGGGLVQAGGSLRLSCAASGYIFRPNLMGWYRQAPGKERELVAGIDTGSSTYYADSVKGRFTISRDNAKNTVYLQMNSLKPEDTAVYYCAAGYAGWHDYIYWGQGTQVTVSS

SEQ ID NO: 14456 - protein, 119 aa, Artificial Sequence
  Chemically Synthesized
QVQLQESGGGLVQAGGSLRLSCAASGYISGYYPMGWYRQAPGKEREFVATISYGAITYYADSVKGRFTISRDNAKNTVYLQMNSLKPEDTAVYYCAVTERYTTVILYYWGQGTQVTVSS

SEQ ID NO: 14457 - protein, 126 aa, Artificial Sequence
  Chemically Synthesized
QVQLQESGGGLVQAGGSLRLSCAASGYIFVWYFMGWYRQAPGKEREFVAAITTGGNTNYADSVKGRFTISRDNAKNTVYLQMNSLKPEDTAVYYCAVYAYRYLTWWSTYYSGHAYWGQGTQVTVSS

SEQ ID NO: 14458 - protein, 121 aa, Artificial Sequence
  Chemically Synthesized
QVQLQESGGGLVQAGGSLRLSCAASGYIFRYTPMGWYRQAPGKEREFVASISGGTSTNYADSVKGRFTISRDNAKNTVYLQMNSLKPEDTAVYYCAAQSLSTTTTVTCLYWGQGTQVTVSS

SEQ ID NO: 14459 - protein, 120 aa, Artificial Sequence
  Chemically Synthesized
QVQLQESGGGLVQAGGSLRLSCAASGSIFQRVVMGWYRQAPGKERELVASISYGGNTNYADSVKGRFTISRDNAKNTVYLQMNSLKPEDTAVYYCAADVYYGHRGALSYWGQGTQVTVSS

SEQ ID NO: 14460 - protein, 122 aa, Artificial Sequence
  Chemically Synthesized
QVQLQESGGGLVQAGGSLRLSCAASGTIFWLSAMGWYRQAPGKERELVAGIGYGGTTNYADSVKGRFTISRDNAKNTVYLQMNSLKPEDTAVYYCAARPSLPYTARYWHYYWGQGTQVTVSS

SEQ ID NO: 14461 - protein, 110 aa, Artificial Sequence
  Chemically Synthesized
QVQLQESGGGLVQAGGSLRLSCAASGYISHYPYMGWYRQAPGKERELVATIAYGGNNLYADSVKGRFTISRDNAKNTVYLQMNSLKPEDTAVYYCAVFYWGQGTQVTVSS

SEQ ID NO: 14462 - protein, 122 aa, Artificial Sequence
  Chemically Synthesized
QVQLQESGGGLVQAGGSLRLSCAASGSISYRYTMGWYRQAPGKEREFVATITDGANTNYADSVKGRFTISRDNAKNTVYLQMNSLKPEDTAVYYCAVYDEGSLLRTFDLAYWGQGTQVTVSS

SEQ ID NO: 14463 - protein, 122 aa, Artificial Sequence
  Chemically Synthesized
QVQLQESGGGLVQAGGSLRLSCAASGYISSVLTMGWYRQAPGKEREFVAGISTGGITNYADSVKGRFTISRDNAKNTVYLQMNSLKPEDTAVYYCAVEVYVQEALVNNHWYWGQGTQVTVSS

SEQ ID NO: 14464 - protein, 121 aa, Artificial Sequence
  Chemically Synthesized
QVQLQESGGGLVQAGGSLRLSCAASGNISGYVYMGWYRQAPGKEREFVASITPGTTTNYADSVKGRFTISRDNAKNTVYLQMNSLKPEDTAVYYCAVNYFYFSTRLTTLYWGQGTQVTVSS

SEQ ID NO: 14465 - protein, 119 aa, Artificial Sequence
  Chemically Synthesized
QVQLQESGGGLVQAGGSLRLSCAASGNISYYDYMGWYRQAPGKERELVAAIAGGGITNYADSVKGRFTISRDNAKNTVYLQMNSLKPEDTAVYYCAAISYWDDYDFYYWGQGTQVTVSS

SEQ ID NO: 14466 - protein, 117 aa, Artificial Sequence
  Chemically Synthesized
QVQLQESGGGLVQAGGSLRLSCAASGTIFNYPYMGWYRQAPGKERELVATIAAGGITNYADSVKGRFTISRDNAKNTVYLQMNSLKPEDTAVYYCAADYPYVYHLYWGQGTQVTVSS

SEQ ID NO: 14467 - protein, 122 aa, Artificial Sequence
  Chemically Synthesized
QVQLQESGGGLVQAGGSLRLSCAASGSISYNYTMGWYRQAPGKERELVAAITRGGTTYYADSVKGRFTISRDNAKNTVYLQMNSLKPEDTAVYYCAVRASVLDYREVSYSYWGQGTQVTVSS

SEQ ID NO: 14468 - protein, 118 aa, Artificial Sequence
  Chemically Synthesized
QVQLQESGGGLVQAGGSLRLSCAASGTISSNYDMGWYRQAPGKERELVAAISTGGITYYADSVKGRFTISRDNAKNTVYLQMNSLKPEDTAVYYCAAWANDFERYGYWGQGTQVTVSS

SEQ ID NO: 14469 - protein, 110 aa, Artificial Sequence
  Chemically Synthesized
QVQLQESGGGLVQAGGSLRLSCAASGNISAYGQMGWYRQAPGKEREFVATIDWGASTNYADSVKGRFTISRDNAKNTVYLQMNSLKPEDTAVYYCAVNYWGQGTQVTVSS

SEQ ID NO: 14470 - protein, 117 aa, Artificial Sequence
  Chemically Synthesized
QVQLQESGGGLVQAGGSLRLSCAASGYIFAVTAMGWYRQAPGKEREFVATIAPGSSTNYADSVKGRFTISRDNAKNTVYLQMNSLKPEDTAVYYCAAPAYGGISHYWGQGTQVTVSS

SEQ ID NO: 14471 - protein, 122 aa, Artificial Sequence
  Chemically Synthesized
QVQLQESGGGLVQAGGSLRLSCAASGSIFRINAMGWYRQAPGKERELVAAIGDGASTNYADSVKGRFTISRDNAKNTVYLQMNSLKPEDTAVYYCAAAIGSSLLYWWYFVYWGQGTQVTVSS

SEQ ID NO: 14472 - protein, 122 aa, Artificial Sequence
  Chemically Synthesized
QVQLQESGGGLVQAGGSLRLSCAASGYIFRIEYMGWYRQAPGKERELVAGIGDGTNTYYADSVKGRFTISRDNAKNTVYLQMNSLKPEDTAVYYCAAYYPSVWYPWYWFSYWGQGTQVTVSS

SEQ ID NO: 14473 - protein, 118 aa, Artificial Sequence
  Chemically Synthesized
QVQLQESGGGLVQAGGSLRLSCAASGNIFRPYFMGWYRQAPGKERELVASISIGSSTYYADSVKGRFTISRDNAKNTVYLQMNSLKPEDTAVYYCAVRYYWYYRHDYWGQGTQVTVSS

SEQ ID NO: 14474 - protein, 118 aa, Artificial Sequence
  Chemically Synthesized
QVQLQESGGGLVQAGGSLRLSCAASGYIFDPDGMGWYRQAPGKERELVATITIGGTTYYADSVKGRFTISRDNAKNTVYLQMNSLKPEDTAVYYCAAARYIFYIFAYWGQGTQVTVSS

SEQ ID NO: 14475 - protein, 118 aa, Artificial Sequence
  Chemically Synthesized
QVQLQESGGGLVQAGGSLRLSCAASGSISVSDYMGWYRQAPGKEREFVASITGGANTYYADSVKGRFTISRDNAKNTVYLQMNSLKPEDTAVYYCAVLQFSGDSHAYWGQGTQVTVSS

SEQ ID NO: 14476 - protein, 122 aa, Artificial Sequence
  Chemically Synthesized
QVQLQESGGGLVQAGGSLRLSCAASGNIFANYQMGWYRQAPGKERELVASISSGGTTNYADSVKGRFTISRDNAKNTVYLQMNSLKPEDTAVYYCAVHGPRSDYPDYYYAYWGQGTQVTVSS

SEQ ID NO: 14477 - protein, 118 aa, Artificial Sequence
  Chemically Synthesized
QVQLQESGGGLVQAGGSLRLSCAASGTISTIGRMGWYRQAPGKERELVATINAGGSTYYADSVKGRFTISRDNAKNTVYLQMNSLKPEDTAVYYCAVSYNSHKKFAYWGQGTQVTVSS

SEQ ID NO: 14478 - protein, 115 aa, Artificial Sequence
  Chemically Synthesized
QVQLQESGGGLVQAGGSLRLSCAASGNIFAVLIMGWYRQAPGKEREFVAAIAYGANTYYADSVKGRFTISRDNAKNTVYLQMNSLKPEDTAVYYCAALTGYFFYWGQGTQVTVSS

SEQ ID NO: 14479 - protein, 116 aa, Artificial Sequence
  Chemically Synthesized
QVQLQESGGGLVQAGGSLRLSCAASGNIFNNYFMGWYRQAPGKEREFVASINQGGTTNYADSVKGRFTISRDNAKNTVYLQMNSLKPEDTAVYYCAADDAWYLIYWGQGTQVTVSS

SEQ ID NO: 14480 - protein, 118 aa, Artificial Sequence
  Chemically Synthesized
QVQLQESGGGLVQAGGSLRLSCAASGSISRIQSMGWYRQAPGKERELVASIDSGSITYYADSVKGRFTISRDNAKNTVYLQMNSLKPEDTAVYYCAAVSGYAALYQYWGQGTQVTVSS

SEQ ID NO: 14481 - protein, 118 aa, Artificial Sequence
  Chemically Synthesized
QVQLQESGGGLVQAGGSLRLSCAASGYIFGWDYMGWYRQAPGKEREFVASITAGGTTYYADSVKGRFTISRDNAKNTVYLQMNSLKPEDTAVYYCAVTGYVGGGHFYWGQGTQVTVSS

SEQ ID NO: 14482 - protein, 118 aa, Artificial Sequence
  Chemically Synthesized
QVQLQESGGGLVQAGGSLRLSCAASGTISSHYDMGWYRQAPGKERELVAGIGYGASTNYADSVKGRFTISRDNAKNTVYLQMNSLKPEDTAVYYCAVWFAWPDQYPYWGQGTQVTVSS

SEQ ID NO: 14483 - protein, 121 aa, Artificial Sequence
  Chemically Synthesized
QVQLQESGGGLVQAGGSLRLSCAASGNISYYDYMGWYRQAPGKERELVAAITLGGTTYYADSVKGRFTISRDNAKNTVYLQMNSLKPEDTAVYYCAATPRGTYDDNYHYYWGQGTQVTVSS

SEQ ID NO: 14484 - protein, 121 aa, Artificial Sequence
  Chemically Synthesized
QVQLQESGGGLVQAGGSLRLSCAASGSISYYYMGWYRQAPGKERELVAAINDGATTYYADSVKGRFTISRDNAKNTVYLQMNSLKPEDTAVYYCAVAEYSQPYTPPIHGYWGQGTQVTVSS

SEQ ID NO: 14485 - protein, 117 aa, Artificial Sequence
  Chemically Synthesized
QVQLQESGGGLVQAGGSLRLSCAASGYISYSVMGWYRQAPGKEREFVAAINSGASTYYADSVKGRFTISRDNAKNTVYLQMNSLKPEDTAVYYCAVYGDYGPTYRYWGQGTQVTVSS

SEQ ID NO: 14486 - protein, 117 aa, Artificial Sequence
  Chemically Synthesized
QVQLQESGGGLVQAGGSLRLSCAASGTISDSLRMGWYRQAPGKEREFVAAIAVGGIPYADSVKGRFTISRDNAKNTVYLQMNSLKPEDTAVYYCAAARPYYISHYYWGQGTQVTVSS

SEQ ID NO: 14487 - protein, 122 aa, Artificial Sequence
  Chemically Synthesized
QVQLQESGGGLVQAGGSLRLSCAASGNISYHDDMGWYRQAPGKEREFVATIGTGASTNYADSVKGRFTISRDNAKNTVYLQMNSLKPEDTAVYYCAATTQARDQFYTVHHYWGQGTQVTVSS

SEQ ID NO: 14488 - protein, 118 aa, Artificial Sequence
  Chemically Synthesized
QVQLQESGGGLVQAGGSLRLSCAASGTISSYAYMGWYRQAPGKERELVAGISRGGTTYYADSVKGRFTISRDNAKNTVYLQMNSLKPEDTAVYYCAVYAYGFDSHAYWGQGTQVTVSS

SEQ ID NO: 14489 - protein, 118 aa, Artificial Sequence
  Chemically Synthesized
QVQLQESGGGLVQAGGSLRLSCAASGTISSYILMGWYRQAPGKEREFVATIAEGTTTYYADSVKGRFTISRDNAKNTVYLQMNSLKPEDTAVYYCAVEYDQSHRYGYWGQGTQVTVSS

SEQ ID NO: 14490 - protein, 122 aa, Artificial Sequence
  Chemically Synthesized
QVQLQESGGGLVQAGGSLRLSCAASGNISLDGGMGWYRQAPGKERELVAAIGQGGNTNYADSVKGRFTISRDNAKNTVYLQMNSLKPEDTAVYYCAVDPDDYGYGQDRYDYWGQGTQVTVSS

SEQ ID NO: 14491 - protein, 123 aa, Artificial Sequence
  Chemically Synthesized
QVQLQESGGGLVQAGGSLRLSCAASGTIFPYIDMGWYRQAPGKEREFVAAIGQGANTNYADSVKGRFTISRDNAKNTVYLQMNSLKPEDTAVYYCAVEGYGNRYTWQDLFDYWGQGTQVTVSS

SEQ ID NO: 14492 - protein, 119 aa, Artificial Sequence
  Chemically Synthesized
QVQLQESGGGLVQAGGSLRLSCAASGTISYLPSMGWYRQAPGKERELVATIDTGATTNYADSVKGRFTISRDNAKNTVYLQMNSLKPEDTAVYYCAVQAPLIPGGHAYWGQGTQVTVSS

SEQ ID NO: 14493 - protein, 121 aa, Artificial Sequence
  Chemically Synthesized
QVQLQESGGGLVQAGGSLRLSCAASGSIFTRTDMGWYRQAPGKERELVATIGAGSTTNYADSVKGRFTISRDNAKNTVYLQMNSLKPEDTAVYYCAVGWTNSLLVGTCMYWGQGTQVTVSS

SEQ ID NO: 14494 - protein, 111 aa, Artificial Sequence
  Chemically Synthesized
QVQLQESGGGLVQAGGSLRLSCAASGTIFPYYVMGWYRQAPGKEREFVASITHGGSTNYADSVKGRFTISRDNAKNTVYLQMNSLKPEDTAVYYCAAYQYWGQGTQVTVSS

SEQ ID NO: 14495 - protein, 118 aa, Artificial Sequence
  Chemically Synthesized
QVQLQESGGGLVQAGGSLRLSCAASGNISNPYYMGWYRQAPGKERELVAGIGPGGSTNYADSVKGRFTISRDNAKNTVYLQMNSLKPEDTAVYYCAVDYRGYTSLDYWGQGTQVTVSS

SEQ ID NO: 14496 - protein, 125 aa, Artificial Sequence
  Chemically Synthesized
QVQLQESGGGLVQAGGSLRLSCAASGNISAYVHMGWYRQAPGKEREFVAAIYGSNTYYADSVKGRFTISRDNAKNTVYLQMNSLKPEDTAVYYCAAPAPTPGGDVQGQPDDYYYWGQGTQVTVSS

SEQ ID NO: 14497 - protein, 107 aa, Artificial Sequence
  Chemically Synthesized
QVQLQESGGGLVQAGGSLRLSCAASGTISWYIYMGWYRQAPGKEREFVATYADSVKGRFTISRDNAKNTVYLQMNSLKPEDTAVYYCAVTDDGVYYWGQGTQVTVSS

SEQ ID NO: 14498 - protein, 121 aa, Artificial Sequence
  Chemically Synthesized
QVQLQESGGGLVQAGGSLRLSCAASGNISYVARMGWYRQAPGKERELVAAIGIGANTYYADSVKGRFTISRDNAKNTVYLQMNSLKPEDTAVYYCAVDFPYDSDVGALSYWGQGTQVTVSS

SEQ ID NO: 14499 - protein, 118 aa, Artificial Sequence
  Chemically Synthesized
QVQLQESGGGLVQAGGSLRLSCAASGYIFGYSAMGWYRQAPGKEREFVATITGGTNTNYADSVKGRFTISRDNAKNTVYLQMNSLKPEDTAVYYCAVPLTDRGYYRYWGQGTQVTVSS

SEQ ID NO: 14500 - protein, 121 aa, Artificial Sequence
  Chemically Synthesized
QVQLQESGGGLVQAGGSLRLSCAASGTISPSPMGWYRQAPGKERELVASIGYGGTTYYADSVKGRFTISRDNAKNTVYLQMNSLKPEDTAVYYCAVGGGHRYQGPSYFGYWGQGTQVTVSS

SEQ ID NO: 14501 - protein, 121 aa, Artificial Sequence
  Chemically Synthesized
QVQLQESGGGLVQAGGSLRLSCAASGTISPSRMGWYRQAPGKEREFVASISYGSTTNYADSVKGRFTISRDNAKNTVYLQMNSLKPEDTAVYYCAADTYYVSAYLVTYGYWGQGTQVTVSS

SEQ ID NO: 14502 - protein, 122 aa, Artificial Sequence
  Chemically Synthesized
QVQLQESGGGLVQAGGSLRLSCAASGTIFTYIDMGWYRQAPGKEREFVAGITIGAITYYADSVKGRFTISRDNAKNTVYLQMNSLKPEDTAVYYCAADRDRGYSPYYEHAYWGQGTQVTVSS

SEQ ID NO: 14503 - protein, 126 aa, Artificial Sequence
  Chemically Synthesized
QVQLQESGGGLVQAGGSLRLSCAASGTISRVPSMGWYRQAPGKEREFVATISSGTSTNYADSVKGRFTISRDNAKNTVYLQMNSLKPEDTAVYYCAVAVGDNQFPPQDPRTSYRYWGQGTQVTVSS

SEQ ID NO: 14504 - protein, 118 aa, Artificial Sequence
  Chemically Synthesized
QVQLQESGGGLVQAGGSLRLSCAASGNISYQDLMGWYRQAPGKERELVASIGSGASTNYADSVKGRFTISRDNAKNTVYLQMNSLKPEDTAVYYCAVDSVADRGFRYWGQGTQVTVSS

SEQ ID NO: 14505 - protein, 122 aa, Artificial Sequence
  Chemically Synthesized
QVQLQESGGGLVQAGGSLRLSCAASGYISSDSYMGWYRQAPGKEREFVASITTGASTNYADSVKGRFTISRDNAKNTVYLQMNSLKPEDTAVYYCAAIYWYTTVDVYGLYYWGQGTQVTVSS

SEQ ID NO: 14506 - protein, 120 aa, Artificial Sequence
  Chemically Synthesized
QVQLQESGGGLVQAGGSLRLSCAASGYIFYYGHMGWYRQAPGKERELVAAISGGGNTYYADSVKGRFTISRDNAKNTVYLQMNSLKPEDTAVYYCAVRNPDGDAVLHTYWGQGTQVTVSS

SEQ ID NO: 14507 - protein, 122 aa, Artificial Sequence
  Chemically Synthesized
QVQLQESGGGLVQAGGSLRLSCAASGTISNGGYMGWYRQAPGKERELVAGIDRGSTTYYADSVKGRFTISRDNAKNTVYLQMNSLKPEDTAVYYCAAQDQRDVTDSYIHLYWGQGTQVTVSS

SEQ ID NO: 14508 - protein, 119 aa, Artificial Sequence
  Chemically Synthesized
QVQLQESGGGLVQAGGSLRLSCAASGYISAVVYMGWYRQAPGKERELVAGIDLGTSTNYADSVKGRFTISRDNAKNTVYLQMNSLKPEDTAVYYCAALDGLDRLDYGYWGQGTQVTVSS

SEQ ID NO: 14509 - protein, 118 aa, Artificial Sequence
  Chemically Synthesized
QVQLQESGGGLVQAGGSLRLSCAASGYIFFAYAMGWYRQAPGKERELVATIGIGGITYYADSVKGRFTISRDNAKNTVYLQMNSLKPEDTAVYYCAVYSQIRPYFIYWGQGTQVTVSS

SEQ ID NO: 14510 - protein, 117 aa, Artificial Sequence
  Chemically Synthesized
QVQLQESGGGLVQAGGSLRLSCAASGNIFAAMMGWYRQAPGKEREFVAGISVGTITYYADSVKGRFTISRDNAKNTVYLQMNSLKPEDTAVYYCAAGFDWRDGYGYWGQGTQVTVSS

SEQ ID NO: 14511 - protein, 118 aa, Artificial Sequence
  Chemically Synthesized
QVQLQESGGGLVQAGGSLRLSCAASGTIFWVPAMGWYRQAPGKERELVASINRGATTYYADSVKGRFTISRDNAKNTVYLQMNSLKPEDTAVYYCAASTTYTIVLYYWGQGTQVTVSS

SEQ ID NO: 14512 - protein, 126 aa, Artificial Sequence
  Chemically Synthesized
QVQLQESGGGLVQAGGSLRLSCAASGSISDDYQMGWYRQAPGKEREFVASIAYGGNTYYADSVKGRFTISRDNAKNTVYLQMNSLKPEDTAVYYCAAWRYIYRQARLRQDYRHKYWGQGTQVTVSS

SEQ ID NO: 14513 - protein, 117 aa, Artificial Sequence
  Chemically Synthesized
QVQLQESGGGLVQAGGSLRLSCAASGYISSNYSMGWYRQAPGKEREFVPLLLRVVVPYADSVKGRFTISRDNAKNTVYLQMNSLKPEDTAVYYCAVDVAYYDVHDYWGQGTQVTVSS

SEQ ID NO: 14514 - protein, 116 aa, Artificial Sequence
  Chemically Synthesized
QVQLQESGGGLVQAGGSLRLSCAASGTIFYAPIMGWYRQAPGKEREFVAAIGEGAITYYADSVKGRFTISRDNAKNTVYLQMNSLKPEDTAVYYCAVLLVPGLSYWGQGTQVTVSS

SEQ ID NO: 14515 - protein, 118 aa, Artificial Sequence
  Chemically Synthesized
QVQLQESGGGLVQAGGSLRLSCAASGYIFIYYAMGWYRQAPGKERELVATINTGASTNYADSVKGRFTISRDNAKNTVYLQMNSLKPEDTAVYYCAAATRPYPPYAYWGQGTQVTVSS

SEQ ID NO: 14516 - protein, 126 aa, Artificial Sequence
  Chemically Synthesized
QVQLQESGGGLVQAGGSLRLSCAASGSISYYVYMGWYRQAPGKERELVATITNGASTYYADSVKGRFTISRDNAKNTVYLQMNSLKPEDTAVYYCAALTVYKEVWPTGRDYGYYYWGQGTQVTVSS

SEQ ID NO: 14517 - protein, 117 aa, Artificial Sequence
  Chemically Synthesized
QVQLQESGGGLVQAGGSLRLSCAASGYISRWYDMGWYRQAPGKERELVATIANGGTTYYADSVKGRFTISRDNAKNTVYLQMNSLKPEDTAVYYCAVGTTTNVTFYWGQGTQVTVSS

SEQ ID NO: 14518 - protein, 119 aa, Artificial Sequence
  Chemically Synthesized
QVQLQESGGGLVQAGGSLRLSCAASGNISDHYPMGWYRQAPGKEREFVAAIAPGGTTYYADSVKGRFTISRDNAKNTVYLQMNSLKPEDTAVYYCAVAWYLGYPTLTYWGQGTQVTVSS

SEQ ID NO: 14519 - protein, 118 aa, Artificial Sequence
  Chemically Synthesized
QVQLQESGGGLVQAGGSLRLSCAASGTIFGPYRMGWYRQAPGKEREFVATISYGTNTYYADSVKGRFTISRDNAKNTVYLQMNSLKPEDTAVYYCAARYVNAFLLSYWGQGTQVTVSS

SEQ ID NO: 14520 - protein, 118 aa, Artificial Sequence
  Chemically Synthesized
QVQLQESGGGLVQAGGSLRLSCAASGSIFSPRNMGWYRQAPGKEREFVASIAAGGNTNYADSVKGRFTISRDNAKNTVYLQMNSLKPEDTAVYYCAVQRRRPRQHAYWGQGTQVTVSS

SEQ ID NO: 14521 - protein, 122 aa, Artificial Sequence
  Chemically Synthesized
QVQLQESGGGLVQAGGSLRLSCAASGYISAPLTMGWYRQAPGKEREFVASIANGGITYYADSVKGRFTISRDNAKNTVYLQMNSLKPEDTAVYYCAVNQRRYTGDWDVYRYWGQGTQVTVSS

SEQ ID NO: 14522 - protein, 118 aa, Artificial Sequence
  Chemically Synthesized
QVQLQESGGGLVQAGGSLRLSCAASGTISFYADMGWYRQAPGKERELVAGIAPGAITNYADSVKGRFTISRDNAKNTVYLQMNSLKPEDTAVYYCAAAASSTPKFEYWGQGTQVTVSS

SEQ ID NO: 14523 - protein, 122 aa, Artificial Sequence
  Chemically Synthesized
QVQLQESGGGLVQAGGSLRLSCAASGSISDLVYMGWYRQAPGKERELVASIDAGTTTNYADSVKGRFTISRDNAKNTVYLQMNSLKPEDTAVYYCAVYLDARAHIPYVHQYWGQGTQVTVSS

SEQ ID NO: 14524 - protein, 116 aa, Artificial Sequence
  Chemically Synthesized
QVQLQESGGGLVQAGGSLRLSCAASGNIFYQLMGWYRQAPGKEREFVAAIAYGSTTNYADSVKGRFTISRDNAKNTVYLQMNSLKPEDTAVYYCAANEGDVYVHYWGQGTQVTVSS

SEQ ID NO: 14525 - protein, 121 aa, Artificial Sequence
  Chemically Synthesized
QVQLQESGGGLVQAGGSLRLSCAASGNISYDDPMGWYRQAPGKEREFVAGLILVVLPYADSVKGRFTISRDNAKNTVYLQMNSLKPEDTAVYYCAVLPYYLLYLGWAFEYWGQGTQVTVSS

SEQ ID NO: 14526 - protein, 122 aa, Artificial Sequence
  Chemically Synthesized
QVQLQESGGGLVQAGGSLRLSCAASGTIFDSTAMGWYRQAPGKERELVAAINGGGTTNYADSVKGRFTISRDNAKNTVYLQMNSLKPEDTAVYYCAVDLHLTPSPYPTHAYWGQGTQVTVSS

SEQ ID NO: 14527 - protein, 118 aa, Artificial Sequence
  Chemically Synthesized
QVQLQESGGGLVQAGGSLRLSCAASGNIFYGYWMGWYRQAPGKERELVATINGGATTNYADSVKGRFTISRDNAKNTVYLQMNSLKPEDTAVYYCAAGAIRQWQLVYWGQGTQVTVSS

SEQ ID NO: 14528 - protein, 118 aa, Artificial Sequence
  Chemically Synthesized
QVQLQESGGGLVQAGGSLRLSCAASGNIFLDAYMGWYRQAPGKEREFVAAIGYGSNTYYADSVKGRFTISRDNAKNTVYLQMNSLKPEDTAVYYCAVIRRRDVYHYYWGQGTQVTVSS

SEQ ID NO: 14529 - protein, 118 aa, Artificial Sequence
  Chemically Synthesized
QVQLQESGGGLVQAGGSLRLSCAASGNIFWAYWMGWYRQAPGKERELVASITYGTTTNYADSVKGRFTISRDNAKNTVYLQMNSLKPEDTAVYYCAVRVFWIVSHSYWGQGTQVTVSS

SEQ ID NO: 14530 - protein, 117 aa, Artificial Sequence
  Chemically Synthesized
QVQLQESGGGLVQAGGSLRLSCAASGTIFPNRMGWYRQAPGKEREFVATINSGTTTNYADSVKGRFTISRDNAKNTVYLQMNSLKPEDTAVYYCAVLTSYFDDLSYWGQGTQVTVSS

SEQ ID NO: 14531 - protein, 118 aa, Artificial Sequence
  Chemically Synthesized
QVQLQESGGGLVQAGGSLRLSCAASGSIFDDYVMGWYRQAPGKERELVATINEGGNTYYADSVKGRFTISRDNAKNTVYLQMNSLKPEDTAVYYCAAVGWWTYAHWYWGQGTQVTVSS

SEQ ID NO: 14532 - protein, 118 aa, Artificial Sequence
  Chemically Synthesized
QVQLQESGGGLVQAGGSLRLSCAASGYISRWHYMGWYRQAPGKERELVAAISNGGSTYYADSVKGRFTISRDNAKNTVYLQMNSLKPEDTAVYYCAAAAVGYWSYGYWGQGTQVTVSS

SEQ ID NO: 14533 - protein, 126 aa, Artificial Sequence
  Chemically Synthesized
QVQLQESGGGLVQAGGSLRLSCAASGYISGYRTMGWYRQAPGKERELVAAISNGANTNYADSVKGRFTISRDNAKNTVYLQMNSLKPEDTAVYYCAADGQSAYVQPSYVDGYHGYWGQGTQVTVSS

SEQ ID NO: 14534 - protein, 113 aa, Artificial Sequence
  Chemically Synthesized
QVQLQESGGGLVQAGGSLRLSCAASGTIFGSYDMGWYRQAPGKERELVASIGDGATTNYADSVKGRFTISRDNAKNTVYLQMNSLKPEDTAVYYCAADPRKYWGQGTQVTVSS

SEQ ID NO: 14535 - protein, 126 aa, Artificial Sequence
  Chemically Synthesized
QVQLQESGGGLVQAGGSLRLSCAASGSISFPYTMGWYRQAPGKEREFVAAIDYGGITNYADSVKGRFTISRDNAKNTVYLQMNSLKPEDTAVYYCAATSQRPLRQDQTLYWDHDYWGQGTQVTVSS

SEQ ID NO: 14536 - protein, 121 aa, Artificial Sequence
  Chemically Synthesized
QVQLQESGGGLVQAGGSLRLSCAASGNFLVRTMGWYRQAPGKEREFVATITRGAITNYADSVKGRFTISRDNAKNTVYLQMNSLKPEDTAVYYCAAYAHPGQDASDNHVYWGQGTQVTVSS

SEQ ID NO: 14537 - protein, 118 aa, Artificial Sequence
  Chemically Synthesized
QVQLQESGGGLVQAGGSLRLSCAASGSISAYFAMGWYRQAPGKEREFVAGIDTGTITNYADSVKGRFTISRDNAKNTVYLQMNSLKPEDTAVYYCAARGSKTGGLDYWGQGTQVTVSS

SEQ ID NO: 14538 - protein, 120 aa, Artificial Sequence
  Chemically Synthesized
QVQLQESGGGLVQAGGSLRLSCAASGTIFRTMGWYRQAPGKEREFVAAIGWGATTYYADSVKGRFTISRDNAKNTVYLQMNSLKPEDTAVYYCAARIGYWRTGTGGHRYWGQGTQVTVSS

SEQ ID NO: 14539 - protein, 118 aa, Artificial Sequence
  Chemically Synthesized
QVQLQESGGGLVQAGGSLRLSCAASGNIFWTHVMGWYRQAPGKEREFVASITDGTSTYYADSVKGRFTISRDNAKNTVYLQMNSLKPEDTAVYYCAALGDDYDRLLYWGQGTQVTVSS

SEQ ID NO: 14540 - protein, 126 aa, Artificial Sequence
  Chemically Synthesized
QVQLQESGGGLVQAGGSLRLSCAASGSIFDTAIMGWYRQAPGKEREFVATINDGTITNYADSVKGRFTISRDNAKNTVYLQMNSLKPEDTAVYYCAADGYAIGGNYRGTVAVFDYWGQGTQVTVSS

SEQ ID NO: 14541 - protein, 118 aa, Artificial Sequence
  Chemically Synthesized
QVQLQESGGGLVQAGGSLRLSCAASGYISQPPAMGWYRQAPGKERELVAGIATGASTYYADSVKGRFTISRDNAKNTVYLQMNSLKPEDTAVYYCAAWRRDYGLHDYWGQGTQVTVSS

SEQ ID NO: 14542 - protein, 126 aa, Artificial Sequence
  Chemically Synthesized
QVQLQESGGGLVQAGGSLRLSCAASGNIFQYYYMGWYRQAPGKEREFVAGIADGGTTYYADSVKGRFTISRDNAKNTVYLQMNSLKPEDTAVYYCAVGGRLYFRPYYLPRPRHGYWGQGTQVTVSS

SEQ ID NO: 14543 - protein, 118 aa, Artificial Sequence
  Chemically Synthesized
QVQLQESGGGLVQAGGSLRLSCAASGNIFVPSYMGWYRQAPGKEREFVATIATGATTYYADSVKGRFTISRDNAKNTVYLQMNSLKPEDTAVYYCAVYYLTDGDYGYWGQGTQVTVSS

SEQ ID NO: 14544 - protein, 118 aa, Artificial Sequence
  Chemically Synthesized
QVQLQESGGGLVQAGGSLRLSCAASGTISSARAMGWYRQAPGKERELVAGISTGGITNYADSVKGRFTISRDNAKNTVYLQMNSLKPEDTAVYYCAAYYRSDDVFSYWGQGTQVTVSS

SEQ ID NO: 14545 - protein, 122 aa, Artificial Sequence
  Chemically Synthesized
QVQLQESGGGLVQAGGSLRLSCAASGSIFNRDAMGWYRQAPGKEREFVAAIGDGTSTNYADSVKGRFTISRDNAKNTVYLQMNSLKPEDTAVYYCAARQWHRYNRQGWHTYWGQGTQVTVSS

SEQ ID NO: 14546 - protein, 118 aa, Artificial Sequence
  Chemically Synthesized
QVQLQESGGGLVQAGGSLRLSCAASGSISNTVTMGWYRQAPGKERELVAAITAGGITNYADSVKGRFTISRDNAKNTVYLQMNSLKPEDTAVYYCAAGPYSGRGFIYWGQGTQVTVSS

SEQ ID NO: 14547 - protein, 122 aa, Artificial Sequence
  Chemically Synthesized
QVQLQESGGGLVQAGGSLRLSCAASGTISAHPYMGWYRQAPGKERELVAGIANGSITYYADSVKGRFTISRDNAKNTVYLQMNSLKPEDTAVYYCAARNVTSAYVAYAFAYWGQGTQVTVSS

SEQ ID NO: 14548 - protein, 118 aa, Artificial Sequence
  Chemically Synthesized
QVQLQESGGGLVQAGGSLRLSCAASGSIFSVRRMGWYRQAPGKERELVAAITYGSSTNYADSVKGRFTISRDNAKNTVYLQMNSLKPEDTAVYYCAAVTHSYWVFSYWGQGTQVTVSS

SEQ ID NO: 14549 - protein, 128 aa, Artificial Sequence
  Chemically Synthesized
QVQLQESGGGLVQAGGSLRLSCAASGTISRQDVMGWYRQAPGKERELVATINGGSTTNYADSVKGRFTISRDNAKNTVYLQMNSLKPEDTAVYYCAVPYDTGDRITTYSTAGFPFWYWGQGTQVTVSS

SEQ ID NO: 14550 - protein, 121 aa, Artificial Sequence
  Chemically Synthesized
QVQLQESGGGLVQAGGSLRLSCAASGNISYTVGMGWYRQAPGKEREFVAAIATGTITNYADSVKGRFTISRDNAKNTVYLQMNSLKPEDTAVYYCAATNAYRYISIAHIYWGQGTQVTVSS

SEQ ID NO: 14551 - protein, 122 aa, Artificial Sequence
  Chemically Synthesized
QVQLQESGGGLVQAGGSLRLSCAASGTIFIRGVMGWYRQAPGKERELVASIGSGASTNYADSVKGRFTISRDNAKNTVYLQMNSLKPEDTAVYYCAVYSILAYFGYYDLIYWGQGTQVTVSS

SEQ ID NO: 14552 - protein, 122 aa, Artificial Sequence
  Chemically Synthesized
QVQLQESGGGLVQAGGSLRLSCAASGSISTTYIMGWYRQAPGKERELVAAITTGTTTNYADSVKGRFTISRDNAKNTVYLQMNSLKPEDTAVYYCAVLRDLYDLNQERLYYWGQGTQVTVSS

SEQ ID NO: 14553 - protein, 117 aa, Artificial Sequence
  Chemically Synthesized
QVQLQESGGGLVQAGGSLRLSCAASGNIFYFSYMGWYRQAPGKERELVAAIASVVLPYADSVKGRFTISRDNAKNTVYLQMNSLKPEDTAVYYCAVWKTLSYDHTYWGQGTQVTVSS

SEQ ID NO: 14554 - protein, 122 aa, Artificial Sequence
  Chemically Synthesized
QVQLQESGGGLVQAGGSLRLSCAASGSISEAWFMGWYRQAPGKEREFVAAISYGSTTYYADSVKGRFTISRDNAKNTVYLQMNSLKPEDTAVYYCAAIGHPYVRHAYPHAYWGQGTQVTVSS

SEQ ID NO: 14555 - protein, 122 aa, Artificial Sequence
  Chemically Synthesized
QVQLQESGGGLVQAGGSLRLSCAASGTISFVIGMGWYRQAPGKERELVAAITRGASTYYADSVKGRFTISRDNAKNTVYLQMNSLKPEDTAVYYCAAGLYRFDTGYRNYAYWGQGTQVTVSS

SEQ ID NO: 14556 - protein, 118 aa, Artificial Sequence
  Chemically Synthesized
QVQLQESGGGLVQAGGSLRLSCAASGYIFYPAIMGWYRQAPGKERELVAGIDPGGNTNYADSVKGRFTISRDNAKNTVYLQMNSLKPEDTAVYYCAVDYYYSSTFYYWGQGTQVTVSS

SEQ ID NO: 14557 - protein, 118 aa, Artificial Sequence
  Chemically Synthesized
QVQLQESGGGLVQAGGSLRLSCAASGTIFGWPEMGWYRQAPGKERELVAGIGDGTSTYYADSVKGRFTISRDNAKNTVYLQMNSLKPEDTAVYYCAVEVTSHRLLWYWGQGTQVTVSS

SEQ ID NO: 14558 - protein, 118 aa, Artificial Sequence
  Chemically Synthesized
QVQLQESGGGLVQAGGSLRLSCAASGYISRYRYMGWYRQAPGKEREFVATIAPGTTTYYADSVKGRFTISRDNAKNTVYLQMNSLKPEDTAVYYCAAYYSSDYGFGYWGQGTQVTVSS

SEQ ID NO: 14559 - protein, 118 aa, Artificial Sequence
  Chemically Synthesized
QVQLQESGGGLVQAGGSLRLSCAASGSIFTVQYMGWYRQAPGKEREFVAAIDYGTITYYADSVKGRFTISRDNAKNTVYLQMNSLKPEDTAVYYCAARQIAQLYHVYWGQGTQVTVSS

SEQ ID NO: 14560 - protein, 122 aa, Artificial Sequence
  Chemically Synthesized
QVQLQESGGGLVQAGGSLRLSCAASGNISDVYYMGWYRQAPGKERELVAGISYGASTNYADSVKGRFTISRDNAKNTVYLQMNSLKPEDTAVYYCAARPYWVVKRARILDYWGQGTQVTVSS

SEQ ID NO: 14561 - protein, 126 aa, Artificial Sequence
  Chemically Synthesized
QVQLQESGGGLVQAGGSLRLSCAASGTISIGDTMGWYRQAPGKERELVAGINTGTTTYYADSVKGRFTISRDNAKNTVYLQMNSLKPEDTAVYYCAARQYGYHYSYGTKDRVLGYWGQGTQVTVSS

SEQ ID NO: 14562 - protein, 118 aa, Artificial Sequence
  Chemically Synthesized
QVQLQESGGGLVQAGGSLRLSCAASGTISDTASMGWYRQAPGKERELVATISPGGTTNYADSVKGRFTISRDNAKNTVYLQMNSLKPEDTAVYYCAVFDYRYYQYAYWGQGTQVTVSS

SEQ ID NO: 14563 - protein, 118 aa, Artificial Sequence
  Chemically Synthesized
QVQLQESGGGLVQAGGSLRLSCAASGTISQQAEMGWYRQAPGKERELVAAISYGANTNYADSVKGRFTISRDNAKNTVYLQMNSLKPEDTAVYYCAVESETRRGFAYWGQGTQVTVSS

SEQ ID NO: 14564 - protein, 118 aa, Artificial Sequence
  Chemically Synthesized
QVQLQESGGGLVQAGGSLRLSCAASGNISTVSAMGWYRQAPGKEREFVAAISYGAITNYADSVKGRFTISRDNAKNTVYLQMNSLKPEDTAVYYCAVGLWYAGGLTYWGQGTQVTVSS

SEQ ID NO: 14565 - protein, 122 aa, Artificial Sequence
  Chemically Synthesized
QVQLQESGGGLVQAGGSLRLSCAASGSISPTDLMGWYRQAPGKERELVATIAVGTSTNYADSVKGRFTISRDNAKNTVYLQMNSLKPEDTAVYYCAVPTYAGAYQANDFIYWGQGTQVTVSS

SEQ ID NO: 14566 - protein, 116 aa, Artificial Sequence
  Chemically Synthesized
QVQLQESGGGLVQAGGSLRLSCAASGTISGTHYMGWYRQAPGKEREFVAAISAGTTTNYADSVKGRFTISRDNAKNTVYLQMNSLKPEDTAVYYCAANYYDSHYYWGQGTQVTVSS

SEQ ID NO: 14567 - protein, 121 aa, Artificial Sequence
  Chemically Synthesized
QVQLQESGGGLVQAGGSLRLSCAASGSIFAYYNMGWYRQAPGKERELLPLLVVVLLPYADSVKGRFTISRDNAKNTVYLQMNSLKPEDTAVYYCAVWYRDVVAGAPGHVYWGQGTQVTVSS

SEQ ID NO: 14568 - protein, 117 aa, Artificial Sequence
  Chemically Synthesized
QVQLQESGGGLVQAGGSLRLSCAASGNISFGYMGWYRQAPGKERELVAGISDGASTNYADSVKGRFTISRDNAKNTVYLQMNSLKPEDTAVYYCAADPYDYSPHTYWGQGTQVTVSS

SEQ ID NO: 14569 - protein, 122 aa, Artificial Sequence
  Chemically Synthesized
QVQLQESGGGLVQAGGSLRLSCAASGYISLPYYMGWYRQAPGKEREFVATIGEGAITYYADSVKGRFTISRDNAKNTVYLQMNSLKPEDTAVYYCAAPYRGYGGAPDYLIYWGQGTQVTVSS

SEQ ID NO: 14570 - protein, 122 aa, Artificial Sequence
  Chemically Synthesized
QVQLQESGGGLVQAGGSLRLSCAASGTISYPYNMGWYRQAPGKEREFVASINDGASTYYADSVKGRFTISRDNAKNTVYLQMNSLKPEDTAVYYCAADNSFSAAVLPGPWYWGQGTQVTVSS

SEQ ID NO: 14571 - protein, 118 aa, Artificial Sequence
  Chemically Synthesized
QVQLQESGGGLVQAGGSLRLSCAASGNIFWDAAMGWYRQAPGKEREFVASITSGGTTNYADSVKGRFTISRDNAKNTVYLQMNSLKPEDTAVYYCAAYPRRSYGLWYWGQGTQVTVSS

SEQ ID NO: 14572 - protein, 118 aa, Artificial Sequence
  Chemically Synthesized
QVQLQESGGGLVQAGGSLRLSCAASGTISRTRPMGWYRQAPGKERELVATIDSGGTTYYADSVKGRFTISRDNAKNTVYLQMNSLKPEDTAVYYCAAYGYRHRYHVYWGQGTQVTVSS

SEQ ID NO: 14573 - protein, 118 aa, Artificial Sequence
  Chemically Synthesized
QVQLQESGGGLVQAGGSLRLSCAASGNIFDSYVMGWYRQAPGKERELVASISLGATTNYADSVKGRFTISRDNAKNTVYLQMNSLKPEDTAVYYCAARAQSDLDYTYWGQGTQVTVSS

SEQ ID NO: 14574 - protein, 120 aa, Artificial Sequence
  Chemically Synthesized
QVQLQESGGGLVQAGGSLRLSCAASGTISDYFMGWYRQAPGKEREFVASIDSVVLPYADSVKGRFTISRDNAKNTVYLQMNSLKPEDTAVYYCAVRRAADYTYDEYHGYWGQGTQVTVSS

SEQ ID NO: 14575 - protein, 118 aa, Artificial Sequence
  Chemically Synthesized
QVQLQESGGGLVQAGGSLRLSCAASGYISFRGYMGWYRQAPGKERELVATINFGGSTYYADSVKGRFTISRDNAKNTVYLQMNSLKPEDTAVYYCAVYLEYSYDHRYWGQGTQVTVSS

SEQ ID NO: 14576 - protein, 118 aa, Artificial Sequence
  Chemically Synthesized
QVQLQESGGGLVQAGGSLRLSCAASGNISAYGFMGWYRQAPGKEREFVASIDTGSITNYADSVKGRFTISRDNAKNTVYLQMNSLKPEDTAVYYCAVEDARGYVYPYWGQGTQVTVSS

SEQ ID NO: 14577 - protein, 118 aa, Artificial Sequence
  Chemically Synthesized
QVQLQESGGGLVQAGGSLRLSCAASGTISYAGDMGWYRQAPGKEREFVAAISDGASTNYADSVKGRFTISRDNAKNTVYLQMNSLKPEDTAVYYCAVGSGSGHQLDYWGQGTQVTVSS

SEQ ID NO: 14578 - protein, 117 aa, Artificial Sequence
  Chemically Synthesized
QVQLQESGGGLVQAGGSLRLSCAASGYISYYAPMGWYRQAPGKEREFVASIGWGGNTNYADSVKGRFTISRDNAKNTVYLQMNSLKPEDTAVYYCAVHIPVGIPSYWGQGTQVTVSS

SEQ ID NO: 14579 - protein, 118 aa, Artificial Sequence
  Chemically Synthesized
QVQLQESGGGLVQAGGSLRLSCAASGYIFGQASMGWYRQAPGKERELVAAITFGATTNYADSVKGRFTISRDNAKNTVYLQMNSLKPEDTAVYYCAAGKDNYGDHSYWGQGTQVTVSS

SEQ ID NO: 14580 - protein, 126 aa, Artificial Sequence
  Chemically Synthesized
QVQLQESGGGLVQAGGSLRLSCAASGTISNATYMGWYRQAPGKERELVASIDTGSNTYYADSVKGRFTISRDNAKNTVYLQMNSLKPEDTAVYYCAANFRQYFAYTDTDYHSHDYWGQGTQVTVSS

SEQ ID NO: 14581 - protein, 118 aa, Artificial Sequence
  Chemically Synthesized
QVQLQESGGGLVQAGGSLRLSCAASGSISPQYVMGWYRQAPGKEREFVATITTGATTNYADSVKGRFTISRDNAKNTVYLQMNSLKPEDTAVYYCAAYAYDASGHYYWGQGTQVTVSS

SEQ ID NO: 14582 - protein, 118 aa, Artificial Sequence
  Chemically Synthesized
QVQLQESGGGLVQAGGSLRLSCAASGYIFAYFYMGWYRQAPGKEREFVASIAVGTSTNYADSVKGRFTISRDNAKNTVYLQMNSLKPEDTAVYYCAAYGYTDGDHFYWGQGTQVTVSS

SEQ ID NO: 14583 - protein, 118 aa, Artificial Sequence
  Chemically Synthesized
QVQLQESGGGLVQAGGSLRLSCAASGNISDQIDMGWYRQAPGKEREFVAGIATGSTTNYADSVKGRFTISRDNAKNTVYLQMNSLKPEDTAVYYCAVQGIVQELYGYWGQGTQVTVSS

SEQ ID NO: 14584 - protein, 118 aa, Artificial Sequence
  Chemically Synthesized
QVQLQESGGGLVQAGGSLRLSCAASGNISDAPYMGWYRQAPGKEREFVASIGYGTITYYADSVKGRFTISRDNAKNTVYLQMNSLKPEDTAVYYCAAAEEYWPYYVYWGQGTQVTVSS

SEQ ID NO: 14585 - protein, 117 aa, Artificial Sequence
  Chemically Synthesized
QVQLQESGGGLVQAGGSLRLSCAASGYIFSTSMGWYRQAPGKEREFVASINQGGSTYYADSVKGRFTISRDNAKNTVYLQMNSLKPEDTAVYYCAVGQWSYLVLSYWGQGTQVTVSS

SEQ ID NO: 14586 - protein, 118 aa, Artificial Sequence
  Chemically Synthesized
QVQLQESGGGLVQAGGSLRLSCAASGNISYDGLMGWYRQAPGKEREFVATITRGASTYYADSVKGRFTISRDNAKNTVYLQMNSLKPEDTAVYYCAVLGKWLVRHYYWGQGTQVTVSS

SEQ ID NO: 14587 - protein, 126 aa, Artificial Sequence
  Chemically Synthesized
QVQLQESGGGLVQAGGSLRLSCAASGNIFGGDAMGWYRQAPGKERELVATINDGGSTNYADSVKGRFTISRDNAKNTVYLQMNSLKPEDTAVYYCAASRPGQIYATYGVADQYNYWGQGTQVTVSS

SEQ ID NO: 14588 - protein, 114 aa, Artificial Sequence
  Chemically Synthesized
QVQLQESGGGLVQAGGSLRLSCAASGNIFEQATMGWYRQAPGKERELVATISDGGITYYADSVKGRFTISRDNAKNTVYLQMNSLKPEDTAVYYCAANRSSMYWGQGTQVTVSS

SEQ ID NO: 14589 - protein, 117 aa, Artificial Sequence
  Chemically Synthesized
QVQLQESGGGLVQAGGSLRLSCAASGTIFYEGNMGWYRQAPGKERELVAVVIPYADSVKGRFTISRDNAKNTVYLQMNSLKPEDTAVYYCAVDRPVTALLDPYYRYWGQGTQVTVSS

SEQ ID NO: 14590 - protein, 120 aa, Artificial Sequence
  Chemically Synthesized
QVQLQESGGGLVQAGGSLRLSCAASGNISLDRTMGWYRQAPGKERELVAAISGGGSTYYADSVKGRFTISRDNAKNTVYLQMNSLKPEDTAVYYCAAQYEYTDLLTYPYWGQGTQVTVSS

SEQ ID NO: 14591 - protein, 126 aa, Artificial Sequence
  Chemically Synthesized
QVQLQESGGGLVQAGGSLRLSCAASGTISRHPMGWYRQAPGKERELVASITAGTNTYYADSVKGRFTISRDNAKNTVYLQMNSLKPEDTAVYYCAVSLYRKGGRPHHYIDYWHSYWGQGTQVTVSS

SEQ ID NO: 14592 - protein, 118 aa, Artificial Sequence
  Chemically Synthesized
QVQLQESGGGLVQAGGSLRLSCAASGYISRWFSMGWYRQAPGKEREFVAAISSGAITYYADSVKGRFTISRDNAKNTVYLQMNSLKPEDTAVYYCAVLIIDQPYHDYWGQGTQVTVSS

SEQ ID NO: 14593 - protein, 117 aa, Artificial Sequence
  Chemically Synthesized
QVQLQESGGGLVQAGGSLRLSCAASGTISHRDFMGWYRQAPGKERELVAAISLGANTNYADSVKGRFTISRDNAKNTVYLQMNSLKPEDTAVYYCAAYSNLVTTMYWGQGTQVTVSS

SEQ ID NO: 14594 - protein, 118 aa, Artificial Sequence
  Chemically Synthesized
QVQLQESGGGLVQAGGSLRLSCAASGNISYVFRMGWYRQAPGKERELVASINNGTTTNYADSVKGRFTISRDNAKNTVYLQMNSLKPEDTAVYYCAVDDTRDRRLGYWGQGTQVTVSS

SEQ ID NO: 14595 - protein, 117 aa, Artificial Sequence
  Chemically Synthesized
QVQLQESGGGLVQAGGSLRLSCAASGSIFGRLMGWYRQAPGKEREFVASIAYGSITNYADSVKGRFTISRDNAKNTVYLQMNSLKPEDTAVYYCAANLWTGGGLVYWGQGTQVTVSS

SEQ ID NO: 14596 - protein, 122 aa, Artificial Sequence
  Chemically Synthesized
QVQLQESGGGLVQAGGSLRLSCAASGNISRAYRMGWYRQAPGKERELVATITYGGTTYYADSVKGRFTISRDNAKNTVYLQMNSLKPEDTAVYYCAVPTYITATDYNGHDYWGQGTQVTVSS

SEQ ID NO: 14597 - protein, 118 aa, Artificial Sequence
  Chemically Synthesized
QVQLQESGGGLVQAGGSLRLSCAASGNISTTWHMGWYRQAPGKERELVASITGGSTTNYADSVKGRFTISRDNAKNTVYLQMNSLKPEDTAVYYCAAFLDEYSYLYYWGQGTQVTVSS

SEQ ID NO: 14598 - protein, 118 aa, Artificial Sequence
  Chemically Synthesized
QVQLQESGGGLVQAGGSLRLSCAASGNIFAYGAMGWYRQAPGKEREFVATIGRGTNTNYADSVKGRFTISRDNAKNTVYLQMNSLKPEDTAVYYCAVIDKGYSDFHYWGQGTQVTVSS

SEQ ID NO: 14599 - protein, 118 aa, Artificial Sequence
  Chemically Synthesized
QVQLQESGGGLVQAGGSLRLSCAASGTISDRIVMGWYRQAPGKEREFVAAISDGATTNYADSVKGRFTISRDNAKNTVYLQMNSLKPEDTAVYYCAAAWITVWAHDYWGQGTQVTVSS

SEQ ID NO: 14600 - protein, 118 aa, Artificial Sequence
  Chemically Synthesized
QVQLQESGGGLVQAGGSLRLSCAASGTIFDLDFMGWYRQAPGKERELVLMVVLVPYADSVKGRFTISRDNAKNTVYLQMNSLKPEDTAVYYCAAVLYNVPRYGLFSYWGQGTQVTVSS

SEQ ID NO: 14601 - protein, 118 aa, Artificial Sequence
  Chemically Synthesized
QVQLQESGGGLVQAGGSLRLSCAASGTISIDGNMGWYRQAPGKEREFVATITGGAITNYADSVKGRFTISRDNAKNTVYLQMNSLKPEDTAVYYCAVGYGTSGSVWYWGQGTQVTVSS

SEQ ID NO: 14602 - protein, 122 aa, Artificial Sequence
  Chemically Synthesized
QVQLQESGGGLVQAGGSLRLSCAASGNISDPGDMGWYRQAPGKERELVAGINPGTNTYYADSVKGRFTISRDNAKNTVYLQMNSLKPEDTAVYYCAAGPFPHWWDQFVHTYWGQGTQVTVSS

SEQ ID NO: 14603 - protein, 118 aa, Artificial Sequence
  Chemically Synthesized
QVQLQESGGGLVQAGGSLRLSCAASGTIFYEWSMGWYRQAPGKERELVASIAYGAITYYADSVKGRFTISRDNAKNTVYLQMNSLKPEDTAVYYCAVTGSGDTYHRYWGQGTQVTVSS

SEQ ID NO: 14604 - protein, 122 aa, Artificial Sequence
  Chemically Synthesized
QVQLQESGGGLVQAGGSLRLSCAASGNISDDEAMGWYRQAPGKERELVAAISVGGTTNYADSVKGRFTISRDNAKNTVYLQMNSLKPEDTAVYYCAAASQPSYAGHDNHYYWGQGTQVTVSS

SEQ ID NO: 14605 - protein, 126 aa, Artificial Sequence
  Chemically Synthesized
QVQLQESGGGLVQAGGSLRLSCAASGTISSDFYMGWYRQAPGKERELVATIDDGASTNYADSVKGRFTISRDNAKNTVYLQMNSLKPEDTAVYYCAVYYQANSSIRGYYTTDHTYWGQGTQVTVSS

SEQ ID NO: 14606 - protein, 125 aa, Artificial Sequence
  Chemically Synthesized
QVQLQESGGGLVQAGGSLRLSCAASGTISIQPMGWYRQAPGKERELVAGITDGSNTYYADSVKGRFTISRDNAKNTVYLQMNSLKPEDTAVYYCAVVDARTRHGKAGGDQVHSYWGQGTQVTVSS

SEQ ID NO: 14607 - protein, 122 aa, Artificial Sequence
  Chemically Synthesized
QVQLQESGGGLVQAGGSLRLSCAASGNISVGTYMGWYRQAPGKEREFVATINDGGNTYYADSVKGRFTISRDNAKNTVYLQMNSLKPEDTAVYYCAVTRVTNTQVSWLYAYWGQGTQVTVSS

SEQ ID NO: 14608 - protein, 122 aa, Artificial Sequence
  Chemically Synthesized
QVQLQESGGGLVQAGGSLRLSCAASGYIFDAYSMGWYRQAPGKEREFVATIDSGGITYYADSVKGRFTISRDNAKNTVYLQMNSLKPEDTAVYYCAVPRVDYRPVGAVHEYWGQGTQVTVSS

SEQ ID NO: 14609 - protein, 118 aa, Artificial Sequence
  Chemically Synthesized
QVQLQESGGGLVQAGGSLRLSCAASGTIFYGGVMGWYRQAPGKEREFVASITPGSSTYYADSVKGRFTISRDNAKNTVYLQMNSLKPEDTAVYYCAAYRPDAVYHSYWGQGTQVTVSS

SEQ ID NO: 14610 - protein, 117 aa, Artificial Sequence
  Chemically Synthesized
QVQLQESGGGLVQAGGSLRLSCAASGSISRKTMGWYRQAPGKERELVAGIDDGGSTYYADSVKGRFTISRDNAKNTVYLQMNSLKPEDTAVYYCAADAHHTGLHWYWGQGTQVTVSS

SEQ ID NO: 14611 - protein, 118 aa, Artificial Sequence
  Chemically Synthesized
QVQLQESGGGLVQAGGSLRLSCAASGNISGVIGMGWYRQAPGKEREFVASIAQGTSTYYADSVKGRFTISRDNAKNTVYLQMNSLKPEDTAVYYCAAVISYAVQLVYWGQGTQVTVSS

SEQ ID NO: 14612 - protein, 122 aa, Artificial Sequence
  Chemically Synthesized
QVQLQESGGGLVQAGGSLRLSCAASGTISSPFRMGWYRQAPGKERELVASIGGGGNTNYADSVKGRFTISRDNAKNTVYLQMNSLKPEDTAVYYCAAGVGYGYKRGIRFDYWGQGTQVTVSS

SEQ ID NO: 14613 - protein, 114 aa, Artificial Sequence
  Chemically Synthesized
QVQLQESGGGLVQAGGSLRLSCAASGTIFDNSAMGWYRQAPGKERELVAGIGYGSTTNYADSVKGRFTISRDNAKNTVYLQMNSLKPEDTAVYYCAAYSDVEYWGQGTQVTVSS

SEQ ID NO: 14614 - protein, 122 aa, Artificial Sequence
  Chemically Synthesized
QVQLQESGGGLVQAGGSLRLSCAASGNIFLDVRMGWYRQAPGKERELVAAISTGAITNYADSVKGRFTISRDNAKNTVYLQMNSLKPEDTAVYYCAVVKSRGWLHSAGPYYWGQGTQVTVSS

SEQ ID NO: 14615 - protein, 118 aa, Artificial Sequence
  Chemically Synthesized
QVQLQESGGGLVQAGGSLRLSCAASGTISWRYGMGWYRQAPGKERELVASITDGASTNYADSVKGRFTISRDNAKNTVYLQMNSLKPEDTAVYYCAVGFGYGVLLYYWGQGTQVTVSS

SEQ ID NO: 14616 - protein, 122 aa, Artificial Sequence
  Chemically Synthesized
QVQLQESGGGLVQAGGSLRLSCAASGYIFASDDMGWYRQAPGKEREFVAAITYGTITYYADSVKGRFTISRDNAKNTVYLQMNSLKPEDTAVYYCAAYKGQWRNQYDRYGYWGQGTQVTVSS

SEQ ID NO: 14617 - protein, 118 aa, Artificial Sequence
  Chemically Synthesized
QVQLQESGGGLVQAGGSLRLSCAASGTISRSFGMGWYRQAPGKEREFVAGISYGSTTNYADSVKGRFTISRDNAKNTVYLQMNSLKPEDTAVYYCAVYRLIDIDLGYWGQGTQVTVSS

SEQ ID NO: 14618 - protein, 122 aa, Artificial Sequence
  Chemically Synthesized
QVQLQESGGGLVQAGGSLRLSCAASGNIFQNALMGWYRQAPGKERELVASIGYGATTNYADSVKGRFTISRDNAKNTVYLQMNSLKPEDTAVYYCAVGTDVDGRDRVGHFYWGQGTQVTVSS

SEQ ID NO: 14619 - protein, 122 aa, Artificial Sequence
  Chemically Synthesized
QVQLQESGGGLVQAGGSLRLSCAASGTIFDPYQMGWYRQAPGKERELVAAIARGATTYYADSVKGRFTISRDNAKNTVYLQMNSLKPEDTAVYYCAVSENGQQRWDFDHWYWGQGTQVTVSS

SEQ ID NO: 14620 - protein, 122 aa, Artificial Sequence
  Chemically Synthesized
QVQLQESGGGLVQAGGSLRLSCAASGSISRYYVMGWYRQAPGKEREFVASIGTGGNTYYADSVKGRFTISRDNAKNTVYLQMNSLKPEDTAVYYCAVVRYYPTYAVYGFYYWGQGTQVTVSS

SEQ ID NO: 14621 - protein, 118 aa, Artificial Sequence
  Chemically Synthesized
QVQLQESGGGLVQAGGSLRLSCAASGNIFYVSYMGWYRQAPGKEREFVAGIAYGTNTYYADSVKGRFTISRDNAKNTVYLQMNSLKPEDTAVYYCAVVPSRRTHHLYWGQGTQVTVSS

SEQ ID NO: 14622 - protein, 122 aa, Artificial Sequence
  Chemically Synthesized
QVQLQESGGGLVQAGGSLRLSCAASGYISQTNWMGWYRQAPGKERELVASISTGGSTNYADSVKGRFTISRDNAKNTVYLQMNSLKPEDTAVYYCAVQDVALTDHRLTGIYWGQGTQVTVSS

SEQ ID NO: 14623 - protein, 118 aa, Artificial Sequence
  Chemically Synthesized
QVQLQESGGGLVQAGGSLRLSCAASGYIFQRDSMGWYRQAPGKERELVAAIALGATTYYADSVKGRFTISRDNAKNTVYLQMNSLKPEDTAVYYCAARVGWLWPHVYWGQGTQVTVSS

SEQ ID NO: 14624 - protein, 118 aa, Artificial Sequence
  Chemically Synthesized
QVQLQESGGGLVQAGGSLRLSCAASGYISYTRYMGWYRQAPGKEREFVAAIGNGASTYYADSVKGRFTISRDNAKNTVYLQMNSLKPEDTAVYYCAAPFRTRSGFPYWGQGTQVTVSS

SEQ ID NO: 14625 - protein, 118 aa, Artificial Sequence
  Chemically Synthesized
QVQLQESGGGLVQAGGSLRLSCAASGYIFHVAGMGWYRQAPGKERELVATIGYGTITYYADSVKGRFTISRDNAKNTVYLQMNSLKPEDTAVYYCAATYYTYYAFNYWGQGTQVTVSS

SEQ ID NO: 14626 - protein, 118 aa, Artificial Sequence
  Chemically Synthesized
QVQLQESGGGLVQAGGSLRLSCAASGNISQRDSMGWYRQAPGKERELVATITDGSNTYYADSVKGRFTISRDNAKNTVYLQMNSLKPEDTAVYYCAVYTPSYINHRYWGQGTQVTVSS

SEQ ID NO: 14627 - protein, 122 aa, Artificial Sequence
  Chemically Synthesized
QVQLQESGGGLVQAGGSLRLSCAASGNIFFRTFMGWYRQAPGKEREFVASIGYGSTTNYADSVKGRFTISRDNAKNTVYLQMNSLKPEDTAVYYCAVPPRGGRYNLYRHYYWGQGTQVTVSS

SEQ ID NO: 14628 - protein, 118 aa, Artificial Sequence
  Chemically Synthesized
QVQLQESGGGLVQAGGSLRLSCAASGNIFPPDGMGWYRQAPGKEREIFAGIDHGGTTYYADSVKGRFTISRDNAKNTVYLQMNSLKPEDTAVYYCAALAYYIYWYPYWGQGTQVTVSS

SEQ ID NO: 14629 - protein, 118 aa, Artificial Sequence
  Chemically Synthesized
QVQLQESGGGLVQAGGSLRLSCAASGNISWYYSMGWYRQAPGKERELCRYYLRCYYLYADSVKGRFTISRDNAKNTVYLQMNSLKPEDTAVYYCAVLQDEYTRAYGYWGQGTQVTVSS

SEQ ID NO: 14630 - protein, 118 aa, Artificial Sequence
  Chemically Synthesized
QVQLQESGGGLVQAGGSLRLSCAASGTISWDGTMGWYRQAPGKERELVASITDGTTTNYADSVKGRFTISRDNAKNTVYLQMNSLKPEDTAVYYCAAPDWKLADYRYWGQGTQVTVSS

SEQ ID NO: 14631 - protein, 122 aa, Artificial Sequence
  Chemically Synthesized
QVQLQESGGGLVQAGGSLRLSCAASGSISKAYTMGWYRQAPGKEREFVATIDFGTITNYADSVKGRFTISRDNAKNTVYLQMNSLKPEDTAVYYCAANYYRRFIIWRDHVYWGQGTQVTVSS

SEQ ID NO: 14632 - protein, 114 aa, Artificial Sequence
  Chemically Synthesized
QVQLQESGGGLVQAGGSLRLSCAASGYIFSPGMGWYRQAPGKEREFVAAIGDGGNTNYADSVKGRFTISRDNAKNTVYLQMNSLKPEDTAVYYCAVGESAHTYWGQGTQVTVSS

SEQ ID NO: 14633 - protein, 118 aa, Artificial Sequence
  Chemically Synthesized
QVQLQESGGGLVQAGGSLRLSCAASGTISNGKYMGWYRQAPGKERELVAAITHGSSTYYADSVKGRFTISRDNAKNTVYLQMNSLKPEDTAVYYCAADPRVDGGYWYWGQGTQVTVSS

SEQ ID NO: 14634 - protein, 118 aa, Artificial Sequence
  Chemically Synthesized
QVQLQESGGGLVQAGGSLRLSCAASGNISYLDSMGWYRQAPGKERELVATIDLGGTTYYADSVKGRFTISRDNAKNTVYLQMNSLKPEDTAVYYCAAWAADTANHTYWGQGTQVTVSS

SEQ ID NO: 14635 - protein, 117 aa, Artificial Sequence
  Chemically Synthesized
QVQLQESGGGLVQAGGSLRLSCAASGNISYDPDMGWYRQAPGKERELVAAIASVLLPYADSVKGRFTISRDNAKNTVYLQMNSLKPEDTAVYYCAADPYWWDGHWYWGQGTQVTVSS

SEQ ID NO: 14636 - protein, 118 aa, Artificial Sequence
  Chemically Synthesized
QVQLQESGGGLVQAGGSLRLSCAASGSISHSSYMGWYRQAPGKERELVATIAYGSTTYYADSVKGRFTISRDNAKNTVYLQMNSLKPEDTAVYYCAVRFYYYGYLAYWGQGTQVTVSS

SEQ ID NO: 14637 - protein, 122 aa, Artificial Sequence
  Chemically Synthesized
QVQLQESGGGLVQAGGSLRLSCAASGTIFDSWFMGWYRQAPGKERELVASIADGGTTNYADSVKGRFTISRDNAKNTVYLQMNSLKPEDTAVYYCAVRGYYEALATGYFRYWGQGTQVTVSS

SEQ ID NO: 14638 - protein, 126 aa, Artificial Sequence
  Chemically Synthesized
QVQLQESGGGLVQAGGSLRLSCAASGTISLWKYMGWYRQAPGKERELVASITLGGTTYYADSVKGRFTISRDNAKNTVYLQMNSLKPEDTAVYYCAASGYYRYHYWQSWYSGHKYWGQGTQVTVSS

SEQ ID NO: 14639 - protein, 115 aa, Artificial Sequence
  Chemically Synthesized
QVQLQESGGGLVQAGGSLRLSCAASGSIFSQLSMGWYRQAPGKEREFVATISIGTITNYADSVKGRFTISRDNAKNTVYLQMNSLKPEDTAVYYCAAGYYTHEYWGQGTQVTVSS

SEQ ID NO: 14640 - protein, 112 aa, Artificial Sequence
  Chemically Synthesized
QVQLQESGGGLVQAGGSLRLSCAASGTISSTYSMGWYRQAPGKERELVAGITTGAITNYADSVKGRFTISRDNAKNTVYLQMNSLKPEDTAVYYCAAVTMYWGQGTQVTVSS

SEQ ID NO: 14641 - protein, 118 aa, Artificial Sequence
  Chemically Synthesized
QVQLQESGGGLVQAGGSLRLSCAASGYIFRYNAMGWYRQAPGKEREFVATIAEGTNTNYADSVKGRFTISRDNAKNTVYLQMNSLKPEDTAVYYCAVGRWLDDYLIYWGQGTQVTVSS

SEQ ID NO: 14642 - protein, 121 aa, Artificial Sequence
  Chemically Synthesized
QVQLQESGGGLVQAGGSLRLSCAASGNIFTWSYMGWYRQAPGKERELVAGIGYVVLPYADSVKGRFTISRDNAKNTVYLQMNSLKPEDTAVYYCAVIGPYDANYIDFHTYWGQGTQVTVSS

SEQ ID NO: 14643 - protein, 116 aa, Artificial Sequence
  Chemically Synthesized
QVQLQESGGGLVQAGGSLRLSCAASGTFFLSVMGWYRQAPGKEREFVATIASVLLPYADSVKGRFTISRDNAKNTVYLQMNSLKPEDTAVYYCAVYDYSYAVHAYWGQGTQVTVSS

SEQ ID NO: 14644 - protein, 118 aa, Artificial Sequence
  Chemically Synthesized
QVQLQESGGGLVQAGGSLRLSCAASGTIFDPRVMGWYRQAPGKERELVASIARGSSTYYADSVKGRFTISRDNAKNTVYLQMNSLKPEDTAVYYCAAQARWLFPHVYWGQGTQVTVSS

SEQ ID NO: 14645 - protein, 118 aa, Artificial Sequence
  Chemically Synthesized
QVQLQESGGGLVQAGGSLRLSCAASGSIFGRFTMGWYRQAPGKERELVASIGPGSITYYADSVKGRFTISRDNAKNTVYLQMNSLKPEDTAVYYCAVLDDEDYYYRYWGQGTQVTVSS

SEQ ID NO: 14646 - protein, 118 aa, Artificial Sequence
  Chemically Synthesized
QVQLQESGGGLVQAGGSLRLSCAASGTIFTYYDMGWYRQAPGKEREFVASITGGGTTYYADSVKGRFTISRDNAKNTVYLQMNSLKPEDTAVYYCAAFNRGWYDLYYWGQGTQVTVSS

SEQ ID NO: 14647 - protein, 118 aa, Artificial Sequence
  Chemically Synthesized
QVQLQESGGGLVQAGGSLRLSCAASGYIFPKGIMGWYRQAPGKEREFVATISYGGITNYADSVKGRFTISRDNAKNTVYLQMNSLKPEDTAVYYCAARYRFAWVHPYWGQGTQVTVSS

SEQ ID NO: 14648 - protein, 122 aa, Artificial Sequence
  Chemically Synthesized
QVQLQESGGGLVQAGGSLRLSCAASGNISAGYYMGWYRQAPGKEREFVAAISKGGITYYADSVKGRFTISRDNAKNTVYLQMNSLKPEDTAVYYCAARQYTRWYSKTVHRYWGQGTQVTVSS

SEQ ID NO: 14649 - protein, 122 aa, Artificial Sequence
  Chemically Synthesized
QVQLQESGGGLVQAGGSLRLSCAASGYISWVSLMGWYRQAPGKERELVAGITTGTNTYYADSVKGRFTISRDNAKNTVYLQMNSLKPEDTAVYYCAARRRFDGRYTTRFWYWGQGTQVTVSS

SEQ ID NO: 14650 - protein, 118 aa, Artificial Sequence
  Chemically Synthesized
QVQLQESGGGLVQAGGSLRLSCAASGYISITRTMGWYRQAPGKEREFVAAIGRGANTNYADSVKGRFTISRDNAKNTVYLQMNSLKPEDTAVYYCAAPRYWRDRHGYWGQGTQVTVSS

SEQ ID NO: 14651 - protein, 122 aa, Artificial Sequence
  Chemically Synthesized
QVQLQESGGGLVQAGGSLRLSCAASGNISAYRGMGWYRQAPGKERELVAGISSGATTNYADSVKGRFTISRDNAKNTVYLQMNSLKPEDTAVYYCAAYTTPYYFRITGLVYWGQGTQVTVSS

SEQ ID NO: 14652 - protein, 118 aa, Artificial Sequence
  Chemically Synthesized
QVQLQESGGGLVQAGGSLRLSCAASGSISNGYVMGWYRQAPGKEREFVAAIAYGGITNYADSVKGRFTISRDNAKNTVYLQMNSLKPEDTAVYYCAADDHYPVYFHYWGQGTQVTVSS

SEQ ID NO: 14653 - protein, 118 aa, Artificial Sequence
  Chemically Synthesized
QVQLQESGGGLVQAGGSLRLSCAASGTIFAYWYMGWYRQAPGKERELVAAISRGGTTYYADSVKGRFTISRDNAKNTVYLQMNSLKPEDTAVYYCAVWRYRTNRLRYWGQGTQVTVSS

SEQ ID NO: 14654 - protein, 118 aa, Artificial Sequence
  Chemically Synthesized
QVQLQESGGGLVQAGGSLRLSCAASGTISWVAIMGWYRQAPGKERELVAAITRGGTTNYADSVKGRFTISRDNAKNTVYLQMNSLKPEDTAVYYCAVYNYWSTRLGYWGQGTQVTVSS

SEQ ID NO: 14655 - protein, 121 aa, Artificial Sequence
  Chemically Synthesized
QVQLQESGGGLVQAGGSLRLSCAASGSFSGALMGWYRQAPGKEREFVAGISYGTTTNYADSVKGRFTISRDNAKNTVYLQMNSLKPEDTAVYYCAVILWYPSEYNVILVYWGQGTQVTVSS

SEQ ID NO: 14656 - protein, 122 aa, Artificial Sequence
  Chemically Synthesized
QVQLQESGGGLVQAGGSLRLSCAASGNISYVYGMGWYRQAPGKEREFVATIGWGASTYYADSVKGRFTISRDNAKNTVYLQMNSLKPEDTAVYYCAAYNYYGYYNSRRYRYWGQGTQVTVSS

SEQ ID NO: 14657 - protein, 126 aa, Artificial Sequence
  Chemically Synthesized
QVQLQESGGGLVQAGGSLRLSCAASGTIFWRFPMGWYRQAPGKEREFVATIDGGANTYYADSVKGRFTISRDNAKNTVYLQMNSLKPEDTAVYYCAARRAYGYWSVFGRYWAYPYWGQGTQVTVSS

SEQ ID NO: 14658 - protein, 117 aa, Artificial Sequence
  Chemically Synthesized
QVQLQESGGGLVQAGGSLRLSCAASGTIFWSGDMGWYRQAPGKEREFVAGINVGGTTYYADSVKGRFTISRDNAKNTVYLQMNSLKPEDTAVYYCAVTTPYAYLSYWGQGTQVTVSS

SEQ ID NO: 14659 - protein, 122 aa, Artificial Sequence
  Chemically Synthesized
QVQLQESGGGLVQAGGSLRLSCAASGTISRYSRMGWYRQAPGKEREFVAGIAGGSITYYADSVKGRFTISRDNAKNTVYLQMNSLKPEDTAVYYCAARRPYPRPYIRGLPYWGQGTQVTVSS

SEQ ID NO: 14660 - protein, 122 aa, Artificial Sequence
  Chemically Synthesized
QVQLQESGGGLVQAGGSLRLSCAASGYIFAVPSMGWYRQAPGKEREFVASINYGAITYYADSVKGRFTISRDNAKNTVYLQMNSLKPEDTAVYYCAVKWWYYTPYWYRHRYWGQGTQVTVSS

SEQ ID NO: 14661 - protein, 118 aa, Artificial Sequence
  Chemically Synthesized
QVQLQESGGGLVQAGGSLRLSCAASGYISSRSAMGWYRQAPGKEREFVAGINPGGTTNYADSVKGRFTISRDNAKNTVYLQMNSLKPEDTAVYYCAVLRWAYRFYRYWGQGTQVTVSS

SEQ ID NO: 14662 - protein, 122 aa, Artificial Sequence
  Chemically Synthesized
QVQLQESGGGLVQAGGSLRLSCAASGNIFKRAYMGWYRQAPGKERELVASITDGGNTYYADSVKGRFTISRDNAKNTVYLQMNSLKPEDTAVYYCAVGKRVWGLYRSYLYYWGQGTQVTVSS

SEQ ID NO: 14663 - protein, 118 aa, Artificial Sequence
  Chemically Synthesized
QVQLQESGGGLVQAGGSLRLSCAASGNISGRFTMGWYRQAPGKEREFVAGISPGTSTYYADSVKGRFTISRDNAKNTVYLQMNSLKPEDTAVYYCAAAHYWRYRHAYWGQGTQVTVSS

SEQ ID NO: 14664 - protein, 118 aa, Artificial Sequence
  Chemically Synthesized
QVQLQESGGGLVQAGGSLRLSCAASGTISPLVWMGWYRQAPGKERELVAGINLGSSTNYADSVKGRFTISRDNAKNTVYLQMNSLKPEDTAVYYCAADNFPFDSHWYWGQGTQVTVSS

SEQ ID NO: 14665 - protein, 118 aa, Artificial Sequence
  Chemically Synthesized
QVQLQESGGGLVQAGGSLRLSCAASGTISKTKFMGWYRQAPGKERELVAGIGTGSITYYADSVKGRFTISRDNAKNTVYLQMNSLKPEDTAVYYCAAWGRVYGRLRYWGQGTQVTVSS

SEQ ID NO: 14666 - protein, 118 aa, Artificial Sequence
  Chemically Synthesized
QVQLQESGGGLVQAGGSLRLSCAASGSIFRAYSMGWYRQAPGKERELVAAIAWGSSTYYADSVKGRFTISRDNAKNTVYLQMNSLKPEDTAVYYCAVTYWRSYYHGYWGQGTQVTVSS

SEQ ID NO: 14667 - protein, 122 aa, Artificial Sequence
  Chemically Synthesized
QVQLQESGGGLVQAGGSLRLSCAASGNIFYQTYMGWYRQAPGKERELVAAISRGGNTNYADSVKGRFTISRDNAKNTVYLQMNSLKPEDTAVYYCAVRPRTPSYYRYTHDYWGQGTQVTVSS

SEQ ID NO: 14668 - protein, 118 aa, Artificial Sequence
  Chemically Synthesized
QVQLQESGGGLVQAGGSLRLSCAASGYIFRHLAMGWYRQAPGKEREFVAGIGPGGNTNYADSVKGRFTISRDNAKNTVYLQMNSLKPEDTAVYYCAVTYRDYVGYPYWGQGTQVTVSS

SEQ ID NO: 14669 - protein, 118 aa, Artificial Sequence
  Chemically Synthesized
QVQLQESGGGLVQAGGSLRLSCAASGYISYYLRMGWYRQAPGKERELVATIDTGTNTNYADSVKGRFTISRDNAKNTVYLQMNSLKPEDTAVYYCAVSKFDDDDHAYWGQGTQVTVSS

SEQ ID NO: 14670 - protein, 126 aa, Artificial Sequence
  Chemically Synthesized
QVQLQESGGGLVQAGGSLRLSCAASGTISGPRLMGWYRQAPGKERELVAAIARGGTTYYADSVKGRFTISRDNAKNTVYLQMNSLKPEDTAVYYCAVAYRWLRPIYVSPDRVLAYWGQGTQVTVSS

SEQ ID NO: 14671 - protein, 121 aa, Artificial Sequence
  Chemically Synthesized
QVQLQESGGGLVQAGGSLRLSCAASGYISWYYKMGWYRQAPGKERELVAAIGSGSTTNYADSVKGRFTISRDNAKNTVYLQMNSLKPEDTAVYYCAARYSEKYGSSWFMYWGQGTQVTVSS

SEQ ID NO: 14672 - protein, 118 aa, Artificial Sequence
  Chemically Synthesized
QVQLQESGGGLVQAGGSLRLSCAASGYISWHRSMGWYRQAPGKERELVAGITFGGSTYYADSVKGRFTISRDNAKNTVYLQMNSLKPEDTAVYYCAAAYYRARGLQYWGQGTQVTVSS

SEQ ID NO: 14673 - protein, 117 aa, Artificial Sequence
  Chemically Synthesized
QVQLQESGGGLVQAGGSLRLSCAASGSISYWQIMGWYRQAPGKEREFVASIDYGSSTNYADSVKGRFTISRDNAKNTVYLQMNSLKPEDTAVYYCAVRWRWLNYRYWGQGTQVTVSS

SEQ ID NO: 14674 - protein, 117 aa, Artificial Sequence
  Chemically Synthesized
QVQLQESGGGLVQAGGSLRLSCAASGSIFRYRYMGWYRQAPGKERELVATINVGSTYYADSVKGRFTISRDNAKNTVYLQMNSLKPEDTAVYYCAVRKWFASQFDYWGQGTQVTVSS

SEQ ID NO: 14675 - protein, 118 aa, Artificial Sequence
  Chemically Synthesized
QVQLQESGGGLVQAGGSLRLSCAASGYIFGYTYMGWYRQAPGKERELVAGINRGTSTNYADSVKGRFTISRDNAKNTVYLQMNSLKPEDTAVYYCAAKSRGPWRHYYWGQGTQVTVSS

SEQ ID NO: 14676 - protein, 126 aa, Artificial Sequence
  Chemically Synthesized
QVQLQESGGGLVQAGGSLRLSCAASGSIFVYGYMGWYRQAPGKERELVAAIDIGGITNYADSVKGRFTISRDNAKNTVYLQMNSLKPEDTAVYYCAAYAYIYLDRYFDLDTYLIYWGQGTQVTVSS

SEQ ID NO: 14677 - protein, 118 aa, Artificial Sequence
  Chemically Synthesized
QVQLQESGGGLVQAGGSLRLSCAASGTIFVNLYMGWYRQAPGKERELVAAIALGSTTNYADSVKGRFTISRDNAKNTVYLQMNSLKPEDTAVYYCAVATFDAGLYQYWGQGTQVTVSS

SEQ ID NO: 14678 - protein, 121 aa, Artificial Sequence
  Chemically Synthesized
QVQLQESGGGLVQAGGSLRLSCAASGNISYLSYMGWYRQAPGKERELASIDIGSITNYADSVKGRFTISRDNAKNTVYLQMNSLKPEDTAVYYCAVQGYRTELAYDTHPYWGQGTQVTVSS

SEQ ID NO: 14679 - protein, 122 aa, Artificial Sequence
  Chemically Synthesized
QVQLQESGGGLVQAGGSLRLSCAASGNISKPYYMGWYRQAPGKEREFVAAIGAGGITYYADSVKGRFTISRDNAKNTVYLQMNSLKPEDTAVYYCAVAGSRYRGQYSRHYYWGQGTQVTVSS

SEQ ID NO: 14680 - protein, 118 aa, Artificial Sequence
  Chemically Synthesized
QVQLQESGGGLVQAGGSLRLSCAASGYIFARAAMGWYRQAPGKEREFVAAIAHGANTYYADSVKGRFTISRDNAKNTVYLQMNSLKPEDTAVYYCAVYVRLRRGLLYWGQGTQVTVSS

SEQ ID NO: 14681 - protein, 124 aa, Artificial Sequence
  Chemically Synthesized
QVQLQESGGGLVQAGGSLRLSCAASGTIFGVYGMGWYRQAPGKERELVATIDYGGITYYADSVKGRFTISRDNAKNTVYLQMNSLKPEDTAVYYCAAAVWQDVYDDATAYHQYWGQGTQVTVSS

SEQ ID NO: 14682 - protein, 126 aa, Artificial Sequence
  Chemically Synthesized
QVQLQESGGGLVQAGGSLRLSCAASGYISYDYNMGWYRQAPGKEREFVAGITYGGTTNYADSVKGRFTISRDNAKNTVYLQMNSLKPEDTAVYYCAAYALYYPYVYQPATAILRYWGQGTQVTVSS

SEQ ID NO: 14683 - protein, 122 aa, Artificial Sequence
  Chemically Synthesized
QVQLQESGGGLVQAGGSLRLSCAASGSISGEDDMGWYRQAPGKEREFVPVLLRVVIPYADSVKGRFTISRDNAKNTVYLQMNSLKPEDTAVYYCAAYGWPSRGGTEDVHSYWGQGTQVTVSS

SEQ ID NO: 14684 - protein, 118 aa, Artificial Sequence
  Chemically Synthesized
QVQLQESGGGLVQAGGSLRLSCAASGSIFFRIFMGWYRQAPGKEREFVAGISYGGNTNYADSVKGRFTISRDNAKNTVYLQMNSLKPEDTAVYYCAVGRYRYGGHWYWGQGTQVTVSS

SEQ ID NO: 14685 - protein, 126 aa, Artificial Sequence
  Chemically Synthesized
QVQLQESGGGLVQAGGSLRLSCAASGTISHRRPMGWYRQAPGKERELVAAITTGTITYYADSVKGRFTISRDNAKNTVYLQMNSLKPEDTAVYYCAVGGYRRDGSGKYYLRYHPYWGQGTQVTVSS

SEQ ID NO: 14686 - protein, 118 aa, Artificial Sequence
  Chemically Synthesized
QVQLQESGGGLVQAGGSLRLSCAASGYIFLLIEMGWYRQAPGKERELVASISYGGITNYADSVKGRFTISRDNAKNTVYLQMNSLKPEDTAVYYCAVLYPTVWSHTYWGQGTQVTVSS

SEQ ID NO: 14687 - protein, 126 aa, Artificial Sequence
  Chemically Synthesized
QVQLQESGGGLVQAGGSLRLSCAASGTIFYGSYMGWYRQAPGKEREFVAAIGIGASTYYADSVKGRFTISRDNAKNTVYLQMNSLKPEDTAVYYCAAYGYYKGYSVYAWLPNHSYWGQGTQVTVSS

SEQ ID NO: 14688 - protein, 126 aa, Artificial Sequence
  Chemically Synthesized
QVQLQESGGGLVQAGGSLRLSCAASGTISSTRLMGWYRQAPGKERELVAAIDTGGNTYYADSVKGRFTISRDNAKNTVYLQMNSLKPEDTAVYYCAAYGIGDYRQDDLHRVRFDYWGQGTQVTVSS

SEQ ID NO: 14689 - protein, 118 aa, Artificial Sequence
  Chemically Synthesized
QVQLQESGGGLVQAGGSLRLSCAASGYISSRRVMGWYRQAPGKERELVAAIAGGGSTYYADSVKGRFTISRDNAKNTVYLQMNSLKPEDTAVYYCAVLYGSRIGFRYWGQGTQVTVSS

SEQ ID NO: 14690 - protein, 118 aa, Artificial Sequence
  Chemically Synthesized
QVQLQESGGGLVQAGGSLRLSCAASGTIFVTIVMGWYRQAPGKERELVAGIGPGGITYYADSVKGRFTISRDNAKNTVYLQMNSLKPEDTAVYYCAARRFYSWRHDYWGQGTQVTVSS

SEQ ID NO: 14691 - protein, 118 aa, Artificial Sequence
  Chemically Synthesized
QVQLQESGGGLVQAGGSLRLSCAASGNISGRARMGWYRQAPGKEREFVATITSGSTTYYADSVKGRFTISRDNAKNTVYLQMNSLKPEDTAVYYCAAQLYRYYYHRYWGQGTQVTVSS

SEQ ID NO: 14692 - protein, 122 aa, Artificial Sequence
  Chemically Synthesized
QVQLQESGGGLVQAGGSLRLSCAASGNIFRYDSMGWYRQAPGKERELVAAIGSGSSTYYADSVKGRFTISRDNAKNTVYLQMNSLKPEDTAVYYCAVHASAGWRWWIQHWYWGQGTQVTVSS

SEQ ID NO: 14693 - protein, 121 aa, Artificial Sequence
  Chemically Synthesized
QVQLQESGGGLVQAGGSLRLSCAASGSISDVPMGWYRQAPGKERELVATIAPGGTTYYADSVKGRFTISRDNAKNTVYLQMNSLKPEDTAVYYCAVAYTYDDAGLAGLGYWGQGTQVTVSS

SEQ ID NO: 14694 - protein, 122 aa, Artificial Sequence
  Chemically Synthesized
QVQLQESGGGLVQAGGSLRLSCAASGTISYYLTMGWYRQAPGKERELVAAINYGGTTYYADSVKGRFTISRDNAKNTVYLQMNSLKPEDTAVYYCAVGLLPTGYDAALYDYWGQGTQVTVSS

SEQ ID NO: 14695 - protein, 118 aa, Artificial Sequence
  Chemically Synthesized
QVQLQESGGGLVQAGGSLRLSCAASGYISRQQYMGWYRQAPGKERELVASIAYGGNTNYADSVKGRFTISRDNAKNTVYLQMNSLKPEDTAVYYCAVTWRLYRYLSYWGQGTQVTVSS

SEQ ID NO: 14696 - protein, 126 aa, Artificial Sequence
  Chemically Synthesized
QVQLQESGGGLVQAGGSLRLSCAASGSISGYYDMGWYRQAPGKEREFVAGIAIGGNTYYADSVKGRFTISRDNAKNTVYLQMNSLKPEDTAVYYCAVAIRTKPYYLSEHKGWFRYWGQGTQVTVSS

SEQ ID NO: 14697 - protein, 126 aa, Artificial Sequence
  Chemically Synthesized
QVQLQESGGGLVQAGGSLRLSCAASGYIFRRKVMGWYRQAPGKEREFVATIDGGASTYYADSVKGRFTISRDNAKNTVYLQMNSLKPEDTAVYYCAVHWPGVRIHGADPYYYLLYWGQGTQVTVSS

SEQ ID NO: 14698 - protein, 118 aa, Artificial Sequence
  Chemically Synthesized
QVQLQESGGGLVQAGGSLRLSCAASGTIFGVHWMGWYRQAPGKERELVATIAYGGTTYYADSVKGRFTISRDNAKNTVYLQMNSLKPEDTAVYYCAAYSILWGLHTYWGQGTQVTVSS

SEQ ID NO: 14699 - protein, 126 aa, Artificial Sequence
  Chemically Synthesized
QVQLQESGGGLVQAGGSLRLSCAASGTIFRAQQMGWYRQAPGKERELVATINRGTTTYYADSVKGRFTISRDNAKNTVYLQMNSLKPEDTAVYYCAVWYIKPNRYRQRYYVNLYYWGQGTQVTVSS

SEQ ID NO: 14700 - protein, 117 aa, Artificial Sequence
  Chemically Synthesized
QVQLQESGGGLVQAGGSLRLSCAASGYISSSGTMGWYRQAPGKERELVAGITVGANTNYADSVKGRFTISRDNAKNTVYLQMNSLKPEDTAVYYCAAIDIDHSDHYWGQGTQVTVSS

SEQ ID NO: 14701 - protein, 118 aa, Artificial Sequence
  Chemically Synthesized
QVQLQESGGGLVQAGGSLRLSCAASGSIFRNKSMGWYRQAPGKERELVAAINDGAITNYADSVKGRFTISRDNAKNTVYLQMNSLKPEDTAVYYCAVSDVVQDYYGYWGQGTQVTVSS

SEQ ID NO: 14702 - protein, 122 aa, Artificial Sequence
  Chemically Synthesized
QVQLQESGGGLVQAGGSLRLSCAASGYISRAPVMGWYRQAPGKEREFVAAITVGASTYYADSVKGRFTISRDNAKNTVYLQMNSLKPEDTAVYYCAAAWRGTQYGTILYTYWGQGTQVTVSS

SEQ ID NO: 14703 - protein, 122 aa, Artificial Sequence
  Chemically Synthesized
QVQLQESGGGLVQAGGSLRLSCAASGSIFYATYMGWYRQAPGKERELVASIGRGANTNYADSVKGRFTISRDNAKNTVYLQMNSLKPEDTAVYYCAVGRRHIYTERARYAYWGQGTQVTVSS

SEQ ID NO: 14704 - protein, 125 aa, Artificial Sequence
  Chemically Synthesized
QVQLQESGGGLVQAGGSLRLSCAASGTIFWRGRMGWYRQAPGKERELVAAITRGGNTYYADSVKGRFTISRDNAKNTVYLQMNSLKPEDTAVYYCAVWTTYVPAWNITGRIHGYWGQGTQVTVSS

SEQ ID NO: 14705 - protein, 126 aa, Artificial Sequence
  Chemically Synthesized
QVQLQESGGGLVQAGGSLRLSCAASGYISPRNLMGWYRQAPGKERELVATIARGGNTNYADSVKGRFTISRDNAKNTVYLQMNSLKPEDTAVYYCAARLRSLRELHTWPSWGHVYWGQGTQVTVSS

SEQ ID NO: 14706 - protein, 122 aa, Artificial Sequence
  Chemically Synthesized
QVQLQESGGGLVQAGGSLRLSCAASGYIFWPSYMGWYRQAPGKERELVATIGWGTITNYADSVKGRFTISRDNAKNTVYLQMNSLKPEDTAVYYCAVHTRRSALYTQGHVYWGQGTQVTVSS

SEQ ID NO: 14707 - protein, 121 aa, Artificial Sequence
  Chemically Synthesized
QVQLQESGGGLVQAGGSLRLSCAASGTISPRVWMGWYRQAPGKERELVATIGYGSTTNYADSVKGRFTISRDNAKNTVYLQMNSLKPEDTAVYYCAFWLTTGVLTLTTIYWGQGTQVTVSS

SEQ ID NO: 14708 - protein, 116 aa, Artificial Sequence
  Chemically Synthesized
QVQLQESGGGLVQAGGSLRLSCAASGTIFVPAEMGWYRQAPGKEREFVAAISYGASTNYADSVKGRFTISRDNAKNTVYLQMNSLKPEDTAVYYCAAYYWLRLNYWGQGTQVTVSS

SEQ ID NO: 14709 - protein, 118 aa, Artificial Sequence
  Chemically Synthesized
QVQLQESGGGLVQAGGSLRLSCAASGTIFKPRDMGWYRQAPGKERELVASIAYGGTTYYADSVKGRFTISRDNAKNTVYLQMNSLKPEDTAVYYCAARPVWWRGHYYWGQGTQVTVSS

SEQ ID NO: 14710 - protein, 121 aa, Artificial Sequence
  Chemically Synthesized
QVQLQESGGGLVQAGGSLRLSCAASGYILVILMGWYRQAPGKEREFVAAIGYGGNTYYADSVKGRFTISRDNAKNTVYLQMNSLKPEDTAVYYCAAHYYVGDGVNDIYYYWGQGTQVTVSS

SEQ ID NO: 14711 - protein, 118 aa, Artificial Sequence
  Chemically Synthesized
QVQLQESGGGLVQAGGSLRLSCAASGSIFDLADMGWYRQAPGKEREFVATITPGGNTNYADSVKGRFTISRDNAKNTVYLQMNSLKPEDTAVYYCAALWAYASLLVYWGQGTQVTVSS

SEQ ID NO: 14712 - protein, 117 aa, Artificial Sequence
  Chemically Synthesized
QVQLQESGGGLVQAGGSLRLSCAASGSISDPYRMGWYRQAPGKERELVAAIGSGAITYYADSVKGRFTISRDNAKNTVYLQMNSLKPEDTAVYYCAVDAQYTQLIYWGQGTQVTVSS

SEQ ID NO: 14713 - protein, 118 aa, Artificial Sequence
  Chemically Synthesized
QVQLQESGGGLVQAGGSLRLSCAASGNIFPHPEMGWYRQAPGKEREFVASIARGGNTYYADSVKGRFTISRDNAKNTVYLQMNSLKPEDTAVYYCAVRRGWRYAHFYWGQGTQVTVSS

SEQ ID NO: 14714 - protein, 118 aa, Artificial Sequence
  Chemically Synthesized
QVQLQESGGGLVQAGGSLRLSCAASGSISSGIIMGWYRQAPGKERELVAAIDSGGNTYYADSVKGRFTISRDNAKNTVYLQMNSLKPEDTAVYYCAAGYRYPYIYGYWGQGTQVTVSS

SEQ ID NO: 14715 - protein, 122 aa, Artificial Sequence
  Chemically Synthesized
QVQLQESGGGLVQAGGSLRLSCAASGTISLDIGMGWYRQAPGKERELVAAIGFGTTTYYADSVKGRFTISRDNAKNTVYLQMNSLKPEDTAVYYCAAGYDGGYYTYYYYYYWGQGTQVTVSS

SEQ ID NO: 14716 - protein, 118 aa, Artificial Sequence
  Chemically Synthesized
QVQLQESGGGLVQAGGSLRLSCAASGNIFIRRDMGWYRQAPGKEREFVAAIDLGANTYYADSVKGRFTISRDNAKNTVYLQMNSLKPEDTAVYYCAAWSIRARRFGYWGQGTQVTVSS

SEQ ID NO: 14717 - protein, 122 aa, Artificial Sequence
  Chemically Synthesized
QVQLQESGGGLVQAGGSLRLSCAASGYIFGRVYMGWYRQAPGKERELVASIGRGSTTNYADSVKGRFTISRDNAKNTVYLQMNSLKPEDTAVYYCAAYGVSRFAIRYTYYYWGQGTQVTVSS

SEQ ID NO: 14718 - protein, 118 aa, Artificial Sequence
  Chemically Synthesized
QVQLQESGGGLVQAGGSLRLSCAASGYISYYFYMGWYRQAPGKEREFVASIGYGGTTYYADSVKGRFTISRDNAKNTVYLQMNSLKPEDTAVYYCAAVNGYETRFWYWGQGTQVTVSS

SEQ ID NO: 14719 - protein, 122 aa, Artificial Sequence
  Chemically Synthesized
QVQLQESGGGLVQAGGSLRLSCAASGTISPDVVMGWYRQAPGKERELVATITHGGSTNYADSVKGRFTISRDNAKNTVYLQMNSLKPEDTAVYYCAAVPTGNQDWEDDYLYWGQGTQVTVSS

SEQ ID NO: 14720 - protein, 118 aa, Artificial Sequence
  Chemically Synthesized
QVQLQESGGGLVQAGGSLRLSCAASGYISYWDTMGWYRQAPGKEREFVAAITYGTSTNYADSVKGRFTISRDNAKNTVYLQMNSLKPEDTAVYYCAVSRRRIHVHVYWGQGTQVTVSS

SEQ ID NO: 14721 - protein, 126 aa, Artificial Sequence
  Chemically Synthesized
QVQLQESGGGLVQAGGSLRLSCAASGNISRVVTMGWYRQAPGKERELVASIAQGATTYYADSVKGRFTISRDNAKNTVYLQMNSLKPEDTAVYYCAVEPQRNLLLSLYHAPFHSYWGQGTQVTVSS

SEQ ID NO: 14722 - protein, 118 aa, Artificial Sequence
  Chemically Synthesized
QVQLQESGGGLVQAGGSLRLSCAASGSISTYYAMGWYRQAPGKERELVAGIDYGASTYYADSVKGRFTISRDNAKNTVYLQMNSLKPEDTAVYYCAVTNLGADGFDYWGQGTQVTVSS

SEQ ID NO: 14723 - protein, 116 aa, Artificial Sequence
  Chemically Synthesized
QVQLQESGGGLVQAGGSLRLSCAASGYISDPGHMGWYRQAPGKEREFVAGIAYVIPYADSVKGRFTISRDNAKNTVYLQMNSLKPEDTAVYYCAAVRGYARYFGYWGQGTQVTVSS

SEQ ID NO: 14724 - protein, 122 aa, Artificial Sequence
  Chemically Synthesized
QVQLQESGGGLVQAGGSLRLSCAASGNISNYRAMGWYRQAPGKEREFVATIDQGTNTYYADSVKGRFTISRDNAKNTVYLQMNSLKPEDTAVYYCAVDPADQGYRDIGHPYWGQGTQVTVSS

SEQ ID NO: 14725 - protein, 120 aa, Artificial Sequence
  Chemically Synthesized
QVQLQESGGGLVQAGGSLRLSCAASGSISDVDMGWYRQAPGKERELVATINMVVVPYADSVKGRFTISRDNAKNTVYLQMNSLKPEDTAVYYCAVDVDIAYGDTRPYDYWGQGTQVTVSS

SEQ ID NO: 14726 - protein, 118 aa, Artificial Sequence
  Chemically Synthesized
QVQLQESGGGLVQAGGSLRLSCAASGSISAFAVMGWYRQAPGKEREFVAGISYGTSTYYADSVKGRFTISRDNAKNTVYLQMNSLKPEDTAVYYCAVLHYNESDFDYWGQGTQVTVSS

SEQ ID NO: 14727 - protein, 114 aa, Artificial Sequence
  Chemically Synthesized
QVQLQESGGGLVQAGGSLRLSCAASGSISPSVMGWYRQAPGKEREFVAGITEGGNTYYADSVKGRFTISRDNAKNTVYLQMNSLKPEDTAVYYCAALTTTLIYWGQGTQVTVSS

SEQ ID NO: 14728 - protein, 119 aa, Artificial Sequence
  Chemically Synthesized
QVQLQESGGGLVQAGGSLRLSCAASGTISVYATMGWYRQAPGKERELVATIGYGTTTYYADSVKGRFTISRDNAKNTVYLQMNSLKPEDTAVYYCAVTATYRPYRYGYWGQGTQVTVSS

SEQ ID NO: 14729 - protein, 118 aa, Artificial Sequence
  Chemically Synthesized
QVQLQESGGGLVQAGGSLRLSCAASGTIFDYYGMGWYRQAPGKERELVASINDGSSTNYADSVKGRFTISRDNAKNTVYLQMNSLKPEDTAVYYCAADVDHLRDLGYWGQGTQVTVSS

SEQ ID NO: 14730 - protein, 118 aa, Artificial Sequence
  Chemically Synthesized
QVQLQESGGGLVQAGGSLRLSCAASGNISHTNLMGWYRQAPGKEREFVAGINVGSITNYADSVKGRFTISRDNAKNTVYLQMNSLKPEDTAVYYCAAQPYYNRDHRYWGQGTQVTVSS

SEQ ID NO: 14731 - protein, 117 aa, Artificial Sequence
  Chemically Synthesized
QVQLQESGGGLVQAGGSLRLSCAASGTIFPSLMGWYRQAPGKERELVATISPGGSTNYADSVKGRFTISRDNAKNTVYLQMNSLKPEDTAVYYCAVIVLAYYLFGYWGQGTQVTVSS

SEQ ID NO: 14732 - protein, 118 aa, Artificial Sequence
  Chemically Synthesized
QVQLQESGGGLVQAGGSLRLSCAASGYISDQFYMGWYRQAPGKERELVATISGGGTTYYADSVKGRFTISRDNAKNTVYLQMNSLKPEDTAVYYCAVFGRVPIVYLYWGQGTQVTVSS

SEQ ID NO: 14733 - protein, 118 aa, Artificial Sequence
  Chemically Synthesized
QVQLQESGGGLVQAGGSLRLSCAASGYISRWINMGWYRQAPGKERELVASITRGTITNYADSVKGRFTISRDNAKNTVYLQMNSLKPEDTAVYYCAAYYQGWRVHNYWGQGTQVTVSS

SEQ ID NO: 14734 - protein, 118 aa, Artificial Sequence
  Chemically Synthesized
QVQLQESGGGLVQAGGSLRLSCAASGYISGDGAMGWYRQAPGKEREFVAGITLGATTYYADSVKGRFTISRDNAKNTVYLQMNSLKPEDTAVYYCAVDYGSTRAHHYWGQGTQVTVSS

SEQ ID NO: 14735 - protein, 118 aa, Artificial Sequence
  Chemically Synthesized
QVQLQESGGGLVQAGGSLRLSCAASGTISAWYGMGWYRQAPGKERELVAGISRGATTYYADSVKGRFTISRDNAKNTVYLQMNSLKPEDTAVYYCAALLYARWGFYYWGQGTQVTVSS

SEQ ID NO: 14736 - protein, 116 aa, Artificial Sequence
  Chemically Synthesized
QVQLQESGGGLVQAGGSLRLSCAASGNISQRGGMGWYRQAPGKEREFVATINDGGNTNYADSVKGRFTISRDNAKNTVYLQMNSLKPEDTAVYYCAARISADDGYWGQGTQVTVSS

SEQ ID NO: 14737 - protein, 117 aa, Artificial Sequence
  Chemically Synthesized
QVQLQESGGGLVQAGGSLRLSCAASGTIFSSYMGWYRQAPGKERELVAGITYGTSTNYADSVKGRFTISRDNAKNTVYLQMNSLKPEDTAVYYCAVQLVPLIPFFYWGQGTQVTVSS

SEQ ID NO: 14738 - protein, 118 aa, Artificial Sequence
  Chemically Synthesized
QVQLQESGGGLVQAGGSLRLSCAASGYISLRRQMGWYRQAPGKERELVAGITFGGTTYYADSVKGRFTISRDNAKNTVYLQMNSLKPEDTAVYYCAAVGGRYFRHGYWGQGTQVTVSS

SEQ ID NO: 14739 - protein, 118 aa, Artificial Sequence
  Chemically Synthesized
QVQLQESGGGLVQAGGSLRLSCAASGYISVDAYMGWYRQAPGKERELVATITFGGITYYADSVKGRFTISRDNAKNTVYLQMNSLKPEDTAVYYCAVPTPYVADYWYWGQGTQVTVSS

SEQ ID NO: 14740 - protein, 118 aa, Artificial Sequence
  Chemically Synthesized
QVQLQESGGGLVQAGGSLRLSCAASGYISQTHYMGWYRQAPGKEREFVATIGQGAITNYADSVKGRFTISRDNAKNTVYLQMNSLKPEDTAVYYCAVIYNFWDVFGYWGQGTQVTVSS

SEQ ID NO: 14741 - protein, 118 aa, Artificial Sequence
  Chemically Synthesized
QVQLQESGGGLVQAGGSLRLSCAASGSISYRRKMGWYRQAPGKEREFVASISRGSITNYADSVKGRFTISRDNAKNTVYLQMNSLKPEDTAVYYCAAQPRYSWVYTYWGQGTQVTVSS

SEQ ID NO: 14742 - protein, 118 aa, Artificial Sequence
  Chemically Synthesized
QVQLQESGGGLVQAGGSLRLSCAASGTISGYTRMGWYRQAPGKERELVAAINYGTSTYYADSVKGRFTISRDNAKNTVYLQMNSLKPEDTAVYYCAVYRGISRRYPYWGQGTQVTVSS

SEQ ID NO: 14743 - protein, 117 aa, Artificial Sequence
  Chemically Synthesized
QVQLQESGGGLVQAGGSLRLSCAASGNIFYTGYMGWYRQAPGKEREFVATIGRGTSTNYADSVKGRFTISRDNAKNTVYLQMNSLKPEDTAVYYCAYHRPYRWYAYWGQGTQVTVSS

SEQ ID NO: 14744 - protein, 122 aa, Artificial Sequence
  Chemically Synthesized
QVQLQESGGGLVQAGGSLRLSCAASGYISYPSYMGWYRQAPGKERELVAAISAGASTNYADSVKGRFTISRDNAKNTVYLQMNSLKPEDTAVYYCAVTGPSSRGRIDAYPYWGQGTQVTVSS

SEQ ID NO: 14745 - protein, 123 aa, Artificial Sequence
  Chemically Synthesized
QVQLQESGGGLVQAGGSLRLSCAASGSISGDVYMGWYRQAPGKERELVAAISGGSTTYADSVKGRFTISRDNAKNTVYLQMNSLKPEDTAVYYCAVVAGYQDDAYDPYALPYWGQGTQVTVSS

SEQ ID NO: 14746 - protein, 110 aa, Artificial Sequence
  Chemically Synthesized
QVQLQESGGGLVQAGGSLRLSCAASGTISPADDMGWYRQAPGKEREFVASITVGGIPYADSVKGRFTISRDNAKNTVYLQMNSLKPEDTAVYYCAAHYYWGQGTQVTVSS

SEQ ID NO: 14747 - protein, 126 aa, Artificial Sequence
  Chemically Synthesized
QVQLQESGGGLVQAGGSLRLSCAASGTISYTSSMGWYRQAPGKERELVATIGYGTSTNYADSVKGRFTISRDNAKNTVYLQMNSLKPEDTAVYYCAVIRVAPGAWHIIYDAEYYYWGQGTQVTVSS

SEQ ID NO: 14748 - protein, 111 aa, Artificial Sequence
  Chemically Synthesized
QVQLQESGGGLVQAGGSLRLSCAASGNIFGWYYMGWYRQAPGKEREFVAGIAYGGTTYYADSVKGRFTISRDNAKNTVYLQMNSLKPEDTAVYYCAAHGYWGQGTQVTVSS

SEQ ID NO: 14749 - protein, 118 aa, Artificial Sequence
  Chemically Synthesized
QVQLQESGGGLVQAGGSLRLSCAASGYIFRRINMGWYRQAPGKERELVAAIAYGGTTNYADSVKGRFTISRDNAKNTVYLQMNSLKPEDTAVYYCAAHLRRYARYRYWGQGTQVTVSS

SEQ ID NO: 14750 - protein, 126 aa, Artificial Sequence
  Chemically Synthesized
QVQLQESGGGLVQAGGSLRLSCAASGTISSHVYMGWYRQAPGKERELVAAITDGTTTYYADSVKGRFTISRDNAKNTVYLQMNSLKPEDTAVYYCAAYPDTSRYYDPPAYWYHWYWGQGTQVTVSS

SEQ ID NO: 14751 - protein, 117 aa, Artificial Sequence
  Chemically Synthesized
QVQLQESGGGLVQAGGSLRLSCAASGSIFSLTMGWYRQAPGKEREFVATINYGSTTYYADSVKGRFTISRDNAKNTVYLQMNSLKPEDTAVYYCAVNGGWYPSYYYWGQGTQVTVSS

SEQ ID NO: 14752 - protein, 119 aa, Artificial Sequence
  Chemically Synthesized
QVQLQESGGGLVQAGGSLRLSCAASGNIFRRVSMGWYRQAPGKERELVAAINYGGITYYADSVKGRFTISRDNAKNTVYLQMNSLKPEDTAVYYCAVYRAWRYRGHPYWGQGTQVTVSS

SEQ ID NO: 14753 - protein, 118 aa, Artificial Sequence
  Chemically Synthesized
QVQLQESGGGLVQAGGSLRLSCAASGSISRGKSMGWYRQAPGKEREFVAAINGGSTTYYADSVKGRFTISRDNAKNTVYLQMNSLKPEDTAVYYCAVYYWRRSRLGYWGQGTQVTVSS

SEQ ID NO: 14754 - protein, 122 aa, Artificial Sequence
  Chemically Synthesized
QVQLQESGGGLVQAGGSLRLSCAASGNIFSDATMGWYRQAPGKERELVAGIGSGGTTNYADSVKGRFTISRDNAKNTVYLQMNSLKPEDTAVYYCAARRGYGLVRPWSHAYWGQGTQVTVSS

SEQ ID NO: 14755 - protein, 117 aa, Artificial Sequence
  Chemically Synthesized
QVQLQESGGGLVQAGGSLRLSCAASGTICYYLMGWYRQAPGKERELVASISDGSNTNYADSVKGRFTISRDNAKNTVYLQMNSLKPEDTAVYYCAAYNWDTITFSYWGQGTQVTVSS

SEQ ID NO: 14756 - protein, 114 aa, Artificial Sequence
  Chemically Synthesized
QVQLQESGGGLVQAGGSLRLSCAASGNIFRIWYMGWYRQAPGKEREFVATINIGTSTNYADSVKGRFTISRDNAKNTVYLQMNSLKPEDTAVYYCAAGVRLRYWGQGTQVTVSS

SEQ ID NO: 14757 - protein, 118 aa, Artificial Sequence
  Chemically Synthesized
QVQLQESGGGLVQAGGSLRLSCAASGNIFFQTNMGWYRQAPGKERELVASINRGANTNYADSVKGRFTISRDNAKNTVYLQMNSLKPEDTAVYYCAANYRLHRWYRYWGQGTQVTVSS

SEQ ID NO: 14758 - protein, 122 aa, Artificial Sequence
  Chemically Synthesized
QVQLQESGGGLVQAGGSLRLSCAASGNIFFTQSMGWYRQAPGKERELVAAINFGTNTNYADSVKGRFTISRDNAKNTVYLQMNSLKPEDTAVYYCAAVDLYNYRYAAPHGYWGQGTQVTVSS

SEQ ID NO: 14759 - protein, 122 aa, Artificial Sequence
  Chemically Synthesized
QVQLQESGGGLVQAGGSLRLSCAASGYISYYRQMGWYRQAPGKEREFVASIGRGTSTNYADSVKGRFTISRDNAKNTVYLQMNSLKPEDTAVYYCAVLKRYVPYTNNYFTYWGQGTQVTVSS

SEQ ID NO: 14760 - protein, 118 aa, Artificial Sequence
  Chemically Synthesized
QVQLQESGGGLVQAGGSLRLSCAASGNIFRRVGMGWYRQAPGKEREFVASISYGATTYYADSVKGRFTISRDNAKNTVYLQMNSLKPEDTAVYYCAVYWGYSRIHLYWGQGTQVTVSS

SEQ ID NO: 14761 - protein, 118 aa, Artificial Sequence
  Chemically Synthesized
QVQLQESGGGLVQAGGSLRLSCAASGYISSYTYMGWYRQAPGKERELVASITTGGSTNYADSVKGRFTISRDNAKNTVYLQMNSLKPEDTAVYYCAVQAYAVYRFGYWGQGTQVTVSS

SEQ ID NO: 14762 - protein, 122 aa, Artificial Sequence
  Chemically Synthesized
QVQLQESGGGLVQAGGSLRLSCAASGNIFSLRYMGWYRQAPGKEREFVASIGYGATTNYADSVKGRFTISRDNAKNTVYLQMNSLKPEDTAVYYCAVSYYRVTYDNYQHVYWGQGTQVTVSS

SEQ ID NO: 14763 - protein, 118 aa, Artificial Sequence
  Chemically Synthesized
QVQLQESGGGLVQAGGSLRLSCAASGSIFLFQYMGWYRQAPGKERELVASITVGGITNYADSVKGRFTISRDNAKNTVYLQMNSLKPEDTAVYYCAATRRRAFRFGYWGQGTQVTVSS

SEQ ID NO: 14764 - protein, 119 aa, Artificial Sequence
  Chemically Synthesized
QVQLQESGGGLVQAGGSLRLSCAASGSISVYTIMGWYRQAPGKERELVAGISTGGSTNYADSVKGRFTISRDNAKNTVYLQMNSLKPEDTAVYYCAVDYRQYDDFHGYWGQGTQVTVSS

SEQ ID NO: 14765 - protein, 122 aa, Artificial Sequence
  Chemically Synthesized
QVQLQESGGGLVQAGGSLRLSCAASGNISRATLMGWYRQAPGKERELVAAIDTGSSTYYADSVKGRFTISRDNAKNTVYLQMNSLKPEDTAVYYCAAYAQQNHRYRYQFGYWGQGTQVTVSS

SEQ ID NO: 14766 - protein, 118 aa, Artificial Sequence
  Chemically Synthesized
QVQLQESGGGLVQAGGSLRLSCAASGYIFEGTYMGWYRQAPGKEREFVAGIGVGGTTYYADSVKGRFTISRDNAKNTVYLQMNSLKPEDTAVYYCAATSDPAKYLDYWGQGTQVTVSS

SEQ ID NO: 14767 - protein, 117 aa, Artificial Sequence
  Chemically Synthesized
QVQLQESGGGLVQAGGSLRLSCAASGSIFYSLMGWYRQAPGKERELVAAIGDGASTNYADSVKGRFTISRDNAKNTVYLQMNSLKPEDTAVYYCAADEYGLGPYVYWGQGTQVTVSS

SEQ ID NO: 14768 - protein, 122 aa, Artificial Sequence
  Chemically Synthesized
QVQLQESGGGLVQAGGSLRLSCAASGNISYWAFMGWYRQAPGKEREFVAGITYGAITNYADSVKGRFTISRDNAKNTVYLQMNSLKPEDTAVYYCAAGYLDWWYDGYAFRYWGQGTQVTVSS

SEQ ID NO: 14769 - protein, 114 aa, Artificial Sequence
  Chemically Synthesized
QVQLQESGGGLVQAGGSLRLSCAASGYISANALMGWYRQAPGKERELVAGIALVVLPYADSVKGRFTISRDNAKNTVYLQMNSLKPEDTAVYYCAADIYDYVYWGQGTQVTVSS

SEQ ID NO: 14770 - protein, 118 aa, Artificial Sequence
  Chemically Synthesized
QVQLQESGGGLVQAGGSLRLSCAASGYISGRYVMGWYRQAPGKERELVAAITKGGNTYYADSVKGRFTISRDNAKNTVYLQMNSLKPEDTAVYYCAARIRRWANYGYWGQGTQVTVSS

SEQ ID NO: 14771 - protein, 126 aa, Artificial Sequence
  Chemically Synthesized
QVQLQESGGGLVQAGGSLRLSCAASGYISEYIDMGWYRQAPGKEREFVASIGYGSITNYADSVKGRFTISRDNAKNTVYLQMNSLKPEDTAVYYCAATDRYGYFYWDYDGGRFTYWGQGTQVTVSS

SEQ ID NO: 14772 - protein, 122 aa, Artificial Sequence
  Chemically Synthesized
QVQLQESGGGLVQAGGSLRLSCAASGTIFRPQVMGWYRQAPGKERELVAGISYGGTTYYADSVKGRFTISRDNAKNTVYLQMNSLKPEDTAVYYCAVLPFTATVGYYGLKYWGQGTQVTVSS

SEQ ID NO: 14773 - protein, 122 aa, Artificial Sequence
  Chemically Synthesized
QVQLQESGGGLVQAGGSLRLSCAASGYISIGKRMGWYRQAPGKERELVASINRGGTTYYADSVKGRFTISRDNAKNTVYLQMNSLKPEDTAVYYCAARGWRNAQNWVYHLYWGQGTQVTVSS

SEQ ID NO: 14774 - protein, 116 aa, Artificial Sequence
  Chemically Synthesized
QVQLQESGGGLVQAGGSLRLSCAASGSIFDPLIMGWYRQAPGKEREFVAVITVLLHYADSVKGRFTISRDNAKNTVYLQMNSLKPEDTAVYYCAAGDYVYDTLAYWGQGTQVTVSS

SEQ ID NO: 14775 - protein, 118 aa, Artificial Sequence
  Chemically Synthesized
QVQLQESGGGLVQAGGSLRLSCAASGTIFLDDYMGWYRQAPGKERELVATIGDGATTYYADSVKGRFTISRDNAKNTVYLQMNSLKPEDTAVYYCAVYYIPDYIHYYWGQGTQVTVSS

SEQ ID NO: 14776 - protein, 122 aa, Artificial Sequence
  Chemically Synthesized
QVQLQESGGGLVQAGGSLRLSCAASGNISRHPYMGWYRQAPGKEREFVATIGWGTTTYYADSVKGRFTISRDNAKNTVYLQMNSLKPEDTAVYYCAVHPRYRTPTRYPYVYWGQGTQVTVSS

SEQ ID NO: 14777 - protein, 118 aa, Artificial Sequence
  Chemically Synthesized
QVQLQESGGGLVQAGGSLRLSCAASGYISPYGRMGWYRQAPGKERELVASIAYGTTTYYADSVKGRFTISRDNAKNTVYLQMNSLKPEDTAVYYCAADLQQYPSHYYWGQGTQVTVSS

SEQ ID NO: 14778 - protein, 118 aa, Artificial Sequence
  Chemically Synthesized
QVQLQESGGGLVQAGGSLRLSCAASGNIFYVRDMGWYRQAPGKERELVASITSGGSTNYADSVKGRFTISRDNAKNTVYLQMNSLKPEDTAVYYCAARNRYRSRHLYWGQGTQVTVSS

SEQ ID NO: 14779 - protein, 125 aa, Artificial Sequence
  Chemically Synthesized
QVQLQESGGGLVQAGGSLRLSCAASGTIFAFWSMGWYRQAPGKERELVAGINLGATTYYADSVKGRFTISRDNAKNTVYLQMNSLKPEDTAVYYCAVRRWTARYWPGKVGSHNYWGQGTQVTVSS

SEQ ID NO: 14780 - protein, 125 aa, Artificial Sequence
  Chemically Synthesized
QVQLQESGGGLVQAGGSLRLSCAASGNISGAGSMGWYRQAPGKEREFVAAITSGSTTYYADSVKGRFTISRDNAKNTVYLQMNSLKPEDTAVYYCAVGQQLNGYWHPDSSVTLYWGQGTQVTVSS

SEQ ID NO: 14781 - protein, 118 aa, Artificial Sequence
  Chemically Synthesized
QVQLQESGGGLVQAGGSLRLSCAASGTIFYIRQMGWYRQAPGKERELVATISYGSNTNYADSVKGRFTISRDNAKNTVYLQMNSLKPEDTAVYYCAVVRGRYRYFDYWGQGTQVTVSS

SEQ ID NO: 14782 - protein, 118 aa, Artificial Sequence
  Chemically Synthesized
QVQLQESGGGLVQAGGSLRLSCAASGTISEVYYMGWYRQAPGKERELVAAIAYGSSTNYADSVKGRFTISRDNAKNTVYLQMNSLKPEDTAVYYCAAFTSLRSPYFYWGQGTQVTVSS

SEQ ID NO: 14783 - protein, 111 aa, Artificial Sequence
  Chemically Synthesized
QVQLQESGGGLVQAGGSLRLSCAASGNISSYPWMGWYRQAPGKEREFVAAINFGGNTYYADSVKGRFTISRDNAKNTVYLQMNSLKPEDTAVYYCAVHRYWGQGTQVTVSS

SEQ ID NO: 14784 - protein, 118 aa, Artificial Sequence
  Chemically Synthesized
QVQLQESGGGLVQAGGSLRLSCAASGSISGSRYMGWYRQAPGKEREFVAGITRGSNTYYADSVKGRFTISRDNAKNTVYLQMNSLKPEDTAVYYCAAWGYRYYRYAYWGQGTQVTVSS

SEQ ID NO: 14785 - protein, 126 aa, Artificial Sequence
  Chemically Synthesized
QVQLQESGGGLVQAGGSLRLSCAASGSIFWPRTMGWYRQAPGKERELVATISRGSNTYYADSVKGRFTISRDNAKNTVYLQMNSLKPEDTAVYYCAANPRFGGRGYYHYRAPYDYWGQGTQVTVSS

SEQ ID NO: 14786 - protein, 118 aa, Artificial Sequence
  Chemically Synthesized
QVQLQESGGGLVQAGGSLRLSCAASGTISYVRAMGWYRQAPGKERELVAGIDLGAITYYADSVKGRFTISRDNAKNTVYLQMNSLKPEDTAVYYCAVRYRRYFYHHYWGQGTQVTVSS

SEQ ID NO: 14787 - protein, 122 aa, Artificial Sequence
  Chemically Synthesized
QVQLQESGGGLVQAGGSLRLSCAASGTIFYLDYMGWYRQAPGKERELVASIGDGTNTNYADSVKGRFTISRDNAKNTVYLQMNSLKPEDTAVYYCAAANFLDHYGVDLFLYWGQGTQVTVSS

SEQ ID NO: 14788 - protein, 118 aa, Artificial Sequence
  Chemically Synthesized
QVQLQESGGGLVQAGGSLRLSCAASGNIFPGPLMGWYRQAPGKEREFVAGIADGGSTYYADSVKGRFTISRDNAKNTVYLQMNSLKPEDTAVYYCAVAARTGPRYDYWGQGTQVTVSS

SEQ ID NO: 14789 - protein, 122 aa, Artificial Sequence
  Chemically Synthesized
QVQLQESGGGLVQAGGSLRLSCAASGTIFTIERMGWYRQAPGKERELVAGIAGGTTTYYADSVKGRFTISRDNAKNTVYLQMNSLKPEDTAVYYCAVYVTWDAYYIYRFAYWGQGTQVTVSS

SEQ ID NO: 14790 - protein, 118 aa, Artificial Sequence
  Chemically Synthesized
QVQLQESGGGLVQAGGSLRLSCAASGYISHYGIMGWYRQAPGKEREFVATINGGANTNYADSVKGRFTISRDNAKNTVYLQMNSLKPEDTAVYYCAVYAWRRRGHGYWGQGTQVTVSS

SEQ ID NO: 14791 - protein, 118 aa, Artificial Sequence
  Chemically Synthesized
QVQLQESGGGLVQAGGSLRLSCAASGTIFVYRYMGWYRQAPGKERELVAGIGWGANTYYADSVKGRFTISRDNAKNTVYLQMNSLKPEDTAVYYCAAARRFQGHLYYWGQGTQVTVSS

SEQ ID NO: 14792 - protein, 126 aa, Artificial Sequence
  Chemically Synthesized
QVQLQESGGGLVQAGGSLRLSCAASGNIFVYRKMGWYRQAPGKERELVASIGYGGTTYYADSVKGRFTISRDNAKNTVYLQMNSLKPEDTAVYYCAAYRRYGRYRWDTYTGTFGYWGQGTQVTVSS

SEQ ID NO: 14793 - protein, 122 aa, Artificial Sequence
  Chemically Synthesized
QVQLQESGGGLVQAGGSLRLSCAASGYISLLYTMGWYRQAPGKEREFVAAIDTGTITNYADSVKGRFTISRDNAKNTVYLQMNSLKPEDTAVYYCAVTSGCLRYLYSRYVYWGQGTQVTVSS

SEQ ID NO: 14794 - protein, 118 aa, Artificial Sequence
  Chemically Synthesized
QVQLQESGGGLVQAGGSLRLSCAASGTISNYDTMGWYRQAPGKEREFVASIGYGATTYYADSVKGRFTISRDNAKNTVYLQMNSLKPEDTAVYYCAAPPFVAAWFVYWGQGTQVTVSS

SEQ ID NO: 14795 - protein, 118 aa, Artificial Sequence
  Chemically Synthesized
QVQLQESGGGLVQAGGSLRLSCAASGTISYLWYMGWYRQAPGKEREFVAGIASGGTTNYADSVKGRFTISRDNAKNTVYLQMNSLKPEDTAVYYCAVYYRHYRTHLYWGQGTQVTVSS

SEQ ID NO: 14796 - protein, 118 aa, Artificial Sequence
  Chemically Synthesized
QVQLQESGGGLVQAGGSLRLSCAASGSIFGFAYMGWYRQAPGKEREFVAAINDGGNTYYADSVKGRFTISRDNAKNTVYLQMNSLKPEDTAVYYCAVHELYANRHTYWGQGTQVTVSS

SEQ ID NO: 14797 - protein, 118 aa, Artificial Sequence
  Chemically Synthesized
QVQLQESGGGLVQAGGSLRLSCAASGYIFRYVRMGWYRQAPGKEREFVAAIGTGSNTYYADSVKGRFTISRDNAKNTVYLQMNSLKPEDTAVYYCAASRRAVVTHRYWGQGTQVTVSS

SEQ ID NO: 14798 - protein, 111 aa, Artificial Sequence
  Chemically Synthesized
QVQLQESGGGLVQAGGSLRLSCAASGYISFPVGMGWYRQAPGKEREFVATYYADSVKGRFTISRDNAKNTVYLQMNSLKPEDTAVYYCAVDAYHVGNHPYWGQGTQVTVSS

SEQ ID NO: 14799 - protein, 118 aa, Artificial Sequence
  Chemically Synthesized
QVQLQESGGGLVQAGGSLRLSCAASGYIFLKDTMGWYRQAPGKEREFVAAITDGTITYYADSVKGRFTISRDNAKNTVYLQMNSLKPEDTAVYYCAVGTGQTLWHDYWGQGTQVTVSS

SEQ ID NO: 14800 - protein, 118 aa, Artificial Sequence
  Chemically Synthesized
QVQLQESGGGLVQAGGSLRLSCAASGTIFGSHSMGWYRQAPGKEREFVASIGVGGITYYADSVKGRFTISRDNAKNTVYLQMNSLKPEDTAVYYCAAETVPYYYLGYWGQGTQVTVSS

SEQ ID NO: 14801 - protein, 122 aa, Artificial Sequence
  Chemically Synthesized
QVQLQESGGGLVQAGGSLRLSCAASGTIFRWYHMGWYRQAPGKEREFVAAISPGGNTYYADSVKGRFTISRDNAKNTVYLQMNSLKPEDTAVYYCAVPGLGWRRFGIYHYYWGQGTQVTVSS

SEQ ID NO: 14802 - protein, 118 aa, Artificial Sequence
  Chemically Synthesized
QVQLQESGGGLVQAGGSLRLSCAASGTISYPFRMGWYRQAPGKEREFVATIASGGSTYYADSVKGRFTISRDNAKNTVYLQMNSLKPEDTAVYYCAARYVFQYTHRYWGQGTQVTVSS

SEQ ID NO: 14803 - protein, 118 aa, Artificial Sequence
  Chemically Synthesized
QVQLQESGGGLVQAGGSLRLSCAASGTIFRAPPMGWYRQAPGKEREFVAAIDYGGSTYYADSVKGRFTISRDNAKNTVYLQMNSLKPEDTAVYYCAVKARIYTRYPYWGQGTQVTVSS

SEQ ID NO: 14804 - protein, 126 aa, Artificial Sequence
  Chemically Synthesized
QVQLQESGGGLVQAGGSLRLSCAASGSISDTLYMGWYRQAPGKEREFVASIATGASTNYADSVKGRFTISRDNAKNTVYLQMNSLKPEDTAVYYCAVYTRVGTLAVTGDYRGHLYWGQGTQVTVSS

SEQ ID NO: 14805 - protein, 126 aa, Artificial Sequence
  Chemically Synthesized
QVQLQESGGGLVQAGGSLRLSCAASGYISRRSSMGWYRQAPGKEREFVATIALGGNTYYADSVKGRFTISRDNAKNTVYLQMNSLKPEDTAVYYCAVHGYAQAYRDYYPYRYLRYWGQGTQVTVSS

SEQ ID NO: 14806 - protein, 126 aa, Artificial Sequence
  Chemically Synthesized
QVQLQESGGGLVQAGGSLRLSCAASGSIFRGRAMGWYRQAPGKERELVAAIGRGATTNYADSVKGRFTISRDNAKNTVYLQMNSLKPEDTAVYYCAVWRPENYTRYTWNGIAYTYWGQGTQVTVSS

SEQ ID NO: 14807 - protein, 117 aa, Artificial Sequence
  Chemically Synthesized
QVQLQESGGGLVQAGGSLRLSCAASGYIFARAYMGWYRQAPGKERELVASISAGAITNYADSVKGRFTISRDNAKNTVYLQMNSLKPEDTAVYYCAVYNWYKRHNYWGQGTQVTVSS

SEQ ID NO: 14808 - protein, 118 aa, Artificial Sequence
  Chemically Synthesized
QVQLQESGGGLVQAGGSLRLSCAASGYIFGRDYMGWYRQAPGKEREFVAGITDGATTYYADSVKGRFTISRDNAKNTVYLQMNSLKPEDTAVYYCAAGLADHEGLYYWGQGTQVTVSS

SEQ ID NO: 14809 - protein, 118 aa, Artificial Sequence
  Chemically Synthesized
QVQLQESGGGLVQAGGSLRLSCAASGYIFIWRKMGWYRQAPGKERELVASISIGSSTNYADSVKGRFTISRDNAKNTVYLQMNSLKPEDTAVYYCAVYERVTRRYRYWGQGTQVTVSS

SEQ ID NO: 14810 - protein, 118 aa, Artificial Sequence
  Chemically Synthesized
QVQLQESGGGLVQAGGSLRLSCAASGYIFWYYGMGWYRQAPGKERELVASITGGAITNYADSVKGRFTISRDNAKNTVYLQMNSLKPEDTAVYYCAVYWGWIHAYIYWGQGTQVTVSS

SEQ ID NO: 14811 - protein, 118 aa, Artificial Sequence
  Chemically Synthesized
QVQLQESGGGLVQAGGSLRLSCAASGSISQNAVMGWYRQAPGKEREFVAGISYGSTTYYADSVKGRFTISRDNAKNTVYLQMNSLKPEDTAVYYCAAYHKRRYRYGYWGQGTQVTVSS

SEQ ID NO: 14812 - protein, 122 aa, Artificial Sequence
  Chemically Synthesized
QVQLQESGGGLVQAGGSLRLSCAASGNISLYYYMGWYRQAPGKEREFVAGIGDGSTTNYADSVKGRFTISRDNAKNTVYLQMNSLKPEDTAVYYCAVYSGDYVNYIPLHDYWGQGTQVTVSS

SEQ ID NO: 14813 - protein, 118 aa, Artificial Sequence
  Chemically Synthesized
QVQLQESGGGLVQAGGSLRLSCAASGTISYYVDMGWYRQAPGKEREFVAAITGGTSTYYADSVKGRFTISRDNAKNTVYLQMNSLKPEDTAVYYCAAYAYNYDSYHYWGQGTQVTVSS

SEQ ID NO: 14814 - protein, 126 aa, Artificial Sequence
  Chemically Synthesized
QVQLQESGGGLVQAGGSLRLSCAASGYISVTSYMGWYRQAPGKEREFVAAIAFGSITYYADSVKGRFTISRDNAKNTVYLQMNSLKPEDTAVYYCAVKRWWATYRASPLYQYHAYWGQGTQVTVSS

SEQ ID NO: 14815 - protein, 122 aa, Artificial Sequence
  Chemically Synthesized
QVQLQESGGGLVQAGGSLRLSCAASGYISDWRPMGWYRQAPGKEREFVAGISWGTSTYYADSVKGRFTISRDNAKNTVYLQMNSLKPEDTAVYYCAVGRKWFRYQGQPFVYWGQGTQVTVSS

SEQ ID NO: 14816 - protein, 126 aa, Artificial Sequence
  Chemically Synthesized
QVQLQESGGGLVQAGGSLRLSCAASGTISPPGWMGWYRQAPGKERELVATIDTGGTTNYADSVKGRFTISRDNAKNTVYLQMNSLKPEDTAVYYCAVTVETTPDRLVLYRYAHSYWGQGTQVTVSS

SEQ ID NO: 14817 - protein, 118 aa, Artificial Sequence
  Chemically Synthesized
QVQLQESGGGLVQAGGSLRLSCAASGSISVSYNMGWYRQAPGKERELVAAITYGTNTYYADSVKGRFTISRDNAKNTVYLQMNSLKPEDTAVYYCAARRYWRYVYVYWGQGTQVTVSS

SEQ ID NO: 14818 - protein, 126 aa, Artificial Sequence
  Chemically Synthesized
QVQLQESGGGLVQAGGSLRLSCAASGYISRQGYMGWYRQAPGKERELVAGITRGSNTYYADSVKGRFTISRDNAKNTVYLQMNSLKPEDTAVYYCAVVYGSQPYGWPYRSYYHRYWGQGTQVTVSS

SEQ ID NO: 14819 - protein, 122 aa, Artificial Sequence
  Chemically Synthesized
QVQLQESGGGLVQAGGSLRLSCAASGYIFIRYSMGWYRQAPGKERELVAAITRGGTTNYADSVKGRFTISRDNAKNTVYLQMNSLKPEDTAVYYCAVYRPDRWVPYRYFVYWGQGTQVTVSS

SEQ ID NO: 14820 - protein, 121 aa, Artificial Sequence
  Chemically Synthesized
QVQLQESGGGLVQAGGSLRLSCAASGYISGNSTMGWYRQAPGKERELVATIDIGATTNYADSVKGRFTISRDNAKNTVYLQMNSLKPEDTAVYYCAARWHVNIRDDYLSYWGQGTQVTVSS

SEQ ID NO: 14821 - protein, 118 aa, Artificial Sequence
  Chemically Synthesized
QVQLQESGGGLVQAGGSLRLSCAASGYISPYGGMGWYRQAPGKEREFVATISPGSTTYYADSVKGRFTISRDNAKNTVYLQMNSLKPEDTAVYYCAAYNDYAYVFDYWGQGTQVTVSS

SEQ ID NO: 14822 - protein, 118 aa, Artificial Sequence
  Chemically Synthesized
QVQLQESGGGLVQAGGSLRLSCAASGSIFPFYVMGWYRQAPGKEREFVATISHGGTTNYADSVKGRFTISRDNAKNTVYLQMNSLKPEDTAVYYCAVARRGYRRYPYWGQGTQVTVSS

SEQ ID NO: 14823 - protein, 118 aa, Artificial Sequence
  Chemically Synthesized
QVQLQESGGGLVQAGGSLRLSCAASGNISDRYAMGWYRQAPGKERELVAAITGGSITYYADSVKGRFTISRDNAKNTVYLQMNSLKPEDTAVYYCAAQRRLSRVHSYWGQGTQVTVSS

SEQ ID NO: 14824 - protein, 122 aa, Artificial Sequence
  Chemically Synthesized
QVQLQESGGGLVQAGGSLRLSCAASGYISPYNTMGWYRQAPGKERELVAAIDDGATTYYADSVKGRFTISRDNAKNTVYLQMNSLKPEDTAVYYCAAVLRRRYQANRLLYYWGQGTQVTVSS

SEQ ID NO: 14825 - protein, 121 aa, Artificial Sequence
  Chemically Synthesized
QVQLQESGGGLVQAGGSLRLSCAASGNIFLHPYMGWYRQAPGKEREFVAAIAGGTTNYADSVKGRFTISRDNAKNTVYLQMNSLKPEDTAVYYCAAYVPLFYGRSAYFDYWGQGTQVTVSS

SEQ ID NO: 14826 - protein, 121 aa, Artificial Sequence
  Chemically Synthesized
QVQLQESGGGLVQAGGSLRLSCAASGNISGYWTMGWYRQAPGKEREFVASIARGSSTNYADSVKGRFTISRDNAKNTVYLQMNSLKPEDTAVYYCAAYTPRYYRINALRYWGQGTQVTVSS

SEQ ID NO: 14827 - protein, 118 aa, Artificial Sequence
  Chemically Synthesized
QVQLQESGGGLVQAGGSLRLSCAASGTIFSWYYMGWYRQAPGKEREFVASITHGSNTNYADSVKGRFTISRDNAKNTVYLQMNSLKPEDTAVYYCAAWVRRLRAHWYWGQGTQVTVSS

SEQ ID NO: 14828 - protein, 126 aa, Artificial Sequence
  Chemically Synthesized
QVQLQESGGGLVQAGGSLRLSCAASGTISPYAIMGWYRQAPGKERELVASITWGSITNYADSVKGRFTISRDNAKNTVYLQMNSLKPEDTAVYYCAADYLPYHYYYGPLLTYLYYWGQGTQVTVSS

SEQ ID NO: 14829 - protein, 122 aa, Artificial Sequence
  Chemically Synthesized
QVQLQESGGGLVQAGGSLRLSCAASGYISRRHYMGWYRQAPGKERELVAAIAHGGNTYYADSVKGRFTISRDNAKNTVYLQMNSLKPEDTAVYYCAAYTYPTYARGHIHSYWGQGTQVTVSS

SEQ ID NO: 14830 - protein, 118 aa, Artificial Sequence
  Chemically Synthesized
QVQLQESGGGLVQAGGSLRLSCAASGSIFAPSLMGWYRQAPGKERELVATIASGGSTNYADSVKGRFTISRDNAKNTVYLQMNSLKPEDTAVYYCAAYVAVAWYYYYWGQGTQVTVSS

SEQ ID NO: 14831 - protein, 120 aa, Artificial Sequence
  Chemically Synthesized
QVQLQESGGGLVQAGGSLRLSCAASGNISGGVHMGWYRQAPGKEREFGASTYYADSVKGRFTISRDNAKNTVYLQMNSLKPEDTAVYYCAADESSQSTQLDYLRPVLHYWGQGTQVTVSS

SEQ ID NO: 14832 - protein, 115 aa, Artificial Sequence
  Chemically Synthesized
QVQLQESGGGLVQAGGSLRLSCAASGYISRTGSMGWYRQAPGKERELVAGIANTYYADSVKGRFTISRDNAKNTVYLQMNSLKPEDTAVYYCAAATNDSGSYQYWGQGTQVTVSS

SEQ ID NO: 14833 - protein, 126 aa, Artificial Sequence
  Chemically Synthesized
QVQLQESGGGLVQAGGSLRLSCAASGNIFDYTQMGWYRQAPGKERELVATISFGSTTYYADSVKGRFTISRDNAKNTVYLQMNSLKPEDTAVYYCAVYKRLGPYADARDDTWLDYWGQGTQVTVSS

SEQ ID NO: 14834 - protein, 118 aa, Artificial Sequence
  Chemically Synthesized
QVQLQESGGGLVQAGGSLRLSCAASGNISGDAYMGWYRQAPGKEREFVAGISYGSITNYADSVKGRFTISRDNAKNTVYLQMNSLKPEDTAVYYCAAYADITSDHYYWGQGTQVTVSS

SEQ ID NO: 14835 - protein, 118 aa, Artificial Sequence
  Chemically Synthesized
QVQLQESGGGLVQAGGSLRLSCAASGNISPGQNMGWYRQAPGKEREFVAGITNGTSTYYADSVKGRFTISRDNAKNTVYLQMNSLKPEDTAVYYCAVVGQRTYVFSYWGQGTQVTVSS

SEQ ID NO: 14836 - protein, 117 aa, Artificial Sequence
  Chemically Synthesized
QVQLQESGGGLVQAGGSLRLSCAASGTISYPGTMGWYRQAPGKEREFVAGINEGTNTYYADSVKGRFTISRDNAKNTVYLQMNSLKPEDTAVYYCAAADYSLDTFYWGQGTQVTVSS

SEQ ID NO: 14837 - protein, 123 aa, Artificial Sequence
  Chemically Synthesized
QVQLQESGGGLVQAGGSLRLSCAASGNIFYIADMGWYRQAPGKEREFVATIGAGGNTYYADSVKGRFTISRDNAKNTVYLQMNSLKPEDTAVYYCAANHHGYQVGPPLLHNYWGQGTQVTVSS

SEQ ID NO: 14838 - protein, 125 aa, Artificial Sequence
  Chemically Synthesized
QVQLQESGGGLVQAGGSLRLSCAASGSISFGLYMGWYRQAPGKERELVASIAYGGNTYYADSVKGRFTISRDNAKNTVYLQMNSLKPEDTAVYYCAAYYLATWEDVLVNFDRLYWGQGTQVTVSS

SEQ ID NO: 14839 - protein, 121 aa, Artificial Sequence
  Chemically Synthesized
QVQLQESGGGLVQAGGSLRLSCAASGSISWVDFMGWYRQAPGKEREFVATIDPGANTNYADSVKGRFTISRDNAKNTVYLQMNSLKPEDTAVYYCAAQFDDLLRDSTTLYWGQGTQVTVSS

SEQ ID NO: 14840 - protein, 117 aa, Artificial Sequence
  Chemically Synthesized
QVQLQESGGGLVQAGGSLRLSCAASGSISGAVHMGWYRQAPGKEREFVAAIGAGGTTYYADSVKGRFTISRDNAKNTVYLQMNSLKPEDTAVYYCAAYSNGYDSLYWGQGTQVTVSS

SEQ ID NO: 14841 - protein, 118 aa, Artificial Sequence
  Chemically Synthesized
QVQLQESGGGLVQAGGSLRLSCAASGTIFYTAQMGWYRQAPGKERELVAAIDYGTTTYYADSVKGRFTISRDNAKNTVYLQMNSLKPEDTAVYYCAVHRYYRSRYRYWGQGTQVTVSS

SEQ ID NO: 14842 - protein, 117 aa, Artificial Sequence
  Chemically Synthesized
QVQLQESGGGLVQAGGSLRLSCAASGYISDSDMGWYRQAPGKEREFVAAIAVGTNTYYADSVKGRFTISRDNAKNTVYLQMNSLKPEDTAVYYCAVRSRYANDLPYWGQGTQVTVSS

SEQ ID NO: 14843 - protein, 118 aa, Artificial Sequence
  Chemically Synthesized
QVQLQESGGGLVQAGGSLRLSCAASGTIFPWYDMGWYRQAPGKEREFVATINRGATTNYADSVKGRFTISRDNAKNTVYLQMNSLKPEDTAVYYCAVQLSHHGSYDYWGQGTQVTVSS

SEQ ID NO: 14844 - protein, 122 aa, Artificial Sequence
  Chemically Synthesized
QVQLQESGGGLVQAGGSLRLSCAASGNISRHHTMGWYRQAPGKEREFVASIAEGTITNYADSVKGRFTISRDNAKNTVYLQMNSLKPEDTAVYYCAAAKRPYLGYRYAHWYWGQGTQVTVSS

SEQ ID NO: 14845 - protein, 118 aa, Artificial Sequence
  Chemically Synthesized
QVQLQESGGGLVQAGGSLRLSCAASGNIFGGDEMGWYRQAPGKEREFVASIGTGSTTYYADSVKGRFTISRDNAKNTVYLQMNSLKPEDTAVYYCAVRIYGYVLFAYWGQGTQVTVSS

SEQ ID NO: 14846 - protein, 117 aa, Artificial Sequence
  Chemically Synthesized
QVQLQESGGGLVQAGGSLRLSCAASGSIFTTYDMGWYRQAPGKERELLPVLLVVLVPYADSVKGRFTISRDNAKNTVYLQMNSLKPEDTAVYYCAVYVRAYLYYPYWGQGTQVTVSS

SEQ ID NO: 14847 - protein, 121 aa, Artificial Sequence
  Chemically Synthesized
QVQLQESGGGLVQAGGSLRLSCAASGTISGPTDMGWYRQAPGKEREFVAGIGYGSITYYADSVKGRFTISRDNAKNTVYLQMNSLKPEDTAVYYCAAYQGYSGTGRWWFYWGQGTQVTVSS

SEQ ID NO: 14848 - protein, 115 aa, Artificial Sequence
  Chemically Synthesized
QVQLQESGGGLVQAGGSLRLSCAASGSIFPTSSMGWYRQAPGKEREFVASITDGGTTYYADSVKGRFTISRDNAKNTVYLQMNSLKPEDTAVYYCAVALNTHSYWGQGTQVTVSS

SEQ ID NO: 14849 - protein, 117 aa, Artificial Sequence
  Chemically Synthesized
QVQLQESGGGLVQAGGSLRLSCAASGNIFTTVLMGWYRQAPGKERELVASIDGGAITNYADSVKGRFTISRDNAKNTVYLQMNSLKPEDTAVYYCAVTDGGKPFLYWGQGTQVTVSS

SEQ ID NO: 14850 - protein, 116 aa, Artificial Sequence
  Chemically Synthesized
QVQLQESGGGLVQAGGSLRLSCAASGTIFAYSRMGWYRQAPGKERELVATISSVLLPYADSVKGRFTISRDNAKNTVYLQMNSLKPEDTAVYYCAVAWYSMTTIYWGQGTQVTVSS

SEQ ID NO: 14851 - protein, 126 aa, Artificial Sequence
  Chemically Synthesized
QVQLQESGGGLVQAGGSLRLSCAASGSIFDFIYMGWYRQAPGKERELVATITYGGTTYYADSVKGRFTISRDNAKNTVYLQMNSLKPEDTAVYYCAVPYVTTLISYPWAGGDLYYWGQGTQVTVSS

SEQ ID NO: 14852 - protein, 118 aa, Artificial Sequence
  Chemically Synthesized
QVQLQESGGGLVQAGGSLRLSCAASGNISYKSYMGWYRQAPGKEREFVASITIGTITNYADSVKGRFTISRDNAKNTVYLQMNSLKPEDTAVYYCAVGTYGDTQFVYWGQGTQVTVSS

SEQ ID NO: 14853 - protein, 118 aa, Artificial Sequence
  Chemically Synthesized
QVQLQESGGGLVQAGGSLRLSCAASGSISCWFMGWYRQAPGKEREFVAIGGNTYYADSVKGRFTISRDNAKNTVYLQMNSLKPEDTAVYYCAAYEGDVPDATAVYLYWGQGTQVTVSS

SEQ ID NO: 14854 - protein, 118 aa, Artificial Sequence
  Chemically Synthesized
QVQLQESGGGLVQAGGSLRLSCAASGNIFRHNDMGWYRQAPGKEREFVAGIASGSNTNYADSVKGRFTISRDNAKNTVYLQMNSLKPEDTAVYYCAASTDQGDYLLYWGQGTQVTVSS

SEQ ID NO: 14855 - protein, 122 aa, Artificial Sequence
  Chemically Synthesized
QVQLQESGGGLVQAGGSLRLSCAASGTISYTDEMGWYRQAPGKEREFVAGINSGTTTNYADSVKGRFTISRDNAKNTVYLQMNSLKPEDTAVYYCAAQVYTVDDDVYVFPYWGQGTQVTVSS

SEQ ID NO: 14856 - protein, 126 aa, Artificial Sequence
  Chemically Synthesized
QVQLQESGGGLVQAGGSLRLSCAASGNIFAVPPMGWYRQAPGKERELVAAISDGASTYYADSVKGRFTISRDNAKNTVYLQMNSLKPEDTAVYYCAAVRHSGLPDIYDKPYDYIYWGQGTQVTVSS

SEQ ID NO: 14857 - protein, 126 aa, Artificial Sequence
  Chemically Synthesized
QVQLQESGGGLVQAGGSLRLSCAASGYISSRYSMGWYRQAPGKEREFVAAIARGSNTYYADSVKGRFTISRDNAKNTVYLQMNSLKPEDTAVYYCAVYRYRYGSRDGTKRDYYYYWGQGTQVTVSS

SEQ ID NO: 14858 - protein, 111 aa, Artificial Sequence
  Chemically Synthesized
QVQLQESGGGLVQAGGSLRLSCAASGSIFVQTHMGWYRQAPGKERELVATIDLGATTNYADSVKGRFTISRDNAKNTVYLQMNSLKPEDTAVYYCAVVSYWGQGTQVTVSS

SEQ ID NO: 14859 - protein, 122 aa, Artificial Sequence
  Chemically Synthesized
QVQLQESGGGLVQAGGSLRLSCAASGNISSRYYMGWYRQAPGKERELVAGINSGGTTNYADSVKGRFTISRDNAKNTVYLQMNSLKPEDTAVYYCAVGADVHDTYTGYYYYWGQGTQVTVSS

SEQ ID NO: 14860 - protein, 122 aa, Artificial Sequence
  Chemically Synthesized
QVQLQESGGGLVQAGGSLRLSCAASGYIFTYRRMGWYRQAPGKEREFVATIASGGNTNYADSVKGRFTISRDNAKNTVYLQMNSLKPEDTAVYYCAATRFLRTNDSYRHGYWGQGTQVTVSS

SEQ ID NO: 14861 - protein, 117 aa, Artificial Sequence
  Chemically Synthesized
QVQLQESGGGLVQAGGSLRLSCAASGTIFTYRVMGWYRQAPGKEREFVAAINTGSITNYADSVKGRFTISRDNAKNTVYLQMNSLKPEDTAVYYCAVYEGTYDDYYWGQGTQVTVSS

SEQ ID NO: 14862 - protein, 115 aa, Artificial Sequence
  Chemically Synthesized
QVQLQESGGGLVQAGGSLRLSCAASGNIFYADKMGWYRQAPGKERELVAAIGGGTTTYYADSVKGRFTISRDNAKNTVYLQMNSLKPEDTAVYYCAVMVLTSIYWGQGTQVTVSS

SEQ ID NO: 14863 - protein, 126 aa, Artificial Sequence
  Chemically Synthesized
QVQLQESGGGLVQAGGSLRLSCAASGYIFAPRRMGWYRQAPGKEREFVAAIGGGSSTYYADSVKGRFTISRDNAKNTVYLQMNSLKPEDTAVYYCAAYRGYPLFRTWNYISGHYYWGQGTQVTVSS

SEQ ID NO: 14864 - protein, 118 aa, Artificial Sequence
  Chemically Synthesized
QVQLQESGGGLVQAGGSLRLSCAASGYIFGSRSMGWYRQAPGKEREFVASITAGTITNYADSVKGRFTISRDNAKNTVYLQMNSLKPEDTAVYYCAARYDVFYYHDYWGQGTQVTVSS

SEQ ID NO: 14865 - protein, 117 aa, Artificial Sequence
  Chemically Synthesized
QVQLQESGGGLVQAGGSLRLSCAASGTIFRIYYMGWYRQAPGKERELVASIAFGSNTYYADSVKGRFTISRDNAKNTVYLQMNSLKPEDTAVYYCAVYDGQSTTLYWGQGTQVTVSS

SEQ ID NO: 14866 - protein, 125 aa, Artificial Sequence
  Chemically Synthesized
QVQLQESGGGLVQAGGSLRLSCAASGNISYTWKMGWYRQAPGKERELVASIAWVLIPYADSVKGRFTISRDNAKNTVYLQMNSLKPEDTAVYYCAVDIDIYYPLGTYVHDDHRYWGQGTQVTVSS

SEQ ID NO: 14867 - protein, 118 aa, Artificial Sequence
  Chemically Synthesized
QVQLQESGGGLVQAGGSLRLSCAASGTIFGYAYMGWYRQAPGKERELVAAIGIGGITYYADSVKGRFTISRDNAKNTVYLQMNSLKPEDTAVYYCAVDYYLYVLYWYWGQGTQVTVSS

SEQ ID NO: 14868 - protein, 118 aa, Artificial Sequence
  Chemically Synthesized
QVQLQESGGGLVQAGGSLRLSCAASGYIFGHWRMGWYRQAPGKEREFVAGIAYGSTTYYADSVKGRFTISRDNAKNTVYLQMNSLKPEDTAVYYCAVLWSTAKRYAYWGQGTQVTVSS

SEQ ID NO: 14869 - protein, 114 aa, Artificial Sequence
  Chemically Synthesized
QVQLQESGGGLVQAGGSLRLSCAASGYISGLYYMGWYRQAPGKEREFVAAIGYGSSTNYADSVKGRFTISRDNAKNTVYLQMNSLKPEDTAVYYCAVLGTLYYWGQGTQVTVSS

SEQ ID NO: 14870 - protein, 122 aa, Artificial Sequence
  Chemically Synthesized
QVQLQESGGGLVQAGGSLRLSCAASGSISRVSAMGWYRQAPGKERELVASIGFGGTTYYADSVKGRFTISRDNAKNTVYLQMNSLKPEDTAVYYCAAKPYTRYGYRYHYGYWGQGTQVTVSS

SEQ ID NO: 14871 - protein, 118 aa, Artificial Sequence
  Chemically Synthesized
QVQLQESGGGLVQAGGSLRLSCAASGTISPSYAMGWYRQAPGKERELVATITYGGITYYADSVKGRFTISRDNAKNTVYLQMNSLKPEDTAVYYCAATYEQAGEHPYWGQGTQVTVSS

SEQ ID NO: 14872 - protein, 112 aa, Artificial Sequence
  Chemically Synthesized
QVQLQESGGGLVQAGGSLRLSCAASGTIFALAYMGWYRQAPGKEREFVATIDAGGTTNYADSVKGRFTISRDNAKNTVYLQMNSLKPEDTAVYYCAVYLCYWGQGTQVTVSS

SEQ ID NO: 14873 - protein, 119 aa, Artificial Sequence
  Chemically Synthesized
QVQLQESGGGLVQAGGSLRLSCAASGYIFYQVRMGWYRQAPGKERELVATITRGTNTYYADSVKGRFTISRDNAKNTVYLQMNSLKPEDTAVYYCAAGDRASYARYSYWGQGTQVTVSS

SEQ ID NO: 14874 - protein, 118 aa, Artificial Sequence
  Chemically Synthesized
QVQLQESGGGLVQAGGSLRLSCAASGTISRYRVMGWYRQAPGKERELVAGIGVGGNTYYADSVKGRFTISRDNAKNTVYLQMNSLKPEDTAVYYCAAFRVRSWAHAYWGQGTQVTVSS

SEQ ID NO: 14875 - protein, 118 aa, Artificial Sequence
  Chemically Synthesized
QVQLQESGGGLVQAGGSLRLSCAASGNIFPGYFMGWYRQAPGKEREFVAGIDRGATTYYADSVKGRFTISRDNAKNTVYLQMNSLKPEDTAVYYCAAYGYDYFGLDYWGQGTQVTVSS

SEQ ID NO: 14876 - protein, 117 aa, Artificial Sequence
  Chemically Synthesized
QVQLQESGGGLVQAGGSLRLSCAASGNIFFEYMGWYRQAPGKEREFVAAINAGSITNYADSVKGRFTISRDNAKNTVYLQMNSLKPEDTAVYYCAADVWGASSLGYWGQGTQVTVSS

SEQ ID NO: 14877 - protein, 118 aa, Artificial Sequence
  Chemically Synthesized
QVQLQESGGGLVQAGGSLRLSCAASGNISDSDIMGWYRQAPGKEREFVAGITVGGNTYYADSVKGRFTISRDNAKNTVYLQMNSLKPEDTAVYYCAARLRYPRALYYWGQGTQVTVSS

SEQ ID NO: 14878 - protein, 120 aa, Artificial Sequence
  Chemically Synthesized
QVQLQESGGGLVQAGGSLRLSCAASGTISQSYMGWYRQAPGKEREFVASIGHGTITYYADSVKGRFTISRDNAKNTVYLQMNSLKPEDTAVYYCAAKTRGRFVPDANFYWGQGTQVTVSS

SEQ ID NO: 14879 - protein, 118 aa, Artificial Sequence
  Chemically Synthesized
QVQLQESGGGLVQAGGSLRLSCAASGTIFGRTTMGWYRQAPGKERELVAAISRGGITNYADSVKGRFTISRDNAKNTVYLQMNSLKPEDTAVYYCAAYRYVRKKFLYWGQGTQVTVSS

SEQ ID NO: 14880 - protein, 122 aa, Artificial Sequence
  Chemically Synthesized
QVQLQESGGGLVQAGGSLRLSCAASGSISQDTYMGWYRQAPGKEREFVAAINGGSNTNYADSVKGRFTISRDNAKNTVYLQMNSLKPEDTAVYYCAAYTGRADSLLGVHGYWGQGTQVTVSS

SEQ ID NO: 14881 - protein, 122 aa, Artificial Sequence
  Chemically Synthesized
QVQLQESGGGLVQAGGSLRLSCAASGYIFEFRGMGWYRQAPGKEREFVASIDTGANTNYADSVKGRFTISRDNAKNTVYLQMNSLKPEDTAVYYCAAITYDIQRIPDGHDYWGQGTQVTVSS

SEQ ID NO: 14882 - protein, 125 aa, Artificial Sequence
  Chemically Synthesized
QVQLQESGGGLVQAGGSLRLSCAASGTISSVTSMGWYRQAPGKERELVAAIDWGSITYYADSVKGRFTISRDNAKNTVYLQMNSLKPEDTAVYYCAVTPYTYPPEFSDESLVLYWGQGTQVTVSS

SEQ ID NO: 14883 - protein, 126 aa, Artificial Sequence
  Chemically Synthesized
QVQLQESGGGLVQAGGSLRLSCAASGNIFRTRYMGWYRQAPGKEREFVAGIADGAITYYADSVKGRFTISRDNAKNTVYLQMNSLKPEDTAVYYCAVYDAAPLHVIDQYLTGYYYWGQGTQVTVSS

SEQ ID NO: 14884 - protein, 126 aa, Artificial Sequence
  Chemically Synthesized
QVQLQESGGGLVQAGGSLRLSCAASGTISYYNAMGWYRQAPGKERELVAAIDIGGNTYYADSVKGRFTISRDNAKNTVYLQMNSLKPEDTAVYYCAVRRAFLYYDDSGGRDDYGYWGQGTQVTVSS

SEQ ID NO: 14885 - protein, 118 aa, Artificial Sequence
  Chemically Synthesized
QVQLQESGGGLVQAGGSLRLSCAASGYISPYRRMGWYRQAPGKEREFVAGIANGTITYYADSVKGRFTISRDNAKNTVYLQMNSLKPEDTAVYYCAAQRYRSYRHYYWGQGTQVTVSS

SEQ ID NO: 14886 - protein, 118 aa, Artificial Sequence
  Chemically Synthesized
QVQLQESGGGLVQAGGSLRLSCAASGSISQIPRMGWYRQAPGKERELVAAIGYGGITYYADSVKGRFTISRDNAKNTVYLQMNSLKPEDTAVYYCAADDVQGDDFAYWGQGTQVTVSS

SEQ ID NO: 14887 - protein, 125 aa, Artificial Sequence
  Chemically Synthesized
QVQLQESGGGLVQAGGSLRLSCAASGSIFYVSEMGWYRQAPGKERELVASIGNSGTTYYADSVKGRFTISRDNAKNTVYLQMNSLKPEDTAVYYCAVRQYYSYWIYSRVGTLAYWGQGTQVTVSS

SEQ ID NO: 14888 - protein, 122 aa, Artificial Sequence
  Chemically Synthesized
QVQLQESGGGLVQAGGSLRLSCAASGTISDTIWMGWYRQAPGKEREFVAGIGWGTNTYYADSVKGRFTISRDNAKNTVYLQMNSLKPEDTAVYYCAAYGTDDWYLYIYFAYWGQGTQVTVSS

SEQ ID NO: 14889 - protein, 119 aa, Artificial Sequence
  Chemically Synthesized
QVQLQESGGGLVQAGGSLRLSCAASGSISGSERMGWYRQAPGKERELVASISYGANTNYADSVKGRFTISRDNAKNTVYLQMNSLKPEDTAVYYCAATRTSTVTSTMYWGQGTQVTVSS

SEQ ID NO: 14890 - protein, 125 aa, Artificial Sequence
  Chemically Synthesized
QVQLQESGGGLVQAGGSLRLSCAASGTISPAWYMGWYRQAPGKEREFVATIGRVVLPYADSVKGRFTISRDNAKNTVYLQMNSLKPEDTAVYYCAAIPQGERYDEDNGYAKFYYWGQGTQVTVSS

SEQ ID NO: 14891 - protein, 118 aa, Artificial Sequence
  Chemically Synthesized
QVQLQESGGGLVQAGGSLRLSCAASGTIFRVASMGWYRQAPGKERELVAAINPGSSTNYADSVKGRFTISRDNAKNTVYLQMNSLKPEDTAVYYCAAPRIWGYRFSYWGQGTQVTVSS

SEQ ID NO: 14892 - protein, 122 aa, Artificial Sequence
  Chemically Synthesized
QVQLQESGGGLVQAGGSLRLSCAASGNISSSRYMGWYRQAPGKEREFVAGITKGGSTYYADSVKGRFTISRDNAKNTVYLQMNSLKPEDTAVYYCAAYYFYYSYTRNFYRYWGQGTQVTVSS

SEQ ID NO: 14893 - protein, 126 aa, Artificial Sequence
  Chemically Synthesized
QVQLQESGGGLVQAGGSLRLSCAASGSIFADREMGWYRQAPGKERELVATIDDGGSTNYADSVKGRFTISRDNAKNTVYLQMNSLKPEDTAVYYCAATYYYPDVSTSVSWRYLAYWGQGTQVTVSS

SEQ ID NO: 14894 - protein, 121 aa, Artificial Sequence
  Chemically Synthesized
QVQLQESGGGLVQAGGSLRLSCAASGNIFGSGSMGWYRQAPGKEREFVPVLLGVLIPYADSVKGRFTISRDNAKNTVYLQMNSLKPEDTAVYYCAAYDLYGSDYWSDHRYWGQGTQVTVSS

SEQ ID NO: 14895 - protein, 117 aa, Artificial Sequence
  Chemically Synthesized
QVQLQESGGGLVQAGGSLRLSCAASGNISEWYMGWYRQAPGKEREFVAAITRGTNTNYADSVKGRFTISRDNAKNTVYLQMNSLKPEDTAVYYCAAIPDLADGHDYWGQGTQVTVSS

SEQ ID NO: 14896 - protein, 118 aa, Artificial Sequence
  Chemically Synthesized
QVQLQESGGGLVQAGGSLRLSCAASGTIFSFHWMGWYRQAPGKERELVASISHGGTTYYADSVKGRFTISRDNAKNTVYLQMNSLKPEDTAVYYCAAKDYFDISHAYWGQGTQVTVSS

SEQ ID NO: 14897 - protein, 122 aa, Artificial Sequence
  Chemically Synthesized
QVQLQESGGGLVQAGGSLRLSCAASGSIFWLGVMGWYRQAPGKERELVASIARGSTTYYADSVKGRFTISRDNAKNTVYLQMNSLKPEDTAVYYCAVEPSYDIQYRGTYYYWGQGTQVTVSS

SEQ ID NO: 14898 - protein, 120 aa, Artificial Sequence
  Chemically Synthesized
QVQLQESGGGLVQAGGSLRLSCAASGYISDPMGWYRQAPGKERELVAAIDAGANTNYADSVKGRFTISRDNAKNTVYLQMNSLKPEDTAVYYCAVYHAYSNLQTLGYQYWGQGTQVTVSS

SEQ ID NO: 14899 - protein, 118 aa, Artificial Sequence
  Chemically Synthesized
QVQLQESGGGLVQAGGSLRLSCAASGTIFGRYDMGWYRQAPGKERELVATIADGTNTNYADSVKGRFTISRDNAKNTVYLQMNSLKPEDTAVYYCAVTGRYIYRFYYWGQGTQVTVSS

SEQ ID NO: 14900 - protein, 121 aa, Artificial Sequence
  Chemically Synthesized
QVQLQESGGGLVQAGGSLRLSCAASGYIFVYEMGWYRQAPGKEREFVAGIDIGTTTYYADSVKGRFTISRDNAKNTVYLQMNSLKPEDTAVYYCAARIHDGRYLYRRYWYWGQGTQVTVSS

SEQ ID NO: 14901 - protein, 118 aa, Artificial Sequence
  Chemically Synthesized
QVQLQESGGGLVQAGGSLRLSCAASGTIFDDPTMGWYRQAPGKERELVASITLGGTTYYADSVKGRFTISRDNAKNTVYLQMNSLKPEDTAVYYCAARSPPDRTYGYWGQGTQVTVSS

SEQ ID NO: 14902 - protein, 110 aa, Artificial Sequence
  Chemically Synthesized
QVQLQESGGGLVQAGGSLRLSCAASGSISDSANMGWYRQAPGKERELVAGIGYGTITNYADSVKGRFTISRDNAKNTVYLQMNSLKPEDTAVYYCAAIYWGQGTQVTVSS

SEQ ID NO: 14903 - protein, 126 aa, Artificial Sequence
  Chemically Synthesized
QVQLQESGGGLVQAGGSLRLSCAASGNISGYIYMGWYRQAPGKERELVATIGRGGSTNYADSVKGRFTISRDNAKNTVYLQMNSLKPEDTAVYYCALTDTANSTLLGWAGTVHLYWGQGTQVTVSS

SEQ ID NO: 14904 - protein, 116 aa, Artificial Sequence
  Chemically Synthesized
QVQLQESGGGLVQAGGSLRLSCAASGYIFKPKYMGWYRQAPGKERELVASITRGATTNYADSVKGRFTISRDNAKNTVYLQMNSLKPEDTAVYYCAAAGIGYRRYWGQGTQVTVSS

SEQ ID NO: 14905 - protein, 116 aa, Artificial Sequence
  Chemically Synthesized
QVQLQESGGGLVQAGGSLRLSCAASGSIFYRRYMGWYRQAPGKERELVAAIGGGTITNYADSVKGRFTISRDNAKNTVYLQMNSLKPEDTAVYYCAVARYDGHYYWGQGTQVTVSS

SEQ ID NO: 14906 - protein, 122 aa, Artificial Sequence
  Chemically Synthesized
QVQLQESGGGLVQAGGSLRLSCAASGTISYSQGMGWYRQAPGKEREFVATISFGGSTNYADSVKGRFTISRDNAKNTVYLQMNSLKPEDTAVYYCAAVVYDDEDFYWAHTYWGQGTQVTVSS

SEQ ID NO: 14907 - protein, 122 aa, Artificial Sequence
  Chemically Synthesized
QVQLQESGGGLVQAGGSLRLSCAASGNISASADMGWYRQAPGKERELVASISRGTSTNYADSVKGRFTISRDNAKNTVYLQMNSLKPEDTAVYYCAVVYPYGYLTDYSYPYWGQGTQVTVSS

SEQ ID NO: 14908 - protein, 123 aa, Artificial Sequence
  Chemically Synthesized
QVQLQESGGGLVQAGGSLRLSCAASGTISRWRQYMGWYRQAPGKEREFVAGIAVGGSTNYADSVKGRFTISRDNAKNTVYLQMNSLKPEDTAVYYCAATHRRSDAWVIRHYYWGQGTQVTVSS

SEQ ID NO: 14909 - protein, 122 aa, Artificial Sequence
  Chemically Synthesized
QVQLQESGGGLVQAGGSLRLSCAASGTISLEDGMGWYRQAPGKEREFVATITSGGNTYYADSVKGRFTISRDNAKNTVYLQMNSLKPEDTAVYYCAVPDVYIARAPYIYPYWGQGTQVTVSS

SEQ ID NO: 14910 - protein, 125 aa, Artificial Sequence
  Chemically Synthesized
QVQLQESGGGLVQAGGSLRLSCAASGSIFGFPVMGWYRQAPGKEREFVATIAYGASTNYADSVKGRFTISRDNAKNTVYLQMNSLKPEDTAVYYCAVVSAYLAYGRYYGGKQIYWGQGTQVTVSS

SEQ ID NO: 14911 - protein, 118 aa, Artificial Sequence
  Chemically Synthesized
QVQLQESGGGLVQAGGSLRLSCAASGTIFQSYSMGWYRQAPGKERELVAAIGVGGTTYYADSVKGRFTISRDNAKNTVYLQMNSLKPEDTAVYYCAVYTPYQTWLQYWGQGTQVTVSS

SEQ ID NO: 14912 - protein, 118 aa, Artificial Sequence
  Chemically Synthesized
QVQLQESGGGLVQAGGSLRLSCAASGNIFDDAQMGWYRQAPGKEREFVATISGGGTTYYADSVKGRFTISRDNAKNTVYLQMNSLKPEDTAVYYCAALRYGQDRYGYWGQGTQVTVSS

SEQ ID NO: 14913 - protein, 114 aa, Artificial Sequence
  Chemically Synthesized
QVQLQESGGGLVQAGGSLRLSCAASGNIFGYRYMGWYRQAPGKERELVAAIDGGITYYADSVKGRFTISRDNAKNTVYLQMNSLKPEDTAVYYCAADGFPHVYWGQGTQVTVSS

SEQ ID NO: 14914 - protein, 118 aa, Artificial Sequence
  Chemically Synthesized
QVQLQESGGGLVQAGGSLRLSCAASGTISELRYMGWYRQAPGKERELVAGIAGGANTYYADSVKGRFTISRDNAKNTVYLQMNSLKPEDTAVYYCAVRPYYFYYYRYWGQGTQVTVSS

SEQ ID NO: 14915 - protein, 121 aa, Artificial Sequence
  Chemically Synthesized
QVQLQESGGGLVQAGGSLRLSCAASGTISGAAMGWYRQAPGKERELVAGIGHGSSTYYADSVKGRFTISRDNAKNTVYLQMNSLKPEDTAVYYCAADSGSLYYYYDTHVYWGQGTQVTVSS

SEQ ID NO: 14916 - protein, 122 aa, Artificial Sequence
  Chemically Synthesized
QVQLQESGGGLVQAGGSLRLSCAASGYISWLDWMGWYRQAPGKERELVASIAYGASTYYADSVKGRFTISRDNAKNTVYLQMNSLKPEDTAVYYCAAYLEYQYARSDDYGYWGQGTQVTVSS

SEQ ID NO: 14917 - protein, 122 aa, Artificial Sequence
  Chemically Synthesized
QVQLQESGGGLVQAGGSLRLSCAASGSIFLWSYMGWYRQAPGKERELVAGIDRGASTYYADSVKGRFTISRDNAKNTVYLQMNSLKPEDTAVYYCAALGSIGYAPAAGHSYWGQGTQVTVSS

SEQ ID NO: 14918 - protein, 122 aa, Artificial Sequence
  Chemically Synthesized
QVQLQESGGGLVQAGGSLRLSCAASGYIFHYLPMGWYRQAPGKERELVASINLGTTTYYADSVKGRFTISRDNAKNTVYLQMNSLKPEDTAVYYCAVLRDVAGKGDDEHYYWGQGTQVTVSS

SEQ ID NO: 14919 - protein, 126 aa, Artificial Sequence
  Chemically Synthesized
QVQLQESGGGLVQAGGSLRLSCAASGNIFDWRRMGWYRQAPGKERELVAGINYGGNTYYADSVKGRFTISRDNAKNTVYLQMNSLKPEDTAVYYCAADPDARYINAQWYTYRYEYWGQGTQVTVSS

SEQ ID NO: 14920 - protein, 126 aa, Artificial Sequence
  Chemically Synthesized
QVQLQESGGGLVQAGGSLRLSCAASGSISPGGKMGWYRQAPGKEREFVASISSGAITYYADSVKGRFTISRDNAKNTVYLQMNSLKPEDTAVYYCAAPALKWYHGRQHWYTYLGYWGQGTQVTVSS

SEQ ID NO: 14921 - protein, 121 aa, Artificial Sequence
  Chemically Synthesized
QVQLQESGGGLVQAGGSLRLSCAASGSIFRGISMGWYRQAPGKEREFVASISVGANTYADSVKGRFTISRDNAKNTVYLQMNSLKPEDTAVYYCAVTTYGQDSDSYSFWYWGQGTQVTVSS

SEQ ID NO: 14922 - protein, 118 aa, Artificial Sequence
  Chemically Synthesized
QVQLQESGGGLVQAGGSLRLSCAASGNIFTSTIMGWYRQAPGKERELVAGISLGTTTNYADSVKGRFTISRDNAKNTVYLQMNSLKPEDTAVYYCAVDASFPYALGYWGQGTQVTVSS

SEQ ID NO: 14923 - protein, 116 aa, Artificial Sequence
  Chemically Synthesized
QVQLQESGGGLVQAGGSLRLSCAASGNISSRWMGWYRQAPGKEREFVATIAAGGTTYADSVKGRFTISRDNAKNTVYLQMNSLKPEDTAVYYCAANTGQHPQHAYWGQGTQVTVSS

SEQ ID NO: 14924 - protein, 126 aa, Artificial Sequence
  Chemically Synthesized
QVQLQESGGGLVQAGGSLRLSCAASGYIFARKFMGWYRQAPGKERELVAAITSGASTYYADSVKGRFTISRDNAKNTVYLQMNSLKPEDTAVYYCAVVYGGRLSWSYLVERRHYYWGQGTQVTVSS

SEQ ID NO: 14925 - protein, 122 aa, Artificial Sequence
  Chemically Synthesized
QVQLQESGGGLVQAGGSLRLSCAASGTIFGRSSMGWYRQAPGKEREFVASIATGASTNYADSVKGRFTISRDNAKNTVYLQMNSLKPEDTAVYYCAAKYYYLYLGEIYPLYWGQGTQVTVSS

SEQ ID NO: 14926 - protein, 122 aa, Artificial Sequence
  Chemically Synthesized
QVQLQESGGGLVQAGGSLRLSCAASGTISGPPVMGWYRQAPGKERELVASIGIGASTNYADSVKGRFTISRDNAKNTVYLQMNSLKPEDTAVYYCAVYTYRHDYRVPAYGYWGQGTQVTVSS

SEQ ID NO: 14927 - protein, 112 aa, Artificial Sequence
  Chemically Synthesized
QVQLQESGGGLVQAGGSLRLSCAASGTIFGYYGMGWYRQAPGKERELLYADSVKGRFTISRDNAKNTVYLQMNSLKPEDTAVYYCAASKQPLGPANYQHEYWGQGTQVTVSS

SEQ ID NO: 14928 - protein, 126 aa, Artificial Sequence
  Chemically Synthesized
QVQLQESGGGLVQAGGSLRLSCAASGSIFYDTYMGWYRQAPGKEREFVATISRGGTTYYADSVKGRFTISRDNAKNTVYLQMNSLKPEDTAVYYCAAIGYAVFWTSYIAGSDLVYWGQGTQVTVSS

SEQ ID NO: 14929 - protein, 118 aa, Artificial Sequence
  Chemically Synthesized
QVQLQESGGGLVQAGGSLRLSCAASGTIFRADYMGWYRQAPGKEREFVAAISDGSITNYADSVKGRFTISRDNAKNTVYLQMNSLKPEDTAVYYCAVYQYYGRVLVYWGQGTQVTVSS

SEQ ID NO: 14930 - protein, 122 aa, Artificial Sequence
  Chemically Synthesized
QVQLQESGGGLVQAGGSLRLSCAASGTIFAYPRMGWYRQAPGKERELVATINPGANTYYADSVKGRFTISRDNAKNTVYLQMNSLKPEDTAVYYCAARTAGTLGLYRGHVYWGQGTQVTVSS

SEQ ID NO: 14931 - protein, 116 aa, Artificial Sequence
  Chemically Synthesized
QVQLQESGGGLVQAGGSLRLSCAASGSISSVSMGWYRQAPGKEREFVASITDGANTYYADSVKGRFTISRDNAKNTVYLQMNSLKPEDTAVYYCAVGRETSADQYWGQGTQVTVSS

SEQ ID NO: 14932 - protein, 126 aa, Artificial Sequence
  Chemically Synthesized
QVQLQESGGGLVQAGGSLRLSCAASGYISGVVRMGWYRQAPGKERELVATINAGGITYYADSVKGRFTISRDNAKNTVYLQMNSLKPEDTAVYYCAVDHDSYVAYWWYIILGYPYWGQGTQVTVSS

SEQ ID NO: 14933 - protein, 121 aa, Artificial Sequence
  Chemically Synthesized
QVQLQESGGGLVQAGGSLRLSCAASGYISIYYMGWYRQAPGKEREFVAAINVGGITYYADSVKGRFTISRDNAKNTVYLQMNSLKPEDTAVYYCAAFELYGTKSNGAYRYWGQGTQVTVSS

SEQ ID NO: 14934 - protein, 122 aa, Artificial Sequence
  Chemically Synthesized
QVQLQESGGGLVQAGGSLRLSCAASGSISAFTWMGWYRQAPGKERELVAAINWGSNTYYADSVKGRFTISRDNAKNTVYLQMNSLKPEDTAVYYCAVGSHYVDIPSTDYIYWGQGTQVTVSS

SEQ ID NO: 14935 - protein, 121 aa, Artificial Sequence
  Chemically Synthesized
QVQLQESGGGLVQAGGSLRLSCAASGYIFTQYHMGWYRQAPGKERELVAAISYGASTYYADSVKGRFTISRDNAKNTVYLQMNSLKPEDTAVYYCAVGLRSTSTGNTTIYWGQGTQVTVSS

SEQ ID NO: 14936 - protein, 122 aa, Artificial Sequence
  Chemically Synthesized
QVQLQESGGGLVQAGGSLRLSCAASGSISNFLDMGWYRQAPGKEREFVAAINYGATTNYADSVKGRFTISRDNAKNTVYLQMNSLKPEDTAVYYCAAYGELYYIDDYPLVYWGQGTQVTVSS

SEQ ID NO: 14937 - protein, 126 aa, Artificial Sequence
  Chemically Synthesized
QVQLQESGGGLVQAGGSLRLSCAASGSIFPANAMGWYRQAPGKEREFVATISYGGTTYYADSVKGRFTISRDNAKNTVYLQMNSLKPEDTAVYYCAVAPYYTYLSYYEIPGDYYYWGQGTQVTVSS

SEQ ID NO: 14938 - protein, 118 aa, Artificial Sequence
  Chemically Synthesized
QVQLQESGGGLVQAGGSLRLSCAASGSIFRDVSMGWYRQAPGKERELVAAIALGSNTYYADSVKGRFTISRDNAKNTVYLQMNSLKPEDTAVYYCAAYPDVDFAHRYWGQGTQVTVSS

SEQ ID NO: 14939 - protein, 118 aa, Artificial Sequence
  Chemically Synthesized
QVQLQESGGGLVQAGGSLRLSCAASGSIFQSRYMGWYRQAPGKERELVAAIGRGSITYYADSVKGRFTISRDNAKNTVYLQMNSLKPEDTAVYYCAAADIKGDGLRYWGQGTQVTVSS

SEQ ID NO: 14940 - protein, 118 aa, Artificial Sequence
  Chemically Synthesized
QVQLQESGGGLVQAGGSLRLSCAASGSISTLYGMGWYRQAPGKEREFVATIDTGTNTYYADSVKGRFTISRDNAKNTVYLQMNSLKPEDTAVYYCAADYDDPSVLHYWGQGTQVTVSS

SEQ ID NO: 14941 - protein, 125 aa, Artificial Sequence
  Chemically Synthesized
QVQLQESGGGLVQAGGSLRLSCAASGNISSITHMGWYRQAPGKEREFVAAIDYGSNTNYADSVKGRFTISRDNAKNTVYLQMNSLKPEDTAVYYCAVSVWTTILRTTSWLVRIYWGQGTQVTVSS

SEQ ID NO: 14942 - protein, 118 aa, Artificial Sequence
  Chemically Synthesized
QVQLQESGGGLVQAGGSLRLSCAASGYISDYPDMGWYRQAPGKERELVATIGNGASTNYADSVKGRFTISRDNAKNTVYLQMNSLKPEDTAVYYCAVDDELSAVLDYWGQGTQVTVSS

SEQ ID NO: 14943 - protein, 124 aa, Artificial Sequence
  Chemically Synthesized
QVQLQESGGGLVQAGGSLRLSCAASGTISAFRRMGWYRQAPGKERELVAGIAYGITYYADSVKGRFTISRDNAKNTVYLQMNSLKPEDTAVYYCAAARPPYDKQATPDSVLMYWGQGTQVTVSS

SEQ ID NO: 14944 - protein, 122 aa, Artificial Sequence
  Chemically Synthesized
QVQLQESGGGLVQAGGSLRLSCAASGNIFSRYRMGWYRQAPGKEREFVAAISDGTSTNYADSVKGRFTISRDNAKNTVYLQMNSLKPEDTAVYYCAVYRRRYVWLYHTHYYWGQGTQVTVSS

SEQ ID NO: 14945 - protein, 118 aa, Artificial Sequence
  Chemically Synthesized
QVQLQESGGGLVQAGGSLRLSCAASGSIFLRRSMGWYRQAPGKEREFVATITYGGNTNYADSVKGRFTISRDNAKNTVYLQMNSLKPEDTAVYYCAARGRWVYRYGYWGQGTQVTVSS

SEQ ID NO: 14946 - protein, 122 aa, Artificial Sequence
  Chemically Synthesized
QVQLQESGGGLVQAGGSLRLSCAASGYISWWPYMGWYRQAPGKERELVATIDRGGNTYYADSVKGRFTISRDNAKNTVYLQMNSLKPEDTAVYYCAAIYTARYYQGSRHRYWGQGTQVTVSS

SEQ ID NO: 14947 - protein, 118 aa, Artificial Sequence
  Chemically Synthesized
QVQLQESGGGLVQAGGSLRLSCAASGTISSADLMGWYRQAPGKEREFVAAIAWGASTYYADSVKGRFTISRDNAKNTVYLQMNSLKPEDTAVYYCAAKRSYWRYFRYWGQGTQVTVSS

SEQ ID NO: 14948 - protein, 116 aa, Artificial Sequence
  Chemically Synthesized
QVQLQESGGGLVQAGGSLRLSCAASGTISRDGVMGWYRQAPGKERELVAAITYGGITNYADSVKGRFTISRDNAKNTVYLQMNSLKPEDTAVYYCAVVVTEDHVYWGQGTQVTVSS

SEQ ID NO: 14949 - protein, 124 aa, Artificial Sequence
  Chemically Synthesized
QVQLQESGGGLVQAGGSLRLSCAASGTISRGYVMGWYRQAPGKERELVAGINRGGNTNYADSVKGRFTISRDNAKNTVYLQMNSLKPEDTAVYYCAVGRGWRTPGASYVAYSYWGQGTQVTVSS

SEQ ID NO: 14950 - protein, 122 aa, Artificial Sequence
  Chemically Synthesized
QVQLQESGGGLVQAGGSLRLSCAASGYISGTVTMGWYRQAPGKERELVAGIDDGGTTYYADSVKGRFTISRDNAKNTVYLQMNSLKPEDTAVYYCAAYDLTDDGPRALHYYWGQGTQVTVSS

SEQ ID NO: 14951 - protein, 118 aa, Artificial Sequence
  Chemically Synthesized
QVQLQESGGGLVQAGGSLRLSCAASGTIFGHRIMGWYRQAPGKEREFVAAIGVGGTTNYADSVKGRFTISRDNAKNTVYLQMNSLKPEDTAVYYCAVWRAYYTPHTYWGQGTQVTVSS

SEQ ID NO: 14952 - protein, 122 aa, Artificial Sequence
  Chemically Synthesized
QVQLQESGGGLVQAGGSLRLSCAASGTISYVYDMGWYRQAPGKEREFVATIGYGSITYYADSVKGRFTISRDNAKNTVYLQMNSLKPEDTAVYYCAVGEPRYWWPYTDLGYWGQGTQVTVSS

SEQ ID NO: 14953 - protein, 125 aa, Artificial Sequence
  Chemically Synthesized
QVQLQESGGGLVQAGGSLRLSCAASGSISASVMGWYRQAPGKEREFVASIDWGAITNYADSVKGRFTISRDNAKNTVYLQMNSLKPEDTAVYYCAVVNYDGDRDRPEYGERHQYWGQGTQVTVSS

SEQ ID NO: 14954 - protein, 122 aa, Artificial Sequence
  Chemically Synthesized
QVQLQESGGGLVQAGGSLRLSCAASGYIFRYYYMGWYRQAPGKEREFVASINTGANTYYADSVKGRFTISRDNAKNTVYLQMNSLKPEDTAVYYCAVWRPGDLTDTDYHVYWGQGTQVTVSS

SEQ ID NO: 14955 - protein, 122 aa, Artificial Sequence
  Chemically Synthesized
QVQLQESGGGLVQAGGSLRLSCAASGYISDYVWMGWYRQAPGKEREFVAAIDSGGSTYYADSVKGRFTISRDNAKNTVYLQMNSLKPEDTAVYYCAVDRRDNNYYDKVYIYWGQGTQVTVSS

SEQ ID NO: 14956 - protein, 122 aa, Artificial Sequence
  Chemically Synthesized
QVQLQESGGGLVQAGGSLRLSCAASGNIFGENVMGWYRQAPGKEREFVAGISDGTNTNYADSVKGRFTISRDNAKNTVYLQMNSLKPEDTAVYYCAVNGDQTVADYGDHAYWGQGTQVTVSS

SEQ ID NO: 14957 - protein, 118 aa, Artificial Sequence
  Chemically Synthesized
QVQLQESGGGLVQAGGSLRLSCAASGSISKYRSMGWYRQAPGKEREFVAGIAHGGNTYYADSVKGRFTISRDNAKNTVYLQMNSLKPEDTAVYYCAAQGADVDQLVYWGQGTQVTVSS

SEQ ID NO: 14958 - protein, 122 aa, Artificial Sequence
  Chemically Synthesized
QVQLQESGGGLVQAGGSLRLSCAASGNIFPQRGMGWYRQAPGKERELVAAIGAGTSTNYADSVKGRFTISRDNAKNTVYLQMNSLKPEDTAVYYCAAYALLGYYAPSLLYYWGQGTQVTVSS

SEQ ID NO: 14959 - protein, 118 aa, Artificial Sequence
  Chemically Synthesized
QVQLQESGGGLVQAGGSLRLSCAASGSIFPYYYMGWYRQAPGKEREFVAGIADGSNTYYADSVKGRFTISRDNAKNTVYLQMNSLKPEDTAVYYCAAGWDHRYYLSYWGQGTQVTVSS

SEQ ID NO: 14960 - protein, 122 aa, Artificial Sequence
  Chemically Synthesized
QVQLQESGGGLVQAGGSLRLSCAASGTISYLDSMGWYRQAPGKEREFVAAIASGSTTYYADSVKGRFTISRDNAKNTVYLQMNSLKPEDTAVYYCAAENEDGGDGQGVHGYWGQGTQVTVSS

SEQ ID NO: 14961 - protein, 116 aa, Artificial Sequence
  Chemically Synthesized
QVQLQESGGGLVQAGGSLRLSCAASGNIFTLTMGWYRQAPGKERELVAGIGVGTITYYADSVKGRFTISRDNAKNTVYLQMNSLKPEDTAVYYCAVFGDPSVVLYWGQGTQVTVSS

SEQ ID NO: 14962 - protein, 118 aa, Artificial Sequence
  Chemically Synthesized
QVQLQESGGGLVQAGGSLRLSCAASGSISLRIDMGWYRQAPGKEREFVASIDAGGTTYYADSVKGRFTISRDNAKNTVYLQMNSLKPEDTAVYYCAVQLWKSQLFDYWGQGTQVTVSS

SEQ ID NO: 14963 - protein, 125 aa, Artificial Sequence
  Chemically Synthesized
QVQLQESGGGLVQAGGSLRLSCAASGYISYGAYMGWYRQAPGKEREFVATIAYGANTNYADSVKGRFTISRDNAKNTVYLQMNSLKPEDTAVYYCAVSRSSHADSRSTKVVVIYWGQGTQVTVSS

SEQ ID NO: 14964 - protein, 114 aa, Artificial Sequence
  Chemically Synthesized
QVQLQESGGGLVQAGGSLRLSCAASGNISGFSPMGWYRQAPGKERELVASISYGAITYYADSVKGRFTISRDNAKNTVYLQMNSLKPEDTAVYYCAVDDRYYYWGQGTQVTVSS

SEQ ID NO: 14965 - protein, 118 aa, Artificial Sequence
  Chemically Synthesized
QVQLQESGGGLVQAGGSLRLSCAASGNISSATSMGWYRQAPGKEREFVAGISPGASTYYADSVKGRFTISRDNAKNTVYLQMNSLKPEDTAVYYCAVDSSYSDFLGYWGQGTQVTVSS

SEQ ID NO: 14966 - protein, 110 aa, Artificial Sequence
  Chemically Synthesized
QVQLQESGGGLVQAGGSLRLSCAASGNISSDIDMGWYRQAPGKERELVAGIGTGTSTYYADSVKGRFTISRDNAKNTVYLQMNSLKPEDTAVYYCAVFYWGQGTQVTVSS

SEQ ID NO: 14967 - protein, 121 aa, Artificial Sequence
  Chemically Synthesized
QVQLQESGGGLVQAGGSLRLSCAASGYIFGHSIMGWYRQAPGKERELVAGISVGGITYYADSVKGRFTISRDNAKNTVYLQMNSLKPEDTAVYYCAVGTVSLTVTFTGLYWGQGTQVTVSS

SEQ ID NO: 14968 - protein, 118 aa, Artificial Sequence
  Chemically Synthesized
QVQLQESGGGLVQAGGSLRLSCAASGSIFWDDAMGWYRQAPGKEREFVATIGAGSNTYYADSVKGRFTISRDNAKNTVYLQMNSLKPEDTAVYYCAVTFQYASYFPYWGQGTQVTVSS

SEQ ID NO: 14969 - protein, 122 aa, Artificial Sequence
  Chemically Synthesized
QVQLQESGGGLVQAGGSLRLSCAASGSIFDTVIMGWYRQAPGKERELVAAIAYGATTNYADSVKGRFTISRDNAKNTVYLQMNSLKPEDTAVYYCAADWDVDYVDRLSFPYWGQGTQVTVSS

SEQ ID NO: 14970 - protein, 118 aa, Artificial Sequence
  Chemically Synthesized
QVQLQESGGGLVQAGGSLRLSCAASGSIFAIVYMGWYRQAPGKERELVAGIGYGSITYYADSVKGRFTISRDNAKNTVYLQMNSLKPEDTAVYYCAVVSGLYAYYLYWGQGTQVTVSS

SEQ ID NO: 14971 - protein, 122 aa, Artificial Sequence
  Chemically Synthesized
QVQLQESGGGLVQAGGSLRLSCAASGTIFDWYVMGWYRQAPGKEREFVAGIAWGATTQYADSVKGRFTISRDNAKNTVYLQMNSLKPEDTAVYYCAVGVYTPGVYYYPHPYWGQGTQVTVSS

SEQ ID NO: 14972 - protein, 110 aa, Artificial Sequence
  Chemically Synthesized
QVQLQESGGGLVQAGGSLRLSCAASGYISRRDSMGWYRQAPGKERELVAGISRGGNTNYADSVKGRFTISRDNAKNTVYLQMNSLKPEDTAVYYCAAWYWGQGTQVTVSS

SEQ ID NO: 14973 - protein, 126 aa, Artificial Sequence
  Chemically Synthesized
QVQLQESGGGLVQAGGSLRLSCAASGTISFGYAMGWYRQAPGKERELVATISSGSTTNYADSVKGRFTISRDNAKNTVYLQMNSLKPEDTAVYYCAAYFRVDPYRARYSYSYHDYWGQGTQVTVSS

SEQ ID NO: 14974 - protein, 117 aa, Artificial Sequence
  Chemically Synthesized
QVQLQESGGGLVQAGGSLRLSCAASGSISASYMGWYRQAPGKERELVASIAYGANTNYADSVKGRFTISRDNAKNTVYLQMNSLKPEDTAVYYCAASRQGYDVYSYWGQGTQVTVSS

SEQ ID NO: 14975 - protein, 116 aa, Artificial Sequence
  Chemically Synthesized
QVQLQESGGGLVQAGGSLRLSCAASGNISVLSYMGWYRQAPGKERELVAAINKVVVPYADSVKGRFTISRDNAKNTVYLQMNSLKPEDTAVYYCAVYDLIGDDLYWGQGTQVTVSS

SEQ ID NO: 14976 - protein, 126 aa, Artificial Sequence
  Chemically Synthesized
QVQLQESGGGLVQAGGSLRLSCAASGYIFAIYVMGWYRQAPGKERELVAGITLGATTYYADSVKGRFTISRDNAKNTVYLQMNSLKPEDTAVYYCAALAIIGQGLYDQPNYYHGYWGQGTQVTVSS

SEQ ID NO: 14977 - protein, 122 aa, Artificial Sequence
  Chemically Synthesized
QVQLQESGGGLVQAGGSLRLSCAASGSISYTFNMGWYRQAPGKERELVATIGRGSTTNYADSVKGRFTISRDNAKNTVYLQMNSLKPEDTAVYYCAVTRVGLGRDKPYLLYWGQGTQVTVSS

SEQ ID NO: 14978 - protein, 117 aa, Artificial Sequence
  Chemically Synthesized
QVQLQESGGGLVQAGGSLRLSCAASGTIFETSMGWYRQAPGKEREFVAAISTGSITYYADSVKGRFTISRDNAKNTVYLQMNSLKPEDTAVYYCAVDYTDGLDLQYWGQGTQVTVSS

SEQ ID NO: 14979 - protein, 122 aa, Artificial Sequence
  Chemically Synthesized
QVQLQESGGGLVQAGGSLRLSCAASGNIFDRRTMGWYRQAPGKERELVASISPGGSTNYADSVKGRFTISRDNAKNTVYLQMNSLKPEDTAVYYCAVAPYDLKDYRDDLDYWGQGTQVTVSS

SEQ ID NO: 14980 - protein, 126 aa, Artificial Sequence
  Chemically Synthesized
QVQLQESGGGLVQAGGSLRLSCAASGTIFGWSAMGWYRQAPGKERELVAAIALGATTNYADSVKGRFTISRDNAKNTVYLQMNSLKPEDTAVYYCAAPYYVWLYPDSGTRYLFDYWGQGTQVTVSS

SEQ ID NO: 14981 - protein, 118 aa, Artificial Sequence
  Chemically Synthesized
QVQLQESGGGLVQAGGSLRLSCAASGYIFGYYIMGWYRQAPGKEREFVATISYGGNTNYADSVKGRFTISRDNAKNTVYLQMNSLKPEDTAVYYCAVPHYYRYTFAYWGQGTQVTVSS

SEQ ID NO: 14982 - protein, 122 aa, Artificial Sequence
  Chemically Synthesized
QVQLQESGGGLVQAGGSLRLSCAASGTIFYTDSMGWYRQAPGKEREFVAAITGGGSTNYADSVKGRFTISRDNAKNTVYLQMNSLKPEDTAVYYCAVDYGWDRPYDQVFWYWGQGTQVTVSS

SEQ ID NO: 14983 - protein, 126 aa, Artificial Sequence
  Chemically Synthesized
QVQLQESGGGLVQAGGSLRLSCAASGSIFYTGTMGWYRQAPGKERELVAAINSGGTTNYADSVKGRFTISRDNAKNTVYLQMNSLKPEDTAVYYCAVDAALPLDGGTWERGHHQYWGQGTQVTVSS

SEQ ID NO: 14984 - protein, 118 aa, Artificial Sequence
  Chemically Synthesized
QVQLQESGGGLVQAGGSLRLSCAASGYIFRYSIMGWYRQAPGKERELVASISGGSNTNYADSVKGRFTISRDNAKNTVYLQMNSLKPEDTAVYYCAAFNDLSYVHGYWGQGTQVTVSS

SEQ ID NO: 14985 - protein, 120 aa, Artificial Sequence
  Chemically Synthesized
QVQLQESGGGLVQAGGSLRLSCAASGNISYSMGWYRQAPGKERELVAGIDVGTNTNYADSVKGRFTISRDNAKNTVYLQMNSLKPEDTAVYYCAAQYYPGDSRDNLHRYWGQGTQVTVSS

SEQ ID NO: 14986 - protein, 126 aa, Artificial Sequence
  Chemically Synthesized
QVQLQESGGGLVQAGGSLRLSCAASGSISDYTYMGWYRQAPGKERELVASIDRGGITYYADSVKGRFTISRDNAKNTVYLQMNSLKPEDTAVYYCAAGRGDTNRSTTDYYQVHTYWGQGTQVTVSS

SEQ ID NO: 14987 - protein, 122 aa, Artificial Sequence
  Chemically Synthesized
QVQLQESGGGLVQAGGSLRLSCAASGNISNVYVMGWYRQAPGKERELVATITWGSNTNYADSVKGRFTISRDNAKNTVYLQMNSLKPEDTAVYYCAVHGYPYLYVGLTYGYWGQGTQVTVSS

SEQ ID NO: 14988 - protein, 117 aa, Artificial Sequence
  Chemically Synthesized
QVQLQESGGGLVQAGGSLRLSCAASGNISISLMGWYRQAPGKEREFVAGIGDGSNTNYADSVKGRFTISRDNAKNTVYLQMNSLKPEDTAVYYCAVWRLYSDYHSYWGQGTQVTVSS

SEQ ID NO: 14989 - protein, 118 aa, Artificial Sequence
  Chemically Synthesized
QVQLQESGGGLVQAGGSLRLSCAASGIYFFYGSMGWYRQAPGKERELVAAIANGGSTNYADSVKGRFTISRDNAKNTVYLQMNSLKPEDTAVYYCAVYYFPFRYHDYWGQGTQVTVSS

SEQ ID NO: 14990 - protein, 118 aa, Artificial Sequence
  Chemically Synthesized
QVQLQESGGGLVQAGGSLRLSCAASGSISDYVDMGWYRQAPGKEREFVAGIDRGAITNYADSVKGRFTISRDNAKNTVYLQMNSLKPEDTAVYYCAVYDFDAGAHYYWGQGTQVTVSS

SEQ ID NO: 14991 - protein, 118 aa, Artificial Sequence
  Chemically Synthesized
QVQLQESGGGLVQAGGSLRLSCAASGTIFFDASMGWYRQAPGKEREFVATIGYGANTNYADSVKGRFTISRDNAKNTVYLQMNSLKPEDTAVYYCAVQGYDLPQFDYWGQGTQVTVSS

SEQ ID NO: 14992 - protein, 118 aa, Artificial Sequence
  Chemically Synthesized
QVQLQESGGGLVQAGGSLRLSCAASGYIFSRIVMGWYRQAPGKEREFVAGIATGSTTYYADSVKGRFTISRDNAKNTVYLQMNSLKPEDTAVYYCAVDLWNPAPYPYWGQGTQVTVSS

SEQ ID NO: 14993 - protein, 121 aa, Artificial Sequence
  Chemically Synthesized
QVQLQESGGGLVQAGGSLRLSCAASGYISDVGYMGWYRQAPGKERELVAAIDEVVIPYADSVKGRFTISRDNAKNTVYLQMNSLKPEDTAVYYCAADRQDVDAYRFDYPYWGQGTQVTVSS

SEQ ID NO: 14994 - protein, 121 aa, Artificial Sequence
  Chemically Synthesized
QVQLQESGGGLVQAGGSLRLSCAASGYISGYDMGWYRQAPGKEREFVAGINYGSITNYADSVKGRFTISRDNAKNTVYLQMNSLKPEDTAVYYCAAQYGGWYASPSDLNYWGQGTQVTVSS

SEQ ID NO: 14995 - protein, 123 aa, Artificial Sequence
  Chemically Synthesized
QVQLQESGGGLVQAGGSLRLSCAASGSIFSADVMGWYRQAPGKERELVAAIGPTGAITNYADSVKGRFTISRDNAKNTVYLQMNSLKPEDTAVYYCAALLAEGWHAVGILGYWGQGTQVTVSS

SEQ ID NO: 14996 - protein, 118 aa, Artificial Sequence
  Chemically Synthesized
QVQLQESGGGLVQAGGSLRLSCAASGYIFTYQYMGWYRQAPGKERELVATITSGGSTYYADSVKGRFTISRDNAKNTVYLQMNSLKPEDTAVYYCAVVGSYKRQLDYWGQGTQVTVSS

SEQ ID NO: 14997 - protein, 117 aa, Artificial Sequence
  Chemically Synthesized
QVQLQESGGGLVQAGGSLRLSCAASGNIFFPDTMGWYRQAPGKERELVAGISLGGITYADSVKGRFTISRDNAKNTVYLQMNSLKPEDTAVYYCAVGENYDAGLAYWGQGTQVTVSS

SEQ ID NO: 14998 - protein, 117 aa, Artificial Sequence
  Chemically Synthesized
QVQLQESGGGLVQAGGSLRLSCAASGTISWRGHMGWYRQAPGKERELVASINSVLIPYADSVKGRFTISRDNAKNTVYLQMNSLKPEDTAVYYCAVLNTGLWLHTYWGQGTQVTVSS

SEQ ID NO: 14999 - protein, 117 aa, Artificial Sequence
  Chemically Synthesized
QVQLQESGGGLVQAGGSLRLSCAASGTISLTIRMGWYRQAPGKERELVAGIGQGTSTNYADSVKGRFTISRDNAKNTVYLQMNSLKPEDTAVYYCAVAQYYTSFHYWGQGTQVTVSS

SEQ ID NO: 15000 - protein, 121 aa, Artificial Sequence
  Chemically Synthesized
QVQLQESGGGLVQAGGSLRLSCAASGYIFDESYMGWYRQAPGKEREFVATIASGGNTNYADSVKGRFTISRDNAKNTVYLQMNSLKPEDTAVYYCAVAIYRTSGTRQVIYWGQGTQVTVSS

SEQ ID NO: 15001 - protein, 118 aa, Artificial Sequence
  Chemically Synthesized
QVQLQESGGGLVQAGGSLRLSCAASGNIFTILYMGWYRQAPGKERELVAGIGDGGITYYADSVKGRFTISRDNAKNTVYLQMNSLKPEDTAVYYCAAINQDQSYHEYWGQGTQVTVSS

SEQ ID NO: 15002 - protein, 118 aa, Artificial Sequence
  Chemically Synthesized
QVQLQESGGGLVQAGGSLRLSCAASGNIFDLYTMGWYRQAPGKEREFVATIDDGATTNYADSVKGRFTISRDNAKNTVYLQMNSLKPEDTAVYYCAVDGLNAYRHRYWGQGTQVTVSS

SEQ ID NO: 15003 - protein, 122 aa, Artificial Sequence
  Chemically Synthesized
QVQLQESGGGLVQAGGSLRLSCAASGTIFSGHAMGWYRQAPGKEREFVAGIDRGANTYYADSVKGRFTISRDNAKNTVYLQMNSLKPEDTAVYYCAVRYFYWPSIRTRHVYWGQGTQVTVSS

SEQ ID NO: 15004 - protein, 118 aa, Artificial Sequence
  Chemically Synthesized
QVQLQESGGGLVQAGGSLRLSCAASGTIFADYTMGWYRQAPGKEREFVATIDGGGTTYYADSVKGRFTISRDNAKNTVYLQMNSLKPEDTAVYYCAVGPTTIWYYDYWGQGTQVTVSS

SEQ ID NO: 15005 - protein, 118 aa, Artificial Sequence
  Chemically Synthesized
QVQLQESGGGLVQAGGSLRLSCAASGYIFRYATMGWYRQAPGKEREFVAGISGGGSTYYADSVKGRFTISRDNAKNTVYLQMNSLKPEDTAVYYCAVSSYRYHGLRYWGQGTQVTVSS

SEQ ID NO: 15006 - protein, 118 aa, Artificial Sequence
  Chemically Synthesized
QVQLQESGGGLVQAGGSLRLSCAASGTIFYYTYMGWYRQAPGKERELVAAITDGAITNYADSVKGRFTISRDNAKNTVYLQMNSLKPEDTAVYYCAADDTQQLGHQYWGQGTQVTVSS

SEQ ID NO: 15007 - protein, 126 aa, Artificial Sequence
  Chemically Synthesized
QVQLQESGGGLVQAGGSLRLSCAASGTISYYSRMGWYRQAPGKERELVAAIGRGSTTYYADSVKGRFTISRDNAKNTVYLQMNSLKPEDTAVYYCAAGYAKYTTHGYRYNNWYRYWGQGTQVTVSS

SEQ ID NO: 15008 - protein, 118 aa, Artificial Sequence
  Chemically Synthesized
QVQLQESGGGLVQAGGSLRLSCAASGNIFPVYIMGWYRQAPGKERELVAAIDPGAITYYADSVKGRFTISRDNAKNTVYLQMNSLKPEDTAVYYCAVDSWDYDPFVYWGQGTQVTVSS

SEQ ID NO: 15009 - protein, 118 aa, Artificial Sequence
  Chemically Synthesized
QVQLQESGGGLVQAGGSLRLSCAASGNISNYYIMGWYRQAPGKEREFVAGIAFGASTYYADSVKGRFTISRDNAKNTVYLQMNSLKPEDTAVYYCAVGDIHGPDHRYWGQGTQVTVSS

SEQ ID NO: 15010 - protein, 118 aa, Artificial Sequence
  Chemically Synthesized
QVQLQESGGGLVQAGGSLRLSCAASGNISYAGVMGWYRQAPGKEREFVAGISYGTSTYYADSVKGRFTISRDNAKNTVYLQMNSLKPEDTAVYYCAVYRRYYRGHRYWGQGTQVTVSS

SEQ ID NO: 15011 - protein, 118 aa, Artificial Sequence
  Chemically Synthesized
QVQLQESGGGLVQAGGSLRLSCAASGTIFRNRYMGWYRQAPGKEREFVAGIARGGTTNYADSVKGRFTISRDNAKNTVYLQMNSLKPEDTAVYYCAAWGYRRQYYAYWGQGTQVTVSS

SEQ ID NO: 15012 - protein, 118 aa, Artificial Sequence
  Chemically Synthesized
QVQLQESGGGLVQAGGSLRLSCAASGNIFQYTYMGWYRQAPGKERELVATIDHGGNTYYADSVKGRFTISRDNAKNTVYLQMNSLKPEDTAVYYCAVRSQYTAYYLYWGQGTQVTVSS

SEQ ID NO: 15013 - protein, 118 aa, Artificial Sequence
  Chemically Synthesized
QVQLQESGGGLVQAGGSLRLSCAASGYIFYSSYMGWYRQAPGKERELVAAIDPGASTNYADSVKGRFTISRDNAKNTVYLQMNSLKPEDTAVYYCAADTEDVDYFEYWGQGTQVTVSS

SEQ ID NO: 15014 - protein, 122 aa, Artificial Sequence
  Chemically Synthesized
QVQLQESGGGLVQAGGSLRLSCAASGNIFGAYPMGWYRQAPGKERELVAAITRGSNTYYADSVKGRFTISRDNAKNTVYLQMNSLKPEDTAVYYCAAQGRYEGHRRQYHYYWGQGTQVTVSS

SEQ ID NO: 15015 - protein, 122 aa, Artificial Sequence
  Chemically Synthesized
QVQLQESGGGLVQAGGSLRLSCAASGYISGRIRMGWYRQAPGKERELVAAITQGGSTYYADSVKGRFTISRDNAKNTVYLQMNSLKPEDTAVYYCAVGLLPRTSRGRYHPYWGQGTQVTVSS

SEQ ID NO: 15016 - protein, 108 aa, Artificial Sequence
  Chemically Synthesized
QVQLQESGGGLVQAGGSLRLSCAASGNISSYLAMGWYRQAPGKERELVYADSVKGRFTISRDNAKNTVYLQMNSLKPEDTAVYYCAADDVDGSNYYYWGQGTQVTVSS

SEQ ID NO: 15017 - protein, 122 aa, Artificial Sequence
  Chemically Synthesized
QVQLQESGGGLVQAGGSLRLSCAASGSIFRRYPMGWYRQAPGKERELVAAITWGTSTYYADSVKGRFTISRDNAKNTVYLQMNSLKPEDTAVYYCAVRYSTRTWSSYWHYYWGQGTQVTVSS

SEQ ID NO: 15018 - protein, 118 aa, Artificial Sequence
  Chemically Synthesized
QVQLQESGGGLVQAGGSLRLSCAASGYIFSRRYMGWYRQAPGKEREFVAAIGLGTTTNYADSVKGRFTISRDNAKNTVYLQMNSLKPEDTAVYYCAAYAYRSRAFHYWGQGTQVTVSS

SEQ ID NO: 15019 - protein, 121 aa, Artificial Sequence
  Chemically Synthesized
QVQLQESGGGLVQAGGSLRLSCAASGYISWSPYMGWYRQAPGKERELVAAIDSGTTTYYADSVKGRFTISRDNAKNTVYLQMNSLKPEDTAVYYCAAVGGARRGYRQHGYWGQGTQVTVSS

SEQ ID NO: 15020 - protein, 122 aa, Artificial Sequence
  Chemically Synthesized
QVQLQESGGGLVQAGGSLRLSCAASGTISYYRRMGWYRQAPGKEREFVATITYGSSTYYADSVKGRFTISRDNAKNTVYLQMNSLKPEDTAVYYCAAYRFGTSYIRPVHAYWGQGTQVTVSS

SEQ ID NO: 15021 - protein, 118 aa, Artificial Sequence
  Chemically Synthesized
QVQLQESGGGLVQAGGSLRLSCAASGYIFSFRTMGWYRQAPGKEREFVAGIGGGTITYYADSVKGRFTISRDNAKNTVYLQMNSLKPEDTAVYYCAVLWRFGDRLKYWGQGTQVTVSS

SEQ ID NO: 15022 - protein, 115 aa, Artificial Sequence
  Chemically Synthesized
QVQLQESGGGLVQAGGSLRLSCAASGYISAFDLMGWYRQAPGKERELVAAIDAGSNTYYADSVKGRFTISRDNAKNTVYLQMNSLKPEDTAVYYCAAAYYVHDYWGQGTQVTVSS

SEQ ID NO: 15023 - protein, 124 aa, Artificial Sequence
  Chemically Synthesized
QVQLQESGGGLVQAGGSLRLSCAASGNISSVTMGWYRQAPGKEREFVAGIGLGTITYYADSVKGRFTISRDNAKNTVYLQMNSLKPEDTAVYYCAVYGYDSVVVVSVLRCVFYWGQGTQVTVSS

SEQ ID NO: 15024 - protein, 118 aa, Artificial Sequence
  Chemically Synthesized
QVQLQESGGGLVQAGGSLRLSCAASGTIFFRYYMGWYRQAPGKERELVATISRGTSTYYADSVKGRFTISRDNAKNTVYLQMNSLKPEDTAVYYCAVNPAYRVRYVYWGQGTQVTVSS

SEQ ID NO: 15025 - protein, 122 aa, Artificial Sequence
  Chemically Synthesized
QVQLQESGGGLVQAGGSLRLSCAASGNISPGDGMGWYRQAPGKEREFVATITLGATTYYADSVKGRFTISRDNAKNTVYLQMNSLKPEDTAVYYCAAYTTTRDSSEDLHTYWGQGTQVTVSS

SEQ ID NO: 15026 - protein, 118 aa, Artificial Sequence
  Chemically Synthesized
QVQLQESGGGLVQAGGSLRLSCAASGNIFLTRFMGWYRQAPGKERELVAAINRGTITYYADSVKGRFTISRDNAKNTVYLQMNSLKPEDTAVYYCAAVASYPGRHAYWGQGTQVTVSS

SEQ ID NO: 15027 - protein, 122 aa, Artificial Sequence
  Chemically Synthesized
QVQLQESGGGLVQAGGSLRLSCAASGTIFLQLAMGWYRQAPGKEREFVAAIGYGTTTYYADSVKGRFTISRDNAKNTVYLQMNSLKPEDTAVYYCAARPRWGSTRIRSFRYWGQGTQVTVSS

SEQ ID NO: 15028 - protein, 126 aa, Artificial Sequence
  Chemically Synthesized
QVQLQESGGGLVQAGGSLRLSCAASGSIFLLGVMGWYRQAPGKERELVAAIAYGGITYYADSVKGRFTISRDNAKNTVYLQMNSLKPEDTAVYYCAARYDYYSLYGNWPYSDHRYWGQGTQVTVSS

SEQ ID NO: 15029 - protein, 118 aa, Artificial Sequence
  Chemically Synthesized
QVQLQESGGGLVQAGGSLRLSCAASGTIFAIGFMGWYRQAPGKERELVAAIGWGAITNYADSVKGRFTISRDNAKNTVYLQMNSLKPEDTAVYYCAAWTAYWYLHDYWGQGTQVTVSS

SEQ ID NO: 15030 - protein, 126 aa, Artificial Sequence
  Chemically Synthesized
QVQLQESGGGLVQAGGSLRLSCAASGTIFYTSGMGWYRQAPGKERELVASIATGTSTYYADSVKGRFTISRDNAKNTVYLQMNSLKPEDTAVYYCAVFGWRVPFRGTYGYGGHYYWGQGTQVTVSS

SEQ ID NO: 15031 - protein, 117 aa, Artificial Sequence
  Chemically Synthesized
QVQLQESGGGLVQAGGSLRLSCAASGSIFVDYDMGWYRQAPGKEREFVASIAVVLIPYADSVKGRFTISRDNAKNTVYLQMNSLKPEDTAVYYCAAYALPYQRFRYWGQGTQVTVSS

SEQ ID NO: 15032 - protein, 122 aa, Artificial Sequence
  Chemically Synthesized
QVQLQESGGGLVQAGGSLRLSCAASGYISVVRYMGWYRQAPGKERELVAGINYGGITYYADSVKGRFTISRDNAKNTVYLQMNSLKPEDTAVYYCAAGRPHGSYVGRWHGYWGQGTQVTVSS

SEQ ID NO: 15033 - protein, 121 aa, Artificial Sequence
  Chemically Synthesized
QVQLQESGGGLVQAGGSLRLSCAASGNISPQRAMGWYRQAPGKERELVATINLGAITYADSVKGRFTISRDNAKNTVYLQMNSLKPEDTAVYYCAVISYGYVYSVVRHPYWGQGTQVTVSS

SEQ ID NO: 15034 - protein, 122 aa, Artificial Sequence
  Chemically Synthesized
QVQLQESGGGLVQAGGSLRLSCAASGNISRAIKMGWYRQAPGKERELVATINWGGSTYYADSVKGRFTISRDNAKNTVYLQMNSLKPEDTAVYYCAVLTTTYQGRRKYHHYWGQGTQVTVSS

SEQ ID NO: 15035 - protein, 118 aa, Artificial Sequence
  Chemically Synthesized
QVQLQESGGGLVQAGGSLRLSCAASGNISSSSSMGWYRQAPGKERELVASIDIGSSTNYADSVKGRFTISRDNAKNTVYLQMNSLKPEDTAVYYCAVGGGKPLYYYYWGQGTQVTVSS

SEQ ID NO: 15036 - protein, 122 aa, Artificial Sequence
  Chemically Synthesized
QVQLQESGGGLVQAGGSLRLSCAASGTIFYPTGMGWYRQAPGKEREFVAAITSGATTYYADSVKGRFTISRDNAKNTVYLQMNSLKPEDTAVYYCAVWIWYARLAYGYYPYWGQGTQVTVSS

SEQ ID NO: 15037 - protein, 112 aa, Artificial Sequence
  Chemically Synthesized
QVQLQESGGGLVQAGGSLRLSCAASGYISRALRMGWYRQAPGKERELVAGITRGGITYYADSVKGRFTISRDNAKNTVYLQMNSLKPEDTAVYYCAALHRYWGQGTQVTVSS

SEQ ID NO: 15038 - protein, 122 aa, Artificial Sequence
  Chemically Synthesized
QVQLQESGGGLVQAGGSLRLSCAASGNIFTWDYMGWYRQAPGKEREFVASIDYGTNTYYADSVKGRFTISRDNAKNTVYLQMNSLKPEDTAVYYCAAVGHDANYTGYDHGYWGQGTQVTVSS

SEQ ID NO: 15039 - protein, 118 aa, Artificial Sequence
  Chemically Synthesized
QVQLQESGGGLVQAGGSLRLSCAASGTISKRVRMGWYRQAPGKERELVASINWGTSTNYADSVKGRFTISRDNAKNTVYLQMNSLKPEDTAVYYCAAATRFGLGLLYWGQGTQVTVSS

SEQ ID NO: 15040 - protein, 126 aa, Artificial Sequence
  Chemically Synthesized
QVQLQESGGGLVQAGGSLRLSCAASGNIFTRDDMGWYRQAPGKEREFVAAISVGTSTNYADSVKGRFTISRDNAKNTVYLQMNSLKPEDTAVYYCAVRRATPRWYIRWYTAIHQYWGQGTQVTVSS

SEQ ID NO: 15041 - protein, 118 aa, Artificial Sequence
  Chemically Synthesized
QVQLQESGGGLVQAGGSLRLSCAASGNISELVDMGWYRQAPGKEREFVASIGYGAITYYADSVKGRFTISRDNAKNTVYLQMNSLKPEDTAVYYCAAYDYARYSLPYWGQGTQVTVSS

SEQ ID NO: 15042 - protein, 125 aa, Artificial Sequence
  Chemically Synthesized
QVQLQESGGGLVQAGGSLRLSCAASGTIFDNDIMGWYRQAPGKERELVATIDPGANTNYADSVKGRFTISRDNAKNTVYLQMNSLKPEDTAVYYCAVRSYWYSTLVVSTGTFIYWGQGTQVTVSS

SEQ ID NO: 15043 - protein, 118 aa, Artificial Sequence
  Chemically Synthesized
QVQLQESGGGLVQAGGSLRLSCAASGSIFWRYAMGWYRQAPGKEREFVATIAGGTTTYYADSVKGRFTISRDNAKNTVYLQMNSLKPEDTAVYYCAVASKYYSYHRYWGQGTQVTVSS

SEQ ID NO: 15044 - protein, 118 aa, Artificial Sequence
  Chemically Synthesized
QVQLQESGGGLVQAGGSLRLSCAASGTISYVRLMGWYRQAPGKEREFVAAIGRGSNTNYADSVKGRFTISRDNAKNTVYLQMNSLKPEDTAVYYCAAKQYARGQHTYWGQGTQVTVSS

SEQ ID NO: 15045 - protein, 118 aa, Artificial Sequence
  Chemically Synthesized
QVQLQESGGGLVQAGGSLRLSCAASGTIFGLAAMGWYRQAPGKERELVASISRGTNTYYADSVKGRFTISRDNAKNTVYLQMNSLKPEDTAVYYCAVRFPYLKRHWYWGQGTQVTVSS

SEQ ID NO: 15046 - protein, 118 aa, Artificial Sequence
  Chemically Synthesized
QVQLQESGGGLVQAGGSLRLSCAASGTIFRVRYMGWYRQAPGKERELVAGITFGANTYYADSVKGRFTISRDNAKNTVYLQMNSLKPEDTAVYYCAVRYAARYLHFYWGQGTQVTVSS

SEQ ID NO: 15047 - protein, 122 aa, Artificial Sequence
  Chemically Synthesized
QVQLQESGGGLVQAGGSLRLSCAASGYISDYTSMGWYRQAPGKERELVAAIDAGTITYYADSVKGRFTISRDNAKNTVYLQMNSLKPEDTAVYYCAAGETFGRWYFDEHAYWGQGTQVTVSS

SEQ ID NO: 15048 - protein, 122 aa, Artificial Sequence
  Chemically Synthesized
QVQLQESGGGLVQAGGSLRLSCAASGTISTLSIMGWYRQAPGKERELVAAITTGATTNYADSVKGRFTISRDNAKNTVYLQMNSLKPEDTAVYYCAAERTYEVYGQRAYWYWGQGTQVTVSS

SEQ ID NO: 15049 - protein, 126 aa, Artificial Sequence
  Chemically Synthesized
QVQLQESGGGLVQAGGSLRLSCAASGTISWRRPMGWYRQAPGKERELVAAISAGGSTNYADSVKGRFTISRDNAKNTVYLQMNSLKPEDTAVYYCAVHYRGTRDGWRYALNYLVYWGQGTQVTVSS

SEQ ID NO: 15050 - protein, 117 aa, Artificial Sequence
  Chemically Synthesized
QVQLQESGGGLVQAGGSLRLSCAASGNISYRYMGWYRQAPGKERELVAGINYGASTYYADSVKGRFTISRDNAKNTVYLQMNSLKPEDTAVYYCAVLYRRPRNYNYWGQGTQVTVSS

SEQ ID NO: 15051 - protein, 117 aa, Artificial Sequence
  Chemically Synthesized
QVQLQESGGGLVQAGGSLRLSCAASGTISTSSEMGWYRQAPGKERELVATISFGTITNYADSVKGRFTISRDNAKNTVYLQMNSLKPEDTAVYYCAAYRSSSTLLYWGQGTQVTVSS

SEQ ID NO: 15052 - protein, 121 aa, Artificial Sequence
  Chemically Synthesized
QVQLQESGGGLVQAGGSLRLSCAASGNIFRSQVMGWYRQAPGKERELVASIAGGTTYYADSVKGRFTISRDNAKNTVYLQMNSLKPEDTAVYYCAVRTWRPYSYPRRHAYWGQGTQVTVSS

SEQ ID NO: 15053 - protein, 122 aa, Artificial Sequence
  Chemically Synthesized
QVQLQESGGGLVQAGGSLRLSCAASGYISGYYRMGWYRQAPGKEREFVATITRGSTTYYADSVKGRFTISRDNAKNTVYLQMNSLKPEDTAVYYCAAVRWQWAPWNRKLLYWGQGTQVTVSS

SEQ ID NO: 15054 - protein, 121 aa, Artificial Sequence
  Chemically Synthesized
QVQLQESGGGLVQAGGSLRLSCAASGSISDPWMGWYRQAPGKERELVAGIGTGGSTYYADSVKGRFTISRDNAKNTVYLQMNSLKPEDTAVYYCAALVDQDHLDYYLLYYWGQGTQVTVSS

SEQ ID NO: 15055 - protein, 121 aa, Artificial Sequence
  Chemically Synthesized
QVQLQESGGGLVQAGGSLRLSCAASGSISRYYMGWYRQAPGKERELVASIDPGAITNYADSVKGRFTISRDNAKNTVYLQMNSLKPEDTAVYYCAAQNRWRPVWGRKLYYWGQGTQVTVSS

SEQ ID NO: 15056 - protein, 118 aa, Artificial Sequence
  Chemically Synthesized
QVQLQESGGGLVQAGGSLRLSCAASGSIFGYRYMGWYRQAPGKERELVAGIGFGGITYYADSVKGRFTISRDNAKNTVYLQMNSLKPEDTAVYYCAAGYTYRYPYRYWGQGTQVTVSS

SEQ ID NO: 15057 - protein, 118 aa, Artificial Sequence
  Chemically Synthesized
QVQLQESGGGLVQAGGSLRLSCAASGYIFRWFTMGWYRQAPGKERELVAAINYGTTTNYADSVKGRFTISRDNAKNTVYLQMNSLKPEDTAVYYCAAPLRGVRRHFYWGQGTQVTVSS

SEQ ID NO: 15058 - protein, 126 aa, Artificial Sequence
  Chemically Synthesized
QVQLQESGGGLVQAGGSLRLSCAASGSIFIPKYMGWYRQAPGKERELVASIGRGSNTNYADSVKGRFTISRDNAKNTVYLQMNSLKPEDTAVYYCAASPRYPYFFDFQYYYTHGYWGQGTQVTVSS

SEQ ID NO: 15059 - protein, 117 aa, Artificial Sequence
  Chemically Synthesized
QVQLQESGGGLVQAGGSLRLSCAASGTIFGDRMGWYRQAPGKERELVATISRGTITYYADSVKGRFTISRDNAKNTVYLQMNSLKPEDTAVYYCAVQAAYHVTHAYWGQGTQVTVSS

SEQ ID NO: 15060 - protein, 118 aa, Artificial Sequence
  Chemically Synthesized
QVQLQESGGGLVQAGGSLRLSCAASGSIFRWSTMGWYRQAPGKEREFVAAIAPGTSTNYADSVKGRFTISRDNAKNTVYLQMNSLKPEDTAVYYCAVRRGYIYNHWYWGQGTQVTVSS

SEQ ID NO: 15061 - protein, 122 aa, Artificial Sequence
  Chemically Synthesized
QVQLQESGGGLVQAGGSLRLSCAASGNISRRASMGWYRQAPGKERELVAGINRGSSTNYADSVKGRFTISRDNAKNTVYLQMNSLKPEDTAVYYCAVVPGRYLRPYHLYQYWGQGTQVTVSS

SEQ ID NO: 15062 - protein, 122 aa, Artificial Sequence
  Chemically Synthesized
QVQLQESGGGLVQAGGSLRLSCAASGTISSVDSMGWYRQAPGKERELVATIGYGAITYYADSVKGRFTISRDNAKNTVYLQMNSLKPEDTAVYYCAALWYYYAGPEYYHGYWGQGTQVTVSS

SEQ ID NO: 15063 - protein, 125 aa, Artificial Sequence
  Chemically Synthesized
QVQLQESGGGLVQAGGSLRLSCAASGTISDQDGMGWYRQAPGKEREFVAGINWGANTYYADSVKGRFTISRDNAKNTVYLQMNSLKPEDTAVYYCAAVVGATYHRGSPRALHRYWGQGTQVTVSS

SEQ ID NO: 15064 - protein, 118 aa, Artificial Sequence
  Chemically Synthesized
QVQLQESGGGLVQAGGSLRLSCAASGNIFYVRYMGWYRQAPGKEREFVATITSGTTTYYADSVKGRFTISRDNAKNTVYLQMNSLKPEDTAVYYCAAAFWRRGTHGYWGQGTQVTVSS

SEQ ID NO: 15065 - protein, 122 aa, Artificial Sequence
  Chemically Synthesized
QVQLQESGGGLVQAGGSLRLSCAASGNIFIIPIMGWYRQAPGKERELVAAITYGTTTYYADSVKGRFTISRDNAKNTVYLQMNSLKPEDTAVYYCAVGRIYGLYYAWRHGYWGQGTQVTVSS

SEQ ID NO: 15066 - protein, 122 aa, Artificial Sequence
  Chemically Synthesized
QVQLQESGGGLVQAGGSLRLSCAASGSISYPSYMGWYRQAPGKERELVAGINYGSSTYYADSVKGRFTISRDNAKNTVYLQMNSLKPEDTAVYYCAVFRTGKNARYIYLQYWGQGTQVTVSS

SEQ ID NO: 15067 - protein, 118 aa, Artificial Sequence
  Chemically Synthesized
QVQLQESGGGLVQAGGSLRLSCAASGNISEVSQMGWYRQAPGKERELVATITGGGTTYYADSVKGRFTISRDNAKNTVYLQMNSLKPEDTAVYYCAVRHHYYLIHVYWGQGTQVTVSS

SEQ ID NO: 15068 - protein, 126 aa, Artificial Sequence
  Chemically Synthesized
QVQLQESGGGLVQAGGSLRLSCAASGSIFRFRRMGWYRQAPGKERELVAGIGYGGNTYYADSVKGRFTISRDNAKNTVYLQMNSLKPEDTAVYYCAVSRTLRRQWNRPLYDSYYYWGQGTQVTVSS

SEQ ID NO: 15069 - protein, 116 aa, Artificial Sequence
  Chemically Synthesized
QVQLQESGGGLVQAGGSLRLSCAASGNISEPASMGWYRQAPGKERELVADVGGNTNYADSVKGRFTISRDNAKNTVYLQMNSLKPEDTAVYYCAVTSRTQIYFTYWGQGTQVTVSS

SEQ ID NO: 15070 - protein, 126 aa, Artificial Sequence
  Chemically Synthesized
QVQLQESGGGLVQAGGSLRLSCAASGSIFLYFIMGWYRQAPGKERELVAAIAPGTSTYYADSVKGRFTISRDNAKNTVYLQMNSLKPEDTAVYYCAAIYVDPGEYDADSPRKYYYWGQGTQVTVSS

SEQ ID NO: 15071 - protein, 122 aa, Artificial Sequence
  Chemically Synthesized
QVQLQESGGGLVQAGGSLRLSCAASGTISDKYYMGWYRQAPGKERELVAGITDGATTYYADSVKGRFTISRDNAKNTVYLQMNSLKPEDTAVYYCAAIDHDLYHYPENYDYWGQGTQVTVSS

SEQ ID NO: 15072 - protein, 118 aa, Artificial Sequence
  Chemically Synthesized
QVQLQESGGGLVQAGGSLRLSCAASGYIFWVYGMGWYRQAPGKERELVAGIGIGGITYYADSVKGRFTISRDNAKNTVYLQMNSLKPEDTAVYYCAAYLIDWKWLVYWGQGTQVTVSS

SEQ ID NO: 15073 - protein, 122 aa, Artificial Sequence
  Chemically Synthesized
QVQLQESGGGLVQAGGSLRLSCAASGSISRVYRMGWYRQAPGKEREFVASIGYGTTTNYADSVKGRFTISRDNAKNTVYLQMNSLKPEDTAVYYCAVVYRARNPRRPLYLYWGQGTQVTVSS

SEQ ID NO: 15074 - protein, 118 aa, Artificial Sequence
  Chemically Synthesized
QVQLQESGGGLVQAGGSLRLSCAASGNISRYVYMGWYRQAPGKEREFVAGIGAGTTTNYADSVKGRFTISRDNAKNTVYLQMNSLKPEDTAVYYCAARPLTWWRYYYWGQGTQVTVSS

SEQ ID NO: 15075 - protein, 118 aa, Artificial Sequence
  Chemically Synthesized
QVQLQESGGGLVQAGGSLRLSCAASGYISTRSAMGWYRQAPGKERELVAAIAYGSNTYYADSVKGRFTISRDNAKNTVYLQMNSLKPEDTAVYYCAVQFRRRPYYYYWGQGTQVTVSS

SEQ ID NO: 15076 - protein, 116 aa, Artificial Sequence
  Chemically Synthesized
QVQLQESGGGLVQAGGSLRLSCAASGTISRNPRMGWYRQAPGKEREFVAGITRGAITYYADSVKGRFTISRDNAKNTVYLQMNSLKPEDTAVYYCAVVRYGQYGYWGQGTQVTVSS

SEQ ID NO: 15077 - protein, 121 aa, Artificial Sequence
  Chemically Synthesized
QVQLQESGGGLVQAGGSLRLSCAASGNIFRFGYMGWYRQAPGKEREFVASIGRGATTNYADSVKGRFTISRDNAKNTVYLQMNSLKPEDTAVYYCAAYYGWNTFSWHLVYWGQGTQVTVSS

SEQ ID NO: 15078 - protein, 118 aa, Artificial Sequence
  Chemically Synthesized
QVQLQESGGGLVQAGGSLRLSCAASGSISDDQYMGWYRQAPGKEREFVATITLGTSTNYADSVKGRFTISRDNAKNTVYLQMNSLKPEDTAVYYCAVRRYVGFAFGYWGQGTQVTVSS

SEQ ID NO: 15079 - protein, 126 aa, Artificial Sequence
  Chemically Synthesized
QVQLQESGGGLVQAGGSLRLSCAASGNISTRPAMGWYRQAPGKERELVASIDFGTNTYYADSVKGRFTISRDNAKNTVYLQMNSLKPEDTAVYYCAVEAQIRYDDTYGLYAIYGYWGQGTQVTVSS

SEQ ID NO: 15080 - protein, 118 aa, Artificial Sequence
  Chemically Synthesized
QVQLQESGGGLVQAGGSLRLSCAASGTIFGTTDMGWYRQAPGKERELVATIDYGTITNYADSVKGRFTISRDNAKNTVYLQMNSLKPEDTAVYYCAAEYVSHYYLVYWGQGTQVTVSS

SEQ ID NO: 15081 - protein, 118 aa, Artificial Sequence
  Chemically Synthesized
QVQLQESGGGLVQAGGSLRLSCAASGTIFPRLSMGWYRQAPGKERELVASIGLGGSTNYADSVKGRFTISRDNAKNTVYLQMNSLKPEDTAVYYCAVHRYRRGWLYYWGQGTQVTVSS

SEQ ID NO: 15082 - protein, 122 aa, Artificial Sequence
  Chemically Synthesized
QVQLQESGGGLVQAGGSLRLSCAASGNIFFQPPMGWYRQAPGKERELVAGIGYGGTTNYADSVKGRFTISRDNAKNTVYLQMNSLKPEDTAVYYCAVVQRVRYQRGWGHLYWGQGTQVTVSS

SEQ ID NO: 15083 - protein, 118 aa, Artificial Sequence
  Chemically Synthesized
QVQLQESGGGLVQAGGSLRLSCAASGTISSRAVMGWYRQAPGKERELVAGITIGGNTNYADSVKGRFTISRDNAKNTVYLQMNSLKPEDTAVYYCAATNWLRWWYYYWGQGTQVTVSS

SEQ ID NO: 15084 - protein, 114 aa, Artificial Sequence
  Chemically Synthesized
QVQLQESGGGLVQAGGSLRLSCAASGYISPFGYMGWYRQAPGKERELVAGISYGGTTNYADSVKGRFTISRDNAKNTVYLQMNSLKPEDTAVYYCAVDSALVYWGQGTQVTVSS

SEQ ID NO: 15085 - protein, 118 aa, Artificial Sequence
  Chemically Synthesized
QVQLQESGGGLVQAGGSLRLSCAASGYISYRPSMGWYRQAPGKEREFVAGISGGANTYYADSVKGRFTISRDNAKNTVYLQMNSLKPEDTAVYYCAAVILGRVPHLYWGQGTQVTVSS

SEQ ID NO: 15086 - protein, 122 aa, Artificial Sequence
  Chemically Synthesized
QVQLQESGGGLVQAGGSLRLSCAASGNISRSTLMGWYRQAPGKEREFVATISRGTITYYADSVKGRFTISRDNAKNTVYLQMNSLKPEDTAVYYCAVLTGYRARWRDPHVYWGQGTQVTVSS

SEQ ID NO: 15087 - protein, 121 aa, Artificial Sequence
  Chemically Synthesized
QVQLQESGGGLVQAGGSLRLSCAASGYISGGYVMGWYRQAPGKERELVAAIATGGSTYYADSVKGRFTISRDNAKNTVYLQMNSLKPEDTAVYYCAAYKIRAPRRFWHVYWGQGTQVTVSS

SEQ ID NO: 15088 - protein, 122 aa, Artificial Sequence
  Chemically Synthesized
QVQLQESGGGLVQAGGSLRLSCAASGSISYFYYMGWYRQAPGKEREFVAAISFGTSTYYADSVKGRFTISRDNAKNTVYLQMNSLKPEDTAVYYCAVRHDSQVPSWQGHYYWGQGTQVTVSS

SEQ ID NO: 15089 - protein, 115 aa, Artificial Sequence
  Chemically Synthesized
QVQLQESGGGLVQAGGSLRLSCAASGNIFYPRIMGWYRQAPGKERELVAGISYGGTTYYADSVKGRFTISRDNAKNTVYLQMNSLKPEDTAVYYCAVGSIRHTYWGQGTQVTVSS

SEQ ID NO: 15090 - protein, 118 aa, Artificial Sequence
  Chemically Synthesized
QVQLQESGGGLVQAGGSLRLSCAASGNISDLDRMGWYRQAPGKERELVAGIDYGGSTYYADSVKGRFTISRDNAKNTVYLQMNSLKPEDTAVYYCAVGVALYYPYFYWGQGTQVTVSS

SEQ ID NO: 15091 - protein, 122 aa, Artificial Sequence
  Chemically Synthesized
QVQLQESGGGLVQAGGSLRLSCAASGSIFDDHRMGWYRQAPGKEREFVAAITYGANTNYADSVKGRFTISRDNAKNTVYLQMNSLKPEDTAVYYCAAGSYRLNYAPGLLLYWGQGTQVTVSS

SEQ ID NO: 15092 - protein, 126 aa, Artificial Sequence
  Chemically Synthesized
QVQLQESGGGLVQAGGSLRLSCAASGTISSARDMGWYRQAPGKEREFVASIDYGTSTNYADSVKGRFTISRDNAKNTVYLQMNSLKPEDTAVYYCAVGDYGTYDLDYELVGYYYYWGQGTQVTVSS

SEQ ID NO: 15093 - protein, 118 aa, Artificial Sequence
  Chemically Synthesized
QVQLQESGGGLVQAGGSLRLSCAASGYIFVRHGMGWYRQAPGKERELVAGINPGGTTYYADSVKGRFTISRDNAKNTVYLQMNSLKPEDTAVYYCAVRYWRRWYFLYWGQGTQVTVSS

SEQ ID NO: 15094 - protein, 126 aa, Artificial Sequence
  Chemically Synthesized
QVQLQESGGGLVQAGGSLRLSCAASGNIFDEWSMGWYRQAPGKEREFVATIAYGATTYYADSVKGRFTISRDNAKNTVYLQMNSLKPEDTAVYYCAVDDDYASDQQRPPWYYHYYWGQGTQVTVSS

SEQ ID NO: 15095 - protein, 118 aa, Artificial Sequence
  Chemically Synthesized
QVQLQESGGGLVQAGGSLRLSCAASGTIFTGYVMGWYRQAPGKEREFVAGIGYGSTTYYADSVKGRFTISRDNAKNTVYLQMNSLKPEDTAVYYCAVHSWSQYLYDYWGQGTQVTVSS

SEQ ID NO: 15096 - protein, 122 aa, Artificial Sequence
  Chemically Synthesized
QVQLQESGGGLVQAGGSLRLSCAASGSIFLEYYMGWYRQAPGKEREFVASIGYGTNTNYADSVKGRFTISRDNAKNTVYLQMNSLKPEDTAVYYCAVDIYDPLGWFTLHDYWGQGTQVTVSS

SEQ ID NO: 15097 - protein, 121 aa, Artificial Sequence
  Chemically Synthesized
QVQLQESGGGLVQAGGSLRLSCAASGSIFDYSGMGWYRQAPGKEREFVATIAVGTNTNYADSVKGRFTISRDNAKNTVYLQMNSLKPEDTAVYYCAAIDTYPRYYYPLVYWGQGTQVTVSS

SEQ ID NO: 15098 - protein, 125 aa, Artificial Sequence
  Chemically Synthesized
QVQLQESGGGLVQAGGSLRLSCAASGTISTLDYMGWYRQAPGKERELVAAIGVGSTTNYADSVKGRFTISRDNAKNTVYLQMNSLKPEDTAVYYCAAAQVYYLLATVKISDSFYWGQGTQVTVSS

SEQ ID NO: 15099 - protein, 122 aa, Artificial Sequence
  Chemically Synthesized
QVQLQESGGGLVQAGGSLRLSCAASGYISRRFTMGWYRQAPGKERELVAAISRGTTTYYADSVKGRFTISRDNAKNTVYLQMNSLKPEDTAVYYCAVVYVTRSWPTYYHPYWGQGTQVTVSS

SEQ ID NO: 15100 - protein, 122 aa, Artificial Sequence
  Chemically Synthesized
QVQLQESGGGLVQAGGSLRLSCAASGTISRWRRMGWYRQAPGKERELVATITGGGNTNYADSVKGRFTISRDNAKNTVYLQMNSLKPEDTAVYYCAVGVSSRYPAIVRYYYWGQGTQVTVSS

SEQ ID NO: 15101 - protein, 114 aa, Artificial Sequence
  Chemically Synthesized
QVQLQESGGGLVQAGGSLRLSCAASGSISDSLLMGWYRQAPGKEREFVAGITYGAITYYADSVKGRFTISRDNAKNTVYLQMNSLKPEDTAVYYCASVVYYWYWGQGTQVTVSS

SEQ ID NO: 15102 - protein, 118 aa, Artificial Sequence
  Chemically Synthesized
QVQLQESGGGLVQAGGSLRLSCAASGTISRSGVMGWYRQAPGKEREFVAGIGRGSSTYYADSVKGRFTISRDNAKNTVYLQMNSLKPEDTAVYYCAVRGTRLYNHVYWGQGTQVTVSS

SEQ ID NO: 15103 - protein, 118 aa, Artificial Sequence
  Chemically Synthesized
QVQLQESGGGLVQAGGSLRLSCAASGYISYGTVMGWYRQAPGKEREFVAAIGRGATTYYADSVKGRFTISRDNAKNTVYLQMNSLKPEDTAVYYCAVWRRKGRTLGYWGQGTQVTVSS

SEQ ID NO: 15104 - protein, 118 aa, Artificial Sequence
  Chemically Synthesized
QVQLQESGGGLVQAGGSLRLSCAASGYISGGRPMGWYRQAPGKERELVATIGRGAITYYADSVKGRFTISRDNAKNTVYLQMNSLKPEDTAVYYCAARVHRLAYYAYWGQGTQVTVSS

SEQ ID NO: 15105 - protein, 118 aa, Artificial Sequence
  Chemically Synthesized
QVQLQESGGGLVQAGGSLRLSCAASGTIFWRTYMGWYRQAPGKERELVAAIGYGSNTYYADSVKGRFTISRDNAKNTVYLQMNSLKPEDTAVYYCAAEPTRKATHLYWGQGTQVTVSS

SEQ ID NO: 15106 - protein, 123 aa, Artificial Sequence
  Chemically Synthesized
QVQLQESGGGLVQAGGSLRLSCAASGTISVRRMGWYRQAPGKERELVAGITYGGTTYYADSVKGRFTISRDNAKNTVYLQMNSLKPEDTAVYYCAVTAKAYDARPAYKYHRYWGQGTQVTVSS

SEQ ID NO: 15107 - protein, 118 aa, Artificial Sequence
  Chemically Synthesized
QVQLQESGGGLVQAGGSLRLSCAASGNISVYYTMGWYRQAPGKEREFVAGITEGSNTYYADSVKGRFTISRDNAKNTVYLQMNSLKPEDTAVYYCAALYPYALDLDYWGQGTQVTVSS

SEQ ID NO: 15108 - protein, 126 aa, Artificial Sequence
  Chemically Synthesized
QVQLQESGGGLVQAGGSLRLSCAASGYISYYYSMGWYRQAPGKEREFVAGITRGATTYYADSVKGRFTISRDNAKNTVYLQMNSLKPEDTAVYYCAVRARPGHSYALARPYGYGYWGQGTQVTVSS

SEQ ID NO: 15109 - protein, 118 aa, Artificial Sequence
  Chemically Synthesized
QVQLQESGGGLVQAGGSLRLSCAASGNIFWYPYMGWYRQAPGKERELVAAIGRGASTNYADSVKGRFTISRDNAKNTVYLQMNSLKPEDTAVYYCAAWYGLYTRHTYWGQGTQVTVSS

SEQ ID NO: 15110 - protein, 122 aa, Artificial Sequence
  Chemically Synthesized
QVQLQESGGGLVQAGGSLRLSCAASGTIFSSGRMGWYRQAPGKEREFVAAINGGGITYYADSVKGRFTISRDNAKNTVYLQMNSLKPEDTAVYYCAARYYYRAWYSRPHTYWGQGTQVTVSS

SEQ ID NO: 15111 - protein, 122 aa, Artificial Sequence
  Chemically Synthesized
QVQLQESGGGLVQAGGSLRLSCAASGYISNAWIMGWYRQAPGKERELVASIGWGTITNYADSVKGRFTISRDNAKNTVYLQMNSLKPEDTAVYYCAVTRYQRYYAYYKHSYWGQGTQVTVSS

SEQ ID NO: 15112 - protein, 118 aa, Artificial Sequence
  Chemically Synthesized
QVQLQESGGGLVQAGGSLRLSCAASGYISYYQVMGWYRQAPGKEREFVAGIAWGASTNYADSVKGRFTISRDNAKNTVYLQMNSLKPEDTAVYYCAAVTPRRNRHNYWGQGTQVTVSS

SEQ ID NO: 15113 - protein, 118 aa, Artificial Sequence
  Chemically Synthesized
QVQLQESGGGLVQAGGSLRLSCAASGYISDSNGMGWYRQAPGKEREFVATIDRGGITNYADSVKGRFTISRDNAKNTVYLQMNSLKPEDTAVYYCAVYRRLGYPYSYWGQGTQVTVSS

SEQ ID NO: 15114 - protein, 116 aa, Artificial Sequence
  Chemically Synthesized
QVQLQESGGGLVQAGGSLRLSCAASGTIFGGSMGWYRQAPGKEREFVAAIDWGAITYYADSVKGRFTISRDNAKNTVYLQMNSLKPEDTAVYYCAVGDNSVVSMYWGQGTQVTVSS

SEQ ID NO: 15115 - protein, 121 aa, Artificial Sequence
  Chemically Synthesized
QVQLQESGGGLVQAGGSLRLSCAASGTIFYIRSMGWYRQAPGKERELVATITYGASTNYADSVKGRFTISRDNAKNTVYLQMNSLKPEDTAVYYCAVQRLRIWDFLSHAYWGQGTQVTVSS

SEQ ID NO: 15116 - protein, 122 aa, Artificial Sequence
  Chemically Synthesized
QVQLQESGGGLVQAGGSLRLSCAASGNIFLISVMGWYRQAPGKERELVAGIGDGTITNYADSVKGRFTISRDNAKNTVYLQMNSLKPEDTAVYYCAVPYRRSLQRNPDHWYWGQGTQVTVSS

SEQ ID NO: 15117 - protein, 122 aa, Artificial Sequence
  Chemically Synthesized
QVQLQESGGGLVQAGGSLRLSCAASGTIFLRNYMGWYRQAPGKEREFVASINKGTTTNYADSVKGRFTISRDNAKNTVYLQMNSLKPEDTAVYYCAVWSRAWLHYWNWLGYWGQGTQVTVSS

SEQ ID NO: 15118 - protein, 118 aa, Artificial Sequence
  Chemically Synthesized
QVQLQESGGGLVQAGGSLRLSCAASGTIFGDSGMGWYRQAPGKEREFVATINYGGITNYADSVKGRFTISRDNAKNTVYLQMNSLKPEDTAVYYCAAAGRVYPTFPYWGQGTQVTVSS

SEQ ID NO: 15119 - protein, 122 aa, Artificial Sequence
  Chemically Synthesized
QVQLQESGGGLVQAGGSLRLSCAASGNISKTDEMGWYRQAPGKEREFVASIGQGGITNYADSVKGRFTISRDNAKNTVYLQMNSLKPEDTAVYYCAADIDGTLAPVDRYVYWGQGTQVTVSS

SEQ ID NO: 15120 - protein, 118 aa, Artificial Sequence
  Chemically Synthesized
QVQLQESGGGLVQAGGSLRLSCAASGYISNVRTMGWYRQAPGKERELVAAISRGSSTYYADSVKGRFTISRDNAKNTVYLQMNSLKPEDTAVYYCAAVGTLTKRYYYWGQGTQVTVSS

SEQ ID NO: 15121 - protein, 118 aa, Artificial Sequence
  Chemically Synthesized
QVQLQESGGGLVQAGGSLRLSCAASGSISWYRGMGWYRQAPGKERELVASISYGSSTYYADSVKGRFTISRDNAKNTVYLQMNSLKPEDTAVYYCAAYYYRRARYYYWGQGTQVTVSS

SEQ ID NO: 15122 - protein, 118 aa, Artificial Sequence
  Chemically Synthesized
QVQLQESGGGLVQAGGSLRLSCAASGYISSWAGMGWYRQAPGKERELVAGIAAGSTTYYADSVKGRFTISRDNAKNTVYLQMNSLKPEDTAVYYCAAFRGRRYLHTYWGQGTQVTVSS

SEQ ID NO: 15123 - protein, 118 aa, Artificial Sequence
  Chemically Synthesized
QVQLQESGGGLVQAGGSLRLSCAASGSIFRRQFMGWYRQAPGKERELVASINKGGNTYYADSVKGRFTISRDNAKNTVYLQMNSLKPEDTAVYYCAANRYSWLRHFYWGQGTQVTVSS

SEQ ID NO: 15124 - protein, 125 aa, Artificial Sequence
  Chemically Synthesized
QVQLQESGGGLVQAGGSLRLSCAASGNISDRDYMGWYRQAPGKERELVASIDWGGTTYYADSVKGRFTISRDNAKNTVYLQMNSLKPEDTAVYYCALRSVVVVRTGFTLVGRFYWGQGTQVTVSS

SEQ ID NO: 15125 - protein, 118 aa, Artificial Sequence
  Chemically Synthesized
QVQLQESGGGLVQAGGSLRLSCAASGSIFDGYLMGWYRQAPGKEREFVAGIAYGTSTYYADSVKGRFTISRDNAKNTVYLQMNSLKPEDTAVYYCAAYERYGYGHDYWGQGTQVTVSS

SEQ ID NO: 15126 - protein, 118 aa, Artificial Sequence
  Chemically Synthesized
QVQLQESGGGLVQAGGSLRLSCAASGYISTTATMGWYRQAPGKERELVAAIGRGSITYYADSVKGRFTISRDNAKNTVYLQMNSLKPEDTAVYYCAVGTYLVAYFAYWGQGTQVTVSS

SEQ ID NO: 15127 - protein, 122 aa, Artificial Sequence
  Chemically Synthesized
QVQLQESGGGLVQAGGSLRLSCAASGYISLPWYMGWYRQAPGKERELVAAIGYGTSTNYADSVKGRFTISRDNAKNTVYLQMNSLKPEDTAVYYCAAASIIPGYLPYGYDYWGQGTQVTVSS

SEQ ID NO: 15128 - protein, 118 aa, Artificial Sequence
  Chemically Synthesized
QVQLQESGGGLVQAGGSLRLSCAASGTIFYVTDMGWYRQAPGKEREFVASINYGASTYYADSVKGRFTISRDNAKNTVYLQMNSLKPEDTAVYYCAAYYVLGANLYYWGQGTQVTVSS

SEQ ID NO: 15129 - protein, 122 aa, Artificial Sequence
  Chemically Synthesized
QVQLQESGGGLVQAGGSLRLSCAASGNISRSLRMGWYRQAPGKERELVAAIGYGGNTYYADSVKGRFTISRDNAKNTVYLQMNSLKPEDTAVYYCAARGSRRVYGEISHIYWGQGTQVTVSS

SEQ ID NO: 15130 - protein, 118 aa, Artificial Sequence
  Chemically Synthesized
QVQLQESGGGLVQAGGSLRLSCAASGNIFAYRRMGWYRQAPGKERELVAGIAGGSSTYYADSVKGRFTISRDNAKNTVYLQMNSLKPEDTAVYYCAVLRGWRYLHTYWGQGTQVTVSS

SEQ ID NO: 15131 - protein, 126 aa, Artificial Sequence
  Chemically Synthesized
QVQLQESGGGLVQAGGSLRLSCAASGYISREGDMGWYRQAPGKERELVAAIDDGGITNYADSVKGRFTISRDNAKNTVYLQMNSLKPEDTAVYYCAAHGEIAQEHLTIGKRELYYWGQGTQVTVSS

SEQ ID NO: 15132 - protein, 122 aa, Artificial Sequence
  Chemically Synthesized
QVQLQESGGGLVQAGGSLRLSCAASGNISPDWYMGWYRQAPGKERELVASINHGGNTNYADSVKGRFTISRDNAKNTVYLQMNSLKPEDTAVYYCAVVVATPYDYWVAFGYWGQGTQVTVSS

SEQ ID NO: 15133 - protein, 118 aa, Artificial Sequence
  Chemically Synthesized
QVQLQESGGGLVQAGGSLRLSCAASGYISLTPDMGWYRQAPGKEREFVASIGYGTSTYYADSVKGRFTISRDNAKNTVYLQMNSLKPEDTAVYYCAAIAYDDWDFLYWGQGTQVTVSS

SEQ ID NO: 15134 - protein, 126 aa, Artificial Sequence
  Chemically Synthesized
QVQLQESGGGLVQAGGSLRLSCAASGNISGTFDMGWYRQAPGKERELVATITYGGITYYADSVKGRFTISRDNAKNTVYLQMNSLKPEDTAVYYCAVYQNASDPQLEWHGYSHAYWGQGTQVTVSS

SEQ ID NO: 15135 - protein, 124 aa, Artificial Sequence
  Chemically Synthesized
QVQLQESGGGLVQAGGSLRLSCAASGYIFGRYNMGWYRQAPGKERELVATIDIVVLPYADSVKGRFTISRDNAKNTVYLQMNSLKPEDTAVYYCADLLVFFPGRPAGGDFFLYWGQGTQVTVSS

SEQ ID NO: 15136 - protein, 118 aa, Artificial Sequence
  Chemically Synthesized
QVQLQESGGGLVQAGGSLRLSCAASGYISYFYTMGWYRQAPGKEREFVAGIAYGTNTYYADSVKGRFTISRDNAKNTVYLQMNSLKPEDTAVYYCAVRSVVAPGYDYWGQGTQVTVSS

SEQ ID NO: 15137 - protein, 115 aa, Artificial Sequence
  Chemically Synthesized
QVQLQESGGGLVQAGGSLRLSCAASGYIFRRAYMGWYRQAPGKERELVAAINYGTNTYYADSVKGRFTISRDNAKNTVYLQMNSLKPEDTAVYYCAVARNRYAYWGQGTQVTVSS

SEQ ID NO: 15138 - protein, 118 aa, Artificial Sequence
  Chemically Synthesized
QVQLQESGGGLVQAGGSLRLSCAASGYISYRWYMGWYRQAPGKERELVAAINAGANTYYADSVKGRFTISRDNAKNTVYLQMNSLKPEDTAVYYCAAQSPYYYRHRYWGQGTQVTVSS

SEQ ID NO: 15139 - protein, 118 aa, Artificial Sequence
  Chemically Synthesized
QVQLQESGGGLVQAGGSLRLSCAASGSISRSAFMGWYRQAPGKEREFVAAITVGSNTYYADSVKGRFTISRDNAKNTVYLQMNSLKPEDTAVYYCAVGYDTHPKYAYWGQGTQVTVSS

SEQ ID NO: 15140 - protein, 122 aa, Artificial Sequence
  Chemically Synthesized
QVQLQESGGGLVQAGGSLRLSCAASGTIFWHDDMGWYRQAPGKERELVAAIGVGSTTNYADSVKGRFTISRDNAKNTVYLQMNSLKPEDTAVYYCAADDTGIHQVNFYLWYWGQGTQVTVSS

SEQ ID NO: 15141 - protein, 122 aa, Artificial Sequence
  Chemically Synthesized
QVQLQESGGGLVQAGGSLRLSCAASGSISRPNTMGWYRQAPGKEREFVAGIGAGTTTNYADSVKGRFTISRDNAKNTVYLQMNSLKPEDTAVYYCAAETQKYDPYNQSYPYWGQGTQVTVSS

SEQ ID NO: 15142 - protein, 122 aa, Artificial Sequence
  Chemically Synthesized
QVQLQESGGGLVQAGGSLRLSCAASGSISYRVIMGWYRQAPGKERELVAGIGRGATTYYADSVKGRFTISRDNAKNTVYLQMNSLKPEDTAVYYCAVYRYALPHYAGRYAYWGQGTQVTVSS

SEQ ID NO: 15143 - protein, 117 aa, Artificial Sequence
  Chemically Synthesized
QVQLQESGGGLVQAGGSLRLSCAASGYISGYGMGWYRQAPGKEREFVAGISDGTNTYYADSVKGRFTISRDNAKNTVYLQMNSLKPEDTAVYYCAVVRVSAGIHYYWGQGTQVTVSS

SEQ ID NO: 15144 - protein, 118 aa, Artificial Sequence
  Chemically Synthesized
QVQLQESGGGLVQAGGSLRLSCAASGNIFKRVGMGWYRQAPGKEREFVASIGYGAITNYADSVKGRFTISRDNAKNTVYLQMNSLKPEDTAVYYCAVLHSIRRWLDYWGQGTQVTVSS

SEQ ID NO: 15145 - protein, 118 aa, Artificial Sequence
  Chemically Synthesized
QVQLQESGGGLVQAGGSLRLSCAASGYIFDRQVMGWYRQAPGKERELVAGISRGSNTNYADSVKGRFTISRDNAKNTVYLQMNSLKPEDTAVYYCAVVHGSFRKFSYWGQGTQVTVSS

SEQ ID NO: 15146 - protein, 118 aa, Artificial Sequence
  Chemically Synthesized
QVQLQESGGGLVQAGGSLRLSCAASGTIFSDRLMGWYRQAPGKEREFVAGIAQGSTTNYADSVKGRFTISRDNAKNTVYLQMNSLKPEDTAVYYCAAFHHARSTHDYWGQGTQVTVSS

SEQ ID NO: 15147 - protein, 126 aa, Artificial Sequence
  Chemically Synthesized
QVQLQESGGGLVQAGGSLRLSCAASGSIFIRGRMGWYRQAPGKEREFVATITVGGTTYYADSVKGRFTISRDNAKNTVYLQMNSLKPEDTAVYYCAAPRYAWTTKETPRARYFRYWGQGTQVTVSS

SEQ ID NO: 15148 - protein, 118 aa, Artificial Sequence
  Chemically Synthesized
QVQLQESGGGLVQAGGSLRLSCAASGNIFYRGGMGWYRQAPGKEREFVAGIAVGTNTYYADSVKGRFTISRDNAKNTVYLQMNSLKPEDTAVYYCAVYRYRYRGHWYWGQGTQVTVSS

SEQ ID NO: 15149 - protein, 126 aa, Artificial Sequence
  Chemically Synthesized
QVQLQESGGGLVQAGGSLRLSCAASGNIFAYGRMGWYRQAPGKEREFVASISNGTNTNYADSVKGRFTISRDNAKNTVYLQMNSLKPEDTAVYYCAAIGRDHYNRGTGRIESHLYWGQGTQVTVSS

SEQ ID NO: 15150 - protein, 118 aa, Artificial Sequence
  Chemically Synthesized
QVQLQESGGGLVQAGGSLRLSCAASGSISVRRAMGWYRQAPGKERELVAGIARGTTTYYADSVKGRFTISRDNAKNTVYLQMNSLKPEDTAVYYCAAYYRGYTSYIYWGQGTQVTVSS

SEQ ID NO: 15151 - protein, 118 aa, Artificial Sequence
  Chemically Synthesized
QVQLQESGGGLVQAGGSLRLSCAASGNISRRAQMGWYRQAPGKERELVAGIAYGTNTYYADSVKGRFTISRDNAKNTVYLQMNSLKPEDTAVYYCAARIRYWGPFYYWGQGTQVTVSS

SEQ ID NO: 15152 - protein, 118 aa, Artificial Sequence
  Chemically Synthesized
QVQLQESGGGLVQAGGSLRLSCAASGTIFDDWNMGWYRQAPGKEREFVAAIDRGASTNYADSVKGRFTISRDNAKNTVYLQMNSLKPEDTAVYYCAVWVVYYIVHGYWGQGTQVTVSS

SEQ ID NO: 15153 - protein, 126 aa, Artificial Sequence
  Chemically Synthesized
QVQLQESGGGLVQAGGSLRLSCAASGSISAFGLMGWYRQAPGKEREFVAGISTGTITYYADSVKGRFTISRDNAKNTVYLQMNSLKPEDTAVYYCAAVVTLQSGTIYVRDNLYYYWGQGTQVTVSS

SEQ ID NO: 15154 - protein, 118 aa, Artificial Sequence
  Chemically Synthesized
QVQLQESGGGLVQAGGSLRLSCAASGNIFSPRYMGWYRQAPGKERELVASIGWGGTTNYADSVKGRFTISRDNAKNTVYLQMNSLKPEDTAVYYCAVNQPRRWALAYWGQGTQVTVSS

SEQ ID NO: 15155 - protein, 118 aa, Artificial Sequence
  Chemically Synthesized
QVQLQESGGGLVQAGGSLRLSCAASGNIFDGRPMGWYRQAPGKEREFVATITRGTSTNYADSVKGRFTISRDNAKNTVYLQMNSLKPEDTAVYYCAVRPFYRHYFVYWGQGTQVTVSS

SEQ ID NO: 15156 - protein, 118 aa, Artificial Sequence
  Chemically Synthesized
QVQLQESGGGLVQAGGSLRLSCAASGNIFPYTPMGWYRQAPGKERELVASIAGGTNTNYADSVKGRFTISRDNAKNTVYLQMNSLKPEDTAVYYCAARGATYPFLYYWGQGTQVTVSS

SEQ ID NO: 15157 - protein, 122 aa, Artificial Sequence
  Chemically Synthesized
QVQLQESGGGLVQAGGSLRLSCAASGSIFRRRDMGWYRQAPGKERELVASITPGANTYYADSVKGRFTISRDNAKNTVYLQMNSLKPEDTAVYYCAASDKIWFFGWQYYLYWGQGTQVTVSS

SEQ ID NO: 15158 - protein, 118 aa, Artificial Sequence
  Chemically Synthesized
QVQLQESGGGLVQAGGSLRLSCAASGTIFLRRYMGWYRQAPGKERELVAGISQGSTTYYADSVKGRFTISRDNAKNTVYLQMNSLKPEDTAVYYCAVVRQYRGTHWYWGQGTQVTVSS

SEQ ID NO: 15159 - protein, 122 aa, Artificial Sequence
  Chemically Synthesized
QVQLQESGGGLVQAGGSLRLSCAASGTISPQDYMGWYRQAPGKERELVASIAPGSNTNYADSVKGRFTISRDNAKNTVYLQMNSLKPEDTAVYYCAALNFDVYDPYAWHDYWGQGTQVTVSS

SEQ ID NO: 15160 - protein, 110 aa, Artificial Sequence
  Chemically Synthesized
QVQLQESGGGLVQAGGSLRLSCAASGNISSGKRMGWYRQAPGKERELVASIGTGGNTNYADSVKGRFTISRDNAKNTVYLQMNSLKPEDTAVYYCAAPYWGQGTQVTVSS

SEQ ID NO: 15161 - protein, 121 aa, Artificial Sequence
  Chemically Synthesized
QVQLQESGGGLVQAGGSLRLSCAASGYIFWVRRMGWYRQAPGKEREFVATIGGGTSTYYADSVKGRFTISRDNAKNTVYLQMNSLKPEDTAVYYCAAYYRRTNGSPWYIYWGQGTQVTVSS

SEQ ID NO: 15162 - protein, 122 aa, Artificial Sequence
  Chemically Synthesized
QVQLQESGGGLVQAGGSLRLSCAASGTIFRYAYMGWYRQAPGKEREFVAAINGGANTYYADSVKGRFTISRDNAKNTVYLQMNSLKPEDTAVYYCAAIEDSYAYNPTVHYYWGQGTQVTVSS

SEQ ID NO: 15163 - protein, 117 aa, Artificial Sequence
  Chemically Synthesized
QVQLQESGGGLVQAGGSLRLSCAASGTIFFNWLMGWYRQAPGKEREFVAGIDLGGITYYADSVKGRFTISRDNAKNTVYLQMNSLKPEDTAVYYCAAYGYNFPFDYWGQGTQVTVSS

SEQ ID NO: 15164 - protein, 121 aa, Artificial Sequence
  Chemically Synthesized
QVQLQESGGGLVQAGGSLRLSCAASGTIFPAYYMGWYRQAPGKEREFVASIDSVVIPYADSVKGRFTISRDNAKNTVYLQMNSLKPEDTAVYYCAVVSITIYSAVWLFDYWGQGTQVTVSS

SEQ ID NO: 15165 - protein, 126 aa, Artificial Sequence
  Chemically Synthesized
QVQLQESGGGLVQAGGSLRLSCAASGSISIYYAMGWYRQAPGKEREFVATIDYGGTTNYADSVKGRFTISRDNAKNTVYLQMNSLKPEDTAVYYCAVDSTGYEPTAPTLHHFYAYWGQGTQVTVSS

SEQ ID NO: 15166 - protein, 122 aa, Artificial Sequence
  Chemically Synthesized
QVQLQESGGGLVQAGGSLRLSCAASGTIFRGQSMGWYRQAPGKEREFVAGITYGANTNYADSVKGRFTISRDNAKNTVYLQMNSLKPEDTAVYYCAVRVYDTATDFTGFCYWGQGTQVTVSS

SEQ ID NO: 15167 - protein, 111 aa, Artificial Sequence
  Chemically Synthesized
QVQLQESGGGLVQAGGSLRLSCAASGTIFRFRSMGWYRQAPGKERELVAGITGGSTTYYADSVKGRFTISRDNAKNTVYLQMNSLKPEDTAVYYCALFTYWGQGTQVTVSS

SEQ ID NO: 15168 - protein, 118 aa, Artificial Sequence
  Chemically Synthesized
QVQLQESGGGLVQAGGSLRLSCAASGSISRASNMGWYRQAPGKERELVATIAPGGTTYYADSVKGRFTISRDNAKNTVYLQMNSLKPEDTAVYYCAVRYVLDAYHWYWGQGTQVTVSS

SEQ ID NO: 15169 - protein, 122 aa, Artificial Sequence
  Chemically Synthesized
QVQLQESGGGLVQAGGSLRLSCAASGYISHPKYMGWYRQAPGKERELVAGIGIGGNTNYADSVKGRFTISRDNAKNTVYLQMNSLKPEDTAVYYCAANGPDAIGDDLTYRYWGQGTQVTVSS

SEQ ID NO: 15170 - protein, 118 aa, Artificial Sequence
  Chemically Synthesized
QVQLQESGGGLVQAGGSLRLSCAASGSISVDQAMGWYRQAPGKERELVASIADGTSTNYADSVKGRFTISRDNAKNTVYLQMNSLKPEDTAVYYCAVLLTGVTEFDYWGQGTQVTVSS

SEQ ID NO: 15171 - protein, 118 aa, Artificial Sequence
  Chemically Synthesized
QVQLQESGGGLVQAGGSLRLSCAASGSISNHEDMGWYRQAPGKEREFVAAIADGSTTNYADSVKGRFTISRDNAKNTVYLQMNSLKPEDTAVYYCAADAARISRYTYWGQGTQVTVSS

SEQ ID NO: 15172 - protein, 121 aa, Artificial Sequence
  Chemically Synthesized
QVQLQESGGGLVQAGGSLRLSCAASGTISEYAYMGWYRQAPGKEREFVASISSGANTNYADSVKGRFTISRDNAKNTVYLQMNSLKPEDTAVYYCAVDDGYLYSVTFVFYWGQGTQVTVSS

SEQ ID NO: 15173 - protein, 122 aa, Artificial Sequence
  Chemically Synthesized
QVQLQESGGGLVQAGGSLRLSCAASGTISVDDNMGWYRQAPGKERELVASIDYGSSTNYADSVKGRFTISRDNAKNTVYLQMNSLKPEDTAVYYCAAWIGRGNEYDVSHAYWGQGTQVTVSS

SEQ ID NO: 15174 - protein, 126 aa, Artificial Sequence
  Chemically Synthesized
QVQLQESGGGLVQAGGSLRLSCAASGYIFAVPGMGWYRQAPGKEREFVAGINKGTNTNYADSVKGRFTISRDNAKNTVYLQMNSLKPEDTAVYYCAADVPLRTAAYTPINDLLRYWGQGTQVTVSS

SEQ ID NO: 15175 - protein, 126 aa, Artificial Sequence
  Chemically Synthesized
QVQLQESGGGLVQAGGSLRLSCAASGSIFPIHTMGWYRQAPGKEREFVASITLGTTTNYADSVKGRFTISRDNAKNTVYLQMNSLKPEDTAVYYCAVHTFAYHESAQGRDTHFVYWGQGTQVTVSS

SEQ ID NO: 15176 - protein, 125 aa, Artificial Sequence
  Chemically Synthesized
QVQLQESGGGLVQAGGSLRLSCAASGNISDGNTMGWYRQAPGKEREFLPVLVLVLLPYADSVKGRFTISRDNAKNTVYLQMNSLKPEDTAVYYCAVTSYTRHKQTGYDGDDYSYWGQGTQVTVSS

SEQ ID NO: 15177 - protein, 126 aa, Artificial Sequence
  Chemically Synthesized
QVQLQESGGGLVQAGGSLRLSCAASGSISTGYGMGWYRQAPGKERELVAGINPGTSTNYADSVKGRFTISRDNAKNTVYLQMNSLKPEDTAVYYCAVDVYATYNKTNTAYYDYVYWGQGTQVTVSS

SEQ ID NO: 15178 - protein, 118 aa, Artificial Sequence
  Chemically Synthesized
QVQLQESGGGLVQAGGSLRLSCAASGNISHYGYMGWYRQAPGKERELVAAIATGANTNYADSVKGRFTISRDNAKNTVYLQMNSLKPEDTAVYYCAVNLGSFTYHGYWGQGTQVTVSS

SEQ ID NO: 15179 - protein, 120 aa, Artificial Sequence
  Chemically Synthesized
QVQLQESGGGLVQAGGSLRLSCAASGNIFDDRWMGWYRQAPGKEREFVAGIALGSSTNYADSVKGRFTISRDNAKNTVYLQMNSLKPEDTAVYYCAASAKVTLFCTTIYWGQGTQVTVSS

SEQ ID NO: 15180 - protein, 121 aa, Artificial Sequence
  Chemically Synthesized
QVQLQESGGGLVQAGGSLRLSCAASGNIFTGYNMGWYRQAPGKEREFVAGINAGSSTNYADSVKGRFTISRDNAKNTVYLQMNSLKPEDTAVYYCAVLDEGDYYSTVFMYWGQGTQVTVSS

SEQ ID NO: 15181 - protein, 118 aa, Artificial Sequence
  Chemically Synthesized
QVQLQESGGGLVQAGGSLRLSCAASGSIFAGWYMGWYRQAPGKEREFVAGISYGSITNYADSVKGRFTISRDNAKNTVYLQMNSLKPEDTAVYYCAVTYIGFAYFWYWGQGTQVTVSS

SEQ ID NO: 15182 - protein, 118 aa, Artificial Sequence
  Chemically Synthesized
QVQLQESGGGLVQAGGSLRLSCAASGYISPADTMGWYRQAPGKEREFVAAIAYGAITYYADSVKGRFTISRDNAKNTVYLQMNSLKPEDTAVYYCAAPYLVDYGYGYWGQGTQVTVSS

SEQ ID NO: 15183 - protein, 123 aa, Artificial Sequence
  Chemically Synthesized
QVQLQESGGGLVQAGGSLRLSCAASGTIFNTIEMGWYRQAPGKERELVAAMVVLPYADSVKGRFTISRDNAKNTVYLQMNSLKPEDTAVYYCAVWSTLGHDFPLDYDVVYRYWGQGTQVTVSS

SEQ ID NO: 15184 - protein, 126 aa, Artificial Sequence
  Chemically Synthesized
QVQLQESGGGLVQAGGSLRLSCAASGSIFDDGDMGWYRQAPGKEREFVAAISSGAITYYADSVKGRFTISRDNAKNTVYLQMNSLKPEDTAVYYCAVTRRDSRWYTYNTDWYYYYWGQGTQVTVSS

SEQ ID NO: 15185 - protein, 126 aa, Artificial Sequence
  Chemically Synthesized
QVQLQESGGGLVQAGGSLRLSCAASGSIFKSDVMGWYRQAPGKEREFVASIADGGSTYYADSVKGRFTISRDNAKNTVYLQMNSLKPEDTAVYYCAARYLYYYVWPPYSYYPHIYWGQGTQVTVSS

SEQ ID NO: 15186 - protein, 116 aa, Artificial Sequence
  Chemically Synthesized
QVQLQESGGGLVQAGGSLRLSCAASGYIFNGLFMGWYRQAPGKERESTIGSGTTTYYADSVKGRFTISRDNAKNTVYLQMNSLKPEDTAVYYCAVYNYRGLAHEYWGQGTQVTVSS

SEQ ID NO: 15187 - protein, 118 aa, Artificial Sequence
  Chemically Synthesized
QVQLQESGGGLVQAGGSLRLSCAASGSIFSYWTMGWYRQAPGKEREFVAAISDGSNTYYADSVKGRFTISRDNAKNTVYLQMNSLKPEDTAVYYCAAKVPVQSTYHYWGQGTQVTVSS

SEQ ID NO: 15188 - protein, 120 aa, Artificial Sequence
  Chemically Synthesized
QVQLQESGGGLVQAGGSLRLSCAASGTIFLTVTMGWYRQAPGKEREFVASIGNGTSTYYADSVKGRFTISRDNAKNTVYLQMNSLKPEDTAVYYCAADWQLPTYGYFLYWGQGTQVTVSS

SEQ ID NO: 15189 - protein, 117 aa, Artificial Sequence
  Chemically Synthesized
QVQLQESGGGLVQAGGSLRLSCAASGNIFGDGPMGWYRQAPGKEREFVASIAVGATTNYADSVKGRFTISRDNAKNTVYLQMNSLKPEDTAVYYCAVQRLTRYHHYWGQGTQVTVSS

SEQ ID NO: 15190 - protein, 118 aa, Artificial Sequence
  Chemically Synthesized
QVQLQESGGGLVQAGGSLRLSCAASGSISAPHIMGWYRQAPGKEREFVAGITYGTSTNYADSVKGRFTISRDNAKNTVYLQMNSLKPEDTAVYYCAATWVYVKQYTYWGQGTQVTVSS

SEQ ID NO: 15191 - protein, 111 aa, Artificial Sequence
  Chemically Synthesized
QVQLQESGGGLVQAGGSLRLSCAASGNISRYTGMGWYRQAPGKERELVATINGGTTTYYADSVKGRFTISRDNAKNTVYLQMNSLKPEDTAVYYCAVGYYWGQGTQVTVSS

SEQ ID NO: 15192 - protein, 117 aa, Artificial Sequence
  Chemically Synthesized
QVQLQESGGGLVQAGGSLRLSCAASGYISLTTMGWYRQAPGKEREFVATIDRGGSTNYADSVKGRFTISRDNAKNTVYLQMNSLKPEDTAVYYCAAGNDYDGEHYYWGQGTQVTVSS

SEQ ID NO: 15193 - protein, 122 aa, Artificial Sequence
  Chemically Synthesized
QVQLQESGGGLVQAGGSLRLSCAASGYISTVLAMGWYRQAPGKERELVAAISYGATTNYADSVKGRFTISRDNAKNTVYLQMNSLKPEDTAVYYCAAVILYKARPYQDFGYWGQGTQVTVSS

SEQ ID NO: 15194 - protein, 122 aa, Artificial Sequence
  Chemically Synthesized
QVQLQESGGGLVQAGGSLRLSCAASGSISVRGIMGWYRQAPGKERELVAGINPGGTTNYADSVKGRFTISRDNAKNTVYLQMNSLKPEDTAVYYCAVTNGHGVSDYAPYWYWGQGTQVTVSS

SEQ ID NO: 15195 - protein, 122 aa, Artificial Sequence
  Chemically Synthesized
QVQLQESGGGLVQAGGSLRLSCAASGNISDDITMGWYRQAPGKEREFVATITDGSNTYYADSVKGRFTISRDNAKNTVYLQMNSLKPEDTAVYYCAVPPVNYDSYALGHYYWGQGTQVTVSS

SEQ ID NO: 15196 - protein, 116 aa, Artificial Sequence
  Chemically Synthesized
QVQLQESGGGLVQAGGSLRLSCAASGLFLLTLMGWYRQAPGKEREFVAAIARGSSTNYADSVKGRFTISRDNAKNTVYLQMNSLKPEDTAVYYCAATIYRSTTLYWGQGTQVTVSS

SEQ ID NO: 15197 - protein, 118 aa, Artificial Sequence
  Chemically Synthesized
QVQLQESGGGLVQAGGSLRLSCAASGNISVFLSMGWYRQAPGKERELVAAITGGTITYYADSVKGRFTISRDNAKNTVYLQMNSLKPEDTAVYYCAVYFGWTSRLHYWGQGTQVTVSS

SEQ ID NO: 15198 - protein, 126 aa, Artificial Sequence
  Chemically Synthesized
QVQLQESGGGLVQAGGSLRLSCAASGYIFRTLVMGWYRQAPGKEREFVAAINRGSSTYYADSVKGRFTISRDNAKNTVYLQMNSLKPEDTAVYYCAAGYYSALPGNSKYRGGYKYWGQGTQVTVSS

SEQ ID NO: 15199 - protein, 125 aa, Artificial Sequence
  Chemically Synthesized
QVQLQESGGGLVQAGGSLRLSCAASGTISAPYGMGWYRQAPGKERELVASIDVGANTYYADSVKGRFTISRDNAKNTVYLQMNSLKPEDTAVYYCAAQDWSDLVRWDYDNAHGYWGQGTQVTVSS

SEQ ID NO: 15200 - protein, 122 aa, Artificial Sequence
  Chemically Synthesized
QVQLQESGGGLVQAGGSLRLSCAASGTISYINYMGWYRQAPGKERELVATIAYGTTTYYADSVKGRFTISRDNAKNTVYLQMNSLKPEDTAVYYCAADTLQSDGYVYHHPYWGQGTQVTVSS

SEQ ID NO: 15201 - protein, 118 aa, Artificial Sequence
  Chemically Synthesized
QVQLQESGGGLVQAGGSLRLSCAASGTISYLYVMGWYRQAPGKERELVAGIDTGGNTYYADSVKGRFTISRDNAKNTVYLQMNSLKPEDTAVYYCAVYADDVLSFEYWGQGTQVTVSS

SEQ ID NO: 15202 - protein, 115 aa, Artificial Sequence
  Chemically Synthesized
QVQLQESGGGLVQAGGSLRLSCAASGTISLDTSMGWYRQAPGKERELVAAISYGGSTYYADSVKGRFTISRDNAKNTVYLQMNSLKPEDTAVYYCAAASYDYEYWGQGTQVTVSS

SEQ ID NO: 15203 - protein, 117 aa, Artificial Sequence
  Chemically Synthesized
QVQLQESGGGLVQAGGSLRLSCAASGYISPHDYMGWYRQAPGKEREFVATINPGGNTNYADSVKGRFTISRDNAKNTVYLQMNSLKPEDTAVYYCAANYTNDVRLYWGQGTQVTVSS

SEQ ID NO: 15204 - protein, 122 aa, Artificial Sequence
  Chemically Synthesized
QVQLQESGGGLVQAGGSLRLSCAASGNIFRPFYMGWYRQAPGKERELVAGISYGTTTYYADSVKGRFTISRDNAKNTVYLQMNSLKPEDTAVYYCAAHFGLASPRRDVHIYWGQGTQVTVSS

SEQ ID NO: 15205 - protein, 126 aa, Artificial Sequence
  Chemically Synthesized
QVQLQESGGGLVQAGGSLRLSCAASGNIFGWWDMGWYRQAPGKEREFVAGISGGGNTNYADSVKGRFTISRDNAKNTVYLQMNSLKPEDTAVYYCAAHYTTVYYDYHRITRNLTYWGQGTQVTVSS

SEQ ID NO: 15206 - protein, 122 aa, Artificial Sequence
  Chemically Synthesized
QVQLQESGGGLVQAGGSLRLSCAASGTIFRFHYMGWYRQAPGKERELVAGIDYGGNTQYADSVKGRFTISRDNAKNTVYLQMNSLKPEDTAVYYCAAGYDRRILPYFWLGYWGQGTQVTVSS

SEQ ID NO: 15207 - protein, 118 aa, Artificial Sequence
  Chemically Synthesized
QVQLQESGGGLVQAGGSLRLSCAASGTISYYAIMGWYRQAPGKEREFVASIAVGATTNYADSVKGRFTISRDNAKNTVYLQMNSLKPEDTAVYYCAVVSAAIRPHVYWGQGTQVTVSS

SEQ ID NO: 15208 - protein, 122 aa, Artificial Sequence
  Chemically Synthesized
QVQLQESGGGLVQAGGSLRLSCAASGTIFLIVVMGWYRQAPGKEREFVAGITAGSITYYADSVKGRFTISRDNAKNTVYLQMNSLKPEDTAVYYCAARDPPYRVDTYGLTYWGQGTQVTVSS

SEQ ID NO: 15209 - protein, 117 aa, Artificial Sequence
  Chemically Synthesized
QVQLQESGGGLVQAGGSLRLSCAASGNISASKMGWYRQAPGKERELVAAISDGGNTNYADSVKGRFTISRDNAKNTVYLQMNSLKPEDTAVYYCAVYATTYSYLAYWGQGTQVTVSS

SEQ ID NO: 15210 - protein, 126 aa, Artificial Sequence
  Chemically Synthesized
QVQLQESGGGLVQAGGSLRLSCAASGSIFGTSYMGWYRQAPGKERELVATIGYGTNTNYADSVKGRFTISRDNAKNTVYLQMNSLKPEDTAVYYCAVYDNYTNQGGGNWSSTLDYWGQGTQVTVSS

SEQ ID NO: 15211 - protein, 111 aa, Artificial Sequence
  Chemically Synthesized
QVQLQESGGGLVQAGGSLRLSCAASGYISQVGRMGWYRQAPGKERELVAANYADSVKGRFTISRDNAKNTVYLQMNSLKPEDTAVYYCAVAVARSAGLGYWGQGTQVTVSS

SEQ ID NO: 15212 - protein, 125 aa, Artificial Sequence
  Chemically Synthesized
QVQLQESGGGLVQAGGSLRLSCAASGSIFDYNYMGWYRQAPGKEREFVAAIDPGTNTYYADSVKGRFTISRDNAKNTVYLQMNSLKPEDTAVYYCAVRYRAGNDSFSLLTSRLYWGQGTQVTVSS

SEQ ID NO: 15213 - protein, 122 aa, Artificial Sequence
  Chemically Synthesized
QVQLQESGGGLVQAGGSLRLSCAASGNISNVIQMGWYRQAPGKEREFVASIGYGGITYYADSVKGRFTISRDNAKNTVYLQMNSLKPEDTAVYYCAAVYDPSADHRTVLWYWGQGTQVTVSS

SEQ ID NO: 15214 - protein, 118 aa, Artificial Sequence
  Chemically Synthesized
QVQLQESGGGLVQAGGSLRLSCAASGYISDSTMGWYRQAPGKEREFVAAGGSTNYADSVKGRFTISRDNAKNTVYLQMNSLKPEDTAVYYCAVNAAPISVTSDTYTYWGQGTQVTVSS

SEQ ID NO: 15215 - protein, 122 aa, Artificial Sequence
  Chemically Synthesized
QVQLQESGGGLVQAGGSLRLSCAASGNISYTYAMGWYRQAPGKERELVATISAGGNTNYADSVKGRFTISRDNAKNTVYLQMNSLKPEDTAVYYCAVSANDYDWYDGIYAYWGQGTQVTVSS

SEQ ID NO: 15216 - protein, 115 aa, Artificial Sequence
  Chemically Synthesized
QVQLQESGGGLVQAGGSLRLSCAASGTIFRGYGMGWYRQAPGKEREFVATIDGGGNTYYADSVKGRFTISRDNAKNTVYLQMNSLKPEDTAVYYCAVYDLHHGYWGQGTQVTVSS

SEQ ID NO: 15217 - protein, 121 aa, Artificial Sequence
  Chemically Synthesized
QVQLQESGGGLVQAGGSLRLSCAASGTISPYPAMGWYRQAPGKERELVAAIGFGGNTNYADSVKGRFTISRDNAKNTVYLQMNSLKPEDTAVYYCAADPDWDYYYIYGLYWGQGTQVTVSS

SEQ ID NO: 15218 - protein, 118 aa, Artificial Sequence
  Chemically Synthesized
QVQLQESGGGLVQAGGSLRLSCAASGTISPSFSMGWYRQAPGKEREFVAAITIGASTNYADSVKGRFTISRDNAKNTVYLQMNSLKPEDTAVYYCAADHTHDVTLRYWGQGTQVTVSS

SEQ ID NO: 15219 - protein, 126 aa, Artificial Sequence
  Chemically Synthesized
QVQLQESGGGLVQAGGSLRLSCAASGNIFRFLLMGWYRQAPGKEREFVASISHGTTTNYADSVKGRFTISRDNAKNTVYLQMNSLKPEDTAVYYCAVEYYYPGIYPPPYWYPHPYWGQGTQVTVSS

SEQ ID NO: 15220 - protein, 126 aa, Artificial Sequence
  Chemically Synthesized
QVQLQESGGGLVQAGGSLRLSCAASGYISRDAIMGWYRQAPGKEREFVATITVGGTTYYADSVKGRFTISRDNAKNTVYLQMNSLKPEDTAVYYCAARYYNYPSKYDYSTWFYSYWGQGTQVTVSS

SEQ ID NO: 15221 - protein, 125 aa, Artificial Sequence
  Chemically Synthesized
QVQLQESGGGLVQAGGSLRLSCAASGSIFLASIMGWYRQAPGKERELVAAINIGANTNYADSVKGRFTISRDNAKNTVYLQMNSLKPEDTAVYYCAVVDDEISTTAASTLTSIYWGQGTQVTVSS

SEQ ID NO: 15222 - protein, 118 aa, Artificial Sequence
  Chemically Synthesized
QVQLQESGGGLVQAGGSLRLSCAASGTIFLYEPMGWYRQAPGKERELVATINPGSTTYYADSVKGRFTISRDNAKNTVYLQMNSLKPEDTAVYYCAVSYDQRYDFYYWGQGTQVTVSS

SEQ ID NO: 15223 - protein, 118 aa, Artificial Sequence
  Chemically Synthesized
QVQLQESGGGLVQAGGSLRLSCAASGYISFDVIMGWYRQAPGKEREFVAAITYGSNTNYADSVKGRFTISRDNAKNTVYLQMNSLKPEDTAVYYCAAYSRRYFRYRYWGQGTQVTVSS

SEQ ID NO: 15224 - protein, 118 aa, Artificial Sequence
  Chemically Synthesized
QVQLQESGGGLVQAGGSLRLSCAASGYIFRTYYMGWYRQAPGKEREFVATISAGTSTNYADSVKGRFTISRDNAKNTVYLQMNSLKPEDTAVYYCAVPRYISYRYYYWGQGTQVTVSS

SEQ ID NO: 15225 - protein, 123 aa, Artificial Sequence
  Chemically Synthesized
QVQLQESGGGLVQAGGSLRLSCAASGYISSSASMGWYRQAPGKERELVASIGDGTTTYYADSVKGRFTISRDNAKNTVYLQMNSLKPEDTAVYYCAADDVRDSLRLVTWVLYWGQGTQVTVSS

SEQ ID NO: 15226 - protein, 116 aa, Artificial Sequence
  Chemically Synthesized
QVQLQESGGGLVQAGGSLRLSCAASGTIFPYFSMGWYRQAPGKEREFVAGITSGGSTYYADSVKGRFTISRDNAKNTVYLQMNSLKPEDTAVYYCAVFDYYILRYWGQGTQVTVSS

SEQ ID NO: 15227 - protein, 117 aa, Artificial Sequence
  Chemically Synthesized
QVQLQESGGGLVQAGGSLRLSCAASGTISGYYMGWYRQAPGKERELVASIGFGAITYYADSVKGRFTISRDNAKNTVYLQMNSLKPEDTAVYYCAVTPDPSDPFIYWGQGTQVTVSS

SEQ ID NO: 15228 - protein, 117 aa, Artificial Sequence
  Chemically Synthesized
QVQLQESGGGLVQAGGSLRLSCAASGTISRPQGMGWYRQAPGKERELVATIDQVVIPYADSVKGRFTISRDNAKNTVYLQMNSLKPEDTAVYYCAVILTDADGHDYWGQGTQVTVSS

SEQ ID NO: 15229 - protein, 122 aa, Artificial Sequence
  Chemically Synthesized
QVQLQESGGGLVQAGGSLRLSCAASGTISSVNYMGWYRQAPGKERELVASIGYGAITYYADSVKGRFTISRDNAKNTVYLQMNSLKPEDTAVYYCAALLYYQPANQGDYGYWGQGTQVTVSS

SEQ ID NO: 15230 - protein, 122 aa, Artificial Sequence
  Chemically Synthesized
QVQLQESGGGLVQAGGSLRLSCAASGSISNRATMGWYRQAPGKEREFVAAISGGGTTYYADSVKGRFTISRDNAKNTVYLQMNSLKPEDTAVYYCAVDSIISYYYPYYHDYWGQGTQVTVSS

SEQ ID NO: 15231 - protein, 118 aa, Artificial Sequence
  Chemically Synthesized
QVQLQESGGGLVQAGGSLRLSCAASGTIFWTYIMGWYRQAPGKEREFVAGIAYGANTNYADSVKGRFTISRDNAKNTVYLQMNSLKPEDTAVYYCAARPLLSSGFRYWGQGTQVTVSS

SEQ ID NO: 15232 - protein, 118 aa, Artificial Sequence
  Chemically Synthesized
QVQLQESGGGLVQAGGSLRLSCAASGSIFSIAEMGWYRQAPGKERELVAAINEGTITYYADSVKGRFTISRDNAKNTVYLQMNSLKPEDTAVYYCAARVWPDVVYDYWGQGTQVTVSS

SEQ ID NO: 15233 - protein, 118 aa, Artificial Sequence
  Chemically Synthesized
QVQLQESGGGLVQAGGSLRLSCAASGSIFTDDPMGWYRQAPGKEREFVASINPGSNTNYADSVKGRFTISRDNAKNTVYLQMNSLKPEDTAVYYCAAYISYLLSYPYWGQGTQVTVSS

SEQ ID NO: 15234 - protein, 120 aa, Artificial Sequence
  Chemically Synthesized
QVQLQESGGGLVQAGGSLRLSCAASGTIFVSDIMGWYRQAPGKERELVASISHGGITYYADSVKGRFTISRDNAKNTVYLQMNSLKPEDTAVYYCAAWDTYDYYGLHAYWGQGTQVTVSS

SEQ ID NO: 15235 - protein, 118 aa, Artificial Sequence
  Chemically Synthesized
QVQLQESGGGLVQAGGSLRLSCAASGTIFAAVRMGWYRQAPGKERELVAAIAYGASTNYADSVKGRFTISRDNAKNTVYLQMNSLKPEDTAVYYCAATKGSYDPHGYWGQGTQVTVSS

SEQ ID NO: 15236 - protein, 118 aa, Artificial Sequence
  Chemically Synthesized
QVQLQESGGGLVQAGGSLRLSCAASGTISRARYMGWYRQAPGKEREFVASIGAGATTNYADSVKGRFTISRDNAKNTVYLQMNSLKPEDTAVYYCAVGYESRGDLWYWGQGTQVTVSS

SEQ ID NO: 15237 - protein, 122 aa, Artificial Sequence
  Chemically Synthesized
QVQLQESGGGLVQAGGSLRLSCAASGNIFGGPYMGWYRQAPGKERELVATIAYGATTYYADSVKGRFTISRDNAKNTVYLQMNSLKPEDTAVYYCAVGGYDDIYLYAEFGYWGQGTQVTVSS

SEQ ID NO: 15238 - protein, 123 aa, Artificial Sequence
  Chemically Synthesized
QVQLQESGGGLVQAGGSLRLSCAASGNIFSVMGWYRQAPGKEREFVASIASGTSTNYADSVKGRFTISRDNAKNTVYLQMNSLKPEDTAVYYCAVPVNAGRPYFISGLVSSYWGQGTQVTVSS

SEQ ID NO: 15239 - protein, 117 aa, Artificial Sequence
  Chemically Synthesized
QVQLQESGGGLVQAGGSLRLSCAASGTISTTYVMGWYRQAPGKEREFVATITPGAITNYADSVKGRFTISRDNAKNTVYLQMNSLKPEDTAVYYCAVEGANQRVHYWGQGTQVTVSS

SEQ ID NO: 15240 - protein, 118 aa, Artificial Sequence
  Chemically Synthesized
QVQLQESGGGLVQAGGSLRLSCAASGTIFDIIYMGWYRQAPGKERELVAAIGRGTSTYYADSVKGRFTISRDNAKNTVYLQMNSLKPEDTAVYYCAVYLWSSDLFWYWGQGTQVTVSS

SEQ ID NO: 15241 - protein, 118 aa, Artificial Sequence
  Chemically Synthesized
QVQLQESGGGLVQAGGSLRLSCAASGNISTVFIMGWYRQAPGKEREFVASITSGATTYYADSVKGRFTISRDNAKNTVYLQMNSLKPEDTAVYYCAAGSWQYRYHWYWGQGTQVTVSS

SEQ ID NO: 15242 - protein, 122 aa, Artificial Sequence
  Chemically Synthesized
QVQLQESGGGLVQAGGSLRLSCAASGSISGFFGMGWYRQAPGKERELVAAIADGSTTYYADSVKGRFTISRDNAKNTVYLQMNSLKPEDTAVYYCAAYYYGPDRDDVYLVYWGQGTQVTVSS

SEQ ID NO: 15243 - protein, 122 aa, Artificial Sequence
  Chemically Synthesized
QVQLQESGGGLVQAGGSLRLSCAASGNISSITFMGWYRQAPGKEREFVAAIGYGTSTYYADSVKGRFTISRDNAKNTVYLQMNSLKPEDTAVYYCAAAQTRNSQPLEYHYYWGQGTQVTVSS

SEQ ID NO: 15244 - protein, 118 aa, Artificial Sequence
  Chemically Synthesized
QVQLQESGGGLVQAGGSLRLSCAASGNISAVVIMGWYRQAPGKEREFVASIASGGITNYADSVKGRFTISRDNAKNTVYLQMNSLKPEDTAVYYCAALLTDVYWYYYWGQGTQVTVSS

SEQ ID NO: 15245 - protein, 122 aa, Artificial Sequence
  Chemically Synthesized
QVQLQESGGGLVQAGGSLRLSCAASGSISYRSRMGWYRQAPGKERELVAAIADGTNTYYADSVKGRFTISRDNAKNTVYLQMNSLKPEDTAVYYCAAFILYQYYVDTYLVYWGQGTQVTVSS

SEQ ID NO: 15246 - protein, 122 aa, Artificial Sequence
  Chemically Synthesized
QVQLQESGGGLVQAGGSLRLSCAASGNISHIIVMGWYRQAPGKEREFVASITEGTTTNYADSVKGRFTISRDNAKNTVYLQMNSLKPEDTAVYYCAALGYYTAETAAWHYYWGQGTQVTVSS

SEQ ID NO: 15247 - protein, 122 aa, Artificial Sequence
  Chemically Synthesized
QVQLQESGGGLVQAGGSLRLSCAASGSISNYHGMGWYRQAPGKERELVAAIADGSSTYYADSVKGRFTISRDNAKNTVYLQMNSLKPEDTAVYYCAVYEKWLPYIDQYHVYWGQGTQVTVSS

SEQ ID NO: 15248 - protein, 122 aa, Artificial Sequence
  Chemically Synthesized
QVQLQESGGGLVQAGGSLRLSCAASGNIFDVAAMGWYRQAPGKEREFVAGIGVGGITNYADSVKGRFTISRDNAKNTVYLQMNSLKPEDTAVYYCAAITAVYTVADRWHWYWGQGTQVTVSS

SEQ ID NO: 15249 - protein, 122 aa, Artificial Sequence
  Chemically Synthesized
QVQLQESGGGLVQAGGSLRLSCAASGTISDPFLMGWYRQAPGKEREFVAGIASGGITNYADSVKGRFTISRDNAKNTVYLQMNSLKPEDTAVYYCAALRRDTYRHRGYFSYWGQGTQVTVSS

SEQ ID NO: 15250 - protein, 118 aa, Artificial Sequence
  Chemically Synthesized
QVQLQESGGGLVQAGGSLRLSCAASGNISAVIVMGWYRQAPGKEREFVAAIAYGASTNYADSVKGRFTISRDNAKNTVYLQMNSLKPEDTAVYYCAAYLSNSARHYYWGQGTQVTVSS

SEQ ID NO: 15251 - protein, 121 aa, Artificial Sequence
  Chemically Synthesized
QVQLQESGGGLVQAGGSLRLSCAASGSISYVVGMGWYRQAPGKEREFVAGISIGASTNYADSVKGRFTISRDNAKNTVYLQMNSLKPEDTAVYYCAAAGYHPDQGQIHYYWGQGTQVTVSS

SEQ ID NO: 15252 - protein, 118 aa, Artificial Sequence
  Chemically Synthesized
QVQLQESGGGLVQAGGSLRLSCAASGTISRVIVMGWYRQAPGKEREFVAAIAEGASTNYADSVKGRFTISRDNAKNTVYLQMNSLKPEDTAVYYCAALAYTGIAHYYWGQGTQVTVSS

SEQ ID NO: 15253 - protein, 122 aa, Artificial Sequence
  Chemically Synthesized
QVQLQESGGGLVQAGGSLRLSCAASGTIFDIVVMGWYRQAPGKEREFVASIANGSTTNYADSVKGRFTISRDNAKNTVYLQMNSLKPEDTAVYYCAALAGWGYDRSDYHVYWGQGTQVTVSS

SEQ ID NO: 15254 - protein, 119 aa, Artificial Sequence
  Chemically Synthesized
QVQLQESGGGLVQAGGSLRLSCAASGYIFHRWIMGWYRQAPGKERELVAGINDGGTTYYADSVKGRFTISRDNAKNTVYLQMNSLKPEDTAVYYCAATVGRWDGHIGYWGQGTQVTVSS

SEQ ID NO: 15255 - protein, 119 aa, Artificial Sequence
  Chemically Synthesized
QVQLQESGGGLVQAGGSLRLSCAASGNIFYIYGMGWYRQAPGKERELVAGIATGGSTYYADSVKGRFTISRDNAKNTVYLQMNSLKPEDTAVYYCAAAERVAYYSYWYWGQGTQVTVSS

SEQ ID NO: 15256 - protein, 118 aa, Artificial Sequence
  Chemically Synthesized
QVQLQESGGGLVQAGGSLRLSCAASGNISTIIVMGWYRQAPGKEREFVAAIAEGTTTNYADSVKGRFTISRDNAKNTVYLQMNSLKPEDTAVYYCAAYGYYRGVHYYWGQGTQVTVSS

SEQ ID NO: 15257 - protein, 122 aa, Artificial Sequence
  Chemically Synthesized
QVQLQESGGGLVQAGGSLRLSCAASGNIFDIHSMGWYRQAPGKERELVATIGYGSTTNYADSVKGRFTISRDNAKNTVYLQMNSLKPEDTAVYYCAALVFVGNYEQLYHRYWGQGTQVTVSS

SEQ ID NO: 15258 - protein, 118 aa, Artificial Sequence
  Chemically Synthesized
QVQLQESGGGLVQAGGSLRLSCAASGTISYRYGMGWYRQAPGKEREFVAAIGLGGNTYYADSVKGRFTISRDNAKNTVYLQMNSLKPEDTAVYYCAVIYWNDGYYDYWGQGTQVTVSS

SEQ ID NO: 15259 - protein, 118 aa, Artificial Sequence
  Chemically Synthesized
QVQLQESGGGLVQAGGSLRLSCAASGSIFAILVMGWYRQAPGKEREFVAAIAAGSTTYYADSVKGRFTISRDNAKNTVYLQMNSLKPEDTAVYYCAASTRDNVSLGYWGQGTQVTVSS

SEQ ID NO: 15260 - protein, 122 aa, Artificial Sequence
  Chemically Synthesized
QVQLQESGGGLVQAGGSLRLSCAASGNIFVLLDMGWYRQAPGKERELVAAIGDGGSTYYADSVKGRFTISRDNAKNTVYLQMNSLKPEDTAVYYCAAAKPDYYYNQEPHVYWGQGTQVTVSS

SEQ ID NO: 15261 - protein, 118 aa, Artificial Sequence
  Chemically Synthesized
QVQLQESGGGLVQAGGSLRLSCAASGNIFSITYMGWYRQAPGKEREFVAAIGYGASTYYADSVKGRFTISRDNAKNTVYLQMNSLKPEDTAVYYCAATTAKDYRYHYWGQGTQVTVSS

SEQ ID NO: 15262 - protein, 118 aa, Artificial Sequence
  Chemically Synthesized
QVQLQESGGGLVQAGGSLRLSCAASGTISQPYLMGWYRQAPGKERELVAGISNGSITYYADSVKGRFTISRDNAKNTVYLQMNSLKPEDTAVYYCAAYAPYIALHNYWGQGTQVTVSS

SEQ ID NO: 15263 - protein, 122 aa, Artificial Sequence
  Chemically Synthesized
QVQLQESGGGLVQAGGSLRLSCAASGNISRVHSMGWYRQAPGKEREFVAGIAWGAITNYADSVKGRFTISRDNAKNTVYLQMNSLKPEDTAVYYCAARLPYRGIPGRYHWYWGQGTQVTVSS

SEQ ID NO: 15264 - protein, 118 aa, Artificial Sequence
  Chemically Synthesized
QVQLQESGGGLVQAGGSLRLSCAASGTISLPHLMGWYRQAPGKEREFVATIASGGTTYYADSVKGRFTISRDNAKNTVYLQMNSLKPEDTAVYYCAAWSYLESGLYYWGQGTQVTVSS

SEQ ID NO: 15265 - protein, 126 aa, Artificial Sequence
  Chemically Synthesized
QVQLQESGGGLVQAGGSLRLSCAASGSISRIDSMGWYRQAPGKERELVAAIGVGAITNYADSVKGRFTISRDNAKNTVYLQMNSLKPEDTAVYYCAALHWDRLDTSGSGTSYYYYWGQGTQVTVSS

SEQ ID NO: 15266 - protein, 118 aa, Artificial Sequence
  Chemically Synthesized
QVQLQESGGGLVQAGGSLRLSCAASGNISSIAVMGWYRQAPGKEREFVAGIGFGSITNYADSVKGRFTISRDNAKNTVYLQMNSLKPEDTAVYYCAALYRTYRYYHYWGQGTQVTVSS

SEQ ID NO: 15267 - protein, 123 aa, Artificial Sequence
  Chemically Synthesized
QVQLQESGGGLVQAGGSLRLSCAASGSISSIYVMGWYRQAPGKEREFVAAIGTGATTYYADSVKGRFTISRDNAKNTVYLQMNSLKPEDTAVYYCAAGYTSVGTGKLRLYRYWGQGTQVTVSS

SEQ ID NO: 15268 - protein, 122 aa, Artificial Sequence
  Chemically Synthesized
QVQLQESGGGLVQAGGSLRLSCAASGYISGPYLMGWYRQAPGKEREFVAAITDGATTNYADSVKGRFTISRDNAKNTVYLQMNSLKPEDTAVYYCAVLWLASVTSRIYLEYWGQGTQVTVSS

SEQ ID NO: 15269 - protein, 126 aa, Artificial Sequence
  Chemically Synthesized
QVQLQESGGGLVQAGGSLRLSCAASGYISHARAMGWYRQAPGKEREFVAGINEGGTTYYADSVKGRFTISRDNAKNTVYLQMNSLKPEDTAVYYCAVRQYGPQYSQGDVTSRYWYWGQGTQVTVSS

SEQ ID NO: 15270 - protein, 118 aa, Artificial Sequence
  Chemically Synthesized
QVQLQESGGGLVQAGGSLRLSCAASGSISYRYGMGWYRQAPGKEREFVAGINQGGSTYYADSVKGRFTISRDNAKNTVYLQMNSLKPEDTAVYYCAAVGTRSARHAYWGQGTQVTVSS

SEQ ID NO: 15271 - protein, 118 aa, Artificial Sequence
  Chemically Synthesized
QVQLQESGGGLVQAGGSLRLSCAASGTISTWYAMGWYRQAPGKEREFVAGINEGGNTYYADSVKGRFTISRDNAKNTVYLQMNSLKPEDTAVYYCAVPRYGYPGHWYWGQGTQVTVSS

SEQ ID NO: 15272 - protein, 117 aa, Artificial Sequence
  Chemically Synthesized
QVQLQESGGGLVQAGGSLRLSCAASGTIFGISAMGWYRQAPGKEREFVAGINEGSTTYYADSVKGRFTISRDNAKNTVYLQMNSLKPEDTAVYYCAVRGYPYTHWYWGQGTQVTVSS

SEQ ID NO: 15273 - protein, 117 aa, Artificial Sequence
  Chemically Synthesized
QVQLQESGGGLVQAGGSLRLSCAASGSISTYVMGWYRQAPGKERELVAGISHGSNTYYADSVKGRFTISRDNAKNTVYLQMNSLKPEDTAVYYCAVEYRASASLLYWGQGTQVTVSS

SEQ ID NO: 15274 - protein, 120 aa, Artificial Sequence
  Chemically Synthesized
QVQLQESGGGLVQAGGSLRLSCAASGSISRGPSMGWYRQAPGKERELVAGIDPGSSPYADSVKGRFTISRDNAKNTVYLQMNSLKPEDTAVYYCAAPDDDQYDSLTFIYWGQGTQVTVSS

SEQ ID NO: 15275 - protein, 118 aa, Artificial Sequence
  Chemically Synthesized
QVQLQESGGGLVQAGGSLRLSCAASGSIFVYSTMGWYRQAPGKEREFVATIAIGANTNYADSVKGRFTISRDNAKNTVYLQMNSLKPEDTAVYYCAVDDDKYTYLGYWGQGTQVTVSS

SEQ ID NO: 15276 - protein, 118 aa, Artificial Sequence
  Chemically Synthesized
QVQLQESGGGLVQAGGSLRLSCAASGYIFRYRIMGWYRQAPGKERELVASINPGTNTYYADSVKGRFTISRDNAKNTVYLQMNSLKPEDTAVYYCAAVSWTYLYHHYWGQGTQVTVSS

SEQ ID NO: 15277 - protein, 122 aa, Artificial Sequence
  Chemically Synthesized
QVQLQESGGGLVQAGGSLRLSCAASGNISTSYVMGWYRQAPGKERELVAGITDGSNTNYADSVKGRFTISRDNAKNTVYLQMNSLKPEDTAVYYCAVLYSASYGNEGHLEYWGQGTQVTVSS

SEQ ID NO: 15278 - protein, 118 aa, Artificial Sequence
  Chemically Synthesized
QVQLQESGGGLVQAGGSLRLSCAASGTISVPHVMGWYRQAPGKEREFVAGITYGAITYYADSVKGRFTISRDNAKNTVYLQMNSLKPEDTAVYYCAAVSLAKPYLGYWGQGTQVTVSS

SEQ ID NO: 15279 - protein, 116 aa, Artificial Sequence
  Chemically Synthesized
QVQLQESGGGLVQAGGSLRLSCAASGTIFAWLAMGWYRQAPGKEREFVASIGIGTSTNYADSVKGRFTISRDNAKNTVYLQMNSLKPEDTAVYYCAALQDGNYRYWGQGTQVTVSS

SEQ ID NO: 15280 - protein, 118 aa, Artificial Sequence
  Chemically Synthesized
QVQLQESGGGLVQAGGSLRLSCAASGTIFRVSDMGWYRQAPGKERELVASITRGGSTYYADSVKGRFTISRDNAKNTVYLQMNSLKPEDTAVYYCAADTYGQGDHGYWGQGTQVTVSS

SEQ ID NO: 15281 - protein, 118 aa, Artificial Sequence
  Chemically Synthesized
QVQLQESGGGLVQAGGSLRLSCAASGSIFYPSVMGWYRQAPGKERELVAGISIGGITYYADSVKGRFTISRDNAKNTVYLQMNSLKPEDTAVYYCAVIAYTPYTLHYWGQGTQVTVSS

SEQ ID NO: 15282 - protein, 118 aa, Artificial Sequence
  Chemically Synthesized
QVQLQESGGGLVQAGGSLRLSCAASGYISQPSDMGWYRQAPGKEREFVASIGYGAITNYADSVKGRFTISRDNAKNTVYLQMNSLKPEDTAVYYCAVYQRITPGYPYWGQGTQVTVSS

SEQ ID NO: 15283 - protein, 118 aa, Artificial Sequence
  Chemically Synthesized
QVQLQESGGGLVQAGGSLRLSCAASGSISYARGMGWYRQAPGKEREFVATIDDGGSTNYADSVKGRFTISRDNAKNTVYLQMNSLKPEDTAVYYCAVERKVLPSFGYWGQGTQVTVSS

SEQ ID NO: 15284 - protein, 117 aa, Artificial Sequence
  Chemically Synthesized
QVQLQESGGGLVQAGGSLRLSCAASGSISKYRMGWYRQAPGKERELVAGINAGTSTNYADSVKGRFTISRDNAKNTVYLQMNSLKPEDTAVYYCAVSDIVTYRHAYWGQGTQVTVSS

SEQ ID NO: 15285 - protein, 122 aa, Artificial Sequence
  Chemically Synthesized
QVQLQESGGGLVQAGGSLRLSCAASGTISRQYAMGWYRQAPGKEREFVAAIGYGSTTYYADSVKGRFTISRDNAKNTVYLQMNSLKPEDTAVYYCAAYLYQNGWRPRRYRYWGQGTQVTVSS

SEQ ID NO: 15286 - protein, 118 aa, Artificial Sequence
  Chemically Synthesized
QVQLQESGGGLVQAGGSLRLSCAASGTISRWHRMGWYRQAPGKEREFVAAIGYGSSTNYADSVKGRFTISRDNAKNTVYLQMNSLKPEDTAVYYCAATRSRFSVYGYWGQGTQVTVSS

SEQ ID NO: 15287 - protein, 118 aa, Artificial Sequence
  Chemically Synthesized
QVQLQESGGGLVQAGGSLRLSCAASGYIFRRVSMGWYRQAPGKEREFVAGIATGTSTYYADSVKGRFTISRDNAKNTVYLQMNSLKPEDTAVYYCAVGTGWWRTYYYWGQGTQVTVSS

SEQ ID NO: 15288 - protein, 117 aa, Artificial Sequence
  Chemically Synthesized
QVQLQESGGGLVQAGGSLRLSCAASGYISIYLYMGWYRQAPGKEREFVAGISNGANTNYADSVKGRFTISRDNAKNTVYLQMNSLKPEDTAVYYCAVNVIRDVHEYWGQGTQVTVSS

SEQ ID NO: 15289 - protein, 122 aa, Artificial Sequence
  Chemically Synthesized
QVQLQESGGGLVQAGGSLRLSCAASGNIFQRYTMGWYRQAPGKEREFVASISTGGSTYYADSVKGRFTISRDNAKNTVYLQMNSLKPEDTAVYYCAVAGYIPSKFANQLAYWGQGTQVTVSS

SEQ ID NO: 15290 - protein, 122 aa, Artificial Sequence
  Chemically Synthesized
QVQLQESGGGLVQAGGSLRLSCAASGTISNDDYMGWYRQAPGKERELVASIDPGTNTNYADSVKGRFTISRDNAKNTVYLQMNSLKPEDTAVYYCAVGDEYDDIAQDTYLYWGQGTQVTVSS

SEQ ID NO: 15291 - protein, 118 aa, Artificial Sequence
  Chemically Synthesized
QVQLQESGGGLVQAGGSLRLSCAASGYISYGGAMGWYRQAPGKEREFVASIGLGSTTNYADSVKGRFTISRDNAKNTVYLQMNSLKPEDTAVYYCAVNSQKYIILVYWGQGTQVTVSS

SEQ ID NO: 15292 - protein, 122 aa, Artificial Sequence
  Chemically Synthesized
QVQLQESGGGLVQAGGSLRLSCAASGTISFYSNMGWYRQAPGKERELVASIAYGSSTNYADSVKGRFTISRDNAKNTVYLQMNSLKPEDTAVYYCAAINNSAREYGTLYWYWGQGTQVTVSS

SEQ ID NO: 15293 - protein, 118 aa, Artificial Sequence
  Chemically Synthesized
QVQLQESGGGLVQAGGSLRLSCAASGTISFFPWMGWYRQAPGKEREFVASIAYGGTTYYADSVKGRFTISRDNAKNTVYLQMNSLKPEDTAVYYCAVPLRETGYLAYWGQGTQVTVSS

SEQ ID NO: 15294 - protein, 116 aa, Artificial Sequence
  Chemically Synthesized
QVQLQESGGGLVQAGGSLRLSCAASGTISRPYMGWYRQAPGKEREFVASIARVLIPYADSVKGRFTISRDNAKNTVYLQMNSLKPEDTAVYYCAVDENRQRDYQYWGQGTQVTVSS

SEQ ID NO: 15295 - protein, 118 aa, Artificial Sequence
  Chemically Synthesized
QVQLQESGGGLVQAGGSLRLSCAASGSIFFPWYMGWYRQAPGKEREFVAAINYGTNTYYADSVKGRFTISRDNAKNTVYLQMNSLKPEDTAVYYCAATLGDASDYYYWGQGTQVTVSS

SEQ ID NO: 15296 - protein, 118 aa, Artificial Sequence
  Chemically Synthesized
QVQLQESGGGLVQAGGSLRLSCAASGSIFNYVYMGWYRQAPGKERELVAAIGDGSSTYYADSVKGRFTISRDNAKNTVYLQMNSLKPEDTAVYYCAVKRNVLYDLVYWGQGTQVTVSS

SEQ ID NO: 15297 - protein, 122 aa, Artificial Sequence
  Chemically Synthesized
QVQLQESGGGLVQAGGSLRLSCAASGNISVRYRMGWYRQAPGKERELVAAINLGGTTYYADSVKGRFTISRDNAKNTVYLQMNSLKPEDTAVYYCAVLTRRRGYNYYGHWYWGQGTQVTVSS

SEQ ID NO: 15298 - protein, 120 aa, Artificial Sequence
  Chemically Synthesized
QVQLQESGGGLVQAGGSLRLSCAASGTIFLADWMGWYRQAPGKEREFVAAIASGGITNYADSVKGRFTISRDNAKNTVYLQMNSLKPEDTAVYYCAVYWGAQAYTFEHYWGQGTQVTVSS

SEQ ID NO: 15299 - protein, 126 aa, Artificial Sequence
  Chemically Synthesized
QVQLQESGGGLVQAGGSLRLSCAASGYISASTGMGWYRQAPGKERELVAGIDGGGNTNYADSVKGRFTISRDNAKNTVYLQMNSLKPEDTAVYYCAANDTGDIYPDGPQQDRHDYWGQGTQVTVSS

SEQ ID NO: 15300 - protein, 122 aa, Artificial Sequence
  Chemically Synthesized
QVQLQESGGGLVQAGGSLRLSCAASGYIFVYWTMGWYRQAPGKERELVAAIGYGSITNYADSVKGRFTISRDNAKNTVYLQMNSLKPEDTAVYYCAATYPVSYWVSTALLYWGQGTQVTVSS

SEQ ID NO: 15301 - protein, 118 aa, Artificial Sequence
  Chemically Synthesized
QVQLQESGGGLVQAGGSLRLSCAASGTISRRGIMGWYRQAPGKERELVAAIGWGSSTNYADSVKGRFTISRDNAKNTVYLQMNSLKPEDTAVYYCAAGYTYRYKLGYWGQGTQVTVSS

SEQ ID NO: 15302 - protein, 122 aa, Artificial Sequence
  Chemically Synthesized
QVQLQESGGGLVQAGGSLRLSCAASGNIFYGTVMGWYRQAPGKEREFVATIDEGTTTNYADSVKGRFTISRDNAKNTVYLQMNSLKPEDTAVYYCAATRRKTTVIVGYFDYWGQGTQVTVSS

SEQ ID NO: 15303 - protein, 121 aa, Artificial Sequence
  Chemically Synthesized
QVQLQESGGGLVQAGGSLRLSCAASGTIFGDSDMGWYRQAPGKERELVAGIGSGGITYYADSVKGRFTISRDNAKNTVYLQMNSLKPEDTAVYYCAAYGGFVRDQYRFAYWGQGTQVTVSS

SEQ ID NO: 15304 - protein, 121 aa, Artificial Sequence
  Chemically Synthesized
QVQLQESGGGLVQAGGSLRLSCAASGTIFNLYMGWYRQAPGKEREFVASIAVGTITNYADSVKGRFTISRDNAKNTVYLQMNSLKPEDTAVYYCAAGTQLYRTYGYGLYYWGQGTQVTVSS

SEQ ID NO: 15305 - protein, 118 aa, Artificial Sequence
  Chemically Synthesized
QVQLQESGGGLVQAGGSLRLSCAASGNISYYVYMGWYRQAPGKEREFVAGIAAGGITNYADSVKGRFTISRDNAKNTVYLQMNSLKPEDTAVYYCAVYGNYGVTHYYWGQGTQVTVSS

SEQ ID NO: 15306 - protein, 118 aa, Artificial Sequence
  Chemically Synthesized
QVQLQESGGGLVQAGGSLRLSCAASGSIFDSTSMGWYRQAPGKEREFVASISDGGNTNYADSVKGRFTISRDNAKNTVYLQMNSLKPEDTAVYYCAAKLDYRLGLDYWGQGTQVTVSS

SEQ ID NO: 15307 - protein, 118 aa, Artificial Sequence
  Chemically Synthesized
QVQLQESGGGLVQAGGSLRLSCAASGTIFGPPKMGWYRQAPGKEREFVASITYGTTTYYADSVKGRFTISRDNAKNTVYLQMNSLKPEDTAVYYCAVGRYRWTRHPYWGQGTQVTVSS

SEQ ID NO: 15308 - protein, 122 aa, Artificial Sequence
  Chemically Synthesized
QVQLQESGGGLVQAGGSLRLSCAASGTISSFLPMGWYRQAPGKERELVATINAGSTTNYADSVKGRFTISRDNAKNTVYLQMNSLKPEDTAVYYCAAERGGAGVAYATLDYWGQGTQVTVSS

SEQ ID NO: 15309 - protein, 126 aa, Artificial Sequence
  Chemically Synthesized
QVQLQESGGGLVQAGGSLRLSCAASGSIFTYHYMGWYRQAPGKERELVAGIDSGTSTNYADSVKGRFTISRDNAKNTVYLQMNSLKPEDTAVYYCAAKTRGYHWSIWRFIATYEYWGQGTQVTVSS

SEQ ID NO: 15310 - protein, 122 aa, Artificial Sequence
  Chemically Synthesized
QVQLQESGGGLVQAGGSLRLSCAASGTIFGQVGMGWYRQAPGKEREFVAAIAIGGITYYADSVKGRFTISRDNAKNTVYLQMNSLKPEDTAVYYCAVTGPYYYWAGDIFGYWGQGTQVTVSS

SEQ ID NO: 15311 - protein, 122 aa, Artificial Sequence
  Chemically Synthesized
QVQLQESGGGLVQAGGSLRLSCAASGNISRWLAMGWYRQAPGKERELVAAIAEGGSTYYADSVKGRFTISRDNAKNTVYLQMNSLKPEDTAVYYCAVGDVQDAGPADGHIYWGQGTQVTVSS

SEQ ID NO: 15312 - protein, 122 aa, Artificial Sequence
  Chemically Synthesized
QVQLQESGGGLVQAGGSLRLSCAASGTIFRRFTMGWYRQAPGKERELVASIDPGGTTYYADSVKGRFTISRDNAKNTVYLQMNSLKPEDTAVYYCAADRFRYYLQLYAHQYWGQGTQVTVSS

SEQ ID NO: 15313 - protein, 118 aa, Artificial Sequence
  Chemically Synthesized
QVQLQESGGGLVQAGGSLRLSCAASGYISTVYGMGWYRQAPGKEREFVAGIDYGSNTNYADSVKGRFTISRDNAKNTVYLQMNSLKPEDTAVYYCAAELDPTDYYGYWGQGTQVTVSS

SEQ ID NO: 15314 - protein, 114 aa, Artificial Sequence
  Chemically Synthesized
QVQLQESGGGLVQAGGSLRLSCAASGTISRLHIMGWYRQAPGKERELVAAWYYLYADSVKGRFTISRDNAKNTVYLQMNSLKPEDTAVYYCAAYSGYDVYFYYWGQGTQVTVSS

SEQ ID NO: 15315 - protein, 122 aa, Artificial Sequence
  Chemically Synthesized
QVQLQESGGGLVQAGGSLRLSCAASGYISQLGIMGWYRQAPGKERELVATIALGANTYYADSVKGRFTISRDNAKNTVYLQMNSLKPEDTAVYYCAVRPFYSVIDARPFYYWGQGTQVTVSS

SEQ ID NO: 15316 - protein, 112 aa, Artificial Sequence
  Chemically Synthesized
QVQLQESGGGLVQAGGSLRLSCAASGTIFDYREMGWYRQAPGKEREFGSNTNYADSVKGRFTISRDNAKNTVYLQMNSLKPEDTAVYYCAVSYRPNDYYAYWGQGTQVTVSS

SEQ ID NO: 15317 - protein, 118 aa, Artificial Sequence
  Chemically Synthesized
QVQLQESGGGLVQAGGSLRLSCAASGSIFWYESMGWYRQAPGKEREFVAAITLGANTYYADSVKGRFTISRDNAKNTVYLQMNSLKPEDTAVYYCAVNRRGDNIFTYWGQGTQVTVSS

SEQ ID NO: 15318 - protein, 118 aa, Artificial Sequence
  Chemically Synthesized
QVQLQESGGGLVQAGGSLRLSCAASGTIFDAYYMGWYRQAPGKERELVAGIAYGSNTNYADSVKGRFTISRDNAKNTVYLQMNSLKPEDTAVYYCAVDKGRTIYLNYWGQGTQVTVSS

SEQ ID NO: 15319 - protein, 117 aa, Artificial Sequence
  Chemically Synthesized
QVQLQESGGGLVQAGGSLRLSCAASGNISYSTDMGWYRQAPGKERELLPLLVTVVLPYADSVKGRFTISRDNAKNTVYLQMNSLKPEDTAVYYCAVTASEIPQLFYWGQGTQVTVSS

SEQ ID NO: 15320 - protein, 115 aa, Artificial Sequence
  Chemically Synthesized
QVQLQESGGGLVQAGGSLRLSCAASGNIFTTTMGWYRQAPGKERELVASITRGATTYYADSVKGRFTISRDNAKNTVYLQMNSLKPEDTAVYYCAVWAWSRYWYWGQGTQVTVSS

SEQ ID NO: 15321 - protein, 118 aa, Artificial Sequence
  Chemically Synthesized
QVQLQESGGGLVQAGGSLRLSCAASGSIFLPWYMGWYRQAPGKERELVAAISNGASTYYADSVKGRFTISRDNAKNTVYLQMNSLKPEDTAVYYCAVVVYYFVPFTYWGQGTQVTVSS

SEQ ID NO: 15322 - protein, 118 aa, Artificial Sequence
  Chemically Synthesized
QVQLQESGGGLVQAGGSLRLSCAASGYISRGPYMGWYRQAPGKEREFVAAIDKGGTTYYADSVKGRFTISRDNAKNTVYLQMNSLKPEDTAVYYCAVNRRFQRYYTYWGQGTQVTVSS

SEQ ID NO: 15323 - protein, 126 aa, Artificial Sequence
  Chemically Synthesized
QVQLQESGGGLVQAGGSLRLSCAASGSIFRPWYMGWYRQAPGKERELVAAISYGTITYYADSVKGRFTISRDNAKNTVYLQMNSLKPEDTAVYYCAVASVIVHPNTSYRQWPHGYWGQGTQVTVSS

SEQ ID NO: 15324 - protein, 124 aa, Artificial Sequence
  Chemically Synthesized
QVQLQESGGGLVQAGGSLRLSCAASGNIFGWMGWYRQAPGKERELVAGINRGTITNYADSVKGRFTISRDNAKNTVYLQMNSLKPEDTAVYYCAADPFRPFLHILSLLPKHYYWGQGTQVTVSS

SEQ ID NO: 15325 - protein, 122 aa, Artificial Sequence
  Chemically Synthesized
QVQLQESGGGLVQAGGSLRLSCAASGNISHRSSMGWYRQAPGKERELVATIGWGGNTYYADSVKGRFTISRDNAKNTVYLQMNSLKPEDTAVYYCAVRTSDADRSDRSHQYWGQGTQVTVSS

SEQ ID NO: 15326 - protein, 122 aa, Artificial Sequence
  Chemically Synthesized
QVQLQESGGGLVQAGGSLRLSCAASGNIFGYTVMGWYRQAPGKERELVAAITTGSSTYYADSVKGRFTISRDNAKNTVYLQMNSLKPEDTAVYYCAVTRRRLWTYYGYLYYWGQGTQVTVSS

SEQ ID NO: 15327 - protein, 118 aa, Artificial Sequence
  Chemically Synthesized
QVQLQESGGGLVQAGGSLRLSCAASGTISETYEMGWYRQAPGKERELVAAIGYGSSTNYADSVKGRFTISRDNAKNTVYLQMNSLKPEDTAVYYCAADSPQYSYLYYWGQGTQVTVSS

SEQ ID NO: 15328 - protein, 121 aa, Artificial Sequence
  Chemically Synthesized
QVQLQESGGGLVQAGGSLRLSCAASGSISPSNDMGWYRQAPGKERELVATIAGGTSTYYADSVKGRFTISRDNAKNTVYLQMNSLKPEDTAVYYCAAVTVTLTVTPTTMYWGQGTQVTVSS

SEQ ID NO: 15329 - protein, 118 aa, Artificial Sequence
  Chemically Synthesized
QVQLQESGGGLVQAGGSLRLSCAASGSISSQLSMGWYRQAPGKERELVASIAYGGITNYADSVKGRFTISRDNAKNTVYLQMNSLKPEDTAVYYCAVGAKVPYALVYWGQGTQVTVSS

SEQ ID NO: 15330 - protein, 118 aa, Artificial Sequence
  Chemically Synthesized
QVQLQESGGGLVQAGGSLRLSCAASGSIFTPRAMGWYRQAPGKERELVAGITRGATTNYADSVKGRFTISRDNAKNTVYLQMNSLKPEDTAVYYCAVRTYRYTNFYYWGQGTQVTVSS

SEQ ID NO: 15331 - protein, 112 aa, Artificial Sequence
  Chemically Synthesized
QVQLQESGGGLVQAGGSLRLSCAASGNISSYIGMGWYRQAPGKEREFVAGIDGGGNTNYADSVKGRFTISRDNAKNTVYLQMNSLKPEDTAVYYCAYYFLYWGQGTQVTVSS

SEQ ID NO: 15332 - protein, 118 aa, Artificial Sequence
  Chemically Synthesized
QVQLQESGGGLVQAGGSLRLSCAASGTISDPFYMGWYRQAPGKERELVAAIDQGGTTYYADSVKGRFTISRDNAKNTVYLQMNSLKPEDTAVYYCAVATAYGDHHVYWGQGTQVTVSS

SEQ ID NO: 15333 - protein, 126 aa, Artificial Sequence
  Chemically Synthesized
QVQLQESGGGLVQAGGSLRLSCAASGSIFFRLGMGWYRQAPGKEREFVAGISYGSTTNYADSVKGRFTISRDNAKNTVYLQMNSLKPEDTAVYYCAAYIPVYDSRYDYTQGQFGYWGQGTQVTVSS

SEQ ID NO: 15334 - protein, 122 aa, Artificial Sequence
  Chemically Synthesized
QVQLQESGGGLVQAGGSLRLSCAASGTIFTPTRMGWYRQAPGKERELVAAITRGGSTNYADSVKGRFTISRDNAKNTVYLQMNSLKPEDTAVYYCAAHKQITPWWAYPYAYWGQGTQVTVSS

SEQ ID NO: 15335 - protein, 118 aa, Artificial Sequence
  Chemically Synthesized
QVQLQESGGGLVQAGGSLRLSCAASGNIFRVRDMGWYRQAPGKEREFVASINSGSTTYYADSVKGRFTISRDNAKNTVYLQMNSLKPEDTAVYYCAAAVRGYRWHYYWGQGTQVTVSS

SEQ ID NO: 15336 - protein, 117 aa, Artificial Sequence
  Chemically Synthesized
QVQLQESGGGLVQAGGSLRLSCAASGYIFLRTMGWYRQAPGKERELVASIAPGGITNYADSVKGRFTISRDNAKNTVYLQMNSLKPEDTAVYYCAVYYDYHHTYRYWGQGTQVTVSS

SEQ ID NO: 15337 - protein, 118 aa, Artificial Sequence
  Chemically Synthesized
QVQLQESGGGLVQAGGSLRLSCAASGSISGGGEMGWYRQAPGKEREFVATITTGSTTNYADSVKGRFTISRDNAKNTVYLQMNSLKPEDTAVYYCAAAGPRVDPLGYWGQGTQVTVSS

SEQ ID NO: 15338 - protein, 122 aa, Artificial Sequence
  Chemically Synthesized
QVQLQESGGGLVQAGGSLRLSCAASGSISYDYGMGWYRQAPGKEREFVASISLGASTNYADSVKGRFTISRDNAKNTVYLQMNSLKPEDTAVYYCAVGDEDDYKITTGHAYWGQGTQVTVSS

SEQ ID NO: 15339 - protein, 126 aa, Artificial Sequence
  Chemically Synthesized
QVQLQESGGGLVQAGGSLRLSCAASGTIFYDDSMGWYRQAPGKEREFVAAITDGTITNYADSVKGRFTISRDNAKNTVYLQMNSLKPEDTAVYYCAVKGIIEYDAYVPDYNILTYWGQGTQVTVSS

SEQ ID NO: 15340 - protein, 118 aa, Artificial Sequence
  Chemically Synthesized
QVQLQESGGGLVQAGGSLRLSCAASGSISRARYMGWYRQAPGKEREFVAAITYGSITNYADSVKGRFTISRDNAKNTVYLQMNSLKPEDTAVYYCAVYGGLGGGLRYWGQGTQVTVSS

SEQ ID NO: 15341 - protein, 121 aa, Artificial Sequence
  Chemically Synthesized
QVQLQESGGGLVQAGGSLRLSCAASGTIFGGPMGWYRQAPGKEREFVATIDNGGNTNYADSVKGRFTISRDNAKNTVYLQMNSLKPEDTAVYYCAAGEVDGYYEPPDLVYWGQGTQVTVSS

SEQ ID NO: 15342 - protein, 121 aa, Artificial Sequence
  Chemically Synthesized
QVQLQESGGGLVQAGGSLRLSCAASGTISDGPYMGWYRQAPGKERELVASIAKGASTNYADSVKGRFTISRDNAKNTVYLQMNSLKPEDTAVYYCAVVDVYYYTVPRSIYWGQGTQVTVSS

SEQ ID NO: 15343 - protein, 118 aa, Artificial Sequence
  Chemically Synthesized
QVQLQESGGGLVQAGGSLRLSCAASGYIFDSRTMGWYRQAPGKEREFVAGIGRGATTYYADSVKGRFTISRDNAKNTVYLQMNSLKPEDTAVYYCAVWVSTSRPHPYWGQGTQVTVSS

SEQ ID NO: 15344 - protein, 118 aa, Artificial Sequence
  Chemically Synthesized
QVQLQESGGGLVQAGGSLRLSCAASGTISRRPWMGWYRQAPGKERELVASIDGGTTTNYADSVKGRFTISRDNAKNTVYLQMNSLKPEDTAVYYCAVWYGWGGVFDYWGQGTQVTVSS

SEQ ID NO: 15345 - protein, 118 aa, Artificial Sequence
  Chemically Synthesized
QVQLQESGGGLVQAGGSLRLSCAASGTIFRRVRMGWYRQAPGKERELVAGITHGANTYYADSVKGRFTISRDNAKNTVYLQMNSLKPEDTAVYYCAAWFYRYTSYSYWGQGTQVTVSS

SEQ ID NO: 15346 - protein, 118 aa, Artificial Sequence
  Chemically Synthesized
QVQLQESGGGLVQAGGSLRLSCAASGSIFWYYGMGWYRQAPGKERELVAAIDRGTNTNYADSVKGRFTISRDNAKNTVYLQMNSLKPEDTAVYYCAVLWPFSLPLDYWGQGTQVTVSS

SEQ ID NO: 15347 - protein, 122 aa, Artificial Sequence
  Chemically Synthesized
QVQLQESGGGLVQAGGSLRLSCAASGYISRWYTMGWYRQAPGKEREFVAAISYGSITYYADSVKGRFTISRDNAKNTVYLQMNSLKPEDTAVYYCAVRPSWRWNRYTVHGYWGQGTQVTVSS

SEQ ID NO: 15348 - protein, 122 aa, Artificial Sequence
  Chemically Synthesized
QVQLQESGGGLVQAGGSLRLSCAASGTISVVRQMGWYRQAPGKERELVASIGAGSTTNYADSVKGRFTISRDNAKNTVYLQMNSLKPEDTAVYYCAVDDDDNLFRELLHLYWGQGTQVTVSS

SEQ ID NO: 15349 - protein, 118 aa, Artificial Sequence
  Chemically Synthesized
QVQLQESGGGLVQAGGSLRLSCAASGYISNHRTMGWYRQAPGKEREFVASIGRGGITYYADSVKGRFTISRDNAKNTVYLQMNSLKPEDTAVYYCAATAYRYRYYGYWGQGTQVTVSS

SEQ ID NO: 15350 - protein, 117 aa, Artificial Sequence
  Chemically Synthesized
QVQLQESGGGLVQAGGSLRLSCAASGIFLTLVMGWYRQAPGKERELVASIARGASTYYADSVKGRFTISRDNAKNTVYLQMNSLKPEDTAVYYCAVTYAPDQPYGYWGQGTQVTVSS

SEQ ID NO: 15351 - protein, 118 aa, Artificial Sequence
  Chemically Synthesized
QVQLQESGGGLVQAGGSLRLSCAASGYISPRSDMGWYRQAPGKERELVASIAYGTNTYYADSVKGRFTISRDNAKNTVYLQMNSLKPEDTAVYYCAARGNYDLVLGYWGQGTQVTVSS

SEQ ID NO: 15352 - protein, 126 aa, Artificial Sequence
  Chemically Synthesized
QVQLQESGGGLVQAGGSLRLSCAASGYISVVHRMGWYRQAPGKERELVATITRGGSTNYADSVKGRFTISRDNAKNTVYLQMNSLKPEDTAVYYCAAYAGAGYHPYSQRRSYHSYWGQGTQVTVSS

SEQ ID NO: 15353 - protein, 122 aa, Artificial Sequence
  Chemically Synthesized
QVQLQESGGGLVQAGGSLRLSCAASGTIFLYRVMGWYRQAPGKEREFVATIASGAITNYADSVKGRFTISRDNAKNTVYLQMNSLKPEDTAVYYCAAAYRYSRYGDERYGYWGQGTQVTVSS

SEQ ID NO: 15354 - protein, 118 aa, Artificial Sequence
  Chemically Synthesized
QVQLQESGGGLVQAGGSLRLSCAASGSIFWRAYMGWYRQAPGKEREFVAAITRGTNTYYADSVKGRFTISRDNAKNTVYLQMNSLKPEDTAVYYCAVGARGTRRYVYWGQGTQVTVSS

SEQ ID NO: 15355 - protein, 122 aa, Artificial Sequence
  Chemically Synthesized
QVQLQESGGGLVQAGGSLRLSCAASGNIFDYDSMGWYRQAPGKERELVASIAYGTITYYADSVKGRFTISRDNAKNTVYLQMNSLKPEDTAVYYCAVLGRTTYANVFRYAYWGQGTQVTVSS

SEQ ID NO: 15356 - protein, 116 aa, Artificial Sequence
  Chemically Synthesized
QVQLQESGGGLVQAGGSLRLSCAASGTISADYQMGWYRQAPGKERELVAGIDRGANTNYADSVKGRFTISRDNAKNTVYLQMNSLKPEDTAVYYCAVYPSVTTMYWGQGTQVTVSS

SEQ ID NO: 15357 - protein, 124 aa, Artificial Sequence
  Chemically Synthesized
QVQLQESGGGLVQAGGSLRLSCAASGTISADSDMGWYRQAPGKEREFVASITYGTITNYADSVKGRFTISRDNAKNTVYLQMNSLKPEDTAVYYCAVYSTRSYQYSDEGYYPYWGQGTQVTVSS

SEQ ID NO: 15358 - protein, 122 aa, Artificial Sequence
  Chemically Synthesized
QVQLQESGGGLVQAGGSLRLSCAASGNISYLRGMGWYRQAPGKERELVATINRGTTTNYADSVKGRFTISRDNAKNTVYLQMNSLKPEDTAVYYCAALALGSHGVGRWYRYWGQGTQVTVSS

SEQ ID NO: 15359 - protein, 122 aa, Artificial Sequence
  Chemically Synthesized
QVQLQESGGGLVQAGGSLRLSCAASGNISDGYRMGWYRQAPGKERELVATIGDGTSTYYADSVKGRFTISRDNAKNTVYLQMNSLKPEDTAVYYCAAGNTDWTNTQFVHDYWGQGTQVTVSS

SEQ ID NO: 15360 - protein, 122 aa, Artificial Sequence
  Chemically Synthesized
QVQLQESGGGLVQAGGSLRLSCAASGTIFARRVMGWYRQAPGKEREFVAGIDRGATTYYADSVKGRFTISRDNAKNTVYLQMNSLKPEDTAVYYCAVQYLARDGKPYQLWYWGQGTQVTVSS

SEQ ID NO: 15361 - protein, 122 aa, Artificial Sequence
  Chemically Synthesized
QVQLQESGGGLVQAGGSLRLSCAASGSIFSYASMGWYRQAPGKEREFVAAIDTGASTNYADSVKGRFTISRDNAKNTVYLQMNSLKPEDTAVYYCAAELYASGYDGKYHDYWGQGTQVTVSS

SEQ ID NO: 15362 - protein, 122 aa, Artificial Sequence
  Chemically Synthesized
QVQLQESGGGLVQAGGSLRLSCAASGSIFDELYMGWYRQAPGKEREFVATINRGGNTNYADSVKGRFTISRDNAKNTVYLQMNSLKPEDTAVYYCAAAGDYADRDDYWYDYWGQGTQVTVSS

SEQ ID NO: 15363 - protein, 117 aa, Artificial Sequence
  Chemically Synthesized
QVQLQESGGGLVQAGGSLRLSCAASGSIFVPRMGWYRQAPGKEREFVAGINTGTITNYADSVKGRFTISRDNAKNTVYLQMNSLKPEDTAVYYCAARGWRQRTLRYWGQGTQVTVSS

SEQ ID NO: 15364 - protein, 118 aa, Artificial Sequence
  Chemically Synthesized
QVQLQESGGGLVQAGGSLRLSCAASGNISGPYAMGWYRQAPGKEREFVAAINDGASTYYADSVKGRFTISRDNAKNTVYLQMNSLKPEDTAVYYCAVRRGGGAEYGYWGQGTQVTVSS

SEQ ID NO: 15365 - protein, 118 aa, Artificial Sequence
  Chemically Synthesized
QVQLQESGGGLVQAGGSLRLSCAASGNIFPYAGMGWYRQAPGKEREFVAAIAFGGSTYYADSVKGRFTISRDNAKNTVYLQMNSLKPEDTAVYYCAAGPYRRGRFYYWGQGTQVTVSS

SEQ ID NO: 15366 - protein, 122 aa, Artificial Sequence
  Chemically Synthesized
QVQLQESGGGLVQAGGSLRLSCAASGTIFVRGYMGWYRQAPGKEREFVATISRGATTNYADSVKGRFTISRDNAKNTVYLQMNSLKPEDTAVYYCAARRNYYGPYWARFRYWGQGTQVTVSS

SEQ ID NO: 15367 - protein, 118 aa, Artificial Sequence
  Chemically Synthesized
QVQLQESGGGLVQAGGSLRLSCAASGNIFKRRYMGWYRQAPGKEREFVASIGSGSSTNYADSVKGRFTISRDNAKNTVYLQMNSLKPEDTAVYYCAVWGIRGLYFRYWGQGTQVTVSS

SEQ ID NO: 15368 - protein, 109 aa, Artificial Sequence
  Chemically Synthesized
QVQLQESGGGLVQAGGSLRLSCAASGYISGKSIMGWYRQAPGKERELVASIGYGGNTNYADSVKGRFTISRDNAKNTVYLQMNSLKPEDTAVYYCAIYWGQGTQVTVSS

SEQ ID NO: 15369 - protein, 126 aa, Artificial Sequence
  Chemically Synthesized
QVQLQESGGGLVQAGGSLRLSCAASGYIFGLRTMGWYRQAPGKEREFVAAIGRGSNTYYADSVKGRFTISRDNAKNTVYLQMNSLKPEDTAVYYCAVHSAALHASYPHGKSSHRYWGQGTQVTVSS

SEQ ID NO: 15370 - protein, 118 aa, Artificial Sequence
  Chemically Synthesized
QVQLQESGGGLVQAGGSLRLSCAASGTISYQYYMGWYRQAPGKERELVASIDDGTTTYYADSVKGRFTISRDNAKNTVYLQMNSLKPEDTAVYYCAVRKDRDDDHKYWGQGTQVTVSS

SEQ ID NO: 15371 - protein, 126 aa, Artificial Sequence
  Chemically Synthesized
QVQLQESGGGLVQAGGSLRLSCAASGNIFPYQRMGWYRQAPGKEREFVATINYGGNTYYADSVKGRFTISRDNAKNTVYLQMNSLKPEDTAVYYCAARYDWRAYYAPARRYDHYYWGQGTQVTVSS

SEQ ID NO: 15372 - protein, 118 aa, Artificial Sequence
  Chemically Synthesized
QVQLQESGGGLVQAGGSLRLSCAASGYISYWRVMGWYRQAPGKERELVAAIAYGTITYYADSVKGRFTISRDNAKNTVYLQMNSLKPEDTAVYYCAVRSAGFARHGYWGQGTQVTVSS

SEQ ID NO: 15373 - protein, 122 aa, Artificial Sequence
  Chemically Synthesized
QVQLQESGGGLVQAGGSLRLSCAASGYIFGASDMGWYRQAPGKEREFVAGITYGGITNYADSVKGRFTISRDNAKNTVYLQMNSLKPEDTAVYYCAVDATGDGRDDANFYYWGQGTQVTVSS

SEQ ID NO: 15374 - protein, 119 aa, Artificial Sequence
  Chemically Synthesized
QVQLQESGGGLVQAGGSLRLSCAASGYISQRGAMGWYRQAPGKERELVAAIAYGSSTNYADSVKGRFTISRDNAKNTVYLQMNSLKPEDTAVYYCAAYYVRRYVPHYYWGQGTQVTVSS

SEQ ID NO: 15375 - protein, 126 aa, Artificial Sequence
  Chemically Synthesized
QVQLQESGGGLVQAGGSLRLSCAASGYISGGLGMGWYRQAPGKERELVAAIGYGATTNYADSVKGRFTISRDNAKNTVYLQMNSLKPEDTAVYYCAASHTTPYPHVNRVLGPLLYWGQGTQVTVSS

SEQ ID NO: 15376 - protein, 118 aa, Artificial Sequence
  Chemically Synthesized
QVQLQESGGGLVQAGGSLRLSCAASGNISPDHYMGWYRQAPGKEREFVAAIDHGGTTNYADSVKGRFTISRDNAKNTVYLQMNSLKPEDTAVYYCAVTDSYQYAHDYWGQGTQVTVSS

SEQ ID NO: 15377 - protein, 122 aa, Artificial Sequence
  Chemically Synthesized
QVQLQESGGGLVQAGGSLRLSCAASGNIFYAYWMGWYRQAPGKEREFVASISYGASTNYADSVKGRFTISRDNAKNTVYLQMNSLKPEDTAVYYCAVYYTWFSAPPWFLAYWGQGTQVTVSS

SEQ ID NO: 15378 - protein, 118 aa, Artificial Sequence
  Chemically Synthesized
QVQLQESGGGLVQAGGSLRLSCAASGTIFRWQEMGWYRQAPGKEREFVAGIDVGGITYYADSVKGRFTISRDNAKNTVYLQMNSLKPEDTAVYYCAANVLTPDYHPYWGQGTQVTVSS

SEQ ID NO: 15379 - protein, 115 aa, Artificial Sequence
  Chemically Synthesized
QVQLQESGGGLVQAGGSLRLSCAASGSIFDYAVMGWYRQAPGKERELVAGIANGASTNYADSVKGRFTISRDNAKNTVYLQMNSLKPEDTAVYYCAVTTTLVIYWGQGTQVTVSS

SEQ ID NO: 15380 - protein, 118 aa, Artificial Sequence
  Chemically Synthesized
QVQLQESGGGLVQAGGSLRLSCAASGTIFWLRGMGWYRQAPGKERELVATISRGSTTYYADSVKGRFTISRDNAKNTVYLQMNSLKPEDTAVYYCAARRTWGWYHYYWGQGTQVTVSS

SEQ ID NO: 15381 - protein, 122 aa, Artificial Sequence
  Chemically Synthesized
QVQLQESGGGLVQAGGSLRLSCAASGTIFRSHAMGWYRQAPGKERELVASIGGGGITNYADSVKGRFTISRDNAKNTVYLQMNSLKPEDTAVYYCAVGRRYYRDYIWGHVYWGQGTQVTVSS

SEQ ID NO: 15382 - protein, 126 aa, Artificial Sequence
  Chemically Synthesized
QVQLQESGGGLVQAGGSLRLSCAASGYIFLHSHMGWYRQAPGKEREFVATIGQGGSTNYADSVKGRFTISRDNAKNTVYLQMNSLKPEDTAVYYCAAYPYRRWYYPFNYYRYHVYWGQGTQVTVSS

SEQ ID NO: 15383 - protein, 117 aa, Artificial Sequence
  Chemically Synthesized
QVQLQESGGGLVQAGGSLRLSCAASGYISPYEHMGWYRQAPGKEREFVAGITSGTSTNYADSVKGRFTISRDNAKNTVYLQMNSLKPEDTAVYYCAVDIPGSTSIYWGQGTQVTVSS

SEQ ID NO: 15384 - protein, 122 aa, Artificial Sequence
  Chemically Synthesized
QVQLQESGGGLVQAGGSLRLSCAASGSISQGGYMGWYRQAPGKEREFVAGIDGGASTNYADSVKGRFTISRDNAKNTVYLQMNSLKPEDTAVYYCAADAVYYGQYVWVYYYWGQGTQVTVSS

SEQ ID NO: 15385 - protein, 122 aa, Artificial Sequence
  Chemically Synthesized
QVQLQESGGGLVQAGGSLRLSCAASGNIFRPPSMGWYRQAPGKERELVASIAYGGSTNYADSVKGRFTISRDNAKNTVYLQMNSLKPEDTAVYYCAAYRYRSWYYRTGHEYWGQGTQVTVSS

SEQ ID NO: 15386 - protein, 117 aa, Artificial Sequence
  Chemically Synthesized
QVQLQESGGGLVQAGGSLRLSCAASGYISSLLMGWYRQAPGKEREFVASITEGANTYYADSVKGRFTISRDNAKNTVYLQMNSLKPEDTAVYYCAVYPPGRYPLVYWGQGTQVTVSS

SEQ ID NO: 15387 - protein, 116 aa, Artificial Sequence
  Chemically Synthesized
QVQLQESGGGLVQAGGSLRLSCAASGYIFQLSSMGWYRQAPGKERELVAAIGYGTTTNYADSVKGRFTISRDNAKNTVYLQMNSLKPEDTAVYYCAVSTVVTVLYWGQGTQVTVSS

SEQ ID NO: 15388 - protein, 118 aa, Artificial Sequence
  Chemically Synthesized
QVQLQESGGGLVQAGGSLRLSCAASGYISDDPSMGWYRQAPGKERELVAGIGDGANTYYADSVKGRFTISRDNAKNTVYLQMNSLKPEDTAVYYCAAYGDDGDDFAYWGQGTQVTVSS

SEQ ID NO: 15389 - protein, 118 aa, Artificial Sequence
  Chemically Synthesized
QVQLQESGGGLVQAGGSLRLSCAASGTIFYGQDMGWYRQAPGKEREFVAAITVGANTYYADSVKGRFTISRDNAKNTVYLQMNSLKPEDTAVYYCAAGWAYLSWYRYWGQGTQVTVSS

SEQ ID NO: 15390 - protein, 126 aa, Artificial Sequence
  Chemically Synthesized
QVQLQESGGGLVQAGGSLRLSCAASGYIFPRYNMGWYRQAPGKEREFVASIAFGGITNYADSVKGRFTISRDNAKNTVYLQMNSLKPEDTAVYYCAVLRRVPYIAGHFRAGPYRYWGQGTQVTVSS

SEQ ID NO: 15391 - protein, 126 aa, Artificial Sequence
  Chemically Synthesized
QVQLQESGGGLVQAGGSLRLSCAASGNISPYLWMGWYRQAPGKERELVAGINDGSNTNYADSVKGRFTISRDNAKNTVYLQMNSLKPEDTAVYYCAVGVGGGNAIHYADYVDHTYWGQGTQVTVSS

SEQ ID NO: 15392 - protein, 123 aa, Artificial Sequence
  Chemically Synthesized
QVQLQESGGGLVQAGGSLRLSCAASGYISASTWMGWYRQAPGKERELVAGISYGGTTYYADSVKGRFTISRDNAKNTVYLQMNSLKPEDTAVYYCAAYDNDRVKWRVSRHPYWGQGTQVTVSS

SEQ ID NO: 15393 - protein, 118 aa, Artificial Sequence
  Chemically Synthesized
QVQLQESGGGLVQAGGSLRLSCAASGNISYYDYMGWYRQAPGKEREFVAGINYGSTTNYADSVKGRFTISRDNAKNTVYLQMNSLKPEDTAVYYCAVYASDYLLFKYWGQGTQVTVSS

SEQ ID NO: 15394 - protein, 126 aa, Artificial Sequence
  Chemically Synthesized
QVQLQESGGGLVQAGGSLRLSCAASGSIFSYVNMGWYRQAPGKERELVAGIGDGASTNYADSVKGRFTISRDNAKNTVYLQMNSLKPEDTAVYYCAVRGTYDYGIYYVSAYDHYYWGQGTQVTVSS

SEQ ID NO: 15395 - protein, 122 aa, Artificial Sequence
  Chemically Synthesized
QVQLQESGGGLVQAGGSLRLSCAASGTIFEYVAMGWYRQAPGKERELVAGIDYGGSTYYADSVKGRFTISRDNAKNTVYLQMNSLKPEDTAVYYCAALRYSRLYPNRQHTYWGQGTQVTVSS

SEQ ID NO: 15396 - protein, 122 aa, Artificial Sequence
  Chemically Synthesized
QVQLQESGGGLVQAGGSLRLSCAASGTIFDTDFMGWYRQAPGKERELVAGIDQGGITYYADSVKGRFTISRDNAKNTVYLQMNSLKPEDTAVYYCAVPYVYYDYSDDYLYYWGQGTQVTVSS

SEQ ID NO: 15397 - protein, 118 aa, Artificial Sequence
  Chemically Synthesized
QVQLQESGGGLVQAGGSLRLSCAASGTIFERRLMGWYRQAPGKERELVATIAGGANTYYADSVKGRFTISRDNAKNTVYLQMNSLKPEDTAVYYCAAYSWGEYGYPYWGQGTQVTVSS

SEQ ID NO: 15398 - protein, 121 aa, Artificial Sequence
  Chemically Synthesized
QVQLQESGGGLVQAGGSLRLSCAASGNIFAAGIMGWYRQAPGKERELVASIDYGAITNYADSVKGRFTISRDNAKNTVYLQMNSLKPEDTAVYYCAVPDDYPPSSTVTIYWGQGTQVTVSS

SEQ ID NO: 15399 - protein, 117 aa, Artificial Sequence
  Chemically Synthesized
QVQLQESGGGLVQAGGSLRLSCAASGTIFDAPDMGWYRQAPGKERELVATINYGTTTYYADSVKGRFTISRDNAKNTVYLQMNSLKPEDTAVYYCAVLVSLTLTLYWGQGTQVTVSS

SEQ ID NO: 15400 - protein, 118 aa, Artificial Sequence
  Chemically Synthesized
QVQLQESGGGLVQAGGSLRLSCAASGYISRGHAMGWYRQAPGKEREFVAGIDTGGNTNYADSVKGRFTISRDNAKNTVYLQMNSLKPEDTAVYYCAAARTGELSFHYWGQGTQVTVSS

SEQ ID NO: 15401 - protein, 118 aa, Artificial Sequence
  Chemically Synthesized
QVQLQESGGGLVQAGGSLRLSCAASGSIFATYQMGWYRQAPGKEREFVAAISRGTNYLYADSVKGRFTISRDNAKNTVYLQMNSLKPEDTAVYYCAALQDYYLYYRYWGQGTQVTVSS

SEQ ID NO: 15402 - protein, 120 aa, Artificial Sequence
  Chemically Synthesized
QVQLQESGGGLVQAGGSLRLSCAASGYISWTYMGWYRQAPGKERELVAALLLVVIPYADSVKGRFTISRDNAKNTVYLQMNSLKPEDTAVYYCAAAQAYNKRRYYYLKYWGQGTQVTVSS

SEQ ID NO: 15403 - protein, 116 aa, Artificial Sequence
  Chemically Synthesized
QVQLQESGGGLVQAGGSLRLSCAASGYIFPDLDMGWYRQAPGKERELVASISYGTNTYYADSVKGRFTISRDNAKNTVYLQMNSLKPEDTAVYYCAVYPRYRFPYWGQGTQVTVSS

SEQ ID NO: 15404 - protein, 126 aa, Artificial Sequence
  Chemically Synthesized
QVQLQESGGGLVQAGGSLRLSCAASGSIFYAAHMGWYRQAPGKEREFVATIGKGGSTNYADSVKGRFTISRDNAKNTVYLQMNSLKPEDTAVYYCAVYYLDYPFPDVGDYYYYYYWGQGTQVTVSS

SEQ ID NO: 15405 - protein, 122 aa, Artificial Sequence
  Chemically Synthesized
QVQLQESGGGLVQAGGSLRLSCAASGTIFDTTVMGWYRQAPGKEREFVATIGTGANTYYADSVKGRFTISRDNAKNTVYLQMNSLKPEDTAVYYCAVIRGLYETTGVAHYYWGQGTQVTVSS

SEQ ID NO: 15406 - protein, 118 aa, Artificial Sequence
  Chemically Synthesized
QVQLQESGGGLVQAGGSLRLSCAASGYISATLPMGWYRQAPGKEREFVASITSGASTNYADSVKGRFTISRDNAKNTVYLQMNSLKPEDTAVYYCAVYDNTVRYFIYWGQGTQVTVSS

SEQ ID NO: 15407 - protein, 126 aa, Artificial Sequence
  Chemically Synthesized
QVQLQESGGGLVQAGGSLRLSCAASGYISYRGDMGWYRQAPGKERELVASIGDGTSTYYADSVKGRFTISRDNAKNTVYLQMNSLKPEDTAVYYCAVDVYTYPIIDIPHKKRLYYWGQGTQVTVSS

SEQ ID NO: 15408 - protein, 126 aa, Artificial Sequence
  Chemically Synthesized
QVQLQESGGGLVQAGGSLRLSCAASGNIFSSSVMGWYRQAPGKERELVAAISDGATTNYADSVKGRFTISRDNAKNTVYLQMNSLKPEDTAVYYCAVQDDGWWREYPSSYGIHYYWGQGTQVTVSS

SEQ ID NO: 15409 - protein, 126 aa, Artificial Sequence
  Chemically Synthesized
QVQLQESGGGLVQAGGSLRLSCAASGYIFYWYTMGWYRQAPGKEREFVATIGDGGSTNYADSVKGRFTISRDNAKNTVYLQMNSLKPEDTAVYYCAAYDRYHDSNDSTAQNDFDYWGQGTQVTVSS

SEQ ID NO: 15410 - protein, 113 aa, Artificial Sequence
  Chemically Synthesized
QVQLQESGGGLVQAGGSLRLSCAASGSIFTPARMGWYRQAPGKERELVAGITTGTSTYYADSVKGRFTISRDNAKNTVYLQMNSLKPEDTAVYYCAPDYHGYWGQGTQVTVSS

SEQ ID NO: 15411 - protein, 126 aa, Artificial Sequence
  Chemically Synthesized
QVQLQESGGGLVQAGGSLRLSCAASGTIFGIYIMGWYRQAPGKEREFVATISNGTNTNYADSVKGRFTISRDNAKNTVYLQMNSLKPEDTAVYYCAVRRDWSYRYDGYSPADHNYWGQGTQVTVSS

SEQ ID NO: 15412 - protein, 116 aa, Artificial Sequence
  Chemically Synthesized
QVQLQESGGGLVQAGGSLRLSCAASGTISSQSYMGWYRQAPGKEREFVAAIGIGAITYYADSVKGRFTISRDNAKNTVYLQMNSLKPEDTAVYYCAVLHHDVLLYWGQGTQVTVSS

SEQ ID NO: 15413 - protein, 117 aa, Artificial Sequence
  Chemically Synthesized
QVQLQESGGGLVQAGGSLRLSCAASGSISTHYMGWYRQAPGKERELVATIAWGSITNYADSVKGRFTISRDNAKNTVYLQMNSLKPEDTAVYYCAAIGDYILDFLYWGQGTQVTVSS

SEQ ID NO: 15414 - protein, 111 aa, Artificial Sequence
  Chemically Synthesized
QVQLQESGGGLVQAGGSLRLSCAASGNISYANYMGWYRQAPGKEREFVAGISHGTSTNYADSVKGRFTISRDNAKNTVYLQMNSLKPEDTAVYYCAAHIYWGQGTQVTVSS

SEQ ID NO: 15415 - protein, 121 aa, Artificial Sequence
  Chemically Synthesized
QVQLQESGGGLVQAGGSLRLSCAASGYIFDPYSMGWYRQAPGKERELVASIDGGTITNYADSVKGRFTISRDNAKNTVYLQMNSLKPEDTAVYYCAAYTPALRLTVLTIYWGQGTQVTVSS

SEQ ID NO: 15416 - protein, 118 aa, Artificial Sequence
  Chemically Synthesized
QVQLQESGGGLVQAGGSLRLSCAASGTIFYLTAMGWYRQAPGKERELVATISRGGTTYYADSVKGRFTISRDNAKNTVYLQMNSLKPEDTAVYYCAVPYIAHSPLRYWGQGTQVTVSS

SEQ ID NO: 15417 - protein, 126 aa, Artificial Sequence
  Chemically Synthesized
QVQLQESGGGLVQAGGSLRLSCAASGYIFDRLHMGWYRQAPGKEREFVAGIDSGGTTYYADSVKGRFTISRDNAKNTVYLQMNSLKPEDTAVYYCAAYDDYTLDDDDGYEIYLEYWGQGTQVTVSS

SEQ ID NO: 15418 - protein, 121 aa, Artificial Sequence
  Chemically Synthesized
QVQLQESGGGLVQAGGSLRLSCAASGTISIDVGMGWYRQAPGKEREFVATINDGGNTNYADSVKGRFTISRDNAKNTVYLQMNSLKPEDTAVYYCAADADPYSTVHLLCYWGQGTQVTVSS

SEQ ID NO: 15419 - protein, 125 aa, Artificial Sequence
  Chemically Synthesized
QVQLQESGGGLVQAGGSLRLSCAASGTIFSLRMGWYRQAPGKERELVASIGAGGNTNYADSVKGRFTISRDNAKNTVYLQMNSLKPEDTAVYYCAVYLTWTEWLSYPLYVDHDYWGQGTQVTVSS

SEQ ID NO: 15420 - protein, 126 aa, Artificial Sequence
  Chemically Synthesized
QVQLQESGGGLVQAGGSLRLSCAASGYIFSYDYMGWYRQAPGKERELVASIGSGGITNYADSVKGRFTISRDNAKNTVYLQMNSLKPEDTAVYYCAADGPRSVSSYYLGVVQHVYWGQGTQVTVSS

SEQ ID NO: 15421 - protein, 122 aa, Artificial Sequence
  Chemically Synthesized
QVQLQESGGGLVQAGGSLRLSCAASGTISTPYAMGWYRQAPGKERELVAGINPGTITYYADSVKGRFTISRDNAKNTVYLQMNSLKPEDTAVYYCAAYYYAYYSGGYHHYYWGQGTQVTVSS

SEQ ID NO: 15422 - protein, 118 aa, Artificial Sequence
  Chemically Synthesized
QVQLQESGGGLVQAGGSLRLSCAASGNIFRGDEMGWYRQAPGKEREFVAGITYGGNTNYADSVKGRFTISRDNAKNTVYLQMNSLKPEDTAVYYCAAGIEPYAYLTYWGQGTQVTVSS

SEQ ID NO: 15423 - protein, 113 aa, Artificial Sequence
  Chemically Synthesized
QVQLQESGGGLVQAGGSLRLSCAASGNISYDNIMGWYRQAPGKEREFVATIDYGGSTNYADSVKGRFTISRDNAKNTVYLQMNSLKPEDTAVYYCAAVLSWYWGQGTQVTVSS

SEQ ID NO: 15424 - protein, 121 aa, Artificial Sequence
  Chemically Synthesized
QVQLQESGGGLVQAGGSLRLSCAASGYISLLYTMGWYRQAPGKERELVATISRGSITNYADSVKGRFTISRDNAKNTVYLQMNSLKPEDTAVYYCAAHYYVARWTPAFSYWGQGTQVTVSS

SEQ ID NO: 15425 - protein, 126 aa, Artificial Sequence
  Chemically Synthesized
QVQLQESGGGLVQAGGSLRLSCAASGNISVSHIMGWYRQAPGKEREFVATIGRGGITNYADSVKGRFTISRDNAKNTVYLQMNSLKPEDTAVYYCAADWAYTRDAGFDGNYYHRYWGQGTQVTVSS

SEQ ID NO: 15426 - protein, 122 aa, Artificial Sequence
  Chemically Synthesized
QVQLQESGGGLVQAGGSLRLSCAASGNIFSSHDMGWYRQAPGKEREFVAGIGRGTTTYYADSVKGRFTISRDNAKNTVYLQMNSLKPEDTAVYYCAVGDVTAGDVLDNLHYWGQGTQVTVSS

SEQ ID NO: 15427 - protein, 117 aa, Artificial Sequence
  Chemically Synthesized
QVQLQESGGGLVQAGGSLRLSCAASGNISDDRYMGWYRQAPGKERELVAAIALGSNTNYADSVKGRFTISRDNAKNTVYLQMNSLKPEDTAVYYCAGLHHHLTFIYWGQGTQVTVSS

SEQ ID NO: 15428 - protein, 118 aa, Artificial Sequence
  Chemically Synthesized
QVQLQESGGGLVQAGGSLRLSCAASGNISRDTYMGWYRQAPGKERELVATISGGGSTNYADSVKGRFTISRDNAKNTVYLQMNSLKPEDTAVYYCAAVYYIGYGFYYWGQGTQVTVSS

SEQ ID NO: 15429 - protein, 118 aa, Artificial Sequence
  Chemically Synthesized
QVQLQESGGGLVQAGGSLRLSCAASGTISARGDMGWYRQAPGKEREFVAGIDYGGSTNYADSVKGRFTISRDNAKNTVYLQMNSLKPEDTAVYYCAVTAYLAFYFSYWGQGTQVTVSS

SEQ ID NO: 15430 - protein, 118 aa, Artificial Sequence
  Chemically Synthesized
QVQLQESGGGLVQAGGSLRLSCAASGTIFGSTDMGWYRQAPGKERELVAAIDIGASTYYADSVKGRFTISRDNAKNTVYLQMNSLKPEDTAVYYCAVRADGQDNYAYWGQGTQVTVSS

SEQ ID NO: 15431 - protein, 118 aa, Artificial Sequence
  Chemically Synthesized
QVQLQESGGGLVQAGGSLRLSCAASGNISRDDRMGWYRQAPGKEREFVASIGPGTSTYYADSVKGRFTISRDNAKNTVYLQMNSLKPEDTAVYYCAVDRRYFRDFVYWGQGTQVTVSS

SEQ ID NO: 15432 - protein, 118 aa, Artificial Sequence
  Chemically Synthesized
QVQLQESGGGLVQAGGSLRLSCAASGNIFINTDMGWYRQAPGKERELVATINAGGNTYYADSVKGRFTISRDNAKNTVYLQMNSLKPEDTAVYYCAARGYLDIFLPYWGQGTQVTVSS

SEQ ID NO: 15433 - protein, 122 aa, Artificial Sequence
  Chemically Synthesized
QVQLQESGGGLVQAGGSLRLSCAASGTISVFVIMGWYRQAPGKEREFVASINGGASTNYADSVKGRFTISRDNAKNTVYLQMNSLKPEDTAVYYCAAVYYDSVVVTISHRYWGQGTQVTVSS

SEQ ID NO: 15434 - protein, 117 aa, Artificial Sequence
  Chemically Synthesized
QVQLQESGGGLVQAGGSLRLSCAASGSIFASPEMGWYRQAPGKERELVASINYGGSTNYADSVKGRFTISRDNAKNTVYLQMNSLKPEDTAVYYCAVGDNDGYSLYWGQGTQVTVSS

SEQ ID NO: 15435 - protein, 126 aa, Artificial Sequence
  Chemically Synthesized
QVQLQESGGGLVQAGGSLRLSCAASGSIFRDLVMGWYRQAPGKEREFVASIDIGASTNYADSVKGRFTISRDNAKNTVYLQMNSLKPEDTAVYYCAVADRGYVAYWSYWYYYYNYWGQGTQVTVSS

SEQ ID NO: 15436 - protein, 122 aa, Artificial Sequence
  Chemically Synthesized
QVQLQESGGGLVQAGGSLRLSCAASGYIFRYYGMGWYRQAPGKEREFVAAIDRGSITNYADSVKGRFTISRDNAKNTVYLQMNSLKPEDTAVYYCAVYPAYYSPHAYYYYYWGQGTQVTVSS

SEQ ID NO: 15437 - protein, 121 aa, Artificial Sequence
  Chemically Synthesized
QVQLQESGGGLVQAGGSLRLSCAASGSIFPFYQMGWYRQAPGKEREFVATITYGANTNYADSVKGRFTISRDNAKNTVYLQMNSLKPEDTAVYYCAVVGDYVAVDDTDHYWGQGTQVTVSS

SEQ ID NO: 15438 - protein, 126 aa, Artificial Sequence
  Chemically Synthesized
QVQLQESGGGLVQAGGSLRLSCAASGYIFVARSMGWYRQAPGKEREFVAAIGWGSTTNYADSVKGRFTISRDNAKNTVYLQMNSLKPEDTAVYYCAVYDASYTQIYRYDGWLHGYWGQGTQVTVSS

SEQ ID NO: 15439 - protein, 115 aa, Artificial Sequence
  Chemically Synthesized
QVQLQESGGGLVQAGGSLRLSCAASGSISAYYMGWYRQAPGKERELVATIAWGGSTNYADSVKGRFTISRDNAKNTVYLQMNSLKPEDTAVYYCAAVYTPWLWYWGQGTQVTVSS

SEQ ID NO: 15440 - protein, 122 aa, Artificial Sequence
  Chemically Synthesized
QVQLQESGGGLVQAGGSLRLSCAASGYIFPYVIMGWYRQAPGKERELVATINYGTTTNYADSVKGRFTISRDNAKNTVYLQMNSLKPEDTAVYYCAVTYSGHRYVWASYNYWGQGTQVTVSS

SEQ ID NO: 15441 - protein, 121 aa, Artificial Sequence
  Chemically Synthesized
QVQLQESGGGLVQAGGSLRLSCAASGTISVKRAMGWYRQAPGKERELVASIDIGGTTYADSVKGRFTISRDNAKNTVYLQMNSLKPEDTAVYYCAVYRGVHYWLRRDYRYWGQGTQVTVSS

SEQ ID NO: 15442 - protein, 122 aa, Artificial Sequence
  Chemically Synthesized
QVQLQESGGGLVQAGGSLRLSCAASGSIFGARTMGWYRQAPGKEREFVATITYGSTTYYADSVKGRFTISRDNAKNTVYLQMNSLKPEDTAVYYCAARYRDISESDDVHYYWGQGTQVTVSS

SEQ ID NO: 15443 - protein, 117 aa, Artificial Sequence
  Chemically Synthesized
QVQLQESGGGLVQAGGSLRLSCAASGTILTTLMGWYRQAPGKERELVASIGYGGSTYYADSVKGRFTISRDNAKNTVYLQMNSLKPEDTAVYYCAAPRYAYDEHAYWGQGTQVTVSS

SEQ ID NO: 15444 - protein, 126 aa, Artificial Sequence
  Chemically Synthesized
QVQLQESGGGLVQAGGSLRLSCAASGYIFLRPNMGWYRQAPGKEREFVAAISFGASTYYADSVKGRFTISRDNAKNTVYLQMNSLKPEDTAVYYCAVYLNEGPLEGTDYGLYLYYWGQGTQVTVSS

SEQ ID NO: 15445 - protein, 117 aa, Artificial Sequence
  Chemically Synthesized
QVQLQESGGGLVQAGGSLRLSCAASGSISYWYMGWYRQAPGKEREFVAAIDYGGITNYADSVKGRFTISRDNAKNTVYLQMNSLKPEDTAVYYCAAIGKTGTSLPYWGQGTQVTVSS

SEQ ID NO: 15446 - protein, 125 aa, Artificial Sequence
  Chemically Synthesized
QVQLQESGGGLVQAGGSLRLSCAASGTISVSNPMGWYRQAPGKERELVASITYGASTNYADSVKGRFTISRDNAKNTVYLQMNSLKPEDTAVYYCAAPYGYDDLSPDDRFRLYYWGQGTQVTVSS

SEQ ID NO: 15447 - protein, 126 aa, Artificial Sequence
  Chemically Synthesized
QVQLQESGGGLVQAGGSLRLSCAASGSIFQYRYMGWYRQAPGKEREFVAGINGGSSTNYADSVKGRFTISRDNAKNTVYLQMNSLKPEDTAVYYCAVPIQLSDANGTAIDLRYPYWGQGTQVTVSS

SEQ ID NO: 15448 - protein, 126 aa, Artificial Sequence
  Chemically Synthesized
QVQLQESGGGLVQAGGSLRLSCAASGSIFPRTYMGWYRQAPGKEREFVAAIGNGGNTYYADSVKGRFTISRDNAKNTVYLQMNSLKPEDTAVYYCAVWYYWGDTKDGGSVYRLEYWGQGTQVTVSS

SEQ ID NO: 15449 - protein, 122 aa, Artificial Sequence
  Chemically Synthesized
QVQLQESGGGLVQAGGSLRLSCAASGSISPDYVMGWYRQAPGKEREFVAAIAGGATTYYADSVKGRFTISRDNAKNTVYLQMNSLKPEDTAVYYCAVYDTPNAVYVNPHPYWGQGTQVTVSS

SEQ ID NO: 15450 - protein, 122 aa, Artificial Sequence
  Chemically Synthesized
QVQLQESGGGLVQAGGSLRLSCAASGSIFARSGMGWYRQAPGKEREFVAGINSGGTTYYADSVKGRFTISRDNAKNTVYLQMNSLKPEDTAVYYCAVTVSYWARDIYDLSYWGQGTQVTVSS

SEQ ID NO: 15451 - protein, 118 aa, Artificial Sequence
  Chemically Synthesized
QVQLQESGGGLVQAGGSLRLSCAASGNIFIQQDMGWYRQAPGKEREFVAGINIGTTTNYADSVKGRFTISRDNAKNTVYLQMNSLKPEDTAVYYCAAYVGSAGPHAYWGQGTQVTVSS

SEQ ID NO: 15452 - protein, 118 aa, Artificial Sequence
  Chemically Synthesized
QVQLQESGGGLVQAGGSLRLSCAASGSISQTGYMGWYRQAPGKEREFVAAIGNGANTYYADSVKGRFTISRDNAKNTVYLQMNSLKPEDTAVYYCAAYRFQVDTYYYWGQGTQVTVSS

SEQ ID NO: 15453 - protein, 122 aa, Artificial Sequence
  Chemically Synthesized
QVQLQESGGGLVQAGGSLRLSCAASGSIFFADTMGWYRQAPGKERELVAGIGFGATTNYADSVKGRFTISRDNAKNTVYLQMNSLKPEDTAVYYCAAYALDQNGQQEKYAYWGQGTQVTVSS

SEQ ID NO: 15454 - protein, 118 aa, Artificial Sequence
  Chemically Synthesized
QVQLQESGGGLVQAGGSLRLSCAASGNISGGTQMGWYRQAPGKEREFVASITVGASTYYADSVKGRFTISRDNAKNTVYLQMNSLKPEDTAVYYCAVQVAKFHPFEYWGQGTQVTVSS

SEQ ID NO: 15455 - protein, 122 aa, Artificial Sequence
  Chemically Synthesized
QVQLQESGGGLVQAGGSLRLSCAASGYISDYSLMGWYRQAPGKERELVAAIADGGITNYADSVKGRFTISRDNAKNTVYLQMNSLKPEDTAVYYCAAYYSRTWRSDGVYPYWGQGTQVTVSS

SEQ ID NO: 15456 - protein, 117 aa, Artificial Sequence
  Chemically Synthesized
QVQLQESGGGLVQAGGSLRLSCAASGNIFTWFMGWYRQAPGKERELVASIDGGTNTYYADSVKGRFTISRDNAKNTVYLQMNSLKPEDTAVYYCAAYWGYPNGFWYWGQGTQVTVSS

SEQ ID NO: 15457 - protein, 117 aa, Artificial Sequence
  Chemically Synthesized
QVQLQESGGGLVQAGGSLRLSCAASGIFLLTRMGWYRQAPGKEREFVASITGGATTNYADSVKGRFTISRDNAKNTVYLQMNSLKPEDTAVYYCAARPKPYPALTYWGQGTQVTVSS

SEQ ID NO: 15458 - protein, 118 aa, Artificial Sequence
  Chemically Synthesized
QVQLQESGGGLVQAGGSLRLSCAASGSISVVPYMGWYRQAPGKERELVASIDGGATTYYADSVKGRFTISRDNAKNTVYLQMNSLKPEDTAVYYCAVFLHYTYGHYYWGQGTQVTVSS

SEQ ID NO: 15459 - protein, 122 aa, Artificial Sequence
  Chemically Synthesized
QVQLQESGGGLVQAGGSLRLSCAASGYIFDTFIMGWYRQAPGKEREFVAAITSGANTNYADSVKGRFTISRDNAKNTVYLQMNSLKPEDTAVYYCAAYGQEDPTVDGTFLYWGQGTQVTVSS

SEQ ID NO: 15460 - protein, 118 aa, Artificial Sequence
  Chemically Synthesized
QVQLQESGGGLVQAGGSLRLSCAASGNISALQGMGWYRQAPGKEREFVAAISHGTSTNYADSVKGRFTISRDNAKNTVYLQMNSLKPEDTAVYYCAVGSRYQVDYHYWGQGTQVTVSS

SEQ ID NO: 15461 - protein, 122 aa, Artificial Sequence
  Chemically Synthesized
QVQLQESGGGLVQAGGSLRLSCAASGYIFTRPYMGWYRQAPGKEREFVAGITRGASTYYADSVKGRFTISRDNAKNTVYLQMNSLKPEDTAVYYCAASRRTRWYEYRDHAYWGQGTQVTVSS

SEQ ID NO: 15462 - protein, 121 aa, Artificial Sequence
  Chemically Synthesized
QVQLQESGGGLVQAGGSLRLSCAASGTISSDDSMGWYRQAPGKERELVATITSVVLPYADSVKGRFTISRDNAKNTVYLQMNSLKPEDTAVYYCAVDDYHGVTPAYQHDYWGQGTQVTVSS

SEQ ID NO: 15463 - protein, 122 aa, Artificial Sequence
  Chemically Synthesized
QVQLQESGGGLVQAGGSLRLSCAASGYISNYGYMGWYRQAPGKERELVAAISYGASTYYADSVKGRFTISRDNAKNTVYLQMNSLKPEDTAVYYCAVYQGGGQYGYYYHRYWGQGTQVTVSS

SEQ ID NO: 15464 - protein, 118 aa, Artificial Sequence
  Chemically Synthesized
QVQLQESGGGLVQAGGSLRLSCAASGYISRASVMGWYRQAPGKERELVAAINTGGITYYADSVKGRFTISRDNAKNTVYLQMNSLKPEDTAVYYCAAQSRLRGVHEYWGQGTQVTVSS

SEQ ID NO: 15465 - protein, 117 aa, Artificial Sequence
  Chemically Synthesized
QVQLQESGGGLVQAGGSLRLSCAASGYISSRSMGWYRQAPGKERELVATISTGGTTYYADSVKGRFTISRDNAKNTVYLQMNSLKPEDTAVYYCAAYIYPKTVFPYWGQGTQVTVSS

SEQ ID NO: 15466 - protein, 118 aa, Artificial Sequence
  Chemically Synthesized
QVQLQESGGGLVQAGGSLRLSCAASGSIFYWKRMGWYRQAPGKERELVAGIAYGGITYYADSVKGRFTISRDNAKNTVYLQMNSLKPEDTAVYYCAVYGYYYTRFKYWGQGTQVTVSS

SEQ ID NO: 15467 - protein, 117 aa, Artificial Sequence
  Chemically Synthesized
QVQLQESGGGLVQAGGSLRLSCAASGTIFTDYAMGWYRQAPGKEREFVAYADSVKGRFTISRDNAKNTVYLQMNSLKPEDTAVYYCAATYVTFPFVYASYDYGYHYWGQGTQVTVSS

SEQ ID NO: 15468 - protein, 118 aa, Artificial Sequence
  Chemically Synthesized
QVQLQESGGGLVQAGGSLRLSCAASGNISAHNRMGWYRQAPGKEREFVASITTGSSTNYADSVKGRFTISRDNAKNTVYLQMNSLKPEDTAVYYCAVWLTTGVRHYYWGQGTQVTVSS

SEQ ID NO: 15469 - protein, 120 aa, Artificial Sequence
  Chemically Synthesized
QVQLQESGGGLVQAGGSLRLSCAASGNISWTSMGWYRQAPGKERELVATIDHGAITYYADSVKGRFTISRDNAKNTVYLQMNSLKPEDTAVYYCAARLLDVQYSTTTLYWGQGTQVTVSS

SEQ ID NO: 15470 - protein, 122 aa, Artificial Sequence
  Chemically Synthesized
QVQLQESGGGLVQAGGSLRLSCAASGYISDEPHMGWYRQAPGKERELVATINPGSSTYYADSVKGRFTISRDNAKNTVYLQMNSLKPEDTAVYYCAVRGASRYHGGYYHWYWGQGTQVTVSS

SEQ ID NO: 15471 - protein, 126 aa, Artificial Sequence
  Chemically Synthesized
QVQLQESGGGLVQAGGSLRLSCAASGSISVARDMGWYRQAPGKEREFVAGIGAGGITNYADSVKGRFTISRDNAKNTVYLQMNSLKPEDTAVYYCAVGGLNGYDGVAVGQTGFGYWGQGTQVTVSS

SEQ ID NO: 15472 - protein, 112 aa, Artificial Sequence
  Chemically Synthesized
QVQLQESGGGLVQAGGSLRLSCAASGNISSYTYMGWYRQAPGKEREFVAGISGGSTTYYADSVKGRFTISRDNAKNTVYLQMNSLKPEDTAVYYCATTHDYWGQGTQVTVSS

SEQ ID NO: 15473 - protein, 122 aa, Artificial Sequence
  Chemically Synthesized
QVQLQESGGGLVQAGGSLRLSCAASGNISVTPDMGWYRQAPGKERELVATINKGATTYYADSVKGRFTISRDNAKNTVYLQMNSLKPEDTAVYYCAVAYADHDGDQYIYDYWGQGTQVTVSS

SEQ ID NO: 15474 - protein, 118 aa, Artificial Sequence
  Chemically Synthesized
QVQLQESGGGLVQAGGSLRLSCAASGNISVALLMGWYRQAPGKERELVATIAEGATTYYADSVKGRFTISRDNAKNTVYLQMNSLKPEDTAVYYCAAYHPWQAYHAYWGQGTQVTVSS

SEQ ID NO: 15475 - protein, 120 aa, Artificial Sequence
  Chemically Synthesized
QVQLQESGGGLVQAGGSLRLSCAASGSISYTDDMGWYRQAPGKERELVATISTGTNTNYADSVKGRFTISRDNAKNTVYLQMNSLKPEDTAVYYCAVRSTLSTLTKSFYWGQGTQVTVSS

SEQ ID NO: 15476 - protein, 125 aa, Artificial Sequence
  Chemically Synthesized
QVQLQESGGGLVQAGGSLRLSCAASGSILVVTMGWYRQAPGKERELVASIDVGTNTNYADSVKGRFTISRDNAKNTVYLQMNSLKPEDTAVYYCAAVPHVGIDGQSDAYGPLEYWGQGTQVTVSS

SEQ ID NO: 15477 - protein, 111 aa, Artificial Sequence
  Chemically Synthesized
QVQLQESGGGLVQAGGSLRLSCAASGYIFRDDRMGWYRQAPGKEREFVASINLGGTTNYADSVKGRFTISRDNAKNTVYLQMNSLKPEDTAVYYCATHDYWGQGTQVTVSS

SEQ ID NO: 15478 - protein, 122 aa, Artificial Sequence
  Chemically Synthesized
QVQLQESGGGLVQAGGSLRLSCAASGTISYGYFMGWYRQAPGKERELVAGISLGASTNYADSVKGRFTISRDNAKNTVYLQMNSLKPEDTAVYYCAADSPDYAGTVNRLTYWGQGTQVTVSS

SEQ ID NO: 15479 - protein, 126 aa, Artificial Sequence
  Chemically Synthesized
QVQLQESGGGLVQAGGSLRLSCAASGSISPNAWMGWYRQAPGKEREFVASITYGSNTYYADSVKGRFTISRDNAKNTVYLQMNSLKPEDTAVYYCAAYYGQYSDYTPYDYKPHAYWGQGTQVTVSS

SEQ ID NO: 15480 - protein, 122 aa, Artificial Sequence
  Chemically Synthesized
QVQLQESGGGLVQAGGSLRLSCAASGTISGPYVMGWYRQAPGKEREFVATITGGTNTYYADSVKGRFTISRDNAKNTVYLQMNSLKPEDTAVYYCAVWAVTRNEGKYTLGYWGQGTQVTVSS

SEQ ID NO: 15481 - protein, 121 aa, Artificial Sequence
  Chemically Synthesized
QVQLQESGGGLVQAGGSLRLSCAASGSISSNYTMGWYRQAPGKERELVAGITPGSSTYYADSVKGRFTISRDNAKNTVYLQMNSLKPEDTAVYYCAAYYGDRDGASLTFYWGQGTQVTVSS

SEQ ID NO: 15482 - protein, 118 aa, Artificial Sequence
  Chemically Synthesized
QVQLQESGGGLVQAGGSLRLSCAASGYIFFNRPMGWYRQAPGKEREFVAAIDLGATTNYADSVKGRFTISRDNAKNTVYLQMNSLKPEDTAVYYCAASTADPGGLPYWGQGTQVTVSS

SEQ ID NO: 15483 - protein, 122 aa, Artificial Sequence
  Chemically Synthesized
QVQLQESGGGLVQAGGSLRLSCAASGYISETPSMGWYRQAPGKERELVATITTGSNTYYADSVKGRFTISRDNAKNTVYLQMNSLKPEDTAVYYCAVPDHRFYRYNDHYFYWGQGTQVTVSS

SEQ ID NO: 15484 - protein, 118 aa, Artificial Sequence
  Chemically Synthesized
QVQLQESGGGLVQAGGSLRLSCAASGTIFFYAIMGWYRQAPGKERELVAAITRGGSTNYADSVKGRFTISRDNAKNTVYLQMNSLKPEDTAVYYCAVPYYASKSLLYWGQGTQVTVSS

SEQ ID NO: 15485 - protein, 125 aa, Artificial Sequence
  Chemically Synthesized
QVQLQESGGGLVQAGGSLRLSCAASGSISVARYMGWYRQAPGKEREFVAAINAGTTTYYADSVKGRFTISRDNAKNTVYLQMNSLKPEDTAVYYCAIEGGYSVVGYRAALVHAYWGQGTQVTVSS

SEQ ID NO: 15486 - protein, 118 aa, Artificial Sequence
  Chemically Synthesized
QVQLQESGGGLVQAGGSLRLSCAASGTIFAIAYMGWYRQAPGKEREFVAAISLGTSNLYADSVKGRFTISRDNAKNTVYLQMNSLKPEDTAVYYCAADDADYAVLVYWGQGTQVTVSS

SEQ ID NO: 15487 - protein, 121 aa, Artificial Sequence
  Chemically Synthesized
QVQLQESGGGLVQAGGSLRLSCAASGNIRNPTMGWYRQAPGKERELVATISAGAITNYADSVKGRFTISRDNAKNTVYLQMNSLKPEDTAVYYCAALDNSRPYGRYVHWYWGQGTQVTVSS

SEQ ID NO: 15488 - protein, 116 aa, Artificial Sequence
  Chemically Synthesized
QVQLQESGGGLVQAGGSLRLSCAASGNRMGWYRQAPGKERELVATISSGTNTNYADSVKGRFTISRDNAKNTVYLQMNSLKPEDTAVYYCAAGASYAYRSTLLMYWGQGTQVTVSS

SEQ ID NO: 15489 - protein, 124 aa, Artificial Sequence
  Chemically Synthesized
QVQLQESGGGLVQAGGSLRLSCAASGYISAAGIMGWYRQAPGKERELPLLVTVLLPYADSVKGRFTISRDNAKNTVYLQMNSLKPEDTAVYYCAVVARYIDDEWSSGWDRFPYWGQGTQVTVSS

SEQ ID NO: 15490 - protein, 113 aa, Artificial Sequence
  Chemically Synthesized
QVQLQESGGGLVQAGGSLRLSCAASGSRMGWYRQAPGKERELVAAIADGTSTNYADSVKGRFTISRDNAKNTVYLQMNSLKPEDTAVYYCAAGYWIAKIHQYWGQGTQVTVSS

SEQ ID NO: 15491 - protein, 122 aa, Artificial Sequence
  Chemically Synthesized
QVQLQESGGGLVQAGGSLRLSCAASGSIFYWTKMGWYRQAPGKEREFVAAIGYGAITYYADSVKGRFTISRDNAKNTVYLQMNSLKPEDTAVYYCAARVRYYPAYWQRHTYWGQGTQVTVSS

SEQ ID NO: 15492 - protein, 126 aa, Artificial Sequence
  Chemically Synthesized
QVQLQESGGGLVQAGGSLRLSCAASGYISTVYDMGWYRQAPGKEREFVASIGSGGNTNYADSVKGRFTISRDNAKNTVYLQMNSLKPEDTAVYYCAVDVYGRYGYQNADGNRHDYWGQGTQVTVSS

SEQ ID NO: 15493 - protein, 118 aa, Artificial Sequence
  Chemically Synthesized
QVQLQESGGGLVQAGGSLRLSCAASGTISARRPMGWYRQAPGKEREFVAGIGHGASTYYADSVKGRFTISRDNAKNTVYLQMNSLKPEDTAVYYCAAYVFYAYRHWYWGQGTQVTVSS

SEQ ID NO: 15494 - protein, 116 aa, Artificial Sequence
  Chemically Synthesized
QVQLQESGGGLVQAGGSLRLSCAASGSIFDDLRMGWYRQAPGKERELVATIGIGAITNYADSVKGRFTISRDNAKNTVYLQMNSLKPEDTAVYYCATCTLTSVMYWGQGTQVTVSS

SEQ ID NO: 15495 - protein, 116 aa, Artificial Sequence
  Chemically Synthesized
QVQLQESGGGLVQAGGSLRLSCAASGTIFLWYYMGWYRQAPGKEREFVATIGSVVLPYADSVKGRFTISRDNAKNTVYLQMNSLKPEDTAVYYCAVYTGVTSYLYWGQGTQVTVSS

SEQ ID NO: 15496 - protein, 121 aa, Artificial Sequence
  Chemically Synthesized
QVQLQESGGGLVQAGGSLRLSCAASGTICWSEMGWYRQAPGKERELVMLVLIPYADSVKGRFTISRDNAKNTVYLQMNSLKPEDTAVYYCAVWYVSYAEYYAENYYEHDYWGQGTQVTVSS

SEQ ID NO: 15497 - protein, 118 aa, Artificial Sequence
  Chemically Synthesized
QVQLQESGGGLVQAGGSLRLSCAASGTIFYFTWMGWYRQAPGKERELVATIAFGSNTNYADSVKGRFTISRDNAKNTVYLQMNSLKPEDTAVYYCAVWPWRSYGLHYWGQGTQVTVSS

SEQ ID NO: 15498 - protein, 117 aa, Artificial Sequence
  Chemically Synthesized
QVQLQESGGGLVQAGGSLRLSCAASGYIFGGSSMGWYRQAPGKEREFVAAIGGGTTYYADSVKGRFTISRDNAKNTVYLQMNSLKPEDTAVYYCAVLSWYGYRHSYWGQGTQVTVSS

SEQ ID NO: 15499 - protein, 115 aa, Artificial Sequence
  Chemically Synthesized
QVQLQESGGGLVQAGGSLRLSCAASGSIFRCMGWYRQAPGKERELVRVLLPYADSVKGRFTISRDNAKNTVYLQMNSLKPEDTAVYYCAAPYEQYDDSQYYHYYWGQGTQVTVSS

SEQ ID NO: 15500 - protein, 118 aa, Artificial Sequence
  Chemically Synthesized
QVQLQESGGGLVQAGGSLRLSCAASGNIFHYRDMGWYRQAPGKEREFVAGINYGSNTYYADSVKGRFTISRDNAKNTVYLQMNSLKPEDTAVYYCAVRRVRYKYHLYWGQGTQVTVSS

SEQ ID NO: 15501 - protein, 118 aa, Artificial Sequence
  Chemically Synthesized
QVQLQESGGGLVQAGGSLRLSCAASGYISDLYYMGWYRQAPGKEREFVAAITTGANTYYADSVKGRFTISRDNAKNTVYLQMNSLKPEDTAVYYCAVRDYAGGVHDYWGQGTQVTVSS

SEQ ID NO: 15502 - protein, 118 aa, Artificial Sequence
  Chemically Synthesized
QVQLQESGGGLVQAGGSLRLSCAASGYIFHRYSMGWYRQAPGKEREFVAAISRGTTTYYADSVKGRFTISRDNAKNTVYLQMNSLKPEDTAVYYCAAYGGHYYGHTYWGQGTQVTVSS

SEQ ID NO: 15503 - protein, 121 aa, Artificial Sequence
  Chemically Synthesized
QVQLQESGGGLVQAGGSLRLSCAASGTIFDSTMGWYRQAPGKEREFVAGIADGGTTNYADSVKGRFTISRDNAKNTVYLQMNSLKPEDTAVYYCAVPPYYDVGPDRVYYYWGQGTQVTVSS

SEQ ID NO: 15504 - protein, 116 aa, Artificial Sequence
  Chemically Synthesized
QVQLQESGGGLVQAGGSLRLSCAASGYISYLSYMGWYRQAPGKEREFVALMTVVLPYADSVKGRFTISRDNAKNTVYLQMNSLKPEDTAVYYCAADVDSYGRLDYWGQGTQVTVSS

SEQ ID NO: 15505 - protein, 117 aa, Artificial Sequence
  Chemically Synthesized
QVQLQESGGGLVQAGGSLRLSCAASGYILRCIMGWYRQAPGKERELVATITIGTITNYADSVKGRFTISRDNAKNTVYLQMNSLKPEDTAVYYCAVYSNSWSRYYYWGQGTQVTVSS

SEQ ID NO: 15506 - protein, 121 aa, Artificial Sequence
  Chemically Synthesized
QVQLQESGGGLVQAGGSLRLSCAASGTISNTQDMGWYRQAPGKEREFVAGIDDGGNTYYADSVKGRFTISRDNAKNTVYLQMNSLKPEDTAVYYCAAPYTYYTYDYSLIYWGQGTQVTVSS

SEQ ID NO: 15507 - protein, 118 aa, Artificial Sequence
  Chemically Synthesized
QVQLQESGGGLVQAGGSLRLSCAASGYISYSRNMGWYRQAPGKEREFVASISGGASTNYADSVKGRFTISRDNAKNTVYLQMNSLKPEDTAVYYCAAIGYHAHFFRYWGQGTQVTVSS

SEQ ID NO: 15508 - protein, 126 aa, Artificial Sequence
  Chemically Synthesized
QVQLQESGGGLVQAGGSLRLSCAASGSIFAPYSMGWYRQAPGKERELVATITPGGSTNYADSVKGRFTISRDNAKNTVYLQMNSLKPEDTAVYYCAASPYFFYPANDAWDRAYRYWGQGTQVTVSS

SEQ ID NO: 15509 - protein, 117 aa, Artificial Sequence
  Chemically Synthesized
QVQLQESGGGLVQAGGSLRLSCAASGYISETTMGWYRQAPGKEREFVAAIGVGTNTNYADSVKGRFTISRDNAKNTVYLQMNSLKPEDTAVYYCAVHAALVGDHAYWGQGTQVTVSS

SEQ ID NO: 15510 - protein, 122 aa, Artificial Sequence
  Chemically Synthesized
QVQLQESGGGLVQAGGSLRLSCAASGYIFRPYYMGWYRQAPGKEREFVAAIGYGASTYYADSVKGRFTISRDNAKNTVYLQMNSLKPEDTAVYYCAAKVIYWYDLRQQHDYWGQGTQVTVSS

SEQ ID NO: 15511 - protein, 123 aa, Artificial Sequence
  Chemically Synthesized
QVQLQESGGGLVQAGGSLRLSCAASGSIFDTDTTMGWYRQAPGKERELVASIDPGTITYYADSVKGRFTISRDNAKNTVYLQMNSLKPEDTAVYYCAVDPPPNDSGTDYLRYWGQGTQVTVSS

SEQ ID NO: 15512 - protein, 118 aa, Artificial Sequence
  Chemically Synthesized
QVQLQESGGGLVQAGGSLRLSCAASGSIFVPRSMGWYRQAPGKEREFVAGITRGGNTYYADSVKGRFTISRDNAKNTVYLQMNSLKPEDTAVYYCAAPSRRYQYHPYWGQGTQVTVSS

SEQ ID NO: 15513 - protein, 117 aa, Artificial Sequence
  Chemically Synthesized
QVQLQESGGGLVQAGGSLRLSCAASGTIFTSTMGWYRQAPGKERELVATITVGASTNYADSVKGRFTISRDNAKNTVYLQMNSLKPEDTAVYYCAAGYDFYRQLFYWGQGTQVTVSS

SEQ ID NO: 15514 - protein, 122 aa, Artificial Sequence
  Chemically Synthesized
QVQLQESGGGLVQAGGSLRLSCAASGYISGTYLMGWYRQAPGKERELVAAIAGGSITYYADSVKGRFTISRDNAKNTVYLQMNSLKPEDTAVYYCAARAGLKYWTYWAHRYWGQGTQVTVSS

SEQ ID NO: 15515 - protein, 118 aa, Artificial Sequence
  Chemically Synthesized
QVQLQESGGGLVQAGGSLRLSCAASGSIFPYYSMGWYRQAPGKERELVASIDSGTNTNYADSVKGRFTISRDNAKNTVYLQMNSLKPEDTAVYYCAAYNTSDHGHRYWGQGTQVTVSS

SEQ ID NO: 15516 - protein, 113 aa, Artificial Sequence
  Chemically Synthesized
QVQLQESGGGLVQAGGSLRLSCAASGYISSAVLMGWYRQAPGKERELVAGIAAGYADSVKGRFTISRDNAKNTVYLQMNSLKPEDTAVYYCAVLHAYVQYNYWGQGTQVTVSS

SEQ ID NO: 15517 - protein, 116 aa, Artificial Sequence
  Chemically Synthesized
QVQLQESGGGLVQAGGSLRLSCAASGNISLSDKMGWYRQAPGKEREFVAAISPGSNTNYADSVKGRFTISRDNAKNTVYLQMNSLKPEDTAVYYCAAGPYGFVLYWGQGTQVTVSS

SEQ ID NO: 15518 - protein, 122 aa, Artificial Sequence
  Chemically Synthesized
QVQLQESGGGLVQAGGSLRLSCAASGNISRPYDMGWYRQAPGKERELVAAIGYGATTYYADSVKGRFTISRDNAKNTVYLQMNSLKPEDTAVYYCAARAQYQYYRVSVFVYWGQGTQVTVSS

SEQ ID NO: 15519 - protein, 121 aa, Artificial Sequence
  Chemically Synthesized
QVQLQESGGGLVQAGGSLRLSCAASGTISQYTYMGWYRQAPGKERELVATISSGTNTYYADSVKGRFTISRDNAKNTVYLQMNSLKPEDTAVYYCAADVDTSHNPYPYHYWGQGTQVTVSS

SEQ ID NO: 15520 - protein, 122 aa, Artificial Sequence
  Chemically Synthesized
QVQLQESGGGLVQAGGSLRLSCAASGTISALNSMGWYRQAPGKEREFVAAIDPGSNTNYADSVKGRFTISRDNAKNTVYLQMNSLKPEDTAVYYCAVAGLVVDPTIPFHFYWGQGTQVTVSS

SEQ ID NO: 15521 - protein, 118 aa, Artificial Sequence
  Chemically Synthesized
QVQLQESGGGLVQAGGSLRLSCAASGYIFQYGGMGWYRQAPGKEREFVASIAIGTNTYYADSVKGRFTISRDNAKNTVYLQMNSLKPEDTAVYYCAAVGVAGWYYYYWGQGTQVTVSS

SEQ ID NO: 15522 - protein, 123 aa, Artificial Sequence
  Chemically Synthesized
QVQLQESGGGLVQAGGSLRLSCAASGYISYYDVMGWYRQAPGKERELVATISVGSSTYYADSVKGRFTISRDNAKNTVYLQMNSLKPEDTAVYYCAVYVGTYQVWNYRSGMYWGQGTQVTVSS

SEQ ID NO: 15523 - protein, 117 aa, Artificial Sequence
  Chemically Synthesized
QVQLQESGGGLVQAGGSLRLSCAASGYISDYAMGWYRQAPGKEREFVAGIADGTSTYYADSVKGRFTISRDNAKNTVYLQMNSLKPEDTAVYYCAAGNNRDTGLVYWGQGTQVTVSS

SEQ ID NO: 15524 - protein, 121 aa, Artificial Sequence
  Chemically Synthesized
QVQLQESGGGLVQAGGSLRLSCAASGYIFRRGTMGWYRQAPGKEREFVAAIAYGAITNYADSVKGRFTISRDNAKNTVYLQMNSLKPEDTAVYYCAVSYPRYWRPTAHEYWGQGTQVTVSS

SEQ ID NO: 15525 - protein, 124 aa, Artificial Sequence
  Chemically Synthesized
QVQLQESGGGLVQAGGSLRLSCAASGYIFRNSYMGWYRQAPGKERELVASINWGTNTYYADSVKGRFTISRDNAKNTVYLQMNSLKPEDTAVYYCAVRQGGSGYRYQTRDHAYWGQGTQVTVSS

SEQ ID NO: 15526 - protein, 118 aa, Artificial Sequence
  Chemically Synthesized
QVQLQESGGGLVQAGGSLRLSCAASGSIFRYVGMGWYRQAPGKERELVAGITIGTTTYYADSVKGRFTISRDNAKNTVYLQMNSLKPEDTAVYYCAVNRRIFGGHWYWGQGTQVTVSS

SEQ ID NO: 15527 - protein, 126 aa, Artificial Sequence
  Chemically Synthesized
QVQLQESGGGLVQAGGSLRLSCAASGNISYYHYMGWYRQAPGKERELVAGIAPGGITNYADSVKGRFTISRDNAKNTVYLQMNSLKPEDTAVYYCAAWWSSGVEYNRVATWDLGYWGQGTQVTVSS

SEQ ID NO: 15528 - protein, 122 aa, Artificial Sequence
  Chemically Synthesized
QVQLQESGGGLVQAGGSLRLSCAASGYISPYSTMGWYRQAPGKEREFVASINLGTITNYADSVKGRFTISRDNAKNTVYLQMNSLKPEDTAVYYCAVYRRAWTWWSRNYGYWGQGTQVTVSS

SEQ ID NO: 15529 - protein, 118 aa, Artificial Sequence
  Chemically Synthesized
QVQLQESGGGLVQAGGSLRLSCAASGTISQTYYMGWYRQAPGKERELVASISPGATTNYADSVKGRFTISRDNAKNTVYLQMNSLKPEDTAVYYCAAFDDYYDTHYYWGQGTQVTVSS

SEQ ID NO: 15530 - protein, 112 aa, Artificial Sequence
  Chemically Synthesized
QVQLQESGGGLVQAGGSLRLSCAASGSISGRDTMGWYRQAPGKERELVASIDRGTNTYYADSVKGRFTISRDNAKNTVYLQMNSLKPEDTAVYYCAPIYVYWGQGTQVTVSS

SEQ ID NO: 15531 - protein, 118 aa, Artificial Sequence
  Chemically Synthesized
QVQLQESGGGLVQAGGSLRLSCAASGYIFRYRGMGWYRQAPGKERELVAGITAGSSTNYADSVKGRFTISRDNAKNTVYLQMNSLKPEDTAVYYCAVYARSYRFLAYWGQGTQVTVSS

SEQ ID NO: 15532 - protein, 118 aa, Artificial Sequence
  Chemically Synthesized
QVQLQESGGGLVQAGGSLRLSCAASGTIFRYVAMGWYRQAPGKERELVATIDRGATTNYADSVKGRFTISRDNAKNTVYLQMNSLKPEDTAVYYCAAGWRPRALYRYWGQGTQVTVSS

SEQ ID NO: 15533 - protein, 125 aa, Artificial Sequence
  Chemically Synthesized
QVQLQESGGGLVQAGGSLRLSCAASGSISYSTMGWYRQAPGKERELVASINRGGSTYYADSVKGRFTISRDNAKNTVYLQMNSLKPEDTAVYYCAVGLRRRYTLWYPYYVAFAYWGQGTQVTVSS

SEQ ID NO: 15534 - protein, 121 aa, Artificial Sequence
  Chemically Synthesized
QVQLQESGGGLVQAGGSLRLSCAASGNISYNDAMGWYRQAPGKERELVASISYGGSTNYADSVKGRFTISRDNAKNTVYLQMNSLKPEDTAVYYCAAFVTVIPGAYYYDYWGQGTQVTVSS

SEQ ID NO: 15535 - protein, 118 aa, Artificial Sequence
  Chemically Synthesized
QVQLQESGGGLVQAGGSLRLSCAASGSIFNGRFMGWYRQAPGKERELVASITGGGTTYYADSVKGRFTISRDNAKNTVYLQMNSLKPEDTAVYYCAANYFDVFGYSYWGQGTQVTVSS

SEQ ID NO: 15536 - protein, 118 aa, Artificial Sequence
  Chemically Synthesized
QVQLQESGGGLVQAGGSLRLSCAASGNIFRLGYMGWYRQAPGKEREFVAAIDPGSTTYYADSVKGRFTISRDNAKNTVYLQMNSLKPEDTAVYYCAVQYYDSIQLSYWGQGTQVTVSS

SEQ ID NO: 15537 - protein, 118 aa, Artificial Sequence
  Chemically Synthesized
QVQLQESGGGLVQAGGSLRLSCAASGYISAYRDMGWYRQAPGKERELVAAISRGAITNYADSVKGRFTISRDNAKNTVYLQMNSLKPEDTAVYYCAARRRAFYFHPYWGQGTQVTVSS

SEQ ID NO: 15538 - protein, 118 aa, Artificial Sequence
  Chemically Synthesized
QVQLQESGGGLVQAGGSLRLSCAASGTIFWSLYMGWYRQAPGKEREFVASIARGSNTYYADSVKGRFTISRDNAKNTVYLQMNSLKPEDTAVYYCAATSPLRYRYRYWGQGTQVTVSS

SEQ ID NO: 15539 - protein, 126 aa, Artificial Sequence
  Chemically Synthesized
QVQLQESGGGLVQAGGSLRLSCAASGSIFATTFMGWYRQAPGKERELVAAIGYGGTTNYADSVKGRFTISRDNAKNTVYLQMNSLKPEDTAVYYCAVNVPQRYSAYSKRNQPFRYWGQGTQVTVSS

SEQ ID NO: 15540 - protein, 118 aa, Artificial Sequence
  Chemically Synthesized
QVQLQESGGGLVQAGGSLRLSCAASGTIFTYRYMGWYRQAPGKEREFVAAINKGGNTYYADSVKGRFTISRDNAKNTVYLQMNSLKPEDTAVYYCAAGYRYYSPFTYWGQGTQVTVSS

SEQ ID NO: 15541 - protein, 122 aa, Artificial Sequence
  Chemically Synthesized
QVQLQESGGGLVQAGGSLRLSCAASGNISQRIVMGWYRQAPGKEREFVAGIDSGTNTYYADSVKGRFTISRDNAKNTVYLQMNSLKPEDTAVYYCAATRRRRYVNYIPYGYWGQGTQVTVSS

SEQ ID NO: 15542 - protein, 113 aa, Artificial Sequence
  Chemically Synthesized
QVQLQESGGGLVQAGGSLRLSCAASGSISLYFDMGWYRQAPGKERELVASIGEGSTTNYADSVKGRFTISRDNAKNTVYLQMNSLKPEDTAVYYCAADGYPYWGQGTQVTVSS

SEQ ID NO: 15543 - protein, 116 aa, Artificial Sequence
  Chemically Synthesized
QVQLQESGGGLVQAGGSLRLSCAASGYISSTMGWYRQAPGKEREFVAGIDWGTSTNYADSVKGRFTISRDNAKNTVYLQMNSLKPEDTAVYYCAAGDAYDQQHNYWGQGTQVTVSS

SEQ ID NO: 15544 - protein, 118 aa, Artificial Sequence
  Chemically Synthesized
QVQLQESGGGLVQAGGSLRLSCAASGTIFSDRAMGWYRQAPGKEREFVAGIAGGGTTNYADSVKGRFTISRDNAKNTVYLQMNSLKPEDTAVYYCAVWSYTLGYHWYWGQGTQVTVSS

SEQ ID NO: 15545 - protein, 126 aa, Artificial Sequence
  Chemically Synthesized
QVQLQESGGGLVQAGGSLRLSCAASGTISGPDYMGWYRQAPGKEREFVAGIGYGGITYYADSVKGRFTISRDNAKNTVYLQMNSLKPEDTAVYYCAALPYYVYYIRAPIGTTHDYWGQGTQVTVSS

SEQ ID NO: 15546 - protein, 118 aa, Artificial Sequence
  Chemically Synthesized
QVQLQESGGGLVQAGGSLRLSCAASGYIFFARYMGWYRQAPGKEREFVASISRGSITYYADSVKGRFTISRDNAKNTVYLQMNSLKPEDTAVYYCAAVGHALLGYVYWGQGTQVTVSS

SEQ ID NO: 15547 - protein, 118 aa, Artificial Sequence
  Chemically Synthesized
QVQLQESGGGLVQAGGSLRLSCAASGTIFSHRSMGWYRQAPGKERELVAGIAYGTTTYYADSVKGRFTISRDNAKNTVYLQMNSLKPEDTAVYYCAVQQPPYFAFAYWGQGTQVTVSS

SEQ ID NO: 15548 - protein, 118 aa, Artificial Sequence
  Chemically Synthesized
QVQLQESGGGLVQAGGSLRLSCAASGNISLRRSMGWYRQAPGKERELVASINRGANTYYADSVKGRFTISRDNAKNTVYLQMNSLKPEDTAVYYCAASRYRYSSYPYWGQGTQVTVSS

SEQ ID NO: 15549 - protein, 126 aa, Artificial Sequence
  Chemically Synthesized
QVQLQESGGGLVQAGGSLRLSCAASGTIFAPAYMGWYRQAPGKEREFVASITGGANTYYADSVKGRFTISRDNAKNTVYLQMNSLKPEDTAVYYCAARDAAGYDLYRAYIPYFDYWGQGTQVTVSS

SEQ ID NO: 15550 - protein, 123 aa, Artificial Sequence
  Chemically Synthesized
QVQLQESGGGLVQAGGSLRLSCAASGNIFIPHGVMGWYRQAPGKEREFVAAITLGSTTNYADSVKGRFTISRDNAKNTVYLQMNSLKPEDTAVYYCAVDYFSDYVDTTSFGYWGQGTQVTVSS

SEQ ID NO: 15551 - protein, 126 aa, Artificial Sequence
  Chemically Synthesized
QVQLQESGGGLVQAGGSLRLSCAASGYIFTTYNMGWYRQAPGKERELVATITHGGTTNYADSVKGRFTISRDNAKNTVYLQMNSLKPEDTAVYYCAVVYGDFVYPTPRQPSIHAYWGQGTQVTVSS

SEQ ID NO: 15552 - protein, 117 aa, Artificial Sequence
  Chemically Synthesized
QVQLQESGGGLVQAGGSLRLSCAASGYISYTRIMGWYRQAPGKEREFVAAIADGSTYYADSVKGRFTISRDNAKNTVYLQMNSLKPEDTAVYYCAAGGRYARFFRYWGQGTQVTVSS

SEQ ID NO: 15553 - protein, 117 aa, Artificial Sequence
  Chemically Synthesized
QVQLQESGGGLVQAGGSLRLSCAASGNISGPAVMGWYRQAPGKERELVASIAHGSNTYYADSVKGRFTISRDNAKNTVYLQMNSLKPEDTAVYYCAAYASRTYHRYWGQGTQVTVSS

SEQ ID NO: 15554 - protein, 122 aa, Artificial Sequence
  Chemically Synthesized
QVQLQESGGGLVQAGGSLRLSCAASGTIFDKWPMGWYRQAPGKEREFVAGIDPGGTTYYADSVKGRFTISRDNAKNTVYLQMNSLKPEDTAVYYCAAIYLYYAVSQYTYIYWGQGTQVTVSS

SEQ ID NO: 15555 - protein, 118 aa, Artificial Sequence
  Chemically Synthesized
QVQLQESGGGLVQAGGSLRLSCAASGYISRYFQMGWYRQAPGKERELVATIDWGGTTYYADSVKGRFTISRDNAKNTVYLQMNSLKPEDTAVYYCAVSSPILIDHPYWGQGTQVTVSS

SEQ ID NO: 15556 - protein, 122 aa, Artificial Sequence
  Chemically Synthesized
QVQLQESGGGLVQAGGSLRLSCAASGTISYPKSMGWYRQAPGKERELVAGIGYGSITNYADSVKGRFTISRDNAKNTVYLQMNSLKPEDTAVYYCAAVSYYYTERGGSHDYWGQGTQVTVSS

SEQ ID NO: 15557 - protein, 118 aa, Artificial Sequence
  Chemically Synthesized
QVQLQESGGGLVQAGGSLRLSCAASGYISLSRYMGWYRQAPGKEREFVAAIASGGTTYYADSVKGRFTISRDNAKNTVYLQMNSLKPEDTAVYYCAVGNVPYFDYPYWGQGTQVTVSS

SEQ ID NO: 15558 - protein, 118 aa, Artificial Sequence
  Chemically Synthesized
QVQLQESGGGLVQAGGSLRLSCAASGYIFLRRYMGWYRQAPGKERELVAAITYGANTYYADSVKGRFTISRDNAKNTVYLQMNSLKPEDTAVYYCAVGQRRINRYLYWGQGTQVTVSS

SEQ ID NO: 15559 - protein, 118 aa, Artificial Sequence
  Chemically Synthesized
QVQLQESGGGLVQAGGSLRLSCAASGTISRGAIMGWYRQAPGKEREFVAAITRGSITYYADSVKGRFTISRDNAKNTVYLQMNSLKPEDTAVYYCAARRYVQYPYRYWGQGTQVTVSS

SEQ ID NO: 15560 - protein, 122 aa, Artificial Sequence
  Chemically Synthesized
QVQLQESGGGLVQAGGSLRLSCAASGSISRYQYMGWYRQAPGKEREFVAAITYGSSTYYADSVKGRFTISRDNAKNTVYLQMNSLKPEDTAVYYCAATARKYYRRDIVFSYWGQGTQVTVSS

SEQ ID NO: 15561 - protein, 118 aa, Artificial Sequence
  Chemically Synthesized
QVQLQESGGGLVQAGGSLRLSCAASGSISWVYDMGWYRQAPGKERELVASIAWGAITNYADSVKGRFTISRDNAKNTVYLQMNSLKPEDTAVYYCAVYYRNGTRFVYWGQGTQVTVSS

SEQ ID NO: 15562 - protein, 122 aa, Artificial Sequence
  Chemically Synthesized
QVQLQESGGGLVQAGGSLRLSCAASGSISRNYIMGWYRQAPGKEREFVAGISFGATTNYADSVKGRFTISRDNAKNTVYLQMNSLKPEDTAVYYCAAYRHYLGYYGTWYYYWGQGTQVTVSS

SEQ ID NO: 15563 - protein, 118 aa, Artificial Sequence
  Chemically Synthesized
QVQLQESGGGLVQAGGSLRLSCAASGSIFLPLIMGWYRQAPGKERELVASIGLGAITNYADSVKGRFTISRDNAKNTVYLQMNSLKPEDTAVYYCAVYSGWWTVLHYWGQGTQVTVSS

SEQ ID NO: 15564 - protein, 118 aa, Artificial Sequence
  Chemically Synthesized
QVQLQESGGGLVQAGGSLRLSCAASGSIFGRRPMGWYRQAPGKEREFVATINHGSNTNYADSVKGRFTISRDNAKNTVYLQMNSLKPEDTAVYYCAVTTLWRYKHQYWGQGTQVTVSS

SEQ ID NO: 15565 - protein, 121 aa, Artificial Sequence
  Chemically Synthesized
QVQLQESGGGLVQAGGSLRLSCAASGNIFDSRMGWYRQAPGKERELVAAIGQGTNTNYADSVKGRFTISRDNAKNTVYLQMNSLKPEDTAVYYCAVGPDYTWIESREHGYWGQGTQVTVSS

SEQ ID NO: 15566 - protein, 118 aa, Artificial Sequence
  Chemically Synthesized
QVQLQESGGGLVQAGGSLRLSCAASGNIFRLKYMGWYRQAPGKERELVASISRGATTYYADSVKGRFTISRDNAKNTVYLQMNSLKPEDTAVYYCAVSTVLRGYHVYWGQGTQVTVSS

SEQ ID NO: 15567 - protein, 121 aa, Artificial Sequence
  Chemically Synthesized
QVQLQESGGGLVQAGGSLRLSCAASGSIFIIANMGWYRQAPGKERELVAAIAGGSSTYYADSVKGRFTISRDNAKNTVYLQMNSLKPEDTAVYYCAAYDQYGKFYYAYAYWGQGTQVTVSS

SEQ ID NO: 15568 - protein, 119 aa, Artificial Sequence
  Chemically Synthesized
QVQLQESGGGLVQAGGSLRLSCAASGYISWVVAMGWYRQAPGKEREFVAGISTGATTNYADSVKGRFTISRDNAKNTVYLQMNSLKPEDTAVYYCARTYGQYYLVYYYWGQGTQVTVSS

SEQ ID NO: 15569 - protein, 126 aa, Artificial Sequence
  Chemically Synthesized
QVQLQESGGGLVQAGGSLRLSCAASGNIFGYSGMGWYRQAPGKERELVAGIAPGTTTNYADSVKGRFTISRDNAKNTVYLQMNSLKPEDTAVYYCAAYYSESRDWYLPWYWRYYYWGQGTQVTVSS

SEQ ID NO: 15570 - protein, 118 aa, Artificial Sequence
  Chemically Synthesized
QVQLQESGGGLVQAGGSLRLSCAASGNISSRLAMGWYRQAPGKERELVAAIGYGTTTNYADSVKGRFTISRDNAKNTVYLQMNSLKPEDTAVYYCAAKRWGWGYHLYWGQGTQVTVSS

SEQ ID NO: 15571 - protein, 122 aa, Artificial Sequence
  Chemically Synthesized
QVQLQESGGGLVQAGGSLRLSCAASGYISFGYNMGWYRQAPGKERELVAAIDRGGNTYYADSVKGRFTISRDNAKNTVYLQMNSLKPEDTAVYYCAVRTGRTIFRGRTYYYWGQGTQVTVSS

SEQ ID NO: 15572 - protein, 126 aa, Artificial Sequence
  Chemically Synthesized
QVQLQESGGGLVQAGGSLRLSCAASGNIFPVADMGWYRQAPGKEREFVASINDGSNTYYADSVKGRFTISRDNAKNTVYLQMNSLKPEDTAVYYCAAKRWRHRYIHAYDLITHRYWGQGTQVTVSS

SEQ ID NO: 15573 - protein, 127 aa, Artificial Sequence
  Chemically Synthesized
QVQLQESGGGLVQAGGSLRLSCAASGSISGVVGMGWYRQAPGKEREFVATIGYGSSTNYADSVKGRFTISRDNAKNTVYLQMNSLKPEDTAVYYCAARYDDDYYTTPSYERAYFAYWGQGTQVTVSS

SEQ ID NO: 15574 - protein, 126 aa, Artificial Sequence
  Chemically Synthesized
QVQLQESGGGLVQAGGSLRLSCAASGNTSRHRYMGWYRQAPGKERELVATITTGAITNYADSVKGRFTISRDNAKNTVYLQMNSLKPEDTAVYYCAATKTYYFSTQKAYYRWHRYWGQGTQVTVSS

SEQ ID NO: 15575 - protein, 118 aa, Artificial Sequence
  Chemically Synthesized
QVQLQESGGGLVQAGGSLRLSCAASGYISVYRYMGWYRQAPGKEREFVAGISYGATTNYADSVKGRFTISRDNAKNTVYLQMNSLKPEDTAVYYCAAYYLNYKWLSYWGQGTQVTVSS

SEQ ID NO: 15576 - protein, 121 aa, Artificial Sequence
  Chemically Synthesized
QVQLQESGGGLVQAGGSLRLSCAASGTISYGTYMGWYRQAPGKERELVAAINRGSTTYYADSVKGRFTISRDNAKNTVYLQMNSLKPEDTAVYYCAANWRSYWRGRGHWYWGQGTQVTVSS

SEQ ID NO: 15577 - protein, 118 aa, Artificial Sequence
  Chemically Synthesized
QVQLQESGGGLVQAGGSLRLSCAASGTISARGSMGWYRQAPGKERELVAAIGRGGNTNYADSVKGRFTISRDNAKNTVYLQMNSLKPEDTAVYYCAVRQSGRWFHSYWGQGTQVTVSS

SEQ ID NO: 15578 - protein, 122 aa, Artificial Sequence
  Chemically Synthesized
QVQLQESGGGLVQAGGSLRLSCAASGYIFSSLTMGWYRQAPGKEREFVATIADGAITYYADSVKGRFTISRDNAKNTVYLQMNSLKPEDTAVYYCAVGNYLYKDYDLTLDYWGQGTQVTVSS

SEQ ID NO: 15579 - protein, 119 aa, Artificial Sequence
  Chemically Synthesized
QVQLQESGGGLVQAGGSLRLSCAASGYIFVLGYMGWYRQAPGKEREFVAAISPGGTTYYADSVKGRFTISRDNAKNTVYLQMNSLKPEDTAVYYCAADDIRIGYAYGYWGQGTQVTVSS

SEQ ID NO: 15580 - protein, 117 aa, Artificial Sequence
  Chemically Synthesized
QVQLQESGGGLVQAGGSLRLSCAASGNIFLTPVMGWYRQAPGKEREFVAGITTGANTYYADSVKGRFTISRDNAKNTVYLQMNSLKPEDTAVYYCAALVRVLVLMYWGQGTQVTVSS

SEQ ID NO: 15581 - protein, 126 aa, Artificial Sequence
  Chemically Synthesized
QVQLQESGGGLVQAGGSLRLSCAASGTISPAVWMGWYRQAPGKERELVASIGGGATTNYADSVKGRFTISRDNAKNTVYLQMNSLKPEDTAVYYCAVLQPLPDIWYDDPYYGHAYWGQGTQVTVSS

SEQ ID NO: 15582 - protein, 124 aa, Artificial Sequence
  Chemically Synthesized
QVQLQESGGGLVQAGGSLRLSCAASGNIFPITEMGWYRQAPGKERELPVLIRVLIPYADSVKGRFTISRDNAKNTVYLQMNSLKPEDTAVYYCAADADTYYITYWTEEYTYVYWGQGTQVTVSS

SEQ ID NO: 15583 - protein, 122 aa, Artificial Sequence
  Chemically Synthesized
QVQLQESGGGLVQAGGSLRLSCAASGSISRRRAMGWYRQAPGKERELVASISLGTNTNYADSVKGRFTISRDNAKNTVYLQMNSLKPEDTAVYYCAVFTRTRYGLYRYLGYWGQGTQVTVSS

SEQ ID NO: 15584 - protein, 122 aa, Artificial Sequence
  Chemically Synthesized
QVQLQESGGGLVQAGGSLRLSCAASGYISLKTSMGWYRQAPGKERELVATITAGTTTNYADSVKGRFTISRDNAKNTVYLQMNSLKPEDTAVYYCAVYDYRYRAGDAGHDYWGQGTQVTVSS

SEQ ID NO: 15585 - protein, 126 aa, Artificial Sequence
  Chemically Synthesized
QVQLQESGGGLVQAGGSLRLSCAASGTISWFPDMGWYRQAPGKERELVASITHGGTTNYADSVKGRFTISRDNAKNTVYLQMNSLKPEDTAVYYCAVPVFGWVYVHRAWPLLFSYWGQGTQVTVSS

SEQ ID NO: 15586 - protein, 118 aa, Artificial Sequence
  Chemically Synthesized
QVQLQESGGGLVQAGGSLRLSCAASGTISYRGAMGWYRQAPGKERELVAAISFGTITYYADSVKGRFTISRDNAKNTVYLQMNSLKPEDTAVYYCAAYRGRYRPYLYWGQGTQVTVSS

SEQ ID NO: 15587 - protein, 118 aa, Artificial Sequence
  Chemically Synthesized
QVQLQESGGGLVQAGGSLRLSCAASGYIFVTPVMGWYRQAPGKEREFVAGIDRGSITNYADSVKGRFTISRDNAKNTVYLQMNSLKPEDTAVYYCAVYASAYTVHQYWGQGTQVTVSS

SEQ ID NO: 15588 - protein, 126 aa, Artificial Sequence
  Chemically Synthesized
QVQLQESGGGLVQAGGSLRLSCAASGTIFDTPYMGWYRQAPGKEREFVAAIGIGTTTNYADSVKGRFTISRDNAKNTVYLQMNSLKPEDTAVYYCAAGDLVLRVYPGTIAPYHGYWGQGTQVTVSS

SEQ ID NO: 15589 - protein, 122 aa, Artificial Sequence
  Chemically Synthesized
QVQLQESGGGLVQAGGSLRLSCAASGTIFPGRTMGWYRQAPGKERELVATIDSGTNTNYADSVKGRFTISRDNAKNTVYLQMNSLKPEDTAVYYCAAIQYEPLSLYYYFRYWGQGTQVTVSS

SEQ ID NO: 15590 - protein, 117 aa, Artificial Sequence
  Chemically Synthesized
QVQLQESGGGLVQAGGSLRLSCAASGSIFYVPKMGWYRQAPGKEREFVATIDRGSSTYYADSVKGRFTISRDNAKNTVYLQMNSLKPEDTAVYYCAVVRRRPRHIYWGQGTQVTVSS

SEQ ID NO: 15591 - protein, 118 aa, Artificial Sequence
  Chemically Synthesized
QVQLQESGGGLVQAGGSLRLSCAASGSIFSARTMGWYRQAPGKERELVAAIGYGGTTNYADSVKGRFTISRDNAKNTVYLQMNSLKPEDTAVYYCAAQRYWNRLHRYWGQGTQVTVSS

SEQ ID NO: 15592 - protein, 118 aa, Artificial Sequence
  Chemically Synthesized
QVQLQESGGGLVQAGGSLRLSCAASGYIFQRRYMGWYRQAPGKEREFVASIGTGANTYYADSVKGRFTISRDNAKNTVYLQMNSLKPEDTAVYYCAATTYYRHRHTYWGQGTQVTVSS

SEQ ID NO: 15593 - protein, 122 aa, Artificial Sequence
  Chemically Synthesized
QVQLQESGGGLVQAGGSLRLSCAASGSIFRSWRMGWYRQAPGKEREFVASISYGTITNYADSVKGRFTISRDNAKNTVYLQMNSLKPEDTAVYYCAAGYRAGYSSRQYYRYWGQGTQVTVSS

SEQ ID NO: 15594 - protein, 122 aa, Artificial Sequence
  Chemically Synthesized
QVQLQESGGGLVQAGGSLRLSCAASGNISRLQNMGWYRQAPGKEREFVAGIGYGATTYYADSVKGRFTISRDNAKNTVYLQMNSLKPEDTAVYYCAAGYRYRYGPYRFLRYWGQGTQVTVSS

SEQ ID NO: 15595 - protein, 115 aa, Artificial Sequence
  Chemically Synthesized
QVQLQESGGGLVQAGGSLRLSCAASGTISRVIGMGWYRQAPGKERELVAGITRGTSTNYADSVKGRFTISRDNAKNTVYLQMNSLKPEDTAVYYCAAVLPYHYYWGQGTQVTVSS

SEQ ID NO: 15596 - protein, 125 aa, Artificial Sequence
  Chemically Synthesized
QVQLQESGGGLVQAGGSLRLSCAASGTIFDVGDMGWYRQAPGKEREFVAGIARGGSSTNYADSVKGRFTISRDNAKNTVYLQMNSLKPEDTAVYYCAAYRGVYYDYDSVSTLCYWGQGTQVTVSS

SEQ ID NO: 15597 - protein, 126 aa, Artificial Sequence
  Chemically Synthesized
QVQLQESGGGLVQAGGSLRLSCAASGYIFPWVVMGWYRQAPGKEREFVAAIGYGSTTNYADSVKGRFTISRDNAKNTVYLQMNSLKPEDTAVYYCAVEGTKRGDTLAGLSFYLQYWGQGTQVTVSS

SEQ ID NO: 15598 - protein, 122 aa, Artificial Sequence
  Chemically Synthesized
QVQLQESGGGLVQAGGSLRLSCAASGYISGTARMGWYRQAPGKERELVAAISSGGTTYYADSVKGRFTISRDNAKNTVYLQMNSLKPEDTAVYYCAARRGYSYRYFPYHYYWGQGTQVTVSS

SEQ ID NO: 15599 - protein, 118 aa, Artificial Sequence
  Chemically Synthesized
QVQLQESGGGLVQAGGSLRLSCAASGNISYGLGMGWYRQAPGKERELVATIAVGSSTYYADSVKGRFTISRDNAKNTVYLQMNSLKPEDTAVYYCAAGPWYGSDHTYWGQGTQVTVSS

SEQ ID NO: 15600 - protein, 122 aa, Artificial Sequence
  Chemically Synthesized
QVQLQESGGGLVQAGGSLRLSCAASGNISYWWTMGWYRQAPGKEREFVASIGYGGTTYYADSVKGRFTISRDNAKNTVYLQMNSLKPEDTAVYYCAADGSLGDSYFLLFDYWGQGTQVTVSS

SEQ ID NO: 15601 - protein, 118 aa, Artificial Sequence
  Chemically Synthesized
QVQLQESGGGLVQAGGSLRLSCAASGYIFYYRYMGWYRQAPGKEREFVAAIGRGGNTYYADSVKGRFTISRDNAKNTVYLQMNSLKPEDTAVYYCAVGRGQRTVYWYWGQGTQVTVSS

SEQ ID NO: 15602 - protein, 118 aa, Artificial Sequence
  Chemically Synthesized
QVQLQESGGGLVQAGGSLRLSCAASGSISYNKPMGWYRQAPGKEREFVAAINRGGSTYYADSVKGRFTISRDNAKNTVYLQMNSLKPEDTAVYYCAAVSRWRATHHYWGQGTQVTVSS

SEQ ID NO: 15603 - protein, 118 aa, Artificial Sequence
  Chemically Synthesized
QVQLQESGGGLVQAGGSLRLSCAASGTISRRGVMGWYRQAPGKEREFVAAINGGTITNYADSVKGRFTISRDNAKNTVYLQMNSLKPEDTAVYYCAVRSWGRQRHLYWGQGTQVTVSS

SEQ ID NO: 15604 - protein, 118 aa, Artificial Sequence
  Chemically Synthesized
QVQLQESGGGLVQAGGSLRLSCAASGNIFYDRTMGWYRQAPGKERELVAGITRGGSTYYADSVKGRFTISRDNAKNTVYLQMNSLKPEDTAVYYCAVYRYRRFAYLYWGQGTQVTVSS

SEQ ID NO: 15605 - protein, 126 aa, Artificial Sequence
  Chemically Synthesized
QVQLQESGGGLVQAGGSLRLSCAASGNIFFFTNMGWYRQAPGKERELVASISEGGTTYYADSVKGRFTISRDNAKNTVYLQMNSLKPEDTAVYYCAAQRSFVGGDGTRFNWWLGYWGQGTQVTVSS

SEQ ID NO: 15606 - protein, 118 aa, Artificial Sequence
  Chemically Synthesized
QVQLQESGGGLVQAGGSLRLSCAASGNISWVRRMGWYRQAPGKERELVATIASGANTYYADSVKGRFTISRDNAKNTVYLQMNSLKPEDTAVYYCAANNRYYGSHFYWGQGTQVTVSS

SEQ ID NO: 15607 - protein, 116 aa, Artificial Sequence
  Chemically Synthesized
QVQLQESGGGLVQAGGSLRLSCAASGYIFCTTMGWYRQAPGKEREFVAAIALGGTTNYADSVKGRFTISRDNAKNTVYLQMNSLKPEDTAVYYCAVDALVYDLLYWGQGTQVTVSS

SEQ ID NO: 15608 - protein, 118 aa, Artificial Sequence
  Chemically Synthesized
QVQLQESGGGLVQAGGSLRLSCAASGSIFENYRMGWYRQAPGKERELVATIGPGASTNYADSVKGRFTISRDNAKNTVYLQMNSLKPEDTAVYYCAVYTDNRYGLAYWGQGTQVTVSS

SEQ ID NO: 15609 - protein, 122 aa, Artificial Sequence
  Chemically Synthesized
QVQLQESGGGLVQAGGSLRLSCAASGSISYADEMGWYRQAPGKERELVAAIAYGSNTNYADSVKGRFTISRDNAKNTVYLQMNSLKPEDTAVYYCAAFTLGGYSPYDWHLYWGQGTQVTVSS

SEQ ID NO: 15610 - protein, 122 aa, Artificial Sequence
  Chemically Synthesized
QVQLQESGGGLVQAGGSLRLSCAASGTISYVYVMGWYRQAPGKERELVAGIGLGGTTNYADSVKGRFTISRDNAKNTVYLQMNSLKPEDTAVYYCAAVYGDEWGVGEWLGYWGQGTQVTVSS

SEQ ID NO: 15611 - protein, 119 aa, Artificial Sequence
  Chemically Synthesized
QVQLQESGGGLVQAGGSLRLSCAASGTIFPGYYMGWYRQAPGKEREFVAGISDVGGTTYYADSVKGRFTISRDNAKNTVYLQMNSLKPEDTAVYYCAALTVTKLSFDYWGQGTQVTVSS

SEQ ID NO: 15612 - protein, 126 aa, Artificial Sequence
  Chemically Synthesized
QVQLQESGGGLVQAGGSLRLSCAASGTIFEAWDMGWYRQAPGKEREFVATIDSGGNTNYADSVKGRFTISRDNAKNTVYLQMNSLKPEDTAVYYCAVNWVYLPTWWFRHRVSHRYWGQGTQVTVSS

SEQ ID NO: 15613 - protein, 126 aa, Artificial Sequence
  Chemically Synthesized
QVQLQESGGGLVQAGGSLRLSCAASGYISWVGYMGWYRQAPGKEREFVAAIDPGSTTYYADSVKGRFTISRDNAKNTVYLQMNSLKPEDTAVYYCAVDYYDAPLDGAGRWYSYAYWGQGTQVTVSS

SEQ ID NO: 15614 - protein, 126 aa, Artificial Sequence
  Chemically Synthesized
QVQLQESGGGLVQAGGSLRLSCAASGNISRGKAMGWYRQAPGKEREFVAGIGIGGNTYYADSVKGRFTISRDNAKNTVYLQMNSLKPEDTAVYYCAALTRYRYWAGNYGGRRHYYWGQGTQVTVSS

SEQ ID NO: 15615 - protein, 122 aa, Artificial Sequence
  Chemically Synthesized
QVQLQESGGGLVQAGGSLRLSCAASGTISVHFDMGWYRQAPGKEREFVASIAYGGITYYADSVKGRFTISRDNAKNTVYLQMNSLKPEDTAVYYCAATPYLRDYGGYYHVYWGQGTQVTVSS

SEQ ID NO: 15616 - protein, 117 aa, Artificial Sequence
  Chemically Synthesized
QVQLQESGGGLVQAGGSLRLSCAASGTISYYRVMGWYRQAPGKERELVATISYGTTTNYADSVKGRFTISRDNAKNTVYLQMNSLKPEDTAVYYCAAWSLRFSTFYWGQGTQVTVSS

SEQ ID NO: 15617 - protein, 126 aa, Artificial Sequence
  Chemically Synthesized
QVQLQESGGGLVQAGGSLRLSCAASGSIFDYRYMGWYRQAPGKERELVAGIDSGSNTYYADSVKGRFTISRDNAKNTVYLQMNSLKPEDTAVYYCAAEPGCSDLLRSVRCSGPLYWGQGTQVTVSS

SEQ ID NO: 15618 - protein, 122 aa, Artificial Sequence
  Chemically Synthesized
QVQLQESGGGLVQAGGSLRLSCAASGTISVDSPMGWYRQAPGKEREFVATITTGSITYYADSVKGRFTISRDNAKNTVYLQMNSLKPEDTAVYYCAAWYRYYGSPVVYYDYWGQGTQVTVSS

SEQ ID NO: 15619 - protein, 118 aa, Artificial Sequence
  Chemically Synthesized
QVQLQESGGGLVQAGGSLRLSCAASGNISLYLGMGWYRQAPGKEREFVAGIASGSNTNYADSVKGRFTISRDNAKNTVYLQMNSLKPEDTAVYYCAVLERTGIYHYYWGQGTQVTVSS

SEQ ID NO: 15620 - protein, 122 aa, Artificial Sequence
  Chemically Synthesized
QVQLQESGGGLVQAGGSLRLSCAASGNISITLNMGWYRQAPGKEREFVAAIATGANTNYADSVKGRFTISRDNAKNTVYLQMNSLKPEDTAVYYCAAVQVNDAGQHKRHFYWGQGTQVTVSS

SEQ ID NO: 15621 - protein, 118 aa, Artificial Sequence
  Chemically Synthesized
QVQLQESGGGLVQAGGSLRLSCAASGNIFLSDAMGWYRQAPGKEREFVAGIARGATTYYADSVKGRFTISRDNAKNTVYLQMNSLKPEDTAVYYCAADYTQYNIYVYWGQGTQVTVSS

SEQ ID NO: 15622 - protein, 118 aa, Artificial Sequence
  Chemically Synthesized
QVQLQESGGGLVQAGGSLRLSCAASGNIFTLANMGWYRQAPGKEREFVAGIAGGGITNYADSVKGRFTISRDNAKNTVYLQMNSLKPEDTAVYYCAAIYYDIKYYGYWGQGTQVTVSS

SEQ ID NO: 15623 - protein, 118 aa, Artificial Sequence
  Chemically Synthesized
QVQLQESGGGLVQAGGSLRLSCAASGNIFPWDGMGWYRQAPGKEREFVATISQGASTNYADSVKGRFTISRDNAKNTVYLQMNSLKPEDTAVYYCAAVRRSDHYYYYWGQGTQVTVSS

SEQ ID NO: 15624 - protein, 117 aa, Artificial Sequence
  Chemically Synthesized
QVQLQESGGGLVQAGGSLRLSCAASGTISYPFTMGWYRQAPGKERELVAAISYGASTNYADSVKGRFTISRDNAKNTVYLQMNSLKPEDTAVYYCAVPAGDDPSSYWGQGTQVTVSS

SEQ ID NO: 15625 - protein, 125 aa, Artificial Sequence
  Chemically Synthesized
QVQLQESGGGLVQAGGSLRLSCAASGSIFPWLMGWYRQAPGKEREFVATIGSGGSTYYADSVKGRFTISRDNAKNTVYLQMNSLKPEDTAVYYCAVGRQHAVEGQYGWGPQYSYWGQGTQVTVSS

SEQ ID NO: 15626 - protein, 118 aa, Artificial Sequence
  Chemically Synthesized
QVQLQESGGGLVQAGGSLRLSCAASGYISAPRTMGWYRQAPGKEREFVAGIADGTSTNYADSVKGRFTISRDNAKNTVYLQMNSLKPEDTAVYYCAALQWRDGYYWYWGQGTQVTVSS

SEQ ID NO: 15627 - protein, 118 aa, Artificial Sequence
  Chemically Synthesized
QVQLQESGGGLVQAGGSLRLSCAASGYIFLHKDMGWYRQAPGKEREFVASIGIGASTYYADSVKGRFTISRDNAKNTVYLQMNSLKPEDTAVYYCAVGDRYGTDLAYWGQGTQVTVSS

SEQ ID NO: 15628 - protein, 118 aa, Artificial Sequence
  Chemically Synthesized
QVQLQESGGGLVQAGGSLRLSCAASGNIFRTPLMGWYRQAPGKEREFVAGITGGSNTNYADSVKGRFTISRDNAKNTVYLQMNSLKPEDTAVYYCAAIVWYSTYFYYWGQGTQVTVSS

SEQ ID NO: 15629 - protein, 120 aa, Artificial Sequence
  Chemically Synthesized
QVQLQESGGGLVQAGGSLRLSCAASGNISDPRYMGWYRQAPGKEREFVASIDVGGNTNYADSVKGRFTISRDNAKNTVYLQMNSLKPEDTAVYYCAVLDWTYYVGAVVYWGQGTQVTVSS

SEQ ID NO: 15630 - protein, 118 aa, Artificial Sequence
  Chemically Synthesized
QVQLQESGGGLVQAGGSLRLSCAASGYISRRDPMGWYRQAPGKEREFVASINGGGTTYYADSVKGRFTISRDNAKNTVYLQMNSLKPEDTAVYYCAAITTLYDYHAYWGQGTQVTVSS

SEQ ID NO: 15631 - protein, 118 aa, Artificial Sequence
  Chemically Synthesized
QVQLQESGGGLVQAGGSLRLSCAASGSISPYKYMGWYRQAPGKEREFVAGITVGSNTNYADSVKGRFTISRDNAKNTVYLQMNSLKPEDTAVYYCAALAFTTRYYGYWGQGTQVTVSS

SEQ ID NO: 15632 - protein, 126 aa, Artificial Sequence
  Chemically Synthesized
QVQLQESGGGLVQAGGSLRLSCAASGSISYYAYMGWYRQAPGKEREFVATISTGSTTYYADSVKGRFTISRDNAKNTVYLQMNSLKPEDTAVYYCAVPLGAQEDIELPRRTSFRYWGQGTQVTVSS

SEQ ID NO: 15633 - protein, 118 aa, Artificial Sequence
  Chemically Synthesized
QVQLQESGGGLVQAGGSLRLSCAASGNISPIFDMGWYRQAPGKEREFVAAIAQGGIYQYADSVKGRFTISRDNAKNTVYLQMNSLKPEDTAVYYCAANCLVTSKVIYWGQGTQVTVSS

SEQ ID NO: 15634 - protein, 126 aa, Artificial Sequence
  Chemically Synthesized
QVQLQESGGGLVQAGGSLRLSCAASGSISESRLMGWYRQAPGKEREFVAAINLGTITNYADSVKGRFTISRDNAKNTVYLQMNSLKPEDTAVYYCAATVQRRTGLQHGPVTEHDYWGQGTQVTVSS

SEQ ID NO: 15635 - protein, 117 aa, Artificial Sequence
  Chemically Synthesized
QVQLQESGGGLVQAGGSLRLSCAASGTISMGWYRQAPGKERELVAGITDGTTTNYADSVKGRFTISRDNAKNTVYLQMNSLKPEDTAVYYCAAWYVAGTAYDLRQYWGQGTQVTVSS

SEQ ID NO: 15636 - protein, 119 aa, Artificial Sequence
  Chemically Synthesized
QVQLQESGGGLVQAGGSLRLSCAASGTIFDRDMGWYRQAPGKEREFVAGIDDGTNTNYADSVKGRFTISRDNAKNTVYLQMNSLKPEDTAVYYCAVRTYLYDDGQGYYWGQGTQVTVSS

SEQ ID NO: 15637 - protein, 118 aa, Artificial Sequence
  Chemically Synthesized
QVQLQESGGGLVQAGGSLRLSCAASGTISGSSAMGWYRQAPGKEREFVASIGYGSTTNYADSVKGRFTISRDNAKNTVYLQMNSLKPEDTAVYYCAVILYRVYWHYYWGQGTQVTVSS

SEQ ID NO: 15638 - protein, 118 aa, Artificial Sequence
  Chemically Synthesized
QVQLQESGGGLVQAGGSLRLSCAASGNIFPPSYMGWYRQAPGKERELVASISFGATTNYADSVKGRFTISRDNAKNTVYLQMNSLKPEDTAVYYCAAYTGEGSRFSYWGQGTQVTVSS

SEQ ID NO: 15639 - protein, 117 aa, Artificial Sequence
  Chemically Synthesized
QVQLQESGGGLVQAGGSLRLSCAASGNIFSDVVMGWYRQAPGKEREFVAAIGDGTNTYYADSVKGRFTISRDNAKNTVYLQMNSLKPEDTAVYYCAAATATDRFIYWGQGTQVTVSS

SEQ ID NO: 15640 - protein, 126 aa, Artificial Sequence
  Chemically Synthesized
QVQLQESGGGLVQAGGSLRLSCAASGSISSTLDMGWYRQAPGKERELVAGIGYGSSTNYADSVKGRFTISRDNAKNTVYLQMNSLKPEDTAVYYCAVGFYQSRDFPDWAATAHYYWGQGTQVTVSS

SEQ ID NO: 15641 - protein, 126 aa, Artificial Sequence
  Chemically Synthesized
QVQLQESGGGLVQAGGSLRLSCAASGYIFRWDGMGWYRQAPGKEREFVAAINKGGNTNYADSVKGRFTISRDNAKNTVYLQMNSLKPEDTAVYYCAVQAYVTYAGDTDYYGYYLYWGQGTQVTVSS

SEQ ID NO: 15642 - protein, 122 aa, Artificial Sequence
  Chemically Synthesized
QVQLQESGGGLVQAGGSLRLSCAASGNIFGLTYMGWYRQAPGKEREFVAAITSGGSTNYADSVKGRFTISRDNAKNTVYLQMNSLKPEDTAVYYCAAINRITDGTWRYHYYWGQGTQVTVSS

SEQ ID NO: 15643 - protein, 117 aa, Artificial Sequence
  Chemically Synthesized
QVQLQESGGGLVQAGGSLRLSCAASGNISYGGGMGWYRQAPGKEREFVASIDSVLLPYADSVKGRFTISRDNAKNTVYLQMNSLKPEDTAVYYCAADDYDNVQLDYWGQGTQVTVSS

SEQ ID NO: 15644 - protein, 122 aa, Artificial Sequence
  Chemically Synthesized
QVQLQESGGGLVQAGGSLRLSCAASGNISYVFAMGWYRQAPGKERELVAAIDVGANTNYADSVKGRFTISRDNAKNTVYLQMNSLKPEDTAVYYCAANVGIIIPFSGDHRYWGQGTQVTVSS

SEQ ID NO: 15645 - protein, 122 aa, Artificial Sequence
  Chemically Synthesized
QVQLQESGGGLVQAGGSLRLSCAASGSISSDDTMGWYRQAPGKEREFVAGISPGANTNYADSVKGRFTISRDNAKNTVYLQMNSLKPEDTAVYYCAALHTDPQRKGEYFVYWGQGTQVTVSS

SEQ ID NO: 15646 - protein, 123 aa, Artificial Sequence
  Chemically Synthesized
QVQLQESGGGLVQAGGSLRLSCAASGNISSYLDMGWYRQAPGKEREFVASITYGTNTYYADSVKGRFTISRDNAKNTVYLQMNSLKPEDTAVYYCAVPIGELDIVDAAPHIYWGQGTQVTVSS

SEQ ID NO: 15647 - protein, 122 aa, Artificial Sequence
  Chemically Synthesized
QVQLQESGGGLVQAGGSLRLSCAASGYISYIANMGWYRQAPGKERELVATIAYGGNTYYADSVKGRFTISRDNAKNTVYLQMNSLKPEDTAVYYCAVRLRYIPYYYRTYVYWGQGTQVTVSS

SEQ ID NO: 15648 - protein, 118 aa, Artificial Sequence
  Chemically Synthesized
QVQLQESGGGLVQAGGSLRLSCAASGYISYGYSMGWYRQAPGKEREFVAAITFGGNTYYADSVKGRFTISRDNAKNTVYLQMNSLKPEDTAVYYCAVWYPYRYLFRYWGQGTQVTVSS

SEQ ID NO: 15649 - protein, 121 aa, Artificial Sequence
  Chemically Synthesized
QVQLQESGGGLVQAGGSLRLSCAASGTIFRLRDMGWYRQAPGKEREFFRWYYQYADSVKGRFTISRDNAKNTVYLQMNSLKPEDTAVYYCAVERGGAALFVDGWGPFHTYWGQGTQVTVSS

SEQ ID NO: 15650 - protein, 118 aa, Artificial Sequence
  Chemically Synthesized
QVQLQESGGGLVQAGGSLRLSCAASGSISRPNSMGWYRQAPGKEREFVASIDAGATTNYADSVKGRFTISRDNAKNTVYLQMNSLKPEDTAVYYCAAYTGRAPDFYYWGQGTQVTVSS

SEQ ID NO: 15651 - protein, 118 aa, Artificial Sequence
  Chemically Synthesized
QVQLQESGGGLVQAGGSLRLSCAASGSIFNSRYMGWYRQAPGKEREFVAAISAGGTTYYADSVKGRFTISRDNAKNTVYLQMNSLKPEDTAVYYCAVEPSDGATHNYWGQGTQVTVSS

SEQ ID NO: 15652 - protein, 117 aa, Artificial Sequence
  Chemically Synthesized
QVQLQESGGGLVQAGGSLRLSCAASGSISWSATMGWYRQAPGKEREFVAGIDSGGNTYYADSVKGRFTISRDNAKNTVYLQMNSLKPEDTAVYYCAAVDGDVYHGYWGQGTQVTVSS

SEQ ID NO: 15653 - protein, 118 aa, Artificial Sequence
  Chemically Synthesized
QVQLQESGGGLVQAGGSLRLSCAASGTIFPRAAMGWYRQAPGKERELVASIAVGTTTNYADSVKGRFTISRDNAKNTVYLQMNSLKPEDTAVYYCAAVRYHSDPYRYWGQGTQVTVSS

SEQ ID NO: 15654 - protein, 110 aa, Artificial Sequence
  Chemically Synthesized
QVQLQESGGGLVQAGGSLRLSCAASGNISDIVGMGWYRQAPGKEREFVAAIDDGATTNYADSVKGRFTISRDNAKNTVYLQMNSLKPEDTAVYYCAHPYWGQGTQVTVSS

SEQ ID NO: 15655 - protein, 121 aa, Artificial Sequence
  Chemically Synthesized
QVQLQESGGGLVQAGGSLRLSCAASGTIFPYFLMGWYRQAPGKERELVATIDDGSNTNYADSVKGRFTISRDNAKNTVYLQMNSLKPEDTAVYYCAVSLLTVVLRSWTMYWGQGTQVTVSS

SEQ ID NO: 15656 - protein, 122 aa, Artificial Sequence
  Chemically Synthesized
QVQLQESGGGLVQAGGSLRLSCAASGTISPYTYMGWYRQAPGKERELVASIDRGANTNYADSVKGRFTISRDNAKNTVYLQMNSLKPEDTAVYYCAASYPFQYDDVDTLAYWGQGTQVTVSS

SEQ ID NO: 15657 - protein, 118 aa, Artificial Sequence
  Chemically Synthesized
QVQLQESGGGLVQAGGSLRLSCAASGSISLTTAMGWYRQAPGKERELVAAIGQGAITYYADSVKGRFTISRDNAKNTVYLQMNSLKPEDTAVYYCAVKDGRSRYHSYWGQGTQVTVSS

SEQ ID NO: 15658 - protein, 115 aa, Artificial Sequence
  Chemically Synthesized
QVQLQESGGGLVQAGGSLRLSCAASGSISWTLIMGWYRQAPGKERELLPVLIWVLVPYADSVKGRFTISRDNAKNTVYLQMNSLKPEDTAVYYCATGVLLTRMYWGQGTQVTVSS

SEQ ID NO: 15659 - protein, 118 aa, Artificial Sequence
  Chemically Synthesized
QVQLQESGGGLVQAGGSLRLSCAASGYISWRYVMGWYRQAPGKEREFVAGISRGTITYYADSVKGRFTISRDNAKNTVYLQMNSLKPEDTAVYYCAVGNSFPPDHTYWGQGTQVTVSS

SEQ ID NO: 15660 - protein, 121 aa, Artificial Sequence
  Chemically Synthesized
QVQLQESGGGLVQAGGSLRLSCAASGYISLSYSMGWYRQAPGKEREFVATIGSGTSTNYADSVKGRFTISRDNAKNTVYLQMNSLKPEDTAVYYCAAYGERPDILSGRYYWGQGTQVTVSS

SEQ ID NO: 15661 - protein, 122 aa, Artificial Sequence
  Chemically Synthesized
QVQLQESGGGLVQAGGSLRLSCAASGNIFGVREMGWYRQAPGKEREFVATIGPGGNTYYADSVKGRFTISRDNAKNTVYLQMNSLKPEDTAVYYCAATWRQRWVHRYYHRYWGQGTQVTVSS

SEQ ID NO: 15662 - protein, 117 aa, Artificial Sequence
  Chemically Synthesized
QVQLQESGGGLVQAGGSLRLSCAASGNISTYVNMGWYRQAPGKEREFVAAIAKVVLPYADSVKGRFTISRDNAKNTVYLQMNSLKPEDTAVYYCAADDNAFGRLDYWGQGTQVTVSS

SEQ ID NO: 15663 - protein, 118 aa, Artificial Sequence
  Chemically Synthesized
QVQLQESGGGLVQAGGSLRLSCAASGYISFRKRMGWYRQAPGKERELVAAIGRGASTNYADSVKGRFTISRDNAKNTVYLQMNSLKPEDTAVYYCAAWSVYSRYYSYWGQGTQVTVSS

SEQ ID NO: 15664 - protein, 118 aa, Artificial Sequence
  Chemically Synthesized
QVQLQESGGGLVQAGGSLRLSCAASGSISYSQYMGWYRQAPGKEREFVAGIDPGAITNYADSVKGRFTISRDNAKNTVYLQMNSLKPEDTAVYYCAAYAQVGPRFGYWGQGTQVTVSS

SEQ ID NO: 15665 - protein, 117 aa, Artificial Sequence
  Chemically Synthesized
QVQLQESGGGLVQAGGSLRLSCAASGSISYPQYMGWYRQAPGKERELVAGISQGTITNYADSVKGRFTISRDNAKNTVYLQMNSLKPEDTAVYYCAARASTTCTMYWGQGTQVTVSS

SEQ ID NO: 15666 - protein, 122 aa, Artificial Sequence
  Chemically Synthesized
QVQLQESGGGLVQAGGSLRLSCAASGTISYRRSMGWYRQAPGKEREFVAGITRGATTNYADSVKGRFTISRDNAKNTVYLQMNSLKPEDTAVYYCAVHARTFVSTYRRHPYWGQGTQVTVSS

SEQ ID NO: 15667 - protein, 118 aa, Artificial Sequence
  Chemically Synthesized
QVQLQESGGGLVQAGGSLRLSCAASGSISDNVYMGWYRQAPGKERELVAGIGTGGSTYYADSVKGRFTISRDNAKNTVYLQMNSLKPEDTAVYYCAGFSDLAGILFYWGQGTQVTVSS

SEQ ID NO: 15668 - protein, 113 aa, Artificial Sequence
  Chemically Synthesized
QVQLQESGGGLVQAGGSLRLSCAASGSIFRYYIMGWYRQAPGKERELVAAISRGGSTYYADSVKGRFTISRDNAKNTVYLQMNSLKPEDTAVYYCAAYRHYYWGQGTQVTVSS

SEQ ID NO: 15669 - protein, 117 aa, Artificial Sequence
  Chemically Synthesized
QVQLQESGGGLVQAGGSLRLSCAASGYISRSTMGWYRQAPGKERELVASISTGSNTNYADSVKGRFTISRDNAKNTVYLQMNSLKPEDTAVYYCAATDYAFIGLEYWGQGTQVTVSS

SEQ ID NO: 15670 - protein, 118 aa, Artificial Sequence
  Chemically Synthesized
QVQLQESGGGLVQAGGSLRLSCAASGYISRAATMGWYRQAPGKERELVAAIAHGGNTNYADSVKGRFTISRDNAKNTVYLQMNSLKPEDTAVYYCAARAYLQWYHRYWGQGTQVTVSS

SEQ ID NO: 15671 - protein, 118 aa, Artificial Sequence
  Chemically Synthesized
QVQLQESGGGLVQAGGSLRLSCAASGNISTGGAMGWYRQAPGKERELVAAIDPGAITYYADSVKGRFTISRDNAKNTVYLQMNSLKPEDTAVYYCAVYGTSGGGHVYWGQGTQVTVSS

SEQ ID NO: 15672 - protein, 118 aa, Artificial Sequence
  Chemically Synthesized
QVQLQESGGGLVQAGGSLRLSCAASGNIFTLRRMGWYRQAPGKERELVASISGGTSTYYADSVKGRFTISRDNAKNTVYLQMNSLKPEDTAVYYCAARRFTYNAHRYWGQGTQVTVSS

SEQ ID NO: 15673 - protein, 126 aa, Artificial Sequence
  Chemically Synthesized
QVQLQESGGGLVQAGGSLRLSCAASGNISGYDNMGWYRQAPGKEREFVASISVGSSTNYADSVKGRFTISRDNAKNTVYLQMNSLKPEDTAVYYCAAIYVGKYYRWDFYRDTHYYWGQGTQVTVSS

SEQ ID NO: 15674 - protein, 117 aa, Artificial Sequence
  Chemically Synthesized
QVQLQESGGGLVQAGGSLRLSCAASGNISFSVYMGWYRQAPGKERELVASIGRGASTYYADSVKGRFTISRDNAKNTVYLQMNSLKPEDTAVYYCAATQSTTLVIYWGQGTQVTVSS

SEQ ID NO: 15675 - protein, 122 aa, Artificial Sequence
  Chemically Synthesized
QVQLQESGGGLVQAGGSLRLSCAASGTISYYRYMGWYRQAPGKEREFVAGIGSGASTNYADSVKGRFTISRDNAKNTVYLQMNSLKPEDTAVYYCAVVRQGYPPWWLSLDYWGQGTQVTVSS

SEQ ID NO: 15676 - protein, 118 aa, Artificial Sequence
  Chemically Synthesized
QVQLQESGGGLVQAGGSLRLSCAASGYISVWYDMGWYRQAPGKERELVAGIAFGTITYYADSVKGRFTISRDNAKNTVYLQMNSLKPEDTAVYYCAVRADHAYDYRYWGQGTQVTVSS

SEQ ID NO: 15677 - protein, 122 aa, Artificial Sequence
  Chemically Synthesized
QVQLQESGGGLVQAGGSLRLSCAASGTIFVTVYMGWYRQAPGKEREFVAGIASGGITNYADSVKGRFTISRDNAKNTVYLQMNSLKPEDTAVYYCAADEHVRSYYTTYFRYWGQGTQVTVSS

SEQ ID NO: 15678 - protein, 117 aa, Artificial Sequence
  Chemically Synthesized
QVQLQESGGGLVQAGGSLRLSCAASGTIFPNRNMGWYRQAPGKERELVASISLGANTNYADSVKGRFTISRDNAKNTVYLQMNSLKPEDTAVYYCAAYTSGLTTIYWGQGTQVTVSS

SEQ ID NO: 15679 - protein, 122 aa, Artificial Sequence
  Chemically Synthesized
QVQLQESGGGLVQAGGSLRLSCAASGYISTRQFMGWYRQAPGKEREFVASIADGGITNYADSVKGRFTISRDNAKNTVYLQMNSLKPEDTAVYYCAVDRDRITDDYGVHAYWGQGTQVTVSS

SEQ ID NO: 15680 - protein, 117 aa, Artificial Sequence
  Chemically Synthesized
QVQLQESGGGLVQAGGSLRLSCAASGYISGRYRMGWYRQAPGKEREFVASIGRGSTYYADSVKGRFTISRDNAKNTVYLQMNSLKPEDTAVYYCAARFGWARPLVYWGQGTQVTVSS

SEQ ID NO: 15681 - protein, 122 aa, Artificial Sequence
  Chemically Synthesized
QVQLQESGGGLVQAGGSLRLSCAASGNIFHFVIMGWYRQAPGKEREFVAAISYGTSTYYADSVKGRFTISRDNAKNTVYLQMNSLKPEDTAVYYCAVWWPSGAYGWRDYDYWGQGTQVTVSS

SEQ ID NO: 15682 - protein, 118 aa, Artificial Sequence
  Chemically Synthesized
QVQLQESGGGLVQAGGSLRLSCAASGTIFTWSYMGWYRQAPGKEREFVAAIAYGTITYYADSVKGRFTISRDNAKNTVYLQMNSLKPEDTAVYYCAAFPYDGYRHAYWGQGTQVTVSS

SEQ ID NO: 15683 - protein, 114 aa, Artificial Sequence
  Chemically Synthesized
QVQLQESGGGLVQAGGSLRLSCAASGSISGSAYMGWYRQAPGKERELVALVVVLPYADSVKGRFTISRDNAKNTVYLQMNSLKPEDTAVYYCAVSYDDNLSFYWGQGTQVTVSS

SEQ ID NO: 15684 - protein, 117 aa, Artificial Sequence
  Chemically Synthesized
QVQLQESGGGLVQAGGSLRLSCAASGTISEGWLMGWYRQAPGKERELVASIASVVVPYADSVKGRFTISRDNAKNTVYLQMNSLKPEDTAVYYCAAIAYGPDDYDYWGQGTQVTVSS

SEQ ID NO: 15685 - protein, 126 aa, Artificial Sequence
  Chemically Synthesized
QVQLQESGGGLVQAGGSLRLSCAASGTISSYYRMGWYRQAPGKERELVASISRGGNTNYADSVKGRFTISRDNAKNTVYLQMNSLKPEDTAVYYCAALKGRTYYLNGHNSTVHRYWGQGTQVTVSS

SEQ ID NO: 15686 - protein, 126 aa, Artificial Sequence
  Chemically Synthesized
QVQLQESGGGLVQAGGSLRLSCAASGNIFRPTRMGWYRQAPGKERELVATITGGGNTYYADSVKGRFTISRDNAKNTVYLQMNSLKPEDTAVYYCAARRRYPSVVYDRDDPYLRYWGQGTQVTVSS

SEQ ID NO: 15687 - protein, 126 aa, Artificial Sequence
  Chemically Synthesized
QVQLQESGGGLVQAGGSLRLSCAASGSIFGWIIMGWYRQAPGKERELVAAISRGGNTYYADSVKGRFTISRDNAKNTVYLQMNSLKPEDTAVYYCAAGDPSIAGPTGYGVRPYWYWGQGTQVTVSS

SEQ ID NO: 15688 - protein, 118 aa, Artificial Sequence
  Chemically Synthesized
QVQLQESGGGLVQAGGSLRLSCAASGNISDWFLMGWYRQAPGKERELVATIAYGSITNYADSVKGRFTISRDNAKNTVYLQMNSLKPEDTAVYYCAVRQQRARSLPYWGQGTQVTVSS

SEQ ID NO: 15689 - protein, 121 aa, Artificial Sequence
  Chemically Synthesized
QVQLQESGGGLVQAGGSLRLSCAASGTIFYVDIMGWYRQAPGKERELVAGIGYGAITYYADSVKGRFTISRDNAKNTVYLQMNSLKPEDTAVYYCAAIGRRERWTYGHRYWGQGTQVTVSS

SEQ ID NO: 15690 - protein, 118 aa, Artificial Sequence
  Chemically Synthesized
QVQLQESGGGLVQAGGSLRLSCAASGNIFYTVAMGWYRQAPGKERELVATINSGSTTYYADSVKGRFTISRDNAKNTVYLQMNSLKPEDTAVYYCAADHNTIRPLDYWGQGTQVTVSS

SEQ ID NO: 15691 - protein, 118 aa, Artificial Sequence
  Chemically Synthesized
QVQLQESGGGLVQAGGSLRLSCAASGSIFASGPMGWYRQAPGKEREFVATIAVGGITNYADSVKGRFTISRDNAKNTVYLQMNSLKPEDTAVYYCAAEYLTFLLYQYWGQGTQVTVSS

SEQ ID NO: 15692 - protein, 122 aa, Artificial Sequence
  Chemically Synthesized
QVQLQESGGGLVQAGGSLRLSCAASGTIFGYAYMGWYRQAPGKEREFVAAITFGGITYYADSVKGRFTISRDNAKNTVYLQMNSLKPEDTAVYYCAALLDYYISDYYLYPYWGQGTQVTVSS

SEQ ID NO: 15693 - protein, 125 aa, Artificial Sequence
  Chemically Synthesized
QVQLQESGGGLVQAGGSLRLSCAASGTISGQAMGWYRQAPGKERELVATIGQGGNTYYADSVKGRFTISRDNAKNTVYLQMNSLKPEDTAVYYCAAIQGIYTDTYSNYDYPFDYWGQGTQVTVSS

SEQ ID NO: 15694 - protein, 118 aa, Artificial Sequence
  Chemically Synthesized
QVQLQESGGGLVQAGGSLRLSCAASGTIFRLRGMGWYRQAPGKEREFVATIARGTTTYYADSVKGRFTISRDNAKNTVYLQMNSLKPEDTAVYYCAAGRYSASFFGYWGQGTQVTVSS

SEQ ID NO: 15695 - protein, 122 aa, Artificial Sequence
  Chemically Synthesized
QVQLQESGGGLVQAGGSLRLSCAASGNISDDWLMGWYRQAPGKEREFVATIGQGGSTNYADSVKGRFTISRDNAKNTVYLQMNSLKPEDTAVYYCAVIYPKAAHYYSYHYYWGQGTQVTVSS

SEQ ID NO: 15696 - protein, 116 aa, Artificial Sequence
  Chemically Synthesized
QVQLQESGGGLVQAGGSLRLSCAASGYISDADIMGWYRQAPGKERELVATITYGGTTNYADSVKGRFTISRDNAKNTVYLQMNSLKPEDTAVYYCAAYGDDLYAYWGQGTQVTVSS

SEQ ID NO: 15697 - protein, 122 aa, Artificial Sequence
  Chemically Synthesized
QVQLQESGGGLVQAGGSLRLSCAASGNISAIAEMGWYRQAPGKERELVAGITIGSTTNYADSVKGRFTISRDNAKNTVYLQMNSLKPEDTAVYYCAVSYDYGEFAYYYHVYWGQGTQVTVSS

SEQ ID NO: 15698 - protein, 121 aa, Artificial Sequence
  Chemically Synthesized
QVQLQESGGGLVQAGGSLRLSCAASGNIFVLGYMGWYRQAPGKERELVASISLGSTTNYADSVKGRFTISRDNAKNTVYLQMNSLKPEDTAVYYCAVDVPTWDLQYGALYWGQGTQVTVSS

SEQ ID NO: 15699 - protein, 121 aa, Artificial Sequence
  Chemically Synthesized
QVQLQESGGGLVQAGGSLRLSCAASGYISYDSMGWYRQAPGKERELVASITDGTTTYYADSVKGRFTISRDNAKNTVYLQMNSLKPEDTAVYYCAVLYGYTYFGYYDHGYWGQGTQVTVSS

SEQ ID NO: 15700 - protein, 118 aa, Artificial Sequence
  Chemically Synthesized
QVQLQESGGGLVQAGGSLRLSCAASGYIFYRGTMGWYRQAPGKEREFVASISPGANTYYADSVKGRFTISRDNAKNTVYLQMNSLKPEDTAVYYCAVTYGYRYAYVYWGQGTQVTVSS

SEQ ID NO: 15701 - protein, 118 aa, Artificial Sequence
  Chemically Synthesized
QVQLQESGGGLVQAGGSLRLSCAASGNIFTYDVMGWYRQAPGKERELVAGIGYGTITNYADSVKGRFTISRDNAKNTVYLQMNSLKPEDTAVYYCAAWAVGPYVLDYWGQGTQVTVSS

SEQ ID NO: 15702 - protein, 122 aa, Artificial Sequence
  Chemically Synthesized
QVQLQESGGGLVQAGGSLRLSCAASGTISGYVGMGWYRQAPGKEREFVASIAPGSSTYYADSVKGRFTISRDNAKNTVYLQMNSLKPEDTAVYYCAAPYLDWYDYSDRLDYWGQGTQVTVSS

SEQ ID NO: 15703 - protein, 126 aa, Artificial Sequence
  Chemically Synthesized
QVQLQESGGGLVQAGGSLRLSCAASGTIFARTYMGWYRQAPGKERELVAGIDRGSNTYYADSVKGRFTISRDNAKNTVYLQMNSLKPEDTAVYYCAVNGRVWGYLYPVYPRRHLYWGQGTQVTVSS

SEQ ID NO: 15704 - protein, 121 aa, Artificial Sequence
  Chemically Synthesized
QVQLQESGGGLVQAGGSLRLSCAASGTISTYVAMGWYRQAPGKEREFVAAISDGSTTNYADSVKGRFTISRDNAKNTVYLQMNSLKPEDTAVYYCAVARYIGGAGDGFYYWGQGTQVTVSS

SEQ ID NO: 15705 - protein, 117 aa, Artificial Sequence
  Chemically Synthesized
QVQLQESGGGLVQAGGSLRLSCAASGNIFSIRDMGWYRQAPGKERELLPLLLWVVVPYADSVKGRFTISRDNAKNTVYLQMNSLKPEDTAVYYCAALDGPGGGLDYWGQGTQVTVSS

SEQ ID NO: 15706 - protein, 120 aa, Artificial Sequence
  Chemically Synthesized
QVQLQESGGGLVQAGGSLRLSCAASGSIFRTLSMGWYRQAPGKEREFVAGIGRGSSTNYADSVKGRFTISRDNAKNTVYLQMNSLKPEDTAVYYCAVRARERLWGWHTYWGQGTQVTVSS

SEQ ID NO: 15707 - protein, 118 aa, Artificial Sequence
  Chemically Synthesized
QVQLQESGGGLVQAGGSLRLSCAASGYIFRRAYMGWYRQAPGKERELVAAIADGGSTNYADSVKGRFTISRDNAKNTVYLQMNSLKPEDTAVYYCAAGTKRWWYFRYWGQGTQVTVSS

SEQ ID NO: 15708 - protein, 122 aa, Artificial Sequence
  Chemically Synthesized
QVQLQESGGGLVQAGGSLRLSCAASGSISDDSYMGWYRQAPGKEREFVASITIGGITNYADSVKGRFTISRDNAKNTVYLQMNSLKPEDTAVYYCAATSQQYYHWYDEYNYWGQGTQVTVSS

SEQ ID NO: 15709 - protein, 122 aa, Artificial Sequence
  Chemically Synthesized
QVQLQESGGGLVQAGGSLRLSCAASGSISQRGYMGWYRQAPGKEREFVATIAYGGTTNYADSVKGRFTISRDNAKNTVYLQMNSLKPEDTAVYYCAAILPNRSLLVWPHTYWGQGTQVTVSS

SEQ ID NO: 15710 - protein, 118 aa, Artificial Sequence
  Chemically Synthesized
QVQLQESGGGLVQAGGSLRLSCAASGSISVGAIMGWYRQAPGKERELVAGITLGASTYYADSVKGRFTISRDNAKNTVYLQMNSLKPEDTAVYYCAVEFDGWESFWYWGQGTQVTVSS

SEQ ID NO: 15711 - protein, 118 aa, Artificial Sequence
  Chemically Synthesized
QVQLQESGGGLVQAGGSLRLSCAASGYIFIRPVMGWYRQAPGKEREFVAGISYGGTTYYADSVKGRFTISRDNAKNTVYLQMNSLKPEDTAVYYCAVIGWARRNLYYWGQGTQVTVSS

SEQ ID NO: 15712 - protein, 118 aa, Artificial Sequence
  Chemically Synthesized
QVQLQESGGGLVQAGGSLRLSCAASGTISGRAYMGWYRQAPGKEREFVAGIGRGASTNYADSVKGRFTISRDNAKNTVYLQMNSLKPEDTAVYYCAVYRRGWTYHPYWGQGTQVTVSS

SEQ ID NO: 15713 - protein, 118 aa, Artificial Sequence
  Chemically Synthesized
QVQLQESGGGLVQAGGSLRLSCAASGYISRPYRMGWYRQAPGKEREFVAGINYGTNTYYADSVKGRFTISRDNAKNTVYLQMNSLKPEDTAVYYCAVGTYGKYILRYWGQGTQVTVSS

SEQ ID NO: 15714 - protein, 117 aa, Artificial Sequence
  Chemically Synthesized
QVQLQESGGGLVQAGGSLRLSCAASGYISRFRAMGWYRQAPGKEREFVAAITGGITYYADSVKGRFTISRDNAKNTVYLQMNSLKPEDTAVYYCAVYSVWYVRYPYWGQGTQVTVSS

SEQ ID NO: 15715 - protein, 126 aa, Artificial Sequence
  Chemically Synthesized
QVQLQESGGGLVQAGGSLRLSCAASGSISATTYMGWYRQAPGKERELVATIAVGATTNYADSVKGRFTISRDNAKNTVYLQMNSLKPEDTAVYYCAAIPPYSWAGFYLIQTYYSYWGQGTQVTVSS

SEQ ID NO: 15716 - protein, 122 aa, Artificial Sequence
  Chemically Synthesized
QVQLQESGGGLVQAGGSLRLSCAASGNISARSYMGWYRQAPGKEREFVATISGGGTTYYADSVKGRFTISRDNAKNTVYLQMNSLKPEDTAVYYCAAKRGQRWSPRQFHAYWGQGTQVTVSS

SEQ ID NO: 15717 - protein, 122 aa, Artificial Sequence
  Chemically Synthesized
QVQLQESGGGLVQAGGSLRLSCAASGTIFKPYYMGWYRQAPGKEREFVATIGPGANTYYADSVKGRFTISRDNAKNTVYLQMNSLKPEDTAVYYCAADYQPAIADSLTHLYWGQGTQVTVSS

SEQ ID NO: 15718 - protein, 118 aa, Artificial Sequence
  Chemically Synthesized
QVQLQESGGGLVQAGGSLRLSCAASGNISTRARMGWYRQAPGKEREFVAGIAAGSTTYYADSVKGRFTISRDNAKNTVYLQMNSLKPEDTAVYYCAAYVYGWRGHRYWGQGTQVTVSS

SEQ ID NO: 15719 - protein, 118 aa, Artificial Sequence
  Chemically Synthesized
QVQLQESGGGLVQAGGSLRLSCAASGTIFYWRYMGWYRQAPGKERELVAAIGGGAITNYADSVKGRFTISRDNAKNTVYLQMNSLKPEDTAVYYCAAKGISYRGFRYWGQGTQVTVSS

SEQ ID NO: 15720 - protein, 117 aa, Artificial Sequence
  Chemically Synthesized
QVQLQESGGGLVQAGGSLRLSCAASGNISTYDVMGWYRQAPGKERELVASISGGSTTYYADSVKGRFTISRDNAKNTVYLQMNSLKPEDTAVYYCAAPVYSTWVMYWGQGTQVTVSS

SEQ ID NO: 15721 - protein, 117 aa, Artificial Sequence
  Chemically Synthesized
QVQLQESGGGLVQAGGSLRLSCAASGYILTKSMGWYRQAPGKERELVATINWGTTTYYADSVKGRFTISRDNAKNTVYLQMNSLKPEDTAVYYCAAFLYTQASHRYWGQGTQVTVSS

SEQ ID NO: 15722 - protein, 117 aa, Artificial Sequence
  Chemically Synthesized
QVQLQESGGGLVQAGGSLRLSCAASGNIFYAWGMGWYRQAPGKERELVAAITRGGNTNYADSVKGRFTISRDNAKNTVYLQMNSLKPEDTAVYYCALLVLTLLVMYWGQGTQVTVSS

SEQ ID NO: 15723 - protein, 117 aa, Artificial Sequence
  Chemically Synthesized
QVQLQESGGGLVQAGGSLRLSCAASGTISGHTMGWYRQAPGKEREFVAAIAHGAITNYADSVKGRFTISRDNAKNTVYLQMNSLKPEDTAVYYCAVTGRGYSPHNYWGQGTQVTVSS

SEQ ID NO: 15724 - protein, 120 aa, Artificial Sequence
  Chemically Synthesized
QVQLQESGGGLVQAGGSLRLSCAASGNIFLAVWMGWYRQAPGKEREFVAGLISVVLPYADSVKGRFTISRDNAKNTVYLQMNSLKPEDTAVYYCAAWYFVQFGYRDDFYWGQGTQVTVSS

SEQ ID NO: 15725 - protein, 112 aa, Artificial Sequence
  Chemically Synthesized
QVQLQESGGGLVQAGGSLRLSCAASGNISDRHEMGWYRQAPGKERELVAGISSGASTYYADSVKGRFTISRDNAKNTVYLQMNSLKPEDTAVYYCAADDRYWGQGTQVTVSS

SEQ ID NO: 15726 - protein, 118 aa, Artificial Sequence
  Chemically Synthesized
QVQLQESGGGLVQAGGSLRLSCAASGTISDPDDMGWYRQAPGKERELVAAIDRGTNTNYADSVKGRFTISRDNAKNTVYLQMNSLKPEDTAVYYCAVLFWQRYLHYYWGQGTQVTVSS

SEQ ID NO: 15727 - protein, 110 aa, Artificial Sequence
  Chemically Synthesized
QVQLQESGGGLVQAGGSLRLSCAASGNIFDLTDMGWYRQAPGKERELVAGINYGGTTQYADSVKGRFTISRDNAKNTVYLQMNSLKPEDTAVYYCAVTYWGQGTQVTVSS

SEQ ID NO: 15728 - protein, 118 aa, Artificial Sequence
  Chemically Synthesized
QVQLQESGGGLVQAGGSLRLSCAASGSIFSSVRMGWYRQAPGKERELVATIAYGTTTYYADSVKGRFTISRDNAKNTVYLQMNSLKPEDTAVYYCAVHFGGTTAHIYWGQGTQVTVSS

SEQ ID NO: 15729 - protein, 122 aa, Artificial Sequence
  Chemically Synthesized
QVQLQESGGGLVQAGGSLRLSCAASGTIFSDYWMGWYRQAPGKEREFVAAIATGASTYYADSVKGRFTISRDNAKNTVYLQMNSLKPEDTAVYYCAAYNYDSDGGYIYHGYWGQGTQVTVSS

SEQ ID NO: 15730 - protein, 125 aa, Artificial Sequence
  Chemically Synthesized
QVQLQESGGGLVQAGGSLRLSCAASGYISPGTWMGWYRQAPGKEREFVAGIGTGANTYYADSVKGRFTISRDNAKNTVYLQMNSLKPEDTAVYYCAAVGRDWQDTRGRYSVLFYWGQGTQVTVSS

SEQ ID NO: 15731 - protein, 121 aa, Artificial Sequence
  Chemically Synthesized
QVQLQESGGGLVQAGGSLRLSCAASGNISATNSMGWYRQAPGKERELVAAITQGASTNYADSVKGRFTISRDNAKNTVYLQMNSLKPEDTAVYYCAVPSVTTTCTLFCIYWGQGTQVTVSS

SEQ ID NO: 15732 - protein, 115 aa, Artificial Sequence
  Chemically Synthesized
QVQLQESGGGLVQAGGSLRLSCAASGYISVKRTMGWYRQAPGKEREFVATISQGAITYYADSVKGRFTISRDNAKNTVYLQMNSLKPEDTAVYYCAVFGWYFRYWGQGTQVTVSS

SEQ ID NO: 15733 - protein, 118 aa, Artificial Sequence
  Chemically Synthesized
QVQLQESGGGLVQAGGSLRLSCAASGNIFLAWPMGWYRQAPGKERELVATITDGANTNYADSVKGRFTISRDNAKNTVYLQMNSLKPEDTAVYYCAVGDSSYGYLYYWGQGTQVTVSS

SEQ ID NO: 15734 - protein, 117 aa, Artificial Sequence
  Chemically Synthesized
QVQLQESGGGLVQAGGSLRLSCAASGTISRPTAMGWYRQAPGKERELVAAITSVLIPYADSVKGRFTISRDNAKNTVYLQMNSLKPEDTAVYYCAVDTYGTLYYDYWGQGTQVTVSS

SEQ ID NO: 15735 - protein, 118 aa, Artificial Sequence
  Chemically Synthesized
QVQLQESGGGLVQAGGSLRLSCAASGSISDFSTMGWYRQAPGKERELVASITYGASTNYADSVKGRFTISRDNAKNTVYLQMNSLKPEDTAVYYCAVVWIDRYTHVYWGQGTQVTVSS

SEQ ID NO: 15736 - protein, 120 aa, Artificial Sequence
  Chemically Synthesized
QVQLQESGGGLVQAGGSLRLSCAASGSISLGANMGWYRQAPGKEREFVAGITSGANTYYADSVKGRFTISRDNAKNTVYLQMNSLKPEDTAVYYCAVQPFYVASKRYGYWGQGTQVTVSS

SEQ ID NO: 15737 - protein, 118 aa, Artificial Sequence
  Chemically Synthesized
QVQLQESGGGLVQAGGSLRLSCAASGNIFFLGRMGWYRQAPGKERELVATIGQGSNTYYADSVKGRFTISRDNAKNTVYLQMNSLKPEDTAVYYCAVAGPDFSPYYYWGQGTQVTVSS

SEQ ID NO: 15738 - protein, 126 aa, Artificial Sequence
  Chemically Synthesized
QVQLQESGGGLVQAGGSLRLSCAASGSIFGPSQMGWYRQAPGKERELVAGIDGGANTNYADSVKGRFTISRDNAKNTVYLQMNSLKPEDTAVYYCAVGYRLYYATAWQSTPVHHYWGQGTQVTVSS

SEQ ID NO: 15739 - protein, 118 aa, Artificial Sequence
  Chemically Synthesized
QVQLQESGGGLVQAGGSLRLSCAASGYIFRQSYMGWYRQAPGKERELVAAISWGGSTYYADSVKGRFTISRDNAKNTVYLQMNSLKPEDTAVYYCAVEVSYNDVYQYWGQGTQVTVSS

SEQ ID NO: 15740 - protein, 122 aa, Artificial Sequence
  Chemically Synthesized
QVQLQESGGGLVQAGGSLRLSCAASGTISYSYTMGWYRQAPGKERELVASITQGTNTYYADSVKGRFTISRDNAKNTVYLQMNSLKPEDTAVYYCAVGDYYYVGVPLEYRYWGQGTQVTVSS

SEQ ID NO: 15741 - protein, 126 aa, Artificial Sequence
  Chemically Synthesized
QVQLQESGGGLVQAGGSLRLSCAASGTIFLPGLMGWYRQAPGKEREFVASIGDGTITNYADSVKGRFTISRDNAKNTVYLQMNSLKPEDTAVYYCAAYAKDLRYYVYQSGYDYYYWGQGTQVTVSS

SEQ ID NO: 15742 - protein, 122 aa, Artificial Sequence
  Chemically Synthesized
QVQLQESGGGLVQAGGSLRLSCAASGSIFLVRYMGWYRQAPGKEREFVASIAPGTNTNYADSVKGRFTISRDNAKNTVYLQMNSLKPEDTAVYYCAVYYAEPGTTDYDHRYWGQGTQVTVSS

SEQ ID NO: 15743 - protein, 117 aa, Artificial Sequence
  Chemically Synthesized
QVQLQESGGGLVQAGGSLRLSCAASGSISAYIDMGWYRQAPGKEREFVAAIGYGTNTNYADSVKGRFTISRDNAKNTVYLQMNSLKPEDTAVYYCAASLLLLTTFYWGQGTQVTVSS

SEQ ID NO: 15744 - protein, 117 aa, Artificial Sequence
  Chemically Synthesized
QVQLQESGGGLVQAGGSLRLSCAASGTIFYWYYMGWYRQAPGKEREFVAGIGFGSITNYADSVKGRFTISRDNAKNTVYLQMNSLKPEDTAVYYCAAYYNRPDLSYWGQGTQVTVSS

SEQ ID NO: 15745 - protein, 116 aa, Artificial Sequence
  Chemically Synthesized
QVQLQESGGGLVQAGGSLRLSCAASGYISYDTYMGWYRQAPGKERELVAAITRGTITNYADSVKGRFTISRDNAKNTVYLQMNSLKPEDTAVYYCAAFDGTAFLYWGQGTQVTVSS

SEQ ID NO: 15746 - protein, 118 aa, Artificial Sequence
  Chemically Synthesized
QVQLQESGGGLVQAGGSLRLSCAASGTIFSVAYMGWYRQAPGKEREFVAAITGGATTNYADSVKGRFTISRDNAKNTVYLQMNSLKPEDTAVYYCAAVDRDRGDFPYWGQGTQVTVSS

SEQ ID NO: 15747 - protein, 117 aa, Artificial Sequence
  Chemically Synthesized
QVQLQESGGGLVQAGGSLRLSCAASGNISWYPVMGWYRQAPGKERELVASIASGANTNYADSVKGRFTISRDNAKNTVYLQMNSLKPEDTAVYYCAAYTSRDSSIYWGQGTQVTVSS

SEQ ID NO: 15748 - protein, 126 aa, Artificial Sequence
  Chemically Synthesized
QVQLQESGGGLVQAGGSLRLSCAASGSIFYYTYMGWYRQAPGKEREFVATITSGANTNYADSVKGRFTISRDNAKNTVYLQMNSLKPEDTAVYYCAATQRSDFRSTIVGLRPHLYWGQGTQVTVSS

SEQ ID NO: 15749 - protein, 118 aa, Artificial Sequence
  Chemically Synthesized
QVQLQESGGGLVQAGGSLRLSCAASGTIFWFSGMGWYRQAPGKERELVASIARGTTTYYADSVKGRFTISRDNAKNTVYLQMNSLKPEDTAVYYCAVNDYWSLQHRYWGQGTQVTVSS

SEQ ID NO: 15750 - protein, 125 aa, Artificial Sequence
  Chemically Synthesized
QVQLQESGGGLVQAGGSLRLSCAASGTIFRRLMGWYRQAPGKEREFVATISNGTSTYYADSVKGRFTISRDNAKNTVYLQMNSLKPEDTAVYYCAAAPPYTDYWDDYYTGYYPYWGQGTQVTVSS

SEQ ID NO: 15751 - protein, 117 aa, Artificial Sequence
  Chemically Synthesized
QVQLQESGGGLVQAGGSLRLSCAASGTIFPSSPMGWYRQAPGKEREFVAGITSGGTTYYADSVKGRFTISRDNAKNTVYLQMNSLKPEDTAVYYCAANQYNRDGGYWGQGTQVTVSS

SEQ ID NO: 15752 - protein, 116 aa, Artificial Sequence
  Chemically Synthesized
QVQLQESGGGLVQAGGSLRLSCAASGTIFYHCYMGWYRQAPGKEREFVASITNGGTTYYADSVKGRFTISRDNAKNTVYLQMNSLKPEDTAVYYCAFSRTVTFMYWGQGTQVTVSS

SEQ ID NO: 15753 - protein, 122 aa, Artificial Sequence
  Chemically Synthesized
QVQLQESGGGLVQAGGSLRLSCAASGSIFDRYYMGWYRQAPGKERELVATIDYGANTYYADSVKGRFTISRDNAKNTVYLQMNSLKPEDTAVYYCAVYYTDDRRAAYSYFYWGQGTQVTVSS

SEQ ID NO: 15754 - protein, 126 aa, Artificial Sequence
  Chemically Synthesized
QVQLQESGGGLVQAGGSLRLSCAASGSIFLPEYMGWYRQAPGKEREFVAGIGQGSITNYADSVKGRFTISRDNAKNTVYLQMNSLKPEDTAVYYCAVGYRQGAGEQDARWDALGYWGQGTQVTVSS

SEQ ID NO: 15755 - protein, 118 aa, Artificial Sequence
  Chemically Synthesized
QVQLQESGGGLVQAGGSLRLSCAASGSISEWPYMGWYRQAPGKERELVATIDGGTITNYADSVKGRFTISRDNAKNTVYLQMNSLKPEDTAVYYCAVVYDGRNGLYYWGQGTQVTVSS

SEQ ID NO: 15756 - protein, 117 aa, Artificial Sequence
  Chemically Synthesized
QVQLQESGGGLVQAGGSLRLSCAASGNISDQGVMGWYRQAPGKERELLPLLLTVVVPYADSVKGRFTISRDNAKNTVYLQMNSLKPEDTAVYYCAVAVPSRAEHRYWGQGTQVTVSS

SEQ ID NO: 15757 - protein, 125 aa, Artificial Sequence
  Chemically Synthesized
QVQLQESGGGLVQAGGSLRLSCAASGSIFVLDTMGWYRQAPGKERELVATIAQGSTTNYADSVKGRFTISRDNAKNTVYLQMNSLKPEDTAVYYCAVTSYNDWDDVGAFGFPLYWGQGTQVTVSS

SEQ ID NO: 15758 - protein, 118 aa, Artificial Sequence
  Chemically Synthesized
QVQLQESGGGLVQAGGSLRLSCAASGYIFIQYSMGWYRQAPGKEREFVATIAGGGITYYADSVKGRFTISRDNAKNTVYLQMNSLKPEDTAVYYCAALGGWDTTLYYWGQGTQVTVSS

SEQ ID NO: 15759 - protein, 126 aa, Artificial Sequence
  Chemically Synthesized
QVQLQESGGGLVQAGGSLRLSCAASGTISYAAVMGWYRQAPGKERELVAAIADGASTNYADSVKGRFTISRDNAKNTVYLQMNSLKPEDTAVYYCAAWANIPFIETSRTYASHGYWGQGTQVTVSS

SEQ ID NO: 15760 - protein, 118 aa, Artificial Sequence
  Chemically Synthesized
QVQLQESGGGLVQAGGSLRLSCAASGTISGYYGMGWYRQAPGKEREFVAGIDYGGTTYYADSVKGRFTISRDNAKNTVYLQMNSLKPEDTAVYYCAAIRQTAGDLDYWGQGTQVTVSS

SEQ ID NO: 15761 - protein, 115 aa, Artificial Sequence
  Chemically Synthesized
QVQLQESGGGLVQAGGSLRLSCAASGSISGNRTMGWYRQAPGKEREFVAGIGQGTTTYYADSVKGRFTISRDNAKNTVYLQMNSLKPEDTAVYYCAVDTTYFPYWGQGTQVTVSS

SEQ ID NO: 15762 - protein, 122 aa, Artificial Sequence
  Chemically Synthesized
QVQLQESGGGLVQAGGSLRLSCAASGSISDTEGMGWYRQAPGKERELVAAIADGSNTNYADSVKGRFTISRDNAKNTVYLQMNSLKPEDTAVYYCAVSPWAFGDHALAHAYWGQGTQVTVSS

SEQ ID NO: 15763 - protein, 118 aa, Artificial Sequence
  Chemically Synthesized
QVQLQESGGGLVQAGGSLRLSCAASGNISAVGGMGWYRQAPGKERELVATISVGGNTYYADSVKGRFTISRDNAKNTVYLQMNSLKPEDTAVYYCAAGDLFGGWLAYWGQGTQVTVSS

SEQ ID NO: 15764 - protein, 118 aa, Artificial Sequence
  Chemically Synthesized
QVQLQESGGGLVQAGGSLRLSCAASGSISSWYNMGWYRQAPGKERELVASINNGGITNYADSVKGRFTISRDNAKNTVYLQMNSLKPEDTAVYYCAVIDSYSQGHVYWGQGTQVTVSS

SEQ ID NO: 15765 - protein, 118 aa, Artificial Sequence
  Chemically Synthesized
QVQLQESGGGLVQAGGSLRLSCAASGNISRFYAMGWYRQAPGKERELVAAISRGTTTNYADSVKGRFTISRDNAKNTVYLQMNSLKPEDTAVYYCAAYWSPRQHYRYWGQGTQVTVSS

SEQ ID NO: 15766 - protein, 117 aa, Artificial Sequence
  Chemically Synthesized
QVQLQESGGGLVQAGGSLRLSCAASGNIFGGDAMGWYRQAPGKEREFVAGISAGTITYYADSVKGRFTISRDNAKNTVYLQMNSLKPEDTAVYYCAVTGDVLRFMYWGQGTQVTVSS

SEQ ID NO: 15767 - protein, 126 aa, Artificial Sequence
  Chemically Synthesized
QVQLQESGGGLVQAGGSLRLSCAASGNISWPYYMGWYRQAPGKERELVASISYGATTYYADSVKGRFTISRDNAKNTVYLQMNSLKPEDTAVYYCAAYWPDIDDHYYDDTYYHPYWGQGTQVTVSS

SEQ ID NO: 15768 - protein, 122 aa, Artificial Sequence
  Chemically Synthesized
QVQLQESGGGLVQAGGSLRLSCAASGTISRTAYMGWYRQAPGKEREFVAGINVGTNTNYADSVKGRFTISRDNAKNTVYLQMNSLKPEDTAVYYCAAQVDRTAPVLGWHTYWGQGTQVTVSS

SEQ ID NO: 15769 - protein, 118 aa, Artificial Sequence
  Chemically Synthesized
QVQLQESGGGLVQAGGSLRLSCAASGTISGSRVMGWYRQAPGKERELVATIDRGTITNYADSVKGRFTISRDNAKNTVYLQMNSLKPEDTAVYYCAVLYVGISPHAYWGQGTQVTVSS

SEQ ID NO: 15770 - protein, 118 aa, Artificial Sequence
  Chemically Synthesized
QVQLQESGGGLVQAGGSLRLSCAASGYISYLNFMGWYRQAPGKEREFVATIDPGATTNYADSVKGRFTISRDNAKNTVYLQMNSLKPEDTAVYYCAVLFWGWVRYYYWGQGTQVTVSS

SEQ ID NO: 15771 - protein, 118 aa, Artificial Sequence
  Chemically Synthesized
QVQLQESGGGLVQAGGSLRLSCAASGNISDGTAMGWYRQAPGKERELVAAIGRGSSTNYADSVKGRFTISRDNAKNTVYLQMNSLKPEDTAVYYCAAYIPAGSHHGYWGQGTQVTVSS

SEQ ID NO: 15772 - protein, 118 aa, Artificial Sequence
  Chemically Synthesized
QVQLQESGGGLVQAGGSLRLSCAASGNISSLYDMGWYRQAPGKEREFVASITPGTNTNYADSVKGRFTISRDNAKNTVYLQMNSLKPEDTAVYYCAAYYALEPGHHYWGQGTQVTVSS

SEQ ID NO: 15773 - protein, 121 aa, Artificial Sequence
  Chemically Synthesized
QVQLQESGGGLVQAGGSLRLSCAASGNISAYYMGWYRQAPGKEREFVAGITWGGTTNYADSVKGRFTISRDNAKNTVYLQMNSLKPEDTAVYYCAVDLGGRDDGDVKHYYWGQGTQVTVSS

SEQ ID NO: 15774 - protein, 119 aa, Artificial Sequence
  Chemically Synthesized
QVQLQESGGGLVQAGGSLRLSCAASGSIFPADYMGWYRQAPGKERELVASITDGASTYYADSVKGRFTISRDNAKNTVYLQMNSLKPEDTAVYYCAAGIYFLGLVPSYWGQGTQVTVSS

SEQ ID NO: 15775 - protein, 118 aa, Artificial Sequence
  Chemically Synthesized
QVQLQESGGGLVQAGGSLRLSCAASGTIFPTTYMGWYRQAPGKERELVASITYGGSTNYADSVKGRFTISRDNAKNTVYLQMNSLKPEDTAVYYCAVGYAYYAVFHYWGQGTQVTVSS

SEQ ID NO: 15776 - protein, 117 aa, Artificial Sequence
  Chemically Synthesized
QVQLQESGGGLVQAGGSLRLSCAASGTISDYSMGWYRQAPGKERELVAAISSGTNTNYADSVKGRFTISRDNAKNTVYLQMNSLKPEDTAVYYCAVDDYGDGPLAYWGQGTQVTVSS

SEQ ID NO: 15777 - protein, 122 aa, Artificial Sequence
  Chemically Synthesized
QVQLQESGGGLVQAGGSLRLSCAASGTISRGQYMGWYRQAPGKEREFVAGIGYGSSTNYADSVKGRFTISRDNAKNTVYLQMNSLKPEDTAVYYCAAVQVYEYRYSYYYAYWGQGTQVTVSS

SEQ ID NO: 15778 - protein, 122 aa, Artificial Sequence
  Chemically Synthesized
QVQLQESGGGLVQAGGSLRLSCAASGTISYTGFMGWYRQAPGKEREFVASIGSGASTNYADSVKGRFTISRDNAKNTVYLQMNSLKPEDTAVYYCAAYTGEYQTYNVYLNYWGQGTQVTVSS

SEQ ID NO: 15779 - protein, 118 aa, Artificial Sequence
  Chemically Synthesized
QVQLQESGGGLVQAGGSLRLSCAASGTISVAIPMGWYRQAPGKEREFVAGINIGGTTNYADSVKGRFTISRDNAKNTVYLQMNSLKPEDTAVYYCAVFDPRDPHHFYWGQGTQVTVSS

SEQ ID NO: 15780 - protein, 122 aa, Artificial Sequence
  Chemically Synthesized
QVQLQESGGGLVQAGGSLRLSCAASGYIFSNIPMGWYRQAPGKEREFVASIAYGTNTNYADSVKGRFTISRDNAKNTVYLQMNSLKPEDTAVYYCAVTYGWYYVSSYALRYWGQGTQVTVSS

SEQ ID NO: 15781 - protein, 125 aa, Artificial Sequence
  Chemically Synthesized
QVQLQESGGGLVQAGGSLRLSCAASGNIFPGIAMGWYRQAPGKEREFVAGIGAGAITNYADSVKGRFTISRDNAKNTVYLQMNSLKPEDTAVYYCAARIDRYYSRTLFTTTTFYWGQGTQVTVSS

SEQ ID NO: 15782 - protein, 118 aa, Artificial Sequence
  Chemically Synthesized
QVQLQESGGGLVQAGGSLRLSCAASGNISATGYMGWYRQAPGKERELVASISPGTNTNYADSVKGRFTISRDNAKNTVYLQMNSLKPEDTAVYYCAVGVASDYVHLYWGQGTQVTVSS

SEQ ID NO: 15783 - protein, 122 aa, Artificial Sequence
  Chemically Synthesized
QVQLQESGGGLVQAGGSLRLSCAASGNISVKYSMGWYRQAPGKERELVASIDDGATTNYADSVKGRFTISRDNAKNTVYLQMNSLKPEDTAVYYCAVERSTSVIKYVPHKYWGQGTQVTVSS

SEQ ID NO: 15784 - protein, 122 aa, Artificial Sequence
  Chemically Synthesized
QVQLQESGGGLVQAGGSLRLSCAASGTIFTNGLMGWYRQAPGKEREFVAGISDGTTTYYADSVKGRFTISRDNAKNTVYLQMNSLKPEDTAVYYCAADIHRHPPAYYPHGYWGQGTQVTVSS

SEQ ID NO: 15785 - protein, 122 aa, Artificial Sequence
  Chemically Synthesized
QVQLQESGGGLVQAGGSLRLSCAASGTIFTSEIMGWYRQAPGKERELVAGIAYGTSTYYADSVKGRFTISRDNAKNTVYLQMNSLKPEDTAVYYCAVPPNVAWSTQGALIYWGQGTQVTVSS

SEQ ID NO: 15786 - protein, 122 aa, Artificial Sequence
  Chemically Synthesized
QVQLQESGGGLVQAGGSLRLSCAASGSISQIGAMGWYRQAPGKERELVASIGQGGSTNYADSVKGRFTISRDNAKNTVYLQMNSLKPEDTAVYYCAVERGAYTRTYDYHGYWGQGTQVTVSS

SEQ ID NO: 15787 - protein, 117 aa, Artificial Sequence
  Chemically Synthesized
QVQLQESGGGLVQAGGSLRLSCAASGYILCLRMGWYRQAPGKEREFVAAIGVGTTTNYADSVKGRFTISRDNAKNTVYLQMNSLKPEDTAVYYCAAGIHFEYTLSYWGQGTQVTVSS

SEQ ID NO: 15788 - protein, 122 aa, Artificial Sequence
  Chemically Synthesized
QVQLQESGGGLVQAGGSLRLSCAASGSISTCYSMGWYRQAPGKERELVAAIAWGTTTNYADSVKGRFTISRDNAKNTVYLQMNSLKPEDTAVYYCAVIRGVYLQGDTDHYYWGQGTQVTVSS

SEQ ID NO: 15789 - protein, 118 aa, Artificial Sequence
  Chemically Synthesized
QVQLQESGGGLVQAGGSLRLSCAASGTISYLREMGWYRQAPGKERELVAAISQGTSTNYADSVKGRFTISRDNAKNTVYLQMNSLKPEDTAVYYCAVGAYFNFLFYYWGQGTQVTVSS

SEQ ID NO: 15790 - protein, 117 aa, Artificial Sequence
  Chemically Synthesized
QVQLQESGGGLVQAGGSLRLSCAASGIFLTLVMGWYRQAPGKERELVASIGPGSSTYYADSVKGRFTISRDNAKNTVYLQMNSLKPEDTAVYYCAVHGTYDRAYSYWGQGTQVTVSS

SEQ ID NO: 15791 - protein, 122 aa, Artificial Sequence
  Chemically Synthesized
QVQLQESGGGLVQAGGSLRLSCAASGNIFSDDFMGWYRQAPGKEREFVATIGGGANTYYADSVKGRFTISRDNAKNTVYLQMNSLKPEDTAVYYCAAEPFAELYLVASHYYWGQGTQVTVSS

SEQ ID NO: 15792 - protein, 111 aa, Artificial Sequence
  Chemically Synthesized
QVQLQESGGGLVQAGGSLRLSCAASGTIFHYADMGWYRQAPGKERELYGGSTYYADSVKGRFTISRDNAKNTVYLQMNSLKPEDTAVYYCAADYDYVHIYWGQGTQVTVSS

SEQ ID NO: 15793 - protein, 121 aa, Artificial Sequence
  Chemically Synthesized
QVQLQESGGGLVQAGGSLRLSCAASGYISHRSVMGWYRQAPGKEREFVAAIGYGGTTYYADSVKGRFTISRDNAKNTVYLQMNSLKPEDTAVYYCAVVDDRPSSTSSIMYWGQGTQVTVSS

SEQ ID NO: 15794 - protein, 125 aa, Artificial Sequence
  Chemically Synthesized
QVQLQESGGGLVQAGGSLRLSCAASGSIFVHYSMGWYRQAPGKERELVALLLWVVLPYADSVKGRFTISRDNAKNTVYLQMNSLKPEDTAVYYCAVADYASWAGTDYTDDDFHYWGQGTQVTVSS

SEQ ID NO: 15795 - protein, 125 aa, Artificial Sequence
  Chemically Synthesized
QVQLQESGGGLVQAGGSLRLSCAASGSISDYGDMGWYRQAPGKEREFVASIAAGGITYYADSVKGRFTISRDNAKNTVYLQMNSLKPEDTAVYYCAVSSTRVCRFVGTTVFRIYWGQGTQVTVSS

SEQ ID NO: 15796 - protein, 117 aa, Artificial Sequence
  Chemically Synthesized
QVQLQESGGGLVQAGGSLRLSCAASGNIFLSDYMGWYRQAPGKERELVAAIDSGGTTYADSVKGRFTISRDNAKNTVYLQMNSLKPEDTAVYYCAAYRFDISRFGYWGQGTQVTVSS

SEQ ID NO: 15797 - protein, 117 aa, Artificial Sequence
  Chemically Synthesized
QVQLQESGGGLVQAGGSLRLSCAASGTKMGWYRQAPGKEREFVAAIGEGGTTNYADSVKGRFTISRDNAKNTVYLQMNSLKPEDTAVYYCAAVLYDYQDQYIGHHYWGQGTQVTVSS

SEQ ID NO: 15798 - protein, 118 aa, Artificial Sequence
  Chemically Synthesized
QVQLQESGGGLVQAGGSLRLSCAASGTISRDSRMGWYRQAPGKERELVASISGGGNTNYADSVKGRFTISRDNAKNTVYLQMNSLKPEDTAVYYCAVLYQAYYYYAYWGQGTQVTVSS

SEQ ID NO: 15799 - protein, 117 aa, Artificial Sequence
  Chemically Synthesized
QVQLQESGGGLVQAGGSLRLSCAASGYISTYHDMGWYRQAPGKERELVAAISYGTTTNYADSVKGRFTISRDNAKNTVYLQMNSLKPEDTAVYYCALTTTSLSLFYWGQGTQVTVSS

SEQ ID NO: 15800 - protein, 118 aa, Artificial Sequence
  Chemically Synthesized
QVQLQESGGGLVQAGGSLRLSCAASGTISDTTDMGWYRQAPGKEREFVAGISYGGSTNYADSVKGRFTISRDNAKNTVYLQMNSLKPEDTAVYYCAVQLDRGDEHAYWGQGTQVTVSS

SEQ ID NO: 15801 - protein, 125 aa, Artificial Sequence
  Chemically Synthesized
QVQLQESGGGLVQAGGSLRLSCAASGNISAYYYMGWYRQAPGKEREFVAGISLGGTTYYADSVKGRFTISRDNAKNTVYLQMNSLKPEDTAVYYCAADYQDYGQYQYATGWHDYWGQGTQVTVSS

SEQ ID NO: 15802 - protein, 122 aa, Artificial Sequence
  Chemically Synthesized
QVQLQESGGGLVQAGGSLRLSCAASGYISASVYMGWYRQAPGKEREFVAAIGAGGSTNYADSVKGRFTISRDNAKNTVYLQMNSLKPEDTAVYYCAVDRYDSYGDYEWHVYWGQGTQVTVSS

SEQ ID NO: 15803 - protein, 122 aa, Artificial Sequence
  Chemically Synthesized
QVQLQESGGGLVQAGGSLRLSCAASGNIFAEIPMGWYRQAPGKEREFVATINLGTNTNYADSVKGRFTISRDNAKNTVYLQMNSLKPEDTAVYYCAVQDRRYSGGGAYYRYWGQGTQVTVSS

SEQ ID NO: 15804 - protein, 118 aa, Artificial Sequence
  Chemically Synthesized
QVQLQESGGGLVQAGGSLRLSCAASGNIFDIRYMGWYRQAPGKERELVAGIAGGGSTNYADSVKGRFTISRDNAKNTVYLQMNSLKPEDTAVYYCAAIRGPRFRYYYWGQGTQVTVSS

SEQ ID NO: 15805 - protein, 126 aa, Artificial Sequence
  Chemically Synthesized
QVQLQESGGGLVQAGGSLRLSCAASGTIFALLVMGWYRQAPGKERELVASIGVGGNTNYADSVKGRFTISRDNAKNTVYLQMNSLKPEDTAVYYCAVGVGYLGDYLFDTSGRHYYWGQGTQVTVSS

SEQ ID NO: 15806 - protein, 126 aa, Artificial Sequence
  Chemically Synthesized
QVQLQESGGGLVQAGGSLRLSCAASGSIFWSASMGWYRQAPGKEREFVATIAYGTSTYYADSVKGRFTISRDNAKNTVYLQMNSLKPEDTAVYYCAVRTYTVTDNVSDTGDTYGYWGQGTQVTVSS

SEQ ID NO: 15807 - protein, 122 aa, Artificial Sequence
  Chemically Synthesized
QVQLQESGGGLVQAGGSLRLSCAASGTIFYVYYMGWYRQAPGKERELVATITSGSNTYYADSVKGRFTISRDNAKNTVYLQMNSLKPEDTAVYYCAAVRGGQRRYGYYHVYWGQGTQVTVSS

SEQ ID NO: 15808 - protein, 126 aa, Artificial Sequence
  Chemically Synthesized
QVQLQESGGGLVQAGGSLRLSCAASGSISDPGYMGWYRQAPGKEREFVASIGTGGNTNYADSVKGRFTISRDNAKNTVYLQMNSLKPEDTAVYYCAAVWATFGGQRAQRAGYHGYWGQGTQVTVSS

SEQ ID NO: 15809 - protein, 118 aa, Artificial Sequence
  Chemically Synthesized
QVQLQESGGGLVQAGGSLRLSCAASGTISVYVTMGWYRQAPGKEREFVAAINKGANTNYADSVKGRFTISRDNAKNTVYLQMNSLKPEDTAVYYCAALNVDEPWHYYWGQGTQVTVSS

SEQ ID NO: 15810 - protein, 121 aa, Artificial Sequence
  Chemically Synthesized
QVQLQESGGGLVQAGGSLRLSCAASGTISHYYLMGWYRQAPGKERELVATITYGGSTNYADSVKGRFTISRDNAKNTVYLQMNSLKPEDTAVYYCAVRSWARGYYVDYDYWGQGTQVTVSS

SEQ ID NO: 15811 - protein, 118 aa, Artificial Sequence
  Chemically Synthesized
QVQLQESGGGLVQAGGSLRLSCAASGSISTYVEMGWYRQAPGKEREFVASIAHGASTYYADSVKGRFTISRDNAKNTVYLQMNSLKPEDTAVYYCAATVPIAEVYYYWGQGTQVTVSS

SEQ ID NO: 15812 - protein, 122 aa, Artificial Sequence
  Chemically Synthesized
QVQLQESGGGLVQAGGSLRLSCAASGTISYGITMGWYRQAPGKERELVAGIAVGTTTNYADSVKGRFTISRDNAKNTVYLQMNSLKPEDTAVYYCAVYVNGGYRYSREHVYWGQGTQVTVSS

SEQ ID NO: 15813 - protein, 118 aa, Artificial Sequence
  Chemically Synthesized
QVQLQESGGGLVQAGGSLRLSCAASGSISDRGYMGWYRQAPGKEREFVAAIGGGSTTYYADSVKGRFTISRDNAKNTVYLQMNSLKPEDTAVYYCAVLAVPTRRLAYWGQGTQVTVSS

SEQ ID NO: 15814 - protein, 111 aa, Artificial Sequence
  Chemically Synthesized
QVQLQESGGGLVQAGGSLRLSCAASGYIFVVQWMGWYRQAPGKERELVASIDDGTTTYADSVKGRFTISRDNAKNTVYLQMNSLKPEDTAVYYCAYALYYWGQGTQVTVSS

SEQ ID NO: 15815 - protein, 121 aa, Artificial Sequence
  Chemically Synthesized
QVQLQESGGGLVQAGGSLRLSCAASGYISTEDYMGWYRQAPGKERELVAGIGVGATTYYADSVKGRFTISRDNAKNTVYLQMNSLKPEDTAVYYCAATTYPSRYETESLYWGQGTQVTVSS

SEQ ID NO: 15816 - protein, 118 aa, Artificial Sequence
  Chemically Synthesized
QVQLQESGGGLVQAGGSLRLSCAASGNISGRFAMGWYRQAPGKERELVATIDYGAITYYADSVKGRFTISRDNAKNTVYLQMNSLKPEDTAVYYCAAPLKGWSEHYYWGQGTQVTVSS

SEQ ID NO: 15817 - protein, 114 aa, Artificial Sequence
  Chemically Synthesized
QVQLQESGGGLVQAGGSLRLSCAASGTIFYDYAMGWYRQAPGKEREFVAGIELPYADSVKGRFTISRDNAKNTVYLQMNSLKPEDTAVYYCAAYDETTSRFAYWGQGTQVTVSS

SEQ ID NO: 15818 - protein, 122 aa, Artificial Sequence
  Chemically Synthesized
QVQLQESGGGLVQAGGSLRLSCAASGTIFYGDIMGWYRQAPGKERELVATIDNGGNTYYADSVKGRFTISRDNAKNTVYLQMNSLKPEDTAVYYCAVYYYDVKTGTGYLVYWGQGTQVTVSS

SEQ ID NO: 15819 - protein, 118 aa, Artificial Sequence
  Chemically Synthesized
QVQLQESGGGLVQAGGSLRLSCAASGNISRATIMGWYRQAPGKEREFVATIDPGTSTYYADSVKGRFTISRDNAKNTVYLQMNSLKPEDTAVYYCAAGTSPGDPHWYWGQGTQVTVSS

SEQ ID NO: 15820 - protein, 122 aa, Artificial Sequence
  Chemically Synthesized
QVQLQESGGGLVQAGGSLRLSCAASGTIFYQGYMGWYRQAPGKERELVAAINYGATTYYADSVKGRFTISRDNAKNTVYLQMNSLKPEDTAVYYCAATRYWTKIAYYRHGYWGQGTQVTVSS

SEQ ID NO: 15821 - protein, 121 aa, Artificial Sequence
  Chemically Synthesized
QVQLQESGGGLVQAGGSLRLSCAASGLFLCTVMGWYRQAPGKERELVAAINYGSTTYYADSVKGRFTISRDNAKNTVYLQMNSLKPEDTAVYYCAVTDTLVYPGERSLDYWGQGTQVTVSS

SEQ ID NO: 15822 - protein, 118 aa, Artificial Sequence
  Chemically Synthesized
QVQLQESGGGLVQAGGSLRLSCAASGTIFYSGLMGWYRQAPGKERELVAAISAGAITYYADSVKGRFTISRDNAKNTVYLQMNSLKPEDTAVYYCAAITDYGGSFSYWGQGTQVTVSS

SEQ ID NO: 15823 - protein, 116 aa, Artificial Sequence
  Chemically Synthesized
QVQLQESGGGLVQAGGSLRLSCAASGYISYNSLMGWYRQAPGKEREFVAGINSVLLPYADSVKGRFTISRDNAKNTVYLQMNSLKPEDTAVYYCAVTCLTLLFLYWGQGTQVTVSS

SEQ ID NO: 15824 - protein, 118 aa, Artificial Sequence
  Chemically Synthesized
QVQLQESGGGLVQAGGSLRLSCAASGTIFGRTNMGWYRQAPGKEREFVAGITLGTNTYYADSVKGRFTISRDNAKNTVYLQMNSLKPEDTAVYYCAAGGRLVGLHYYWGQGTQVTVSS

SEQ ID NO: 15825 - protein, 118 aa, Artificial Sequence
  Chemically Synthesized
QVQLQESGGGLVQAGGSLRLSCAASGYIFGRTRMGWYRQAPGKEREFVAAIGYGGNTYYADSVKGRFTISRDNAKNTVYLQMNSLKPEDTAVYYCAAYWDVLALLYYWGQGTQVTVSS

SEQ ID NO: 15826 - protein, 118 aa, Artificial Sequence
  Chemically Synthesized
QVQLQESGGGLVQAGGSLRLSCAASGYISPLGAMGWYRQAPGKEREFVAGIDIGAITNYADSVKGRFTISRDNAKNTVYLQMNSLKPEDTAVYYCAAVSSRRGYHGYWGQGTQVTVSS

SEQ ID NO: 15827 - protein, 118 aa, Artificial Sequence
  Chemically Synthesized
QVQLQESGGGLVQAGGSLRLSCAASGYIFVHDPMGWYRQAPGKEREFVAAIAQGATTNYADSVKGRFTISRDNAKNTVYLQMNSLKPEDTAVYYCAALYFQDRWHVYWGQGTQVTVSS

SEQ ID NO: 15828 - protein, 125 aa, Artificial Sequence
  Chemically Synthesized
QVQLQESGGGLVQAGGSLRLSCAASGSILLTLMGWYRQAPGKEREFVAGIGTGASTNYADSVKGRFTISRDNAKNTVYLQMNSLKPEDTAVYYCAARRHDYAPRIDVRRLYHHYWGQGTQVTVSS

SEQ ID NO: 15829 - protein, 118 aa, Artificial Sequence
  Chemically Synthesized
QVQLQESGGGLVQAGGSLRLSCAASGNISGYSAMGWYRQAPGKEREFVAGIAIGGTTNYADSVKGRFTISRDNAKNTVYLQMNSLKPEDTAVYYCAAVALYLPHFYYWGQGTQVTVSS

SEQ ID NO: 15830 - protein, 122 aa, Artificial Sequence
  Chemically Synthesized
QVQLQESGGGLVQAGGSLRLSCAASGNISGNIRMGWYRQAPGKERELVAAINVGTNTNYADSVKGRFTISRDNAKNTVYLQMNSLKPEDTAVYYCAAVAYRHGPSDGWFAYWGQGTQVTVSS

SEQ ID NO: 15831 - protein, 117 aa, Artificial Sequence
  Chemically Synthesized
QVQLQESGGGLVQAGGSLRLSCAASGNISYTFMGWYRQAPGKERELVASISYGGTTNYADSVKGRFTISRDNAKNTVYLQMNSLKPEDTAVYYCAANYGYGVWLYYWGQGTQVTVSS

SEQ ID NO: 15832 - protein, 120 aa, Artificial Sequence
  Chemically Synthesized
QVQLQESGGGLVQAGGSLRLSCAASGNIFRPGMGWYRQAPGKEREFVPLLVLVLLPYADSVKGRFTISRDNAKNTVYLQMNSLKPEDTAVYYCAVYETVIDRDDRDYAYWGQGTQVTVSS

SEQ ID NO: 15833 - protein, 126 aa, Artificial Sequence
  Chemically Synthesized
QVQLQESGGGLVQAGGSLRLSCAASGTIFGSNVMGWYRQAPGKEREFVASIGVGASTYYADSVKGRFTISRDNAKNTVYLQMNSLKPEDTAVYYCAALQDLYDDHAISYNATHTYWGQGTQVTVSS

SEQ ID NO: 15834 - protein, 118 aa, Artificial Sequence
  Chemically Synthesized
QVQLQESGGGLVQAGGSLRLSCAASGTISSDYVMGWYRQAPGKEREFVAAINSGANTNYADSVKGRFTISRDNAKNTVYLQMNSLKPEDTAVYYCAALRISYAFHYYWGQGTQVTVSS

SEQ ID NO: 15835 - protein, 122 aa, Artificial Sequence
  Chemically Synthesized
QVQLQESGGGLVQAGGSLRLSCAASGSISAYTVMGWYRQAPGKERELVAGIDWGSITYYADSVKGRFTISRDNAKNTVYLQMNSLKPEDTAVYYCAVYDVSGISNEFAYPYWGQGTQVTVSS

SEQ ID NO: 15836 - protein, 126 aa, Artificial Sequence
  Chemically Synthesized
QVQLQESGGGLVQAGGSLRLSCAASGSISAYRTMGWYRQAPGKERELVAGINAGAITNYADSVKGRFTISRDNAKNTVYLQMNSLKPEDTAVYYCAVDAWHKQDASVRNRYPHTYWGQGTQVTVSS

SEQ ID NO: 15837 - protein, 122 aa, Artificial Sequence
  Chemically Synthesized
QVQLQESGGGLVQAGGSLRLSCAASGNISVELYMGWYRQAPGKERELVAAIGRGGITNYADSVKGRFTISRDNAKNTVYLQMNSLKPEDTAVYYCAVYADRIGEVRYHYTYWGQGTQVTVSS

SEQ ID NO: 15838 - protein, 118 aa, Artificial Sequence
  Chemically Synthesized
QVQLQESGGGLVQAGGSLRLSCAASGTISPLEFMGWYRQAPGKERELVAGINRGASTNYADSVKGRFTISRDNAKNTVYLQMNSLKPEDTAVYYCAALKHSTSWFPYWGQGTQVTVSS

SEQ ID NO: 15839 - protein, 118 aa, Artificial Sequence
  Chemically Synthesized
QVQLQESGGGLVQAGGSLRLSCAASGNISRIDRMGWYRQAPGKEREFVAAITGGGITNYADSVKGRFTISRDNAKNTVYLQMNSLKPEDTAVYYCAALGYLDFWHYYWGQGTQVTVSS

SEQ ID NO: 15840 - protein, 118 aa, Artificial Sequence
  Chemically Synthesized
QVQLQESGGGLVQAGGSLRLSCAASGYIFYPSQMGWYRQAPGKERELVAAIDDGGTTYYADSVKGRFTISRDNAKNTVYLQMNSLKPEDTAVYYCAAPPDAYVDHTYWGQGTQVTVSS

SEQ ID NO: 15841 - protein, 122 aa, Artificial Sequence
  Chemically Synthesized
QVQLQESGGGLVQAGGSLRLSCAASGNIFRPQVMGWYRQAPGKEREFVASINLGATTNYADSVKGRFTISRDNAKNTVYLQMNSLKPEDTAVYYCAVPPNPGDGGGDGYDYWGQGTQVTVSS

SEQ ID NO: 15842 - protein, 118 aa, Artificial Sequence
  Chemically Synthesized
QVQLQESGGGLVQAGGSLRLSCAASGNISGPSLMGWYRQAPGKEREFVAAINDGAITNYADSVKGRFTISRDNAKNTVYLQMNSLKPEDTAVYYCAAIARRDIHHYYWGQGTQVTVSS

SEQ ID NO: 15843 - protein, 120 aa, Artificial Sequence
  Chemically Synthesized
QVQLQESGGGLVQAGGSLRLSCAASGTISWRGTMGWYRQAPGKERELLPLLMLVLIPYADSVKGRFTISRDNAKNTVYLQMNSLKPEDTAVYYCAALSRVLTVFGVTMYWGQGTQVTVSS

SEQ ID NO: 15844 - protein, 117 aa, Artificial Sequence
  Chemically Synthesized
QVQLQESGGGLVQAGGSLRLSCAASGTIFRTPDMGWYRQAPGKEREFVATINGGTTNYADSVKGRFTISRDNAKNTVYLQMNSLKPEDTAVYYCAVLPYSSDPFPYWGQGTQVTVSS

SEQ ID NO: 15845 - protein, 118 aa, Artificial Sequence
  Chemically Synthesized
QVQLQESGGGLVQAGGSLRLSCAASGTISIDYFMGWYRQAPGKEREFVAGIAQGTSTYYADSVKGRFTISRDNAKNTVYLQMNSLKPEDTAVYYCAAYGWVGGGHTYWGQGTQVTVSS

SEQ ID NO: 15846 - protein, 122 aa, Artificial Sequence
  Chemically Synthesized
QVQLQESGGGLVQAGGSLRLSCAASGNISGYDLMGWYRQAPGKEREFVAGIGYGTITYYADSVKGRFTISRDNAKNTVYLQMNSLKPEDTAVYYCAVGNYDQLASSGRYDYWGQGTQVTVSS

SEQ ID NO: 15847 - protein, 118 aa, Artificial Sequence
  Chemically Synthesized
QVQLQESGGGLVQAGGSLRLSCAASGTIFGYWSMGWYRQAPGKERELVATINRGAITNYADSVKGRFTISRDNAKNTVYLQMNSLKPEDTAVYYCAVVRYKYTGHRYWGQGTQVTVSS

SEQ ID NO: 15848 - protein, 118 aa, Artificial Sequence
  Chemically Synthesized
QVQLQESGGGLVQAGGSLRLSCAASGSIFRTDDMGWYRQAPGKERELVATITRGSTTYYADSVKGRFTISRDNAKNTVYLQMNSLKPEDTAVYYCAAHAPITHRHVYWGQGTQVTVSS

SEQ ID NO: 15849 - protein, 122 aa, Artificial Sequence
  Chemically Synthesized
QVQLQESGGGLVQAGGSLRLSCAASGTIFHFFLMGWYRQAPGKERELVATIGGGTNTNYADSVKGRFTISRDNAKNTVYLQMNSLKPEDTAVYYCAARYDTYVEGQDTFDYWGQGTQVTVSS

SEQ ID NO: 15850 - protein, 122 aa, Artificial Sequence
  Chemically Synthesized
QVQLQESGGGLVQAGGSLRLSCAASGNIFLRGVMGWYRQAPGKERELVASITTGSTTNYADSVKGRFTISRDNAKNTVYLQMNSLKPEDTAVYYCAALWYDQDYYYQFHYYWGQGTQVTVSS

SEQ ID NO: 15851 - protein, 118 aa, Artificial Sequence
  Chemically Synthesized
QVQLQESGGGLVQAGGSLRLSCAASGTIFGRIVMGWYRQAPGKEREFVATIALGGSTYYADSVKGRFTISRDNAKNTVYLQMNSLKPEDTAVYYCAAYEHRGYHLYYWGQGTQVTVSS

SEQ ID NO: 15852 - protein, 122 aa, Artificial Sequence
  Chemically Synthesized
QVQLQESGGGLVQAGGSLRLSCAASGTISPVTNMGWYRQAPGKEREFVAGIGYGGNTNYADSVKGRFTISRDNAKNTVYLQMNSLKPEDTAVYYCAVWRYSVGWIPYRYPYWGQGTQVTVSS

SEQ ID NO: 15853 - protein, 118 aa, Artificial Sequence
  Chemically Synthesized
QVQLQESGGGLVQAGGSLRLSCAASGSISYLDGMGWYRQAPGKEREFVAAITAGTSTNYADSVKGRFTISRDNAKNTVYLQMNSLKPEDTAVYYCAAYTHVYRYLSYWGQGTQVTVSS

SEQ ID NO: 15854 - protein, 121 aa, Artificial Sequence
  Chemically Synthesized
QVQLQESGGGLVQAGGSLRLSCAASGTISFDADMGWYRQAPGKERELVAAISIGSSTNYADSVKGRFTISRDNAKNTVYLQMNSLKPEDTAVYYCAVDSIVQWGGSLLMYWGQGTQVTVSS

SEQ ID NO: 15855 - protein, 126 aa, Artificial Sequence
  Chemically Synthesized
QVQLQESGGGLVQAGGSLRLSCAASGTIFLNATMGWYRQAPGKEREFVAAIARGATTNYADSVKGRFTISRDNAKNTVYLQMNSLKPEDTAVYYCAALDRGTKVQDPYPRYLHYYWGQGTQVTVSS

SEQ ID NO: 15856 - protein, 118 aa, Artificial Sequence
  Chemically Synthesized
QVQLQESGGGLVQAGGSLRLSCAASGSIFDDVYMGWYRQAPGKEREFVASIARGTTYYADSVKGRFTISRDNAKNTVYLQMNSLKPEDTAVYYCAVGIGWNVIHLLYWGQGTQVTVSS

SEQ ID NO: 15857 - protein, 116 aa, Artificial Sequence
  Chemically Synthesized
QVQLQESGGGLVQAGGSLRLSCAASGTIFRYYMGWYRQAPGKEREFVASIGPGANTNYADSVKGRFTISRDNAKNTVYLQMNSLKPEDTAVYYCAVGTTYDTAFYWGQGTQVTVSS

SEQ ID NO: 15858 - protein, 129 aa, Artificial Sequence
  Chemically Synthesized
QVQLQESGGGLVQAGGSLRLSCAASGTISSDSCMGWYRQAPGKEREFVASIDRGTTTNYADSVKGRFTISRDNAKNTVYLQMNSLKPEDTAVYYCAAPDIATDLYPYDSRGGYITFRYWGQGTQVTVSS

SEQ ID NO: 15859 - protein, 122 aa, Artificial Sequence
  Chemically Synthesized
QVQLQESGGGLVQAGGSLRLSCAASGTIFPVTYMGWYRQAPGKERELVASIGEGGNTYYADSVKGRFTISRDNAKNTVYLQMNSLKPEDTAVYYCAVQDNAWDYALLDYYYWGQGTQVTVSS

SEQ ID NO: 15860 - protein, 126 aa, Artificial Sequence
  Chemically Synthesized
QVQLQESGGGLVQAGGSLRLSCAASGYIFDHAVMGWYRQAPGKEREFVAGISGGATTNYADSVKGRFTISRDNAKNTVYLQMNSLKPEDTAVYYCAALEHGVSYRTATTDYVHYYWGQGTQVTVSS

SEQ ID NO: 15861 - protein, 118 aa, Artificial Sequence
  Chemically Synthesized
QVQLQESGGGLVQAGGSLRLSCAASGNISPAYTMGWYRQAPGKERELVASIDGGASTYYADSVKGRFTISRDNAKNTVYLQMNSLKPEDTAVYYCAAFGFYPSDHPYWGQGTQVTVSS

SEQ ID NO: 15862 - protein, 118 aa, Artificial Sequence
  Chemically Synthesized
QVQLQESGGGLVQAGGSLRLSCAASGTIFPHASMGWYRQAPGKERELVAAINDGTNTYYADSVKGRFTISRDNAKNTVYLQMNSLKPEDTAVYYCAAVWYEAFWHYYWGQGTQVTVSS

SEQ ID NO: 15863 - protein, 118 aa, Artificial Sequence
  Chemically Synthesized
QVQLQESGGGLVQAGGSLRLSCAASGSISGKDNMGWYRQAPGKEREFVAGINGGGITNYADSVKGRFTISRDNAKNTVYLQMNSLKPEDTAVYYCAALHFDDHRLWYWGQGTQVTVSS

SEQ ID NO: 15864 - protein, 118 aa, Artificial Sequence
  Chemically Synthesized
QVQLQESGGGLVQAGGSLRLSCAASGYIFGTWQMGWYRQAPGKEREFVASIGDGSSTNYADSVKGRFTISRDNAKNTVYLQMNSLKPEDTAVYYCAVVRRVKPFHYYWGQGTQVTVSS

SEQ ID NO: 15865 - protein, 118 aa, Artificial Sequence
  Chemically Synthesized
QVQLQESGGGLVQAGGSLRLSCAASGSIFDQDRMGWYRQAPGKERELVAGIGPGTITYYADSVKGRFTISRDNAKNTVYLQMNSLKPEDTAVYYCAVITYRDYYHYYWGQGTQVTVSS

SEQ ID NO: 15866 - protein, 118 aa, Artificial Sequence
  Chemically Synthesized
QVQLQESGGGLVQAGGSLRLSCAASGYISVRSYMGWYRQAPGKEREFVAGITPGSTTNYADSVKGRFTISRDNAKNTVYLQMNSLKPEDTAVYYCAVIILQHRYLHYWGQGTQVTVSS

SEQ ID NO: 15867 - protein, 118 aa, Artificial Sequence
  Chemically Synthesized
QVQLQESGGGLVQAGGSLRLSCAASGTISTSIVMGWYRQAPGKEREFVAGINRGGTTYYADSVKGRFTISRDNAKNTVYLQMNSLKPEDTAVYYCAALRYTGSYFYYWGQGTQVTVSS

SEQ ID NO: 15868 - protein, 122 aa, Artificial Sequence
  Chemically Synthesized
QVQLQESGGGLVQAGGSLRLSCAASGNIFNTSTMGWYRQAPGKEREFVASIDGGSITYYADSVKGRFTISRDNAKNTVYLQMNSLKPEDTAVYYCAAIDKFVTSGYGYHYYWGQGTQVTVSS

SEQ ID NO: 15869 - protein, 126 aa, Artificial Sequence
  Chemically Synthesized
QVQLQESGGGLVQAGGSLRLSCAASGYISVTDDMGWYRQAPGKERELVASITYGTTTNYADSVKGRFTISRDNAKNTVYLQMNSLKPEDTAVYYCAVTYAAQVGKGPYYWYLYDYWGQGTQVTVSS

SEQ ID NO: 15870 - protein, 118 aa, Artificial Sequence
  Chemically Synthesized
QVQLQESGGGLVQAGGSLRLSCAASGTIFYWYPMGWYRQAPGKEREFVAAITVGSITNYADSVKGRFTISRDNAKNTVYLQMNSLKPEDTAVYYCAVKLSRRFSHTYWGQGTQVTVSS

SEQ ID NO: 15871 - protein, 122 aa, Artificial Sequence
  Chemically Synthesized
QVQLQESGGGLVQAGGSLRLSCAASGSIFPYATMGWYRQAPGKEREFVATIGFGSTTNYADSVKGRFTISRDNAKNTVYLQMNSLKPEDTAVYYCAAVYYALWPFGGHHFYWGQGTQVTVSS

SEQ ID NO: 15872 - protein, 124 aa, Artificial Sequence
  Chemically Synthesized
QVQLQESGGGLVQAGGSLRLSCAASGSIFDRLSMGWYRQAPGKEREFVASIGTGGNTNYADSVKGRFTISRDNAKNTVYLQMNSLKPEDTAVYYCAALLYYVKRTDANIDFFYWGQGTQVTVSS

SEQ ID NO: 15873 - protein, 122 aa, Artificial Sequence
  Chemically Synthesized
QVQLQESGGGLVQAGGSLRLSCAASGTISRPSAMGWYRQAPGKEREFVAGIGTGAITNYADSVKGRFTISRDNAKNTVYLQMNSLKPEDTAVYYCAALYSDAKRGTDPFWYWGQGTQVTVSS

SEQ ID NO: 15874 - protein, 122 aa, Artificial Sequence
  Chemically Synthesized
QVQLQESGGGLVQAGGSLRLSCAASGNISYYRGMGWYRQAPGKEREFVATIARGSNTNYADSVKGRFTISRDNAKNTVYLQMNSLKPEDTAVYYCAVVLYSYGNYQGWHSYWGQGTQVTVSS

SEQ ID NO: 15875 - protein, 118 aa, Artificial Sequence
  Chemically Synthesized
QVQLQESGGGLVQAGGSLRLSCAASGNIFDRWYMGWYRQAPGKEREFVATINDGASTNYADSVKGRFTISRDNAKNTVYLQMNSLKPEDTAVYYCAVIYRYSPFHYYWGQGTQVTVSS

SEQ ID NO: 15876 - protein, 117 aa, Artificial Sequence
  Chemically Synthesized
QVQLQESGGGLVQAGGSLRLSCAASGTISIRLYMGWYRQAPGKEREFVATIGTGGNTNYADSVKGRFTISRDNAKNTVYLQMNSLKPEDTAVYYCAAVDQSSYLYYWGQGTQVTVSS

SEQ ID NO: 15877 - protein, 118 aa, Artificial Sequence
  Chemically Synthesized
QVQLQESGGGLVQAGGSLRLSCAASGSISFLQYMGWYRQAPGKEREFVAAINTGSSTNYADSVKGRFTISRDNAKNTVYLQMNSLKPEDTAVYYCAALWLQSGHHYYWGQGTQVTVSS

SEQ ID NO: 15878 - protein, 121 aa, Artificial Sequence
  Chemically Synthesized
QVQLQESGGGLVQAGGSLRLSCAASGNIPDAYMGWYRQAPGKEREFVAAIDDGTNTNYADSVKGRFTISRDNAKNTVYLQMNSLKPEDTAVYYCAAVYRQHLRYRQYHYYWGQGTQVTVSS

SEQ ID NO: 15879 - protein, 127 aa, Artificial Sequence
  Chemically Synthesized
QVQLQESGGGLVQAGGSLRLSCAASGNIFVYKYTMGWYRQAPGKERELVAGIGVGATTYYADSVKGRFTISRDNAKNTVYLQMNSLKPEDTAVYYCAVYRWFQRGSSDDDKTDLYYWGQGTQVTVSS

SEQ ID NO: 15880 - protein, 121 aa, Artificial Sequence
  Chemically Synthesized
QVQLQESGGGLVQAGGSLRLSCAASGNISPHRTMGWYRQAPGKEREFVAGISSGGNTYYADSVKGRFTISRDNAKNTVYLQMNSLKPEDTAVYYCAVSLTLVRTLRSTMYWGQGTQVTVSS

SEQ ID NO: 15881 - protein, 118 aa, Artificial Sequence
  Chemically Synthesized
QVQLQESGGGLVQAGGSLRLSCAASGYIFYYSWMGWYRQAPGKERELVAAISFGTITYYADSVKGRFTISRDNAKNTVYLQMNSLKPEDTAVYYCAADIIYPSLYGYWGQGTQVTVSS

SEQ ID NO: 15882 - protein, 121 aa, Artificial Sequence
  Chemically Synthesized
QVQLQESGGGLVQAGGSLRLSCAASGTIFPGYEMGWYRQAPGKERELVAAIGPGATTNYADSVKGRFTISRDNAKNTVYLQMNSLKPEDTAVYYCAVYSYQLYWYSLLLYWGQGTQVTVSS

SEQ ID NO: 15883 - protein, 125 aa, Artificial Sequence
  Chemically Synthesized
QVQLQESGGGLVQAGGSLRLSCAASGNISSRAAMGWYRQAPGKEREFVAAINRGSNTNYADSVKGRFTISRDNAKNTVYLQMNSLKPEDTAVYYCAAYDRTRNVYGGTYLYHGYWGQGTQVTVSS

SEQ ID NO: 15884 - protein, 126 aa, Artificial Sequence
  Chemically Synthesized
QVQLQESGGGLVQAGGSLRLSCAASGNIFYQSPMGWYRQAPGKEREFVASITGGTITNYADSVKGRFTISRDNAKNTVYLQMNSLKPEDTAVYYCAADDDPTPDTRYYQPEYYSYWGQGTQVTVSS

SEQ ID NO: 15885 - protein, 118 aa, Artificial Sequence
  Chemically Synthesized
QVQLQESGGGLVQAGGSLRLSCAASGSISPQAGMGWYRQAPGKEREFVAAITVGSSTNYADSVKGRFTISRDNAKNTVYLQMNSLKPEDTAVYYCAAVWYADTLLWYWGQGTQVTVSS

SEQ ID NO: 15886 - protein, 122 aa, Artificial Sequence
  Chemically Synthesized
QVQLQESGGGLVQAGGSLRLSCAASGNISYRWTMGWYRQAPGKEREFVAGIGVGGTTNYADSVKGRFTISRDNAKNTVYLQMNSLKPEDTAVYYCAALRPQRADTWYYHYYWGQGTQVTVSS

SEQ ID NO: 15887 - protein, 118 aa, Artificial Sequence
  Chemically Synthesized
QVQLQESGGGLVQAGGSLRLSCAASGNISSPSVMGWYRQAPGKEREFVAAISPGASTYYADSVKGRFTISRDNAKNTVYLQMNSLKPEDTAVYYCAAIDRVRRAFYYWGQGTQVTVSS

SEQ ID NO: 15888 - protein, 118 aa, Artificial Sequence
  Chemically Synthesized
QVQLQESGGGLVQAGGSLRLSCAASGTIFYDLGMGWYRQAPGKEREFVATIGDGASTYYADSVKGRFTISRDNAKNTVYLQMNSLKPEDTAVYYCAANRPRYLNFTYWGQGTQVTVSS

SEQ ID NO: 15889 - protein, 118 aa, Artificial Sequence
  Chemically Synthesized
QVQLQESGGGLVQAGGSLRLSCAASGSIFGLKGMGWYRQAPGKEREFVATIAYGANTNYADSVKGRFTISRDNAKNTVYLQMNSLKPEDTAVYYCAAVRYYLTWYWYWGQGTQVTVSS

SEQ ID NO: 15890 - protein, 118 aa, Artificial Sequence
  Chemically Synthesized
QVQLQESGGGLVQAGGSLRLSCAASGYISQVYKMGWYRQAPGKEREFVAGIDGGSSTNYADSVKGRFTISRDNAKNTVYLQMNSLKPEDTAVYYCAVIPNIRATLHYWGQGTQVTVSS

SEQ ID NO: 15891 - protein, 114 aa, Artificial Sequence
  Chemically Synthesized
QVQLQESGGGLVQAGGSLRLSCAASGTIFTAPGMGWYRQAPGKERELVAGINAGSITNYADSVKGRFTISRDNAKNTVYLQMNSLKPEDTAVYYCAAYAQYDYWGQGTQVTVSS

SEQ ID NO: 15892 - protein, 118 aa, Artificial Sequence
  Chemically Synthesized
QVQLQESGGGLVQAGGSLRLSCAASGNISGPYIMGWYRQAPGKEREFVATINGGGSTNYADSVKGRFTISRDNAKNTVYLQMNSLKPEDTAVYYCAVLSYYVYYYYYWGQGTQVTVSS

SEQ ID NO: 15893 - protein, 118 aa, Artificial Sequence
  Chemically Synthesized
QVQLQESGGGLVQAGGSLRLSCAASGSISGRHYMGWYRQAPGKEREFVAGISDGSITNYADSVKGRFTISRDNAKNTVYLQMNSLKPEDTAVYYCAVLFHEGWWHYYWGQGTQVTVSS

SEQ ID NO: 15894 - protein, 122 aa, Artificial Sequence
  Chemically Synthesized
QVQLQESGGGLVQAGGSLRLSCAASGSIFDFYIMGWYRQAPGKERELVAAIGDGSTTYYADSVKGRFTISRDNAKNTVYLQMNSLKPEDTAVYYCAAALYAYDDTGDTHYYWGQGTQVTVSS

SEQ ID NO: 15895 - protein, 118 aa, Artificial Sequence
  Chemically Synthesized
QVQLQESGGGLVQAGGSLRLSCAASGTIFSILRMGWYRQAPGKERELVATINSGSITNYADSVKGRFTISRDNAKNTVYLQMNSLKPEDTAVYYCAVYASYDDSYRYWGQGTQVTVSS

SEQ ID NO: 15896 - protein, 118 aa, Artificial Sequence
  Chemically Synthesized
QVQLQESGGGLVQAGGSLRLSCAASGSISYPGVMGWYRQAPGKERELVAGIGDGSSTNYADSVKGRFTISRDNAKNTVYLQMNSLKPEDTAVYYCAVLYKNNKYLWYWGQGTQVTVSS

SEQ ID NO: 15897 - protein, 126 aa, Artificial Sequence
  Chemically Synthesized
QVQLQESGGGLVQAGGSLRLSCAASGTISIYHYMGWYRQAPGKEREFVATIDIGASTYYADSVKGRFTISRDNAKNTVYLQMNSLKPEDTAVYYCAAVPGDQQLDATQYANDFVYWGQGTQVTVSS

SEQ ID NO: 15898 - protein, 118 aa, Artificial Sequence
  Chemically Synthesized
QVQLQESGGGLVQAGGSLRLSCAASGYIFDPWIMGWYRQAPGKERELVAAIDRGSTTYYADSVKGRFTISRDNAKNTVYLQMNSLKPEDTAVYYCAATADPIYYYYYWGQGTQVTVSS

SEQ ID NO: 15899 - protein, 122 aa, Artificial Sequence
  Chemically Synthesized
QVQLQESGGGLVQAGGSLRLSCAASGTISTLVGMGWYRQAPGKEREFVAGIDRGGITNYADSVKGRFTISRDNAKNTVYLQMNSLKPEDTAVYYCAAIYRGPAYDPYLLSYWGQGTQVTVSS

SEQ ID NO: 15900 - protein, 122 aa, Artificial Sequence
  Chemically Synthesized
QVQLQESGGGLVQAGGSLRLSCAASGSIFHGYSMGWYRQAPGKEREFVATIASGASTNYADSVKGRFTISRDNAKNTVYLQMNSLKPEDTAVYYCAAIQAYIPGNDTWHYYWGQGTQVTVSS

SEQ ID NO: 15901 - protein, 122 aa, Artificial Sequence
  Chemically Synthesized
QVQLQESGGGLVQAGGSLRLSCAASGYISSISTMGWYRQAPGKEREFVAGIATGAITNYADSVKGRFTISRDNAKNTVYLQMNSLKPEDTAVYYCAALGLGNNRVGPRHYYWGQGTQVTVSS

SEQ ID NO: 15902 - protein, 118 aa, Artificial Sequence
  Chemically Synthesized
QVQLQESGGGLVQAGGSLRLSCAASGSIFPLNIMGWYRQAPGKEREFVASINSGASTNYADSVKGRFTISRDNAKNTVYLQMNSLKPEDTAVYYCAALRYHTKWYGYWGQGTQVTVSS

SEQ ID NO: 15903 - protein, 122 aa, Artificial Sequence
  Chemically Synthesized
QVQLQESGGGLVQAGGSLRLSCAASGYISRAGVMGWYRQAPGKEREFVAAINAGATTNYADSVKGRFTISRDNAKNTVYLQMNSLKPEDTAVYYCAAVDVKTRYYDRFLSYWGQGTQVTVSS

SEQ ID NO: 15904 - protein, 118 aa, Artificial Sequence
  Chemically Synthesized
QVQLQESGGGLVQAGGSLRLSCAASGSISQRYVMGWYRQAPGKEREFVAGINPGTTTYYADSVKGRFTISRDNAKNTVYLQMNSLKPEDTAVYYCAVVTKPNPYHYYWGQGTQVTVSS

SEQ ID NO: 15905 - protein, 126 aa, Artificial Sequence
  Chemically Synthesized
QVQLQESGGGLVQAGGSLRLSCAASGTISRYKDMGWYRQAPGKEREFVATIAAGAITNYADSVKGRFTISRDNAKNTVYLQMNSLKPEDTAVYYCAVTQYLGVRGGLFGHFNHDYWGQGTQVTVSS

SEQ ID NO: 15906 - protein, 118 aa, Artificial Sequence
  Chemically Synthesized
QVQLQESGGGLVQAGGSLRLSCAASGNISGALWMGWYRQAPGKEREFVASIAFGGSTNYADSVKGRFTISRDNAKNTVYLQMNSLKPEDTAVYYCAVIYDRYYALVYWGQGTQVTVSS

SEQ ID NO: 15907 - protein, 118 aa, Artificial Sequence
  Chemically Synthesized
QVQLQESGGGLVQAGGSLRLSCAASGSISYGPAMGWYRQAPGKERELVASIGPGGNTYYADSVKGRFTISRDNAKNTVYLQMNSLKPEDTAVYYCAADDRQYDWLRYWGQGTQVTVSS

SEQ ID NO: 15908 - protein, 116 aa, Artificial Sequence
  Chemically Synthesized
QVQLQESGGGLVQAGGSLRLSCAASGLFLTTFMGWYRQAPGKEREFVATIDGGTNTYYADSVKGRFTISRDNAKNTVYLQMNSLKPEDTAVYYCAVSLFTLTSIYWGQGTQVTVSS

SEQ ID NO: 15909 - protein, 122 aa, Artificial Sequence
  Chemically Synthesized
QVQLQESGGGLVQAGGSLRLSCAASGSISRGYRMGWYRQAPGKERELVAGITYGSTTYYADSVKGRFTISRDNAKNTVYLQMNSLKPEDTAVYYCAAGYWPLFLDSIRHRYWGQGTQVTVSS

SEQ ID NO: 15910 - protein, 118 aa, Artificial Sequence
  Chemically Synthesized
QVQLQESGGGLVQAGGSLRLSCAASGSIFPRYAMGWYRQAPGKEREFVATIDDGTTTNYADSVKGRFTISRDNAKNTVYLQMNSLKPEDTAVYYCAAIYYRYGWYDYWGQGTQVTVSS

SEQ ID NO: 15911 - protein, 126 aa, Artificial Sequence
  Chemically Synthesized
QVQLQESGGGLVQAGGSLRLSCAASGNISIGYTMGWYRQAPGKEREFVAAIGVGGSTNYADSVKGRFTISRDNAKNTVYLQMNSLKPEDTAVYYCAAVDFGNDGLRAASTRYLYYWGQGTQVTVSS

SEQ ID NO: 15912 - protein, 118 aa, Artificial Sequence
  Chemically Synthesized
QVQLQESGGGLVQAGGSLRLSCAASGNIFRAATMGWYRQAPGKERELVATITIGSNTYYADSVKGRFTISRDNAKNTVYLQMNSLKPEDTAVYYCAAVLEVVRRLPYWGQGTQVTVSS

SEQ ID NO: 15913 - protein, 122 aa, Artificial Sequence
  Chemically Synthesized
QVQLQESGGGLVQAGGSLRLSCAASGNIFTPSGMGWYRQAPGKERELVAAINFGTNTNYADSVKGRFTISRDNAKNTVYLQMNSLKPEDTAVYYCAALYTYYNRGKVYYWYWGQGTQVTVSS

SEQ ID NO: 15914 - protein, 115 aa, Artificial Sequence
  Chemically Synthesized
QVQLQESGGGLVQAGGSLRLSCAASGYIFWNHDMGWYRQAPGKEREFVATIADGSSTNYADSVKGRFTISRDNAKNTVYLQMNSLKPEDTAVYYCAAYVGTYRYWGQGTQVTVSS

SEQ ID NO: 15915 - protein, 118 aa, Artificial Sequence
  Chemically Synthesized
QVQLQESGGGLVQAGGSLRLSCAASGTIFRDYGMGWYRQAPGKEREFVAGITLGSNTYYADSVKGRFTISRDNAKNTVYLQMNSLKPEDTAVYYCAAKPFYLQTHDYWGQGTQVTVSS

SEQ ID NO: 15916 - protein, 122 aa, Artificial Sequence
  Chemically Synthesized
QVQLQESGGGLVQAGGSLRLSCAASGNIFRIGGMGWYRQAPGKEREFVATISAGGSTYYADSVKGRFTISRDNAKNTVYLQMNSLKPEDTAVYYCAVRGHWGYYYGRVHPYWGQGTQVTVSS

SEQ ID NO: 15917 - protein, 118 aa, Artificial Sequence
  Chemically Synthesized
QVQLQESGGGLVQAGGSLRLSCAASGNIFADHIMGWYRQAPGKERELVAAINGGSTTNYADSVKGRFTISRDNAKNTVYLQMNSLKPEDTAVYYCAAVSWYAPYHYYWGQGTQVTVSS

SEQ ID NO: 15918 - protein, 117 aa, Artificial Sequence
  Chemically Synthesized
QVQLQESGGGLVQAGGSLRLSCAASGNISDGRSMGWYRQAPGKEREFVAAIDIGAITNYADSVKGRFTISRDNAKNTVYLQMNSLKPEDTAVYYCAADINEPYIIYWGQGTQVTVSS

SEQ ID NO: 15919 - protein, 118 aa, Artificial Sequence
  Chemically Synthesized
QVQLQESGGGLVQAGGSLRLSCAASGYISYDVGMGWYRQAPGKERELVASIADGASTNYADSVKGRFTISRDNAKNTVYLQMNSLKPEDTAVYYCAARTAGYHLHLYWGQGTQVTVSS

SEQ ID NO: 15920 - protein, 117 aa, Artificial Sequence
  Chemically Synthesized
QVQLQESGGGLVQAGGSLRLSCAASGSISGQRSMGWYRQAPGKEREFVASIAYGTITNYADSVKGRFTISRDNAKNTVYLQMNSLKPEDTAVYYCAVSTTRVTVIYWGQGTQVTVSS

SEQ ID NO: 15921 - protein, 121 aa, Artificial Sequence
  Chemically Synthesized
QVQLQESGGGLVQAGGSLRLSCAASGSISYSDIMGWYRQAPGKERELVASITFGATTNYADSVKGRFTISRDNAKNTVYLQMNSLKPEDTAVYYCAAAQPYGLYDSLVIYWGQGTQVTVSS

SEQ ID NO: 15922 - protein, 116 aa, Artificial Sequence
  Chemically Synthesized
QVQLQESGGGLVQAGGSLRLSCAASGTIFGSLMGWYRQAPGKEREFVATIAYGASTNYADSVKGRFTISRDNAKNTVYLQMNSLKPEDTAVYYCAANSSVRRLSYWGQGTQVTVSS

SEQ ID NO: 15923 - protein, 110 aa, Artificial Sequence
  Chemically Synthesized
QVQLQESGGGLVQAGGSLRLSCAASGTIFPIGTMGWYRQAPGKEREFVAAITLGASTYYADSVKGRFTISRDNAKNTVYLQMNSLKPEDTAVYYCATLYWGQGTQVTVSS

SEQ ID NO: 15924 - protein, 122 aa, Artificial Sequence
  Chemically Synthesized
QVQLQESGGGLVQAGGSLRLSCAASGNISYPAYMGWYRQAPGKERELVASITPGGNTYYADSVKGRFTISRDNAKNTVYLQMNSLKPEDTAVYYCAVQWDGQPLVDNYHVYWGQGTQVTVSS

SEQ ID NO: 15925 - protein, 117 aa, Artificial Sequence
  Chemically Synthesized
QVQLQESGGGLVQAGGSLRLSCAASGSIFPDDYMGWYRQAPGKEREFVATIDDGTSTNYADSVKGRFTISRDNAKNTVYLQMNSLKPEDTAVYYCAVSVGNRLGMYWGQGTQVTVSS

SEQ ID NO: 15926 - protein, 122 aa, Artificial Sequence
  Chemically Synthesized
QVQLQESGGGLVQAGGSLRLSCAASGYIFQRTIMGWYRQAPGKEREFVATITHGANTNYADSVKGRFTISRDNAKNTVYLQMNSLKPEDTAVYYCAAPFGVPYIYYLNHTYWGQGTQVTVSS

SEQ ID NO: 15927 - protein, 117 aa, Artificial Sequence
  Chemically Synthesized
QVQLQESGGGLVQAGGSLRLSCAASGTISLLDYMGWYRQAPGKEREFATIDIGANTNYADSVKGRFTISRDNAKNTVYLQMNSLKPEDTAVYYCAADYYYRTPYGYWGQGTQVTVSS

SEQ ID NO: 15928 - protein, 118 aa, Artificial Sequence
  Chemically Synthesized
QVQLQESGGGLVQAGGSLRLSCAASGSIFTAAIMGWYRQAPGKERELVAAIGNGTTTYYADSVKGRFTISRDNAKNTVYLQMNSLKPEDTAVYYCAVRFGRRLSHEYWGQGTQVTVSS

SEQ ID NO: 15929 - protein, 112 aa, Artificial Sequence
  Chemically Synthesized
QVQLQESGGGLVQAGGSLRLSCAASGYISDNYDMGWYRQAPGKEREFVASINAGSITNYADSVKGRFTISRDNAKNTVYLQMNSLKPEDTAVYYCAVRTMYWGQGTQVTVSS

SEQ ID NO: 15930 - protein, 125 aa, Artificial Sequence
  Chemically Synthesized
QVQLQESGGGLVQAGGSLRLSCAASGYFLVTTMGWYRQAPGKEREFVAAITTGSTTNYADSVKGRFTISRDNAKNTVYLQMNSLKPEDTAVYYCAAPAANVVDLDGYKLYILDYWGQGTQVTVSS

SEQ ID NO: 15931 - protein, 121 aa, Artificial Sequence
  Chemically Synthesized
QVQLQESGGGLVQAGGSLRLSCAASGSISVDAYMGWYRQAPGKEREFVAAIDGGANTYYADSVKGRFTISRDNAKNTVYLQMNSLKPEDTAVYYCAAYNRIDNLDADHHYWGQGTQVTVSS

SEQ ID NO: 15932 - protein, 118 aa, Artificial Sequence
  Chemically Synthesized
QVQLQESGGGLVQAGGSLRLSCAASGNIFRDGSMGWYRQAPGKERELVAAIGPGSSTYYADSVKGRFTISRDNAKNTVYLQMNSLKPEDTAVYYCAATNYDYGWLQYWGQGTQVTVSS

SEQ ID NO: 15933 - protein, 121 aa, Artificial Sequence
  Chemically Synthesized
QVQLQESGGGLVQAGGSLRLSCAASGYFLPAVMGWYRQAPGKERELVATIGYGAITYYADSVKGRFTISRDNAKNTVYLQMNSLKPEDTAVYYCAVAKRYDKESLPEHYYWGQGTQVTVSS

SEQ ID NO: 15934 - protein, 117 aa, Artificial Sequence
  Chemically Synthesized
QVQLQESGGGLVQAGGSLRLSCAASGSIFGFDNMGWYRQAPGKERELVAAINGGGITNYADSVKGRFTISRDNAKNTVYLQMNSLKPEDTAVYYCAAGARSHLLCYWGQGTQVTVSS

SEQ ID NO: 15935 - protein, 118 aa, Artificial Sequence
  Chemically Synthesized
QVQLQESGGGLVQAGGSLRLSCAASGNIFDVQYMGWYRQAPGKEREFVAAIDSGTNTYYADSVKGRFTISRDNAKNTVYLQMNSLKPEDTAVYYCAVTPQGVDDHAYWGQGTQVTVSS

SEQ ID NO: 15936 - protein, 126 aa, Artificial Sequence
  Chemically Synthesized
QVQLQESGGGLVQAGGSLRLSCAASGNISWPSVMGWYRQAPGKEREFVAGIDIGGNTYYADSVKGRFTISRDNAKNTVYLQMNSLKPEDTAVYYCAVGVDITSRINQINQYALRYWGQGTQVTVSS

SEQ ID NO: 15937 - protein, 111 aa, Artificial Sequence
  Chemically Synthesized
QVQLQESGGGLVQAGGSLRLSCAASGNIFQDSRMGWYRQAPGKERELVAGIGRGSITYYADSVKGRFTISRDNAKNTVYLQMNSLKPEDTAVYYCATHGYWGQGTQVTVSS

SEQ ID NO: 15938 - protein, 111 aa, Artificial Sequence
  Chemically Synthesized
QVQLQESGGGLVQAGGSLRLSCAASGSISQRPRMGWYRQAPGKERELVAGIDVGSNTYYADSVKGRFTISRDNAKNTVYLQMNSLKPEDTAVYYCAVFFYWGQGTQVTVSS

SEQ ID NO: 15939 - protein, 111 aa, Artificial Sequence
  Chemically Synthesized
QVQLQESGGGLVQAGGSLRLSCAASGTISGPQRMGWYRQAPGKERELVAGIDVGSSTYYADSVKGRFTISRDNAKNTVYLQMNSLKPEDTAVYYCATHGYWGQGTQVTVSS

SEQ ID NO: 15940 - protein, 111 aa, Artificial Sequence
  Chemically Synthesized
QVQLQESGGGLVQAGGSLRLSCAASGNIFQDSRMGWYRQAPGKERELVAGIGRGSITYYADSVKGRFTISRDNAKNTVYLQMNSLKPEDTAVYYCAVEGYWGQGTQVTVSS

SEQ ID NO: 15941 - protein, 111 aa, Artificial Sequence
  Chemically Synthesized
QVQLQESGGGLVQAGGSLRLSCAASGTISGPQRMGWYRQAPGKERELVAGIGRGSITYYADSVKGRFTISRDNAKNTVYLQMNSLKPEDTAVYYCAVFFYWGQGTQVTVSS

SEQ ID NO: 15942 - protein, 111 aa, Artificial Sequence
  Chemically Synthesized
QVQLQESGGGLVQAGGSLRLSCAASGNIFQDSRMGWYRQAPGKERELVAGIGRGSITYYADSVKGRFTISRDNAKNTVYLQMNSLKPEDTAVYYCAAAFYWGQGTQVTVSS

SEQ ID NO: 15943 - protein, 111 aa, Artificial Sequence
  Chemically Synthesized
QVQLQESGGGLVQAGGSLRLSCAASGNIFQDSRMGWYRQAPGKERELVAGIDVGGNTYYADSVKGRFTISRDNAKNTVYLQMNSLKPEDTAVYYCATHGYWGQGTQVTVSS

SEQ ID NO: 15944 - protein, 111 aa, Artificial Sequence
  Chemically Synthesized
QVQLQESGGGLVQAGGSLRLSCAASGTISGPQRMGWYRQAPGKERELVAGIDVGSSTYYADSVKGRFTISRDNAKNTVYLQMNSLKPEDTAVYYCAYHQYWGQGTQVTVSS

SEQ ID NO: 15945 - protein, 111 aa, Artificial Sequence
  Chemically Synthesized
QVQLQESGGGLVQAGGSLRLSCAASGSISQRPRMGWYRQAPGKERELVAGIDVGSNTYYADSVKGRFTISRDNAKNTVYLQMNSLKPEDTAVYYCAIRYYWGQGTQVTVSS

SEQ ID NO: 15946 - protein, 111 aa, Artificial Sequence
  Chemically Synthesized
QVQLQESGGGLVQAGGSLRLSCAASGNISPPVKMGWYRQAPGKERELVAGIDYGSNTYYADSVKGRFTISRDNAKNTVYLQMNSLKPEDTAVYYCATHGYWGQGTQVTVSS

SEQ ID NO: 15947 - protein, 110 aa, Artificial Sequence
  Chemically Synthesized
QVQLQESGGGLVQAGGSLRLSCAASGSISPYRMGWYRQAPGKERELVAGIDRGSSTYYADSVKGRFTISRDNAKNTVYLQMNSLKPEDTAVYYCAIRYYWGQGTQVTVSS

SEQ ID NO: 15948 - protein, 111 aa, Artificial Sequence
  Chemically Synthesized
QVQLQESGGGLVQAGGSLRLSCAASGSISDFRRMGWYRQAPGKERELVAGIDNGGNTYYADSVKGRFTISRDNAKNTVYLQMNSLKPEDTAVYYCAVFFYWGQGTQVTVSS

SEQ ID NO: 15949 - protein, 111 aa, Artificial Sequence
  Chemically Synthesized
QVQLQESGGGLVQAGGSLRLSCAASGSISDFRRMGWYRQAPGKERELVAGIDNGGNTYYADSVKGRFTISRDNAKNTVYLQMNSLKPEDTAVYYCATHGYWGQGTQVTVSS

SEQ ID NO: 15950 - protein, 110 aa, Artificial Sequence
  Chemically Synthesized
QVQLQESGGGLVQAGGSLRLSCAASGSISPYRMGWYRQAPGKERELVAGIDRGSSTYYADSVKGRFTISRDNAKNTVYLQMNSLKPEDTAVYYCATHGYWGQGTQVTVSS

SEQ ID NO: 15951 - protein, 111 aa, Artificial Sequence
  Chemically Synthesized
QVQLQESGGGLVQAGGSLRLSCAASGNIFQDSRMGWYRQAPGKERELVAGIDVGSSTYYADSVKGRFTISRDNAKNTVYLQMNSLKPEDTAVYYCAIRYYWGQGTQVTVSS

SEQ ID NO: 15952 - protein, 111 aa, Artificial Sequence
  Chemically Synthesized
QVQLQESGGGLVQAGGSLRLSCAASGNISPPVKMGWYRQAPGKERELVAGIDYGSNTYYADSVKGRFTISRDNAKNTVYLQMNSLKPEDTAVYYCAYHQYWGQGTQVTVSS

SEQ ID NO: 15953 - protein, 111 aa, Artificial Sequence
  Chemically Synthesized
QVQLQESGGGLVQAGGSLRLSCAASGSISQRPRMGWYRQAPGKERELVAGIDVGGNTYYADSVKGRFTISRDNAKNTVYLQMNSLKPEDTAVYYCATHGYWGQGTQVTVSS

SEQ ID NO: 15954 - protein, 111 aa, Artificial Sequence
  Chemically Synthesized
QVQLQESGGGLVQAGGSLRLSCAASGSISQRPRMGWYRQAPGKERELVAGIDVGSNTYYADSVKGRFTISRDNAKNTVYLQMNSLKPEDTAVYYCAAYQYWGQGTQVTVSS

SEQ ID NO: 15955 - protein, 111 aa, Artificial Sequence
  Chemically Synthesized
QVQLQESGGGLVQAGGSLRLSCAASGSISDFRRMGWYRQAPGKERELVAGIDNGGNTYYADSVKGRFTISRDNAKNTVYLQMNSLKPEDTAVYYCAYHQYWGQGTQVTVSS

SEQ ID NO: 15956 - protein, 111 aa, Artificial Sequence
  Chemically Synthesized
QVQLQESGGGLVQAGGSLRLSCAASGTIFDAYRMGWYRQAPGKERELVAGIDVGSSTYYADSVKGRFTISRDNAKNTVYLQMNSLKPEDTAVYYCAIRYYWGQGTQVTVSS

SEQ ID NO: 15957 - protein, 111 aa, Artificial Sequence
  Chemically Synthesized
QVQLQESGGGLVQAGGSLRLSCAASGSISQRPRMGWYRQAPGKERELVAGIDVGSSTYYADSVKGRFTISRDNAKNTVYLQMNSLKPEDTAVYYCAIRYYWGQGTQVTVSS

SEQ ID NO: 15958 - protein, 111 aa, Artificial Sequence
  Chemically Synthesized
QVQLQESGGGLVQAGGSLRLSCAASGTISNRGRMGWYRQAPGKERELVAGIDSGANTYYADSVKGRFTISRDNAKNTVYLQMNSLKPEDTAVYYCAQHGYWGQGTQVTVSS

SEQ ID NO: 15959 - protein, 111 aa, Artificial Sequence
  Chemically Synthesized
QVQLQESGGGLVQAGGSLRLSCAASGTISQPYRMGWYRQAPGKERELVAGIDQGSNTYYADSVKGRFTISRDNAKNTVYLQMNSLKPEDTAVYYCAVFFYWGQGTQVTVSS

SEQ ID NO: 15960 - protein, 115 aa, Artificial Sequence
  Chemically Synthesized
QVQLQESGGGLVQAGGSLRLSCAASGSISALVMGWYRQAPGKERELVVLLPYADSVKGRFTISRDNAKNTVYLQMNSLKPEDTAVYYCAAVEYFYLYDYVVYDYWGQGTQVTVSS

SEQ ID NO: 15961 - protein, 117 aa, Artificial Sequence
  Chemically Synthesized
QVQLQESGGGLVQAGGSLRLSCAASGYISFNGRMGWYRQAPGKEREFVAAIADGGSTNYADSVKGRFTISRDNAKNTVYLQMNSLKPEDTAVYYCAVTVLSILPSYWGQGTQVTVSS

SEQ ID NO: 15962 - protein, 112 aa, Artificial Sequence
  Chemically Synthesized
QVQLQESGGGLVQAGGSLRLSCAASGTIFAFGTMGWYRQAPGKEREFVAGIDRGGNTYYADSVKGRFTISRDNAKNTVYLQMNSLKPEDTAVYYCAVDHDYWGQGTQVTVSS

SEQ ID NO: 15963 - protein, 120 aa, Artificial Sequence
  Chemically Synthesized
QVQLQESGGGLVQAGGSLRLSCAASGTIFRDYPMGWYRQAPGKERELVASIGYGSSTYYADSVKGRFTISRDNAKNTVYLQMNSLKPEDTAVYYCAVGDGEGSWLGLIYWGQGTQVTVSS

SEQ ID NO: 15964 - protein, 122 aa, Artificial Sequence
  Chemically Synthesized
QVQLQESGGGLVQAGGSLRLSCAASGYIFFVLPMGWYRQAPGKEREFVAAIAYGANTYYADSVKGRFTISRDNAKNTVYLQMNSLKPEDTAVYYCAVPFGYTGRGYIEHVYWGQGTQVTVSS

SEQ ID NO: 15965 - protein, 118 aa, Artificial Sequence
  Chemically Synthesized
QVQLQESGGGLVQAGGSLRLSCAASGSISDVYSMGWYRQAPGKERELVAAIAYGATTNYADSVKGRFTISRDNAKNTVYLQMNSLKPEDTAVYYCAVAETYNDGFDYWGQGTQVTVSS

SEQ ID NO: 15966 - protein, 118 aa, Artificial Sequence
  Chemically Synthesized
QVQLQESGGGLVQAGGSLRLSCAASGSIFDFSAMGWYRQAPGKERELVASINLGGSTYYADSVKGRFTISRDNAKNTVYLQMNSLKPEDTAVYYCAVSGPRRGVLVYWGQGTQVTVSS

SEQ ID NO: 15967 - protein, 122 aa, Artificial Sequence
  Chemically Synthesized
QVQLQESGGGLVQAGGSLRLSCAASGYISLTPNMGWYRQAPGKERELVAGINYGGSTNYADSVKGRFTISRDNAKNTVYLQMNSLKPEDTAVYYCAANGGYQYYDPVGHLYWGQGTQVTVSS

SEQ ID NO: 15968 - protein, 126 aa, Artificial Sequence
  Chemically Synthesized
QVQLQESGGGLVQAGGSLRLSCAASGNIFQHNVMGWYRQAPGKEREFVAAIDQGGNTYYADSVKGRFTISRDNAKNTVYLQMNSLKPEDTAVYYCAVGYRQQRGSDFYDFLNLTYWGQGTQVTVSS

SEQ ID NO: 15969 - protein, 122 aa, Artificial Sequence
  Chemically Synthesized
QVQLQESGGGLVQAGGSLRLSCAASGTIFYTDYMGWYRQAPGKERELVASISLGGSTNYADSVKGRFTISRDNAKNTVYLQMNSLKPEDTAVYYCAAQGYRTYYYYGDFPYWGQGTQVTVSS

SEQ ID NO: 15970 - protein, 117 aa, Artificial Sequence
  Chemically Synthesized
QVQLQESGGGLVQAGGSLRLSCAASGNISQFEDMGWYRQAPGKERELVAAINYGTITYYADSVKGRFTISRDNAKNTVYLQMNSLKPEDTAVYYCAVQGYNDYHGYWGQGTQVTVSS

SEQ ID NO: 15971 - protein, 110 aa, Artificial Sequence
  Chemically Synthesized
QVQLQESGGGLVQAGGSLRLSCAASGSISYRRTMGWYRQAPGKERERSTNYADSVKGRFTISRDNAKNTVYLQMNSLKPEDTAVYYCAASRIVDRNYVYWGQGTQVTVSS

SEQ ID NO: 15972 - protein, 126 aa, Artificial Sequence
  Chemically Synthesized
QVQLQESGGGLVQAGGSLRLSCAASGYIFSDTAMGWYRQAPGKEREFVATIDAGGITNYADSVKGRFTISRDNAKNTVYLQMNSLKPEDTAVYYCAAVRDSPPAQWVYPLTGFVYWGQGTQVTVSS

SEQ ID NO: 15973 - protein, 118 aa, Artificial Sequence
  Chemically Synthesized
QVQLQESGGGLVQAGGSLRLSCAASGNISRYFDMGWYRQAPGKERELVASIADGGTTNYADSVKGRFTISRDNAKNTVYLQMNSLKPEDTAVYYCAVGFRYRDRLLYWGQGTQVTVSS

SEQ ID NO: 15974 - protein, 117 aa, Artificial Sequence
  Chemically Synthesized
QVQLQESGGGLVQAGGSLRLSCAASGTIFPRRYMGWYRQAPGKEREFVATIGDGANTYYADSVKGRFTISRDNAKNTVYLQMNSLKPEDTAVYYCAASTVTTTSIYWGQGTQVTVSS

SEQ ID NO: 15975 - protein, 122 aa, Artificial Sequence
  Chemically Synthesized
QVQLQESGGGLVQAGGSLRLSCAASGTIFDYNNMGWYRQAPGKERELVASIGAGSNTNYADSVKGRFTISRDNAKNTVYLQMNSLKPEDTAVYYCAVRETKYGHDYSAFPYWGQGTQVTVSS

SEQ ID NO: 15976 - protein, 122 aa, Artificial Sequence
  Chemically Synthesized
QVQLQESGGGLVQAGGSLRLSCAASGSISNVLDMGWYRQAPGKEREFVAAISYGTSTNYADSVKGRFTISRDNAKNTVYLQMNSLKPEDTAVYYCAAISRYRRDGTDDHTYWGQGTQVTVSS

SEQ ID NO: 15977 - protein, 118 aa, Artificial Sequence
  Chemically Synthesized
QVQLQESGGGLVQAGGSLRLSCAASGSISTYTYMGWYRQAPGKERELVAGIGAGGNTYYADSVKGRFTISRDNAKNTVYLQMNSLKPEDTAVYYCAASPNGQNRLFYWGQGTQVTVSS

SEQ ID NO: 15978 - protein, 122 aa, Artificial Sequence
  Chemically Synthesized
QVQLQESGGGLVQAGGSLRLSCAASGNIFRGVYMGWYRQAPGKEREFVAGIGVGSNTNYADSVKGRFTISRDNAKNTVYLQMNSLKPEDTAVYYCAAYRWYGPSRGVPYDYWGQGTQVTVSS

SEQ ID NO: 15979 - protein, 118 aa, Artificial Sequence
  Chemically Synthesized
QVQLQESGGGLVQAGGSLRLSCAASGTISRRQYMGWYRQAPGKERELVAAISGGSITYYADSVKGRFTISRDNAKNTVYLQMNSLKPEDTAVYYCAVQSPYGLRLSYWGQGTQVTVSS

SEQ ID NO: 15980 - protein, 124 aa, Artificial Sequence
  Chemically Synthesized
QVQLQESGGGLVQAGGSLRLSCAASGSISDVKGMGWYRQAPGKEREFVASIDWGGTTNYADSVKGRFTISRDNAKNTVYLQMNSLKPEDTAVYYCAVSTGDWYEIPSDGWLQYWGQGTQVTVSS

SEQ ID NO: 15981 - protein, 115 aa, Artificial Sequence
  Chemically Synthesized
QVQLQESGGGLVQAGGSLRLSCAASGSISYYGVMGWYRQAPGKERELVATIAPGATTNYADSVKGRFTISRDNAKNTVYLQMNSLKPEDTAVYYCAVSYLPYIYWGQGTQVTVSS

SEQ ID NO: 15982 - protein, 117 aa, Artificial Sequence
  Chemically Synthesized
QVQLQESGGGLVQAGGSLRLSCAASGTIFHLGRMGWYRQAPGKERELVAGIAGGASTNYADSVKGRFTISRDNAKNTVYLQMNSLKPEDTAVYYCAVLEVESLSIYWGQGTQVTVSS

SEQ ID NO: 15983 - protein, 122 aa, Artificial Sequence
  Chemically Synthesized
QVQLQESGGGLVQAGGSLRLSCAASGSISWIGDMGWYRQAPGKERELVAGINNGASTYYADSVKGRFTISRDNAKNTVYLQMNSLKPEDTAVYYCAAYAPIPDYGGGTYDYWGQGTQVTVSS

SEQ ID NO: 15984 - protein, 117 aa, Artificial Sequence
  Chemically Synthesized
QVQLQESGGGLVQAGGSLRLSCAASGNISDCRMGWYRQAPGKERELVASIGVGSITYYADSVKGRFTISRDNAKNTVYLQMNSLKPEDTAVYYCAVDYGPGSPHGYWGQGTQVTVSS

SEQ ID NO: 15985 - protein, 115 aa, Artificial Sequence
  Chemically Synthesized
QVQLQESGGGLVQAGGSLRLSCAASGTISSGSYMGWYRQAPGKERELVAGIARGTTTNYADSVKGRFTISRDNAKNTVYLQMNSLKPEDTAVYYCAHDPPDLYYWGQGTQVTVSS

SEQ ID NO: 15986 - protein, 122 aa, Artificial Sequence
  Chemically Synthesized
QVQLQESGGGLVQAGGSLRLSCAASGTISAYGVMGWYRQAPGKEREFVAAIGAGGTTNYADSVKGRFTISRDNAKNTVYLQMNSLKPEDTAVYYCAARSAGTGINDPPLSYWGQGTQVTVSS

SEQ ID NO: 15987 - protein, 118 aa, Artificial Sequence
  Chemically Synthesized
QVQLQESGGGLVQAGGSLRLSCAASGSISDGRYMGWYRQAPGKERELVAAISLGATTNYADSVKGRFTISRDNAKNTVYLQMNSLKPEDTAVYYCAAYYDSRLYFVYWGQGTQVTVSS

SEQ ID NO: 15988 - protein, 118 aa, Artificial Sequence
  Chemically Synthesized
QVQLQESGGGLVQAGGSLRLSCAASGNIFKSIVMGWYRQAPGKEREFVAGIGNGASTYYADSVKGRFTISRDNAKNTVYLQMNSLKPEDTAVYYCAAGYGDIDAHAYWGQGTQVTVSS

SEQ ID NO: 15989 - protein, 125 aa, Artificial Sequence
  Chemically Synthesized
QVQLQESGGGLVQAGGSLRLSCAASGTISYSSVMGWYRQAPGKEREFVASITTGGTPYADSVKGRFTISRDNAKNTVYLQMNSLKPEDTAVYYCAVDWFGYNYRSVDEDVDYDYWGQGTQVTVSS

SEQ ID NO: 15990 - protein, 126 aa, Artificial Sequence
  Chemically Synthesized
QVQLQESGGGLVQAGGSLRLSCAASGTISWSGDMGWYRQAPGKERELVAAINVGGITYYADSVKGRFTISRDNAKNTVYLQMNSLKPEDTAVYYCAVDYILPVPSGSLFYYSHVYWGQGTQVTVSS

SEQ ID NO: 15991 - protein, 126 aa, Artificial Sequence
  Chemically Synthesized
QVQLQESGGGLVQAGGSLRLSCAASGYIFGYGKMGWYRQAPGKERELVASISYGGSTYYADSVKGRFTISRDNAKNTVYLQMNSLKPEDTAVYYCAADSRYYWHTGDLRDHYHSYWGQGTQVTVSS

SEQ ID NO: 15992 - protein, 126 aa, Artificial Sequence
  Chemically Synthesized
QVQLQESGGGLVQAGGSLRLSCAASGTIFDDYYMGWYRQAPGKEREFVAAITYGSNTNYADSVKGRFTISRDNAKNTVYLQMNSLKPEDTAVYYCAVGYDVRYRRISYQEGGHTYWGQGTQVTVSS

SEQ ID NO: 15993 - protein, 119 aa, Artificial Sequence
  Chemically Synthesized
QVQLQESGGGLVQAGGSLRLSCAASGITTLMGWYRQAPGKERELVASIGRGGTTTNYADSVKGRFTISRDNAKNTVYLQMNSLKPEDTAVYYCAVAISVSGTCTLLMYWGQGTQVTVSS

SEQ ID NO: 15994 - protein, 118 aa, Artificial Sequence
  Chemically Synthesized
QVQLQESGGGLVQAGGSLRLSCAASGSIFDGDTMGWYRQAPGKEREFVATIGDGGSTNYADSVKGRFTISRDNAKNTVYLQMNSLKPEDTAVYYCAVNYVTFTSHSYWGQGTQVTVSS

SEQ ID NO: 15995 - protein, 117 aa, Artificial Sequence
  Chemically Synthesized
QVQLQESGGGLVQAGGSLRLSCAASGYISTYSMGWYRQAPGKEREFVATIAEGTNTNYADSVKGRFTISRDNAKNTVYLQMNSLKPEDTAVYYCAAYRVPVGVFDYWGQGTQVTVSS

SEQ ID NO: 15996 - protein, 118 aa, Artificial Sequence
  Chemically Synthesized
QVQLQESGGGLVQAGGSLRLSCAASGNIFTPFYMGWYRQAPGKEREFVAAISYGSTTNYADSVKGRFTISRDNAKNTVYLQMNSLKPEDTAVYYCAVRSNIRAALIYWGQGTQVTVSS

SEQ ID NO: 15997 - protein, 118 aa, Artificial Sequence
  Chemically Synthesized
QVQLQESGGGLVQAGGSLRLSCAASGYIFGYDIMGWYRQAPGKEREFVATIAAGTITNYADSVKGRFTISRDNAKNTVYLQMNSLKPEDTAVYYCAVNDSLRTRVMYWGQGTQVTVSS

SEQ ID NO: 15998 - protein, 118 aa, Artificial Sequence
  Chemically Synthesized
QVQLQESGGGLVQAGGSLRLSCAASGNISDIIEMGWYRQAPGKERELVASIATGTNTYYADSVKGRFTISRDNAKNTVYLQMNSLKPEDTAVYYCAVTYYVSNDYWYWGQGTQVTVSS

SEQ ID NO: 15999 - protein, 122 aa, Artificial Sequence
  Chemically Synthesized
QVQLQESGGGLVQAGGSLRLSCAASGNISYPFIMGWYRQAPGKERELVATINTGGSTNYADSVKGRFTISRDNAKNTVYLQMNSLKPEDTAVYYCAVDRDVTRSYDAWHHYWGQGTQVTVSS

SEQ ID NO: 16000 - protein, 113 aa, Artificial Sequence
  Chemically Synthesized
QVQLQESGGGLVQAGGSLRLSCAASGSISWRTDMGWYRQAPGKEREFVAGITAGGITYYADSVKGRFTISRDNAKNTVYLQMNSLKPEDTAVYYCAVRDFYYWGQGTQVTVSS

SEQ ID NO: 16001 - protein, 118 aa, Artificial Sequence
  Chemically Synthesized
QVQLQESGGGLVQAGGSLRLSCAASGNISDYYVMGWYRQAPGKERELVASIDVGGNTYYADSVKGRFTISRDNAKNTVYLQMNSLKPEDTAVYYCAVPRVYVGLLVYWGQGTQVTVSS

SEQ ID NO: 16002 - protein, 121 aa, Artificial Sequence
  Chemically Synthesized
QVQLQESGGGLVQAGGSLRLSCAASGNIFRVGYMGWYRQAPGKERELVATIGGTNTYYADSVKGRFTISRDNAKNTVYLQMNSLKPEDTAVYYCAARTGSARVDRYLFSYWGQGTQVTVSS

SEQ ID NO: 16003 - protein, 118 aa, Artificial Sequence
  Chemically Synthesized
QVQLQESGGGLVQAGGSLRLSCAASGNISPAYIMGWYRQAPGKEREFVASISRGGSTNYADSVKGRFTISRDNAKNTVYLQMNSLKPEDTAVYYCAAGYGDYRSFSYWGQGTQVTVSS

SEQ ID NO: 16004 - protein, 114 aa, Artificial Sequence
  Chemically Synthesized
QVQLQESGGGLVQAGGSLRLSCAASGYILCLLMGWYRQAPGKERELVAGITYGWYYLYADSVKGRFTISRDNAKNTVYLQMNSLKPEDTAVYYCAVGYDVFDYWGQGTQVTVSS

SEQ ID NO: 16005 - protein, 117 aa, Artificial Sequence
  Chemically Synthesized
QVQLQESGGGLVQAGGSLRLSCAASGYIFDEAYMGWYRQAPGKERELVAGITQGSNTYYADSVKGRFTISRDNAKNTVYLQMNSLKPEDTAVYYCAATSVRTVTIYWGQGTQVTVSS

SEQ ID NO: 16006 - protein, 115 aa, Artificial Sequence
  Chemically Synthesized
QVQLQESGGGLVQAGGSLRLSCAASGTISYTTPMGWYRQAPGKEREFVATISNGGSTNYADSVKGRFTISRDNAKNTVYLQMNSLKPEDTAVYYCAADLHRPLYWGQGTQVTVSS

SEQ ID NO: 16007 - protein, 117 aa, Artificial Sequence
  Chemically Synthesized
QVQLQESGGGLVQAGGSLRLSCAASGNISGADMGWYRQAPGKEREFVAAITSGGNTYYADSVKGRFTISRDNAKNTVYLQMNSLKPEDTAVYYCAAWSTSFVYHVYWGQGTQVTVSS

SEQ ID NO: 16008 - protein, 118 aa, Artificial Sequence
  Chemically Synthesized
QVQLQESGGGLVQAGGSLRLSCAASGTIFFPLYMGWYRQAPGKERELVAGIAVGANTYYADSVKGRFTISRDNAKNTVYLQMNSLKPEDTAVYYCAVDSIYITSLMYWGQGTQVTVSS

SEQ ID NO: 16009 - protein, 122 aa, Artificial Sequence
  Chemically Synthesized
QVQLQESGGGLVQAGGSLRLSCAASGTIFTSHDMGWYRQAPGKEREFVAAINGGANTNYADSVKGRFTISRDNAKNTVYLQMNSLKPEDTAVYYCAATYRPADDWVARYNYWGQGTQVTVSS

SEQ ID NO: 16010 - protein, 118 aa, Artificial Sequence
  Chemically Synthesized
QVQLQESGGGLVQAGGSLRLSCAASGNISVEPRMGWYRQAPGKERELVASIGDGTNTNYADSVKGRFTISRDNAKNTVYLQMNSLKPEDTAVYYCAVLWAGASRLGYWGQGTQVTVSS

SEQ ID NO: 16011 - protein, 117 aa, Artificial Sequence
  Chemically Synthesized
QVQLQESGGGLVQAGGSLRLSCAASGTISPVRMGWYRQAPGKERELVASISYGTNTNYADSVKGRFTISRDNAKNTVYLQMNSLKPEDTAVYYCAVNGDTSWNHVYWGQGTQVTVSS

SEQ ID NO: 16012 - protein, 111 aa, Artificial Sequence
  Chemically Synthesized
QVQLQESGGGLVQAGGSLRLSCAASGTIFPQQTMGWYRQAPGKEREFVASISDGGNTNYADSVKGRFTISRDNAKNTVYLQMNSLKPEDTAVYYCAVGTYWGQGTQVTVSS

SEQ ID NO: 16013 - protein, 118 aa, Artificial Sequence
  Chemically Synthesized
QVQLQESGGGLVQAGGSLRLSCAASGTISPNDVMGWYRQAPGKEREFVAAIAVGATTNYADSVKGRFTISRDNAKNTVYLQMNSLKPEDTAVYYCAVWIRYLSQHYYWGQGTQVTVSS

SEQ ID NO: 16014 - protein, 117 aa, Artificial Sequence
  Chemically Synthesized
QVQLQESGGGLVQAGGSLRLSCAASGNISSNDAMGWYRQAPGKERELVASIGYGTSTNYADSVKGRFTISRDNAKNTVYLQMNSLKPEDTAVYYCAAKYYTATNIYWGQGTQVTVSS

SEQ ID NO: 16015 - protein, 118 aa, Artificial Sequence
  Chemically Synthesized
QVQLQESGGGLVQAGGSLRLSCAASGTIFYDRYMGWYRQAPGKERELVTNYADSVKGRFTISRDNAKNTVYLQMNSLKPEDTAVYYCAVDRVRSADDPIHYFADYYYWGQGTQVTVSS

SEQ ID NO: 16016 - protein, 119 aa, Artificial Sequence
  Chemically Synthesized
QVQLQESGGGLVQAGGSLRLSCAASGTIFPYRYMGWYRQAPGKERELVAGISYGANTNYADSVKGRFTISRDNAKNTVYLQMNSLKPEDTAVYYCAAGTGDLHSGYAYWGQGTQVTVSS

SEQ ID NO: 16017 - protein, 117 aa, Artificial Sequence
  Chemically Synthesized
QVQLQESGGGLVQAGGSLRLSCAASGTIFSYHYMGWYRQAPGKEREFVAAIDGASTNYADSVKGRFTISRDNAKNTVYLQMNSLKPEDTAVYYCAVVDGANGFLAYWGQGTQVTVSS

SEQ ID NO: 16018 - protein, 118 aa, Artificial Sequence
  Chemically Synthesized
QVQLQESGGGLVQAGGSLRLSCAASGSIFLGWDMGWYRQAPGKEREFVAGIGYGSSTYYADSVKGRFTISRDNAKNTVYLQMNSLKPEDTAVYYCAATLTTVRDYYYWGQGTQVTVSS

SEQ ID NO: 16019 - protein, 122 aa, Artificial Sequence
  Chemically Synthesized
QVQLQESGGGLVQAGGSLRLSCAASGTISPLYYMGWYRQAPGKERELVASIAYGGTTNYADSVKGRFTISRDNAKNTVYLQMNSLKPEDTAVYYCAVFQQWDDIPFYVHRYWGQGTQVTVSS

SEQ ID NO: 16020 - protein, 114 aa, Artificial Sequence
  Chemically Synthesized
QVQLQESGGGLVQAGGSLRLSCAASGYISLAAGMGWYRQAPGKERELVAAIAKGSNTYYADSVKGRFTISRDNAKNTVYLQMNSLKPEDTAVYYCAYTYVHWYWGQGTQVTVSS

SEQ ID NO: 16021 - protein, 117 aa, Artificial Sequence
  Chemically Synthesized
QVQLQESGGGLVQAGGSLRLSCAASGYISDGSMGWYRQAPGKERELVASISRGSSTNYADSVKGRFTISRDNAKNTVYLQMNSLKPEDTAVYYCAAPGRDDNLHRYWGQGTQVTVSS

SEQ ID NO: 16022 - protein, 125 aa, Artificial Sequence
  Chemically Synthesized
QVQLQESGGGLVQAGGSLRLSCAASGTIFGLKLMGWYRQAPGKERELVAGINYGYYLYADSVKGRFTISRDNAKNTVYLQMNSLKPEDTAVYYCAVGGQKGTAQDDYRGYYHSYWGQGTQVTVSS

SEQ ID NO: 16023 - protein, 110 aa, Artificial Sequence
  Chemically Synthesized
QVQLQESGGGLVQAGGSLRLSCAASGTIFIHYFMGWYRQAPGKERELVASINSVLLPYADSVKGRFTISRDNAKNTVYLQMNSLKPEDTAVYYCAALRYWGQGTQVTVSS

SEQ ID NO: 16024 - protein, 117 aa, Artificial Sequence
  Chemically Synthesized
QVQLQESGGGLVQAGGSLRLSCAASGTISQDYSMGWYRQAPGKEREFVAAITGGITNYADSVKGRFTISRDNAKNTVYLQMNSLKPEDTAVYYCAVTYNWAYFYDYWGQGTQVTVSS

SEQ ID NO: 16025 - protein, 121 aa, Artificial Sequence
  Chemically Synthesized
QVQLQESGGGLVQAGGSLRLSCAASGYISSSYLMGWYRQAPGKERELVATIGGGANTNYADSVKGRFTISRDNAKNTVYLQMNSLKPEDTAVYYCAAVGVDDDVTSSFIYWGQGTQVTVSS

SEQ ID NO: 16026 - protein, 122 aa, Artificial Sequence
  Chemically Synthesized
QVQLQESGGGLVQAGGSLRLSCAASGTISAQYVMGWYRQAPGKERELVASINYGGITNYADSVKGRFTISRDNAKNTVYLQMNSLKPEDTAVYYCAAVDKGYTRDTAPYIYWGQGTQVTVSS

SEQ ID NO: 16027 - protein, 117 aa, Artificial Sequence
  Chemically Synthesized
QVQLQESGGGLVQAGGSLRLSCAASGSIFSAGGMGWYRQAPGKERELVATISEVVIPYADSVKGRFTISRDNAKNTVYLQMNSLKPEDTAVYYCAVETYDFPEHYYWGQGTQVTVSS

SEQ ID NO: 16028 - protein, 122 aa, Artificial Sequence
  Chemically Synthesized
QVQLQESGGGLVQAGGSLRLSCAASGNIFDYLRMGWYRQAPGKEREFVATIGAGSTTNYADSVKGRFTISRDNAKNTVYLQMNSLKPEDTAVYYCAVKWPLYGNGTDRHDYWGQGTQVTVSS

SEQ ID NO: 16029 - protein, 117 aa, Artificial Sequence
  Chemically Synthesized
QVQLQESGGGLVQAGGSLRLSCAASGNISVQYMGWYRQAPGKERELVASISDGAITNYADSVKGRFTISRDNAKNTVYLQMNSLKPEDTAVYYCAAWSYYQPTLRYWGQGTQVTVSS

SEQ ID NO: 16030 - protein, 117 aa, Artificial Sequence
  Chemically Synthesized
QVQLQESGGGLVQAGGSLRLSCAASGTIFTSYGMGWYRQAPGKEREFVAAIGYGANTYYADSVKGRFTISRDNAKNTVYLQMNSLKPEDTAVYYCAFTTVVLVLLYWGQGTQVTVSS

SEQ ID NO: 16031 - protein, 117 aa, Artificial Sequence
  Chemically Synthesized
QVQLQESGGGLVQAGGSLRLSCAASGSISDTRVMGWYRQAPGKERELVALLVTVLLPYADSVKGRFTISRDNAKNTVYLQMNSLKPEDTAVYYCAVGGAKYHYHFYWGQGTQVTVSS

SEQ ID NO: 16032 - protein, 118 aa, Artificial Sequence
  Chemically Synthesized
QVQLQESGGGLVQAGGSLRLSCAASGTISGGYDMGWYRQAPGKERELVATINSGGITNYADSVKGRFTISRDNAKNTVYLQMNSLKPEDTAVYYCAVITYRLDDFTYWGQGTQVTVSS

SEQ ID NO: 16033 - protein, 118 aa, Artificial Sequence
  Chemically Synthesized
QVQLQESGGGLVQAGGSLRLSCAASGSISYLSLMGWYRQAPGKERELVAAITYGSTTNYADSVKGRFTISRDNAKNTVYLQMNSLKPEDTAVYYCAVLTRAGTAHVYWGQGTQVTVSS

SEQ ID NO: 16034 - protein, 121 aa, Artificial Sequence
  Chemically Synthesized
QVQLQESGGGLVQAGGSLRLSCAASGSISADITMGWYRQAPGKEREFVASIGDGSTTNYADSVKGRFTISRDNAKNTVYLQMNSLKPEDTAVYYCAAYAGGTHGAQSLMYWGQGTQVTVSS

SEQ ID NO: 16035 - protein, 122 aa, Artificial Sequence
  Chemically Synthesized
QVQLQESGGGLVQAGGSLRLSCAASGNISPGYDMGWYRQAPGKERELVASISEGASTNYADSVKGRFTISRDNAKNTVYLQMNSLKPEDTAVYYCAADVPVLAADSGYLGYWGQGTQVTVSS

SEQ ID NO: 16036 - protein, 117 aa, Artificial Sequence
  Chemically Synthesized
QVQLQESGGGLVQAGGSLRLSCAASGNISHESMGWYRQAPGKERELVAGIAGGGITNYADSVKGRFTISRDNAKNTVYLQMNSLKPEDTAVYYCAVWPYYWDTHYYWGQGTQVTVSS

SEQ ID NO: 16037 - protein, 118 aa, Artificial Sequence
  Chemically Synthesized
QVQLQESGGGLVQAGGSLRLSCAASGNIFGRARMGWYRQAPGKEREFVATIAGGSSTYYADSVKGRFTISRDNAKNTVYLQMNSLKPEDTAVYYCAAVVQGRSTHFYWGQGTQVTVSS

SEQ ID NO: 16038 - protein, 118 aa, Artificial Sequence
  Chemically Synthesized
QVQLQESGGGLVQAGGSLRLSCAASGNIFERATMGWYRQAPGKERELVAAITYGTSTNYADSVKGRFTISRDNAKNTVYLQMNSLKPEDTAVYYCAVGHVATGVHYYWGQGTQVTVSS

SEQ ID NO: 16039 - protein, 126 aa, Artificial Sequence
  Chemically Synthesized
QVQLQESGGGLVQAGGSLRLSCAASGYISGDRDMGWYRQAPGKERELVASIGDGANTNYADSVKGRFTISRDNAKNTVYLQMNSLKPEDTAVYYCAAASDGEGEPSNGDWQLLDYWGQGTQVTVSS

SEQ ID NO: 16040 - protein, 117 aa, Artificial Sequence
  Chemically Synthesized
QVQLQESGGGLVQAGGSLRLSCAASGTISPFDYMGWYRQAPGKERELVAAISPVLLPYADSVKGRFTISRDNAKNTVYLQMNSLKPEDTAVYYCAVADSSRENHPYWGQGTQVTVSS

SEQ ID NO: 16041 - protein, 115 aa, Artificial Sequence
  Chemically Synthesized
QVQLQESGGGLVQAGGSLRLSCAASGTISYRFYMGWYRQAPGKERELVAAISGGSITNYADSVKGRFTISRDNAKNTVYLQMNSLKPEDTAVYYCAAATGYHPYWGQGTQVTVSS

SEQ ID NO: 16042 - protein, 118 aa, Artificial Sequence
  Chemically Synthesized
QVQLQESGGGLVQAGGSLRLSCAASGNIFRPDYMGWYRQAPGKEREFVATIAYGGITNYADSVKGRFTISRDNAKNTVYLQMNSLKPEDTAVYYCAADDSAELIHSYWGQGTQVTVSS

SEQ ID NO: 16043 - protein, 116 aa, Artificial Sequence
  Chemically Synthesized
QVQLQESGGGLVQAGGSLRLSCAASGTIFHARYMGWYRQAPGKERELVAGIAAGAVPYADSVKGRFTISRDNAKNTVYLQMNSLKPEDTAVYYCAVVRYLYLLSYWGQGTQVTVSS

SEQ ID NO: 16044 - protein, 118 aa, Artificial Sequence
  Chemically Synthesized
QVQLQESGGGLVQAGGSLRLSCAASGSISRKSIMGWYRQAPGKERELVATIGDGATTYYADSVKGRFTISRDNAKNTVYLQMNSLKPEDTAVYYCAVWPFSYRAHGYWGQGTQVTVSS

SEQ ID NO: 16045 - protein, 112 aa, Artificial Sequence
  Chemically Synthesized
QVQLQESGGGLVQAGGSLRLSCAASGNISTFPCMGWYRQAPGKERELVATIDTGASTYYADSVKGRFTISRDNAKNTVYLQMNSLKPEDTAVYYCAVLHDYWGQGTQVTVSS

SEQ ID NO: 16046 - protein, 118 aa, Artificial Sequence
  Chemically Synthesized
QVQLQESGGGLVQAGGSLRLSCAASGTIFIVNVMGWYRQAPGKEREFVAGISFGTITNYADSVKGRFTISRDNAKNTVYLQMNSLKPEDTAVYYCAADSIYAYPLLYWGQGTQVTVSS

SEQ ID NO: 16047 - protein, 118 aa, Artificial Sequence
  Chemically Synthesized
QVQLQESGGGLVQAGGSLRLSCAASGNISDVYIMGWYRQAPGKEREFVAAIATGATTYYADSVKGRFTISRDNAKNTVYLQMNSLKPEDTAVYYCAAFAWDPDTLAYWGQGTQVTVSS

SEQ ID NO: 16048 - protein, 118 aa, Artificial Sequence
  Chemically Synthesized
QVQLQESGGGLVQAGGSLRLSCAASGTIFRFIDMGWYRQAPGKEREFVAAIGIGANTYYADSVKGRFTISRDNAKNTVYLQMNSLKPEDTAVYYCAARYAGTYAYWYWGQGTQVTVSS

SEQ ID NO: 16049 - protein, 119 aa, Artificial Sequence
  Chemically Synthesized
QVQLQESGGGLVQAGGSLRLSCAASGSISENWPMGWYRQAPGKEREFVATIGYGATTNYADSVKGRFTISRDNAKNTVYLQMNSLKPEDTAVYYCAADVDAYVPDHRYWGQGTQVTVSS

SEQ ID NO: 16050 - protein, 122 aa, Artificial Sequence
  Chemically Synthesized
QVQLQESGGGLVQAGGSLRLSCAASGNIFRDLYMGWYRQAPGKEREFVATIAQGGTTNYADSVKGRFTISRDNAKNTVYLQMNSLKPEDTAVYYCAAVDAIRVPGYYTHAYWGQGTQVTVSS

SEQ ID NO: 16051 - protein, 118 aa, Artificial Sequence
  Chemically Synthesized
QVQLQESGGGLVQAGGSLRLSCAASGTISNRDDMGWYRQAPGKERELVAGIATGSSTNYADSVKGRFTISRDNAKNTVYLQMNSLKPEDTAVYYCAVYPDEESGLQYWGQGTQVTVSS

SEQ ID NO: 16052 - protein, 115 aa, Artificial Sequence
  Chemically Synthesized
QVQLQESGGGLVQAGGSLRLSCAASGTISPRWYMGWYRQAPGKEREFVASISTGGITNYADSVKGRFTISRDNAKNTVYLQMNSLKPEDTAVYYCAAQGRRLLYWGQGTQVTVSS

SEQ ID NO: 16053 - protein, 111 aa, Artificial Sequence
  Chemically Synthesized
QVQLQESGGGLVQAGGSLRLSCAASGNIFQTLPMGWYRQAPGKERELVAGISHGANTNYADSVKGRFTISRDNAKNTVYLQMNSLKPEDTAVYYCAVVRYWGQGTQVTVSS

SEQ ID NO: 16054 - protein, 118 aa, Artificial Sequence
  Chemically Synthesized
QVQLQESGGGLVQAGGSLRLSCAASGSISRSYSMGWYRQAPGKERELVASIGFGTTTNYADSVKGRFTISRDNAKNTVYLQMNSLKPEDTAVYYCAVDYKTTYQHAYWGQGTQVTVSS

SEQ ID NO: 16055 - protein, 118 aa, Artificial Sequence
  Chemically Synthesized
QVQLQESGGGLVQAGGSLRLSCAASGTISSGGYMGWYRQAPGKEREFVASIGDGTNTNYADSVKGRFTISRDNAKNTVYLQMNSLKPEDTAVYYCAVATYTAFGHAYWGQGTQVTVSS

SEQ ID NO: 16056 - protein, 119 aa, Artificial Sequence
  Chemically Synthesized
QVQLQESGGGLVQAGGSLRLSCAASGNIFDTGYMGWYRQAPGKERELVAAIGWGGTTYYADSVKGRFTISRDNAKNTVYLQMNSLKPEDTAVYYCAVVQYWAHAYVDYWGQGTQVTVSS

SEQ ID NO: 16057 - protein, 118 aa, Artificial Sequence
  Chemically Synthesized
QVQLQESGGGLVQAGGSLRLSCAASGSISGTRYMGWYRQAPGKEREFVAGIAYGATTYYADSVKGRFTISRDNAKNTVYLQMNSLKPEDTAVYYCAAGYYYYLRLDYWGQGTQVTVSS

SEQ ID NO: 16058 - protein, 111 aa, Artificial Sequence
  Chemically Synthesized
QVQLQESGGGLVQAGGSLRLSCAASGNISRVTYMGWYRQAPGKEREFVVLTVLLPYADSVKGRFTISRDNAKNTVYLQMNSLKPEDTAVYYCAAGWALDYWGQGTQVTVSS

SEQ ID NO: 16059 - protein, 120 aa, Artificial Sequence
  Chemically Synthesized
QVQLQESGGGLVQAGGSLRLSCAASGTIFQGDEMGWYRQAPGKERELVAGIASGATTNYADSVKGRFTISRDNAKNTVYLQMNSLKPEDTAVYYCAVFYLSTTNVTLMYWGQGTQVTVSS

SEQ ID NO: 16060 - protein, 116 aa, Artificial Sequence
  Chemically Synthesized
QVQLQESGGGLVQAGGSLRLSCAASGSILVTVMGWYRQAPGKERELVASIADGTNTNYADSVKGRFTISRDNAKNTVYLQMNSLKPEDTAVYYCAASDYSRVCLYWGQGTQVTVSS

SEQ ID NO: 16061 - protein, 114 aa, Artificial Sequence
  Chemically Synthesized
QVQLQESGGGLVQAGGSLRLSCAASGNISDESSMGWYRQAPGKERELVATIGDGANTYYADSVKGRFTISRDNAKNTVYLQMNSLKPEDTAVYYCAVRYYHAYWGQGTQVTVSS

SEQ ID NO: 16062 - protein, 126 aa, Artificial Sequence
  Chemically Synthesized
QVQLQESGGGLVQAGGSLRLSCAASGTIFYLDYMGWYRQAPGKEREFVAAISVGTITNYADSVKGRFTISRDNAKNTVYLQMNSLKPEDTAVYYCAAYYPVYWAWTAGGYGWHVYWGQGTQVTVSS

SEQ ID NO: 16063 - protein, 119 aa, Artificial Sequence
  Chemically Synthesized
QVQLQESGGGLVQAGGSLRLSCAASGNISGDTPMGWYRQAPGKEREFVATIDAGAITNYADSVKGRFTISRDNAKNTVYLQMNSLKPEDTAVYYCAAGGIDTRRPWLYWGQGTQVTVSS

SEQ ID NO: 16064 - protein, 117 aa, Artificial Sequence
  Chemically Synthesized
QVQLQESGGGLVQAGGSLRLSCAASGSIFPLSDMGWYRQAPGKERELVATIAYGATTNYADSVKGRFTISRDNAKNTVYLQMNSLKPEDTAVYYCAVRLSTTLTMYWGQGTQVTVSS

SEQ ID NO: 16065 - protein, 118 aa, Artificial Sequence
  Chemically Synthesized
QVQLQESGGGLVQAGGSLRLSCAASGYIFDYYSMGWYRQAPGKEREFVATIGHGSITNYADSVKGRFTISRDNAKNTVYLQMNSLKPEDTAVYYCAAGYYADHLHDYWGQGTQVTVSS

SEQ ID NO: 16066 - protein, 122 aa, Artificial Sequence
  Chemically Synthesized
QVQLQESGGGLVQAGGSLRLSCAASGTIFRVQVMGWYRQAPGKEREFVAAIGQGANTYYADSVKGRFTISRDNAKNTVYLQMNSLKPEDTAVYYCAVLIRLDDFRGGRLPYWGQGTQVTVSS

SEQ ID NO: 16067 - protein, 121 aa, Artificial Sequence
  Chemically Synthesized
QVQLQESGGGLVQAGGSLRLSCAASGTISATGIMGWYRQAPGKERELVAAIAFGGSTYYADSVKGRFTISRDNAKNTVYLQMNSLKPEDTAVYYCAAPITLFDSLSYHPYWGQGTQVTVSS

SEQ ID NO: 16068 - protein, 125 aa, Artificial Sequence
  Chemically Synthesized
QVQLQESGGGLVQAGGSLRLSCAASGYIFYVDAMGWYRQAPGKERECCRYYSGCYYQYADSVKGRFTISRDNAKNTVYLQMNSLKPEDTAVYYCAATRGDYGPNTGYSQGQHDYWGQGTQVTVSS

SEQ ID NO: 16069 - protein, 121 aa, Artificial Sequence
  Chemically Synthesized
QVQLQESGGGLVQAGGSLRLSCAASGTISLLTMGWYRQAPGKERELVASIDKGTNTNYADSVKGRFTISRDNAKNTVYLQMNSLKPEDTAVYYCAAQQARYRQAYRAHDYWGQGTQVTVSS

SEQ ID NO: 16070 - protein, 118 aa, Artificial Sequence
  Chemically Synthesized
QVQLQESGGGLVQAGGSLRLSCAASGNISVYAYMGWYRQAPGKERELVATIAFGSSTNYADSVKGRFTISRDNAKNTVYLQMNSLKPEDTAVYYCAAISYNGKTHRYWGQGTQVTVSS

SEQ ID NO: 16071 - protein, 118 aa, Artificial Sequence
  Chemically Synthesized
QVQLQESGGGLVQAGGSLRLSCAASGSIFTYIAMGWYRQAPGKERELVAAIGIGSNTYYADSVKGRFTISRDNAKNTVYLQMNSLKPEDTAVYYCAADSLYAAELDYWGQGTQVTVSS

SEQ ID NO: 16072 - protein, 119 aa, Artificial Sequence
  Chemically Synthesized
QVQLQESGGGLVQAGGSLRLSCAASGSISSLTRMGWYRQAPGKEREFVAAISQGTTTNYADSVKGRFTISRDNAKNTVYLQMNSLKPEDTAVYYCAAITPGRSAWHFYWGQGTQVTVSS

SEQ ID NO: 16073 - protein, 122 aa, Artificial Sequence
  Chemically Synthesized
QVQLQESGGGLVQAGGSLRLSCAASGNYVMGWYRQAPGKERELVASIGEGANTYYADSVKGRFTISRDNAKNTVYLQMNSLKPEDTAVYYCAVTPRYYFAWSYYTGADYRYWGQGTQVTVSS

SEQ ID NO: 16074 - protein, 118 aa, Artificial Sequence
  Chemically Synthesized
QVQLQESGGGLVQAGGSLRLSCAASGYISSAAIMGWYRQAPGKEREFVAAISYGSNTNYADSVKGRFTISRDNAKNTVYLQMNSLKPEDTAVYYCAAVDYDDYYYWYWGQGTQVTVSS

SEQ ID NO: 16075 - protein, 122 aa, Artificial Sequence
  Chemically Synthesized
QVQLQESGGGLVQAGGSLRLSCAASGTISADSGMGWYRQAPGKEREFVAAINTGGSTNYADSVKGRFTISRDNAKNTVYLQMNSLKPEDTAVYYCAAVYVPRYYSRYRHYYWGQGTQVTVSS

SEQ ID NO: 16076 - protein, 118 aa, Artificial Sequence
  Chemically Synthesized
QVQLQESGGGLVQAGGSLRLSCAASGNIFPAFSMGWYRQAPGKEREFVAAITQGGITNYADSVKGRFTISRDNAKNTVYLQMNSLKPEDTAVYYCAVAYYARSWHAYWGQGTQVTVSS

SEQ ID NO: 16077 - protein, 118 aa, Artificial Sequence
  Chemically Synthesized
QVQLQESGGGLVQAGGSLRLSCAASGSISADGTMGWYRQAPGKEREFVAAIGDGTITNYADSVKGRFTISRDNAKNTVYLQMNSLKPEDTAVYYCAALVVRNTYHYYWGQGTQVTVSS

SEQ ID NO: 16078 - protein, 117 aa, Artificial Sequence
  Chemically Synthesized
QVQLQESGGGLVQAGGSLRLSCAASGTISYFCMGWYRQAPGKEREFVASIDRGATTNYADSVKGRFTISRDNAKNTVYLQMNSLKPEDTAVYYCAVKYGYDVVYTYWGQGTQVTVSS

SEQ ID NO: 16079 - protein, 109 aa, Artificial Sequence
  Chemically Synthesized
QVQLQESGGGLVQAGGSLRLSCAASGYIFQIPIMGWYRQAPGKERELVAGIDDGTNTYYADSVKGRFTISRDNAKNTVYLQMNSLKPEDTAVYYCAVYWGQGTQVTVSS

SEQ ID NO: 16080 - protein, 111 aa, Artificial Sequence
  Chemically Synthesized
QVQLQESGGGLVQAGGSLRLSCAASGNIFYYYRMGWYRQAPGKERELVATINFGTNTYYADSVKGRFTISRDNAKNTVYLQMNSLKPEDTAVYYCAKRYYWGQGTQVTVSS

SEQ ID NO: 16081 - protein, 118 aa, Artificial Sequence
  Chemically Synthesized
QVQLQESGGGLVQAGGSLRLSCAASGSIFPNWVMGWYRQAPGKEREFVAAIGSGASTNYADSVKGRFTISRDNAKNTVYLQMNSLKPEDTAVYYCAVVSNTWPFHYYWGQGTQVTVSS

SEQ ID NO: 16082 - protein, 118 aa, Artificial Sequence
  Chemically Synthesized
QVQLQESGGGLVQAGGSLRLSCAASGTIFRHPAMGWYRQAPGKERELVAGISSGGNTNYADSVKGRFTISRDNAKNTVYLQMNSLKPEDTAVYYCAVLYRDGVFHWYWGQGTQVTVSS

SEQ ID NO: 16083 - protein, 118 aa, Artificial Sequence
  Chemically Synthesized
QVQLQESGGGLVQAGGSLRLSCAASGSISDLIYMGWYRQAPGKEREFVASITLGSNTNYADSVKGRFTISRDNAKNTVYLQMNSLKPEDTAVYYCAAYDPFVYYLSYWGQGTQVTVSS

SEQ ID NO: 16084 - protein, 122 aa, Artificial Sequence
  Chemically Synthesized
QVQLQESGGGLVQAGGSLRLSCAASGNIFYTVYMGWYRQAPGKEREFVAAIDGGATTYYADSVKGRFTISRDNAKNTVYLQMNSLKPEDTAVYYCAVRFADHWLDQRRSFYWGQGTQVTVSS

SEQ ID NO: 16085 - protein, 119 aa, Artificial Sequence
  Chemically Synthesized
QVQLQESGGGLVQAGGSLRLSCAASGYISGPYAMGWYRQAPGKEREFVATINAGGSTYYADSVKGRFTISRDNAKNTVYLQMNSLKPEDTAVYYCAALYIDYSRLRWYWGQGTQVTVSS

SEQ ID NO: 16086 - protein, 126 aa, Artificial Sequence
  Chemically Synthesized
QVQLQESGGGLVQAGGSLRLSCAASGNISYSDAMGWYRQAPGKEREFVAAIAGGTNTNYADSVKGRFTISRDNAKNTVYLQMNSLKPEDTAVYYCAAYRRYRYAVDTRVSSYHGYWGQGTQVTVSS

SEQ ID NO: 16087 - protein, 122 aa, Artificial Sequence
  Chemically Synthesized
QVQLQESGGGLVQAGGSLRLSCAASGSISDYIGMGWYRQAPGKEREFVAGIAAGGSTYYADSVKGRFTISRDNAKNTVYLQMNSLKPEDTAVYYCAVVYHDTSGNVGRFYYWGQGTQVTVSS

SEQ ID NO: 16088 - protein, 123 aa, Artificial Sequence
  Chemically Synthesized
QVQLQESGGGLVQAGGSLRLSCAASGTISWYVGSMGWYRQAPGKEREFVASISQGTNTNYADSVKGRFTISRDNAKNTVYLQMNSLKPEDTAVYYCAVNEHDAAQYYWKYGYWGQGTQVTVSS

SEQ ID NO: 16089 - protein, 112 aa, Artificial Sequence
  Chemically Synthesized
QVQLQESGGGLVQAGGSLRLSCAASGTIFRDYVMGWYRQAPGKEREFVATIDYGSNTNYADSVKGRFTISRDNAKNTVYLQMNSLKPEDTAVYYCATCLIYWGQGTQVTVSS

SEQ ID NO: 16090 - protein, 118 aa, Artificial Sequence
  Chemically Synthesized
QVQLQESGGGLVQAGGSLRLSCAASGTIFESDTMGWYRQAPGKEREFVAAIAHGSSTNYADSVKGRFTISRDNAKNTVYLQMNSLKPEDTAVYYCAALKYARNYLYYWGQGTQVTVSS

SEQ ID NO: 16091 - protein, 118 aa, Artificial Sequence
  Chemically Synthesized
QVQLQESGGGLVQAGGSLRLSCAASGSIFARYDMGWYRQAPGKERELVAAIGYGGNTNYADSVKGRFTISRDNAKNTVYLQMNSLKPEDTAVYYCAVAYTIRRTHWYWGQGTQVTVSS

SEQ ID NO: 16092 - protein, 126 aa, Artificial Sequence
  Chemically Synthesized
QVQLQESGGGLVQAGGSLRLSCAASGTISYWYYMGWYRQAPGKERELVAAIDAGTSTNYADSVKGRFTISRDNAKNTVYLQMNSLKPEDTAVYYCAVYDYNDKDYFYDVGSVYSYWGQGTQVTVSS

SEQ ID NO: 16093 - protein, 121 aa, Artificial Sequence
  Chemically Synthesized
QVQLQESGGGLVQAGGSLRLSCAASGTISNRTNMGWYRQAPGKEREFVASIASGTTTYYADSVKGRFTISRDNAKNTVYLQMNSLKPEDTAVYYCAADPYDTYGSSVSFYWGQGTQVTVSS

SEQ ID NO: 16094 - protein, 126 aa, Artificial Sequence
  Chemically Synthesized
QVQLQESGGGLVQAGGSLRLSCAASGTISTGVYMGWYRQAPGKERELVAAITLGASTNYADSVKGRFTISRDNAKNTVYLQMNSLKPEDTAVYYCAARWSPDFTGDTYDDRAHQYWGQGTQVTVSS

SEQ ID NO: 16095 - protein, 117 aa, Artificial Sequence
  Chemically Synthesized
QVQLQESGGGLVQAGGSLRLSCAASGNIFLNYVMGWYRQAPGKEREFVATIAYGTITYYADSVKGRFTISRDNAKNTVYLQMNSLKPEDTAVYYCAVDTSSSCTFYWGQGTQVTVSS

SEQ ID NO: 16096 - protein, 118 aa, Artificial Sequence
  Chemically Synthesized
QVQLQESGGGLVQAGGSLRLSCAASGSISPYNAMGWYRQAPGKEREFVATITRGSTTNYADSVKGRFTISRDNAKNTVYLQMNSLKPEDTAVYYCAADGYHIPYYDYWGQGTQVTVSS

SEQ ID NO: 16097 - protein, 121 aa, Artificial Sequence
  Chemically Synthesized
QVQLQESGGGLVQAGGSLRLSCAASGYIFSYDHMGWYRQAPGKERELVATIDAGATTNYADSVKGRFTISRDNAKNTVYLQMNSLKPEDTAVYYCAAYDPFPSGTLSTMYWGQGTQVTVSS

SEQ ID NO: 16098 - protein, 122 aa, Artificial Sequence
  Chemically Synthesized
QVQLQESGGGLVQAGGSLRLSCAASGSIFGAFYMGWYRQAPGKERELVASITQGSITNYADSVKGRFTISRDNAKNTVYLQMNSLKPEDTAVYYCAVIYPYDYISTGDHIYWGQGTQVTVSS

SEQ ID NO: 16099 - protein, 124 aa, Artificial Sequence
  Chemically Synthesized
QVQLQESGGGLVQAGGSLRLSCAASGSISNGLVMGWYRQAPGKEREFVATITGGGNTNYADSVKGRFTISRDNAKNTVYLQMNSLKPEDTAVYYCAALQYYGGRREGGHYHYYWGQGTQVTVSS

SEQ ID NO: 16100 - protein, 125 aa, Artificial Sequence
  Chemically Synthesized
QVQLQESGGGLVQAGGSLRLSCAASGYISSLVMGWYRQAPGKEREFVAAIGYGTSTYYADSVKGRFTISRDNAKNTVYLQMNSLKPEDTAVYYCAADHPTDIYTYYKSYVYLVYWGQGTQVTVSS

SEQ ID NO: 16101 - protein, 124 aa, Artificial Sequence
  Chemically Synthesized
QVQLQESGGGLVQAGGSLRLSCAASGSIFEHATMGWYRQAPGKEREFVAGIAYGTSTYYADSVKGRFTISRDNAKNTVYLQMNSLKPEDTAVYYCAVDWEYYGSGDIVRDYGYWGQGTQVTVSS

SEQ ID NO: 16102 - protein, 125 aa, Artificial Sequence
  Chemically Synthesized
QVQLQESGGGLVQAGGSLRLSCAASGTIFTRHFMGWYRQAPGKEREFVASITYGANTNYADSVKGRFTISRDNAKNTVYLQMNSLKPEDTAVYYCAAYVYLGGNDASFWKTVFYWGQGTQVTVSS

SEQ ID NO: 16103 - protein, 118 aa, Artificial Sequence
  Chemically Synthesized
QVQLQESGGGLVQAGGSLRLSCAASGSIFSHYIMGWYRQAPGKEREFVASITYGTSTNYADSVKGRFTISRDNAKNTVYLQMNSLKPEDTAVYYCAAYREVAVGLDYWGQGTQVTVSS

SEQ ID NO: 16104 - protein, 121 aa, Artificial Sequence
  Chemically Synthesized
QVQLQESGGGLVQAGGSLRLSCAASGNISPLSSMGWYRQAPGKERELVATINNGGTTYYADSVKGRFTISRDNAKNTVYLQMNSLKPEDTAVYYCAAQGSWNCTFSTLMYWGQGTQVTVSS

SEQ ID NO: 16105 - protein, 122 aa, Artificial Sequence
  Chemically Synthesized
QVQLQESGGGLVQAGGSLRLSCAASGTISRPSRMGWYRQAPGKEREFVAGIDDGGSTYYADSVKGRFTISRDNAKNTVYLQMNSLKPEDTAVYYCAVGAYGIHYSSDGYPYWGQGTQVTVSS

SEQ ID NO: 16106 - protein, 125 aa, Artificial Sequence
  Chemically Synthesized
QVQLQESGGGLVQAGGSLRLSCAASGNISVDYHMGWYRQAPGKEREFVASIGLGSSTYYADSVKGRFTISRDNAKNTVYLQMNSLKPEDTAVYYCAVAYRWQGGGYTRYLWHGYWGQGTQVTVSS

SEQ ID NO: 16107 - protein, 125 aa, Artificial Sequence
  Chemically Synthesized
QVQLQESGGGLVQAGGSLRLSCAASGTISYTSFMGWYRQAPGKERELVAGISSGGTTYYADSVKGRFTISRDNAKNTVYLQMNSLKPEDTAVYYCAASYDETDRISLGLGRYSYWGQGTQVTVSS

SEQ ID NO: 16108 - protein, 122 aa, Artificial Sequence
  Chemically Synthesized
QVQLQESGGGLVQAGGSLRLSCAASGTISADYYMGWYRQAPGKERELVAGISYGGSTNYADSVKGRFTISRDNAKNTVYLQMNSLKPEDTAVYYCAATVRYWYDYDGAYTYWGQGTQVTVSS

SEQ ID NO: 16109 - protein, 117 aa, Artificial Sequence
  Chemically Synthesized
QVQLQESGGGLVQAGGSLRLSCAASGSISGSFVMGWYRQAPGKEREFVAGINFGTSTNYADSVKGRFTISRDNAKNTVYLQMNSLKPEDTAVYYCAALDASRGQYYWGQGTQVTVSS

SEQ ID NO: 16110 - protein, 117 aa, Artificial Sequence
  Chemically Synthesized
QVQLQESGGGLVQAGGSLRLSCAASGNISSTVMGWYRQAPGKEREFVATIGTGTTTYYADSVKGRFTISRDNAKNTVYLQMNSLKPEDTAVYYCAVSIPRYVDFYYWGQGTQVTVSS

SEQ ID NO: 16111 - protein, 122 aa, Artificial Sequence
  Chemically Synthesized
QVQLQESGGGLVQAGGSLRLSCAASGNIFSRTYMGWYRQAPGKERELVATIDYGTSTYYADSVKGRFTISRDNAKNTVYLQMNSLKPEDTAVYYCAADGLADRTYIHTLQYWGQGTQVTVSS

SEQ ID NO: 16112 - protein, 115 aa, Artificial Sequence
  Chemically Synthesized
QVQLQESGGGLVQAGGSLRLSCAASGNIFQSTVMGWYRQAPGKEREFVATIGAGTSTNYADSVKGRFTISRDNAKNTVYLQMNSLKPEDTAVYYCAVSTTVTLYWGQGTQVTVSS

SEQ ID NO: 16113 - protein, 122 aa, Artificial Sequence
  Chemically Synthesized
QVQLQESGGGLVQAGGSLRLSCAASGSIFATQGMGWYRQAPGKERELVAGIAYGSTTYYADSVKGRFTISRDNAKNTVYLQMNSLKPEDTAVYYCAVRIRRFDWSWYIYYYWGQGTQVTVSS

SEQ ID NO: 16114 - protein, 125 aa, Artificial Sequence
  Chemically Synthesized
QVQLQESGGGLVQAGGSLRLSCAASGYIFPEPEMGWYRQAPGKERELVAAIAWGSNTNYADSVKGRFTISRDNAKNTVYLQMNSLKPEDTAVYYCAATVDVPYDYTTDEPQGHYWGQGTQVTVSS

SEQ ID NO: 16115 - protein, 117 aa, Artificial Sequence
  Chemically Synthesized
QVQLQESGGGLVQAGGSLRLSCAASGTIFYYIGMGWYRQAPGKERELLPVLLPGGIPYADSVKGRFTISRDNAKNTVYLQMNSLKPEDTAVYYCAVPGDPIRYLLYWGQGTQVTVSS

SEQ ID NO: 16116 - protein, 118 aa, Artificial Sequence
  Chemically Synthesized
QVQLQESGGGLVQAGGSLRLSCAASGTIFRPYAMGWYRQAPGKEREFVAGISSGTNTNYADSVKGRFTISRDNAKNTVYLQMNSLKPEDTAVYYCAVLTYDPRWHYYWGQGTQVTVSS

SEQ ID NO: 16117 - protein, 118 aa, Artificial Sequence
  Chemically Synthesized
QVQLQESGGGLVQAGGSLRLSCAASGTIFWDYYMGWYRQAPGKEREFVATISRGTSTNYADSVKGRFTISRDNAKNTVYLQMNSLKPEDTAVYYCAAAGGTTPYHGYWGQGTQVTVSS

SEQ ID NO: 16118 - protein, 126 aa, Artificial Sequence
  Chemically Synthesized
QVQLQESGGGLVQAGGSLRLSCAASGTIFGRYRMGWYRQAPGKERELVAGITYGTSTYYADSVKGRFTISRDNAKNTVYLQMNSLKPEDTAVYYCAVTPVPYDPTGYLVYTVHIYWGQGTQVTVSS

SEQ ID NO: 16119 - protein, 117 aa, Artificial Sequence
  Chemically Synthesized
QVQLQESGGGLVQAGGSLRLSCAASGNISYPVSMGWYRQAPGKERELVATIDLGGNTNYADSVKGRFTISRDNAKNTVYLQMNSLKPEDTAVYYCAALDYSTLLIYWGQGTQVTVSS

SEQ ID NO: 16120 - protein, 117 aa, Artificial Sequence
  Chemically Synthesized
QVQLQESGGGLVQAGGSLRLSCAASGTIFRVASMGWYRQAPGKERELVAAIAYGSNTYYADSVKGRFTISRDNAKNTVYLQMNSLKPEDTAVYYCAASTTTLTCIYWGQGTQVTVSS

SEQ ID NO: 16121 - protein, 118 aa, Artificial Sequence
  Chemically Synthesized
QVQLQESGGGLVQAGGSLRLSCAASGTIFGWILMGWYRQAPGKERELVAAINPGSSTYYADSVKGRFTISRDNAKNTVYLQMNSLKPEDTAVYYCAARYSGRTGHSYWGQGTQVTVSS

SEQ ID NO: 16122 - protein, 122 aa, Artificial Sequence
  Chemically Synthesized
QVQLQESGGGLVQAGGSLRLSCAASGYIFRLLDMGWYRQAPGKERELVAAIAYGGSTNYADSVKGRFTISRDNAKNTVYLQMNSLKPEDTAVYYCAAAQYNGLAIRDALVYWGQGTQVTVSS

SEQ ID NO: 16123 - protein, 118 aa, Artificial Sequence
  Chemically Synthesized
QVQLQESGGGLVQAGGSLRLSCAASGTISSPAIMGWYRQAPGKEREFVAGIAIGSNTNYADSVKGRFTISRDNAKNTVYLQMNSLKPEDTAVYYCAAVYDRSGWHGYWGQGTQVTVSS

SEQ ID NO: 16124 - protein, 118 aa, Artificial Sequence
  Chemically Synthesized
QVQLQESGGGLVQAGGSLRLSCAASGNISADHLMGWYRQAPGKERELVASISTGGSTNYADSVKGRFTISRDNAKNTVYLQMNSLKPEDTAVYYCAAYWEGNVQHSYWGQGTQVTVSS

SEQ ID NO: 16125 - protein, 122 aa, Artificial Sequence
  Chemically Synthesized
QVQLQESGGGLVQAGGSLRLSCAASGYISQGQYMGWYRQAPGKERELVAAIDSGTTTNYADSVKGRFTISRDNAKNTVYLQMNSLKPEDTAVYYCAAYTDHGITHNKTLRYWGQGTQVTVSS

SEQ ID NO: 16126 - protein, 121 aa, Artificial Sequence
  Chemically Synthesized
QVQLQESGGGLVQAGGSLRLSCAASGTIFYDVVMGWYRQAPGKEREFVATIDEGSNTYYADSVKGRFTISRDNAKNTVYLQMNSLKPEDTAVYYCAVTTLLNILRLTLLYWGQGTQVTVSS

SEQ ID NO: 16127 - protein, 126 aa, Artificial Sequence
  Chemically Synthesized
QVQLQESGGGLVQAGGSLRLSCAASGTISVDYIMGWYRQAPGKEREFVAGIAYGAITNYADSVKGRFTISRDNAKNTVYLQMNSLKPEDTAVYYCAADRRAYRGNRYHYGPDHPYWGQGTQVTVSS

SEQ ID NO: 16128 - protein, 126 aa, Artificial Sequence
  Chemically Synthesized
QVQLQESGGGLVQAGGSLRLSCAASGYISDDDIMGWYRQAPGKERELVAGITLGAIPYADSVKGRFTISRDNAKNTVYLQMNSLKPEDTAVYYCAAYDGYFDILRTVSQVYRHSYWGQGTQVTVSS

SEQ ID NO: 16129 - protein, 122 aa, Artificial Sequence
  Chemically Synthesized
QVQLQESGGGLVQAGGSLRLSCAASGNISADIGMGWYRQAPGKERELVAAIGTGGNTYYADSVKGRFTISRDNAKNTVYLQMNSLKPEDTAVYYCAAVAQTDRDDHVIFVYWGQGTQVTVSS

SEQ ID NO: 16130 - protein, 118 aa, Artificial Sequence
  Chemically Synthesized
QVQLQESGGGLVQAGGSLRLSCAASGNIFRYAYMGWYRQAPGKEREFVASIDRGANTYYADSVKGRFTISRDNAKNTVYLQMNSLKPEDTAVYYCAAHSRVRYRLVYWGQGTQVTVSS

SEQ ID NO: 16131 - protein, 122 aa, Artificial Sequence
  Chemically Synthesized
QVQLQESGGGLVQAGGSLRLSCAASGTIFAQFGMGWYRQAPGKERELVAGIDVGANTNYADSVKGRFTISRDNAKNTVYLQMNSLKPEDTAVYYCAAKEWPVPRDTGGLPYWGQGTQVTVSS

SEQ ID NO: 16132 - protein, 115 aa, Artificial Sequence
  Chemically Synthesized
QVQLQESGGGLVQAGGSLRLSCAASGTIFLLVLMGWYRQAPGKEREFVASIGYGSNTNYADSVKGRFTISRDNAKNTVYLQMNSLKPEDTAVYYCAHYYEGHSYWGQGTQVTVSS

SEQ ID NO: 16133 - protein, 118 aa, Artificial Sequence
  Chemically Synthesized
QVQLQESGGGLVQAGGSLRLSCAASGSIFRITDMGWYRQAPGKEREFVATINTGGSTYYADSVKGRFTISRDNAKNTVYLQMNSLKPEDTAVYYCAANYDVDFYFYYWGQGTQVTVSS

SEQ ID NO: 16134 - protein, 122 aa, Artificial Sequence
  Chemically Synthesized
QVQLQESGGGLVQAGGSLRLSCAASGYIFDGVDMGWYRQAPGKERELVATIDYGSITYYADSVKGRFTISRDNAKNTVYLQMNSLKPEDTAVYYCAAAAVDPRTYAISLAYWGQGTQVTVSS

SEQ ID NO: 16135 - protein, 118 aa, Artificial Sequence
  Chemically Synthesized
QVQLQESGGGLVQAGGSLRLSCAASGNISGDAYMGWYRQAPGKERELVAGIGAGANTYYADSVKGRFTISRDNAKNTVYLQMNSLKPEDTAVYYCAAQANNTYHLWYWGQGTQVTVSS

SEQ ID NO: 16136 - protein, 118 aa, Artificial Sequence
  Chemically Synthesized
QVQLQESGGGLVQAGGSLRLSCAASGSISRYYGMGWYRQAPGKERELVAAIDDGGTTYYADSVKGRFTISRDNAKNTVYLQMNSLKPEDTAVYYCAVLLSYPADFLYWGQGTQVTVSS

SEQ ID NO: 16137 - protein, 121 aa, Artificial Sequence
  Chemically Synthesized
QVQLQESGGGLVQAGGSLRLSCAASGTIFAQEDMGWYRQAPGKEREFVATISDGTSTYYADSVKGRFTISRDNAKNTVYLQMNSLKPEDTAVYYCAAYDNFVTDGIRLWYWGQGTQVTVSS

SEQ ID NO: 16138 - protein, 116 aa, Artificial Sequence
  Chemically Synthesized
QVQLQESGGGLVQAGGSLRLSCAASGSIFSRLMGWYRQAPGKERELVASIDLGSITYYADSVKGRFTISRDNAKNTVYLQMNSLKPEDTAVYYCAVLISVLFSFYWGQGTQVTVSS

SEQ ID NO: 16139 - protein, 122 aa, Artificial Sequence
  Chemically Synthesized
QVQLQESGGGLVQAGGSLRLSCAASGSIFYAYIMGWYRQAPGKERELVAAIGYGTSTNYADSVKGRFTISRDNAKNTVYLQMNSLKPEDTAVYYCAVRPSDADVVWYYYQYWGQGTQVTVSS

SEQ ID NO: 16140 - protein, 121 aa, Artificial Sequence
  Chemically Synthesized
QVQLQESGGGLVQAGGSLRLSCAASGYISDTAGMGWYRQAPGKERELVAGISDGSNTYYADSVKGRFTISRDNAKNTVYLQMNSLKPEDTAVYYCAARSSAVVRLSKLMYWGQGTQVTVSS

SEQ ID NO: 16141 - protein, 118 aa, Artificial Sequence
  Chemically Synthesized
QVQLQESGGGLVQAGGSLRLSCAASGNISSLSAMGWYRQAPGKERELVAGINGGASTYYADSVKGRFTISRDNAKNTVYLQMNSLKPEDTAVYYCAASQVANGRHNYWGQGTQVTVSS

SEQ ID NO: 16142 - protein, 118 aa, Artificial Sequence
  Chemically Synthesized
QVQLQESGGGLVQAGGSLRLSCAASGNIFYTDHMGWYRQAPGKERELVASITYGGITYYADSVKGRFTISRDNAKNTVYLQMNSLKPEDTAVYYCAVGPGRGSGFNYWGQGTQVTVSS

SEQ ID NO: 16143 - protein, 116 aa, Artificial Sequence
  Chemically Synthesized
QVQLQESGGGLVQAGGSLRLSCAASGNIFLTLMGWYRQAPGKEREFVATINLGANTNYADSVKGRFTISRDNAKNTVYLQMNSLKPEDTAVYYCAVRASTTVVMYWGQGTQVTVSS

SEQ ID NO: 16144 - protein, 118 aa, Artificial Sequence
  Chemically Synthesized
QVQLQESGGGLVQAGGSLRLSCAASGNISFSTVMGWYRQAPGKERELVAGIDYGTNTNYADSVKGRFTISRDNAKNTVYLQMNSLKPEDTAVYYCAVWEVLLGLHHYWGQGTQVTVSS

SEQ ID NO: 16145 - protein, 126 aa, Artificial Sequence
  Chemically Synthesized
QVQLQESGGGLVQAGGSLRLSCAASGYIFDYIHMGWYRQAPGKERELVAAIDDGATTNYADSVKGRFTISRDNAKNTVYLQMNSLKPEDTAVYYCAVDYVTYDQQFAYSDVDYSYWGQGTQVTVSS

SEQ ID NO: 16146 - protein, 118 aa, Artificial Sequence
  Chemically Synthesized
QVQLQESGGGLVQAGGSLRLSCAASGTIFRYSTMGWYRQAPGKEREFVAAINYGGTTNYADSVKGRFTISRDNAKNTVYLQMNSLKPEDTAVYYCAVGSYVWSNFLYWGQGTQVTVSS

SEQ ID NO: 16147 - protein, 122 aa, Artificial Sequence
  Chemically Synthesized
QVQLQESGGGLVQAGGSLRLSCAASGSISAYANMGWYRQAPGKEREFVAGIGRGSSTYYADSVKGRFTISRDNAKNTVYLQMNSLKPEDTAVYYCAVRYGILWTRGWYFDYWGQGTQVTVSS

SEQ ID NO: 16148 - protein, 122 aa, Artificial Sequence
  Chemically Synthesized
QVQLQESGGGLVQAGGSLRLSCAASGNISGAGNMGWYRQAPGKERELVAAISSGANTNYADSVKGRFTISRDNAKNTVYLQMNSLKPEDTAVYYCAAVYHKFQYYRPYFPYWGQGTQVTVSS

SEQ ID NO: 16149 - protein, 120 aa, Artificial Sequence
  Chemically Synthesized
QVQLQESGGGLVQAGGSLRLSCAASGGMGWYRQAPGKEREFVASIAQGSSTNYADSVKGRFTISRDNAKNTVYLQMNSLKPEDTAVYYCAVYYYYKVYYYWYQTLSYEYWGQGTQVTVSS

SEQ ID NO: 16150 - protein, 117 aa, Artificial Sequence
  Chemically Synthesized
QVQLQESGGGLVQAGGSLRLSCAASGNISVYPAMGWYRQAPGKERELVAGIASVVLPYADSVKGRFTISRDNAKNTVYLQMNSLKPEDTAVYYCAVYIGNDGVHSYWGQGTQVTVSS

SEQ ID NO: 16151 - protein, 118 aa, Artificial Sequence
  Chemically Synthesized
QVQLQESGGGLVQAGGSLRLSCAASGTISYLSDMGWYRQAPGKERELVATIGSGSNTYYADSVKGRFTISRDNAKNTVYLQMNSLKPEDTAVYYCAVSDYGGWGYGYWGQGTQVTVSS

SEQ ID NO: 16152 - protein, 118 aa, Artificial Sequence
  Chemically Synthesized
QVQLQESGGGLVQAGGSLRLSCAASGYISYFYYMGWYRQAPGKEREFVAGINYGGITYYADSVKGRFTISRDNAKNTVYLQMNSLKPEDTAVYYCAVYGGKGYDLYYWGQGTQVTVSS

SEQ ID NO: 16153 - protein, 118 aa, Artificial Sequence
  Chemically Synthesized
QVQLQESGGGLVQAGGSLRLSCAASGSIFPFLEMGWYRQAPGKEREFVAAITGGGTTYYADSVKGRFTISRDNAKNTVYLQMNSLKPEDTAVYYCAVDQYTVYALSYWGQGTQVTVSS

SEQ ID NO: 16154 - protein, 124 aa, Artificial Sequence
  Chemically Synthesized
QVQLQESGGGLVQAGGSLRLSCAASGTIFSTVMGWYRQAPGKERELVASITYGTNTNYADSVKGRFTISRDNAKNTVYLQMNSLKPEDTAVYYCAVGANTFTSGWQGDGDHSYWGQGTQVTVSS

SEQ ID NO: 16155 - protein, 125 aa, Artificial Sequence
  Chemically Synthesized
QVQLQESGGGLVQAGGSLRLSCAASGTIFFADYMGWYRQAPGKEREFVATISRGATTNYADSVKGRFTISRDNAKNTVYLQMNSLKPEDTAVYYCAADGGFCTTTRVTTRCGMYWGQGTQVTVSS

SEQ ID NO: 16156 - protein, 125 aa, Artificial Sequence
  Chemically Synthesized
QVQLQESGGGLVQAGGSLRLSCAASGTIFRLGYMGWYRQAPGKERELVAAINIGSTNYADSVKGRFTISRDNAKNTVYLQMNSLKPEDTAVYYCAADADDLDYVDDPGTGWHYYWGQGTQVTVSS

SEQ ID NO: 16157 - protein, 116 aa, Artificial Sequence
  Chemically Synthesized
QVQLQESGGGLVQAGGSLRLSCAASGTISPAAQMGWYRQAPGKEREFVASIASGASTYYADSVKGRFTISRDNAKNTVYLQMNSLKPEDTAVYYCAVIYYDALRYWGQGTQVTVSS

SEQ ID NO: 16158 - protein, 121 aa, Artificial Sequence
  Chemically Synthesized
QVQLQESGGGLVQAGGSLRLSCAASGTIFDDAHMGWYRQAPGKEREFVAGITLGGSTNYADSVKGRFTISRDNAKNTVYLQMNSLKPEDTAVYYCAVAFEYALTADRHHYWGQGTQVTVSS

SEQ ID NO: 16159 - protein, 122 aa, Artificial Sequence
  Chemically Synthesized
QVQLQESGGGLVQAGGSLRLSCAASGNISARVIMGWYRQAPGKEREFVAAVVLPYADSVKGRFTISRDNAKNTVYLQMNSLKPEDTAVYYCAVPIYDPPLVGYGRGEGHGYWGQGTQVTVSS

SEQ ID NO: 16160 - protein, 118 aa, Artificial Sequence
  Chemically Synthesized
QVQLQESGGGLVQAGGSLRLSCAASGSIFDIGLMGWYRQAPGKEREFVASIGYGGTTNYADSVKGRFTISRDNAKNTVYLQMNSLKPEDTAVYYCAAGLTDWVWHLYWGQGTQVTVSS

SEQ ID NO: 16161 - protein, 122 aa, Artificial Sequence
  Chemically Synthesized
QVQLQESGGGLVQAGGSLRLSCAASGSISRSGQMGWYRQAPGKERELVASITFGTSTNYADSVKGRFTISRDNAKNTVYLQMNSLKPEDTAVYYCAVSPNIDDEVRPYLDYWGQGTQVTVSS

SEQ ID NO: 16162 - protein, 125 aa, Artificial Sequence
  Chemically Synthesized
QVQLQESGGGLVQAGGSLRLSCAASGYISGGVTMGWYRQAPGKEREFVAAISRGSITNYADSVKGRFTISRDNAKNTVYLQMNSLKPEDTAVYYCAAYPRYLFAYPFNPSPHWYWGQGTQVTVSS

SEQ ID NO: 16163 - protein, 122 aa, Artificial Sequence
  Chemically Synthesized
QVQLQESGGGLVQAGGSLRLSCAASGTISYPYTMGWYRQAPGKEREFVASIAWGTTTYYADSVKGRFTISRDNAKNTVYLQMNSLKPEDTAVYYCAADPNGDAYRYADHRYWGQGTQVTVSS

SEQ ID NO: 16164 - protein, 118 aa, Artificial Sequence
  Chemically Synthesized
QVQLQESGGGLVQAGGSLRLSCAASGSIFYSYRMGWYRQAPGKERELVATITWGTSTNYADSVKGRFTISRDNAKNTVYLQMNSLKPEDTAVYYCAAWIDQSIVHLYWGQGTQVTVSS

SEQ ID NO: 16165 - protein, 117 aa, Artificial Sequence
  Chemically Synthesized
QVQLQESGGGLVQAGGSLRLSCAASGSIFTRYMGWYRQAPGKERELVAAIGPGGNTYYADSVKGRFTISRDNAKNTVYLQMNSLKPEDTAVYYCAADTPNSAVYTYWGQGTQVTVSS

SEQ ID NO: 16166 - protein, 122 aa, Artificial Sequence
  Chemically Synthesized
QVQLQESGGGLVQAGGSLRLSCAASGTISYWADMGWYRQAPGKEREFVATISDGSITYYADSVKGRFTISRDNAKNTVYLQMNSLKPEDTAVYYCAAAWSNGGGDVLGHDYWGQGTQVTVSS

SEQ ID NO: 16167 - protein, 112 aa, Artificial Sequence
  Chemically Synthesized
QVQLQESGGGLVQAGGSLRLSCAASGNIFDSRIMGWYRQAPGKERELVAGIADGSSTYYADSVKGRFTISRDNAKNTVYLQMNSLKPEDTAVYYCAVYHSYWGQGTQVTVSS

SEQ ID NO: 16168 - protein, 118 aa, Artificial Sequence
  Chemically Synthesized
QVQLQESGGGLVQAGGSLRLSCAASGSIFARPSMGWYRQAPGKERELVAGIDYGGITYYADSVKGRFTISRDNAKNTVYLQMNSLKPEDTAVYYCAAVEIEDDGLWYWGQGTQVTVSS

SEQ ID NO: 16169 - protein, 126 aa, Artificial Sequence
  Chemically Synthesized
QVQLQESGGGLVQAGGSLRLSCAASGNIFRGAIMGWYRQAPGKERELVATINPGANTNYADSVKGRFTISRDNAKNTVYLQMNSLKPEDTAVYYCAVYTADSWYYPPDDVDVHTYWGQGTQVTVSS

SEQ ID NO: 16170 - protein, 118 aa, Artificial Sequence
  Chemically Synthesized
QVQLQESGGGLVQAGGSLRLSCAASGTIFPLYAMGWYRQAPGKERELVAGIGSGSITYYADSVKGRFTISRDNAKNTVYLQMNSLKPEDTAVYYCAAEDDANYTHYYWGQGTQVTVSS

SEQ ID NO: 16171 - protein, 118 aa, Artificial Sequence
  Chemically Synthesized
QVQLQESGGGLVQAGGSLRLSCAASGTIFLIAVMGWYRQAPGKERELVAGINSGGSTNYADSVKGRFTISRDNAKNTVYLQMNSLKPEDTAVYYCAVKLDADRGYQYWGQGTQVTVSS

SEQ ID NO: 16172 - protein, 116 aa, Artificial Sequence
  Chemically Synthesized
QVQLQESGGGLVQAGGSLRLSCAASGSISSYWWMGWYRQAPGKEREFVAAITNGANTYYADSVKGRFTISRDNAKNTVYLQMNSLKPEDTAVYYCATTTTVTLMYWGQGTQVTVSS

SEQ ID NO: 16173 - protein, 117 aa, Artificial Sequence
  Chemically Synthesized
QVQLQESGGGLVQAGGSLRLSCAASGTIFGGSMGWYRQAPGKERELVAGITIGGSTYYADSVKGRFTISRDNAKNTVYLQMNSLKPEDTAVYYCAVYYRYSFEFLYWGQGTQVTVSS

SEQ ID NO: 16174 - protein, 122 aa, Artificial Sequence
  Chemically Synthesized
QVQLQESGGGLVQAGGSLRLSCAASGYISQVRLMGWYRQAPGKERELVAGIGDGGITNYADSVKGRFTISRDNAKNTVYLQMNSLKPEDTAVYYCAVSAVYSDLALRYFRYWGQGTQVTVSS

SEQ ID NO: 16175 - protein, 122 aa, Artificial Sequence
  Chemically Synthesized
QVQLQESGGGLVQAGGSLRLSCAASGYISPTGTMGWYRQAPGKEREFVASIGLGGSTNYADSVKGRFTISRDNAKNTVYLQMNSLKPEDTAVYYCAVGNGTWGGTRDYFIYWGQGTQVTVSS

SEQ ID NO: 16176 - protein, 119 aa, Artificial Sequence
  Chemically Synthesized
QVQLQESGGGLVQAGGSLRLSCAASGYIFYVGWMGWYRQAPGKEREFVASIARGAITNYADSVKGRFTISRDNAKNTVYLQMNSLKPEDTAVYYCAALPIPVGATHYYWGQGTQVTVSS

SEQ ID NO: 16177 - protein, 118 aa, Artificial Sequence
  Chemically Synthesized
QVQLQESGGGLVQAGGSLRLSCAASGNISDGKYMGWYRQAPGKEREFVAAISSGGITNYADSVKGRFTISRDNAKNTVYLQMNSLKPEDTAVYYCAASWPVWWFLYYWGQGTQVTVSS

SEQ ID NO: 16178 - protein, 126 aa, Artificial Sequence
  Chemically Synthesized
QVQLQESGGGLVQAGGSLRLSCAASGTIFQEYGMGWYRQAPGKERELVAGIGPGGSTYYADSVKGRFTISRDNAKNTVYLQMNSLKPEDTAVYYCAAPGDRNPNDIVADAWFFTYWGQGTQVTVSS

SEQ ID NO: 16179 - protein, 122 aa, Artificial Sequence
  Chemically Synthesized
QVQLQESGGGLVQAGGSLRLSCAASGTIFYVGYMGWYRQAPGKEREFVAAIAPGAITNYADSVKGRFTISRDNAKNTVYLQMNSLKPEDTAVYYCAAYYFIDRIAYYVHAYWGQGTQVTVSS

SEQ ID NO: 16180 - protein, 112 aa, Artificial Sequence
  Chemically Synthesized
QVQLQESGGGLVQAGGSLRLSCAASGNYMGWYRQAPGKERELVAAISIGGTTYYADSVKGRFTISRDNAKNTVYLQMNSLKPEDTAVYYCAADDVAYDLVYWGQGTQVTVSS

SEQ ID NO: 16181 - protein, 118 aa, Artificial Sequence
  Chemically Synthesized
QVQLQESGGGLVQAGGSLRLSCAASGTISTGPYMGWYRQAPGKERELVAGISYGGNTYYADSVKGRFTISRDNAKNTVYLQMNSLKPEDTAVYYCAVLYVRVRDLLYWGQGTQVTVSS

SEQ ID NO: 16182 - protein, 121 aa, Artificial Sequence
  Chemically Synthesized
QVQLQESGGGLVQAGGSLRLSCAASGTIFPTYTMGWYRQAPGKEREFVATITGGSITYADSVKGRFTISRDNAKNTVYLQMNSLKPEDTAVYYCAVKGGNHTRGRRGHAYWGQGTQVTVSS

SEQ ID NO: 16183 - protein, 115 aa, Artificial Sequence
  Chemically Synthesized
QVQLQESGGGLVQAGGSLRLSCAASGNISHSASMGWYRQAPGKERELVAAISTGTITNYADSVKGRFTISRDNAKNTVYLQMNSLKPEDTAVYYCAAFGPYFYYWGQGTQVTVSS

SEQ ID NO: 16184 - protein, 118 aa, Artificial Sequence
  Chemically Synthesized
QVQLQESGGGLVQAGGSLRLSCAASGTIFYYYLMGWYRQAPGKEREFVAGIGTGGITNYADSVKGRFTISRDNAKNTVYLQMNSLKPEDTAVYYCAAHYDRDDVLPYWGQGTQVTVSS

SEQ ID NO: 16185 - protein, 117 aa, Artificial Sequence
  Chemically Synthesized
QVQLQESGGGLVQAGGSLRLSCAASGYISSKGDMGWYRQAPGKERELVASLMLVVVPYADSVKGRFTISRDNAKNTVYLQMNSLKPEDTAVYYCAALDDGGVDFYYWGQGTQVTVSS

SEQ ID NO: 16186 - protein, 118 aa, Artificial Sequence
  Chemically Synthesized
QVQLQESGGGLVQAGGSLRLSCAASGTISSSPTMGWYRQAPGKERELVAAIADGGTTYYADSVKGRFTISRDNAKNTVYLQMNSLKPEDTAVYYCAVGIPSGATYVYWGQGTQVTVSS

SEQ ID NO: 16187 - protein, 118 aa, Artificial Sequence
  Chemically Synthesized
QVQLQESGGGLVQAGGSLRLSCAASGYISPEYYMGWYRQAPGKERELVASITAGGSTNYADSVKGRFTISRDNAKNTVYLQMNSLKPEDTAVYYCAATLYGYYLHTYWGQGTQVTVSS

SEQ ID NO: 16188 - protein, 109 aa, Artificial Sequence
  Chemically Synthesized
QVQLQESGGGLVQAGGSLRLSCAASGSILVTVMGWYRQAPGKERELVAAIDDGTTTYYADSVKGRFTISRDNAKNTVYLQMNSLKPEDTAVYYCAAGYWGQGTQVTVSS

SEQ ID NO: 16189 - protein, 122 aa, Artificial Sequence
  Chemically Synthesized
QVQLQESGGGLVQAGGSLRLSCAASGTIFGLPYMGWYRQAPGKERELVAAIDIGGNTYYADSVKGRFTISRDNAKNTVYLQMNSLKPEDTAVYYCAAYSDSPYGTDIQFQYWGQGTQVTVSS

SEQ ID NO: 16190 - protein, 121 aa, Artificial Sequence
  Chemically Synthesized
QVQLQESGGGLVQAGGSLRLSCAASGYISEYRRMGWYRQAPGKEREFVATINRGGSTNYADSVKGRFTISRDNAKNTVYLQMNSLKPEDTAVYYCAVRGRYDTRNDWLDYWGQGTQVTVSS

SEQ ID NO: 16191 - protein, 118 aa, Artificial Sequence
  Chemically Synthesized
QVQLQESGGGLVQAGGSLRLSCAASGYISYFSGMGWYRQAPGKERELVASIADGATTNYADSVKGRFTISRDNAKNTVYLQMNSLKPEDTAVYYCAADYYFVHYHPYWGQGTQVTVSS

SEQ ID NO: 16192 - protein, 117 aa, Artificial Sequence
  Chemically Synthesized
QVQLQESGGGLVQAGGSLRLSCAASGYIFPVVMGWYRQAPGKERELVAGISPGSTTNYADSVKGRFTISRDNAKNTVYLQMNSLKPEDTAVYYCAVVYNYTSQHTYWGQGTQVTVSS

SEQ ID NO: 16193 - protein, 118 aa, Artificial Sequence
  Chemically Synthesized
QVQLQESGGGLVQAGGSLRLSCAASGTISDPPYMGWYRQAPGKEREFVAGINQGAITYYADSVKGRFTISRDNAKNTVYLQMNSLKPEDTAVYYCAVRDTYEYPFVYWGQGTQVTVSS

SEQ ID NO: 16194 - protein, 118 aa, Artificial Sequence
  Chemically Synthesized
QVQLQESGGGLVQAGGSLRLSCAASGYIFDTPYMGWYRQAPGKERELVASIGSGGTTYYADSVKGRFTISRDNAKNTVYLQMNSLKPEDTAVYYCAAPYRDYAYHYYWGQGTQVTVSS

SEQ ID NO: 16195 - protein, 118 aa, Artificial Sequence
  Chemically Synthesized
QVQLQESGGGLVQAGGSLRLSCAASGSIFGGDEMGWYRQAPGKERELVAGINTGGNTNYADSVKGRFTISRDNAKNTVYLQMNSLKPEDTAVYYCAADDYGPPTLAYWGQGTQVTVSS

SEQ ID NO: 16196 - protein, 118 aa, Artificial Sequence
  Chemically Synthesized
QVQLQESGGGLVQAGGSLRLSCAASGTISPWRDMGWYRQAPGKEREFVASIGVGAITYYADSVKGRFTISRDNAKNTVYLQMNSLKPEDTAVYYCAVLLYFPGGLYYWGQGTQVTVSS

SEQ ID NO: 16197 - protein, 118 aa, Artificial Sequence
  Chemically Synthesized
QVQLQESGGGLVQAGGSLRLSCAASGTISDLGHMGWYRQAPGKEREFVAAISVGGSTNYADSVKGRFTISRDNAKNTVYLQMNSLKPEDTAVYYCAAFYYNRYVLWYWGQGTQVTVSS

SEQ ID NO: 16198 - protein, 118 aa, Artificial Sequence
  Chemically Synthesized
QVQLQESGGGLVQAGGSLRLSCAASGNISRDYYMGWYRQAPGKERELVASIAYGSSTYYADSVKGRFTISRDNAKNTVYLQMNSLKPEDTAVYYCAVDPVGKYQFHYWGQGTQVTVSS

SEQ ID NO: 16199 - protein, 122 aa, Artificial Sequence
  Chemically Synthesized
QVQLQESGGGLVQAGGSLRLSCAASGYIFAYDWMGWYRQAPGKERELVAAISWGTNTYYADSVKGRFTISRDNAKNTVYLQMNSLKPEDTAVYYCAASYKGNVEYARGHYYWGQGTQVTVSS

SEQ ID NO: 16200 - protein, 122 aa, Artificial Sequence
  Chemically Synthesized
QVQLQESGGGLVQAGGSLRLSCAASGYIFYTAYMGWYRQAPGKERELVAAIGPGSTTNYADSVKGRFTISRDNAKNTVYLQMNSLKPEDTAVYYCAARTGRGGYYRATHGYWGQGTQVTVSS

SEQ ID NO: 16201 - protein, 122 aa, Artificial Sequence
  Chemically Synthesized
QVQLQESGGGLVQAGGSLRLSCAASGYISFHYSMGWYRQAPGKERELVASIGYGSITNYADSVKGRFTISRDNAKNTVYLQMNSLKPEDTAVYYCAARRWAYGADPLRFEYWGQGTQVTVSS

SEQ ID NO: 16202 - protein, 115 aa, Artificial Sequence
  Chemically Synthesized
QVQLQESGGGLVQAGGSLRLSCAASGNISGDEAMGWYRQAPGKEREFVALIPYADSVKGRFTISRDNAKNTVYLQMNSLKPEDTAVYYCAVYRFDYSTGIYLSYWGQGTQVTVSS

SEQ ID NO: 16203 - protein, 118 aa, Artificial Sequence
  Chemically Synthesized
QVQLQESGGGLVQAGGSLRLSCAASGSISPGQRMGWYRQAPGKEREFVASITSGTITNYADSVKGRFTISRDNAKNTVYLQMNSLKPEDTAVYYCAAPQWAYGSYRYWGQGTQVTVSS

SEQ ID NO: 16204 - protein, 122 aa, Artificial Sequence
  Chemically Synthesized
QVQLQESGGGLVQAGGSLRLSCAASGTISPYTYMGWYRQAPGKEREFVAGITNGSTTYYADSVKGRFTISRDNAKNTVYLQMNSLKPEDTAVYYCAVTYAYSEPYYAYHEYWGQGTQVTVSS

SEQ ID NO: 16205 - protein, 118 aa, Artificial Sequence
  Chemically Synthesized
QVQLQESGGGLVQAGGSLRLSCAASGTIFGQVDMGWYRQAPGKERELVAGITTWWYYLYADSVKGRFTISRDNAKNTVYLQMNSLKPEDTAVYYCAAVPYTGRYHGYWGQGTQVTVSS

SEQ ID NO: 16206 - protein, 118 aa, Artificial Sequence
  Chemically Synthesized
QVQLQESGGGLVQAGGSLRLSCAASGSIFDQYYMGWYRQAPGKEREFVASIDVGGITNYADSVKGRFTISRDNAKNTVYLQMNSLKPEDTAVYYCAAYTYFTHDLSYWGQGTQVTVSS

SEQ ID NO: 16207 - protein, 115 aa, Artificial Sequence
  Chemically Synthesized
QVQLQESGGGLVQAGGSLRLSCAASGNISAFTMGWYRQAPGKERELVATIDIGASTNYADSVKGRFTISRDNAKNTVYLQMNSLKPEDTAVYYCAATYFDSLMYWGQGTQVTVSS

SEQ ID NO: 16208 - protein, 118 aa, Artificial Sequence
  Chemically Synthesized
QVQLQESGGGLVQAGGSLRLSCAASGYISYQRNMGWYRQAPGKERELVAGIAPGAITYYADSVKGRFTISRDNAKNTVYLQMNSLKPEDTAVYYCAAYSRTRGRHLYWGQGTQVTVSS

SEQ ID NO: 16209 - protein, 110 aa, Artificial Sequence
  Chemically Synthesized
QVQLQESGGGLVQAGGSLRLSCAASGNISANNYMGWYRQAPGKERELVAAIGKGSSTYYADSVKGRFTISRDNAKNTVYLQMNSLKPEDTAVYYCAVYYWGQGTQVTVSS

SEQ ID NO: 16210 - protein, 126 aa, Artificial Sequence
  Chemically Synthesized
QVQLQESGGGLVQAGGSLRLSCAASGTIFYIATMGWYRQAPGKERELVAAIARGSSTYYADSVKGRFTISRDNAKNTVYLQMNSLKPEDTAVYYCAARATTYEWRGIGHTTYHGYWGQGTQVTVSS

SEQ ID NO: 16211 - protein, 118 aa, Artificial Sequence
  Chemically Synthesized
QVQLQESGGGLVQAGGSLRLSCAASGTISGASFMGWYRQAPGKERELVASIGVGTTTYYADSVKGRFTISRDNAKNTVYLQMNSLKPEDTAVYYCAVVGHRQDLFGYWGQGTQVTVSS

SEQ ID NO: 16212 - protein, 118 aa, Artificial Sequence
  Chemically Synthesized
QVQLQESGGGLVQAGGSLRLSCAASGSIFLYGGMGWYRQAPGKERELVASIADGTTTYYADSVKGRFTISRDNAKNTVYLQMNSLKPEDTAVYYCAVGTSGVYSHDYWGQGTQVTVSS

SEQ ID NO: 16213 - protein, 122 aa, Artificial Sequence
  Chemically Synthesized
QVQLQESGGGLVQAGGSLRLSCAASGTISTDIRMGWYRQAPGKERELVATIGAGGTTQYADSVKGRFTISRDNAKNTVYLQMNSLKPEDTAVYYCAAGRQIRVLIQYPLDYWGQGTQVTVSS

SEQ ID NO: 16214 - protein, 116 aa, Artificial Sequence
  Chemically Synthesized
QVQLQESGGGLVQAGGSLRLSCAASGFSSSDMGWYRQAPGKERELVAGISSGGITYYADSVKGRFTISRDNAKNTVYLQMNSLKPEDTAVYYCAVGDYDDPSHAYWGQGTQVTVSS

SEQ ID NO: 16215 - protein, 126 aa, Artificial Sequence
  Chemically Synthesized
QVQLQESGGGLVQAGGSLRLSCAASGNIFLYPSMGWYRQAPGKERELVATIDHGGTTYYADSVKGRFTISRDNAKNTVYLQMNSLKPEDTAVYYCAAVANQVYEWDYLNYDRLGYWGQGTQVTVSS

SEQ ID NO: 16216 - protein, 118 aa, Artificial Sequence
  Chemically Synthesized
QVQLQESGGGLVQAGGSLRLSCAASGNISGVRHMGWYRQAPGKERELVASIAFGANTNYADSVKGRFTISRDNAKNTVYLQMNSLKPEDTAVYYCAVYQVYSRPYVYWGQGTQVTVSS

SEQ ID NO: 16217 - protein, 118 aa, Artificial Sequence
  Chemically Synthesized
QVQLQESGGGLVQAGGSLRLSCAASGYISRDDDMGWYRQAPGKERELVAAISVGGITNYADSVKGRFTISRDNAKNTVYLQMNSLKPEDTAVYYCAADVPYDQTLGYWGQGTQVTVSS

SEQ ID NO: 16218 - protein, 122 aa, Artificial Sequence
  Chemically Synthesized
QVQLQESGGGLVQAGGSLRLSCAASGSIFDDRTMGWYRQAPGKERELVAGITDGAITYYADSVKGRFTISRDNAKNTVYLQMNSLKPEDTAVYYCAAHSYIDGYYRYYHYYWGQGTQVTVSS

SEQ ID NO: 16219 - protein, 126 aa, Artificial Sequence
  Chemically Synthesized
QVQLQESGGGLVQAGGSLRLSCAASGSISYAYGMGWYRQAPGKEREFVASITDGSSTNYADSVKGRFTISRDNAKNTVYLQMNSLKPEDTAVYYCAVYTRNVGYDDWETDVTHGYWGQGTQVTVSS

SEQ ID NO: 16220 - protein, 122 aa, Artificial Sequence
  Chemically Synthesized
QVQLQESGGGLVQAGGSLRLSCAASGTISIGIYMGWYRQAPGKEREFVASISPGAITYYADSVKGRFTISRDNAKNTVYLQMNSLKPEDTAVYYCAVYLLNSDGYVWYLGYWGQGTQVTVSS

SEQ ID NO: 16221 - protein, 122 aa, Artificial Sequence
  Chemically Synthesized
QVQLQESGGGLVQAGGSLRLSCAASGTISWTNVMGWYRQAPGKERELVASIDQGATTNYADSVKGRFTISRDNAKNTVYLQMNSLKPEDTAVYYCAAWQQLDDAYSRYHPYWGQGTQVTVSS

SEQ ID NO: 16222 - protein, 116 aa, Artificial Sequence
  Chemically Synthesized
QVQLQESGGGLVQAGGSLRLSCAASGNISLHFTMGWYRQAPGKEREFVAGINVGGTTNYADSVKGRFTISRDNAKNTVYLQMNSLKPEDTAVYYCAATRYQNVAYWGQGTQVTVSS

SEQ ID NO: 16223 - protein, 121 aa, Artificial Sequence
  Chemically Synthesized
QVQLQESGGGLVQAGGSLRLSCAASGSISESTMGWYRQAPGKERELVAGINVGSTTNYADSVKGRFTISRDNAKNTVYLQMNSLKPEDTAVYYCAAQDIDDWDEVYYLDYWGQGTQVTVSS

SEQ ID NO: 16224 - protein, 118 aa, Artificial Sequence
  Chemically Synthesized
QVQLQESGGGLVQAGGSLRLSCAASGSISRLDAMGWYRQAPGKERELVAAIGRGASTYYADSVKGRFTISRDNAKNTVYLQMNSLKPEDTAVYYCAAPYDHYRGYGYWGQGTQVTVSS

SEQ ID NO: 16225 - protein, 122 aa, Artificial Sequence
  Chemically Synthesized
QVQLQESGGGLVQAGGSLRLSCAASGTIFLVGGMGWYRQAPGKERELVATITWGANTNYADSVKGRFTISRDNAKNTVYLQMNSLKPEDTAVYYCAVTVRNRELPVDAYPYWGQGTQVTVSS

SEQ ID NO: 16226 - protein, 126 aa, Artificial Sequence
  Chemically Synthesized
QVQLQESGGGLVQAGGSLRLSCAASGSISELTDMGWYRQAPGKERELVAAINIGSTTYYADSVKGRFTISRDNAKNTVYLQMNSLKPEDTAVYYCAARDGPYIPEDYERKYSLRYWGQGTQVTVSS

SEQ ID NO: 16227 - protein, 117 aa, Artificial Sequence
  Chemically Synthesized
QVQLQESGGGLVQAGGSLRLSCAASGNISRSTMGWYRQAPGKEREFVAAIAFGATTYYADSVKGRFTISRDNAKNTVYLQMNSLKPEDTAVYYCAVEAQRYDRFTYWGQGTQVTVSS

SEQ ID NO: 16228 - protein, 122 aa, Artificial Sequence
  Chemically Synthesized
QVQLQESGGGLVQAGGSLRLSCAASGSIFGGAFMGWYRQAPGKEREFVAGINRGGNTNYADSVKGRFTISRDNAKNTVYLQMNSLKPEDTAVYYCAVVWWYYYAERRSHRYWGQGTQVTVSS

SEQ ID NO: 16229 - protein, 118 aa, Artificial Sequence
  Chemically Synthesized
QVQLQESGGGLVQAGGSLRLSCAASGYIFDAYIMGWYRQAPGKEREFVAAIGPGSITYYADSVKGRFTISRDNAKNTVYLQMNSLKPEDTAVYYCAASIGFVGKYVYWGQGTQVTVSS

SEQ ID NO: 16230 - protein, 121 aa, Artificial Sequence
  Chemically Synthesized
QVQLQESGGGLVQAGGSLRLSCAASGYIFITSGMGWYRQAPGKERELVASGWGASTNYADSVKGRFTISRDNAKNTVYLQMNSLKPEDTAVYYCAVSGNRGGDVFSYHKYWGQGTQVTVSS

SEQ ID NO: 16231 - protein, 117 aa, Artificial Sequence
  Chemically Synthesized
QVQLQESGGGLVQAGGSLRLSCAASGSISQQSMGWYRQAPGKEREFVAGIDTGANTYYADSVKGRFTISRDNAKNTVYLQMNSLKPEDTAVYYCAVSPAVKYAHVYWGQGTQVTVSS

SEQ ID NO: 16232 - protein, 118 aa, Artificial Sequence
  Chemically Synthesized
QVQLQESGGGLVQAGGSLRLSCAASGTISSLAVMGWYRQAPGKEREFVASITTGSSTNYADSVKGRFTISRDNAKNTVYLQMNSLKPEDTAVYYCAVTDTVGRTHLYWGQGTQVTVSS

SEQ ID NO: 16233 - protein, 122 aa, Artificial Sequence
  Chemically Synthesized
QVQLQESGGGLVQAGGSLRLSCAASGTISNGPRMGWYRQAPGKEREFVATINDGTSTNYADSVKGRFTISRDNAKNTVYLQMNSLKPEDTAVYYCAVYVLKSQGGYDYHGYWGQGTQVTVSS

SEQ ID NO: 16234 - protein, 117 aa, Artificial Sequence
  Chemically Synthesized
QVQLQESGGGLVQAGGSLRLSCAASGYISAYGDMGWYRQAPGKERELVAAIAYGASTNYADSVKGRFTISRDNAKNTVYLQMNSLKPEDTAVYYCAAEFEDSSVIYWGQGTQVTVSS

SEQ ID NO: 16235 - protein, 117 aa, Artificial Sequence
  Chemically Synthesized
QVQLQESGGGLVQAGGSLRLSCAASGTISYILSMGWYRQAPGKERELVAAIASVVLPYADSVKGRFTISRDNAKNTVYLQMNSLKPEDTAVYYCAVAWDDTWLLSYWGQGTQVTVSS

SEQ ID NO: 16236 - protein, 122 aa, Artificial Sequence
  Chemically Synthesized
QVQLQESGGGLVQAGGSLRLSCAASGSISAYYQMGWYRQAPGKERELVAAIGLGSNTNYADSVKGRFTISRDNAKNTVYLQMNSLKPEDTAVYYCAAVHDDSYYLDSTHPYWGQGTQVTVSS

SEQ ID NO: 16237 - protein, 117 aa, Artificial Sequence
  Chemically Synthesized
QVQLQESGGGLVQAGGSLRLSCAASGYIFKSWSMGWYRQAPGKEREFVAGIAGGSNTNYADSVKGRFTISRDNAKNTVYLQMNSLKPEDTAVYYCAATDKYPHHYYWGQGTQVTVSS

SEQ ID NO: 16238 - protein, 118 aa, Artificial Sequence
  Chemically Synthesized
QVQLQESGGGLVQAGGSLRLSCAASGNIFGGAIMGWYRQAPGKEREFVASIDYGGITYYADSVKGRFTISRDNAKNTVYLQMNSLKPEDTAVYYCAALFYYAGYFYYWGQGTQVTVSS

SEQ ID NO: 16239 - protein, 109 aa, Artificial Sequence
  Chemically Synthesized
QVQLQESGGGLVQAGGSLRLSCAASGYISQDSMGWYRQAPGKEREFVAAIDYGGSTYYADSVKGRFTISRDNAKNTVYLQMNSLKPEDTAVYYCAVSYWGQGTQVTVSS

SEQ ID NO: 16240 - protein, 121 aa, Artificial Sequence
  Chemically Synthesized
QVQLQESGGGLVQAGGSLRLSCAASGSISGYPIMGWYRQAPGKERELVAAISFGTTTYYADSVKGRFTISRDNAKNTVYLQMNSLKPEDTAVYYCAVYVRPPANSGPALYWGQGTQVTVSS

SEQ ID NO: 16241 - protein, 118 aa, Artificial Sequence
  Chemically Synthesized
QVQLQESGGGLVQAGGSLRLSCAASGSISQYPYMGWYRQAPGKEREFVAAISGGTNTYYADSVKGRFTISRDNAKNTVYLQMNSLKPEDTAVYYCAVYGYRDTYFYYWGQGTQVTVSS

SEQ ID NO: 16242 - protein, 126 aa, Artificial Sequence
  Chemically Synthesized
QVQLQESGGGLVQAGGSLRLSCAASGTISYRVSMGWYRQAPGKERELVAAISDGSNTNYADSVKGRFTISRDNAKNTVYLQMNSLKPEDTAVYYCAVGVYTGYAQTRRGAYPFRYWGQGTQVTVSS

SEQ ID NO: 16243 - protein, 121 aa, Artificial Sequence
  Chemically Synthesized
QVQLQESGGGLVQAGGSLRLSCAASGSISPYGYMGWYRQAPGKEREFVATINGGSTNYADSVKGRFTISRDNAKNTVYLQMNSLKPEDTAVYYCAVLDGGVSGYKAAHTYWGQGTQVTVSS

SEQ ID NO: 16244 - protein, 121 aa, Artificial Sequence
  Chemically Synthesized
QVQLQESGGGLVQAGGSLRLSCAASGYIFVQAVMGWYRQAPGKERELVASITGGTTYYADSVKGRFTISRDNAKNTVYLQMNSLKPEDTAVYYCAVAQRYYYHGRRSYYYWGQGTQVTVSS

SEQ ID NO: 16245 - protein, 126 aa, Artificial Sequence
  Chemically Synthesized
QVQLQESGGGLVQAGGSLRLSCAASGYIFPYGLMGWYRQAPGKERELVAAIGDGTITYYADSVKGRFTISRDNAKNTVYLQMNSLKPEDTAVYYCAVAHWWYDSYAPYPAWYYSYWGQGTQVTVSS

SEQ ID NO: 16246 - protein, 125 aa, Artificial Sequence
  Chemically Synthesized
QVQLQESGGGLVQAGGSLRLSCAASGNISRGRYMGWYRQAPGKEREFVAAITSVLLPYADSVKGRFTISRDNAKNTVYLQMNSLKPEDTAVYYCAVADYYRNYLDSLRDFLHDYWGQGTQVTVSS

SEQ ID NO: 16247 - protein, 114 aa, Artificial Sequence
  Chemically Synthesized
QVQLQESGGGLVQAGGSLRLSCAASGYISYRDGMGWYRQAPGKEREFVAGIGGGGTTYYADSVKGRFTISRDNAKNTVYLQMNSLKPEDTAVYYCAADAGYAYWGQGTQVTVSS

SEQ ID NO: 16248 - protein, 117 aa, Artificial Sequence
  Chemically Synthesized
QVQLQESGGGLVQAGGSLRLSCAASGTIFADQYMGWYRQAPGKERELVASITGGGNTNYADSVKGRFTISRDNAKNTVYLQMNSLKPEDTAVYYCAVGQYVSGLFYWGQGTQVTVSS

SEQ ID NO: 16249 - protein, 117 aa, Artificial Sequence
  Chemically Synthesized
QVQLQESGGGLVQAGGSLRLSCAASGSIFYRYGMGWYRQAPGKERELVATILLVVIPYADSVKGRFTISRDNAKNTVYLQMNSLKPEDTAVYYCAVDASGDYQLAYWGQGTQVTVSS

SEQ ID NO: 16250 - protein, 118 aa, Artificial Sequence
  Chemically Synthesized
QVQLQESGGGLVQAGGSLRLSCAASGTISPWSYMGWYRQAPGKERELVAGITDGANTYYADSVKGRFTISRDNAKNTVYLQMNSLKPEDTAVYYCAATADSWLSFYYWGQGTQVTVSS

SEQ ID NO: 16251 - protein, 117 aa, Artificial Sequence
  Chemically Synthesized
QVQLQESGGGLVQAGGSLRLSCAASGNISSSFMGWYRQAPGKEREFVAGINYGASTYYADSVKGRFTISRDNAKNTVYLQMNSLKPEDTAVYYCAAYRVDTNYYRYWGQGTQVTVSS

SEQ ID NO: 16252 - protein, 117 aa, Artificial Sequence
  Chemically Synthesized
QVQLQESGGGLVQAGGSLRLSCAASGTIFVIPRMGWYRQAPGKEREFVPLLIRCYYQYADSVKGRFTISRDNAKNTVYLQMNSLKPEDTAVYYCAVPSRLYPPYGYWGQGTQVTVSS

SEQ ID NO: 16253 - protein, 116 aa, Artificial Sequence
  Chemically Synthesized
QVQLQESGGGLVQAGGSLRLSCAASGNISSYLVMGWYRQAPGKERELVVLLTVVLPYADSVKGRFTISRDNAKNTVYLQMNSLKPEDTAVYYCAVQPDYDHVYDYWGQGTQVTVSS

SEQ ID NO: 16254 - protein, 122 aa, Artificial Sequence
  Chemically Synthesized
QVQLQESGGGLVQAGGSLRLSCAASGTISLLQYMGWYRQAPGKEREFVASITAGATTNYADSVKGRFTISRDNAKNTVYLQMNSLKPEDTAVYYCAAVARYRDSRRAPYGYWGQGTQVTVSS

SEQ ID NO: 16255 - protein, 122 aa, Artificial Sequence
  Chemically Synthesized
QVQLQESGGGLVQAGGSLRLSCAASGTIFGSPWMGWYRQAPGKERELVASIGSGASTNYADSVKGRFTISRDNAKNTVYLQMNSLKPEDTAVYYCAVQVVYYFPGPYDHDYWGQGTQVTVSS

SEQ ID NO: 16256 - protein, 117 aa, Artificial Sequence
  Chemically Synthesized
QVQLQESGGGLVQAGGSLRLSCAASGNIFPIEAMGWYRQAPGKEREFVAGIADGSTTYYADSVKGRFTISRDNAKNTVYLQMNSLKPEDTAVYYCAAYDGGWSDHYWGQGTQVTVSS

SEQ ID NO: 16257 - protein, 121 aa, Artificial Sequence
  Chemically Synthesized
QVQLQESGGGLVQAGGSLRLSCAASGSIFITSRMGWYRQAPGKEREFVAAITYGATTNYADSVKGRFTISRDNAKNTVYLQMNSLKPEDTAVYYCAAVRERPSRYGRHYYWGQGTQVTVSS

SEQ ID NO: 16258 - protein, 118 aa, Artificial Sequence
  Chemically Synthesized
QVQLQESGGGLVQAGGSLRLSCAASGYISGAVSMGWYRQAPGKEREFVATISSGGNTYYADSVKGRFTISRDNAKNTVYLQMNSLKPEDTAVYYCAAVTYGHPRFYYWGQGTQVTVSS

SEQ ID NO: 16259 - protein, 122 aa, Artificial Sequence
  Chemically Synthesized
QVQLQESGGGLVQAGGSLRLSCAASGNISRTRYMGWYRQAPGKEREFVASINTGAITNYADSVKGRFTISRDNAKNTVYLQMNSLKPEDTAVYYCAARALRLWGGQRYLSYWGQGTQVTVSS

SEQ ID NO: 16260 - protein, 121 aa, Artificial Sequence
  Chemically Synthesized
QVQLQESGGGLVQAGGSLRLSCAASGTIFASYYMGWYRQAPGKEREFVAAIDRGGTTYYADSVKGRFTISRDNAKNTVYLQMNSLKPEDTAVYYCAAHVSWNVTLTFLMYWGQGTQVTVSS

SEQ ID NO: 16261 - protein, 118 aa, Artificial Sequence
  Chemically Synthesized
QVQLQESGGGLVQAGGSLRLSCAASGNIFTRVGMGWYRQAPGKEREFVATINSGTTTYYADSVKGRFTISRDNAKNTVYLQMNSLKPEDTAVYYCAADAGDRIRLDYWGQGTQVTVSS

SEQ ID NO: 16262 - protein, 118 aa, Artificial Sequence
  Chemically Synthesized
QVQLQESGGGLVQAGGSLRLSCAASGSISAWWYMGWYRQAPGKERELVAAIGGGTNTNYADSVKGRFTISRDNAKNTVYLQMNSLKPEDTAVYYCAVFYDYGYTLSYWGQGTQVTVSS

SEQ ID NO: 16263 - protein, 116 aa, Artificial Sequence
  Chemically Synthesized
QVQLQESGGGLVQAGGSLRLSCAASGTISQGRPMGWYRQAPGKEREFVATIGGGASTNYADSVKGRFTISRDNAKNTVYLQMNSLKPEDTAVYYCAAYIDSTHYYWGQGTQVTVSS

SEQ ID NO: 16264 - protein, 122 aa, Artificial Sequence
  Chemically Synthesized
QVQLQESGGGLVQAGGSLRLSCAASGYIFRRSYMGWYRQAPGKERELVAAIASGGNTYYADSVKGRFTISRDNAKNTVYLQMNSLKPEDTAVYYCAAYRYGTSARYYDHDYWGQGTQVTVSS

SEQ ID NO: 16265 - protein, 118 aa, Artificial Sequence
  Chemically Synthesized
QVQLQESGGGLVQAGGSLRLSCAASGSISIVEAMGWYRQAPGKEREFVASIGQGTITNYADSVKGRFTISRDNAKNTVYLQMNSLKPEDTAVYYCAAIVRGRKLLSYWGQGTQVTVSS

SEQ ID NO: 16266 - protein, 118 aa, Artificial Sequence
  Chemically Synthesized
QVQLQESGGGLVQAGGSLRLSCAASGTISYLLDMGWYRQAPGKERELVAAIGYGSTTYYADSVKGRFTISRDNAKNTVYLQMNSLKPEDTAVYYCAVDDGNARTHGYWGQGTQVTVSS

SEQ ID NO: 16267 - protein, 118 aa, Artificial Sequence
  Chemically Synthesized
QVQLQESGGGLVQAGGSLRLSCAASGNISLPVPMGWYRQAPGKEREFVAAIGTGANTNYADSVKGRFTISRDNAKNTVYLQMNSLKPEDTAVYYCAVTKRFSDRYAYWGQGTQVTVSS

SEQ ID NO: 16268 - protein, 118 aa, Artificial Sequence
  Chemically Synthesized
QVQLQESGGGLVQAGGSLRLSCAASGSISSFTYMGWYRQAPGKEREFVATIDAGTSTNYADSVKGRFTISRDNAKNTVYLQMNSLKPEDTAVYYCAAPYEDRQDHTYWGQGTQVTVSS

SEQ ID NO: 16269 - protein, 126 aa, Artificial Sequence
  Chemically Synthesized
QVQLQESGGGLVQAGGSLRLSCAASGSISDPPYMGWYRQAPGKERELVAGIGIGANTYYADSVKGRFTISRDNAKNTVYLQMNSLKPEDTAVYYCAAWDRGTSYTGFNEDDDHDYWGQGTQVTVSS

SEQ ID NO: 16270 - protein, 117 aa, Artificial Sequence
  Chemically Synthesized
QVQLQESGGGLVQAGGSLRLSCAASGYIFHHYMGWYRQAPGKEREFVAAIDDGAITYYADSVKGRFTISRDNAKNTVYLQMNSLKPEDTAVYYCAARSDDRDAHPYWGQGTQVTVSS

SEQ ID NO: 16271 - protein, 118 aa, Artificial Sequence
  Chemically Synthesized
QVQLQESGGGLVQAGGSLRLSCAASGNIFDYQYMGWYRQAPGKERELVASIGSGGITQYADSVKGRFTISRDNAKNTVYLQMNSLKPEDTAVYYCAADFTLFSDHTYWGQGTQVTVSS

SEQ ID NO: 16272 - protein, 125 aa, Artificial Sequence
  Chemically Synthesized
QVQLQESGGGLVQAGGSLRLSCAASGYIFDPIMGWYRQAPGKEREFVAGITKGTNTNYADSVKGRFTISRDNAKNTVYLQMNSLKPEDTAVYYCAAVGQGYPSGTYDSRTYHAYWGQGTQVTVSS

SEQ ID NO: 16273 - protein, 118 aa, Artificial Sequence
  Chemically Synthesized
QVQLQESGGGLVQAGGSLRLSCAASGYISSTWDMGWYRQAPGKERELVAGITSGATTYYADSVKGRFTISRDNAKNTVYLQMNSLKPEDTAVYYCAADRYDSAEHQYWGQGTQVTVSS

SEQ ID NO: 16274 - protein, 118 aa, Artificial Sequence
  Chemically Synthesized
QVQLQESGGGLVQAGGSLRLSCAASGNISHGKYMGWYRQAPGKERELVASISNGSSTNYADSVKGRFTISRDNAKNTVYLQMNSLKPEDTAVYYCAAETDVTATFDYWGQGTQVTVSS

SEQ ID NO: 16275 - protein, 121 aa, Artificial Sequence
  Chemically Synthesized
QVQLQESGGGLVQAGGSLRLSCAASGYIFDVIMGWYRQAPGKEREFVAGIGGGASTNYADSVKGRFTISRDNAKNTVYLQMNSLKPEDTAVYYCAVLYRYEGTGYQYHSYWGQGTQVTVSS

SEQ ID NO: 16276 - protein, 116 aa, Artificial Sequence
  Chemically Synthesized
QVQLQESGGGLVQAGGSLRLSCAASGSISYSLMGWYRQAPGKERELVAGIATGALPYADSVKGRFTISRDNAKNTVYLQMNSLKPEDTAVYYCAAGDASGYSHSYWGQGTQVTVSS

SEQ ID NO: 16277 - protein, 118 aa, Artificial Sequence
  Chemically Synthesized
QVQLQESGGGLVQAGGSLRLSCAASGYIFNLYYMGWYRQAPGKERELVATIASGASTYYADSVKGRFTISRDNAKNTVYLQMNSLKPEDTAVYYCAVKYDIFVYHDYWGQGTQVTVSS

SEQ ID NO: 16278 - protein, 121 aa, Artificial Sequence
  Chemically Synthesized
QVQLQESGGGLVQAGGSLRLSCAASGYILLRNMGWYRQAPGKERELVATITYGSNTNYADSVKGRFTISRDNAKNTVYLQMNSLKPEDTAVYYCAAPIITYGWPSGGHPYWGQGTQVTVSS

SEQ ID NO: 16279 - protein, 118 aa, Artificial Sequence
  Chemically Synthesized
QVQLQESGGGLVQAGGSLRLSCAASGNIFYPDYMGWYRQAPGKERELVAAIGYGASTNYADSVKGRFTISRDNAKNTVYLQMNSLKPEDTAVYYCAADSWGGKAYAYWGQGTQVTVSS

SEQ ID NO: 16280 - protein, 125 aa, Artificial Sequence
  Chemically Synthesized
QVQLQESGGGLVQAGGSLRLSCAASGSIITYFMGWYRQAPGKEREFVAAINPGGITYYADSVKGRFTISRDNAKNTVYLQMNSLKPEDTAVYYCAVPDITAYDHRFWRSSYYGYWGQGTQVTVSS

SEQ ID NO: 16281 - protein, 122 aa, Artificial Sequence
  Chemically Synthesized
QVQLQESGGGLVQAGGSLRLSCAASGSISTSRYMGWYRQAPGKERELVAGITDGASTNYADSVKGRFTISRDNAKNTVYLQMNSLKPEDTAVYYCAVGDYIGVDTDVLFPYWGQGTQVTVSS

SEQ ID NO: 16282 - protein, 118 aa, Artificial Sequence
  Chemically Synthesized
QVQLQESGGGLVQAGGSLRLSCAASGSIFADRSMGWYRQAPGKERELVATITYGSTTYYADSVKGRFTISRDNAKNTVYLQMNSLKPEDTAVYYCAVDGQRGYTYYYWGQGTQVTVSS

SEQ ID NO: 16283 - protein, 122 aa, Artificial Sequence
  Chemically Synthesized
QVQLQESGGGLVQAGGSLRLSCAASGYISDYYGMGWYRQAPGKERELVAGIDIGSSTNYADSVKGRFTISRDNAKNTVYLQMNSLKPEDTAVYYCAADEGIRDYARYYLYYWGQGTQVTVSS

SEQ ID NO: 16284 - protein, 125 aa, Artificial Sequence
  Chemically Synthesized
QVQLQESGGGLVQAGGSLRLSCAASGSISRIIKMGWYRQAPGKERELVASINLGTSTYYADSVKGRFTISRDNAKNTVYLQMNSLKPEDTAVYYCAAWKDSPTRWRTVHADHTYWGQGTQVTVSS

SEQ ID NO: 16285 - protein, 126 aa, Artificial Sequence
  Chemically Synthesized
QVQLQESGGGLVQAGGSLRLSCAASGTIFDPVQMGWYRQAPGKEREFVASIDDGTTTNYADSVKGRFTISRDNAKNTVYLQMNSLKPEDTAVYYCAADFYSRGGVVREDGRIYDYWGQGTQVTVSS

SEQ ID NO: 16286 - protein, 117 aa, Artificial Sequence
  Chemically Synthesized
QVQLQESGGGLVQAGGSLRLSCAASGYILVVNMGWYRQAPGKEREFVAGITRGGSTNYADSVKGRFTISRDNAKNTVYLQMNSLKPEDTAVYYCAADLSAGVYYGYWGQGTQVTVSS

SEQ ID NO: 16287 - protein, 117 aa, Artificial Sequence
  Chemically Synthesized
QVQLQESGGGLVQAGGSLRLSCAASGYISLLLMGWYRQAPGKERELVAGIANGGSTYYADSVKGRFTISRDNAKNTVYLQMNSLKPEDTAVYYCAARVFYHGGYAYWGQGTQVTVSS

SEQ ID NO: 16288 - protein, 118 aa, Artificial Sequence
  Chemically Synthesized
QVQLQESGGGLVQAGGSLRLSCAASGTISDYGSMGWYRQAPGKEREFVAGINQGTNTNYADSVKGRFTISRDNAKNTVYLQMNSLKPEDTAVYYCAAIRASATWHGYWGQGTQVTVSS

SEQ ID NO: 16289 - protein, 126 aa, Artificial Sequence
  Chemically Synthesized
QVQLQESGGGLVQAGGSLRLSCAASGNISGSDTMGWYRQAPGKEREFVATINGGSNTYYADSVKGRFTISRDNAKNTVYLQMNSLKPEDTAVYYCAAGTHKRYGTYSRESSGHGYWGQGTQVTVSS

SEQ ID NO: 16290 - protein, 122 aa, Artificial Sequence
  Chemically Synthesized
QVQLQESGGGLVQAGGSLRLSCAASGSIFVLDRMGWYRQAPGKEREFVAAIDLGATTNYADSVKGRFTISRDNAKNTVYLQMNSLKPEDTAVYYCAAYTDGFYYAYSRYQYWGQGTQVTVSS

SEQ ID NO: 16291 - protein, 118 aa, Artificial Sequence
  Chemically Synthesized
QVQLQESGGGLVQAGGSLRLSCAASGYIFAASYMGWYRQAPGKEREFVAGITFGGSTNYADSVKGRFTISRDNAKNTVYLQMNSLKPEDTAVYYCAVDQYWQYSFRYWGQGTQVTVSS

SEQ ID NO: 16292 - protein, 118 aa, Artificial Sequence
  Chemically Synthesized
QVQLQESGGGLVQAGGSLRLSCAASGYISARRWMGWYRQAPGKERELVASITPGATTYYADSVKGRFTISRDNAKNTVYLQMNSLKPEDTAVYYCAVGYQWLPVFAYWGQGTQVTVSS

SEQ ID NO: 16293 - protein, 118 aa, Artificial Sequence
  Chemically Synthesized
QVQLQESGGGLVQAGGSLRLSCAASGNISGNVYMGWYRQAPGKEREFVAAITYGGSTNYADSVKGRFTISRDNAKNTVYLQMNSLKPEDTAVYYCAVITVQHPHYYYWGQGTQVTVSS

SEQ ID NO: 16294 - protein, 118 aa, Artificial Sequence
  Chemically Synthesized
QVQLQESGGGLVQAGGSLRLSCAASGNIFNYASMGWYRQAPGKEREFVAGIGYGTITNYADSVKGRFTISRDNAKNTVYLQMNSLKPEDTAVYYCAAVSNYGGLHGYWGQGTQVTVSS

SEQ ID NO: 16295 - protein, 112 aa, Artificial Sequence
  Chemically Synthesized
QVQLQESGGGLVQAGGSLRLSCAASGSIFSVSFMGWYRQAPGKERELVAGINTGSITYYADSVKGRFTISRDNAKNTVYLQMNSLKPEDTAVYYCAHDYTYWGQGTQVTVSS

SEQ ID NO: 16296 - protein, 122 aa, Artificial Sequence
  Chemically Synthesized
QVQLQESGGGLVQAGGSLRLSCAASGYISDYPKMGWYRQAPGKEREFVASIGTGGNTNYADSVKGRFTISRDNAKNTVYLQMNSLKPEDTAVYYCAVLYKNSTGQYGYHYYWGQGTQVTVSS

SEQ ID NO: 16297 - protein, 117 aa, Artificial Sequence
  Chemically Synthesized
QVQLQESGGGLVQAGGSLRLSCAASGTISSVYVMGWYRQAPGKERELLPVLLLVVLPYADSVKGRFTISRDNAKNTVYLQMNSLKPEDTAVYYCAVQIIHGFSYTYWGQGTQVTVSS

SEQ ID NO: 16298 - protein, 122 aa, Artificial Sequence
  Chemically Synthesized
QVQLQESGGGLVQAGGSLRLSCAASGTISLVTDMGWYRQAPGKEREFVAAISGGTITYYADSVKGRFTISRDNAKNTVYLQMNSLKPEDTAVYYCAVRIIPAWYPFYPHAYWGQGTQVTVSS

SEQ ID NO: 16299 - protein, 118 aa, Artificial Sequence
  Chemically Synthesized
QVQLQESGGGLVQAGGSLRLSCAASGTIFRYVYMGWYRQAPGKEREFVAAISAGTITYYADSVKGRFTISRDNAKNTVYLQMNSLKPEDTAVYYCAAYLNAFYNHRYWGQGTQVTVSS

SEQ ID NO: 16300 - protein, 118 aa, Artificial Sequence
  Chemically Synthesized
QVQLQESGGGLVQAGGSLRLSCAASGNISASVRMGWYRQAPGKEREFVAGISNGASTNYADSVKGRFTISRDNAKNTVYLQMNSLKPEDTAVYYCAAVYVYQRPHGYWGQGTQVTVSS

SEQ ID NO: 16301 - protein, 122 aa, Artificial Sequence
  Chemically Synthesized
QVQLQESGGGLVQAGGSLRLSCAASGTISSTYKMGWYRQAPGKERELVAAITYGATTNYADSVKGRFTISRDNAKNTVYLQMNSLKPEDTAVYYCAARWSSVYIIDKPYDYWGQGTQVTVSS

SEQ ID NO: 16302 - protein, 126 aa, Artificial Sequence
  Chemically Synthesized
QVQLQESGGGLVQAGGSLRLSCAASGSISSYYGMGWYRQAPGKEREFVAAISLGAITNYADSVKGRFTISRDNAKNTVYLQMNSLKPEDTAVYYCAVRDRQGNYRDYLYTADLYYWGQGTQVTVSS

SEQ ID NO: 16303 - protein, 121 aa, Artificial Sequence
  Chemically Synthesized
QVQLQESGGGLVQAGGSLRLSCAASGNISYVSPMGWYRQAPGKEREFVASINDGTTTNYADSVKGRFTISRDNAKNTVYLQMNSLKPEDTAVYYCAAYQHLGWSVSTGFYWGQGTQVTVSS

SEQ ID NO: 16304 - protein, 122 aa, Artificial Sequence
  Chemically Synthesized
QVQLQESGGGLVQAGGSLRLSCAASGYISGIEYMGWYRQAPGKERELVASIASGTITYYADSVKGRFTISRDNAKNTVYLQMNSLKPEDTAVYYCAAPSDVLHYYPAVYVYWGQGTQVTVSS

SEQ ID NO: 16305 - protein, 120 aa, Artificial Sequence
  Chemically Synthesized
QVQLQESGGGLVQAGGSLRLSCAASGNIFYDWDMGWYRQAPGKEREFVAGLLVVIPYADSVKGRFTISRDNAKNTVYLQMNSLKPEDTAVYYCAAWSAYAAYWYDEHRYWGQGTQVTVSS

SEQ ID NO: 16306 - protein, 117 aa, Artificial Sequence
  Chemically Synthesized
QVQLQESGGGLVQAGGSLRLSCAASGSISTYYMGWYRQAPGKERELVASIGRGASTNYADSVKGRFTISRDNAKNTVYLQMNSLKPEDTAVYYCAAIRYIRPLLYYWGQGTQVTVSS

SEQ ID NO: 16307 - protein, 126 aa, Artificial Sequence
  Chemically Synthesized
QVQLQESGGGLVQAGGSLRLSCAASGNIFYYYYMGWYRQAPGKERELVATIANGTNTNYADSVKGRFTISRDNAKNTVYLQMNSLKPEDTAVYYCAVVFDSIRYTTRTTYVSLPYWGQGTQVTVSS

SEQ ID NO: 16308 - protein, 117 aa, Artificial Sequence
  Chemically Synthesized
QVQLQESGGGLVQAGGSLRLSCAASGSISRYNAMGWYRQAPGKERELVATINVGGSTNYADSVKGRFTISRDNAKNTVYLQMNSLKPEDTAVYYCAATSRDVSTGYWGQGTQVTVSS

SEQ ID NO: 16309 - protein, 126 aa, Artificial Sequence
  Chemically Synthesized
QVQLQESGGGLVQAGGSLRLSCAASGTISQSRYMGWYRQAPGKEREFVAGIDRGASTNYADSVKGRFTISRDNAKNTVYLQMNSLKPEDTAVYYCAADDETWDTVTARYTPRLYYWGQGTQVTVSS

SEQ ID NO: 16310 - protein, 116 aa, Artificial Sequence
  Chemically Synthesized
QVQLQESGGGLVQAGGSLRLSCAASGSIFDRGYMGWYRQAPGKERELVAGIDEGGSTNYADSVKGRFTISRDNAKNTVYLQMNSLKPEDTAVYYCAAYADEAFAYWGQGTQVTVSS

SEQ ID NO: 16311 - protein, 117 aa, Artificial Sequence
  Chemically Synthesized
QVQLQESGGGLVQAGGSLRLSCAASGTIFDDVLMGWYRQAPGKEREFVATITGGASTYYADSVKGRFTISRDNAKNTVYLQMNSLKPEDTAVYYCAVDTFSDGYHYWGQGTQVTVSS

SEQ ID NO: 16312 - protein, 113 aa, Artificial Sequence
  Chemically Synthesized
QVQLQESGGGLVQAGGSLRLSCAASGYIFYFVMGWYRQAPGKERELVAAIARGTTTYYADSVKGRFTISRDNAKNTVYLQMNSLKPEDTAVYYCAVPYRYRYWGQGTQVTVSS

SEQ ID NO: 16313 - protein, 118 aa, Artificial Sequence
  Chemically Synthesized
QVQLQESGGGLVQAGGSLRLSCAASGYISDAIRMGWYRQAPGKEREFVAGISGGSTTNYADSVKGRFTISRDNAKNTVYLQMNSLKPEDTAVYYCAAIDYAHRLYYYWGQGTQVTVSS

SEQ ID NO: 16314 - protein, 122 aa, Artificial Sequence
  Chemically Synthesized
QVQLQESGGGLVQAGGSLRLSCAASGSISDDQIMGWYRQAPGKEREFVAGITGGANTNYADSVKGRFTISRDNAKNTVYLQMNSLKPEDTAVYYCAAIIYGPGRDGPWHDYWGQGTQVTVSS

SEQ ID NO: 16315 - protein, 117 aa, Artificial Sequence
  Chemically Synthesized
QVQLQESGGGLVQAGGSLRLSCAASGTISYYLSMGWYRQAPGKEREFVAGIDAGGTTYYADSVKGRFTISRDNAKNTVYLQMNSLKPEDTAVYYCAVSTLTLSTIYWGQGTQVTVSS

SEQ ID NO: 16316 - protein, 117 aa, Artificial Sequence
  Chemically Synthesized
QVQLQESGGGLVQAGGSLRLSCAASGTISYTYYMGWYRQAPGKERELVAAITVGTTTNYADSVKGRFTISRDNAKNTVYLQMNSLKPEDTAVYYCAATSTTTRSIYWGQGTQVTVSS

SEQ ID NO: 16317 - protein, 126 aa, Artificial Sequence
  Chemically Synthesized
QVQLQESGGGLVQAGGSLRLSCAASGTIFYDGVMGWYRQAPGKEREFVASINWGSNTNYADSVKGRFTISRDNAKNTVYLQMNSLKPEDTAVYYCAAFQAIYVTLQLTYNDEHTYWGQGTQVTVSS

SEQ ID NO: 16318 - protein, 122 aa, Artificial Sequence
  Chemically Synthesized
QVQLQESGGGLVQAGGSLRLSCAASGNISYAVLMGWYRQAPGKEREFVAAISSGGITNYADSVKGRFTISRDNAKNTVYLQMNSLKPEDTAVYYCAVLYYSEIQYSLYFGYWGQGTQVTVSS

SEQ ID NO: 16319 - protein, 114 aa, Artificial Sequence
  Chemically Synthesized
QVQLQESGGGLVQAGGSLRLSCAASGTISGGRVMGWYRQAPGKEREFVAAIAYGGTTYYADSVKGRFTISRDNAKNTVYLQMNSLKPEDTAVYYCAVGLGYGYWGQGTQVTVSS

SEQ ID NO: 16320 - protein, 118 aa, Artificial Sequence
  Chemically Synthesized
QVQLQESGGGLVQAGGSLRLSCAASGNISRSYLMGWYRQAPGKERELVATITQGTSTYYADSVKGRFTISRDNAKNTVYLQMNSLKPEDTAVYYCAANVTDGRVHLYWGQGTQVTVSS

SEQ ID NO: 16321 - protein, 126 aa, Artificial Sequence
  Chemically Synthesized
QVQLQESGGGLVQAGGSLRLSCAASGSIFADGSMGWYRQAPGKEREFVATINRGGTTYYADSVKGRFTISRDNAKNTVYLQMNSLKPEDTAVYYCAVSSYYGVRFVFYRWDILRYWGQGTQVTVSS

SEQ ID NO: 16322 - protein, 122 aa, Artificial Sequence
  Chemically Synthesized
QVQLQESGGGLVQAGGSLRLSCAASGTISYVSYMGWYRQAPGKERELVAGIATGANTYYADSVKGRFTISRDNAKNTVYLQMNSLKPEDTAVYYCAVLQRDDAYDSKWHYYWGQGTQVTVSS

SEQ ID NO: 16323 - protein, 118 aa, Artificial Sequence
  Chemically Synthesized
QVQLQESGGGLVQAGGSLRLSCAASGNISGPIIMGWYRQAPGKEREFVAGIADGTITNYADSVKGRFTISRDNAKNTVYLQMNSLKPEDTAVYYCAVLYIARTRLYYWGQGTQVTVSS

SEQ ID NO: 16324 - protein, 118 aa, Artificial Sequence
  Chemically Synthesized
QVQLQESGGGLVQAGGSLRLSCAASGSISSYTPMGWYRQAPGKEREFVASIGVGAITYYADSVKGRFTISRDNAKNTVYLQMNSLKPEDTAVYYCAALRYYGPRFDYWGQGTQVTVSS

SEQ ID NO: 16325 - protein, 122 aa, Artificial Sequence
  Chemically Synthesized
QVQLQESGGGLVQAGGSLRLSCAASGSISDYYGMGWYRQAPGKEREFVAGITEGANTNYADSVKGRFTISRDNAKNTVYLQMNSLKPEDTAVYYCAAVRRPNYPRGASFPYWGQGTQVTVSS

SEQ ID NO: 16326 - protein, 122 aa, Artificial Sequence
  Chemically Synthesized
QVQLQESGGGLVQAGGSLRLSCAASGSISYGYAMGWYRQAPGKEREFVAAIGTGGNTYYADSVKGRFTISRDNAKNTVYLQMNSLKPEDTAVYYCAVLRYYLSAAGAYLWYWGQGTQVTVSS

SEQ ID NO: 16327 - protein, 118 aa, Artificial Sequence
  Chemically Synthesized
QVQLQESGGGLVQAGGSLRLSCAASGYIFGDTNMGWYRQAPGKERELVASINDGGNTYYADSVKGRFTISRDNAKNTVYLQMNSLKPEDTAVYYCAVDKVTAYWLEYWGQGTQVTVSS

SEQ ID NO: 16328 - protein, 122 aa, Artificial Sequence
  Chemically Synthesized
QVQLQESGGGLVQAGGSLRLSCAASGSISYTNYMGWYRQAPGKEREFVASIGGGGSTYYADSVKGRFTISRDNAKNTVYLQMNSLKPEDTAVYYCAAVRRVYRPFSKWLYYWGQGTQVTVSS

SEQ ID NO: 16329 - protein, 118 aa, Artificial Sequence
  Chemically Synthesized
QVQLQESGGGLVQAGGSLRLSCAASGSISLFITMGWYRQAPGKERELVAGIDQGAITNYADSVKGRFTISRDNAKNTVYLQMNSLKPEDTAVYYCAVTETDYVTSWYWGQGTQVTVSS

SEQ ID NO: 16330 - protein, 126 aa, Artificial Sequence
  Chemically Synthesized
QVQLQESGGGLVQAGGSLRLSCAASGNISEQRAMGWYRQAPGKEREFVAGINKGAITNYADSVKGRFTISRDNAKNTVYLQMNSLKPEDTAVYYCAAVTHASQAGRPQRGDYLYYWGQGTQVTVSS

SEQ ID NO: 16331 - protein, 117 aa, Artificial Sequence
  Chemically Synthesized
QVQLQESGGGLVQAGGSLRLSCAASGYISQLQQMGWYRQAPGKEREFVASIASVLLPYADSVKGRFTISRDNAKNTVYLQMNSLKPEDTAVYYCAVDRKQYSRHWYWGQGTQVTVSS

SEQ ID NO: 16332 - protein, 118 aa, Artificial Sequence
  Chemically Synthesized
QVQLQESGGGLVQAGGSLRLSCAASGNISGVNYMGWYRQAPGKEREFVASIAYGSNTYYADSVKGRFTISRDNAKNTVYLQMNSLKPEDTAVYYCAADDVQRQSHYYWGQGTQVTVSS

SEQ ID NO: 16333 - protein, 118 aa, Artificial Sequence
  Chemically Synthesized
QVQLQESGGGLVQAGGSLRLSCAASGSISDDYEMGWYRQAPGKEREFVAAIAGGGNTNYADSVKGRFTISRDNAKNTVYLQMNSLKPEDTAVYYCAVLGWVREWLIYWGQGTQVTVSS

SEQ ID NO: 16334 - protein, 118 aa, Artificial Sequence
  Chemically Synthesized
QVQLQESGGGLVQAGGSLRLSCAASGYIFFRTAMGWYRQAPGKERELVATITHGANTNYADSVKGRFTISRDNAKNTVYLQMNSLKPEDTAVYYCAAIHRRRAVHPYWGQGTQVTVSS

SEQ ID NO: 16335 - protein, 119 aa, Artificial Sequence
  Chemically Synthesized
QVQLQESGGGLVQAGGSLRLSCAASGNIFYSTYMGWYRQAPGKERELVATIDLGGSNTYYADSVKGRFTISRDNAKNTVYLQMNSLKPEDTAVYYCAVDYVATQGFDYWGQGTQVTVSS

SEQ ID NO: 16336 - protein, 121 aa, Artificial Sequence
  Chemically Synthesized
QVQLQESGGGLVQAGGSLRLSCAASGSISPVTYMGWYRQAPGKEREFVAGIDTGTITNYADSVKGRFTISRDNAKNTVYLQMNSLKPEDTAVYYCAVAQYYYQDERYYGYWGQGTQVTVSS

SEQ ID NO: 16337 - protein, 118 aa, Artificial Sequence
  Chemically Synthesized
QVQLQESGGGLVQAGGSLRLSCAASGSISAGRYMGWYRQAPGKERELVASIDSGSNTYYADSVKGRFTISRDNAKNTVYLQMNSLKPEDTAVYYCAVLYYYNGWHYYWGQGTQVTVSS

SEQ ID NO: 16338 - protein, 118 aa, Artificial Sequence
  Chemically Synthesized
QVQLQESGGGLVQAGGSLRLSCAASGNISYGLIMGWYRQAPGKEREFVAGIGRGGITNYADSVKGRFTISRDNAKNTVYLQMNSLKPEDTAVYYCAAVHYPVPYYPYWGQGTQVTVSS

SEQ ID NO: 16339 - protein, 122 aa, Artificial Sequence
  Chemically Synthesized
QVQLQESGGGLVQAGGSLRLSCAASGSIFVQWAMGWYRQAPGKEREFVAAINHGGNTNYADSVKGRFTISRDNAKNTVYLQMNSLKPEDTAVYYCAVVDYAPGARRTYHPYWGQGTQVTVSS

SEQ ID NO: 16340 - protein, 126 aa, Artificial Sequence
  Chemically Synthesized
QVQLQESGGGLVQAGGSLRLSCAASGNIFDVGSMGWYRQAPGKEREFVAAIGVGGSTNYADSVKGRFTISRDNAKNTVYLQMNSLKPEDTAVYYCAVGEYQRHAQRRYKAVSLWYWGQGTQVTVSS

SEQ ID NO: 16341 - protein, 118 aa, Artificial Sequence
  Chemically Synthesized
QVQLQESGGGLVQAGGSLRLSCAASGNISYRIDMGWYRQAPGKERELVAAISRGTNTYYADSVKGRFTISRDNAKNTVYLQMNSLKPEDTAVYYCAATQGDSNTLRYWGQGTQVTVSS

SEQ ID NO: 16342 - protein, 110 aa, Artificial Sequence
  Chemically Synthesized
QVQLQESGGGLVQAGGSLRLSCAASGTIFQSLYMGWYRQAPGKEREFVAGIAYGGNTNYADSVKGRFTISRDNAKNTVYLQMNSLKPEDTAVYYCAALYWGQGTQVTVSS

SEQ ID NO: 16343 - protein, 117 aa, Artificial Sequence
  Chemically Synthesized
QVQLQESGGGLVQAGGSLRLSCAASGYISRSLMGWYRQAPGKERELVATIDTGANTYYADSVKGRFTISRDNAKNTVYLQMNSLKPEDTAVYYCAAWDVQEIDHLYWGQGTQVTVSS

SEQ ID NO: 16344 - protein, 118 aa, Artificial Sequence
  Chemically Synthesized
QVQLQESGGGLVQAGGSLRLSCAASGSISYGVDMGWYRQAPGKERELVASIDRGTSYLYADSVKGRFTISRDNAKNTVYLQMNSLKPEDTAVYYCAVWDATYSQHVYWGQGTQVTVSS

SEQ ID NO: 16345 - protein, 125 aa, Artificial Sequence
  Chemically Synthesized
QVQLQESGGGLVQAGGSLRLSCAASGTIFAQGGMGWYRQAPGKERELVAGIGTGASTYYADSVKGRFTISRDNAKNTVYLQMNSLKPEDTAVYYCAVYGIQQSGDKRPWRRDLYWGQGTQVTVSS

SEQ ID NO: 16346 - protein, 120 aa, Artificial Sequence
  Chemically Synthesized
QVQLQESGGGLVQAGGSLRLSCAASGYILLSFMGWYRQAPGKEREFVATIDSVVVPYADSVKGRFTISRDNAKNTVYLQMNSLKPEDTAVYYCAALDQDGYAGAAGLYYWGQGTQVTVSS

SEQ ID NO: 16347 - protein, 118 aa, Artificial Sequence
  Chemically Synthesized
QVQLQESGGGLVQAGGSLRLSCAASGTISGYRDMGWYRQAPGKEREFVAAIADGTSTYYADSVKGRFTISRDNAKNTVYLQMNSLKPEDTAVYYCAVYAYRDGILQYWGQGTQVTVSS

SEQ ID NO: 16348 - protein, 120 aa, Artificial Sequence
  Chemically Synthesized
QVQLQESGGGLVQAGGSLRLSCAASGSILNVTMGWYRQAPGKEREFVAGIGLGRLLYADSVKGRFTISRDNAKNTVYLQMNSLKPEDTAVYYCAAGPGNIAKDDQYYSYWGQGTQVTVSS

SEQ ID NO: 16349 - protein, 126 aa, Artificial Sequence
  Chemically Synthesized
QVQLQESGGGLVQAGGSLRLSCAASGNISYSAWMGWYRQAPGKERELVASITYGGTTYYADSVKGRFTISRDNAKNTVYLQMNSLKPEDTAVYYCAVQYIGADRVNPYYLPRHHYWGQGTQVTVSS

SEQ ID NO: 16350 - protein, 122 aa, Artificial Sequence
  Chemically Synthesized
QVQLQESGGGLVQAGGSLRLSCAASGTISDFDNMGWYRQAPGKERELVAAIDWGTTTYYADSVKGRFTISRDNAKNTVYLQMNSLKPEDTAVYYCAATKRDAIGRRQRHGYWGQGTQVTVSS

SEQ ID NO: 16351 - protein, 118 aa, Artificial Sequence
  Chemically Synthesized
QVQLQESGGGLVQAGGSLRLSCAASGNIFTNSYMGWYRQAPGKERELVATINQGATTNYADSVKGRFTISRDNAKNTVYLQMNSLKPEDTAVYYCAVLTQYHPYHDYWGQGTQVTVSS

SEQ ID NO: 16352 - protein, 120 aa, Artificial Sequence
  Chemically Synthesized
QVQLQESGGGLVQAGGSLRLSCAASGNISTASYMGWYRQAPGKERELVATIAYGTSTYYADSVKGRFTISRDNAKNTVYLQMNSLKPEDTAVYYCATTSVTLTKLVTMYWGQGTQVTVSS

SEQ ID NO: 16353 - protein, 118 aa, Artificial Sequence
  Chemically Synthesized
QVQLQESGGGLVQAGGSLRLSCAASGSISNWWSMGWYRQAPGKERELVAAIAFGSTTYYADSVKGRFTISRDNAKNTVYLQMNSLKPEDTAVYYCAVYYYGLSDYDYWGQGTQVTVSS

SEQ ID NO: 16354 - protein, 118 aa, Artificial Sequence
  Chemically Synthesized
QVQLQESGGGLVQAGGSLRLSCAASGTISRGFLMGWYRQAPGKEREFVATIAYGTITYYADSVKGRFTISRDNAKNTVYLQMNSLKPEDTAVYYCAAYAFWWRTFAYWGQGTQVTVSS

SEQ ID NO: 16355 - protein, 121 aa, Artificial Sequence
  Chemically Synthesized
QVQLQESGGGLVQAGGSLRLSCAASGSISTVFVMGWYRQAPGKERELVAGIDWGAITYYADSVKGRFTISRDNAKNTVYLQMNSLKPEDTAVYYCAAWYYDAYSVVTLMYWGQGTQVTVSS

SEQ ID NO: 16356 - protein, 121 aa, Artificial Sequence
  Chemically Synthesized
QVQLQESGGGLVQAGGSLRLSCAASGYISLESMGWYRQAPGKERELVATIAYGSNTYYADSVKGRFTISRDNAKNTVYLQMNSLKPEDTAVYYCAARPYYYGGVYDSYQYWGQGTQVTVSS

SEQ ID NO: 16357 - protein, 117 aa, Artificial Sequence
  Chemically Synthesized
QVQLQESGGGLVQAGGSLRLSCAASGTIFGYTMGWYRQAPGKEREFVAGINDGSTTYYADSVKGRFTISRDNAKNTVYLQMNSLKPEDTAVYYCAVGEDESQTYNYWGQGTQVTVSS

SEQ ID NO: 16358 - protein, 122 aa, Artificial Sequence
  Chemically Synthesized
QVQLQESGGGLVQAGGSLRLSCAASGNISSRGFMGWYRQAPGKEREFVAAIDYGATTYYADSVKGRFTISRDNAKNTVYLQMNSLKPEDTAVYYCAVYLQISALEHNVHDYWGQGTQVTVSS

SEQ ID NO: 16359 - protein, 122 aa, Artificial Sequence
  Chemically Synthesized
QVQLQESGGGLVQAGGSLRLSCAASGSISLATRMGWYRQAPGKEREFVASISDGTNTNYADSVKGRFTISRDNAKNTVYLQMNSLKPEDTAVYYCAVRAYGPRYSYRAYVYWGQGTQVTVSS

SEQ ID NO: 16360 - protein, 126 aa, Artificial Sequence
  Chemically Synthesized
QVQLQESGGGLVQAGGSLRLSCAASGSISGRHSMGWYRQAPGKEREFVAAINIGGSTNYADSVKGRFTISRDNAKNTVYLQMNSLKPEDTAVYYCAAYGEWSSSDLEDYGYPLAYWGQGTQVTVSS

SEQ ID NO: 16361 - protein, 121 aa, Artificial Sequence
  Chemically Synthesized
QVQLQESGGGLVQAGGSLRLSCAASGTIFVTRAMGWYRQAPGKERELVAAIAPGSTPYADSVKGRFTISRDNAKNTVYLQMNSLKPEDTAVYYCAVGTVQASGAEREHDYWGQGTQVTVSS

SEQ ID NO: 16362 - protein, 125 aa, Artificial Sequence
  Chemically Synthesized
QVQLQESGGGLVQAGGSLRLSCAASGTISAPLMGWYRQAPGKERELVAAIGVGATTYYADSVKGRFTISRDNAKNTVYLQMNSLKPEDTAVYYCAVGYVLTYYADYGERQYHDYWGQGTQVTVSS

SEQ ID NO: 16363 - protein, 118 aa, Artificial Sequence
  Chemically Synthesized
QVQLQESGGGLVQAGGSLRLSCAASGTISYRIRMGWYRQAPGKEREFVATIAPGSITYYADSVKGRFTISRDNAKNTVYLQMNSLKPEDTAVYYCAVLRYLSSKHDYWGQGTQVTVSS

SEQ ID NO: 16364 - protein, 118 aa, Artificial Sequence
  Chemically Synthesized
QVQLQESGGGLVQAGGSLRLSCAASGYISRHAYMGWYRQAPGKERELVAGITVGGTTYYADSVKGRFTISRDNAKNTVYLQMNSLKPEDTAVYYCAATKRPFSRLVYWGQGTQVTVSS

SEQ ID NO: 16365 - protein, 117 aa, Artificial Sequence
  Chemically Synthesized
QVQLQESGGGLVQAGGSLRLSCAASGNIFTAYYMGWYRQAPGKEREFVASIDPGGNTYYADSVKGRFTISRDNAKNTVYLQMNSLKPEDTAVYYCAVTALAYDHIYWGQGTQVTVSS

SEQ ID NO: 16366 - protein, 118 aa, Artificial Sequence
  Chemically Synthesized
QVQLQESGGGLVQAGGSLRLSCAASGSISRDTWMGWYRQAPGKEREFVAGITAGSSTYYADSVKGRFTISRDNAKNTVYLQMNSLKPEDTAVYYCAAYDYARGYLLYWGQGTQVTVSS

SEQ ID NO: 16367 - protein, 118 aa, Artificial Sequence
  Chemically Synthesized
QVQLQESGGGLVQAGGSLRLSCAASGTIFSSVYMGWYRQAPGKEREFVATISEGTITNYADSVKGRFTISRDNAKNTVYLQMNSLKPEDTAVYYCAVRRWGNTWFVYWGQGTQVTVSS

SEQ ID NO: 16368 - protein, 126 aa, Artificial Sequence
  Chemically Synthesized
QVQLQESGGGLVQAGGSLRLSCAASGSIFYLVIMGWYRQAPGKERELVAAIDYGTNTYYADSVKGRFTISRDNAKNTVYLQMNSLKPEDTAVYYCAVVRQLPPSRIGTWQDGLNYWGQGTQVTVSS

SEQ ID NO: 16369 - protein, 118 aa, Artificial Sequence
  Chemically Synthesized
QVQLQESGGGLVQAGGSLRLSCAASGNISSPDGMGWYRQAPGKERELVAGIGGGTNTYYADSVKGRFTISRDNAKNTVYLQMNSLKPEDTAVYYCAVEYTFGVTFVYWGQGTQVTVSS

SEQ ID NO: 16370 - protein, 122 aa, Artificial Sequence
  Chemically Synthesized
QVQLQESGGGLVQAGGSLRLSCAASGSIFYLDNMGWYRQAPGKERELVATITHGTITNYADSVKGRFTISRDNAKNTVYLQMNSLKPEDTAVYYCAAGYSTTNDPYAYFPYWGQGTQVTVSS

SEQ ID NO: 16371 - protein, 118 aa, Artificial Sequence
  Chemically Synthesized
QVQLQESGGGLVQAGGSLRLSCAASGYISLDDDMGWYRQAPGKEREFVAGIAYGANTYYADSVKGRFTISRDNAKNTVYLQMNSLKPEDTAVYYCAVVQLDSWYLPYWGQGTQVTVSS

SEQ ID NO: 16372 - protein, 122 aa, Artificial Sequence
  Chemically Synthesized
QVQLQESGGGLVQAGGSLRLSCAASGTISGDYSMGWYRQAPGKERELVAAIGYGSSTNYADSVKGRFTISRDNAKNTVYLQMNSLKPEDTAVYYCAAYYIGNYSDVYLHRYWGQGTQVTVSS

SEQ ID NO: 16373 - protein, 118 aa, Artificial Sequence
  Chemically Synthesized
QVQLQESGGGLVQAGGSLRLSCAASGSISAKSYMGWYRQAPGKERELVAGINIGGTTNYADSVKGRFTISRDNAKNTVYLQMNSLKPEDTAVYYCAVDQNGLTGLTYWGQGTQVTVSS

SEQ ID NO: 16374 - protein, 115 aa, Artificial Sequence
  Chemically Synthesized
QVQLQESGGGLVQAGGSLRLSCAASGYISTKYAMGWYRQAPGKEREFVASIDQGSTTNYADSVKGRFTISRDNAKNTVYLQMNSLKPEDTAVYYCAAPRGNLVYWGQGTQVTVSS

SEQ ID NO: 16375 - protein, 117 aa, Artificial Sequence
  Chemically Synthesized
QVQLQESGGGLVQAGGSLRLSCAASGSISDDHGMGWYRQAPGKEREFVAAIASVLVPYADSVKGRFTISRDNAKNTVYLQMNSLKPEDTAVYYCAVYTLDQEDLGYWGQGTQVTVSS

SEQ ID NO: 16376 - protein, 118 aa, Artificial Sequence
  Chemically Synthesized
QVQLQESGGGLVQAGGSLRLSCAASGNIFGYVDMGWYRQAPGKERELVATITYGSSTYYADSVKGRFTISRDNAKNTVYLQMNSLKPEDTAVYYCAVPWFAQVNHFYWGQGTQVTVSS

SEQ ID NO: 16377 - protein, 118 aa, Artificial Sequence
  Chemically Synthesized
QVQLQESGGGLVQAGGSLRLSCAASGYIFYPPFMGWYRQAPGKEREFVAAINRGTNTNYADSVKGRFTISRDNAKNTVYLQMNSLKPEDTAVYYCAATRARRGYHLYWGQGTQVTVSS

SEQ ID NO: 16378 - protein, 116 aa, Artificial Sequence
  Chemically Synthesized
QVQLQESGGGLVQAGGSLRLSCAASGTISRRYRMGWYRQAPGKEREFVAAIAVGGNTYYADSVKGRFTISRDNAKNTVYLQMNSLKPEDTAVYYCAVGYRQWHRYWGQGTQVTVSS

SEQ ID NO: 16379 - protein, 122 aa, Artificial Sequence
  Chemically Synthesized
QVQLQESGGGLVQAGGSLRLSCAASGSISDVYHMGWYRQAPGKERELVAAITDGGNTNYADSVKGRFTISRDNAKNTVYLQMNSLKPEDTAVYYCAVYTPIDSYSRTYLYYWGQGTQVTVSS

SEQ ID NO: 16380 - protein, 118 aa, Artificial Sequence
  Chemically Synthesized
QVQLQESGGGLVQAGGSLRLSCAASGYISYYPRMGWYRQAPGKERELVASIGLGTITYYADSVKGRFTISRDNAKNTVYLQMNSLKPEDTAVYYCAVDYYGPGDHYYWGQGTQVTVSS

SEQ ID NO: 16381 - protein, 121 aa, Artificial Sequence
  Chemically Synthesized
QVQLQESGGGLVQAGGSLRLSCAASGTISLWAMGWYRQAPGKEREFVATIATGTNTYYADSVKGRFTISRDNAKNTVYLQMNSLKPEDTAVYYCAAPFYKYFHIQDQLQYWGQGTQVTVSS

SEQ ID NO: 16382 - protein, 122 aa, Artificial Sequence
  Chemically Synthesized
QVQLQESGGGLVQAGGSLRLSCAASGSISGAWIMGWYRQAPGKERELVASITYGGSTYYADSVKGRFTISRDNAKNTVYLQMNSLKPEDTAVYYCAVQVEIAGPTRDDHYYWGQGTQVTVSS

SEQ ID NO: 16383 - protein, 122 aa, Artificial Sequence
  Chemically Synthesized
QVQLQESGGGLVQAGGSLRLSCAASGTIFSAYRMGWYRQAPGKERELVASINRGTTTYYADSVKGRFTISRDNAKNTVYLQMNSLKPEDTAVYYCAVAINDSWQYYAGHVYWGQGTQVTVSS

SEQ ID NO: 16384 - protein, 111 aa, Artificial Sequence
  Chemically Synthesized
QVQLQESGGGLVQAGGSLRLSCAASGNISRRGKMGWYRQAPGKERELVAGISQGAITYYADSVKGRFTISRDNAKNTVYLQMNSLKPEDTAVYYCAAGSYWGQGTQVTVSS

SEQ ID NO: 16385 - protein, 118 aa, Artificial Sequence
  Chemically Synthesized
QVQLQESGGGLVQAGGSLRLSCAASGSIFPDDLMGWYRQAPGKERELVAGIGYGSTTNYADSVKGRFTISRDNAKNTVYLQMNSLKPEDTAVYYCAAPGAIHPHHQYWGQGTQVTVSS

SEQ ID NO: 16386 - protein, 115 aa, Artificial Sequence
  Chemically Synthesized
QVQLQESGGGLVQAGGSLRLSCAASGTIFYVYEMGWYRQAPGKERELVAYYQYADSVKGRFTISRDNAKNTVYLQMNSLKPEDTAVYYCAAYAQLYVQGDDSIYWGQGTQVTVSS

SEQ ID NO: 16387 - protein, 118 aa, Artificial Sequence
  Chemically Synthesized
QVQLQESGGGLVQAGGSLRLSCAASGSISYSYGMGWYRQAPGKERELVATITAGSNTYYADSVKGRFTISRDNAKNTVYLQMNSLKPEDTAVYYCAAEQYYPKYYTYWGQGTQVTVSS

SEQ ID NO: 16388 - protein, 126 aa, Artificial Sequence
  Chemically Synthesized
QVQLQESGGGLVQAGGSLRLSCAASGTISSTNTMGWYRQAPGKERELVAAINIGTNTYYADSVKGRFTISRDNAKNTVYLQMNSLKPEDTAVYYCAVPYEPGDDDYLGEPTGYDYWGQGTQVTVSS

SEQ ID NO: 16389 - protein, 118 aa, Artificial Sequence
  Chemically Synthesized
QVQLQESGGGLVQAGGSLRLSCAASGTISSLEVMGWYRQAPGKERELVAAIDDGTTTNYADSVKGRFTISRDNAKNTVYLQMNSLKPEDTAVYYCAAYTGPTGAYPYWGQGTQVTVSS

SEQ ID NO: 16390 - protein, 112 aa, Artificial Sequence
  Chemically Synthesized
QVQLQESGGGLVQAGGSLRLSCAASGSIFIGRTMGWYRQAPGKERELVAGISDGSTTNYADSVKGRFTISRDNAKNTVYLQMNSLKPEDTAVYYCASVYPYWGQGTQVTVSS

SEQ ID NO: 16391 - protein, 117 aa, Artificial Sequence
  Chemically Synthesized
QVQLQESGGGLVQAGGSLRLSCAASGYILVTLMGWYRQAPGKEREFVATIASGSITNYADSVKGRFTISRDNAKNTVYLQMNSLKPEDTAVYYCAVNFTRPYAHTYWGQGTQVTVSS

SEQ ID NO: 16392 - protein, 122 aa, Artificial Sequence
  Chemically Synthesized
QVQLQESGGGLVQAGGSLRLSCAASGTISTLVWMGWYRQAPGKERELVAAINYGGNTYYADSVKGRFTISRDNAKNTVYLQMNSLKPEDTAVYYCAAWRADFVVYRDYLNYWGQGTQVTVSS

SEQ ID NO: 16393 - protein, 118 aa, Artificial Sequence
  Chemically Synthesized
QVQLQESGGGLVQAGGSLRLSCAASGSIFVLKGMGWYRQAPGKERELVAAIAGGTSTNYADSVKGRFTISRDNAKNTVYLQMNSLKPEDTAVYYCAAGSYDTSRLDYWGQGTQVTVSS

SEQ ID NO: 16394 - protein, 122 aa, Artificial Sequence
  Chemically Synthesized
QVQLQESGGGLVQAGGSLRLSCAASGYISDRVYMGWYRQAPGKERELVAGITEGTITYYADSVKGRFTISRDNAKNTVYLQMNSLKPEDTAVYYCAAGILKDLYWLGHFQYWGQGTQVTVSS

SEQ ID NO: 16395 - protein, 122 aa, Artificial Sequence
  Chemically Synthesized
QVQLQESGGGLVQAGGSLRLSCAASGNISTDGDMGWYRQAPGKERELVAGIAQGGTTNYADSVKGRFTISRDNAKNTVYLQMNSLKPEDTAVYYCAVGDIDVRDKVYGHGYWGQGTQVTVSS

SEQ ID NO: 16396 - protein, 122 aa, Artificial Sequence
  Chemically Synthesized
QVQLQESGGGLVQAGGSLRLSCAASGYISAELVMGWYRQAPGKERELVATIAAGATTYYADSVKGRFTISRDNAKNTVYLQMNSLKPEDTAVYYCAAYDYYSQVYYYGHYYWGQGTQVTVSS

SEQ ID NO: 16397 - protein, 125 aa, Artificial Sequence
  Chemically Synthesized
QVQLQESGGGLVQAGGSLRLSCAASGYISGLKYMGWYRQAPGKEREFVATIAEGANTNYADSVKGRFTISRDNAKNTVYLQMNSLKPEDTAVYYCAAGVVTYLLLLQVYVAFVYWGQGTQVTVSS

SEQ ID NO: 16398 - protein, 122 aa, Artificial Sequence
  Chemically Synthesized
QVQLQESGGGLVQAGGSLRLSCAASGYISRLLTMGWYRQAPGKERELVAAIGGGATTYYADSVKGRFTISRDNAKNTVYLQMNSLKPEDTAVYYCAAVYTDNDIPTVSHIYWGQGTQVTVSS

SEQ ID NO: 16399 - protein, 118 aa, Artificial Sequence
  Chemically Synthesized
QVQLQESGGGLVQAGGSLRLSCAASGTISSSAVMGWYRQAPGKEREFVAAITPGTNTYYADSVKGRFTISRDNAKNTVYLQMNSLKPEDTAVYYCAVPYDEDDTHGYWGQGTQVTVSS

SEQ ID NO: 16400 - protein, 122 aa, Artificial Sequence
  Chemically Synthesized
QVQLQESGGGLVQAGGSLRLSCAASGNIFYAGDMGWYRQAPGKERELVATIGYGSTTNYADSVKGRFTISRDNAKNTVYLQMNSLKPEDTAVYYCAAYVLIDYYDYVWFRYWGQGTQVTVSS

SEQ ID NO: 16401 - protein, 117 aa, Artificial Sequence
  Chemically Synthesized
QVQLQESGGGLVQAGGSLRLSCAASGTIFQDSMGWYRQAPGKEREFVAAIDNGTSTNYADSVKGRFTISRDNAKNTVYLQMNSLKPEDTAVYYCAVYLRPLISLQYWGQGTQVTVSS

SEQ ID NO: 16402 - protein, 121 aa, Artificial Sequence
  Chemically Synthesized
QVQLQESGGGLVQAGGSLRLSCAASGYISDAYAMGWYRQAPGKERELVASINYGYYQYADSVKGRFTISRDNAKNTVYLQMNSLKPEDTAVYYCAAYGDFLVITLYTFYYWGQGTQVTVSS

SEQ ID NO: 16403 - protein, 125 aa, Artificial Sequence
  Chemically Synthesized
QVQLQESGGGLVQAGGSLRLSCAASGSIFFHRGMGWYRQAPGKERELVAAINDGAITYYADSVKGRFTISRDNAKNTVYLQMNSLKPEDTAVYYCAAVTEIYYSDRPYTYYYGYWGQGTQVTVSS

SEQ ID NO: 16404 - protein, 118 aa, Artificial Sequence
  Chemically Synthesized
QVQLQESGGGLVQAGGSLRLSCAASGSISGDSYMGWYRQAPGKEREFVASISDGGSTYYADSVKGRFTISRDNAKNTVYLQMNSLKPEDTAVYYCAAGSFPAGYLSYWGQGTQVTVSS

SEQ ID NO: 16405 - protein, 122 aa, Artificial Sequence
  Chemically Synthesized
QVQLQESGGGLVQAGGSLRLSCAASGTIFYNYTMGWYRQAPGKEREFVAAIDHGGITYYADSVKGRFTISRDNAKNTVYLQMNSLKPEDTAVYYCAASAFDVYALWAGFQYWGQGTQVTVSS

SEQ ID NO: 16406 - protein, 125 aa, Artificial Sequence
  Chemically Synthesized
QVQLQESGGGLVQAGGSLRLSCAASGNIFRSIMGWYRQAPGKEREFVASINDGTTTNYADSVKGRFTISRDNAKNTVYLQMNSLKPEDTAVYYCAAYVINGLAVAEVGDRQYGYWGQGTQVTVSS

SEQ ID NO: 16407 - protein, 118 aa, Artificial Sequence
  Chemically Synthesized
QVQLQESGGGLVQAGGSLRLSCAASGNIFAYYIMGWYRQAPGKERELVAAIAYGTSTYYADSVKGRFTISRDNAKNTVYLQMNSLKPEDTAVYYCAAYVNRAPYHNYWGQGTQVTVSS

SEQ ID NO: 16408 - protein, 118 aa, Artificial Sequence
  Chemically Synthesized
QVQLQESGGGLVQAGGSLRLSCAASGNISRGTYMGWYRQAPGKEREFVASISRGASTYYADSVKGRFTISRDNAKNTVYLQMNSLKPEDTAVYYCAVDVNVYRPLYYWGQGTQVTVSS

SEQ ID NO: 16409 - protein, 118 aa, Artificial Sequence
  Chemically Synthesized
QVQLQESGGGLVQAGGSLRLSCAASGSIFWYFVMGWYRQAPGKEREFVASINTGGTTNYADSVKGRFTISRDNAKNTVYLQMNSLKPEDTAVYYCAATYQYVYFLRYWGQGTQVTVSS

SEQ ID NO: 16410 - protein, 111 aa, Artificial Sequence
  Chemically Synthesized
QVQLQESGGGLVQAGGSLRLSCAASGTIFFDYGMGWYRQAPGKEREFVATITGGTTTYYADSVKGRFTISRDNAKNTVYLQMNSLKPEDTAVYYCANCIYWGQGTQVTVSS

SEQ ID NO: 16411 - protein, 113 aa, Artificial Sequence
  Chemically Synthesized
QVQLQESGGGLVQAGGSLRLSCAASGTIFVLGYMGWYRQAPGKEREFVAGIGYGTNTYYADSVKGRFTISRDNAKNTVYLQMNSLKPEDTAVYYCAADNHRYWGQGTQVTVSS

SEQ ID NO: 16412 - protein, 125 aa, Artificial Sequence
  Chemically Synthesized
QVQLQESGGGLVQAGGSLRLSCAASGNIFDTSMGWYRQAPGKERELVAGITDGATTYYADSVKGRFTISRDNAKNTVYLQMNSLKPEDTAVYYCAVDAYRRTVANVLDSTRHRYWGQGTQVTVSS

SEQ ID NO: 16413 - protein, 122 aa, Artificial Sequence
  Chemically Synthesized
QVQLQESGGGLVQAGGSLRLSCAASGNIFRYSTMGWYRQAPGKERELVAAIGQGANTYYADSVKGRFTISRDNAKNTVYLQMNSLKPEDTAVYYCAVVVESDTGVYGLLDYWGQGTQVTVSS

SEQ ID NO: 16414 - protein, 117 aa, Artificial Sequence
  Chemically Synthesized
QVQLQESGGGLVQAGGSLRLSCAASGSIFLLWAMGWYRQAPGKEREFVASIATGTSTNYADSVKGRFTISRDNAKNTVYLQMNSLKPEDTAVYYCAVYSGIAVFYYWGQGTQVTVSS

SEQ ID NO: 16415 - protein, 117 aa, Artificial Sequence
  Chemically Synthesized
QVQLQESGGGLVQAGGSLRLSCAASGYISWKSMGWYRQAPGKEREFVATISYGSITYYADSVKGRFTISRDNAKNTVYLQMNSLKPEDTAVYYCAAEYQYGYDYIYWGQGTQVTVSS

SEQ ID NO: 16416 - protein, 117 aa, Artificial Sequence
  Chemically Synthesized
QVQLQESGGGLVQAGGSLRLSCAASGYISPYYSMGWYRQAPGKERELVATIDWGGNTYADSVKGRFTISRDNAKNTVYLQMNSLKPEDTAVYYCAADRAYADYHGYWGQGTQVTVSS

SEQ ID NO: 16417 - protein, 122 aa, Artificial Sequence
  Chemically Synthesized
QVQLQESGGGLVQAGGSLRLSCAASGYIFFGGGMGWYRQAPGKERELVATIGYGSTTNYADSVKGRFTISRDNAKNTVYLQMNSLKPEDTAVYYCAAQKGYVNPGGRWLPYWGQGTQVTVSS

SEQ ID NO: 16418 - protein, 118 aa, Artificial Sequence
  Chemically Synthesized
QVQLQESGGGLVQAGGSLRLSCAASGSISALYTMGWYRQAPGKERELVASITYGANTYYADSVKGRFTISRDNAKNTVYLQMNSLKPEDTAVYYCAVSNRLDDDHYYWGQGTQVTVSS

SEQ ID NO: 16419 - protein, 122 aa, Artificial Sequence
  Chemically Synthesized
QVQLQESGGGLVQAGGSLRLSCAASGTISNIDIMGWYRQAPGKEREFVATITIGSITNYADSVKGRFTISRDNAKNTVYLQMNSLKPEDTAVYYCAAGSYRVGGDHYYHKYWGQGTQVTVSS

SEQ ID NO: 16420 - protein, 122 aa, Artificial Sequence
  Chemically Synthesized
QVQLQESGGGLVQAGGSLRLSCAASGSISQWNVMGWYRQAPGKERELVATIAAGSNTYYADSVKGRFTISRDNAKNTVYLQMNSLKPEDTAVYYCAVAYSDNSAIYQYHGYWGQGTQVTVSS

SEQ ID NO: 16421 - protein, 116 aa, Artificial Sequence
  Chemically Synthesized
QVQLQESGGGLVQAGGSLRLSCAASGTIFYDSRMGWYRQAPGKEREFVASIARGASPYADSVKGRFTISRDNAKNTVYLQMNSLKPEDTAVYYCAATRTTVVFMYWGQGTQVTVSS

SEQ ID NO: 16422 - protein, 122 aa, Artificial Sequence
  Chemically Synthesized
QVQLQESGGGLVQAGGSLRLSCAASGSIFYKFGMGWYRQAPGKEREFVAGITHGTSTNYADSVKGRFTISRDNAKNTVYLQMNSLKPEDTAVYYCAAADYNYDFREAYHYYWGQGTQVTVSS

SEQ ID NO: 16423 - protein, 125 aa, Artificial Sequence
  Chemically Synthesized
QVQLQESGGGLVQAGGSLRLSCAASGSIFSWQTMGWYRQAPGKERELVAAINAGTITYYADSVKGRFTISRDNAKNTVYLQMNSLKPEDTAVYYCAAVAGANQSNLLVFRTVIYWGQGTQVTVSS

SEQ ID NO: 16424 - protein, 121 aa, Artificial Sequence
  Chemically Synthesized
QVQLQESGGGLVQAGGSLRLSCAASGNISSSVMGWYRQAPGKERELVAGISQGSSTNYADSVKGRFTISRDNAKNTVYLQMNSLKPEDTAVYYCAATPRTTYGLVYPHGYWGQGTQVTVSS

SEQ ID NO: 16425 - protein, 122 aa, Artificial Sequence
  Chemically Synthesized
QVQLQESGGGLVQAGGSLRLSCAASGTISAYRTMGWYRQAPGKEREFVASIDPGGTTNYADSVKGRFTISRDNAKNTVYLQMNSLKPEDTAVYYCAVQWDASGKRLGYLQYWGQGTQVTVSS

SEQ ID NO: 16426 - protein, 118 aa, Artificial Sequence
  Chemically Synthesized
QVQLQESGGGLVQAGGSLRLSCAASGYIFGYIFMGWYRQAPGKEREFVAAIAGGGTTYYADSVKGRFTISRDNAKNTVYLQMNSLKPEDTAVYYCAAYVGYFPYFGYWGQGTQVTVSS

SEQ ID NO: 16427 - protein, 118 aa, Artificial Sequence
  Chemically Synthesized
QVQLQESGGGLVQAGGSLRLSCAASGTISGWDHMGWYRQAPGKEREFVASIAYGAITYYADSVKGRFTISRDNAKNTVYLQMNSLKPEDTAVYYCAAQVGGTITHAYWGQGTQVTVSS

SEQ ID NO: 16428 - protein, 122 aa, Artificial Sequence
  Chemically Synthesized
QVQLQESGGGLVQAGGSLRLSCAASGTIFHHNSMGWYRQAPGKERELVATIGNGSTTYYADSVKGRFTISRDNAKNTVYLQMNSLKPEDTAVYYCAVYPPIKDKGSFYLAYWGQGTQVTVSS

SEQ ID NO: 16429 - protein, 126 aa, Artificial Sequence
  Chemically Synthesized
QVQLQESGGGLVQAGGSLRLSCAASGNISPDSTMGWYRQAPGKEREFVATISVGAITNYADSVKGRFTISRDNAKNTVYLQMNSLKPEDTAVYYCAVDDKLGDYWEYWYYGTHDYWGQGTQVTVSS

SEQ ID NO: 16430 - protein, 116 aa, Artificial Sequence
  Chemically Synthesized
QVQLQESGGGLVQAGGSLRLSCAASGNISTFYSMGWYRQAPGKEREFVAAISQGSTTYYADSVKGRFTISRDNAKNTVYLQMNSLKPEDTAVYYCAAYDLTTRFYWGQGTQVTVSS

SEQ ID NO: 16431 - protein, 121 aa, Artificial Sequence
  Chemically Synthesized
QVQLQESGGGLVQAGGSLRLSCAASGTISVSSMGWYRQAPGKERELVAGIGYGGNTQYADSVKGRFTISRDNAKNTVYLQMNSLKPEDTAVYYCAVYAYLLVDIGSYHSYWGQGTQVTVSS

SEQ ID NO: 16432 - protein, 118 aa, Artificial Sequence
  Chemically Synthesized
QVQLQESGGGLVQAGGSLRLSCAASGYISVLIDMGWYRQAPGKERELVAAITPGGNTYYADSVKGRFTISRDNAKNTVYLQMNSLKPEDTAVYYCAVLSVAGGGFYYWGQGTQVTVSS

SEQ ID NO: 16433 - protein, 122 aa, Artificial Sequence
  Chemically Synthesized
QVQLQESGGGLVQAGGSLRLSCAASGNISDTGGMGWYRQAPGKEREFVAGITQGSSTNYADSVKGRFTISRDNAKNTVYLQMNSLKPEDTAVYYCAANVVSQLPLPDLLEYWGQGTQVTVSS

SEQ ID NO: 16434 - protein, 118 aa, Artificial Sequence
  Chemically Synthesized
QVQLQESGGGLVQAGGSLRLSCAASGYIFGHDTMGWYRQAPGKERELVAAIGAGTTTYYADSVKGRFTISRDNAKNTVYLQMNSLKPEDTAVYYCAATVQTAVLYSYWGQGTQVTVSS

SEQ ID NO: 16435 - protein, 118 aa, Artificial Sequence
  Chemically Synthesized
QVQLQESGGGLVQAGGSLRLSCAASGYISPEYEMGWYRQAPGKERELVAAIGAGGITNYADSVKGRFTISRDNAKNTVYLQMNSLKPEDTAVYYCAASVTDSLPHQYWGQGTQVTVSS

SEQ ID NO: 16436 - protein, 126 aa, Artificial Sequence
  Chemically Synthesized
QVQLQESGGGLVQAGGSLRLSCAASGTIFVQDVMGWYRQAPGKEREFVATIATGATTNYADSVKGRFTISRDNAKNTVYLQMNSLKPEDTAVYYCAAGTWGSGDNTYSTQDSHTYWGQGTQVTVSS

SEQ ID NO: 16437 - protein, 126 aa, Artificial Sequence
  Chemically Synthesized
QVQLQESGGGLVQAGGSLRLSCAASGNISDGWAMGWYRQAPGKEREFVATIALGTTTNYADSVKGRFTISRDNAKNTVYLQMNSLKPEDTAVYYCAVTYAPQPDAIGWYAYVLDYWGQGTQVTVSS

SEQ ID NO: 16438 - protein, 126 aa, Artificial Sequence
  Chemically Synthesized
QVQLQESGGGLVQAGGSLRLSCAASGNISYIGTMGWYRQAPGKERELVAAIAIGSTTNYADSVKGRFTISRDNAKNTVYLQMNSLKPEDTAVYYCAVVDVAQQGYLTHPRPAFYYWGQGTQVTVSS

SEQ ID NO: 16439 - protein, 118 aa, Artificial Sequence
  Chemically Synthesized
QVQLQESGGGLVQAGGSLRLSCAASGYISGVYGMGWYRQAPGKEREFVAAINSGGTTNYADSVKGRFTISRDNAKNTVYLQMNSLKPEDTAVYYCAVPYDYARQLLYWGQGTQVTVSS

SEQ ID NO: 16440 - protein, 121 aa, Artificial Sequence
  Chemically Synthesized
QVQLQESGGGLVQAGGSLRLSCAASGNIFNVLRMGWYRQAPGKERELVASIGYGSNTNYADSVKGRFTISRDNAKNTVYLQMNSLKPEDTAVYYCAAPRGPRDLYRRPCYWGQGTQVTVSS

SEQ ID NO: 16441 - protein, 118 aa, Artificial Sequence
  Chemically Synthesized
QVQLQESGGGLVQAGGSLRLSCAASGTIFDDHDMGWYRQAPGKEREFVAGIGYGTTTNYADSVKGRFTISRDNAKNTVYLQMNSLKPEDTAVYYCAVNQYAEPTHAYWGQGTQVTVSS

SEQ ID NO: 16442 - protein, 122 aa, Artificial Sequence
  Chemically Synthesized
QVQLQESGGGLVQAGGSLRLSCAASGNISDHPTMGWYRQAPGKEREFVAGIDRGSSTYYADSVKGRFTISRDNAKNTVYLQMNSLKPEDTAVYYCAAYDDKLVFVSRKHSYWGQGTQVTVSS

SEQ ID NO: 16443 - protein, 123 aa, Artificial Sequence
  Chemically Synthesized
QVQLQESGGGLVQAGGSLRLSCAASGSIFGWYYYMGWYRQAPGKEREFVASITVGSITYYADSVKGRFTISRDNAKNTVYLQMNSLKPEDTAVYYCAVRSPWFFDYDLSHRYWGQGTQVTVSS

SEQ ID NO: 16444 - protein, 122 aa, Artificial Sequence
  Chemically Synthesized
QVQLQESGGGLVQAGGSLRLSCAASGNISRGVSMGWYRQAPGKEREFVAAIDRGGSTNYADSVKGRFTISRDNAKNTVYLQMNSLKPEDTAVYYCAARHLRDLLTSINLAYWGQGTQVTVSS

SEQ ID NO: 16445 - protein, 117 aa, Artificial Sequence
  Chemically Synthesized
QVQLQESGGGLVQAGGSLRLSCAASGSIFQSKAMGWYRQAPGKEREFVATIAYGSSTNYADSVKGRFTISRDNAKNTVYLQMNSLKPEDTAVYYCAADGDVGDPHYWGQGTQVTVSS

SEQ ID NO: 16446 - protein, 122 aa, Artificial Sequence
  Chemically Synthesized
QVQLQESGGGLVQAGGSLRLSCAASGTISKRGGMGWYRQAPGKEREFVASIGAGTSTNYADSVKGRFTISRDNAKNTVYLQMNSLKPEDTAVYYCAVNGFWHAYTYYGLGYWGQGTQVTVSS

SEQ ID NO: 16447 - protein, 118 aa, Artificial Sequence
  Chemically Synthesized
QVQLQESGGGLVQAGGSLRLSCAASGTIFTYVRMGWYRQAPGKEREFVASIGSGSNTYYADSVKGRFTISRDNAKNTVYLQMNSLKPEDTAVYYCAALIWYHYYYAYWGQGTQVTVSS

SEQ ID NO: 16448 - protein, 110 aa, Artificial Sequence
  Chemically Synthesized
QVQLQESGGGLVQAGGSLRLSCAASGNIFARYEMGWYRQAPGKEREFVAGITLGTTTYYADSVKGRFTISRDNAKNTVYLQMNSLKPEDTAVYYCADDYWGQGTQVTVSS

SEQ ID NO: 16449 - protein, 118 aa, Artificial Sequence
  Chemically Synthesized
QVQLQESGGGLVQAGGSLRLSCAASGTISVRRYMGWYRQAPGKERELVAGIGYGGSTNYADSVKGRFTISRDNAKNTVYLQMNSLKPEDTAVYYCAADTDSTSDLGYWGQGTQVTVSS

SEQ ID NO: 16450 - protein, 118 aa, Artificial Sequence
  Chemically Synthesized
QVQLQESGGGLVQAGGSLRLSCAASGSIFGRASMGWYRQAPGKEREFVAGIAVGATTNYADSVKGRFTISRDNAKNTVYLQMNSLKPEDTAVYYCAVQRYRYFRHLYWGQGTQVTVSS

SEQ ID NO: 16451 - protein, 126 aa, Artificial Sequence
  Chemically Synthesized
QVQLQESGGGLVQAGGSLRLSCAASGYIFRDYNMGWYRQAPGKERELVATIAYGTNTNYADSVKGRFTISRDNAKNTVYLQMNSLKPEDTAVYYCAADGDYLYSRGADDYSPLDYWGQGTQVTVSS

SEQ ID NO: 16452 - protein, 126 aa, Artificial Sequence
  Chemically Synthesized
QVQLQESGGGLVQAGGSLRLSCAASGYISRSGAMGWYRQAPGKEREFVAAIGEGTTTNYADSVKGRFTISRDNAKNTVYLQMNSLKPEDTAVYYCAAKTLYDVFVRWWTPLAYSYWGQGTQVTVSS

SEQ ID NO: 16453 - protein, 121 aa, Artificial Sequence
  Chemically Synthesized
QVQLQESGGGLVQAGGSLRLSCAASGTISTKLMGWYRQAPGKERELVATIADGGSTYYADSVKGRFTISRDNAKNTVYLQMNSLKPEDTAVYYCAVASALSNFWSVDFQYWGQGTQVTVSS

SEQ ID NO: 16454 - protein, 122 aa, Artificial Sequence
  Chemically Synthesized
QVQLQESGGGLVQAGGSLRLSCAASGTIFEYNDMGWYRQAPGKEREFVASINDGANTNYADSVKGRFTISRDNAKNTVYLQMNSLKPEDTAVYYCAVDWLNDTADRGGYDYWGQGTQVTVSS

SEQ ID NO: 16455 - protein, 118 aa, Artificial Sequence
  Chemically Synthesized
QVQLQESGGGLVQAGGSLRLSCAASGSIFSDWYMGWYRQAPGKEREFVASINYGTNTYYADSVKGRFTISRDNAKNTVYLQMNSLKPEDTAVYYCAVVYEYVGYLAYWGQGTQVTVSS

SEQ ID NO: 16456 - protein, 116 aa, Artificial Sequence
  Chemically Synthesized
QVQLQESGGGLVQAGGSLRLSCAASGTISLDKWMGWYRQAPGKEREFVAGIGSGATTNYADSVKGRFTISRDNAKNTVYLQMNSLKPEDTAVYYCAVYDYVQHTYWGQGTQVTVSS

SEQ ID NO: 16457 - protein, 125 aa, Artificial Sequence
  Chemically Synthesized
QVQLQESGGGLVQAGGSLRLSCAASGYISWPSMGWYRQAPGKERELVAAIGPGTSTYYADSVKGRFTISRDNAKNTVYLQMNSLKPEDTAVYYCAVWYVPEWYAHRTYDVLLYYWGQGTQVTVSS

SEQ ID NO: 16458 - protein, 117 aa, Artificial Sequence
  Chemically Synthesized
QVQLQESGGGLVQAGGSLRLSCAASGNIFNYTRMGWYRQAPGKEREFVAGIDDGSITYYADSVKGRFTISRDNAKNTVYLQMNSLKPEDTAVYYCAVTRYASGHTYWGQGTQVTVSS

SEQ ID NO: 16459 - protein, 126 aa, Artificial Sequence
  Chemically Synthesized
QVQLQESGGGLVQAGGSLRLSCAASGSIFDYNSMGWYRQAPGKERELVAGIDYGSSTYYADSVKGRFTISRDNAKNTVYLQMNSLKPEDTAVYYCAALIAYITEYRGNEATSHSYWGQGTQVTVSS

SEQ ID NO: 16460 - protein, 122 aa, Artificial Sequence
  Chemically Synthesized
QVQLQESGGGLVQAGGSLRLSCAASGSISGDASMGWYRQAPGKERELVATIASGSSTNYADSVKGRFTISRDNAKNTVYLQMNSLKPEDTAVYYCAAVNQSYRRTDRVYSYWGQGTQVTVSS

SEQ ID NO: 16461 - protein, 126 aa, Artificial Sequence
  Chemically Synthesized
QVQLQESGGGLVQAGGSLRLSCAASGSIFYLDYMGWYRQAPGKERELVATIDQGTSTYYADSVKGRFTISRDNAKNTVYLQMNSLKPEDTAVYYCAAETSWDGRLRLFFYTIHEYWGQGTQVTVSS

SEQ ID NO: 16462 - protein, 122 aa, Artificial Sequence
  Chemically Synthesized
QVQLQESGGGLVQAGGSLRLSCAASGTIFAAGFMGWYRQAPGKEREFVAGIADGAITNYADSVKGRFTISRDNAKNTVYLQMNSLKPEDTAVYYCAALDHYARGYSYIYDYWGQGTQVTVSS

SEQ ID NO: 16463 - protein, 118 aa, Artificial Sequence
  Chemically Synthesized
QVQLQESGGGLVQAGGSLRLSCAASGNISYASYMGWYRQAPGKERELVATINGGSTTYYADSVKGRFTISRDNAKNTVYLQMNSLKPEDTAVYYCAVGQIYASLHSYWGQGTQVTVSS

SEQ ID NO: 16464 - protein, 117 aa, Artificial Sequence
  Chemically Synthesized
QVQLQESGGGLVQAGGSLRLSCAASGNISQAYMGWYRQAPGKERELVAAITAGGTTYYADSVKGRFTISRDNAKNTVYLQMNSLKPEDTAVYYCAAKYGSYDVYEYWGQGTQVTVSS

SEQ ID NO: 16465 - protein, 118 aa, Artificial Sequence
  Chemically Synthesized
QVQLQESGGGLVQAGGSLRLSCAASGSISYSLFMGWYRQAPGKERELVASINYGAITNYADSVKGRFTISRDNAKNTVYLQMNSLKPEDTAVYYCAVSLDKADDLGYWGQGTQVTVSS

SEQ ID NO: 16466 - protein, 118 aa, Artificial Sequence
  Chemically Synthesized
QVQLQESGGGLVQAGGSLRLSCAASGYIFYPTYMGWYRQAPGKEREFVATITTGATTNYADSVKGRFTISRDNAKNTVYLQMNSLKPEDTAVYYCAATPYAYTRHAYWGQGTQVTVSS

SEQ ID NO: 16467 - protein, 118 aa, Artificial Sequence
  Chemically Synthesized
QVQLQESGGGLVQAGGSLRLSCAASGTIFPDYYMGWYRQAPGKERELVAGIDTGASTYYADSVKGRFTISRDNAKNTVYLQMNSLKPEDTAVYYCAVDYDWRDPFPYWGQGTQVTVSS

SEQ ID NO: 16468 - protein, 118 aa, Artificial Sequence
  Chemically Synthesized
QVQLQESGGGLVQAGGSLRLSCAASGSISGGRDMGWYRQAPGKEREFVATITEGTTTNYADSVKGRFTISRDNAKNTVYLQMNSLKPEDTAVYYCAAGYSYYSDLYYWGQGTQVTVSS

SEQ ID NO: 16469 - protein, 118 aa, Artificial Sequence
  Chemically Synthesized
QVQLQESGGGLVQAGGSLRLSCAASGYIFPSQYMGWYRQAPGKERELVAAIAYGTNTNYADSVKGRFTISRDNAKNTVYLQMNSLKPEDTAVYYCAVAAGYVTVLSYWGQGTQVTVSS

SEQ ID NO: 16470 - protein, 118 aa, Artificial Sequence
  Chemically Synthesized
QVQLQESGGGLVQAGGSLRLSCAASGNIFGASYMGWYRQAPGKERELVASITRGGSTYYADSVKGRFTISRDNAKNTVYLQMNSLKPEDTAVYYCAVNRYRYQRLSYWGQGTQVTVSS

SEQ ID NO: 16471 - protein, 118 aa, Artificial Sequence
  Chemically Synthesized
QVQLQESGGGLVQAGGSLRLSCAASGNIFAGYYMGWYRQAPGKERELVASISIGTITNYADSVKGRFTISRDNAKNTVYLQMNSLKPEDTAVYYCAAGATGVLYHPYWGQGTQVTVSS

SEQ ID NO: 16472 - protein, 116 aa, Artificial Sequence
  Chemically Synthesized
QVQLQESGGGLVQAGGSLRLSCAASGSISTISYMGWYRQAPGKEREFVASIARGTLYADSVKGRFTISRDNAKNTVYLQMNSLKPEDTAVYYCAADGYDVFSYGYWGQGTQVTVSS

SEQ ID NO: 16473 - protein, 122 aa, Artificial Sequence
  Chemically Synthesized
QVQLQESGGGLVQAGGSLRLSCAASGYIFFAHPMGWYRQAPGKERELVATIDTGATTNYADSVKGRFTISRDNAKNTVYLQMNSLKPEDTAVYYCAATNALYVVSGSDYGYWGQGTQVTVSS

SEQ ID NO: 16474 - protein, 118 aa, Artificial Sequence
  Chemically Synthesized
QVQLQESGGGLVQAGGSLRLSCAASGSISHLLHMGWYRQAPGKERELVASIAPGTNTNYADSVKGRFTISRDNAKNTVYLQMNSLKPEDTAVYYCAASGEYDNLFPYWGQGTQVTVSS

SEQ ID NO: 16475 - protein, 122 aa, Artificial Sequence
  Chemically Synthesized
QVQLQESGGGLVQAGGSLRLSCAASGTIFPYYIMGWYRQAPGKEREFVAGISYGTNTNYADSVKGRFTISRDNAKNTVYLQMNSLKPEDTAVYYCAAYTGIGSPRTVDHRYWGQGTQVTVSS

SEQ ID NO: 16476 - protein, 122 aa, Artificial Sequence
  Chemically Synthesized
QVQLQESGGGLVQAGGSLRLSCAASGYISGYINMGWYRQAPGKERELVAGIGYGASTYYADSVKGRFTISRDNAKNTVYLQMNSLKPEDTAVYYCAVDVPFVWYDHTLLRYWGQGTQVTVSS

SEQ ID NO: 16477 - protein, 117 aa, Artificial Sequence
  Chemically Synthesized
QVQLQESGGGLVQAGGSLRLSCAASGNIFPWLVMGWYRQAPGKERELVASINSGATTNYADSVKGRFTISRDNAKNTVYLQMNSLKPEDTAVYYCAAGGGYDWSMYWGQGTQVTVSS

SEQ ID NO: 16478 - protein, 118 aa, Artificial Sequence
  Chemically Synthesized
QVQLQESGGGLVQAGGSLRLSCAASGTIFSVYLMGWYRQAPGKERELVAAISYGGTTNYADSVKGRFTISRDNAKNTVYLQMNSLKPEDTAVYYCAVNDVGELSHWYWGQGTQVTVSS

SEQ ID NO: 16479 - protein, 117 aa, Artificial Sequence
  Chemically Synthesized
QVQLQESGGGLVQAGGSLRLSCAASGYISASYSMGWYRQAPGKERELVASIARGTITYYADSVKGRFTISRDNAKNTVYLQMNSLKPEDTAVYYCAAGSYVTYDIYWGQGTQVTVSS

SEQ ID NO: 16480 - protein, 119 aa, Artificial Sequence
  Chemically Synthesized
QVQLQESGGGLVQAGGSLRLSCAASGTISKGTYMGWYRQAPGKERELVAGIDVGTSTYYADSVKGRFTISRDNAKNTVYLQMNSLKPEDTAVYYCAVVRWVDAYDHVYWGQGTQVTVSS

SEQ ID NO: 16481 - protein, 117 aa, Artificial Sequence
  Chemically Synthesized
QVQLQESGGGLVQAGGSLRLSCAASGNIFEVPFMGWYRQAPGKERELVASIDAGGTTYYADSVKGRFTISRDNAKNTVYLQMNSLKPEDTAVYYCAATQYLEAFAYWGQGTQVTVSS

SEQ ID NO: 16482 - protein, 122 aa, Artificial Sequence
  Chemically Synthesized
QVQLQESGGGLVQAGGSLRLSCAASGNIFSGPRMGWYRQAPGKERELVAGISQGSSTNYADSVKGRFTISRDNAKNTVYLQMNSLKPEDTAVYYCAVSGGADLPTYRGLDYWGQGTQVTVSS

SEQ ID NO: 16483 - protein, 122 aa, Artificial Sequence
  Chemically Synthesized
QVQLQESGGGLVQAGGSLRLSCAASGTIFDGDYMGWYRQAPGKERELVAGISHGGSTYYADSVKGRFTISRDNAKNTVYLQMNSLKPEDTAVYYCAVSDRYVSKGYTSLAYWGQGTQVTVSS

SEQ ID NO: 16484 - protein, 122 aa, Artificial Sequence
  Chemically Synthesized
QVQLQESGGGLVQAGGSLRLSCAASGSIFTYRVMGWYRQAPGKEREFVAAIDDGGSTYYADSVKGRFTISRDNAKNTVYLQMNSLKPEDTAVYYCAVVYYPSDYEADLLDYWGQGTQVTVSS

SEQ ID NO: 16485 - protein, 118 aa, Artificial Sequence
  Chemically Synthesized
QVQLQESGGGLVQAGGSLRLSCAASGTISNSSAMGWYRQAPGKERELVATINQGGTTNYADSVKGRFTISRDNAKNTVYLQMNSLKPEDTAVYYCAVYYQVRISSLYWGQGTQVTVSS

SEQ ID NO: 16486 - protein, 118 aa, Artificial Sequence
  Chemically Synthesized
QVQLQESGGGLVQAGGSLRLSCAASGSISTWYYMGWYRQAPGKEREFVAGITSGGSTYYADSVKGRFTISRDNAKNTVYLQMNSLKPEDTAVYYCAVDGVHLTGFRYWGQGTQVTVSS

SEQ ID NO: 16487 - protein, 118 aa, Artificial Sequence
  Chemically Synthesized
QVQLQESGGGLVQAGGSLRLSCAASGSISEYRLMGWYRQAPGKEREFVAGIGEGGITYYADSVKGRFTISRDNAKNTVYLQMNSLKPEDTAVYYCAVQYRSLSDFVYWGQGTQVTVSS

SEQ ID NO: 16488 - protein, 126 aa, Artificial Sequence
  Chemically Synthesized
QVQLQESGGGLVQAGGSLRLSCAASGNIFPYDTMGWYRQAPGKERELVASIGVGSTTNYADSVKGRFTISRDNAKNTVYLQMNSLKPEDTAVYYCAASRRVDDGYDQYYGPDHDYWGQGTQVTVSS

SEQ ID NO: 16489 - protein, 119 aa, Artificial Sequence
  Chemically Synthesized
QVQLQESGGGLVQAGGSLRLSCAASGYISTYATMGWYRQAPGKEREFVATIGAGAITYYADSVKGRFTISRDNAKNTVYLQMNSLKPEDTAVYYCAASGGDWRELSAYWGQGTQVTVSS

SEQ ID NO: 16490 - protein, 121 aa, Artificial Sequence
  Chemically Synthesized
QVQLQESGGGLVQAGGSLRLSCAASGNISKVYMGWYRQAPGKERELVASISVGTITYYADSVKGRFTISRDNAKNTVYLQMNSLKPEDTAVYYCAALASDYVTVYDDHPYWGQGTQVTVSS

SEQ ID NO: 16491 - protein, 122 aa, Artificial Sequence
  Chemically Synthesized
QVQLQESGGGLVQAGGSLRLSCAASGSIFVNNSMGWYRQAPGKERELVAGIGNGASTNYADSVKGRFTISRDNAKNTVYLQMNSLKPEDTAVYYCAVLGLDSHYPVYYFGYWGQGTQVTVSS

SEQ ID NO: 16492 - protein, 118 aa, Artificial Sequence
  Chemically Synthesized
QVQLQESGGGLVQAGGSLRLSCAASGYIFGRGEMGWYRQAPGKERELVASISYGGITNYADSVKGRFTISRDNAKNTVYLQMNSLKPEDTAVYYCAAVLPYLSSYRYWGQGTQVTVSS

SEQ ID NO: 16493 - protein, 118 aa, Artificial Sequence
  Chemically Synthesized
QVQLQESGGGLVQAGGSLRLSCAASGSIFRAKRMGWYRQAPGKEREFVAGIGRGGSTNYADSVKGRFTISRDNAKNTVYLQMNSLKPEDTAVYYCAVYNYWNFGFPYWGQGTQVTVSS

SEQ ID NO: 16494 - protein, 122 aa, Artificial Sequence
  Chemically Synthesized
QVQLQESGGGLVQAGGSLRLSCAASGTISIYPYMGWYRQAPGKERELVAGIGYGASTYYADSVKGRFTISRDNAKNTVYLQMNSLKPEDTAVYYCAVTANWDRKYPSPHDYWGQGTQVTVSS

SEQ ID NO: 16495 - protein, 118 aa, Artificial Sequence
  Chemically Synthesized
QVQLQESGGGLVQAGGSLRLSCAASGSISGTDYMGWYRQAPGKERELVAAISYGASTNYADSVKGRFTISRDNAKNTVYLQMNSLKPEDTAVYYCAVYTTPPKVYYYWGQGTQVTVSS

SEQ ID NO: 16496 - protein, 118 aa, Artificial Sequence
  Chemically Synthesized
QVQLQESGGGLVQAGGSLRLSCAASGYIFVRGYMGWYRQAPGKERELVATIDSGGITNYADSVKGRFTISRDNAKNTVYLQMNSLKPEDTAVYYCAVIYASYIWLLYWGQGTQVTVSS

SEQ ID NO: 16497 - protein, 121 aa, Artificial Sequence
  Chemically Synthesized
QVQLQESGGGLVQAGGSLRLSCAASGNIFDRWSMGWYRQAPGKERELVAAIDQGGNTNYADSVKGRFTISRDNAKNTVYLQMNSLKPEDTAVYYCAVDANPDQPAERISYWGQGTQVTVSS

SEQ ID NO: 16498 - protein, 122 aa, Artificial Sequence
  Chemically Synthesized
QVQLQESGGGLVQAGGSLRLSCAASGSISQYYIMGWYRQAPGKERELVATITYGGTTYYADSVKGRFTISRDNAKNTVYLQMNSLKPEDTAVYYCAAGYPSIGAVARGHFYWGQGTQVTVSS

SEQ ID NO: 16499 - protein, 121 aa, Artificial Sequence
  Chemically Synthesized
QVQLQESGGGLVQAGGSLRLSCAASGTISSTLMGWYRQAPGKERELVAGITLGTTTYYADSVKGRFTISRDNAKNTVYLQMNSLKPEDTAVYYCAAVTYRPGSSDLSHHYWGQGTQVTVSS

SEQ ID NO: 16500 - protein, 118 aa, Artificial Sequence
  Chemically Synthesized
QVQLQESGGGLVQAGGSLRLSCAASGSIFATRHMGWYRQAPGKERELVATIARGGSTYYADSVKGRFTISRDNAKNTVYLQMNSLKPEDTAVYYCAVGGNAYTFHSYWGQGTQVTVSS

SEQ ID NO: 16501 - protein, 118 aa, Artificial Sequence
  Chemically Synthesized
QVQLQESGGGLVQAGGSLRLSCAASGTIFDYGTMGWYRQAPGKEREFVAGISQGSSTNYADSVKGRFTISRDNAKNTVYLQMNSLKPEDTAVYYCAVWKYVDSLHVYWGQGTQVTVSS

SEQ ID NO: 16502 - protein, 117 aa, Artificial Sequence
  Chemically Synthesized
QVQLQESGGGLVQAGGSLRLSCAASGSIFRYRNMGWYRQAPGKERELVAGISYGTTTYYADSVKGRFTISRDNAKNTVYLQMNSLKPEDTAVYYCAASSTSSSSMYWGQGTQVTVSS

SEQ ID NO: 16503 - protein, 122 aa, Artificial Sequence
  Chemically Synthesized
QVQLQESGGGLVQAGGSLRLSCAASGTIFDLAEMGWYRQAPGKERELVATIDPGANTNYADSVKGRFTISRDNAKNTVYLQMNSLKPEDTAVYYCAVWYPFVQGQNLYHKYWGQGTQVTVSS

SEQ ID NO: 16504 - protein, 122 aa, Artificial Sequence
  Chemically Synthesized
QVQLQESGGGLVQAGGSLRLSCAASGTISYYYAMGWYRQAPGKERELVASISRGSSTYYADSVKGRFTISRDNAKNTVYLQMNSLKPEDTAVYYCAAPAKYTYRAGDYHPYWGQGTQVTVSS

SEQ ID NO: 16505 - protein, 126 aa, Artificial Sequence
  Chemically Synthesized
QVQLQESGGGLVQAGGSLRLSCAASGSIFSIAYMGWYRQAPGKERELVAAINRGGITNYADSVKGRFTISRDNAKNTVYLQMNSLKPEDTAVYYCAVRYRYTHIGTARYNDSFRYWGQGTQVTVSS

SEQ ID NO: 16506 - protein, 118 aa, Artificial Sequence
  Chemically Synthesized
QVQLQESGGGLVQAGGSLRLSCAASGTIFDVTTMGWYRQAPGKERELVASITVGGTTNYADSVKGRFTISRDNAKNTVYLQMNSLKPEDTAVYYCAAWGYPSHLYYYWGQGTQVTVSS

SEQ ID NO: 16507 - protein, 118 aa, Artificial Sequence
  Chemically Synthesized
QVQLQESGGGLVQAGGSLRLSCAASGYISRRHDMGWYRQAPGKEREFVAAIGTGATTYYADSVKGRFTISRDNAKNTVYLQMNSLKPEDTAVYYCAVVGNGRVAFGYWGQGTQVTVSS

SEQ ID NO: 16508 - protein, 122 aa, Artificial Sequence
  Chemically Synthesized
QVQLQESGGGLVQAGGSLRLSCAASGYIFRTYSMGWYRQAPGKEREFVATIAGGTTTYYADSVKGRFTISRDNAKNTVYLQMNSLKPEDTAVYYCAVDGYWSYYYVGYHPYWGQGTQVTVSS

SEQ ID NO: 16509 - protein, 118 aa, Artificial Sequence
  Chemically Synthesized
QVQLQESGGGLVQAGGSLRLSCAASGSISSATYMGWYRQAPGKEREFVAAITDGGSTNYADSVKGRFTISRDNAKNTVYLQMNSLKPEDTAVYYCAADTDDAVIYVYWGQGTQVTVSS

SEQ ID NO: 16510 - protein, 117 aa, Artificial Sequence
  Chemically Synthesized
QVQLQESGGGLVQAGGSLRLSCAASGYIFSGYAMGWYRQAPGKERELVATISTGANTNYADSVKGRFTISRDNAKNTVYLQMNSLKPEDTAVYYCAANTGWYDFGYWGQGTQVTVSS

SEQ ID NO: 16511 - protein, 126 aa, Artificial Sequence
  Chemically Synthesized
QVQLQESGGGLVQAGGSLRLSCAASGSIFRFTDMGWYRQAPGKEREFVASIDAGAITYYADSVKGRFTISRDNAKNTVYLQMNSLKPEDTAVYYCAVDTLWDQWDRGGPAYDLPYWGQGTQVTVSS

SEQ ID NO: 16512 - protein, 125 aa, Artificial Sequence
  Chemically Synthesized
QVQLQESGGGLVQAGGSLRLSCAASGTIFHAGIMGWYRQAPGKERELVAGIDPGGTTYYADSVKGRFTISRDNAKNTVYLQMNSLKPEDTAVYYCAVWESSLTTTFVTTRTILYWGQGTQVTVSS

SEQ ID NO: 16513 - protein, 126 aa, Artificial Sequence
  Chemically Synthesized
QVQLQESGGGLVQAGGSLRLSCAASGNISGGKYMGWYRQAPGKERELVAGIASGTNTNYADSVKGRFTISRDNAKNTVYLQMNSLKPEDTAVYYCAVDERPNLWLRSWQDAYLRYWGQGTQVTVSS

SEQ ID NO: 16514 - protein, 122 aa, Artificial Sequence
  Chemically Synthesized
QVQLQESGGGLVQAGGSLRLSCAASGNISYYYDMGWYRQAPGKEREFVAGIGGGATTYYADSVKGRFTISRDNAKNTVYLQMNSLKPEDTAVYYCAVPSRRPEYDIATLIYWGQGTQVTVSS

SEQ ID NO: 16515 - protein, 118 aa, Artificial Sequence
  Chemically Synthesized
QVQLQESGGGLVQAGGSLRLSCAASGNISPPTLMGWYRQAPGKEREFVATIDSGSNTYYADSVKGRFTISRDNAKNTVYLQMNSLKPEDTAVYYCAVGDPNADVLLYWGQGTQVTVSS

SEQ ID NO: 16516 - protein, 118 aa, Artificial Sequence
  Chemically Synthesized
QVQLQESGGGLVQAGGSLRLSCAASGSIFTIRYMGWYRQAPGKEREFVAAIDWGGNTYYADSVKGRFTISRDNAKNTVYLQMNSLKPEDTAVYYCAASYWRYLAYRYWGQGTQVTVSS

SEQ ID NO: 16517 - protein, 118 aa, Artificial Sequence
  Chemically Synthesized
QVQLQESGGGLVQAGGSLRLSCAASGTIFQSGIMGWYRQAPGKERELVASITAGTNTNYADSVKGRFTISRDNAKNTVYLQMNSLKPEDTAVYYCAAVRYYASGLAYWGQGTQVTVSS

SEQ ID NO: 16518 - protein, 122 aa, Artificial Sequence
  Chemically Synthesized
QVQLQESGGGLVQAGGSLRLSCAASGTISPSYPMGWYRQAPGKERELVASISNGTITNYADSVKGRFTISRDNAKNTVYLQMNSLKPEDTAVYYCAAPWDRTYVWRAYFDYWGQGTQVTVSS

SEQ ID NO: 16519 - protein, 121 aa, Artificial Sequence
  Chemically Synthesized
QVQLQESGGGLVQAGGSLRLSCAASGSILRLVMGWYRQAPGKEREFVATIGYGGNTNYADSVKGRFTISRDNAKNTVYLQMNSLKPEDTAVYYCAVDYWRQPAGTPDHNYWGQGTQVTVSS

SEQ ID NO: 16520 - protein, 126 aa, Artificial Sequence
  Chemically Synthesized
QVQLQESGGGLVQAGGSLRLSCAASGSIFRDADMGWYRQAPGKERELVAGINDGSTTYYADSVKGRFTISRDNAKNTVYLQMNSLKPEDTAVYYCAVYERKYQYLPHHGITAHYYWGQGTQVTVSS

SEQ ID NO: 16521 - protein, 119 aa, Artificial Sequence
  Chemically Synthesized
QVQLQESGGGLVQAGGSLRLSCAASGTIFQDKTMGWYRQAPGKEREFVASIDRGGNTNYADSVKGRFTISRDNAKNTVYLQMNSLKPEDTAVYYCAAEPYPASTALVYWGQGTQVTVSS

SEQ ID NO: 16522 - protein, 116 aa, Artificial Sequence
  Chemically Synthesized
QVQLQESGGGLVQAGGSLRLSCAASGSISRYATMGWYRQAPGKERELVAGIGRGSSTYYADSVKGRFTISRDNAKNTVYLQMNSLKPEDTAVYYCAVHVNTPHQYWGQGTQVTVSS

SEQ ID NO: 16523 - protein, 119 aa, Artificial Sequence
  Chemically Synthesized
QVQLQESGGGLVQAGGSLRLSCAASGNIFTYVIMGWYRQAPGKERELVAAIAIDGGSTYYADSVKGRFTISRDNAKNTVYLQMNSLKPEDTAVYYCAADDGEASYLLYWGQGTQVTVSS

SEQ ID NO: 16524 - protein, 118 aa, Artificial Sequence
  Chemically Synthesized
QVQLQESGGGLVQAGGSLRLSCAASGNIFYQGIMGWYRQAPGKEREFVASIASGTNTYYADSVKGRFTISRDNAKNTVYLQMNSLKPEDTAVYYCAASTRGSPAFGYWGQGTQVTVSS

SEQ ID NO: 16525 - protein, 122 aa, Artificial Sequence
  Chemically Synthesized
QVQLQESGGGLVQAGGSLRLSCAASGTISAYAGMGWYRQAPGKEREFVAAIDIGGITNYADSVKGRFTISRDNAKNTVYLQMNSLKPEDTAVYYCAVRGVAGEDDVPYFYYWGQGTQVTVSS

SEQ ID NO: 16526 - protein, 126 aa, Artificial Sequence
  Chemically Synthesized
QVQLQESGGGLVQAGGSLRLSCAASGNISIDEFMGWYRQAPGKERELVAAINGGANTYYADSVKGRFTISRDNAKNTVYLQMNSLKPEDTAVYYCAVRVYYPPRASGGDYDDHTYWGQGTQVTVSS

SEQ ID NO: 16527 - protein, 126 aa, Artificial Sequence
  Chemically Synthesized
QVQLQESGGGLVQAGGSLRLSCAASGYISVEWDMGWYRQAPGKERELVATIGKGGITYYADSVKGRFTISRDNAKNTVYLQMNSLKPEDTAVYYCAVPPDYWEAYSLYYVDYHYYWGQGTQVTVSS

SEQ ID NO: 16528 - protein, 118 aa, Artificial Sequence
  Chemically Synthesized
QVQLQESGGGLVQAGGSLRLSCAASGSISQYHFMGWYRQAPGKEREFVAAIDRGSNTYYADSVKGRFTISRDNAKNTVYLQMNSLKPEDTAVYYCAARDDDFLPFDYWGQGTQVTVSS

SEQ ID NO: 16529 - protein, 122 aa, Artificial Sequence
  Chemically Synthesized
QVQLQESGGGLVQAGGSLRLSCAASGSISDYYPIMGWYRQAPGKEREFVAAIAYGSSTYYADSVKGRFTISRDNAKNTVYLQMNSLKPEDTAVYYCAVYTGPAQYGDYHTYWGQGTQVTVSS

SEQ ID NO: 16530 - protein, 118 aa, Artificial Sequence
  Chemically Synthesized
QVQLQESGGGLVQAGGSLRLSCAASGYISQVDIMGWYRQAPGKEREFVAAISSGGNTYYADSVKGRFTISRDNAKNTVYLQMNSLKPEDTAVYYCAVSAYNGTNYLYWGQGTQVTVSS

SEQ ID NO: 16531 - protein, 117 aa, Artificial Sequence
  Chemically Synthesized
QVQLQESGGGLVQAGGSLRLSCAASGSILLTCMGWYRQAPGKERELVAGIDYGTSTNYADSVKGRFTISRDNAKNTVYLQMNSLKPEDTAVYYCAVDAWDQYDLAYWGQGTQVTVSS

SEQ ID NO: 16532 - protein, 126 aa, Artificial Sequence
  Chemically Synthesized
QVQLQESGGGLVQAGGSLRLSCAASGTIFGPRKMGWYRQAPGKEREFVATIAYGTNTYYADSVKGRFTISRDNAKNTVYLQMNSLKPEDTAVYYCAARKPRYYGQYDYPQYTHLYWGQGTQVTVSS

SEQ ID NO: 16533 - protein, 118 aa, Artificial Sequence
  Chemically Synthesized
QVQLQESGGGLVQAGGSLRLSCAASGNISVPWRMGWYRQAPGKERELVATIDLGTNTYYADSVKGRFTISRDNAKNTVYLQMNSLKPEDTAVYYCAVWTDGQVLHVYWGQGTQVTVSS

SEQ ID NO: 16534 - protein, 112 aa, Artificial Sequence
  Chemically Synthesized
QVQLQESGGGLVQAGGSLRLSCAASGTIFGYYAMGWYRQAPGKEREFVATIDLGTSTNYADSVKGRFTISRDNAKNTVYLQMNSLKPEDTAVYYCAADLKYWGQGTQVTVSS

SEQ ID NO: 16535 - protein, 126 aa, Artificial Sequence
  Chemically Synthesized
QVQLQESGGGLVQAGGSLRLSCAASGYISPDLIMGWYRQAPGKEREFVAGIASGATTYYADSVKGRFTISRDNAKNTVYLQMNSLKPEDTAVYYCAVKRTWRVPYQRYWWPDYGYWGQGTQVTVSS

SEQ ID NO: 16536 - protein, 122 aa, Artificial Sequence
  Chemically Synthesized
QVQLQESGGGLVQAGGSLRLSCAASGSIFYGDAMGWYRQAPGKEREFVATIDYGTSTNYADSVKGRFTISRDNAKNTVYLQMNSLKPEDTAVYYCAVTYWSYQAAGAGYAYWGQGTQVTVSS

SEQ ID NO: 16537 - protein, 118 aa, Artificial Sequence
  Chemically Synthesized
QVQLQESGGGLVQAGGSLRLSCAASGSISYVWTMGWYRQAPGKEREFVASIDGGANTYYADSVKGRFTISRDNAKNTVYLQMNSLKPEDTAVYYCAVTSYLSPYFYYWGQGTQVTVSS

SEQ ID NO: 16538 - protein, 119 aa, Artificial Sequence
  Chemically Synthesized
QVQLQESGGGLVQAGGSLRLSCAASGTISFRYAMGWYRQAPGKEREFVATISDGTNTYYADSVKGRFTISRDNAKNTVYLQMNSLKPEDTAVYYCAVGQWTLGPRHGYWGQGTQVTVSS

SEQ ID NO: 16539 - protein, 122 aa, Artificial Sequence
  Chemically Synthesized
QVQLQESGGGLVQAGGSLRLSCAASGYISYDSGMGWYRQAPGKERELVASITNGGTTNYADSVKGRFTISRDNAKNTVYLQMNSLKPEDTAVYYCAARGRRNYANVNALYYWGQGTQVTVSS

SEQ ID NO: 16540 - protein, 122 aa, Artificial Sequence
  Chemically Synthesized
QVQLQESGGGLVQAGGSLRLSCAASGYISGANTMGWYRQAPGKEREFVATINQGTNTYYADSVKGRFTISRDNAKNTVYLQMNSLKPEDTAVYYCAVDIPDPDVDRDYHYYWGQGTQVTVSS

SEQ ID NO: 16541 - protein, 117 aa, Artificial Sequence
  Chemically Synthesized
QVQLQESGGGLVQAGGSLRLSCAASGTIFYRSYMGWYRQAPGKEREFVATIANGGIPYADSVKGRFTISRDNAKNTVYLQMNSLKPEDTAVYYCAVYTVYVDSHGYWGQGTQVTVSS

SEQ ID NO: 16542 - protein, 116 aa, Artificial Sequence
  Chemically Synthesized
QVQLQESGGGLVQAGGSLRLSCAASGNIFGEYSMGWYRQAPGKERELVATITWGAITYYADSVKGRFTISRDNAKNTVYLQMNSLKPEDTAVYYCAAYRNRRDFYWGQGTQVTVSS

SEQ ID NO: 16543 - protein, 127 aa, Artificial Sequence
  Chemically Synthesized
QVQLQESGGGLVQAGGSLRLSCAASGYISRYIYMGWYRQAPGKEREFVAAITTGTITNYADSVKGRFTISRDNAKNTVYLQMNSLKPEDTAVYYCAVYQQYYALATSDYSGEIYGYWGQGTQVTVSS

SEQ ID NO: 16544 - protein, 117 aa, Artificial Sequence
  Chemically Synthesized
QVQLQESGGGLVQAGGSLRLSCAASGTIFPLREMGWYRQAPGKEREFVAAITYGGNTYYADSVKGRFTISRDNAKNTVYLQMNSLKPEDTAVYYCAASTRLVTTFYWGQGTQVTVSS

SEQ ID NO: 16545 - protein, 118 aa, Artificial Sequence
  Chemically Synthesized
QVQLQESGGGLVQAGGSLRLSCAASGNIFFVSTMGWYRQAPGKERELVATITVGSTTNYADSVKGRFTISRDNAKNTVYLQMNSLKPEDTAVYYCAAPGPPDAYLDYWGQGTQVTVSS

SEQ ID NO: 16546 - protein, 121 aa, Artificial Sequence
  Chemically Synthesized
QVQLQESGGGLVQAGGSLRLSCAASGTIFLDRVMGWYRQAPGKERELVAGIAYGANPYADSVKGRFTISRDNAKNTVYLQMNSLKPEDTAVYYCAVLGYPYTYYYYDLGYWGQGTQVTVSS

SEQ ID NO: 16547 - protein, 108 aa, Artificial Sequence
  Chemically Synthesized
QVQLQESGGGLVQAGGSLRLSCAASGSIFTYTGMGWYRQAPGKERELVAAISTTYYADSVKGRFTISRDNAKNTVYLQMNSLKPEDTAVYYCAVPAYWGQGTQVTVSS

SEQ ID NO: 16548 - protein, 117 aa, Artificial Sequence
  Chemically Synthesized
QVQLQESGGGLVQAGGSLRLSCAASGTILTFLMGWYRQAPGKERELVASIDYGGNTNYADSVKGRFTISRDNAKNTVYLQMNSLKPEDTAVYYCAVEDHTQYGHNYWGQGTQVTVSS

SEQ ID NO: 16549 - protein, 122 aa, Artificial Sequence
  Chemically Synthesized
QVQLQESGGGLVQAGGSLRLSCAASGTIFPGYVMGWYRQAPGKERELVAAITDGANTYYADSVKGRFTISRDNAKNTVYLQMNSLKPEDTAVYYCAVYYLGDAWDYYYHYYWGQGTQVTVSS

SEQ ID NO: 16550 - protein, 122 aa, Artificial Sequence
  Chemically Synthesized
QVQLQESGGGLVQAGGSLRLSCAASGTISSYSYMGWYRQAPGKERELVASINDGGSTNYADSVKGRFTISRDNAKNTVYLQMNSLKPEDTAVYYCAANPYYAYEWDSRHWYWGQGTQVTVSS

SEQ ID NO: 16551 - protein, 118 aa, Artificial Sequence
  Chemically Synthesized
QVQLQESGGGLVQAGGSLRLSCAASGTIFYPDKMGWYRQAPGKERELVAAIAYGTTTNYADSVKGRFTISRDNAKNTVYLQMNSLKPEDTAVYYCAANDYDWYYHYYWGQGTQVTVSS

SEQ ID NO: 16552 - protein, 125 aa, Artificial Sequence
  Chemically Synthesized
QVQLQESGGGLVQAGGSLRLSCAASGTISPPDWMGWYRQAPGKERELVASINAGAITYYADSVKGRFTISRDNAKNTVYLQMNSLKPEDTAVYYCAVSSDDTPYSYWRGGYLHYWGQGTQVTVSS

SEQ ID NO: 16553 - protein, 122 aa, Artificial Sequence
  Chemically Synthesized
QVQLQESGGGLVQAGGSLRLSCAASGNIFYFRYMGWYRQAPGKERELVAAIGHGTITYYADSVKGRFTISRDNAKNTVYLQMNSLKPEDTAVYYCAVGYLSSVQLYQDYTYWGQGTQVTVSS

SEQ ID NO: 16554 - protein, 118 aa, Artificial Sequence
  Chemically Synthesized
QVQLQESGGGLVQAGGSLRLSCAASGTISQFGRMGWYRQAPGKERELVATITLGTITNYADSVKGRFTISRDNAKNTVYLQMNSLKPEDTAVYYCAVKRAYSWFYLYWGQGTQVTVSS

SEQ ID NO: 16555 - protein, 122 aa, Artificial Sequence
  Chemically Synthesized
QVQLQESGGGLVQAGGSLRLSCAASGYISWYTPMGWYRQAPGKERELVASISHGATTNYADSVKGRFTISRDNAKNTVYLQMNSLKPEDTAVYYCAVANDGGHYIIQRHDYWGQGTQVTVSS

SEQ ID NO: 16556 - protein, 118 aa, Artificial Sequence
  Chemically Synthesized
QVQLQESGGGLVQAGGSLRLSCAASGNIFAYPGMGWYRQAPGKERELVATIGDGGNTNYADSVKGRFTISRDNAKNTVYLQMNSLKPEDTAVYYCAVVHRYPHTLDYWGQGTQVTVSS

SEQ ID NO: 16557 - protein, 117 aa, Artificial Sequence
  Chemically Synthesized
QVQLQESGGGLVQAGGSLRLSCAASGNISRDPGMGWYRQAPGKEREFVATIDYGGIPYADSVKGRFTISRDNAKNTVYLQMNSLKPEDTAVYYCAAPDALYDGHGYWGQGTQVTVSS

SEQ ID NO: 16558 - protein, 122 aa, Artificial Sequence
  Chemically Synthesized
QVQLQESGGGLVQAGGSLRLSCAASGNISDVGTMGWYRQAPGKERELVAGINDGSTTNYADSVKGRFTISRDNAKNTVYLQMNSLKPEDTAVYYCAARARAGTTVNASYPYWGQGTQVTVSS

SEQ ID NO: 16559 - protein, 117 aa, Artificial Sequence
  Chemically Synthesized
QVQLQESGGGLVQAGGSLRLSCAASGTISPGYEMGWYRQAPGKEREFVATIDTVLIPYADSVKGRFTISRDNAKNTVYLQMNSLKPEDTAVYYCAANYNWIYQFQYWGQGTQVTVSS

SEQ ID NO: 16560 - protein, 118 aa, Artificial Sequence
  Chemically Synthesized
QVQLQESGGGLVQAGGSLRLSCAASGNISRGTGMGWYRQAPGKERELVASIAPGGTTNYADSVKGRFTISRDNAKNTVYLQMNSLKPEDTAVYYCAAVDTYPVYFVYWGQGTQVTVSS

SEQ ID NO: 16561 - protein, 126 aa, Artificial Sequence
  Chemically Synthesized
QVQLQESGGGLVQAGGSLRLSCAASGSIFYNAYMGWYRQAPGKERELVASINHGGITNYADSVKGRFTISRDNAKNTVYLQMNSLKPEDTAVYYCAAVIPRPYGPNDTQGSGFDYWGQGTQVTVSS

SEQ ID NO: 16562 - protein, 118 aa, Artificial Sequence
  Chemically Synthesized
QVQLQESGGGLVQAGGSLRLSCAASGTIFGTNVMGWYRQAPGKERELVATITSGTSTNYADSVKGRFTISRDNAKNTVYLQMNSLKPEDTAVYYCAAHPSLAVTHAYWGQGTQVTVSS

SEQ ID NO: 16563 - protein, 118 aa, Artificial Sequence
  Chemically Synthesized
QVQLQESGGGLVQAGGSLRLSCAASGTIFFLSLMGWYRQAPGKEREFVASIATGASTNYADSVKGRFTISRDNAKNTVYLQMNSLKPEDTAVYYCAAKYGQVNTYLYWGQGTQVTVSS

SEQ ID NO: 16564 - protein, 118 aa, Artificial Sequence
  Chemically Synthesized
QVQLQESGGGLVQAGGSLRLSCAASGTISDRYWMGWYRQAPGKEREFVASIGDGTSTNYADSVKGRFTISRDNAKNTVYLQMNSLKPEDTAVYYCAVGRLDGTALEYWGQGTQVTVSS

SEQ ID NO: 16565 - protein, 111 aa, Artificial Sequence
  Chemically Synthesized
QVQLQESGGGLVQAGGSLRLSCAASGNISRGSYMGWYRQAPGKERELGGTTNYADSVKGRFTISRDNAKNTVYLQMNSLKPEDTAVYYCAADGDSIVSFYWGQGTQVTVSS

SEQ ID NO: 16566 - protein, 118 aa, Artificial Sequence
  Chemically Synthesized
QVQLQESGGGLVQAGGSLRLSCAASGTISKNAFMGWYRQAPGKEREFVAGISYGTNTNYADSVKGRFTISRDNAKNTVYLQMNSLKPEDTAVYYCAAKLYYRHSFPYWGQGTQVTVSS

SEQ ID NO: 16567 - protein, 118 aa, Artificial Sequence
  Chemically Synthesized
QVQLQESGGGLVQAGGSLRLSCAASGTISYAGVMGWYRQAPGKERELVAGITYGSITYYADSVKGRFTISRDNAKNTVYLQMNSLKPEDTAVYYCAVSKYYRYRHKYWGQGTQVTVSS

SEQ ID NO: 16568 - protein, 117 aa, Artificial Sequence
  Chemically Synthesized
QVQLQESGGGLVQAGGSLRLSCAASGSISDEYMGWYRQAPGKERELVASIGAGGTTYYADSVKGRFTISRDNAKNTVYLQMNSLKPEDTAVYYCAASYRGNDDLGYWGQGTQVTVSS

SEQ ID NO: 16569 - protein, 118 aa, Artificial Sequence
  Chemically Synthesized
QVQLQESGGGLVQAGGSLRLSCAASGNISYYDTMGWYRQAPGKERELVASIGPGTSTNYADSVKGRFTISRDNAKNTVYLQMNSLKPEDTAVYYCAVWIKYNGRHDYWGQGTQVTVSS

SEQ ID NO: 16570 - protein, 118 aa, Artificial Sequence
  Chemically Synthesized
QVQLQESGGGLVQAGGSLRLSCAASGTISADVYMGWYRQAPGKEREFVAAIAVGGSTNYADSVKGRFTISRDNAKNTVYLQMNSLKPEDTAVYYCAADVVTAYYHDYWGQGTQVTVSS

SEQ ID NO: 16571 - protein, 121 aa, Artificial Sequence
  Chemically Synthesized
QVQLQESGGGLVQAGGSLRLSCAASGNIFYHTAMGWYRQAPGKEREFVATIAPGGSTYYADSVKGRFTISRDNAKNTVYLQMNSLKPEDTAVYYCAAVYTGADQTKSGFYWGQGTQVTVSS

SEQ ID NO: 16572 - protein, 109 aa, Artificial Sequence
  Chemically Synthesized
QVQLQESGGGLVQAGGSLRLSCAASGNISRTCWMGWYRQAPGKEREFVASINRGANTNYADSVKGRFTISRDNAKNTVYLQMNSLKPEDTAVYYCATYWGQGTQVTVSS

SEQ ID NO: 16573 - protein, 125 aa, Artificial Sequence
  Chemically Synthesized
QVQLQESGGGLVQAGGSLRLSCAASGSISPSVMGWYRQAPGKEREFVAGIDTGGITNYADSVKGRFTISRDNAKNTVYLQMNSLKPEDTAVYYCAVIGAEYPRVPVTVDWPYSYWGQGTQVTVSS

SEQ ID NO: 16574 - protein, 118 aa, Artificial Sequence
  Chemically Synthesized
QVQLQESGGGLVQAGGSLRLSCAASGSISLGDYMGWYRQAPGKERELVASIGGGAITYYADSVKGRFTISRDNAKNTVYLQMNSLKPEDTAVYYCAVDDYGVDFYYYWGQGTQVTVSS

SEQ ID NO: 16575 - protein, 126 aa, Artificial Sequence
  Chemically Synthesized
QVQLQESGGGLVQAGGSLRLSCAASGTIFRYLIMGWYRQAPGKERELVAGIDAGGITYYADSVKGRFTISRDNAKNTVYLQMNSLKPEDTAVYYCAVDEFLRETADTYLQYTHFYWGQGTQVTVSS

SEQ ID NO: 16576 - protein, 121 aa, Artificial Sequence
  Chemically Synthesized
QVQLQESGGGLVQAGGSLRLSCAASGSIFDLFMGWYRQAPGKERELVATIANGTSTNYADSVKGRFTISRDNAKNTVYLQMNSLKPEDTAVYYCAAGTYVRFPVGSTHYYWGQGTQVTVSS

SEQ ID NO: 16577 - protein, 118 aa, Artificial Sequence
  Chemically Synthesized
QVQLQESGGGLVQAGGSLRLSCAASGTISYTPSMGWYRQAPGKERELVASITSGSITNYADSVKGRFTISRDNAKNTVYLQMNSLKPEDTAVYYCAADIGYDASHNYWGQGTQVTVSS

SEQ ID NO: 16578 - protein, 122 aa, Artificial Sequence
  Chemically Synthesized
QVQLQESGGGLVQAGGSLRLSCAASGNISVDREMGWYRQAPGKEREFVAAITRGGTTYYADSVKGRFTISRDNAKNTVYLQMNSLKPEDTAVYYCAAYYFFDTWYYSNHQYWGQGTQVTVSS

SEQ ID NO: 16579 - protein, 117 aa, Artificial Sequence
  Chemically Synthesized
QVQLQESGGGLVQAGGSLRLSCAASGTFLCCWMGWYRQAPGKERELVASINWGASTNYADSVKGRFTISRDNAKNTVYLQMNSLKPEDTAVYYCAADYDNGESLSYWGQGTQVTVSS

SEQ ID NO: 16580 - protein, 125 aa, Artificial Sequence
  Chemically Synthesized
QVQLQESGGGLVQAGGSLRLSCAASGTIFALYYMGWYRQAPGKEREFVATISAGGNTYYADSVKGRFTISRDNAKNTVYLQMNSLKPEDTAVYYCAVAHGSAGLGPDSGLVPYYWGQGTQVTVSS

SEQ ID NO: 16581 - protein, 118 aa, Artificial Sequence
  Chemically Synthesized
QVQLQESGGGLVQAGGSLRLSCAASGTIFYYRTMGWYRQAPGKERELVAAISYGANTYYADSVKGRFTISRDNAKNTVYLQMNSLKPEDTAVYYCAAAGYNPLPHQYWGQGTQVTVSS

SEQ ID NO: 16582 - protein, 118 aa, Artificial Sequence
  Chemically Synthesized
QVQLQESGGGLVQAGGSLRLSCAASGTISYDRTMGWYRQAPGKEREFVAAIGDGAITNYADSVKGRFTISRDNAKNTVYLQMNSLKPEDTAVYYCAVWYFAQSPYRYWGQGTQVTVSS

SEQ ID NO: 16583 - protein, 118 aa, Artificial Sequence
  Chemically Synthesized
QVQLQESGGGLVQAGGSLRLSCAASGSIFAARYMGWYRQAPGKEREFVASINGGSTTYYADSVKGRFTISRDNAKNTVYLQMNSLKPEDTAVYYCAVFLRRYRNFGYWGQGTQVTVSS

SEQ ID NO: 16584 - protein, 117 aa, Artificial Sequence
  Chemically Synthesized
QVQLQESGGGLVQAGGSLRLSCAASGNIFHYYPMGWYRQAPGKEREFVASIADGASTNYADSVKGRFTISRDNAKNTVYLQMNSLKPEDTAVYYCAPYGYTYDFYYWGQGTQVTVSS

SEQ ID NO: 16585 - protein, 110 aa, Artificial Sequence
  Chemically Synthesized
QVQLQESGGGLVQAGGSLRLSCAASGTISRDYTMGWYRQAPGKEREFVATIGGGGTTYYADSVKGRFTISRDNAKNTVYLQMNSLKPEDTAVYYCAHDYWGQGTQVTVSS

SEQ ID NO: 16586 - protein, 117 aa, Artificial Sequence
  Chemically Synthesized
QVQLQESGGGLVQAGGSLRLSCAASGSIFYSCMGWYRQAPGKERELVASIAPGTSTNYADSVKGRFTISRDNAKNTVYLQMNSLKPEDTAVYYCAVYYFSDIIFVYWGQGTQVTVSS

SEQ ID NO: 16587 - protein, 126 aa, Artificial Sequence
  Chemically Synthesized
QVQLQESGGGLVQAGGSLRLSCAASGSISDLGYMGWYRQAPGKERELVATITYGGNTNYADSVKGRFTISRDNAKNTVYLQMNSLKPEDTAVYYCAVAGYRPGDSPDTDAGVHAYWGQGTQVTVSS

SEQ ID NO: 16588 - protein, 117 aa, Artificial Sequence
  Chemically Synthesized
QVQLQESGGGLVQAGGSLRLSCAASGSIFDTSFMGWYRQAPGKEREFVAGISIGASTYYADSVKGRFTISRDNAKNTVYLQMNSLKPEDTAVYYCAASRTVTLLIYWGQGTQVTVSS

SEQ ID NO: 16589 - protein, 118 aa, Artificial Sequence
  Chemically Synthesized
QVQLQESGGGLVQAGGSLRLSCAASGNIFLDRSMGWYRQAPGKERELVAAITVGSTTNYADSVKGRFTISRDNAKNTVYLQMNSLKPEDTAVYYCAVDYDTAPIFTYWGQGTQVTVSS

SEQ ID NO: 16590 - protein, 117 aa, Artificial Sequence
  Chemically Synthesized
QVQLQESGGGLVQAGGSLRLSCAASGSIFPDYDMGWYRQAPGKERELVASIAYGGTTNYADSVKGRFTISRDNAKNTVYLQMNSLKPEDTAVYYCAAYDTKSNCIYWGQGTQVTVSS

SEQ ID NO: 16591 - protein, 126 aa, Artificial Sequence
  Chemically Synthesized
QVQLQESGGGLVQAGGSLRLSCAASGNIFDYVYMGWYRQAPGKEREFVASIASGASTNYADSVKGRFTISRDNAKNTVYLQMNSLKPEDTAVYYCAVVFGVVSDYYDDYYETLLYWGQGTQVTVSS

SEQ ID NO: 16592 - protein, 118 aa, Artificial Sequence
  Chemically Synthesized
QVQLQESGGGLVQAGGSLRLSCAASGSISDQDSMGWYRQAPGKEREFVAAIGVGGTTYYADSVKGRFTISRDNAKNTVYLQMNSLKPEDTAVYYCAVDGVYHDDYWYWGQGTQVTVSS

SEQ ID NO: 16593 - protein, 122 aa, Artificial Sequence
  Chemically Synthesized
QVQLQESGGGLVQAGGSLRLSCAASGTISLAKDMGWYRQAPGKERELVAGIAYGGTTNYADSVKGRFTISRDNAKNTVYLQMNSLKPEDTAVYYCAADHNGRDYPGYTHNYWGQGTQVTVSS

SEQ ID NO: 16594 - protein, 118 aa, Artificial Sequence
  Chemically Synthesized
QVQLQESGGGLVQAGGSLRLSCAASGTISHYDPMGWYRQAPGKEREFVAAINVGGITNYADSVKGRFTISRDNAKNTVYLQMNSLKPEDTAVYYCAATRYQRTPHDYWGQGTQVTVSS

SEQ ID NO: 16595 - protein, 124 aa, Artificial Sequence
  Chemically Synthesized
QVQLQESGGGLVQAGGSLRLSCAASGNISCWMGWYRQAPGKEREFVATITVGASTYYADSVKGRFTISRDNAKNTVYLQMNSLKPEDTAVYYCAVHVKDADVYIYRIVLILAYWGQGTQVTVSS

SEQ ID NO: 16596 - protein, 117 aa, Artificial Sequence
  Chemically Synthesized
QVQLQESGGGLVQAGGSLRLSCAASGYISSTLMGWYRQAPGKEREFVATIAGGGTTNYADSVKGRFTISRDNAKNTVYLQMNSLKPEDTAVYYCAVDGSWRYAHAYWGQGTQVTVSS

SEQ ID NO: 16597 - protein, 117 aa, Artificial Sequence
  Chemically Synthesized
QVQLQESGGGLVQAGGSLRLSCAASGTISYTPFMGWYRQAPGKEREFVAAIDTGASTYYADSVKGRFTISRDNAKNTVYLQMNSLKPEDTAVYYCAVAYGYFAYPYWGQGTQVTVSS

SEQ ID NO: 16598 - protein, 122 aa, Artificial Sequence
  Chemically Synthesized
QVQLQESGGGLVQAGGSLRLSCAASGYISEAPTMGWYRQAPGKERELVASISEGSNTYYADSVKGRFTISRDNAKNTVYLQMNSLKPEDTAVYYCAVNYGYATGDANWFIYWGQGTQVTVSS

SEQ ID NO: 16599 - protein, 125 aa, Artificial Sequence
  Chemically Synthesized
QVQLQESGGGLVQAGGSLRLSCAASGSISEGDDMGWYRQAPGKERELVAGISYGGSYYADSVKGRFTISRDNAKNTVYLQMNSLKPEDTAVYYCAAQTYPGTLYGINPVGDFAYWGQGTQVTVSS

SEQ ID NO: 16600 - protein, 118 aa, Artificial Sequence
  Chemically Synthesized
QVQLQESGGGLVQAGGSLRLSCAASGYISDGSTMGWYRQAPGKERELVATIGPGGNTNYADSVKGRFTISRDNAKNTVYLQMNSLKPEDTAVYYCAVQANTLPNHYYWGQGTQVTVSS

SEQ ID NO: 16601 - protein, 122 aa, Artificial Sequence
  Chemically Synthesized
QVQLQESGGGLVQAGGSLRLSCAASGTIFLYIYMGWYRQAPGKERELVASIGRGGSTNYADSVKGRFTISRDNAKNTVYLQMNSLKPEDTAVYYCAVYRDGFYDTDGLFDYWGQGTQVTVSS

SEQ ID NO: 16602 - protein, 118 aa, Artificial Sequence
  Chemically Synthesized
QVQLQESGGGLVQAGGSLRLSCAASGYISPLHWMGWYRQAPGKEREFVAGISQGAITNYADSVKGRFTISRDNAKNTVYLQMNSLKPEDTAVYYCAAGPYRYADLAYWGQGTQVTVSS

SEQ ID NO: 16603 - protein, 121 aa, Artificial Sequence
  Chemically Synthesized
QVQLQESGGGLVQAGGSLRLSCAASGSIFDPGTMGWYRQAPGKERELVAAITYGSSTNYADSVKGRFTISRDNAKNTVYLQMNSLKPEDTAVYYCAVYSFIVSTLTTTMYWGQGTQVTVSS

SEQ ID NO: 16604 - protein, 118 aa, Artificial Sequence
  Chemically Synthesized
QVQLQESGGGLVQAGGSLRLSCAASGYIFLGGYMGWYRQAPGKEREFVAGIDTGSTTYYADSVKGRFTISRDNAKNTVYLQMNSLKPEDTAVYYCAVAHYPYDLYWYWGQGTQVTVSS

SEQ ID NO: 16605 - protein, 122 aa, Artificial Sequence
  Chemically Synthesized
QVQLQESGGGLVQAGGSLRLSCAASGNIFGAAVMGWYRQAPGKERELVASIADGANTYYADSVKGRFTISRDNAKNTVYLQMNSLKPEDTAVYYCAAGSYLGNGYAVAHYYWGQGTQVTVSS

SEQ ID NO: 16606 - protein, 117 aa, Artificial Sequence
  Chemically Synthesized
QVQLQESGGGLVQAGGSLRLSCAASGTISQYVYMGWYRQAPGKEREFVATIAGGTITNYADSVKGRFTISRDNAKNTVYLQMNSLKPEDTAVYYCAVDDDTLSTFYWGQGTQVTVSS

SEQ ID NO: 16607 - protein, 126 aa, Artificial Sequence
  Chemically Synthesized
QVQLQESGGGLVQAGGSLRLSCAASGYIFAAVVMGWYRQAPGKEREFVATISPGTSTNYADSVKGRFTISRDNAKNTVYLQMNSLKPEDTAVYYCAVWDDDIDYQIRDGRQAHAYWGQGTQVTVSS

SEQ ID NO: 16608 - protein, 111 aa, Artificial Sequence
  Chemically Synthesized
QVQLQESGGGLVQAGGSLRLSCAASGNMGWYRQAPGKERELVATIDIGTSTNYADSVKGRFTISRDNAKNTVYLQMNSLKPEDTAVYYCAAEVDGYNGHYWGQGTQVTVSS

SEQ ID NO: 16609 - protein, 122 aa, Artificial Sequence
  Chemically Synthesized
QVQLQESGGGLVQAGGSLRLSCAASGSISSPFTMGWYRQAPGKEREFVAGIGIGTSTNYADSVKGRFTISRDNAKNTVYLQMNSLKPEDTAVYYCAVDWYYYLFGFQVYPYWGQGTQVTVSS

SEQ ID NO: 16610 - protein, 109 aa, Artificial Sequence
  Chemically Synthesized
QVQLQESGGGLVQAGGSLRLSCAASGTIFSTCMGWYRQAPGKEREFVAGIAWGTTTNYADSVKGRFTISRDNAKNTVYLQMNSLKPEDTAVYYCATMYWGQGTQVTVSS

SEQ ID NO: 16611 - protein, 125 aa, Artificial Sequence
  Chemically Synthesized
QVQLQESGGGLVQAGGSLRLSCAASGYISSWYAMGWYRQAPGKEREFVAGIDSGGNTNYADSVKGRFTISRDNAKNTVYLQMNSLKPEDTAVYYCAVHSLEGYGRATQSSTFLYWGQGTQVTVSS

SEQ ID NO: 16612 - protein, 118 aa, Artificial Sequence
  Chemically Synthesized
QVQLQESGGGLVQAGGSLRLSCAASGTISAKYDMGWYRQAPGKEREFVAGISYGTITNYADSVKGRFTISRDNAKNTVYLQMNSLKPEDTAVYYCAAPYTSAHYFHYWGQGTQVTVSS

SEQ ID NO: 16613 - protein, 118 aa, Artificial Sequence
  Chemically Synthesized
QVQLQESGGGLVQAGGSLRLSCAASGYIFATAYMGWYRQAPGKERELVATIAYGSSTNYADSVKGRFTISRDNAKNTVYLQMNSLKPEDTAVYYCAVEDYVGHTHAYWGQGTQVTVSS

SEQ ID NO: 16614 - protein, 118 aa, Artificial Sequence
  Chemically Synthesized
QVQLQESGGGLVQAGGSLRLSCAASGTISDAPSMGWYRQAPGKEREFVAGIGPGTTTYYADSVKGRFTISRDNAKNTVYLQMNSLKPEDTAVYYCAVYTAWIDYLPYWGQGTQVTVSS

SEQ ID NO: 16615 - protein, 126 aa, Artificial Sequence
  Chemically Synthesized
QVQLQESGGGLVQAGGSLRLSCAASGYISPYGYMGWYRQAPGKEREFVAGIGGGTITYYADSVKGRFTISRDNAKNTVYLQMNSLKPEDTAVYYCAVVDWWYRGTGLLNKLDHIYWGQGTQVTVSS

SEQ ID NO: 16616 - protein, 118 aa, Artificial Sequence
  Chemically Synthesized
QVQLQESGGGLVQAGGSLRLSCAASGTIFRDVDMGWYRQAPGKEREFVATIDWGAITNYADSVKGRFTISRDNAKNTVYLQMNSLKPEDTAVYYCAVFHIYHAWFLYWGQGTQVTVSS

SEQ ID NO: 16617 - protein, 122 aa, Artificial Sequence
  Chemically Synthesized
QVQLQESGGGLVQAGGSLRLSCAASGYIFVYYAMGWYRQAPGKEREFVATIDYGGTTYYADSVKGRFTISRDNAKNTVYLQMNSLKPEDTAVYYCAVGSTTLDPLKATYAYWGQGTQVTVSS

SEQ ID NO: 16618 - protein, 118 aa, Artificial Sequence
  Chemically Synthesized
QVQLQESGGGLVQAGGSLRLSCAASGNISPVWDMGWYRQAPGKEREFVATITPGGSTNYADSVKGRFTISRDNAKNTVYLQMNSLKPEDTAVYYCAAWYQSPSGLVYWGQGTQVTVSS

SEQ ID NO: 16619 - protein, 122 aa, Artificial Sequence
  Chemically Synthesized
QVQLQESGGGLVQAGGSLRLSCAASGNIFRRTVMGWYRQAPGKEREFVAGITGGGNTNYADSVKGRFTISRDNAKNTVYLQMNSLKPEDTAVYYCAAKTWSYKPFHYWYRYWGQGTQVTVSS

SEQ ID NO: 16620 - protein, 122 aa, Artificial Sequence
  Chemically Synthesized
QVQLQESGGGLVQAGGSLRLSCAASGSIFGIVQMGWYRQAPGKEREFVAAIDVGANTYYADSVKGRFTISRDNAKNTVYLQMNSLKPEDTAVYYCAVRRQADFIQSRGHDYWGQGTQVTVSS

SEQ ID NO: 16621 - protein, 118 aa, Artificial Sequence
  Chemically Synthesized
QVQLQESGGGLVQAGGSLRLSCAASGYISPTAGMGWYRQAPGKEREFVASIGFGSSTYYADSVKGRFTISRDNAKNTVYLQMNSLKPEDTAVYYCAVGRRIWLHHYYWGQGTQVTVSS

SEQ ID NO: 16622 - protein, 118 aa, Artificial Sequence
  Chemically Synthesized
QVQLQESGGGLVQAGGSLRLSCAASGYIFTGQYMGWYRQAPGKERELVAGINIGSTTNYADSVKGRFTISRDNAKNTVYLQMNSLKPEDTAVYYCAAIVFKDRIYSYWGQGTQVTVSS

SEQ ID NO: 16623 - protein, 118 aa, Artificial Sequence
  Chemically Synthesized
QVQLQESGGGLVQAGGSLRLSCAASGYISRHYQMGWYRQAPGKEREFVAAINTGATTNYADSVKGRFTISRDNAKNTVYLQMNSLKPEDTAVYYCAVREGEYTVHLYWGQGTQVTVSS

SEQ ID NO: 16624 - protein, 122 aa, Artificial Sequence
  Chemically Synthesized
QVQLQESGGGLVQAGGSLRLSCAASGTISAAYVMGWYRQAPGKERELVAGIAQGTITYYADSVKGRFTISRDNAKNTVYLQMNSLKPEDTAVYYCAVWFYYSPGPYLEHYYWGQGTQVTVSS

SEQ ID NO: 16625 - protein, 119 aa, Artificial Sequence
  Chemically Synthesized
QVQLQESGGGLVQAGGSLRLSCAASGTIFETGDMGWYRQAPGKERELVAGIAYGGSTNYADSVKGRFTISRDNAKNTVYLQMNSLKPEDTAVYYCAALIDSPNPFLDYWGQGTQVTVSS

SEQ ID NO: 16626 - protein, 118 aa, Artificial Sequence
  Chemically Synthesized
QVQLQESGGGLVQAGGSLRLSCAASGSISLPTAMGWYRQAPGKEREFVAAIGNGGSTYYADSVKGRFTISRDNAKNTVYLQMNSLKPEDTAVYYCAVWTDRYYWLPYWGQGTQVTVSS

SEQ ID NO: 16627 - protein, 118 aa, Artificial Sequence
  Chemically Synthesized
QVQLQESGGGLVQAGGSLRLSCAASGNIFYTYYMGWYRQAPGKERELVAAIADGTNTNYADSVKGRFTISRDNAKNTVYLQMNSLKPEDTAVYYCAARRDYDYPFYYWGQGTQVTVSS

SEQ ID NO: 16628 - protein, 118 aa, Artificial Sequence
  Chemically Synthesized
QVQLQESGGGLVQAGGSLRLSCAASGNIFYEYDMGWYRQAPGKEREFVAGIAIGGITNYADSVKGRFTISRDNAKNTVYLQMNSLKPEDTAVYYCAVRFPYPEIFDYWGQGTQVTVSS

SEQ ID NO: 16629 - protein, 126 aa, Artificial Sequence
  Chemically Synthesized
QVQLQESGGGLVQAGGSLRLSCAASGYISDGRDMGWYRQAPGKERELVATIDTGSSTNYADSVKGRFTISRDNAKNTVYLQMNSLKPEDTAVYYCAVIDAYTDRPWPVSGPYHVYWGQGTQVTVSS

SEQ ID NO: 16630 - protein, 122 aa, Artificial Sequence
  Chemically Synthesized
QVQLQESGGGLVQAGGSLRLSCAASGYISIPLQMGWYRQAPGKEREFVAAIAGGAITNYADSVKGRFTISRDNAKNTVYLQMNSLKPEDTAVYYCAANQSVKHLNVYPHVYWGQGTQVTVSS

SEQ ID NO: 16631 - protein, 126 aa, Artificial Sequence
  Chemically Synthesized
QVQLQESGGGLVQAGGSLRLSCAASGNISYDADMGWYRQAPGKERELVATITIGSTTYYADSVKGRFTISRDNAKNTVYLQMNSLKPEDTAVYYCAAVPDTNIAYVSGKYVRLGYWGQGTQVTVSS

SEQ ID NO: 16632 - protein, 122 aa, Artificial Sequence
  Chemically Synthesized
QVQLQESGGGLVQAGGSLRLSCAASGTIFYRRYMGWYRQAPGKERELVAAIGRGGTTNYADSVKGRFTISRDNAKNTVYLQMNSLKPEDTAVYYCAVYVGWYGRFWGTYEYWGQGTQVTVSS

SEQ ID NO: 16633 - protein, 125 aa, Artificial Sequence
  Chemically Synthesized
QVQLQESGGGLVQAGGSLRLSCAASGYIFGDWIMGWYRQAPGKERELVAAIGGGSTNYADSVKGRFTISRDNAKNTVYLQMNSLKPEDTAVYYCAVGRKDPTHDKLTEYDLHYYWGQGTQVTVSS

SEQ ID NO: 16634 - protein, 122 aa, Artificial Sequence
  Chemically Synthesized
QVQLQESGGGLVQAGGSLRLSCAASGSISDYVFMGWYRQAPGKERELVASIGNGSTTNYADSVKGRFTISRDNAKNTVYLQMNSLKPEDTAVYYCAAGDKPYYDSEHRHSYWGQGTQVTVSS

SEQ ID NO: 16635 - protein, 122 aa, Artificial Sequence
  Chemically Synthesized
QVQLQESGGGLVQAGGSLRLSCAASGNISETNEMGWYRQAPGKERELVATIGDGAITYYADSVKGRFTISRDNAKNTVYLQMNSLKPEDTAVYYCAANGYAQDDTQQRHYYWGQGTQVTVSS

SEQ ID NO: 16636 - protein, 118 aa, Artificial Sequence
  Chemically Synthesized
QVQLQESGGGLVQAGGSLRLSCAASGNIFAYDGMGWYRQAPGKERELVASINRGANTYYADSVKGRFTISRDNAKNTVYLQMNSLKPEDTAVYYCAVDWIDNWYLVYWGQGTQVTVSS

SEQ ID NO: 16637 - protein, 118 aa, Artificial Sequence
  Chemically Synthesized
QVQLQESGGGLVQAGGSLRLSCAASGTISGASPMGWYRQAPGKERELVASIDDGAITYYADSVKGRFTISRDNAKNTVYLQMNSLKPEDTAVYYCAVPIDDVGTLWYWGQGTQVTVSS

SEQ ID NO: 16638 - protein, 118 aa, Artificial Sequence
  Chemically Synthesized
QVQLQESGGGLVQAGGSLRLSCAASGYISRWDSMGWYRQAPGKERELVAGIDFGGNTYYADSVKGRFTISRDNAKNTVYLQMNSLKPEDTAVYYCAVWYYSVDQFAYWGQGTQVTVSS

SEQ ID NO: 16639 - protein, 121 aa, Artificial Sequence
  Chemically Synthesized
QVQLQESGGGLVQAGGSLRLSCAASGTIFPHSPMGWYRQAPGKERELVATIDLGAITYYADSVKGRFTISRDNAKNTVYLQMNSLKPEDTAVYYCAARGYWSLYVSFTIYWGQGTQVTVSS

SEQ ID NO: 16640 - protein, 122 aa, Artificial Sequence
  Chemically Synthesized
QVQLQESGGGLVQAGGSLRLSCAASGNIFTYSYMGWYRQAPGKERELVAAIDTGSITYYADSVKGRFTISRDNAKNTVYLQMNSLKPEDTAVYYCAVYDAVSDFRYVDLDYWGQGTQVTVSS

SEQ ID NO: 16641 - protein, 117 aa, Artificial Sequence
  Chemically Synthesized
QVQLQESGGGLVQAGGSLRLSCAASGNIFYGLKMGWYRQAPGKERELVATIGSVLIPYADSVKGRFTISRDNAKNTVYLQMNSLKPEDTAVYYCAVDHGRVAYYDYWGQGTQVTVSS

SEQ ID NO: 16642 - protein, 118 aa, Artificial Sequence
  Chemically Synthesized
QVQLQESGGGLVQAGGSLRLSCAASGTIFLYLYMGWYRQAPGKERELVATINYGAITYYADSVKGRFTISRDNAKNTVYLQMNSLKPEDTAVYYCAVYDSQRYYHGYWGQGTQVTVSS

SEQ ID NO: 16643 - protein, 126 aa, Artificial Sequence
  Chemically Synthesized
QVQLQESGGGLVQAGGSLRLSCAASGTIFPGDYMGWYRQAPGKERELVATIGGGANTYYADSVKGRFTISRDNAKNTVYLQMNSLKPEDTAVYYCAVLRQRSDYHRDGYAYVYWYWGQGTQVTVSS

SEQ ID NO: 16644 - protein, 118 aa, Artificial Sequence
  Chemically Synthesized
QVQLQESGGGLVQAGGSLRLSCAASGTIFGFASMGWYRQAPGKERELVAGIDRGASTYYADSVKGRFTISRDNAKNTVYLQMNSLKPEDTAVYYCAATDDTYPVHDYWGQGTQVTVSS

SEQ ID NO: 16645 - protein, 117 aa, Artificial Sequence
  Chemically Synthesized
QVQLQESGGGLVQAGGSLRLSCAASGNIFPQTRMGWYRQAPGKEREFVAAISRGGTTNYADSVKGRFTISRDNAKNTVYLQMNSLKPEDTAVYYCAVHYWDIVSMYWGQGTQVTVSS

SEQ ID NO: 16646 - protein, 118 aa, Artificial Sequence
  Chemically Synthesized
QVQLQESGGGLVQAGGSLRLSCAASGTISLYNLMGWYRQAPGKERELVAGIDQGSSTNYADSVKGRFTISRDNAKNTVYLQMNSLKPEDTAVYYCAALTPYLQYPSYWGQGTQVTVSS

SEQ ID NO: 16647 - protein, 126 aa, Artificial Sequence
  Chemically Synthesized
QVQLQESGGGLVQAGGSLRLSCAASGNISDYHYMGWYRQAPGKERELVATIADGGITNYADSVKGRFTISRDNAKNTVYLQMNSLKPEDTAVYYCAVTAVRSDRARRARIGGLYYWGQGTQVTVSS

SEQ ID NO: 16648 - protein, 118 aa, Artificial Sequence
  Chemically Synthesized
QVQLQESGGGLVQAGGSLRLSCAASGSIFPWHGMGWYRQAPGKEREFVATIGTGGTTNYADSVKGRFTISRDNAKNTVYLQMNSLKPEDTAVYYCAAEAPDRYWFGYWGQGTQVTVSS

SEQ ID NO: 16649 - protein, 122 aa, Artificial Sequence
  Chemically Synthesized
QVQLQESGGGLVQAGGSLRLSCAASGSISYAYIMGWYRQAPGKEREFVAGISRGGTTYYADSVKGRFTISRDNAKNTVYLQMNSLKPEDTAVYYCAAKSRTRYHYPHPHYYWGQGTQVTVSS

SEQ ID NO: 16650 - protein, 126 aa, Artificial Sequence
  Chemically Synthesized
QVQLQESGGGLVQAGGSLRLSCAASGNIFGGSRMGWYRQAPGKEREFVAGISTGGTTYYADSVKGRFTISRDNAKNTVYLQMNSLKPEDTAVYYCAVRLRNRLYSGTYNYRYHTYWGQGTQVTVSS

SEQ ID NO: 16651 - protein, 118 aa, Artificial Sequence
  Chemically Synthesized
QVQLQESGGGLVQAGGSLRLSCAASGSIFYLSGMGWYRQAPGKEREFVATINGGSITNYADSVKGRFTISRDNAKNTVYLQMNSLKPEDTAVYYCAVTYVVPERFVYWGQGTQVTVSS

SEQ ID NO: 16652 - protein, 121 aa, Artificial Sequence
  Chemically Synthesized
QVQLQESGGGLVQAGGSLRLSCAASGTISTLFMGWYRQAPGKEREFVATINFGTSTNYADSVKGRFTISRDNAKNTVYLQMNSLKPEDTAVYYCAATTLDDEPSYYYHDYWGQGTQVTVSS

SEQ ID NO: 16653 - protein, 121 aa, Artificial Sequence
  Chemically Synthesized
QVQLQESGGGLVQAGGSLRLSCAASGTIFYGDIMGWYRQAPGKEREFVAGIASGGNTNYADSVKGRFTISRDNAKNTVYLQMNSLKPEDTAVYYCAAGDYTRTWKDIHIYWGQGTQVTVSS

SEQ ID NO: 16654 - protein, 118 aa, Artificial Sequence
  Chemically Synthesized
QVQLQESGGGLVQAGGSLRLSCAASGTIFSRGLMGWYRQAPGKERELVAGISAGATTYYADSVKGRFTISRDNAKNTVYLQMNSLKPEDTAVYYCAVLLARWTSAYYWGQGTQVTVSS

SEQ ID NO: 16655 - protein, 122 aa, Artificial Sequence
  Chemically Synthesized
QVQLQESGGGLVQAGGSLRLSCAASGYISPVRDMGWYRQAPGKERELVASIGQGTTTYYADSVKGRFTISRDNAKNTVYLQMNSLKPEDTAVYYCAATTYVPYTFTALLVYWGQGTQVTVSS

SEQ ID NO: 16656 - protein, 125 aa, Artificial Sequence
  Chemically Synthesized
QVQLQESGGGLVQAGGSLRLSCAASGTIFQPDAMGWYRQAPGKEREFVASINDGTSTNYADSVKGRFTISRDNAKNTVYLQMNSLKPEDTAVYYCAANYAFDSDQDYYTPDHGYWGQGTQVTVSS

SEQ ID NO: 16657 - protein, 115 aa, Artificial Sequence
  Chemically Synthesized
QVQLQESGGGLVQAGGSLRLSCAASGSIFGISMGWYRQAPGKEREFVASITTGGTTYYADSVKGRFTISRDNAKNTVYLQMNSLKPEDTAVYYCALTLVTCCIYWGQGTQVTVSS

SEQ ID NO: 16658 - protein, 119 aa, Artificial Sequence
  Chemically Synthesized
QVQLQESGGGLVQAGGSLRLSCAASGNIFVSPYMGWYRQAPGKERELVAGIALGGTTNYADSVKGRFTISRDNAKNTVYLQMNSLKPEDTAVYYCAADDTYPVNNLFYWGQGTQVTVSS

SEQ ID NO: 16659 - protein, 122 aa, Artificial Sequence
  Chemically Synthesized
QVQLQESGGGLVQAGGSLRLSCAASGYIFPLGYMGWYRQAPGKEREFVASIGDGATTNYADSVKGRFTISRDNAKNTVYLQMNSLKPEDTAVYYCAAILQTIYAYYVPLGYWGQGTQVTVSS

SEQ ID NO: 16660 - protein, 118 aa, Artificial Sequence
  Chemically Synthesized
QVQLQESGGGLVQAGGSLRLSCAASGYISGYYSMGWYRQAPGKEREFVATIGYGGSTNYADSVKGRFTISRDNAKNTVYLQMNSLKPEDTAVYYCAALDYLDIDHDYWGQGTQVTVSS

SEQ ID NO: 16661 - protein, 114 aa, Artificial Sequence
  Chemically Synthesized
QVQLQESGGGLVQAGGSLRLSCAASGSIFHYRDMGWYRQAPGKERELLVPYADSVKGRFTISRDNAKNTVYLQMNSLKPEDTAVYYCAANRIDKFQYYNVLDYWGQGTQVTVSS

SEQ ID NO: 16662 - protein, 117 aa, Artificial Sequence
  Chemically Synthesized
QVQLQESGGGLVQAGGSLRLSCAASGSIFLYGGMGWYRQAPGKERELVAAIGDGGTTNYADSVKGRFTISRDNAKNTVYLQMNSLKPEDTAVYYCAAGAGTDYYLYWGQGTQVTVSS

SEQ ID NO: 16663 - protein, 122 aa, Artificial Sequence
  Chemically Synthesized
QVQLQESGGGLVQAGGSLRLSCAASGNISFYNDMGWYRQAPGKEREFVAGITVGGNTYYADSVKGRFTISRDNAKNTVYLQMNSLKPEDTAVYYCAAGQVDTGANSSVHGYWGQGTQVTVSS

SEQ ID NO: 16664 - protein, 126 aa, Artificial Sequence
  Chemically Synthesized
QVQLQESGGGLVQAGGSLRLSCAASGNIFPDQVMGWYRQAPGKEREFVAAIDDGASTLYADSVKGRFTISRDNAKNTVYLQMNSLKPEDTAVYYCAAGRDEAYDAGHADLTYYEYWGQGTQVTVSS

SEQ ID NO: 16665 - protein, 124 aa, Artificial Sequence
  Chemically Synthesized
QVQLQESGGGLVQAGGSLRLSCAASGSISGSPYMGWYRQAPGKEREFVATINSGASTNYADSVKGRFTISRDNAKNTVYLQMNSLKPEDTAVYYCAAVNLYISCSIATRRLLYWGQGTQVTVSS

SEQ ID NO: 16666 - protein, 118 aa, Artificial Sequence
  Chemically Synthesized
QVQLQESGGGLVQAGGSLRLSCAASGNISYRLYMGWYRQAPGKEREFVAGIAYGTSTYYADSVKGRFTISRDNAKNTVYLQMNSLKPEDTAVYYCAVSQSRASYYYYWGQGTQVTVSS

SEQ ID NO: 16667 - protein, 118 aa, Artificial Sequence
  Chemically Synthesized
QVQLQESGGGLVQAGGSLRLSCAASGSISQVLDMGWYRQAPGKEREFVATIDQGSSTYYADSVKGRFTISRDNAKNTVYLQMNSLKPEDTAVYYCAVYPYYIDLHSYWGQGTQVTVSS

SEQ ID NO: 16668 - protein, 121 aa, Artificial Sequence
  Chemically Synthesized
QVQLQESGGGLVQAGGSLRLSCAASGNISWDHWMGWYRQAPGKERELVASISTVLIPYADSVKGRFTISRDNAKNTVYLQMNSLKPEDTAVYYCAVYRRDDEGDNIYHDYWGQGTQVTVSS

SEQ ID NO: 16669 - protein, 117 aa, Artificial Sequence
  Chemically Synthesized
QVQLQESGGGLVQAGGSLRLSCAASGNISRATDMGWYRQAPGKERELVATIGRGSTTYYADSVKGRFTISRDNAKNTVYLQMNSLKPEDTAVYYCAVLYLYDGYGYWGQGTQVTVSS

SEQ ID NO: 16670 - protein, 118 aa, Artificial Sequence
  Chemically Synthesized
QVQLQESGGGLVQAGGSLRLSCAASGTIFVPRYMGWYRQAPGKEREFVAAITRGANTYYADSVKGRFTISRDNAKNTVYLQMNSLKPEDTAVYYCAVTYHARGEYQYWGQGTQVTVSS

SEQ ID NO: 16671 - protein, 121 aa, Artificial Sequence
  Chemically Synthesized
QVQLQESGGGLVQAGGSLRLSCAASGSISAYVMGWYRQAPGKERELVAGISYGTTTYYADSVKGRFTISRDNAKNTVYLQMNSLKPEDTAVYYCAAWYKRYYWYEDFFIYWGQGTQVTVSS

SEQ ID NO: 16672 - protein, 123 aa, Artificial Sequence
  Chemically Synthesized
QVQLQESGGGLVQAGGSLRLSCAASGNISDWDYMGWYRQAPGKERELVAVLVKVLLPYADSVKGRFTISRDNAKNTVYLQMNSLKPEDTAVYYCAVLDLSRRSSYDYRGHGYWGQGTQVTVSS

SEQ ID NO: 16673 - protein, 118 aa, Artificial Sequence
  Chemically Synthesized
QVQLQESGGGLVQAGGSLRLSCAASGSIFYWPYMGWYRQAPGKERELVAGIDVGGNTYYADSVKGRFTISRDNAKNTVYLQMNSLKPEDTAVYYCAAGYSIYGYLPYWGQGTQVTVSS

SEQ ID NO: 16674 - protein, 122 aa, Artificial Sequence
  Chemically Synthesized
QVQLQESGGGLVQAGGSLRLSCAASGNISYLDEMGWYRQAPGKERELVATIAWGTNTYYADSVKGRFTISRDNAKNTVYLQMNSLKPEDTAVYYCAVDDQWSDRYDDGLTYWGQGTQVTVSS

SEQ ID NO: 16675 - protein, 118 aa, Artificial Sequence
  Chemically Synthesized
QVQLQESGGGLVQAGGSLRLSCAASGYISGTCFMGWYRQAPGKERELVAGIADGSITYYADSVKGRFTISRDNAKNTVYLQMNSLKPEDTAVYYCAAWVSYATRHAYWGQGTQVTVSS

SEQ ID NO: 16676 - protein, 112 aa, Artificial Sequence
  Chemically Synthesized
QVQLQESGGGLVQAGGSLRLSCAASGTISYSYHMGWYRQAPGKERELVAAINYGSITNYADSVKGRFTISRDNAKNTVYLQMNSLKPEDTAVYYCAVRLMYWGQGTQVTVSS

SEQ ID NO: 16677 - protein, 118 aa, Artificial Sequence
  Chemically Synthesized
QVQLQESGGGLVQAGGSLRLSCAASGNIFAGISMGWYRQAPGKERELVAAIATGGTTNYADSVKGRFTISRDNAKNTVYLQMNSLKPEDTAVYYCAAREYVYYSYRYWGQGTQVTVSS

SEQ ID NO: 16678 - protein, 118 aa, Artificial Sequence
  Chemically Synthesized
QVQLQESGGGLVQAGGSLRLSCAASGYIFSYDYMGWYRQAPGKERELVASITGGGSTNYADSVKGRFTISRDNAKNTVYLQMNSLKPEDTAVYYCAAVRQGGVGHLYWGQGTQVTVSS

SEQ ID NO: 16679 - protein, 122 aa, Artificial Sequence
  Chemically Synthesized
QVQLQESGGGLVQAGGSLRLSCAASGNIFLPTYMGWYRQAPGKEREFVAAIGYGAITNYADSVKGRFTISRDNAKNTVYLQMNSLKPEDTAVYYCAALSLAPRRPWNGLAYWGQGTQVTVSS

SEQ ID NO: 16680 - protein, 117 aa, Artificial Sequence
  Chemically Synthesized
QVQLQESGGGLVQAGGSLRLSCAASGTISRTTKMGWYRQAPGKERELVASITDGTTTNYADSVKGRFTISRDNAKNTVYLQMNSLKPEDTAVYYCAADYASTLFMYWGQGTQVTVSS

SEQ ID NO: 16681 - protein, 118 aa, Artificial Sequence
  Chemically Synthesized
QVQLQESGGGLVQAGGSLRLSCAASGNIFYHAYMGWYRQAPGKERELVAGISLGAITNYADSVKGRFTISRDNAKNTVYLQMNSLKPEDTAVYYCAVAVYGWYFHYYWGQGTQVTVSS

SEQ ID NO: 16682 - protein, 117 aa, Artificial Sequence
  Chemically Synthesized
QVQLQESGGGLVQAGGSLRLSCAASGTIFYSPYMGWYRQAPGKEREFVAVLVLVVVPYADSVKGRFTISRDNAKNTVYLQMNSLKPEDTAVYYCAADYYYYPYLGYWGQGTQVTVSS

SEQ ID NO: 16683 - protein, 122 aa, Artificial Sequence
  Chemically Synthesized
QVQLQESGGGLVQAGGSLRLSCAASGTIFNYRFMGWYRQAPGKEREFVASIGRGTTTYYADSVKGRFTISRDNAKNTVYLQMNSLKPEDTAVYYCAAGYDADATLNDEFGYWGQGTQVTVSS

SEQ ID NO: 16684 - protein, 125 aa, Artificial Sequence
  Chemically Synthesized
QVQLQESGGGLVQAGGSLRLSCAASGSISRGAYMGWYRQAPGKERELVAAITTGGSTNYADSVKGRFTISRDNAKNTVYLQMNSLKPEDTAVYYCAAPDADYYRPSSDYWSLIYWGQGTQVTVSS

SEQ ID NO: 16685 - protein, 126 aa, Artificial Sequence
  Chemically Synthesized
QVQLQESGGGLVQAGGSLRLSCAASGSISGRVTMGWYRQAPGKERELVAAIGWGGNTYYADSVKGRFTISRDNAKNTVYLQMNSLKPEDTAVYYCAAQVTGLTTPLRGIQDDFVYWGQGTQVTVSS

SEQ ID NO: 16686 - protein, 117 aa, Artificial Sequence
  Chemically Synthesized
QVQLQESGGGLVQAGGSLRLSCAASGNIFEPQNMGWYRQAPGKERELVAAINNGTTTYYADSVKGRFTISRDNAKNTVYLQMNSLKPEDTAVYYCAVGVYISTCMYWGQGTQVTVSS

SEQ ID NO: 16687 - protein, 126 aa, Artificial Sequence
  Chemically Synthesized
QVQLQESGGGLVQAGGSLRLSCAASGYIFYPYHMGWYRQAPGKERELVAGIADGGTTNYADSVKGRFTISRDNAKNTVYLQMNSLKPEDTAVYYCAVQAYTLRSGAQYRPLPYAYWGQGTQVTVSS

SEQ ID NO: 16688 - protein, 121 aa, Artificial Sequence
  Chemically Synthesized
QVQLQESGGGLVQAGGSLRLSCAASGNIFDPSDMGWYRQAPGKERELVATIGIGTSTYYADSVKGRFTISRDNAKNTVYLQMNSLKPEDTAVYYCAVGVPIPLDVVDHTYWGQGTQVTVSS

SEQ ID NO: 16689 - protein, 121 aa, Artificial Sequence
  Chemically Synthesized
QVQLQESGGGLVQAGGSLRLSCAASGNISYLRWMGWYRQAPGKEREFVAAITTVLVPYADSVKGRFTISRDNAKNTVYLQMNSLKPEDTAVYYCAAIIGYGPRGYYTFAYWGQGTQVTVSS

SEQ ID NO: 16690 - protein, 118 aa, Artificial Sequence
  Chemically Synthesized
QVQLQESGGGLVQAGGSLRLSCAASGNISSATVMGWYRQAPGKEREFVASISFGGNTNYADSVKGRFTISRDNAKNTVYLQMNSLKPEDTAVYYCAAGRDGGAVLKYWGQGTQVTVSS

SEQ ID NO: 16691 - protein, 121 aa, Artificial Sequence
  Chemically Synthesized
QVQLQESGGGLVQAGGSLRLSCAASGSISDRDDMGWYRQAPGKERELVATIADGGTTNYADSVKGRFTISRDNAKNTVYLQMNSLKPEDTAVYYCAVGSYPSEDNYDHDYWGQGTQVTVSS

SEQ ID NO: 16692 - protein, 110 aa, Artificial Sequence
  Chemically Synthesized
QVQLQESGGGLVQAGGSLRLSCAASGSISPDAQMGWYRQAPGKEREFVAAIASGTTTYYADSVKGRFTISRDNAKNTVYLQMNSLKPEDTAVYYCALDYWGQGTQVTVSS

SEQ ID NO: 16693 - protein, 118 aa, Artificial Sequence
  Chemically Synthesized
QVQLQESGGGLVQAGGSLRLSCAASGTISVAQYMGWYRQAPGKERELVASINLGGTTYYADSVKGRFTISRDNAKNTVYLQMNSLKPEDTAVYYCAVAYLQQYVLYYWGQGTQVTVSS

SEQ ID NO: 16694 - protein, 118 aa, Artificial Sequence
  Chemically Synthesized
QVQLQESGGGLVQAGGSLRLSCAASGSIFGDYGMGWYRQAPGKERELVATINWGATTYYADSVKGRFTISRDNAKNTVYLQMNSLKPEDTAVYYCAVDLPRYDYHAYWGQGTQVTVSS

SEQ ID NO: 16695 - protein, 118 aa, Artificial Sequence
  Chemically Synthesized
QVQLQESGGGLVQAGGSLRLSCAASGYIFDRWHMGWYRQAPGKEREFVATISGGTSTYYADSVKGRFTISRDNAKNTVYLQMNSLKPEDTAVYYCAAYQLHAFIYSYWGQGTQVTVSS

SEQ ID NO: 16696 - protein, 118 aa, Artificial Sequence
  Chemically Synthesized
QVQLQESGGGLVQAGGSLRLSCAASGSISRYSYMGWYRQAPGKEREFVASISGGGTTYYADSVKGRFTISRDNAKNTVYLQMNSLKPEDTAVYYCAASTATVDGLGYWGQGTQVTVSS

SEQ ID NO: 16697 - protein, 117 aa, Artificial Sequence
  Chemically Synthesized
QVQLQESGGGLVQAGGSLRLSCAASGNISDYDMGWYRQAPGKERELVAGIDVGGSTYYADSVKGRFTISRDNAKNTVYLQMNSLKPEDTAVYYCAAGGTNASAYRYWGQGTQVTVSS

SEQ ID NO: 16698 - protein, 118 aa, Artificial Sequence
  Chemically Synthesized
QVQLQESGGGLVQAGGSLRLSCAASGNIFYYGGMGWYRQAPGKERELVAGISYGTNTYYADSVKGRFTISRDNAKNTVYLQMNSLKPEDTAVYYCAVHPYSNYDLYYWGQGTQVTVSS

SEQ ID NO: 16699 - protein, 122 aa, Artificial Sequence
  Chemically Synthesized
QVQLQESGGGLVQAGGSLRLSCAASGTIFFITYMGWYRQAPGKERELVAAIAPGGSTNYADSVKGRFTISRDNAKNTVYLQMNSLKPEDTAVYYCAVYRWYWPGYTPRLAYWGQGTQVTVSS

SEQ ID NO: 16700 - protein, 119 aa, Artificial Sequence
  Chemically Synthesized
QVQLQESGGGLVQAGGSLRLSCAASGSISGDTMGWYRQAPGKERELVAAISGGTTNYADSVKGRFTISRDNAKNTVYLQMNSLKPEDTAVYYCALDQDQYDYTPDHIYWGQGTQVTVSS

SEQ ID NO: 16701 - protein, 118 aa, Artificial Sequence
  Chemically Synthesized
QVQLQESGGGLVQAGGSLRLSCAASGYIFESGSMGWYRQAPGKERELVASIDRGTSTNYADSVKGRFTISRDNAKNTVYLQMNSLKPEDTAVYYCAVLWSYYNKYSYWGQGTQVTVSS

SEQ ID NO: 16702 - protein, 118 aa, Artificial Sequence
  Chemically Synthesized
QVQLQESGGGLVQAGGSLRLSCAASGNISSEYIMGWYRQAPGKERELVATIAYGSTTNYADSVKGRFTISRDNAKNTVYLQMNSLKPEDTAVYYCAAKRYREYGLVYWGQGTQVTVSS

SEQ ID NO: 16703 - protein, 122 aa, Artificial Sequence
  Chemically Synthesized
QVQLQESGGGLVQAGGSLRLSCAASGTIFGVFAMGWYRQAPGKERELVAAIDIGTSTYYADSVKGRFTISRDNAKNTVYLQMNSLKPEDTAVYYCAATRDYDGFEYRGFDYWGQGTQVTVSS

SEQ ID NO: 16704 - protein, 118 aa, Artificial Sequence
  Chemically Synthesized
QVQLQESGGGLVQAGGSLRLSCAASGYISNDDNMGWYRQAPGKERELVAAINYGGSTYYADSVKGRFTISRDNAKNTVYLQMNSLKPEDTAVYYCAVLDPSAGYHVYWGQGTQVTVSS

SEQ ID NO: 16705 - protein, 118 aa, Artificial Sequence
  Chemically Synthesized
QVQLQESGGGLVQAGGSLRLSCAASGYISLAGYMGWYRQAPGKERELVASIGYGATTNYADSVKGRFTISRDNAKNTVYLQMNSLKPEDTAVYYCAAVTYTNGPFGYWGQGTQVTVSS

SEQ ID NO: 16706 - protein, 118 aa, Artificial Sequence
  Chemically Synthesized
QVQLQESGGGLVQAGGSLRLSCAASGNIFDTYGMGWYRQAPGKEREFVATIDDGANTYYADSVKGRFTISRDNAKNTVYLQMNSLKPEDTAVYYCAVGYAPSSYLTYWGQGTQVTVSS

SEQ ID NO: 16707 - protein, 119 aa, Artificial Sequence
  Chemically Synthesized
QVQLQESGGGLVQAGGSLRLSCAASGYISYYGTMGWYRQAPGKEREFVAAIGQGGSSTNYADSVKGRFTISRDNAKNTVYLQMNSLKPEDTAVYYCAAWGDAETAYLYWGQGTQVTVSS

SEQ ID NO: 16708 - protein, 118 aa, Artificial Sequence
  Chemically Synthesized
QVQLQESGGGLVQAGGSLRLSCAASGTISDIVTMGWYRQAPGKERELVAAITEGGSTNYADSVKGRFTISRDNAKNTVYLQMNSLKPEDTAVYYCAVDTRGSVFLGYWGQGTQVTVSS

SEQ ID NO: 16709 - protein, 121 aa, Artificial Sequence
  Chemically Synthesized
QVQLQESGGGLVQAGGSLRLSCAASGTIFQQYPMGWYRQAPGKEREFVAGINGGSTNYADSVKGRFTISRDNAKNTVYLQMNSLKPEDTAVYYCAVGEDQILQDYGSHYYWGQGTQVTVSS

SEQ ID NO: 16710 - protein, 121 aa, Artificial Sequence
  Chemically Synthesized
QVQLQESGGGLVQAGGSLRLSCAASGYIFYTRFMGWYRQAPGKEREFVATIDDGSNTYYADSVKGRFTISRDNAKNTVYLQMNSLKPEDTAVYYCAATYYQYGYVPRHYYWGQGTQVTVSS

SEQ ID NO: 16711 - protein, 118 aa, Artificial Sequence
  Chemically Synthesized
QVQLQESGGGLVQAGGSLRLSCAASGTISYSDTMGWYRQAPGKEREFVAGIAGGATTYYADSVKGRFTISRDNAKNTVYLQMNSLKPEDTAVYYCAAYGYYTGRHWYWGQGTQVTVSS

SEQ ID NO: 16712 - protein, 126 aa, Artificial Sequence
  Chemically Synthesized
QVQLQESGGGLVQAGGSLRLSCAASGNIFPQYDMGWYRQAPGKEREFVATITGGASTNYADSVKGRFTISRDNAKNTVYLQMNSLKPEDTAVYYCAVSDTGAARADYTPNHGFEYWGQGTQVTVSS

SEQ ID NO: 16713 - protein, 121 aa, Artificial Sequence
  Chemically Synthesized
QVQLQESGGGLVQAGGSLRLSCAASGNISGWNTMGWYRQAPGKERELVAGIAGGGNTYYADSVKGRFTISRDNAKNTVYLQMNSLKPEDTAVYYCAAWDQARTQDPNHAYWGQGTQVTVSS

SEQ ID NO: 16714 - protein, 127 aa, Artificial Sequence
  Chemically Synthesized
QVQLQESGGGLVQAGGSLRLSCAASGTISDTDYMGWYRQAPGKEREFVASITAGSSTNYADSVKGRFTISRDNAKNTVYLQMNSLKPEDTAVYYCAVTLRYATVYYERGEATDLYYWGQGTQVTVSS

SEQ ID NO: 16715 - protein, 125 aa, Artificial Sequence
  Chemically Synthesized
QVQLQESGGGLVQAGGSLRLSCAASGNISQWDGMGWYRQAPGKERELVPVLLRVVLPYADSVKGRFTISRDNAKNTVYLQMNSLKPEDTAVYYCAAESYVDQYNGGVVTGYLYYWGQGTQVTVSS

SEQ ID NO: 16716 - protein, 121 aa, Artificial Sequence
  Chemically Synthesized
QVQLQESGGGLVQAGGSLRLSCAASGYISADAYMGWYRQAPGKEREFVAGINNGTSTNYADSVKGRFTISRDNAKNTVYLQMNSLKPEDTAVYYCAAAVPRWDTKLLLIYWGQGTQVTVSS

SEQ ID NO: 16717 - protein, 118 aa, Artificial Sequence
  Chemically Synthesized
QVQLQESGGGLVQAGGSLRLSCAASGNISPDYYMGWYRQAPGKERELVAAISPGGITYYADSVKGRFTISRDNAKNTVYLQMNSLKPEDTAVYYCAVASWYASTLTYWGQGTQVTVSS

SEQ ID NO: 16718 - protein, 118 aa, Artificial Sequence
  Chemically Synthesized
QVQLQESGGGLVQAGGSLRLSCAASGTISPDQYMGWYRQAPGKEREFVATIGVGANTNYADSVKGRFTISRDNAKNTVYLQMNSLKPEDTAVYYCAVGTYIYPAHTYWGQGTQVTVSS

SEQ ID NO: 16719 - protein, 114 aa, Artificial Sequence
  Chemically Synthesized
QVQLQESGGGLVQAGGSLRLSCAASGTISRSLMGWYRQAPGKEREFVAAIGYGTYADSVKGRFTISRDNAKNTVYLQMNSLKPEDTAVYYCAVLSSLRLAHAYWGQGTQVTVSS

SEQ ID NO: 16720 - protein, 118 aa, Artificial Sequence
  Chemically Synthesized
QVQLQESGGGLVQAGGSLRLSCAASGTIVMGWYRQAPGKERELVATIDDGATTYYADSVKGRFTISRDNAKNTVYLQMNSLKPEDTAVYYCAAQVNYALRDEDYFYYWGQGTQVTVSS

SEQ ID NO: 16721 - protein, 118 aa, Artificial Sequence
  Chemically Synthesized
QVQLQESGGGLVQAGGSLRLSCAASGTISSPYFMGWYRQAPGKERELVASIAPGSNTYYADSVKGRFTISRDNAKNTVYLQMNSLKPEDTAVYYCAVGYYATLPHAYWGQGTQVTVSS

SEQ ID NO: 16722 - protein, 113 aa, Artificial Sequence
  Chemically Synthesized
QVQLQESGGGLVQAGGSLRLSCAASGNISQEYIMGWYRQAPGKEREFVATIGDGANTYYADSVKGRFTISRDNAKNTVYLQMNSLKPEDTAVYYCALFTSMYWGQGTQVTVSS

SEQ ID NO: 16723 - protein, 122 aa, Artificial Sequence
  Chemically Synthesized
QVQLQESGGGLVQAGGSLRLSCAASGTIFGRDAMGWYRQAPGKEREFVAGIAYGSTTYYADSVKGRFTISRDNAKNTVYLQMNSLKPEDTAVYYCAAQEGDPQIGDVYHDYWGQGTQVTVSS

SEQ ID NO: 16724 - protein, 118 aa, Artificial Sequence
  Chemically Synthesized
QVQLQESGGGLVQAGGSLRLSCAASGTIFPTLRMGWYRQAPGKEREFVASITGGGTTYYADSVKGRFTISRDNAKNTVYLQMNSLKPEDTAVYYCAVDYGTLPSYPYWGQGTQVTVSS

SEQ ID NO: 16725 - protein, 109 aa, Artificial Sequence
  Chemically Synthesized
QVQLQESGGGLVQAGGSLRLSCAASGSISYWADMGWYRQAPGKERELVASISYGAITYYADSVKGRFTISRDNAKNTVYLQMNSLKPEDTAVYYCAEYWGQGTQVTVSS

SEQ ID NO: 16726 - protein, 121 aa, Artificial Sequence
  Chemically Synthesized
QVQLQESGGGLVQAGGSLRLSCAASGNISDNVNMGWYRQAPGKERELVAGISDGGITYADSVKGRFTISRDNAKNTVYLQMNSLKPEDTAVYYCAAIVLQGRKRISDFLYWGQGTQVTVSS

SEQ ID NO: 16727 - protein, 126 aa, Artificial Sequence
  Chemically Synthesized
QVQLQESGGGLVQAGGSLRLSCAASGNIFVPPDMGWYRQAPGKEREFVAGIDAGSNTNYADSVKGRFTISRDNAKNTVYLQMNSLKPEDTAVYYCAAWAELGYSSYLQLRPPYDYWGQGTQVTVSS

SEQ ID NO: 16728 - protein, 118 aa, Artificial Sequence
  Chemically Synthesized
QVQLQESGGGLVQAGGSLRLSCAASGTISDYDYMGWYRQAPGKERELVAGIGSGSITYYADSVKGRFTISRDNAKNTVYLQMNSLKPEDTAVYYCAVSLRYSERHNYWGQGTQVTVSS

SEQ ID NO: 16729 - protein, 126 aa, Artificial Sequence
  Chemically Synthesized
QVQLQESGGGLVQAGGSLRLSCAASGNISAYTIMGWYRQAPGKEREFVAGIGYGGNTNYADSVKGRFTISRDNAKNTVYLQMNSLKPEDTAVYYCAVVPSDWRGDYASSSRSYWYWGQGTQVTVSS

SEQ ID NO: 16730 - protein, 112 aa, Artificial Sequence
  Chemically Synthesized
QVQLQESGGGLVQAGGSLRLSCAASGTISWLQYMGWYRQAPGKEREFVAAIAYGGITNYADSVKGRFTISRDNAKNTVYLQMNSLKPEDTAVYYCAAGLYYWGQGTQVTVSS

SEQ ID NO: 16731 - protein, 118 aa, Artificial Sequence
  Chemically Synthesized
QVQLQESGGGLVQAGGSLRLSCAASGTISGGYNMGWYRQAPGKEREFVATIGDGSSTYYADSVKGRFTISRDNAKNTVYLQMNSLKPEDTAVYYCAADPGGPWAYGYWGQGTQVTVSS

SEQ ID NO: 16732 - protein, 118 aa, Artificial Sequence
  Chemically Synthesized
QVQLQESGGGLVQAGGSLRLSCAASGTISPPSIMGWYRQAPGKEREFVAGIGGGSTTNYADSVKGRFTISRDNAKNTVYLQMNSLKPEDTAVYYCAVVYFIDARFTYWGQGTQVTVSS

SEQ ID NO: 16733 - protein, 121 aa, Artificial Sequence
  Chemically Synthesized
QVQLQESGGGLVQAGGSLRLSCAASGYISLSYMGWYRQAPGKEREFVAAIGFGGTTYYADSVKGRFTISRDNAKNTVYLQMNSLKPEDTAVYYCAANDAYSGPVDYRHQYWGQGTQVTVSS

SEQ ID NO: 16734 - protein, 117 aa, Artificial Sequence
  Chemically Synthesized
QVQLQESGGGLVQAGGSLRLSCAASGSISALIQMGWYRQAPGKEREFVASISGGSTNYADSVKGRFTISRDNAKNTVYLQMNSLKPEDTAVYYCAVDYKDTSSHGYWGQGTQVTVSS

SEQ ID NO: 16735 - protein, 122 aa, Artificial Sequence
  Chemically Synthesized
QVQLQESGGGLVQAGGSLRLSCAASGYISSISIMGWYRQAPGKERELVAAINRGGTTYYADSVKGRFTISRDNAKNTVYLQMNSLKPEDTAVYYCAAFTPRWRKGNYWLDYWGQGTQVTVSS

SEQ ID NO: 16736 - protein, 117 aa, Artificial Sequence
  Chemically Synthesized
QVQLQESGGGLVQAGGSLRLSCAASGSISYGQGMGWYRQAPGKEREFVATIDSGSITNYADSVKGRFTISRDNAKNTVYLQMNSLKPEDTAVYYCAAGWNRDYHDYWGQGTQVTVSS

SEQ ID NO: 16737 - protein, 122 aa, Artificial Sequence
  Chemically Synthesized
QVQLQESGGGLVQAGGSLRLSCAASGNIFLYWDMGWYRQAPGKEREFVASINPGANTNYADSVKGRFTISRDNAKNTVYLQMNSLKPEDTAVYYCAVYYIPYTPWYSYHDYWGQGTQVTVSS

SEQ ID NO: 16738 - protein, 118 aa, Artificial Sequence
  Chemically Synthesized
QVQLQESGGGLVQAGGSLRLSCAASGYISTGDDMGWYRQAPGKERELVAAITSGTSTYYADSVKGRFTISRDNAKNTVYLQMNSLKPEDTAVYYCAVQIYLENPFAYWGQGTQVTVSS

SEQ ID NO: 16739 - protein, 118 aa, Artificial Sequence
  Chemically Synthesized
QVQLQESGGGLVQAGGSLRLSCAASGNIFKIEVMGWYRQAPGKERELVATITYGGNTNYADSVKGRFTISRDNAKNTVYLQMNSLKPEDTAVYYCAVIIDSIVRYYYWGQGTQVTVSS

SEQ ID NO: 16740 - protein, 124 aa, Artificial Sequence
  Chemically Synthesized
QVQLQESGGGLVQAGGSLRLSCAASGNISISRVMGWYRQAPGKEREFVAGIDNGASLYADSVKGRFTISRDNAKNTVYLQMNSLKPEDTAVYYCAVRDAISSSLLLVTKLLIYWGQGTQVTVSS

SEQ ID NO: 16741 - protein, 117 aa, Artificial Sequence
  Chemically Synthesized
QVQLQESGGGLVQAGGSLRLSCAASGTISRGYGMGWYRQAPGKERELVASIAYGGNTNYADSVKGRFTISRDNAKNTVYLQMNSLKPEDTAVYYCAAIGPGYPHPYWGQGTQVTVSS

SEQ ID NO: 16742 - protein, 117 aa, Artificial Sequence
  Chemically Synthesized
QVQLQESGGGLVQAGGSLRLSCAASGNISEYPGMGWYRQAPGKEREFVAGITRGSITNYADSVKGRFTISRDNAKNTVYLQMNSLKPEDTAVYYCAVWYTYIGRFYWGQGTQVTVSS

SEQ ID NO: 16743 - protein, 117 aa, Artificial Sequence
  Chemically Synthesized
QVQLQESGGGLVQAGGSLRLSCAASGTISSLYSMGWYRQAPGKERELVASIGRGTSTNYADSVKGRFTISRDNAKNTVYLQMNSLKPEDTAVYYCAVVPDYSLTMYWGQGTQVTVSS

SEQ ID NO: 16744 - protein, 122 aa, Artificial Sequence
  Chemically Synthesized
QVQLQESGGGLVQAGGSLRLSCAASGSISGKRVMGWYRQAPGKEREFVAGIDYGGITYYADSVKGRFTISRDNAKNTVYLQMNSLKPEDTAVYYCAVVDYYYYPGPIDLWYWGQGTQVTVSS

SEQ ID NO: 16745 - protein, 126 aa, Artificial Sequence
  Chemically Synthesized
QVQLQESGGGLVQAGGSLRLSCAASGTISDTLTMGWYRQAPGKEREFVASINSGTITNYADSVKGRFTISRDNAKNTVYLQMNSLKPEDTAVYYCAAYFYGYVRSYSEGRGPFDYWGQGTQVTVSS

SEQ ID NO: 16746 - protein, 117 aa, Artificial Sequence
  Chemically Synthesized
QVQLQESGGGLVQAGGSLRLSCAASGNISARSMGWYRQAPGKERELVASINDGGTTNYADSVKGRFTISRDNAKNTVYLQMNSLKPEDTAVYYCAVAWYYDAGFAYWGQGTQVTVSS

SEQ ID NO: 16747 - protein, 118 aa, Artificial Sequence
  Chemically Synthesized
QVQLQESGGGLVQAGGSLRLSCAASGSIFGRYDMGWYRQAPGKEREFVASIGDGTTTNYADSVKGRFTISRDNAKNTVYLQMNSLKPEDTAVYYCAAYSYGVATLGYWGQGTQVTVSS

SEQ ID NO: 16748 - protein, 126 aa, Artificial Sequence
  Chemically Synthesized
QVQLQESGGGLVQAGGSLRLSCAASGNISLDAGMGWYRQAPGKERELVATINYGGNTYYADSVKGRFTISRDNAKNTVYLQMNSLKPEDTAVYYCAVRGPPGDTLSGYHLYGLAYWGQGTQVTVSS

SEQ ID NO: 16749 - protein, 123 aa, Artificial Sequence
  Chemically Synthesized
QVQLQESGGGLVQAGGSLRLSCAASGTISIPIAMGWYRQAPGKEREFVASIDYGGSTNYADSVKGRFTISRDNAKNTVYLQMNSLKPEDTAVYYCAAESYYDWPDLYVAYDYWGQGTQVTVSS

SEQ ID NO: 16750 - protein, 122 aa, Artificial Sequence
  Chemically Synthesized
QVQLQESGGGLVQAGGSLRLSCAASGTISRSAYMGWYRQAPGKEREFVAAINQGTTTYYADSVKGRFTISRDNAKNTVYLQMNSLKPEDTAVYYCAVGDPYGPSNIFLYDYWGQGTQVTVSS

SEQ ID NO: 16751 - protein, 122 aa, Artificial Sequence
  Chemically Synthesized
QVQLQESGGGLVQAGGSLRLSCAASGYISPRGDMGWYRQAPGKERELVASITEGANTYYADSVKGRFTISRDNAKNTVYLQMNSLKPEDTAVYYCAASYYRWGVYYFDHDYWGQGTQVTVSS

SEQ ID NO: 16752 - protein, 111 aa, Artificial Sequence
  Chemically Synthesized
QVQLQESGGGLVQAGGSLRLSCAASGYMGWYRQAPGKERELVATINSGANTNYADSVKGRFTISRDNAKNTVYLQMNSLKPEDTAVYYCAVLHSLLLTMYWGQGTQVTVSS

SEQ ID NO: 16753 - protein, 114 aa, Artificial Sequence
  Chemically Synthesized
QVQLQESGGGLVQAGGSLRLSCAASGSILLTSMGWYRQAPGKERELVATITYGGTTYYADSVKGRFTISRDNAKNTVYLQMNSLKPEDTAVYYCAAGGGVHHYWGQGTQVTVSS

SEQ ID NO: 16754 - protein, 118 aa, Artificial Sequence
  Chemically Synthesized
QVQLQESGGGLVQAGGSLRLSCAASGYISLRIYMGWYRQAPGKERELVAGITSGGSTNYADSVKGRFTISRDNAKNTVYLQMNSLKPEDTAVYYCAANESVPVRHRYWGQGTQVTVSS

SEQ ID NO: 16755 - protein, 115 aa, Artificial Sequence
  Chemically Synthesized
QVQLQESGGGLVQAGGSLRLSCAASGYIFDDPAMGWYRQAPGKERELVSLGGITYYADSVKGRFTISRDNAKNTVYLQMNSLKPEDTAVYYCAVGRYSYDNFSYWGQGTQVTVSS

SEQ ID NO: 16756 - protein, 122 aa, Artificial Sequence
  Chemically Synthesized
QVQLQESGGGLVQAGGSLRLSCAASGSISYRYLMGWYRQAPGKEREFVATITQGGNTNYADSVKGRFTISRDNAKNTVYLQMNSLKPEDTAVYYCAARDGPILAYYARLTYWGQGTQVTVSS

SEQ ID NO: 16757 - protein, 125 aa, Artificial Sequence
  Chemically Synthesized
QVQLQESGGGLVQAGGSLRLSCAASGYIFNDWYMGWYRQAPGKEREFVAAISSGGNTNYADSVKGRFTISRDNAKNTVYLQMNSLKPEDTAVYYCAVRDYSTFSSKLTVTTGMYWGQGTQVTVSS

SEQ ID NO: 16758 - protein, 126 aa, Artificial Sequence
  Chemically Synthesized
QVQLQESGGGLVQAGGSLRLSCAASGSISYYLRMGWYRQAPGKEREFVAGISGGGTTNYADSVKGRFTISRDNAKNTVYLQMNSLKPEDTAVYYCAVNYTVRKWWSNYTYTKLHYWGQGTQVTVSS

SEQ ID NO: 16759 - protein, 118 aa, Artificial Sequence
  Chemically Synthesized
QVQLQESGGGLVQAGGSLRLSCAASGNIFVDDRMGWYRQAPGKERELVASISYGTSTYYADSVKGRFTISRDNAKNTVYLQMNSLKPEDTAVYYCAATYRKSPALAYWGQGTQVTVSS

SEQ ID NO: 16760 - protein, 121 aa, Artificial Sequence
  Chemically Synthesized
QVQLQESGGGLVQAGGSLRLSCAASGTISDDSYMGWYRQAPGKEREFVAAIGDGSSTNYADSVKGRFTISRDNAKNTVYLQMNSLKPEDTAVYYCAAYVHFKLTPEYSMYWGQGTQVTVSS

SEQ ID NO: 16761 - protein, 122 aa, Artificial Sequence
  Chemically Synthesized
QVQLQESGGGLVQAGGSLRLSCAASGNISQQRVMGWYRQAPGKERELVAGINVGGSTNYADSVKGRFTISRDNAKNTVYLQMNSLKPEDTAVYYCAVQDLGDDGPGLVHTYWGQGTQVTVSS

SEQ ID NO: 16762 - protein, 121 aa, Artificial Sequence
  Chemically Synthesized
QVQLQESGGGLVQAGGSLRLSCAASGTISYAYMGWYRQAPGKERELVATISIGASTNYADSVKGRFTISRDNAKNTVYLQMNSLKPEDTAVYYCAVDYGGRDYQEEPYAYWGQGTQVTVSS

SEQ ID NO: 16763 - protein, 118 aa, Artificial Sequence
  Chemically Synthesized
QVQLQESGGGLVQAGGSLRLSCAASGTISTTAYMGWYRQAPGKEREFVAAIDFGANTNYADSVKGRFTISRDNAKNTVYLQMNSLKPEDTAVYYCAAVVRGRQGHTYWGQGTQVTVSS

SEQ ID NO: 16764 - protein, 122 aa, Artificial Sequence
  Chemically Synthesized
QVQLQESGGGLVQAGGSLRLSCAASGNISDYFGMGWYRQAPGKERELVAAINTGATTNYADSVKGRFTISRDNAKNTVYLQMNSLKPEDTAVYYCAVDTLRCFAPYGPHQYWGQGTQVTVSS

SEQ ID NO: 16765 - protein, 118 aa, Artificial Sequence
  Chemically Synthesized
QVQLQESGGGLVQAGGSLRLSCAASGTISRARVMGWYRQAPGKERELVATISYGGSTYYADSVKGRFTISRDNAKNTVYLQMNSLKPEDTAVYYCAAYAGPQDWFPYWGQGTQVTVSS

SEQ ID NO: 16766 - protein, 122 aa, Artificial Sequence
  Chemically Synthesized
QVQLQESGGGLVQAGGSLRLSCAASGYISGDTAMGWYRQAPGKEREFVASIGQGGTTNYADSVKGRFTISRDNAKNTVYLQMNSLKPEDTAVYYCAALYTTGGYYGDDYQYWGQGTQVTVSS

SEQ ID NO: 16767 - protein, 112 aa, Artificial Sequence
  Chemically Synthesized
QVQLQESGGGLVQAGGSLRLSCAASGTISFWAAMGWYRQAPGKEREFVASIDSGAITYYADSVKGRFTISRDNAKNTVYLQMNSLKPEDTAVYYCAVGVGYWGQGTQVTVSS

SEQ ID NO: 16768 - protein, 118 aa, Artificial Sequence
  Chemically Synthesized
QVQLQESGGGLVQAGGSLRLSCAASGTISPYRVMGWYRQAPGKERELVAGIGYGASTNYADSVKGRFTISRDNAKNTVYLQMNSLKPEDTAVYYCAVVGYVLDSFPYWGQGTQVTVSS

SEQ ID NO: 16769 - protein, 118 aa, Artificial Sequence
  Chemically Synthesized
QVQLQESGGGLVQAGGSLRLSCAASGSIFLARYMGWYRQAPGKEREFVASISIGASTYYADSVKGRFTISRDNAKNTVYLQMNSLKPEDTAVYYCAVYDRKNFNLAYWGQGTQVTVSS

SEQ ID NO: 16770 - protein, 117 aa, Artificial Sequence
  Chemically Synthesized
QVQLQESGGGLVQAGGSLRLSCAASGNIFTYQDMGWYRQAPGKEREFVATITTGAITYYADSVKGRFTISRDNAKNTVYLQMNSLKPEDTAVYYCALNTTVLKTIYWGQGTQVTVSS

SEQ ID NO: 16771 - protein, 126 aa, Artificial Sequence
  Chemically Synthesized
QVQLQESGGGLVQAGGSLRLSCAASGTIFPYYVMGWYRQAPGKERELVATIGNGTITNYADSVKGRFTISRDNAKNTVYLQMNSLKPEDTAVYYCAAYGGHPKYYEWGAPYYFLYWGQGTQVTVSS

SEQ ID NO: 16772 - protein, 122 aa, Artificial Sequence
  Chemically Synthesized
QVQLQESGGGLVQAGGSLRLSCAASGSISYSRYMGWYRQAPGKERELVAGIGPGAITNYADSVKGRFTISRDNAKNTVYLQMNSLKPEDTAVYYCAARDRRTTYYGVRHYYWGQGTQVTVSS

SEQ ID NO: 16773 - protein, 126 aa, Artificial Sequence
  Chemically Synthesized
QVQLQESGGGLVQAGGSLRLSCAASGTISGHSLMGWYRQAPGKERELVATIDYGGNTNYADSVKGRFTISRDNAKNTVYLQMNSLKPEDTAVYYCAAYAYYWYVYGNKGVSPYYYWGQGTQVTVSS

SEQ ID NO: 16774 - protein, 118 aa, Artificial Sequence
  Chemically Synthesized
QVQLQESGGGLVQAGGSLRLSCAASGYISDTSTMGWYRQAPGKERELVAGIGLGASTNYADSVKGRFTISRDNAKNTVYLQMNSLKPEDTAVYYCAARRSGPLYYPYWGQGTQVTVSS

SEQ ID NO: 16775 - protein, 123 aa, Artificial Sequence
  Chemically Synthesized
QVQLQESGGGLVQAGGSLRLSCAASGSIFPDQDMGWYRQAPGKERELVAGIATGSITYYADSVKGRFTISRDNAKNTVYLQMNSLKPEDTAVYYCAVEYGTAQSYLYYYFYYWGQGTQVTVSS

SEQ ID NO: 16776 - protein, 118 aa, Artificial Sequence
  Chemically Synthesized
QVQLQESGGGLVQAGGSLRLSCAASGSIFYYDDMGWYRQAPGKERELVAGIAIGANTYYADSVKGRFTISRDNAKNTVYLQMNSLKPEDTAVYYCAVVWHALHGHSYWGQGTQVTVSS

SEQ ID NO: 16777 - protein, 118 aa, Artificial Sequence
  Chemically Synthesized
QVQLQESGGGLVQAGGSLRLSCAASGNISAYNIMGWYRQAPGKERELVAGINNGSNTYYADSVKGRFTISRDNAKNTVYLQMNSLKPEDTAVYYCAVWPKRDGPYDYWGQGTQVTVSS

SEQ ID NO: 16778 - protein, 122 aa, Artificial Sequence
  Chemically Synthesized
QVQLQESGGGLVQAGGSLRLSCAASGTIFRPPVMGWYRQAPGKERELVAAIARGGNTNYADSVKGRFTISRDNAKNTVYLQMNSLKPEDTAVYYCAAVNLWSGAYGAAFWYWGQGTQVTVSS

SEQ ID NO: 16779 - protein, 118 aa, Artificial Sequence
  Chemically Synthesized
QVQLQESGGGLVQAGGSLRLSCAASGSISRRVYMGWYRQAPGKEREFVAAISYGGNTYYADSVKGRFTISRDNAKNTVYLQMNSLKPEDTAVYYCAVDSYRRDRFVYWGQGTQVTVSS

SEQ ID NO: 16780 - protein, 122 aa, Artificial Sequence
  Chemically Synthesized
QVQLQESGGGLVQAGGSLRLSCAASGYISHGYRMGWYRQAPGKERELVATITYGSTTNYADSVKGRFTISRDNAKNTVYLQMNSLKPEDTAVYYCAVELSHTRSKTLYLTYWGQGTQVTVSS

SEQ ID NO: 16781 - protein, 122 aa, Artificial Sequence
  Chemically Synthesized
QVQLQESGGGLVQAGGSLRLSCAASGTIFYSHSMGWYRQAPGKERELVAAIDYGGITNYADSVKGRFTISRDNAKNTVYLQMNSLKPEDTAVYYCAATDAYAKSFQFDHGYWGQGTQVTVSS

SEQ ID NO: 16782 - protein, 118 aa, Artificial Sequence
  Chemically Synthesized
QVQLQESGGGLVQAGGSLRLSCAASGSISTYLRMGWYRQAPGKERELVAGITDGGTTNYADSVKGRFTISRDNAKNTVYLQMNSLKPEDTAVYYCAAYILSILPHDYWGQGTQVTVSS

SEQ ID NO: 16783 - protein, 118 aa, Artificial Sequence
  Chemically Synthesized
QVQLQESGGGLVQAGGSLRLSCAASGTIFADVAMGWYRQAPGKERELVATIDYGGNTNYADSVKGRFTISRDNAKNTVYLQMNSLKPEDTAVYYCAVYYIDDEYLPYWGQGTQVTVSS

SEQ ID NO: 16784 - protein, 126 aa, Artificial Sequence
  Chemically Synthesized
QVQLQESGGGLVQAGGSLRLSCAASGSIFAAYDMGWYRQAPGKEREFVAAISWGSITYYADSVKGRFTISRDNAKNTVYLQMNSLKPEDTAVYYCAVYIWGRDGNYRVYGNIYGYWGQGTQVTVSS

SEQ ID NO: 16785 - protein, 116 aa, Artificial Sequence
  Chemically Synthesized
QVQLQESGGGLVQAGGSLRLSCAASGTIFQPYYMGWYRQAPGKEREFVAAISRGATTYYADSVKGRFTISRDNAKNTVYLQMNSLKPEDTAVYYCAVWGGRRHRYWGQGTQVTVSS

SEQ ID NO: 16786 - protein, 118 aa, Artificial Sequence
  Chemically Synthesized
QVQLQESGGGLVQAGGSLRLSCAASGYISRGSVMGWYRQAPGKERELVAAIATGGTTYYADSVKGRFTISRDNAKNTVYLQMNSLKPEDTAVYYCAAYYLRDRDHHYWGQGTQVTVSS

SEQ ID NO: 16787 - protein, 118 aa, Artificial Sequence
  Chemically Synthesized
QVQLQESGGGLVQAGGSLRLSCAASGTISKAVRMGWYRQAPGKERELVATINDGGNTNYADSVKGRFTISRDNAKNTVYLQMNSLKPEDTAVYYCAVLYASVPPLLYWGQGTQVTVSS

SEQ ID NO: 16788 - protein, 122 aa, Artificial Sequence
  Chemically Synthesized
QVQLQESGGGLVQAGGSLRLSCAASGTISHPNVMGWYRQAPGKERELVASIGFGASTYYADSVKGRFTISRDNAKNTVYLQMNSLKPEDTAVYYCAVYDDNYSSRVYDLTYWGQGTQVTVSS

SEQ ID NO: 16789 - protein, 118 aa, Artificial Sequence
  Chemically Synthesized
QVQLQESGGGLVQAGGSLRLSCAASGSISNREYMGWYRQAPGKERELVASISGGGITYYADSVKGRFTISRDNAKNTVYLQMNSLKPEDTAVYYCAVNGVKHTVYGYWGQGTQVTVSS

SEQ ID NO: 16790 - protein, 117 aa, Artificial Sequence
  Chemically Synthesized
QVQLQESGGGLVQAGGSLRLSCAASGNISALWGMGWYRQAPGKEREFVAVLVTVLLPYADSVKGRFTISRDNAKNTVYLQMNSLKPEDTAVYYCAVYDVRYGALDYWGQGTQVTVSS

SEQ ID NO: 16791 - protein, 121 aa, Artificial Sequence
  Chemically Synthesized
QVQLQESGGGLVQAGGSLRLSCAASGTIFKLLMGWYRQAPGKEREFVAGIAIGSSTNYADSVKGRFTISRDNAKNTVYLQMNSLKPEDTAVYYCAVHLIVYSEVRLTHVYWGQGTQVTVSS

SEQ ID NO: 16792 - protein, 118 aa, Artificial Sequence
  Chemically Synthesized
QVQLQESGGGLVQAGGSLRLSCAASGTISYRGGMGWYRQAPGKEREFVATISYGTNTNYADSVKGRFTISRDNAKNTVYLQMNSLKPEDTAVYYCAVAGWRQNKHDYWGQGTQVTVSS

SEQ ID NO: 16793 - protein, 109 aa, Artificial Sequence
  Chemically Synthesized
QVQLQESGGGLVQAGGSLRLSCAASGTISWYSIMGWYRQAPGKEREFVATLIRVLVPYADSVKGRFTISRDNAKNTVYLQMNSLKPEDTAVYYCAAIYWGQGTQVTVSS

SEQ ID NO: 16794 - protein, 118 aa, Artificial Sequence
  Chemically Synthesized
QVQLQESGGGLVQAGGSLRLSCAASGNISAYEFMGWYRQAPGKEREFVAAISLGASTYYADSVKGRFTISRDNAKNTVYLQMNSLKPEDTAVYYCAVFSYRYVKLYYWGQGTQVTVSS

SEQ ID NO: 16795 - protein, 118 aa, Artificial Sequence
  Chemically Synthesized
QVQLQESGGGLVQAGGSLRLSCAASGTIFRYATMGWYRQAPGKEREFVASIDFGSNTNYADSVKGRFTISRDNAKNTVYLQMNSLKPEDTAVYYCAVTYQSYYEHAYWGQGTQVTVSS

SEQ ID NO: 16796 - protein, 118 aa, Artificial Sequence
  Chemically Synthesized
QVQLQESGGGLVQAGGSLRLSCAASGYIFGAYEMGWYRQAPGKEREFVAGIDYGATTNYADSVKGRFTISRDNAKNTVYLQMNSLKPEDTAVYYCAVYRPFRNKYDYWGQGTQVTVSS

SEQ ID NO: 16797 - protein, 124 aa, Artificial Sequence
  Chemically Synthesized
QVQLQESGGGLVQAGGSLRLSCAASGNIFDEYIMGWYRQAPGKEREFVAGINHGGTQYADSVKGRFTISRDNAKNTVYLQMNSLKPEDTAVYYCAVLTTNWKLGTKTVKTNIYWGQGTQVTVSS

SEQ ID NO: 16798 - protein, 122 aa, Artificial Sequence
  Chemically Synthesized
QVQLQESGGGLVQAGGSLRLSCAASGNISYGYDMGWYRQAPGKERELVATINDGSTTNYADSVKGRFTISRDNAKNTVYLQMNSLKPEDTAVYYCAATNSDYYGVQTSHLYWGQGTQVTVSS

SEQ ID NO: 16799 - protein, 126 aa, Artificial Sequence
  Chemically Synthesized
QVQLQESGGGLVQAGGSLRLSCAASGTIFVRPHMGWYRQAPGKEREFVAGIAQGSSTYYADSVKGRFTISRDNAKNTVYLQMNSLKPEDTAVYYCAAYVATIADSFLVQDRVFDYWGQGTQVTVSS

SEQ ID NO: 16800 - protein, 117 aa, Artificial Sequence
  Chemically Synthesized
QVQLQESGGGLVQAGGSLRLSCAASGYISTSVYMGWYRQAPGKERELVAGIISVVVPYADSVKGRFTISRDNAKNTVYLQMNSLKPEDTAVYYCAVGDEYVTYFWYWGQGTQVTVSS

SEQ ID NO: 16801 - protein, 122 aa, Artificial Sequence
  Chemically Synthesized
QVQLQESGGGLVQAGGSLRLSCAASGTISTREYMGWYRQAPGKERELVAGINVGAITYYADSVKGRFTISRDNAKNTVYLQMNSLKPEDTAVYYCAVKYDRYYADYAPHYYWGQGTQVTVSS

SEQ ID NO: 16802 - protein, 118 aa, Artificial Sequence
  Chemically Synthesized
QVQLQESGGGLVQAGGSLRLSCAASGSISRTSTMGWYRQAPGKEREFVASIGYGGITNYADSVKGRFTISRDNAKNTVYLQMNSLKPEDTAVYYCAVGSQVWSAFGYWGQGTQVTVSS

SEQ ID NO: 16803 - protein, 121 aa, Artificial Sequence
  Chemically Synthesized
QVQLQESGGGLVQAGGSLRLSCAASGYISYEYNMGWYRQAPGKERELVAGIGLGGNTNYADSVKGRFTISRDNAKNTVYLQMNSLKPEDTAVYYCAVGRWWKTVTTRVIYWGQGTQVTVSS

SEQ ID NO: 16804 - protein, 126 aa, Artificial Sequence
  Chemically Synthesized
QVQLQESGGGLVQAGGSLRLSCAASGHISDRRDMGWYRQAPGKERELVASISPGTNTYYADSVKGRFTISRDNAKNTVYLQMNSLKPEDTAVYYCAAWGSDYPANPRHVYLVLNYWGQGTQVTVSS

SEQ ID NO: 16805 - protein, 126 aa, Artificial Sequence
  Chemically Synthesized
QVQLQESGGGLVQAGGSLRLSCAASGNISVERTMGWYRQAPGKERELVASISGGGITYYADSVKGRFTISRDNAKNTVYLQMNSLKPEDTAVYYCAVVKTYQKQTYGWYQGTHYYWGQGTQVTVSS

SEQ ID NO: 16806 - protein, 122 aa, Artificial Sequence
  Chemically Synthesized
QVQLQESGGGLVQAGGSLRLSCAASGNIFDQAWMGWYRQAPGKEREFVAAIGYGSSTNYADSVKGRFTISRDNAKNTVYLQMNSLKPEDTAVYYCAALNTYDQYDWGWHYYWGQGTQVTVSS

SEQ ID NO: 16807 - protein, 118 aa, Artificial Sequence
  Chemically Synthesized
QVQLQESGGGLVQAGGSLRLSCAASGYISHGPHMGWYRQAPGKERELVAAIATGAITYYADSVKGRFTISRDNAKNTVYLQMNSLKPEDTAVYYCAVNYKGGFAHYYWGQGTQVTVSS

SEQ ID NO: 16808 - protein, 121 aa, Artificial Sequence
  Chemically Synthesized
QVQLQESGGGLVQAGGSLRLSCAASGTISSTSMGWYRQAPGKEREFVAAIGSGGNTNYADSVKGRFTISRDNAKNTVYLQMNSLKPEDTAVYYCAAYARVDLDNDDPFWYWGQGTQVTVSS

SEQ ID NO: 16809 - protein, 117 aa, Artificial Sequence
  Chemically Synthesized
QVQLQESGGGLVQAGGSLRLSCAASGNISRRYAMGWYRQAPGKEREFVATIGWGSNTYYADSVKGRFTISRDNAKNTVYLQMNSLKPEDTAVYYCAADLHSSLRMYWGQGTQVTVSS

SEQ ID NO: 16810 - protein, 121 aa, Artificial Sequence
  Chemically Synthesized
QVQLQESGGGLVQAGGSLRLSCAASGSIFTGGVMGWYRQAPGKEREFVASINPGAKPYADSVKGRFTISRDNAKNTVYLQMNSLKPEDTAVYYCAAKREWDPVYVAEYYYWGQGTQVTVSS

SEQ ID NO: 16811 - protein, 115 aa, Artificial Sequence
  Chemically Synthesized
QVQLQESGGGLVQAGGSLRLSCAASGNISTTVGMGWYRQAPGKERELTVVLPYADSVKGRFTISRDNAKNTVYLQMNSLKPEDTAVYYCAVDFEYSLGSTVLMYWGQGTQVTVSS

SEQ ID NO: 16812 - protein, 122 aa, Artificial Sequence
  Chemically Synthesized
QVQLQESGGGLVQAGGSLRLSCAASGNIFYGYSMGWYRQAPGKEREFVASIGNGGNTYYADSVKGRFTISRDNAKNTVYLQMNSLKPEDTAVYYCAVAHVEGNYRDDIYRYWGQGTQVTVSS

SEQ ID NO: 16813 - protein, 118 aa, Artificial Sequence
  Chemically Synthesized
QVQLQESGGGLVQAGGSLRLSCAASGYISRSYIMGWYRQAPGKERELVAGIGVGTITYYADSVKGRFTISRDNAKNTVYLQMNSLKPEDTAVYYCAARRARDQPHFYWGQGTQVTVSS

SEQ ID NO: 16814 - protein, 117 aa, Artificial Sequence
  Chemically Synthesized
QVQLQESGGGLVQAGGSLRLSCAASGYIFYSYDMGWYRQAPGKERELVASITSVLIPYADSVKGRFTISRDNAKNTVYLQMNSLKPEDTAVYYCAVRDRKPDYLDYWGQGTQVTVSS

SEQ ID NO: 16815 - protein, 118 aa, Artificial Sequence
  Chemically Synthesized
QVQLQESGGGLVQAGGSLRLSCAASGTISQWGEMGWYRQAPGKERELVAGISFGTSTNYADSVKGRFTISRDNAKNTVYLQMNSLKPEDTAVYYCAAHAQSPPTYLYWGQGTQVTVSS

SEQ ID NO: 16816 - protein, 122 aa, Artificial Sequence
  Chemically Synthesized
QVQLQESGGGLVQAGGSLRLSCAASGSIFPRTIMGWYRQAPGKERELVAAIAPGGSTNYADSVKGRFTISRDNAKNTVYLQMNSLKPEDTAVYYCAADYSRPGYRYDVHLYWGQGTQVTVSS

SEQ ID NO: 16817 - protein, 118 aa, Artificial Sequence
  Chemically Synthesized
QVQLQESGGGLVQAGGSLRLSCAASGTISESPYMGWYRQAPGKERELVATIATGTITYYADSVKGRFTISRDNAKNTVYLQMNSLKPEDTAVYYCAAPARDDYDLYYWGQGTQVTVSS

SEQ ID NO: 16818 - protein, 117 aa, Artificial Sequence
  Chemically Synthesized
QVQLQESGGGLVQAGGSLRLSCAASGNISHDRVMGWYRQAPGKERELVAAIASGSSTNYADSVKGRFTISRDNAKNTVYLQMNSLKPEDTAVYYCAVDYAYTASMYWGQGTQVTVSS

SEQ ID NO: 16819 - protein, 118 aa, Artificial Sequence
  Chemically Synthesized
QVQLQESGGGLVQAGGSLRLSCAASGSISTYPAMGWYRQAPGKERELVATIDTGGTTNYADSVKGRFTISRDNAKNTVYLQMNSLKPEDTAVYYCAVRSDHWYVHTYWGQGTQVTVSS

SEQ ID NO: 16820 - protein, 118 aa, Artificial Sequence
  Chemically Synthesized
QVQLQESGGGLVQAGGSLRLSCAASGTISGQYFMGWYRQAPGKERELVAGIDPGATTNYADSVKGRFTISRDNAKNTVYLQMNSLKPEDTAVYYCAVYFRLDNGLRYWGQGTQVTVSS

SEQ ID NO: 16821 - protein, 116 aa, Artificial Sequence
  Chemically Synthesized
QVQLQESGGGLVQAGGSLRLSCAASGNIFGYYRMGWYRQAPGKEREFVAAITNGSTTYYADSVKGRFTISRDNAKNTVYLQMNSLKPEDTAVYYCAVSDAPYHDYWGQGTQVTVSS

SEQ ID NO: 16822 - protein, 121 aa, Artificial Sequence
  Chemically Synthesized
QVQLQESGGGLVQAGGSLRLSCAASGTIFYDPQMGWYRQAPGKEREFVATIGWGSSTNYADSVKGRFTISRDNAKNTVYLQMNSLKPEDTAVYYCAVDPVLKTLTLSTIYWGQGTQVTVSS

SEQ ID NO: 16823 - protein, 121 aa, Artificial Sequence
  Chemically Synthesized
QVQLQESGGGLVQAGGSLRLSCAASGTISQYTMGWYRQAPGKERELVAAIDTGGITNYADSVKGRFTISRDNAKNTVYLQMNSLKPEDTAVYYCALSVTLTTTTTILTMYWGQGTQVTVSS

SEQ ID NO: 16824 - protein, 126 aa, Artificial Sequence
  Chemically Synthesized
QVQLQESGGGLVQAGGSLRLSCAASGYISASTRMGWYRQAPGKERELVAGIGPGTSTYYADSVKGRFTISRDNAKNTVYLQMNSLKPEDTAVYYCAVRYGVVDAGEYGIDDDHVYWGQGTQVTVSS

SEQ ID NO: 16825 - protein, 118 aa, Artificial Sequence
  Chemically Synthesized
QVQLQESGGGLVQAGGSLRLSCAASGTIFRLYIMGWYRQAPGKERELVAAINAGSNTYYADSVKGRFTISRDNAKNTVYLQMNSLKPEDTAVYYCAAEAFRYLSHYYWGQGTQVTVSS

SEQ ID NO: 16826 - protein, 126 aa, Artificial Sequence
  Chemically Synthesized
QVQLQESGGGLVQAGGSLRLSCAASGSIFPTFYMGWYRQAPGKEREFVASIGDGGITYYADSVKGRFTISRDNAKNTVYLQMNSLKPEDTAVYYCAAGYTSLDAHPWYRTRAYFYWGQGTQVTVSS

SEQ ID NO: 16827 - protein, 119 aa, Artificial Sequence
  Chemically Synthesized
QVQLQESGGGLVQAGGSLRLSCAASGYISPWEYMGWYRQAPGKEREFVATIAAGAITYYADSVKGRFTISRDNAKNTVYLQMNSLKPEDTAVYYCAVYLIGPAIYLGYWGQGTQVTVSS

SEQ ID NO: 16828 - protein, 118 aa, Artificial Sequence
  Chemically Synthesized
QVQLQESGGGLVQAGGSLRLSCAASGSISSYGTMGWYRQAPGKEREFVAAIGSGGITYYADSVKGRFTISRDNAKNTVYLQMNSLKPEDTAVYYCAADTDYDAPYPYWGQGTQVTVSS

SEQ ID NO: 16829 - protein, 123 aa, Artificial Sequence
  Chemically Synthesized
QVQLQESGGGLVQAGGSLRLSCAASGSISSGGIWMGWYRQAPGKEREFVATISYGANTNYADSVKGRFTISRDNAKNTVYLQMNSLKPEDTAVYYCAAGQDTYLSYESRHFYWGQGTQVTVSS

SEQ ID NO: 16830 - protein, 118 aa, Artificial Sequence
  Chemically Synthesized
QVQLQESGGGLVQAGGSLRLSCAASGYISITLRMGWYRQAPGKERELVAGIAHGSITYYADSVKGRFTISRDNAKNTVYLQMNSLKPEDTAVYYCAVYGVLYYDLWYWGQGTQVTVSS

SEQ ID NO: 16831 - protein, 118 aa, Artificial Sequence
  Chemically Synthesized
QVQLQESGGGLVQAGGSLRLSCAASGSISDYNRMGWYRQAPGKEREFVAAISKGGITYYADSVKGRFTISRDNAKNTVYLQMNSLKPEDTAVYYCAVASVRGIWLDYWGQGTQVTVSS

SEQ ID NO: 16832 - protein, 126 aa, Artificial Sequence
  Chemically Synthesized
QVQLQESGGGLVQAGGSLRLSCAASGSIFAYPSMGWYRQAPGKERELVAAIDNGATTYYADSVKGRFTISRDNAKNTVYLQMNSLKPEDTAVYYCAAVTGDKGQGLHPYQYGLQYWGQGTQVTVSS

SEQ ID NO: 16833 - protein, 118 aa, Artificial Sequence
  Chemically Synthesized
QVQLQESGGGLVQAGGSLRLSCAASGSIFRLRYMGWYRQAPGKERELVAAINLGAITYYADSVKGRFTISRDNAKNTVYLQMNSLKPEDTAVYYCAVLRRNQGYYWYWGQGTQVTVSS

SEQ ID NO: 16834 - protein, 118 aa, Artificial Sequence
  Chemically Synthesized
QVQLQESGGGLVQAGGSLRLSCAASGYIFRIGVMGWYRQAPGKERELVATIGYGGNTYYADSVKGRFTISRDNAKNTVYLQMNSLKPEDTAVYYCAVFRKTFLDHYYWGQGTQVTVSS

SEQ ID NO: 16835 - protein, 115 aa, Artificial Sequence
  Chemically Synthesized
QVQLQESGGGLVQAGGSLRLSCAASGNIFLNDNMGWYRQAPGKEREFVATIVYADSVKGRFTISRDNAKNTVYLQMNSLKPEDTAVYYCAVYKNGTSYVDSYIYWGQGTQVTVSS

SEQ ID NO: 16836 - protein, 118 aa, Artificial Sequence
  Chemically Synthesized
QVQLQESGGGLVQAGGSLRLSCAASGYISWYTVMGWYRQAPGKERELVAAIGYGGNTYYADSVKGRFTISRDNAKNTVYLQMNSLKPEDTAVYYCAVTYRYLYDYHYWGQGTQVTVSS

SEQ ID NO: 16837 - protein, 122 aa, Artificial Sequence
  Chemically Synthesized
QVQLQESGGGLVQAGGSLRLSCAASGSISQITTMGWYRQAPGKERELVAGISSGGTTYYADSVKGRFTISRDNAKNTVYLQMNSLKPEDTAVYYCAVEFYDSYRRLSNFYYWGQGTQVTVSS

SEQ ID NO: 16838 - protein, 121 aa, Artificial Sequence
  Chemically Synthesized
QVQLQESGGGLVQAGGSLRLSCAASGYISLRGDMGWYRQAPGKERELVAGINSGTNTNYADSVKGRFTISRDNAKNTVYLQMNSLKPEDTAVYYCAVTLTRLTTFTSRFYWGQGTQVTVSS

SEQ ID NO: 16839 - protein, 122 aa, Artificial Sequence
  Chemically Synthesized
QVQLQESGGGLVQAGGSLRLSCAASGNIFLGYAMGWYRQAPGKERELVATIDLGGSTNYADSVKGRFTISRDNAKNTVYLQMNSLKPEDTAVYYCAADYALTGYYRLTYYYWGQGTQVTVSS

SEQ ID NO: 16840 - protein, 126 aa, Artificial Sequence
  Chemically Synthesized
QVQLQESGGGLVQAGGSLRLSCAASGNIFYSRWMGWYRQAPGKEREFVATITAGATTYYADSVKGRFTISRDNAKNTVYLQMNSLKPEDTAVYYCAADGQVDGGDGTPYFYEYRYWGQGTQVTVSS

SEQ ID NO: 16841 - protein, 122 aa, Artificial Sequence
  Chemically Synthesized
QVQLQESGGGLVQAGGSLRLSCAASGTIFGSFHMGWYRQAPGKERELVASIDDGSNTYYADSVKGRFTISRDNAKNTVYLQMNSLKPEDTAVYYCAADVYQFYSVLTPLTYWGQGTQVTVSS

SEQ ID NO: 16842 - protein, 121 aa, Artificial Sequence
  Chemically Synthesized
QVQLQESGGGLVQAGGSLRLSCAASGSIFNPESMGWYRQAPGKERELVASINSVVVPYADSVKGRFTISRDNAKNTVYLQMNSLKPEDTAVYYCAVASEKYEDPYYYHRYWGQGTQVTVSS

SEQ ID NO: 16843 - protein, 118 aa, Artificial Sequence
  Chemically Synthesized
QVQLQESGGGLVQAGGSLRLSCAASGTIFYSYTMGWYRQAPGKERELVASINPGSNTYYADSVKGRFTISRDNAKNTVYLQMNSLKPEDTAVYYCAATHARRDNLGYWGQGTQVTVSS

SEQ ID NO: 16844 - protein, 122 aa, Artificial Sequence
  Chemically Synthesized
QVQLQESGGGLVQAGGSLRLSCAASGTIFGATPMGWYRQAPGKERELVAAIGSGATNQYADSVKGRFTISRDNAKNTVYLQMNSLKPEDTAVYYCAAPGDLSTVTDGYYDYWGQGTQVTVSS

SEQ ID NO: 16845 - protein, 118 aa, Artificial Sequence
  Chemically Synthesized
QVQLQESGGGLVQAGGSLRLSCAASGSISGDRVMGWYRQAPGKERELVAGIDYGGTTYYADSVKGRFTISRDNAKNTVYLQMNSLKPEDTAVYYCAVGYDIVRAFYYWGQGTQVTVSS

SEQ ID NO: 16846 - protein, 111 aa, Artificial Sequence
  Chemically Synthesized
QVQLQESGGGLVQAGGSLRLSCAASGTIFDAGGMGWYRQAPGKEREFVAILVSVVLPYADSVKGRFTISRDNAKNTVYLQMNSLKPEDTAVYYCAALLLYWGQGTQVTVSS

SEQ ID NO: 16847 - protein, 122 aa, Artificial Sequence
  Chemically Synthesized
QVQLQESGGGLVQAGGSLRLSCAASGYIFYDVLMGWYRQAPGKERELVASIDYGANTYYADSVKGRFTISRDNAKNTVYLQMNSLKPEDTAVYYCAVANGYIYYRGTYLAYWGQGTQVTVSS

SEQ ID NO: 16848 - protein, 122 aa, Artificial Sequence
  Chemically Synthesized
QVQLQESGGGLVQAGGSLRLSCAASGSIFDYIYMGWYRQAPGKERELVAAISYGAITYYADSVKGRFTISRDNAKNTVYLQMNSLKPEDTAVYYCAAVYAWFGDYSDRHGYWGQGTQVTVSS

SEQ ID NO: 16849 - protein, 122 aa, Artificial Sequence
  Chemically Synthesized
QVQLQESGGGLVQAGGSLRLSCAASGTIFGGVSMGWYRQAPGKERELVATISVGTTTNYADSVKGRFTISRDNAKNTVYLQMNSLKPEDTAVYYCAVQPTDEGYRNVSHAYWGQGTQVTVSS

SEQ ID NO: 16850 - protein, 118 aa, Artificial Sequence
  Chemically Synthesized
QVQLQESGGGLVQAGGSLRLSCAASGNISSGVLMGWYRQAPGKEREFVAGIDQGGNTNYADSVKGRFTISRDNAKNTVYLQMNSLKPEDTAVYYCAAYVNVGNGHSYWGQGTQVTVSS

SEQ ID NO: 16851 - protein, 112 aa, Artificial Sequence
  Chemically Synthesized
QVQLQESGGGLVQAGGSLRLSCAASGTIFSYIGMGWYRQAPGKERELVAGISSGANTNYADSVKGRFTISRDNAKNTVYLQMNSLKPEDTAVYYCAVYHAYWGQGTQVTVSS

SEQ ID NO: 16852 - protein, 118 aa, Artificial Sequence
  Chemically Synthesized
QVQLQESGGGLVQAGGSLRLSCAASGTISRYERMGWYRQAPGKERELVASIDFGGTTNYADSVKGRFTISRDNAKNTVYLQMNSLKPEDTAVYYCAAYAYGVRKLAYWGQGTQVTVSS

SEQ ID NO: 16853 - protein, 122 aa, Artificial Sequence
  Chemically Synthesized
QVQLQESGGGLVQAGGSLRLSCAASGSISTGSRMGWYRQAPGKERELVASIDYGGITNYADSVKGRFTISRDNAKNTVYLQMNSLKPEDTAVYYCAVPWGYVYAVDYSYPYWGQGTQVTVSS

SEQ ID NO: 16854 - protein, 118 aa, Artificial Sequence
  Chemically Synthesized
QVQLQESGGGLVQAGGSLRLSCAASGYISVSYRMGWYRQAPGKEREFVAGIGDGSTTYYADSVKGRFTISRDNAKNTVYLQMNSLKPEDTAVYYCAVVYEYTLSYVYWGQGTQVTVSS

SEQ ID NO: 16855 - protein, 118 aa, Artificial Sequence
  Chemically Synthesized
QVQLQESGGGLVQAGGSLRLSCAASGTISAGNPMGWYRQAPGKERELVAGIDYGSNTNYADSVKGRFTISRDNAKNTVYLQMNSLKPEDTAVYYCAARQLTDKTHAYWGQGTQVTVSS

SEQ ID NO: 16856 - protein, 118 aa, Artificial Sequence
  Chemically Synthesized
QVQLQESGGGLVQAGGSLRLSCAASGNISTYEEMGWYRQAPGKEREFVAGIDSGGNTYYADSVKGRFTISRDNAKNTVYLQMNSLKPEDTAVYYCAVGSPTQHYFDYWGQGTQVTVSS

SEQ ID NO: 16857 - protein, 118 aa, Artificial Sequence
  Chemically Synthesized
QVQLQESGGGLVQAGGSLRLSCAASGSISTDFGMGWYRQAPGKERELVAGIANGATTYYADSVKGRFTISRDNAKNTVYLQMNSLKPEDTAVYYCAVKYIDLTVHVYWGQGTQVTVSS

SEQ ID NO: 16858 - protein, 122 aa, Artificial Sequence
  Chemically Synthesized
QVQLQESGGGLVQAGGSLRLSCAASGSISDYLPMGWYRQAPGKERELVASIGIGANTNYADSVKGRFTISRDNAKNTVYLQMNSLKPEDTAVYYCAAVWDGRIDWYLRHWYWGQGTQVTVSS

SEQ ID NO: 16859 - protein, 118 aa, Artificial Sequence
  Chemically Synthesized
QVQLQESGGGLVQAGGSLRLSCAASGNISSVRFMGWYRQAPGKEREFVAGINYGTSTYYADSVKGRFTISRDNAKNTVYLQMNSLKPEDTAVYYCAVANATYYAFVYWGQGTQVTVSS

SEQ ID NO: 16860 - protein, 118 aa, Artificial Sequence
  Chemically Synthesized
QVQLQESGGGLVQAGGSLRLSCAASGTIFVPPRMGWYRQAPGKEREFVASITGGGITNYADSVKGRFTISRDNAKNTVYLQMNSLKPEDTAVYYCAADISVDVGYGYWGQGTQVTVSS

SEQ ID NO: 16861 - protein, 118 aa, Artificial Sequence
  Chemically Synthesized
QVQLQESGGGLVQAGGSLRLSCAASGNISYQSYMGWYRQAPGKERELVAAITYGAITYYADSVKGRFTISRDNAKNTVYLQMNSLKPEDTAVYYCAAILDPYYGLIYWGQGTQVTVSS

SEQ ID NO: 16862 - protein, 118 aa, Artificial Sequence
  Chemically Synthesized
QVQLQESGGGLVQAGGSLRLSCAASGNIFYWDIMGWYRQAPGKERELVAGIDIGSTTNYADSVKGRFTISRDNAKNTVYLQMNSLKPEDTAVYYCAVTQHVTAGLGYWGQGTQVTVSS

SEQ ID NO: 16863 - protein, 118 aa, Artificial Sequence
  Chemically Synthesized
QVQLQESGGGLVQAGGSLRLSCAASGSIFLSVIMGWYRQAPGKEREFVAAINEGTITYYADSVKGRFTISRDNAKNTVYLQMNSLKPEDTAVYYCAVDDYYQALHPYWGQGTQVTVSS

SEQ ID NO: 16864 - protein, 121 aa, Artificial Sequence
  Chemically Synthesized
QVQLQESGGGLVQAGGSLRLSCAASGSIFTAGYMGWYRQAPGKEREFAAIAGGGNTYYADSVKGRFTISRDNAKNTVYLQMNSLKPEDTAVYYCAVDDADVRYRYGFLGYWGQGTQVTVSS

SEQ ID NO: 16865 - protein, 126 aa, Artificial Sequence
  Chemically Synthesized
QVQLQESGGGLVQAGGSLRLSCAASGTIFDYWYMGWYRQAPGKERELVATINWGASTYYADSVKGRFTISRDNAKNTVYLQMNSLKPEDTAVYYCAADTGYQPRWYLGRSWGHYYWGQGTQVTVSS

SEQ ID NO: 16866 - protein, 117 aa, Artificial Sequence
  Chemically Synthesized
QVQLQESGGGLVQAGGSLRLSCAASGSIFAPSDMGWYRQAPGKERELVASISYGGTTNYADSVKGRFTISRDNAKNTVYLQMNSLKPEDTAVYYCAVTDEVGLVIYWGQGTQVTVSS

SEQ ID NO: 16867 - protein, 118 aa, Artificial Sequence
  Chemically Synthesized
QVQLQESGGGLVQAGGSLRLSCAASGNIFAREVMGWYRQAPGKERELVAAINRGSSTYYADSVKGRFTISRDNAKNTVYLQMNSLKPEDTAVYYCAVSRRWSYFHWYWGQGTQVTVSS

SEQ ID NO: 16868 - protein, 125 aa, Artificial Sequence
  Chemically Synthesized
QVQLQESGGGLVQAGGSLRLSCAASGSISVPPYMGWYRQAPGKERELVATIGPGATTNYADSVKGRFTISRDNAKNTVYLQMNSLKPEDTAVYYCAAYAGVYFYWYYDAFDHVYWGQGTQVTVSS

SEQ ID NO: 16869 - protein, 118 aa, Artificial Sequence
  Chemically Synthesized
QVQLQESGGGLVQAGGSLRLSCAASGSIFKSTFMGWYRQAPGKEREFVATIDYGGNTNYADSVKGRFTISRDNAKNTVYLQMNSLKPEDTAVYYCAALDTGDYGFYYWGQGTQVTVSS

SEQ ID NO: 16870 - protein, 126 aa, Artificial Sequence
  Chemically Synthesized
QVQLQESGGGLVQAGGSLRLSCAASGTISYEIFMGWYRQAPGKERELVASIATGTNTNYADSVKGRFTISRDNAKNTVYLQMNSLKPEDTAVYYCAAGGLRLRQVYYVTAIDYDYWGQGTQVTVSS

SEQ ID NO: 16871 - protein, 116 aa, Artificial Sequence
  Chemically Synthesized
QVQLQESGGGLVQAGGSLRLSCAASGNISYRWQMGWYRQAPGKEREFVATIDSVVLPYADSVKGRFTISRDNAKNTVYLQMNSLKPEDTAVYYCAAYIQNSVTMYWGQGTQVTVSS

SEQ ID NO: 16872 - protein, 117 aa, Artificial Sequence
  Chemically Synthesized
QVQLQESGGGLVQAGGSLRLSCAASGSISTFWMGWYRQAPGKEREFVATITAGGITNYADSVKGRFTISRDNAKNTVYLQMNSLKPEDTAVYYCAATDPASHAHEYWGQGTQVTVSS

SEQ ID NO: 16873 - protein, 118 aa, Artificial Sequence
  Chemically Synthesized
QVQLQESGGGLVQAGGSLRLSCAASGYIFDYDVMGWYRQAPGKERELVATIAEGGNTYYADSVKGRFTISRDNAKNTVYLQMNSLKPEDTAVYYCAVDWRVYGRLGYWGQGTQVTVSS

SEQ ID NO: 16874 - protein, 122 aa, Artificial Sequence
  Chemically Synthesized
QVQLQESGGGLVQAGGSLRLSCAASGTIFGWTYMGWYRQAPGKERELVASIDAGSSTNYADSVKGRFTISRDNAKNTVYLQMNSLKPEDTAVYYCAVGLFSLYYADISLAYWGQGTQVTVSS

SEQ ID NO: 16875 - protein, 118 aa, Artificial Sequence
  Chemically Synthesized
QVQLQESGGGLVQAGGSLRLSCAASGNIFREAYMGWYRQAPGKERELVAGIGKGGTTYYADSVKGRFTISRDNAKNTVYLQMNSLKPEDTAVYYCAVYYRITQALYYWGQGTQVTVSS

SEQ ID NO: 16876 - protein, 118 aa, Artificial Sequence
  Chemically Synthesized
QVQLQESGGGLVQAGGSLRLSCAASGNISRWRWMGWYRQAPGKERELVATIDAGGNTNYADSVKGRFTISRDNAKNTVYLQMNSLKPEDTAVYYCAAYHYSSDGHTYWGQGTQVTVSS

SEQ ID NO: 16877 - protein, 109 aa, Artificial Sequence
  Chemically Synthesized
QVQLQESGGGLVQAGGSLRLSCAASGSISTGGPMGWYRQAPGKEREFVAAISDGTSTNYADSVKGRFTISRDNAKNTVYLQMNSLKPEDTAVYYCAIYWGQGTQVTVSS

SEQ ID NO: 16878 - protein, 116 aa, Artificial Sequence
  Chemically Synthesized
QVQLQESGGGLVQAGGSLRLSCAASGYISGLDYMGWYRQAPGKERELVATISDGTNTYYADSVKGRFTISRDNAKNTVYLQMNSLKPEDTAVYYCAHRYYYLFSYWGQGTQVTVSS

SEQ ID NO: 16879 - protein, 122 aa, Artificial Sequence
  Chemically Synthesized
QVQLQESGGGLVQAGGSLRLSCAASGTIFLVALMGWYRQAPGKEREFVASIAQGAYYLYADSVKGRFTISRDNAKNTVYLQMNSLKPEDTAVYYCAVSTFPSDNGDSRYSYWGQGTQVTVSS

SEQ ID NO: 16880 - protein, 122 aa, Artificial Sequence
  Chemically Synthesized
QVQLQESGGGLVQAGGSLRLSCAASGSISLYVVMGWYRQAPGKEREFVAGITTGANTNYADSVKGRFTISRDNAKNTVYLQMNSLKPEDTAVYYCAVSLDYDYHYSSLLIYWGQGTQVTVSS

SEQ ID NO: 16881 - protein, 117 aa, Artificial Sequence
  Chemically Synthesized
QVQLQESGGGLVQAGGSLRLSCAASGTISDPAMGWYRQAPGKEREFVATIATGASTNYADSVKGRFTISRDNAKNTVYLQMNSLKPEDTAVYYCAAGTDYYDLHVYWGQGTQVTVSS

SEQ ID NO: 16882 - protein, 117 aa, Artificial Sequence
  Chemically Synthesized
QVQLQESGGGLVQAGGSLRLSCAASGSIFYDLMGWYRQAPGKEREFVASITEGGSTNYADSVKGRFTISRDNAKNTVYLQMNSLKPEDTAVYYCAASQPYLSGLEYWGQGTQVTVSS

SEQ ID NO: 16883 - protein, 118 aa, Artificial Sequence
  Chemically Synthesized
QVQLQESGGGLVQAGGSLRLSCAASGYISAALRMGWYRQAPGKEREFVASINQGSITNYADSVKGRFTISRDNAKNTVYLQMNSLKPEDTAVYYCAAGPSYITYHLYWGQGTQVTVSS

SEQ ID NO: 16884 - protein, 120 aa, Artificial Sequence
  Chemically Synthesized
QVQLQESGGGLVQAGGSLRLSCAASGSISSTRQMGWYRQAPGKERELVASINGGAITNYADSVKGRFTISRDNAKNTVYLQMNSLKPEDTAVYYCAVNGYGGDPYYYEYWGQGTQVTVSS

SEQ ID NO: 16885 - protein, 126 aa, Artificial Sequence
  Chemically Synthesized
QVQLQESGGGLVQAGGSLRLSCAASGSIFVTYTMGWYRQAPGKERELVATINTGATTYYADSVKGRFTISRDNAKNTVYLQMNSLKPEDTAVYYCAVIGTGRNRYRSTWSDQYIYWGQGTQVTVSS

SEQ ID NO: 16886 - protein, 117 aa, Artificial Sequence
  Chemically Synthesized
QVQLQESGGGLVQAGGSLRLSCAASGSISYRNMGWYRQAPGKEREFVAGIAGGASTNYADSVKGRFTISRDNAKNTVYLQMNSLKPEDTAVYYCAVVYVTYIPLTYWGQGTQVTVSS

SEQ ID NO: 16887 - protein, 118 aa, Artificial Sequence
  Chemically Synthesized
QVQLQESGGGLVQAGGSLRLSCAASGTISYAVHMGWYRQAPGKERELVASINRGSTTYYADSVKGRFTISRDNAKNTVYLQMNSLKPEDTAVYYCAVRDGWFIFLLYWGQGTQVTVSS

SEQ ID NO: 16888 - protein, 118 aa, Artificial Sequence
  Chemically Synthesized
QVQLQESGGGLVQAGGSLRLSCAASGTISGTWYMGWYRQAPGKEREFVASISPGSITNYADSVKGRFTISRDNAKNTVYLQMNSLKPEDTAVYYCAVYFLDDGYYRYWGQGTQVTVSS

SEQ ID NO: 16889 - protein, 126 aa, Artificial Sequence
  Chemically Synthesized
QVQLQESGGGLVQAGGSLRLSCAASGNISPYGYMGWYRQAPGKEREFVATITYGGNTNYADSVKGRFTISRDNAKNTVYLQMNSLKPEDTAVYYCAVVGSSQYWYLQSTYAYHSYWGQGTQVTVSS

SEQ ID NO: 16890 - protein, 121 aa, Artificial Sequence
  Chemically Synthesized
QVQLQESGGGLVQAGGSLRLSCAASGSIFAHRSMGWYRQAPGKERELVAAINDGGSTYYADSVKGRFTISRDNAKNTVYLQMNSLKPEDTAVYYCAAQRGIRRVTDRSIYWGQGTQVTVSS

SEQ ID NO: 16891 - protein, 125 aa, Artificial Sequence
  Chemically Synthesized
QVQLQESGGGLVQAGGSLRLSCAASGTISSGVWMGWYRQAPGKERELVASINLGTTTYYADSVKGRFTISRDNAKNTVYLQMNSLKPEDTAVYYCAVKYVDEDSTTRGLLSVIYWGQGTQVTVSS

SEQ ID NO: 16892 - protein, 126 aa, Artificial Sequence
  Chemically Synthesized
QVQLQESGGGLVQAGGSLRLSCAASGNIFRTWSMGWYRQAPGKERELVAAIDYGTITNYADSVKGRFTISRDNAKNTVYLQMNSLKPEDTAVYYCAADIDGLGGVLEDLGDSHGYWGQGTQVTVSS

SEQ ID NO: 16893 - protein, 121 aa, Artificial Sequence
  Chemically Synthesized
QVQLQESGGGLVQAGGSLRLSCAASGSISNIYVMGWYRQAPGKEREFVAAIAAGGITYYADSVKGRFTISRDNAKNTVYLQMNSLKPEDTAVYYCAATDDAKSSSSLTIYWGQGTQVTVSS

SEQ ID NO: 16894 - protein, 122 aa, Artificial Sequence
  Chemically Synthesized
QVQLQESGGGLVQAGGSLRLSCAASGNIFQSTHMGWYRQAPGKERELVATISHGGTTYYADSVKGRFTISRDNAKNTVYLQMNSLKPEDTAVYYCAAGALIRLYYQYRHAYWGQGTQVTVSS

SEQ ID NO: 16895 - protein, 126 aa, Artificial Sequence
  Chemically Synthesized
QVQLQESGGGLVQAGGSLRLSCAASGSIFIYRRMGWYRQAPGKERELVASIGPGATTNYADSVKGRFTISRDNAKNTVYLQMNSLKPEDTAVYYCAAGGGASYYDPDDGAAGFSYWGQGTQVTVSS

SEQ ID NO: 16896 - protein, 126 aa, Artificial Sequence
  Chemically Synthesized
QVQLQESGGGLVQAGGSLRLSCAASGNISLDGVMGWYRQAPGKEREFVAGIDVGGTTYYADSVKGRFTISRDNAKNTVYLQMNSLKPEDTAVYYCAAAPSGAYGWWDYYADPHDYWGQGTQVTVSS

SEQ ID NO: 16897 - protein, 113 aa, Artificial Sequence
  Chemically Synthesized
QVQLQESGGGLVQAGGSLRLSCAASGYISPGDYMGWYRQAPGKERELVAGIADGGTTYYADSVKGRFTISRDNAKNTVYLQMNSLKPEDTAVYYCAAEQLIYWGQGTQVTVSS

SEQ ID NO: 16898 - protein, 118 aa, Artificial Sequence
  Chemically Synthesized
QVQLQESGGGLVQAGGSLRLSCAASGTISRRYEMGWYRQAPGKERELVATIGDGGITYYADSVKGRFTISRDNAKNTVYLQMNSLKPEDTAVYYCAVNGFYSHGLYYWGQGTQVTVSS

SEQ ID NO: 16899 - protein, 118 aa, Artificial Sequence
  Chemically Synthesized
QVQLQESGGGLVQAGGSLRLSCAASGNISRDLTMGWYRQAPGKEREFVATINQGANTNYADSVKGRFTISRDNAKNTVYLQMNSLKPEDTAVYYCAVRSPYGYALLYWGQGTQVTVSS

SEQ ID NO: 16900 - protein, 118 aa, Artificial Sequence
  Chemically Synthesized
QVQLQESGGGLVQAGGSLRLSCAASGSIFSPDRMGWYRQAPGKERELVASIAWGGNTNYADSVKGRFTISRDNAKNTVYLQMNSLKPEDTAVYYCAVVTYYDPLLAYWGQGTQVTVSS

SEQ ID NO: 16901 - protein, 119 aa, Artificial Sequence
  Chemically Synthesized
QVQLQESGGGLVQAGGSLRLSCAASGTISDGDDMGWYRQAPGKERELVASITLGGTTNYADSVKGRFTISRDNAKNTVYLQMNSLKPEDTAVYYCAVRWARSSYTYPYWGQGTQVTVSS

SEQ ID NO: 16902 - protein, 117 aa, Artificial Sequence
  Chemically Synthesized
QVQLQESGGGLVQAGGSLRLSCAASGNISHGQDMGWYRQAPGKERELVATIADGSTTYYADSVKGRFTISRDNAKNTVYLQMNSLKPEDTAVYYCAADWGLRADHYWGQGTQVTVSS

SEQ ID NO: 16903 - protein, 122 aa, Artificial Sequence
  Chemically Synthesized
QVQLQESGGGLVQAGGSLRLSCAASGTISNGPSMGWYRQAPGKEREFVASIDPGGTTNYADSVKGRFTISRDNAKNTVYLQMNSLKPEDTAVYYCAVVGTYYQEYFTYLSYWGQGTQVTVSS

SEQ ID NO: 16904 - protein, 118 aa, Artificial Sequence
  Chemically Synthesized
QVQLQESGGGLVQAGGSLRLSCAASGYIFFYYFMGWYRQAPGKEREFVAAINQGTTTYYADSVKGRFTISRDNAKNTVYLQMNSLKPEDTAVYYCAVRYYDGVYLYYWGQGTQVTVSS

SEQ ID NO: 16905 - protein, 121 aa, Artificial Sequence
  Chemically Synthesized
QVQLQESGGGLVQAGGSLRLSCAASGSISVQQSMGWYRQAPGKERELVAAIGTGGIPYADSVKGRFTISRDNAKNTVYLQMNSLKPEDTAVYYCAVEIDDRVRYGLFHPYWGQGTQVTVSS

SEQ ID NO: 16906 - protein, 112 aa, Artificial Sequence
  Chemically Synthesized
QVQLQESGGGLVQAGGSLRLSCAASGTISRFANMGWYRQAPGKERELVAGISSGANTNYADSVKGRFTISRDNAKNTVYLQMNSLKPEDTAVYYCAVTVMYWGQGTQVTVSS

SEQ ID NO: 16907 - protein, 110 aa, Artificial Sequence
  Chemically Synthesized
QVQLQESGGGLVQAGGSLRLSCAASGTISRTTFMGWYRQAPGKEREFVAAITYGAITNYADSVKGRFTISRDNAKNTVYLQMNSLKPEDTAVYYCAVIYWGQGTQVTVSS

SEQ ID NO: 16908 - protein, 118 aa, Artificial Sequence
  Chemically Synthesized
QVQLQESGGGLVQAGGSLRLSCAASGYISDASAMGWYRQAPGKEREFVAAISDGASTNYADSVKGRFTISRDNAKNTVYLQMNSLKPEDTAVYYCAAGNFYLLGYVYWGQGTQVTVSS

SEQ ID NO: 16909 - protein, 118 aa, Artificial Sequence
  Chemically Synthesized
QVQLQESGGGLVQAGGSLRLSCAASGTIFTTKTMGWYRQAPGKERELVAAIDKGGNTNYADSVKGRFTISRDNAKNTVYLQMNSLKPEDTAVYYCAAGIRPTGRHGYWGQGTQVTVSS

SEQ ID NO: 16910 - protein, 126 aa, Artificial Sequence
  Chemically Synthesized
QVQLQESGGGLVQAGGSLRLSCAASGSISAAQEMGWYRQAPGKERELVAAITDGTSTNYADSVKGRFTISRDNAKNTVYLQMNSLKPEDTAVYYCAVIHAGYRGYGGVDSQGHYYWGQGTQVTVSS

SEQ ID NO: 16911 - protein, 121 aa, Artificial Sequence
  Chemically Synthesized
QVQLQESGGGLVQAGGSLRLSCAASGTISARSMGWYRQAPGKERELVAGITYGTSTYYADSVKGRFTISRDNAKNTVYLQMNSLKPEDTAVYYCAVDVPVYSTSYGDLYYWGQGTQVTVSS

SEQ ID NO: 16912 - protein, 122 aa, Artificial Sequence
  Chemically Synthesized
QVQLQESGGGLVQAGGSLRLSCAASGNISWDSRMGWYRQAPGKERELVASISYGGSTNYADSVKGRFTISRDNAKNTVYLQMNSLKPEDTAVYYCAVFDVSVPPYYWGHYYWGQGTQVTVSS

SEQ ID NO: 16913 - protein, 121 aa, Artificial Sequence
  Chemically Synthesized
QVQLQESGGGLVQAGGSLRLSCAASGNISYPPVMGWYRQAPGKEREFVASIGTGGTTYYADSVKGRFTISRDNAKNTVYLQMNSLKPEDTAVYYCAASSVTTTNTLTFIYWGQGTQVTVSS

SEQ ID NO: 16914 - protein, 121 aa, Artificial Sequence
  Chemically Synthesized
QVQLQESGGGLVQAGGSLRLSCAASGYISLTYYMGWYRQAPGKERELVATIAVGASTYYADSVKGRFTISRDNAKNTVYLQMNSLKPEDTAVYYCAASEVYLSQGYSGLYWGQGTQVTVSS

SEQ ID NO: 16915 - protein, 111 aa, Artificial Sequence
  Chemically Synthesized
QVQLQESGGGLVQAGGSLRLSCAASGNISLGGDMGWYRQAPGKEREFVAAIDGATTYYADSVKGRFTISRDNAKNTVYLQMNSLKPEDTAVYYCAYYFYYWGQGTQVTVSS

SEQ ID NO: 16916 - protein, 118 aa, Artificial Sequence
  Chemically Synthesized
QVQLQESGGGLVQAGGSLRLSCAASGTIFRGYYMGWYRQAPGKEREFVAAIGYGGSTYYADSVKGRFTISRDNAKNTVYLQMNSLKPEDTAVYYCAAFWQILSTNIYWGQGTQVTVSS

SEQ ID NO: 16917 - protein, 115 aa, Artificial Sequence
  Chemically Synthesized
QVQLQESGGGLVQAGGSLRLSCAASGSIFLYSYMGWYRQAPGKEREFVAGIADGTTTYYADSVKGRFTISRDNAKNTVYLQMNSLKPEDTAVYYCAADYPWSSYWGQGTQVTVSS

SEQ ID NO: 16918 - protein, 118 aa, Artificial Sequence
  Chemically Synthesized
QVQLQESGGGLVQAGGSLRLSCAASGYIFGPDVMGWYRQAPGKERELVATIDGGTITYYADSVKGRFTISRDNAKNTVYLQMNSLKPEDTAVYYCAASLVARLQHYYWGQGTQVTVSS

SEQ ID NO: 16919 - protein, 122 aa, Artificial Sequence
  Chemically Synthesized
QVQLQESGGGLVQAGGSLRLSCAASGNISIIYFMGWYRQAPGKEREFVATIAYGTSTNYADSVKGRFTISRDNAKNTVYLQMNSLKPEDTAVYYCAAYAIGYARGRADHTYWGQGTQVTVSS

SEQ ID NO: 16920 - protein, 117 aa, Artificial Sequence
  Chemically Synthesized
QVQLQESGGGLVQAGGSLRLSCAASGYISQTGYMGWYRQAPGKEREFVATINGGASTYYADSVKGRFTISRDNAKNTVYLQMNSLKPEDTAVYYCAAYARGLDDMYWGQGTQVTVSS

SEQ ID NO: 16921 - protein, 126 aa, Artificial Sequence
  Chemically Synthesized
QVQLQESGGGLVQAGGSLRLSCAASGTIFRDDYMGWYRQAPGKEREFVASIDTGGTTNYADSVKGRFTISRDNAKNTVYLQMNSLKPEDTAVYYCAAWDPFATDYDWQGYGDLYYWGQGTQVTVSS

SEQ ID NO: 16922 - protein, 125 aa, Artificial Sequence
  Chemically Synthesized
QVQLQESGGGLVQAGGSLRLSCAASGYISYLDPMGWYRQAPGKEREFVAILLTVVVPYADSVKGRFTISRDNAKNTVYLQMNSLKPEDTAVYYCAASHYLAAEDDTAGVGYLGYWGQGTQVTVSS

SEQ ID NO: 16923 - protein, 118 aa, Artificial Sequence
  Chemically Synthesized
QVQLQESGGGLVQAGGSLRLSCAASGTIFLFFAMGWYRQAPGKERELVATIGYGSTTYYADSVKGRFTISRDNAKNTVYLQMNSLKPEDTAVYYCAVTYLHGSPHRYWGQGTQVTVSS

SEQ ID NO: 16924 - protein, 122 aa, Artificial Sequence
  Chemically Synthesized
QVQLQESGGGLVQAGGSLRLSCAASGTIFYTLFMGWYRQAPGKERELVASISVGSNTNYADSVKGRFTISRDNAKNTVYLQMNSLKPEDTAVYYCAAQDWYTYRVNYAHDYWGQGTQVTVSS

SEQ ID NO: 16925 - protein, 118 aa, Artificial Sequence
  Chemically Synthesized
QVQLQESGGGLVQAGGSLRLSCAASGSISGADSMGWYRQAPGKEREFVATISYGTITNYADSVKGRFTISRDNAKNTVYLQMNSLKPEDTAVYYCAVWEDNIGGYDYWGQGTQVTVSS

SEQ ID NO: 16926 - protein, 122 aa, Artificial Sequence
  Chemically Synthesized
QVQLQESGGGLVQAGGSLRLSCAASGYISDRAVMGWYRQAPGKERELVAAITHGAITYYADSVKGRFTISRDNAKNTVYLQMNSLKPEDTAVYYCAVARVQRRSGTNKHPYWGQGTQVTVSS

SEQ ID NO: 16927 - protein, 118 aa, Artificial Sequence
  Chemically Synthesized
QVQLQESGGGLVQAGGSLRLSCAASGTISRSYDMGWYRQAPGKEREFVASIAGGSITYYADSVKGRFTISRDNAKNTVYLQMNSLKPEDTAVYYCAVHSYDGGTYTYWGQGTQVTVSS

SEQ ID NO: 16928 - protein, 126 aa, Artificial Sequence
  Chemically Synthesized
QVQLQESGGGLVQAGGSLRLSCAASGNIFRGPIMGWYRQAPGKERELVAGIDYGTSTYYADSVKGRFTISRDNAKNTVYLQMNSLKPEDTAVYYCAAYDDRHGADGDRPSKPHVYWGQGTQVTVSS

SEQ ID NO: 16929 - protein, 118 aa, Artificial Sequence
  Chemically Synthesized
QVQLQESGGGLVQAGGSLRLSCAASGTISYTLYMGWYRQAPGKERELVAGIAYGANTNYADSVKGRFTISRDNAKNTVYLQMNSLKPEDTAVYYCAATTTDLFYYEYWGQGTQVTVSS

SEQ ID NO: 16930 - protein, 122 aa, Artificial Sequence
  Chemically Synthesized
QVQLQESGGGLVQAGGSLRLSCAASGSIFILVFMGWYRQAPGKERELVATIDVGANTNYADSVKGRFTISRDNAKNTVYLQMNSLKPEDTAVYYCAADWSGYKYGSASFVYWGQGTQVTVSS

SEQ ID NO: 16931 - protein, 118 aa, Artificial Sequence
  Chemically Synthesized
QVQLQESGGGLVQAGGSLRLSCAASGYIFVGDRMGWYRQAPGKERELVASINIGGSTYYADSVKGRFTISRDNAKNTVYLQMNSLKPEDTAVYYCAAVGLPARRYGYWGQGTQVTVSS

SEQ ID NO: 16932 - protein, 115 aa, Artificial Sequence
  Chemically Synthesized
QVQLQESGGGLVQAGGSLRLSCAASGSIFFIQYMGWYRQAPGKERELVAGYGTNTNYADSVKGRFTISRDNAKNTVYLQMNSLKPEDTAVYYCAAEDPWSSLMYWGQGTQVTVSS

SEQ ID NO: 16933 - protein, 118 aa, Artificial Sequence
  Chemically Synthesized
QVQLQESGGGLVQAGGSLRLSCAASGSIFSWGLMGWYRQAPGKEREFVATIDKGGTTNYADSVKGRFTISRDNAKNTVYLQMNSLKPEDTAVYYCAAKYVDTFRLYYWGQGTQVTVSS

SEQ ID NO: 16934 - protein, 122 aa, Artificial Sequence
  Chemically Synthesized
QVQLQESGGGLVQAGGSLRLSCAASGNIFWYIAMGWYRQAPGKERELVASITYGATTNYADSVKGRFTISRDNAKNTVYLQMNSLKPEDTAVYYCAVQRYDGWTRSGHFQYWGQGTQVTVSS

SEQ ID NO: 16935 - protein, 122 aa, Artificial Sequence
  Chemically Synthesized
QVQLQESGGGLVQAGGSLRLSCAASGNISPSYVMGWYRQAPGKEREFVAGIALGTNTNYADSVKGRFTISRDNAKNTVYLQMNSLKPEDTAVYYCAAYGRDYPVVYVSHFYWGQGTQVTVSS

SEQ ID NO: 16936 - protein, 122 aa, Artificial Sequence
  Chemically Synthesized
QVQLQESGGGLVQAGGSLRLSCAASGSISRPSMGWYRQAPGKEREFVASIGYTGGITYYADSVKGRFTISRDNAKNTVYLQMNSLKPEDTAVYYCAARENYRYIYGQDLAYWGQGTQVTVSS

SEQ ID NO: 16937 - protein, 117 aa, Artificial Sequence
  Chemically Synthesized
QVQLQESGGGLVQAGGSLRLSCAASGTIFPEFDMGWYRQAPGKERELVAAIADGTNTYYADSVKGRFTISRDNAKNTVYLQMNSLKPEDTAVYYCAAGSPSTTLIYWGQGTQVTVSS

SEQ ID NO: 16938 - protein, 126 aa, Artificial Sequence
  Chemically Synthesized
QVQLQESGGGLVQAGGSLRLSCAASGSISWEYWMGWYRQAPGKEREFVAAITRGANTNYADSVKGRFTISRDNAKNTVYLQMNSLKPEDTAVYYCAVDYDGTYYTSWTPKWGYYYWGQGTQVTVSS

SEQ ID NO: 16939 - protein, 126 aa, Artificial Sequence
  Chemically Synthesized
QVQLQESGGGLVQAGGSLRLSCAASGTIFDAYYMGWYRQAPGKEREFVATIAAGGTTNYADSVKGRFTISRDNAKNTVYLQMNSLKPEDTAVYYCAVGGQSNLYHRGWQQVYHAYWGQGTQVTVSS

SEQ ID NO: 16940 - protein, 122 aa, Artificial Sequence
  Chemically Synthesized
QVQLQESGGGLVQAGGSLRLSCAASGYIFTLGGMGWYRQAPGKEREFVAAIAPGATTNYADSVKGRFTISRDNAKNTVYLQMNSLKPEDTAVYYCAANLPDPYYNSDAHDYWGQGTQVTVSS

SEQ ID NO: 16941 - protein, 121 aa, Artificial Sequence
  Chemically Synthesized
QVQLQESGGGLVQAGGSLRLSCAASGYIFPYIDMGWYRQAPGKERELVASITDGTITYYADSVKGRFTISRDNAKNTVYLQMNSLKPEDTAVYYCAAPLSRPIWDGNPHYWGQGTQVTVSS

SEQ ID NO: 16942 - protein, 118 aa, Artificial Sequence
  Chemically Synthesized
QVQLQESGGGLVQAGGSLRLSCAASGNIFSDDYMGWYRQAPGKEREFVAGIDDGGITNYADSVKGRFTISRDNAKNTVYLQMNSLKPEDTAVYYCAAVYRTKHYFYYWGQGTQVTVSS

SEQ ID NO: 16943 - protein, 118 aa, Artificial Sequence
  Chemically Synthesized
QVQLQESGGGLVQAGGSLRLSCAASGNIFPPGGMGWYRQAPGKEREFVATITWGSITNYADSVKGRFTISRDNAKNTVYLQMNSLKPEDTAVYYCAAGGIGEYDHRYWGQGTQVTVSS

SEQ ID NO: 16944 - protein, 122 aa, Artificial Sequence
  Chemically Synthesized
QVQLQESGGGLVQAGGSLRLSCAASGTISRYYVMGWYRQAPGKERELVATIGDGATTYYADSVKGRFTISRDNAKNTVYLQMNSLKPEDTAVYYCAVAQGVYQFHDLQHSYWGQGTQVTVSS

SEQ ID NO: 16945 - protein, 122 aa, Artificial Sequence
  Chemically Synthesized
QVQLQESGGGLVQAGGSLRLSCAASGSISVDRRMGWYRQAPGKEREFVAGISAGAITYYADSVKGRFTISRDNAKNTVYLQMNSLKPEDTAVYYCAVGAKTGYDYYWYLYYWGQGTQVTVSS

SEQ ID NO: 16946 - protein, 121 aa, Artificial Sequence
  Chemically Synthesized
QVQLQESGGGLVQAGGSLRLSCAASGTISNYWDMGWYRQAPGKERELVAGIAEGTTTYYADSVKGRFTISRDNAKNTVYLQMNSLKPEDTAVYYCAVSRIDYRPWFPFDYWGQGTQVTVSS

SEQ ID NO: 16947 - protein, 119 aa, Artificial Sequence
  Chemically Synthesized
QVQLQESGGGLVQAGGSLRLSCAASGTISRAGAMGWYRQAPGKERELVATIDGGGNTYYADSVKGRFTISRDNAKNTVYLQMNSLKPEDTAVYYCAANVYAYFAHFGYWGQGTQVTVSS

SEQ ID NO: 16948 - protein, 121 aa, Artificial Sequence
  Chemically Synthesized
QVQLQESGGGLVQAGGSLRLSCAASGTISDRFWMGWYRQAPGKERELVAAISLGGITYYADSVKGRFTISRDNAKNTVYLQMNSLKPEDTAVYYCAVDRAATSQTHDYYYWGQGTQVTVSS

SEQ ID NO: 16949 - protein, 121 aa, Artificial Sequence
  Chemically Synthesized
QVQLQESGGGLVQAGGSLRLSCAASGYISARGPMGWYRQAPGKERELVAGISPGGNTNYADSVKGRFTISRDNAKNTVYLQMNSLKPEDTAVYYCAAPNYYDVGEDLLLYWGQGTQVTVSS

SEQ ID NO: 16950 - protein, 118 aa, Artificial Sequence
  Chemically Synthesized
QVQLQESGGGLVQAGGSLRLSCAASGNIFYSDDMGWYRQAPGKERELVATIAVGAITYYADSVKGRFTISRDNAKNTVYLQMNSLKPEDTAVYYCAADYDAGPLHQYWGQGTQVTVSS

SEQ ID NO: 16951 - protein, 122 aa, Artificial Sequence
  Chemically Synthesized
QVQLQESGGGLVQAGGSLRLSCAASGSISNVDLMGWYRQAPGKERELVAAIASGANTYYADSVKGRFTISRDNAKNTVYLQMNSLKPEDTAVYYCAVGSDDVTPRAYQYYYWGQGTQVTVSS

SEQ ID NO: 16952 - protein, 122 aa, Artificial Sequence
  Chemically Synthesized
QVQLQESGGGLVQAGGSLRLSCAASGNISKGLVMGWYRQAPGKEREFVAAISIGGNTNYADSVKGRFTISRDNAKNTVYLQMNSLKPEDTAVYYCAVYPTDQYVDGYALLYWGQGTQVTVSS

SEQ ID NO: 16953 - protein, 126 aa, Artificial Sequence
  Chemically Synthesized
QVQLQESGGGLVQAGGSLRLSCAASGTISSRAYMGWYRQAPGKERELVAAISGGTTTYYADSVKGRFTISRDNAKNTVYLQMNSLKPEDTAVYYCAVVYPYTLYDPQDADSLHGYWGQGTQVTVSS

SEQ ID NO: 16954 - protein, 122 aa, Artificial Sequence
  Chemically Synthesized
QVQLQESGGGLVQAGGSLRLSCAASGSISGGISMGWYRQAPGKEREFVAAIAAGGITYYADSVKGRFTISRDNAKNTVYLQMNSLKPEDTAVYYCAAIDPYGLAPGSVLDYWGQGTQVTVSS

SEQ ID NO: 16955 - protein, 116 aa, Artificial Sequence
  Chemically Synthesized
QVQLQESGGGLVQAGGSLRLSCAASGNILFRTMGWYRQAPGKEREFVAGISFGASTNYADSVKGRFTISRDNAKNTVYLQMNSLKPEDTAVYYCAVSTGRVLFLYWGQGTQVTVSS

SEQ ID NO: 16956 - protein, 116 aa, Artificial Sequence
  Chemically Synthesized
QVQLQESGGGLVQAGGSLRLSCAASGNIFAIYAMGWYRQAPGKEREFVAAIVTVLLPYADSVKGRFTISRDNAKNTVYLQMNSLKPEDTAVYYCAVYGDVRLFGYWGQGTQVTVSS

SEQ ID NO: 16957 - protein, 122 aa, Artificial Sequence
  Chemically Synthesized
QVQLQESGGGLVQAGGSLRLSCAASGTIFTYDTMGWYRQAPGKEREFVASIASGATTNYADSVKGRFTISRDNAKNTVYLQMNSLKPEDTAVYYCAASRDRDYRFDYYHPYWGQGTQVTVSS

SEQ ID NO: 16958 - protein, 118 aa, Artificial Sequence
  Chemically Synthesized
QVQLQESGGGLVQAGGSLRLSCAASGTIFAIYFMGWYRQAPGKERELVAAITYGSNTYYADSVKGRFTISRDNAKNTVYLQMNSLKPEDTAVYYCAAAKRYALRYAYWGQGTQVTVSS

SEQ ID NO: 16959 - protein, 117 aa, Artificial Sequence
  Chemically Synthesized
QVQLQESGGGLVQAGGSLRLSCAASGSISVRGPMGWYRQAPGKERELVAGISDGANTYYADSVKGRFTISRDNAKNTVYLQMNSLKPEDTAVYYCAVGTTGAEHGYWGQGTQVTVSS

SEQ ID NO: 16960 - protein, 118 aa, Artificial Sequence
  Chemically Synthesized
QVQLQESGGGLVQAGGSLRLSCAASGSISANPSMGWYRQAPGKEREFVATITTGTITYYADSVKGRFTISRDNAKNTVYLQMNSLKPEDTAVYYCAVDGYGLIPHGYWGQGTQVTVSS

SEQ ID NO: 16961 - protein, 125 aa, Artificial Sequence
  Chemically Synthesized
QVQLQESGGGLVQAGGSLRLSCAASGYISLGSTMGWYRQAPGKERELVAGINYGSTTNYADSVKGRFTISRDNAKNTVYLQMNSLKPEDTAVYYCAANYRWTIYGTDGSRVYYYWGQGTQVTVSS

SEQ ID NO: 16962 - protein, 114 aa, Artificial Sequence
  Chemically Synthesized
QVQLQESGGGLVQAGGSLRLSCAASGYIFGLAPTMGWYRQAPGKEREFLPVVIPYADSVKGRFTISRDNAKNTVYLQMNSLKPEDTAVYYCAAEFPVEGLHYYWGQGTQVTVSS

SEQ ID NO: 16963 - protein, 121 aa, Artificial Sequence
  Chemically Synthesized
QVQLQESGGGLVQAGGSLRLSCAASGTIFLYYYMGWYRQAPGKEREFVAGIAKGTITNYADSVKGRFTISRDNAKNTVYLQMNSLKPEDTAVYYCAVDGYFGVYGDTSMYWGQGTQVTVSS

SEQ ID NO: 16964 - protein, 121 aa, Artificial Sequence
  Chemically Synthesized
QVQLQESGGGLVQAGGSLRLSCAASGSIFYRVMGWYRQAPGKERELVATIGVGGITNYADSVKGRFTISRDNAKNTVYLQMNSLKPEDTAVYYCAVNTINDYGYESPHGYWGQGTQVTVSS

SEQ ID NO: 16965 - protein, 118 aa, Artificial Sequence
  Chemically Synthesized
QVQLQESGGGLVQAGGSLRLSCAASGTISYSRGMGWYRQAPGKERELVAGISEGSTTYYADSVKGRFTISRDNAKNTVYLQMNSLKPEDTAVYYCAAETEDSQYLAYWGQGTQVTVSS

SEQ ID NO: 16966 - protein, 117 aa, Artificial Sequence
  Chemically Synthesized
QVQLQESGGGLVQAGGSLRLSCAASGYIFGRGFMGWYRQAPGKERELVASIAPGGITYYADSVKGRFTISRDNAKNTVYLQMNSLKPEDTAVYYCAAAVCRLVRMYWGQGTQVTVSS

SEQ ID NO: 16967 - protein, 116 aa, Artificial Sequence
  Chemically Synthesized
QVQLQESGGGLVQAGGSLRLSCAASGYISYTTYMGWYRQAPGKEREFVAGIASVVLPYADSVKGRFTISRDNAKNTVYLQMNSLKPEDTAVYYCAVYYAGSSTLYWGQGTQVTVSS

SEQ ID NO: 16968 - protein, 126 aa, Artificial Sequence
  Chemically Synthesized
QVQLQESGGGLVQAGGSLRLSCAASGYISAPSAMGWYRQAPGKERELVASINTGTNTYYADSVKGRFTISRDNAKNTVYLQMNSLKPEDTAVYYCAAQVNSKAADNIYSGFALDYWGQGTQVTVSS

SEQ ID NO: 16969 - protein, 121 aa, Artificial Sequence
  Chemically Synthesized
QVQLQESGGGLVQAGGSLRLSCAASGTISQRYMGWYRQAPGKERELVASIDTGGTTYYADSVKGRFTISRDNAKNTVYLQMNSLKPEDTAVYYCAAGRRYWRHGSYFHGYWGQGTQVTVSS

SEQ ID NO: 16970 - protein, 125 aa, Artificial Sequence
  Chemically Synthesized
QVQLQESGGGLVQAGGSLRLSCAASGYIFYADMGWYRQAPGKERELVASISYGTSTNYADSVKGRFTISRDNAKNTVYLQMNSLKPEDTAVYYCAAQYDPDGTHLLYQYTYFTYWGQGTQVTVSS

SEQ ID NO: 16971 - protein, 118 aa, Artificial Sequence
  Chemically Synthesized
QVQLQESGGGLVQAGGSLRLSCAASGYLCWTMGWYRQAPGKERELVAGISSGGITNYADSVKGRFTISRDNAKNTVYLQMNSLKPEDTAVYYCAAYRTLYYSLVTFYWGQGTQVTVSS

SEQ ID NO: 16972 - protein, 118 aa, Artificial Sequence
  Chemically Synthesized
QVQLQESGGGLVQAGGSLRLSCAASGSIFGSHHMGWYRQAPGKEREFVAGISVGATTYYADSVKGRFTISRDNAKNTVYLQMNSLKPEDTAVYYCAVLATEPQSLVYWGQGTQVTVSS

SEQ ID NO: 16973 - protein, 118 aa, Artificial Sequence
  Chemically Synthesized
QVQLQESGGGLVQAGGSLRLSCAASGTISKYLYMGWYRQAPGKERELVAAITTGATTYYADSVKGRFTISRDNAKNTVYLQMNSLKPEDTAVYYCAVRDYSDADHVYWGQGTQVTVSS

SEQ ID NO: 16974 - protein, 117 aa, Artificial Sequence
  Chemically Synthesized
QVQLQESGGGLVQAGGSLRLSCAASGYIFRGYDMGWYRQAPGKERELVASIMLVVVPYADSVKGRFTISRDNAKNTVYLQMNSLKPEDTAVYYCAALRGINYDHWYWGQGTQVTVSS

SEQ ID NO: 16975 - protein, 121 aa, Artificial Sequence
  Chemically Synthesized
QVQLQESGGGLVQAGGSLRLSCAASGNIFDVLSMGWYRQAPGKERELVAGIAYGTNTNYADSVKGRFTISRDNAKNTVYLQMNSLKPEDTAVYYCAAEDSGAHPYSSLIYWGQGTQVTVSS

SEQ ID NO: 16976 - protein, 122 aa, Artificial Sequence
  Chemically Synthesized
QVQLQESGGGLVQAGGSLRLSCAASGYISVQYGMGWYRQAPGKEREFVAAIGFGGTTYYADSVKGRFTISRDNAKNTVYLQMNSLKPEDTAVYYCAAAENDIDDRDTDLDYWGQGTQVTVSS

SEQ ID NO: 16977 - protein, 118 aa, Artificial Sequence
  Chemically Synthesized
QVQLQESGGGLVQAGGSLRLSCAASGNIFQYDTMGWYRQAPGKEREFVAGINLGATTYYADSVKGRFTISRDNAKNTVYLQMNSLKPEDTAVYYCAVENYNNHPHDYWGQGTQVTVSS

SEQ ID NO: 16978 - protein, 117 aa, Artificial Sequence
  Chemically Synthesized
QVQLQESGGGLVQAGGSLRLSCAASGYISGAAMGWYRQAPGKERELVAGISGGANTYYADSVKGRFTISRDNAKNTVYLQMNSLKPEDTAVYYCAVEETDWFGFPYWGQGTQVTVSS

SEQ ID NO: 16979 - protein, 118 aa, Artificial Sequence
  Chemically Synthesized
QVQLQESGGGLVQAGGSLRLSCAASGTISRYASMGWYRQAPGKEREFVAAIDYGSNTYYADSVKGRFTISRDNAKNTVYLQMNSLKPEDTAVYYCAVVGHYPKRHYYWGQGTQVTVSS

SEQ ID NO: 16980 - protein, 125 aa, Artificial Sequence
  Chemically Synthesized
QVQLQESGGGLVQAGGSLRLSCAASGNIFLEDNMGWYRQAPGKEREFVATINQGATTNYADSVKGRFTISRDNAKNTVYLQMNSLKPEDTAVYYCAAAVYSHSTHDCTTSGLMYWGQGTQVTVSS

SEQ ID NO: 16981 - protein, 115 aa, Artificial Sequence
  Chemically Synthesized
QVQLQESGGGLVQAGGSLRLSCAASGTISRRYNMGWYRQAPGKERELVASISGGGNTNYADSVKGRFTISRDNAKNTVYLQMNSLKPEDTAVYYCAAYQQGHRYWGQGTQVTVSS

SEQ ID NO: 16982 - protein, 118 aa, Artificial Sequence
  Chemically Synthesized
QVQLQESGGGLVQAGGSLRLSCAASGYISLASGMGWYRQAPGKEREFVATINLGTITYYADSVKGRFTISRDNAKNTVYLQMNSLKPEDTAVYYCAAYEQAYQAYQYWGQGTQVTVSS

SEQ ID NO: 16983 - protein, 125 aa, Artificial Sequence
  Chemically Synthesized
QVQLQESGGGLVQAGGSLRLSCAASGTISAFPSMGWYRQAPGKERELVASISAGGTTNYADSVKGRFTISRDNAKNTVYLQMNSLKPEDTAVYYCAAYPYNWTRGVAGNYLFDYWGQGTQVTVSS

SEQ ID NO: 16984 - protein, 117 aa, Artificial Sequence
  Chemically Synthesized
QVQLQESGGGLVQAGGSLRLSCAASGTIFDFYYMGWYRQAPGKEREFVATITIGSNTYYADSVKGRFTISRDNAKNTVYLQMNSLKPEDTAVYYCAALSASTSIMYWGQGTQVTVSS

SEQ ID NO: 16985 - protein, 118 aa, Artificial Sequence
  Chemically Synthesized
QVQLQESGGGLVQAGGSLRLSCAASGSISYTTYMGWYRQAPGKEREFVATIASGSTTNYADSVKGRFTISRDNAKNTVYLQMNSLKPEDTAVYYCAAFPSQEEFYWYWGQGTQVTVSS

SEQ ID NO: 16986 - protein, 121 aa, Artificial Sequence
  Chemically Synthesized
QVQLQESGGGLVQAGGSLRLSCAASGTISAVVWMGWYRQAPGKEREFVATIVTVLIPYADSVKGRFTISRDNAKNTVYLQMNSLKPEDTAVYYCAVINDGDGQHADLLYYWGQGTQVTVSS

SEQ ID NO: 16987 - protein, 126 aa, Artificial Sequence
  Chemically Synthesized
QVQLQESGGGLVQAGGSLRLSCAASGNISAYSRMGWYRQAPGKEREFVASIAYGSSTNYADSVKGRFTISRDNAKNTVYLQMNSLKPEDTAVYYCAVPRSQYDYSYWKYDYVHGYWGQGTQVTVSS

SEQ ID NO: 16988 - protein, 118 aa, Artificial Sequence
  Chemically Synthesized
QVQLQESGGGLVQAGGSLRLSCAASGSISDSQYMGWYRQAPGKERELVASIAWGTITYYADSVKGRFTISRDNAKNTVYLQMNSLKPEDTAVYYCAAYPDYRYPHIYWGQGTQVTVSS

SEQ ID NO: 16989 - protein, 118 aa, Artificial Sequence
  Chemically Synthesized
QVQLQESGGGLVQAGGSLRLSCAASGSISAWGYMGWYRQAPGKERELVATISWGASTNYADSVKGRFTISRDNAKNTVYLQMNSLKPEDTAVYYCAVQYPGRTTHQYWGQGTQVTVSS

SEQ ID NO: 16990 - protein, 121 aa, Artificial Sequence
  Chemically Synthesized
QVQLQESGGGLVQAGGSLRLSCAASGTIFYNTRMGWYRQAPGKEREFVAAISYGGNTYYADSVKGRFTISRDNAKNTVYLQMNSLKPEDTAVYYCAVHYDNVVDDVPYFYWGQGTQVTVSS

SEQ ID NO: 16991 - protein, 122 aa, Artificial Sequence
  Chemically Synthesized
QVQLQESGGGLVQAGGSLRLSCAASGTIFTPQYMGWYRQAPGKEREFVAAISGGTITNYADSVKGRFTISRDNAKNTVYLQMNSLKPEDTAVYYCAAYLYGYTGTDGGHPYWGQGTQVTVSS

SEQ ID NO: 16992 - protein, 118 aa, Artificial Sequence
  Chemically Synthesized
QVQLQESGGGLVQAGGSLRLSCAASGYIFSVYWMGWYRQAPGKEREFVAGIDGGGSTNYADSVKGRFTISRDNAKNTVYLQMNSLKPEDTAVYYCAVSNTKRGQHSYWGQGTQVTVSS

SEQ ID NO: 16993 - protein, 122 aa, Artificial Sequence
  Chemically Synthesized
QVQLQESGGGLVQAGGSLRLSCAASGNISYAIDMGWYRQAPGKERELVASIAGGASTNYADSVKGRFTISRDNAKNTVYLQMNSLKPEDTAVYYCAVGQISRYVYGQDHGYWGQGTQVTVSS

SEQ ID NO: 16994 - protein, 118 aa, Artificial Sequence
  Chemically Synthesized
QVQLQESGGGLVQAGGSLRLSCAASGYIFGGYYMGWYRQAPGKERELVATIDSGATTNYADSVKGRFTISRDNAKNTVYLQMNSLKPEDTAVYYCAVEWSDDWFHAYWGQGTQVTVSS

SEQ ID NO: 16995 - protein, 118 aa, Artificial Sequence
  Chemically Synthesized
QVQLQESGGGLVQAGGSLRLSCAASGTISTSLYMGWYRQAPGKERELVAAIDGGAITYYADSVKGRFTISRDNAKNTVYLQMNSLKPEDTAVYYCAAIIWSDRRHSYWGQGTQVTVSS

SEQ ID NO: 16996 - protein, 118 aa, Artificial Sequence
  Chemically Synthesized
QVQLQESGGGLVQAGGSLRLSCAASGTIFGRIHMGWYRQAPGKERELVATISAGTTTNYADSVKGRFTISRDNAKNTVYLQMNSLKPEDTAVYYCAAWYVVPAYYFYWGQGTQVTVSS

SEQ ID NO: 16997 - protein, 118 aa, Artificial Sequence
  Chemically Synthesized
QVQLQESGGGLVQAGGSLRLSCAASGNISDPRNMGWYRQAPGKERELVAGIDDGTTTYYADSVKGRFTISRDNAKNTVYLQMNSLKPEDTAVYYCAVYAHPALYHDYWGQGTQVTVSS

SEQ ID NO: 16998 - protein, 124 aa, Artificial Sequence
  Chemically Synthesized
QVQLQESGGGLVQAGGSLRLSCAASGSIFGERNMGWYRQAPGKERELVASIDVGTTTNYADSVKGRFTISRDNAKNTVYLQMNSLKPEDTAVYYCAAGYQSGTTYRLGGWYYYWGQGTQVTVSS

SEQ ID NO: 16999 - protein, 118 aa, Artificial Sequence
  Chemically Synthesized
QVQLQESGGGLVQAGGSLRLSCAASGNIFPYTNMGWYRQAPGKEREFVATIDAGSITYYADSVKGRFTISRDNAKNTVYLQMNSLKPEDTAVYYCAAYYSSLHRSLYWGQGTQVTVSS

SEQ ID NO: 17000 - protein, 118 aa, Artificial Sequence
  Chemically Synthesized
QVQLQESGGGLVQAGGSLRLSCAASGTISRHPTMGWYRQAPGKEREFVATIDRGGTTYYADSVKGRFTISRDNAKNTVYLQMNSLKPEDTAVYYCAVYTPSFDPYYYWGQGTQVTVSS

SEQ ID NO: 17001 - protein, 110 aa, Artificial Sequence
  Chemically Synthesized
QVQLQESGGGLVQAGGSLRLSCAASGNISDLGSMGWYRQAPGKEREFVAAITPGGSTYYADSVKGRFTISRDNAKNTVYLQMNSLKPEDTAVYYCAAWYWGQGTQVTVSS

SEQ ID NO: 17002 - protein, 125 aa, Artificial Sequence
  Chemically Synthesized
QVQLQESGGGLVQAGGSLRLSCAASGSIFYLSMGWYRQAPGKERELVASIALGASTNYADSVKGRFTISRDNAKNTVYLQMNSLKPEDTAVYYCAVGYSDYAGFTHGDFWYHRYWGQGTQVTVSS

SEQ ID NO: 17003 - protein, 126 aa, Artificial Sequence
  Chemically Synthesized
QVQLQESGGGLVQAGGSLRLSCAASGTISYSTPMGWYRQAPGKEREFVATIDGGSSTNYADSVKGRFTISRDNAKNTVYLQMNSLKPEDTAVYYCAVYDGRDKQVNQGGARDYYYWGQGTQVTVSS

SEQ ID NO: 17004 - protein, 117 aa, Artificial Sequence
  Chemically Synthesized
QVQLQESGGGLVQAGGSLRLSCAASGTIFYLYTMGWYRQAPGKERELVATISDGGNTYYADSVKGRFTISRDNAKNTVYLQMNSLKPEDTAVYYCAAGTYDDDHTYWGQGTQVTVSS

SEQ ID NO: 17005 - protein, 126 aa, Artificial Sequence
  Chemically Synthesized
QVQLQESGGGLVQAGGSLRLSCAASGSIFAPSTMGWYRQAPGKEREFVAGIGYGGTTYYADSVKGRFTISRDNAKNTVYLQMNSLKPEDTAVYYCAAYDQTWQRSRADPVYFFTYWGQGTQVTVSS

SEQ ID NO: 17006 - protein, 118 aa, Artificial Sequence
  Chemically Synthesized
QVQLQESGGGLVQAGGSLRLSCAASGSISYREYMGWYRQAPGKERELVAGISDGTSTNYADSVKGRFTISRDNAKNTVYLQMNSLKPEDTAVYYCAVYRDAAVPFGYWGQGTQVTVSS

SEQ ID NO: 17007 - protein, 118 aa, Artificial Sequence
  Chemically Synthesized
QVQLQESGGGLVQAGGSLRLSCAASGTISQQEYMGWYRQAPGKERELVAGIDRGGNTNYADSVKGRFTISRDNAKNTVYLQMNSLKPEDTAVYYCAVYDTKHNTHPYWGQGTQVTVSS

SEQ ID NO: 17008 - protein, 118 aa, Artificial Sequence
  Chemically Synthesized
QVQLQESGGGLVQAGGSLRLSCAASGSIFRYVNMGWYRQAPGKEREFVAGIDDGTSTNYADSVKGRFTISRDNAKNTVYLQMNSLKPEDTAVYYCAAVETDYYGLDYWGQGTQVTVSS

SEQ ID NO: 17009 - protein, 125 aa, Artificial Sequence
  Chemically Synthesized
QVQLQESGGGLVQAGGSLRLSCAASGSIFTYPYMGWYRQAPGKEREFVASINDGTNTYYADSVKGRFTISRDNAKNTVYLQMNSLKPEDTAVYYCAADAASPDGPPFAGTMFMYWGQGTQVTVSS

SEQ ID NO: 17010 - protein, 121 aa, Artificial Sequence
  Chemically Synthesized
QVQLQESGGGLVQAGGSLRLSCAASGTISNSTMGWYRQAPGKEREFVAAIDPGTSTYYADSVKGRFTISRDNAKNTVYLQMNSLKPEDTAVYYCAAGYKDDVGFRYSFDYWGQGTQVTVSS

SEQ ID NO: 17011 - protein, 112 aa, Artificial Sequence
  Chemically Synthesized
QVQLQESGGGLVQAGGSLRLSCAASGTISQAYAMGWYRQAPGKEREFVAGINIGSSTYYADSVKGRFTISRDNAKNTVYLQMNSLKPEDTAVYYCAAQHSYWGQGTQVTVSS

SEQ ID NO: 17012 - protein, 126 aa, Artificial Sequence
  Chemically Synthesized
QVQLQESGGGLVQAGGSLRLSCAASGNISARGSMGWYRQAPGKERELVATISTGATTYYADSVKGRFTISRDNAKNTVYLQMNSLKPEDTAVYYCAVYWDISRLRTVGNQYSHDYWGQGTQVTVSS

SEQ ID NO: 17013 - protein, 122 aa, Artificial Sequence
  Chemically Synthesized
QVQLQESGGGLVQAGGSLRLSCAASGTIFALRYMGWYRQAPGKERELVAGIGPGGITNYADSVKGRFTISRDNAKNTVYLQMNSLKPEDTAVYYCAAAYWSSYSDGPIHGYWGQGTQVTVSS

SEQ ID NO: 17014 - protein, 122 aa, Artificial Sequence
  Chemically Synthesized
QVQLQESGGGLVQAGGSLRLSCAASGYISPPYYMGWYRQAPGKEREFVAGIASGGNTNYADSVKGRFTISRDNAKNTVYLQMNSLKPEDTAVYYCAVISNDRYLRYWTLDYWGQGTQVTVSS

SEQ ID NO: 17015 - protein, 121 aa, Artificial Sequence
  Chemically Synthesized
QVQLQESGGGLVQAGGSLRLSCAASGNIFRSYVMGWYRQAPGKERELVAGIARGTNTNYADSVKGRFTISRDNAKNTVYLQMNSLKPEDTAVYYCAVPDNSFVVSTTTMYWGQGTQVTVSS

SEQ ID NO: 17016 - protein, 118 aa, Artificial Sequence
  Chemically Synthesized
QVQLQESGGGLVQAGGSLRLSCAASGNIFYYTLMGWYRQAPGKEREFVAAIARGSSTNYADSVKGRFTISRDNAKNTVYLQMNSLKPEDTAVYYCAAATAYHLSFWYWGQGTQVTVSS

SEQ ID NO: 17017 - protein, 125 aa, Artificial Sequence
  Chemically Synthesized
QVQLQESGGGLVQAGGSLRLSCAASGTISRSTPMGWYRQAPGKEREFVASIAVGTITNYADSVKGRFTISRDNAKNTVYLQMNSLKPEDTAVYYCAADVPRVARGSSVTRCRIYWGQGTQVTVSS

SEQ ID NO: 17018 - protein, 126 aa, Artificial Sequence
  Chemically Synthesized
QVQLQESGGGLVQAGGSLRLSCAASGYIFYALPMGWYRQAPGKEREFVAGIGLGSSTYYADSVKGRFTISRDNAKNTVYLQMNSLKPEDTAVYYCAADYAYNIVDGAGDITGYAYWGQGTQVTVSS

SEQ ID NO: 17019 - protein, 117 aa, Artificial Sequence
  Chemically Synthesized
QVQLQESGGGLVQAGGSLRLSCAASGSIFDTYYMGWYRQAPGKEREFVATIDNGGNTNYADSVKGRFTISRDNAKNTVYLQMNSLKPEDTAVYYCAVRSLRLTTFYWGQGTQVTVSS

SEQ ID NO: 17020 - protein, 112 aa, Artificial Sequence
  Chemically Synthesized
QVQLQESGGGLVQAGGSLRLSCAASGSISAYLAMGWYRQAPGKERELVATIAWGGTTNYADSVKGRFTISRDNAKNTVYLQMNSLKPEDTAVYYCAVLPFYWGQGTQVTVSS

SEQ ID NO: 17021 - protein, 111 aa, Artificial Sequence
  Chemically Synthesized
QVQLQESGGGLVQAGGSLRLSCAASGSIFSYSHMGWYRQAPGKEREFVAAIGVGGSTYYADSVKGRFTISRDNAKNTVYLQMNSLKPEDTAVYYCAVLWYWGQGTQVTVSS

SEQ ID NO: 17022 - protein, 117 aa, Artificial Sequence
  Chemically Synthesized
QVQLQESGGGLVQAGGSLRLSCAASGTISQFIYMGWYRQAPGKEREFVATILRVVIPYADSVKGRFTISRDNAKNTVYLQMNSLKPEDTAVYYCAAITQGTSPYRYWGQGTQVTVSS

SEQ ID NO: 17023 - protein, 118 aa, Artificial Sequence
  Chemically Synthesized
QVQLQESGGGLVQAGGSLRLSCAASGTIFQYYFMGWYRQAPGKEREFVASIAHGTTTYYADSVKGRFTISRDNAKNTVYLQMNSLKPEDTAVYYCAVFQGASPSFGYWGQGTQVTVSS

SEQ ID NO: 17024 - protein, 122 aa, Artificial Sequence
  Chemically Synthesized
QVQLQESGGGLVQAGGSLRLSCAASGSISLYREMGWYRQAPGKERELVAAISDGGSTYYADSVKGRFTISRDNAKNTVYLQMNSLKPEDTAVYYCAVGVIYITDYDTLHAYWGQGTQVTVSS

SEQ ID NO: 17025 - protein, 122 aa, Artificial Sequence
  Chemically Synthesized
QVQLQESGGGLVQAGGSLRLSCAASGTIFGRYFMGWYRQAPGKEREFVAAIGDGGNTYYADSVKGRFTISRDNAKNTVYLQMNSLKPEDTAVYYCAVRRGYDHRTDYAFAYWGQGTQVTVSS

SEQ ID NO: 17026 - protein, 118 aa, Artificial Sequence
  Chemically Synthesized
QVQLQESGGGLVQAGGSLRLSCAASGNISGGGYMGWYRQAPGKERELVASIDHGGNTYYADSVKGRFTISRDNAKNTVYLQMNSLKPEDTAVYYCAVRILYDYNYTYWGQGTQVTVSS

SEQ ID NO: 17027 - protein, 118 aa, Artificial Sequence
  Chemically Synthesized
QVQLQESGGGLVQAGGSLRLSCAASGNISGLYGMGWYRQAPGKERELVAGINYGGTTYYADSVKGRFTISRDNAKNTVYLQMNSLKPEDTAVYYCAVVVGRAGRLDYWGQGTQVTVSS

SEQ ID NO: 17028 - protein, 121 aa, Artificial Sequence
  Chemically Synthesized
QVQLQESGGGLVQAGGSLRLSCAASGYISRYPPMGWYRQAPGKEREFVAGIATWYYYLYADSVKGRFTISRDNAKNTVYLQMNSLKPEDTAVYYCAVYPLDQVKYGDFLYWGQGTQVTVSS

SEQ ID NO: 17029 - protein, 118 aa, Artificial Sequence
  Chemically Synthesized
QVQLQESGGGLVQAGGSLRLSCAASGYISEPRGMGWYRQAPGKERELVASINPGASTYYADSVKGRFTISRDNAKNTVYLQMNSLKPEDTAVYYCAAEGTDVYILPYWGQGTQVTVSS

SEQ ID NO: 17030 - protein, 118 aa, Artificial Sequence
  Chemically Synthesized
QVQLQESGGGLVQAGGSLRLSCAASGSISPASAMGWYRQAPGKERELVATISDGGNTNYADSVKGRFTISRDNAKNTVYLQMNSLKPEDTAVYYCAVYRSTNSPYVYWGQGTQVTVSS

SEQ ID NO: 17031 - protein, 126 aa, Artificial Sequence
  Chemically Synthesized
QVQLQESGGGLVQAGGSLRLSCAASGTISTVFGMGWYRQAPGKEREFVATIGVGASTYYADSVKGRFTISRDNAKNTVYLQMNSLKPEDTAVYYCAVFSSGDDDPWIGPAQPYDYWGQGTQVTVSS

SEQ ID NO: 17032 - protein, 118 aa, Artificial Sequence
  Chemically Synthesized
QVQLQESGGGLVQAGGSLRLSCAASGYISGVLLMGWYRQAPGKERELVAAINLGGNTYYADSVKGRFTISRDNAKNTVYLQMNSLKPEDTAVYYCAVRSYFVGRHLYWGQGTQVTVSS

SEQ ID NO: 17033 - protein, 121 aa, Artificial Sequence
  Chemically Synthesized
QVQLQESGGGLVQAGGSLRLSCAASGYIFYDRDMGWYRQAPGKERELVAAISPGGNTNYADSVKGRFTISRDNAKNTVYLQMNSLKPEDTAVYYCAVVRNLGYLTDSTIYWGQGTQVTVSS

SEQ ID NO: 17034 - protein, 118 aa, Artificial Sequence
  Chemically Synthesized
QVQLQESGGGLVQAGGSLRLSCAASGTISGRYNMGWYRQAPGKERELVATIAGGSSTYYADSVKGRFTISRDNAKNTVYLQMNSLKPEDTAVYYCAVQLIGGLFHGYWGQGTQVTVSS

SEQ ID NO: 17035 - protein, 118 aa, Artificial Sequence
  Chemically Synthesized
QVQLQESGGGLVQAGGSLRLSCAASGYIFGDLYMGWYRQAPGKEREFVASIAHGTTTYYADSVKGRFTISRDNAKNTVYLQMNSLKPEDTAVYYCAALAYQGGYFGYWGQGTQVTVSS

SEQ ID NO: 17036 - protein, 118 aa, Artificial Sequence
  Chemically Synthesized
QVQLQESGGGLVQAGGSLRLSCAASGNISNYKAMGWYRQAPGKEREFVAGIAGGAITNYADSVKGRFTISRDNAKNTVYLQMNSLKPEDTAVYYCAVLTGPYPYLGYWGQGTQVTVSS

SEQ ID NO: 17037 - protein, 118 aa, Artificial Sequence
  Chemically Synthesized
QVQLQESGGGLVQAGGSLRLSCAASGSISAYTYMGWYRQAPGKEREFVAAIDDGTTTNYADSVKGRFTISRDNAKNTVYLQMNSLKPEDTAVYYCAVLLWYSSWHYYWGQGTQVTVSS

SEQ ID NO: 17038 - protein, 118 aa, Artificial Sequence
  Chemically Synthesized
QVQLQESGGGLVQAGGSLRLSCAASGNIFGDNDMGWYRQAPGKERELVAAIADGANTYYADSVKGRFTISRDNAKNTVYLQMNSLKPEDTAVYYCAADYDLTSSYYYWGQGTQVTVSS

SEQ ID NO: 17039 - protein, 123 aa, Artificial Sequence
  Chemically Synthesized
QVQLQESGGGLVQAGGSLRLSCAASGYISNWAYMGWYRQAPGKERELVAAISHGTITNYADSVKGRFTISRDNAKNTVYLQMNSLKPEDTAVYYCAARPYDPYPWPYVSYDYWGQGTQVTVSS

SEQ ID NO: 17040 - protein, 118 aa, Artificial Sequence
  Chemically Synthesized
QVQLQESGGGLVQAGGSLRLSCAASGYIFGRLPMGWYRQAPGKEREFVAGIAFGTITNYADSVKGRFTISRDNAKNTVYLQMNSLKPEDTAVYYCAVADKSLGTLVYWGQGTQVTVSS

SEQ ID NO: 17041 - protein, 118 aa, Artificial Sequence
  Chemically Synthesized
QVQLQESGGGLVQAGGSLRLSCAASGYISYDQFMGWYRQAPGKERELVASISDGTSTNYADSVKGRFTISRDNAKNTVYLQMNSLKPEDTAVYYCAVPGEYANDLYYWGQGTQVTVSS

SEQ ID NO: 17042 - protein, 122 aa, Artificial Sequence
  Chemically Synthesized
QVQLQESGGGLVQAGGSLRLSCAASGYISVAYFMGWYRQAPGKEREFVAAIAKGTTTYYADSVKGRFTISRDNAKNTVYLQMNSLKPEDTAVYYCAAEVLSDDDLRYSHDYWGQGTQVTVSS

SEQ ID NO: 17043 - protein, 122 aa, Artificial Sequence
  Chemically Synthesized
QVQLQESGGGLVQAGGSLRLSCAASGTISDYQYMGWYRQAPGKERELVASIDDGSITYYADSVKGRFTISRDNAKNTVYLQMNSLKPEDTAVYYCAVDRYGAYYLTAYHWYWGQGTQVTVSS

SEQ ID NO: 17044 - protein, 118 aa, Artificial Sequence
  Chemically Synthesized
QVQLQESGGGLVQAGGSLRLSCAASGSISATADMGWYRQAPGKEREFVAGITAGSNTNYADSVKGRFTISRDNAKNTVYLQMNSLKPEDTAVYYCAVGYWSYDYFIYWGQGTQVTVSS

SEQ ID NO: 17045 - protein, 108 aa, Artificial Sequence
  Chemically Synthesized
QVQLQESGGGLVQAGGSLRLSCAASGNISAPEAMGWYRQAPGKEREFDYADSVKGRFTISRDNAKNTVYLQMNSLKPEDTAVYYCAVPDWRYDQLRYWGQGTQVTVSS

SEQ ID NO: 17046 - protein, 122 aa, Artificial Sequence
  Chemically Synthesized
QVQLQESGGGLVQAGGSLRLSCAASGTISYDRYMGWYRQAPGKEREFVASIGVGASTYYADSVKGRFTISRDNAKNTVYLQMNSLKPEDTAVYYCAVGGDAKPETQLDYTYWGQGTQVTVSS

SEQ ID NO: 17047 - protein, 118 aa, Artificial Sequence
  Chemically Synthesized
QVQLQESGGGLVQAGGSLRLSCAASGSISIRRDMGWYRQAPGKERELVAAIGPGSITNYADSVKGRFTISRDNAKNTVYLQMNSLKPEDTAVYYCAVRFYTPILYAYWGQGTQVTVSS

SEQ ID NO: 17048 - protein, 117 aa, Artificial Sequence
  Chemically Synthesized
QVQLQESGGGLVQAGGSLRLSCAASGSISRSRWMGWYRQAPGKEREFVAAIAYGTNTNYADSVKGRFTISRDNAKNTVYLQMNSLKPEDTAVYYCAVYSTSLSCLYWGQGTQVTVSS

SEQ ID NO: 17049 - protein, 119 aa, Artificial Sequence
  Chemically Synthesized
QVQLQESGGGLVQAGGSLRLSCAASGTISQSDGMGWYRQAPGKEREFVATIAGAIPYADSVKGRFTISRDNAKNTVYLQMNSLKPEDTAVYYCAVSTKTTITVVFRMYWGQGTQVTVSS

SEQ ID NO: 17050 - protein, 121 aa, Artificial Sequence
  Chemically Synthesized
QVQLQESGGGLVQAGGSLRLSCAASGIFLLTGMGWYRQAPGKEREFVASIDYGSNTYYADSVKGRFTISRDNAKNTVYLQMNSLKPEDTAVYYCAVEVHHQDDFYYEHQYWGQGTQVTVSS

SEQ ID NO: 17051 - protein, 113 aa, Artificial Sequence
  Chemically Synthesized
QVQLQESGGGLVQAGGSLRLSCAASGTIFRDVVMGWYRQAPGKERELVASIASGTITYYADSVKGRFTISRDNAKNTVYLQMNSLKPEDTAVYYCARGDYDYWGQGTQVTVSS

SEQ ID NO: 17052 - protein, 120 aa, Artificial Sequence
  Chemically Synthesized
QVQLQESGGGLVQAGGSLRLSCAASGNIFLFRAMGWYRQAPGKEREFVAGISGGASTNYADSVKGRFTISRDNAKNTVYLQMNSLKPEDTAVYYCAALRYNEYRTAHYYWGQGTQVTVSS

SEQ ID NO: 17053 - protein, 118 aa, Artificial Sequence
  Chemically Synthesized
QVQLQESGGGLVQAGGSLRLSCAASGYISYNAGMGWYRQAPGKERELVASIGSGGSTNYADSVKGRFTISRDNAKNTVYLQMNSLKPEDTAVYYCAAYYATRYFLPYWGQGTQVTVSS

SEQ ID NO: 17054 - protein, 118 aa, Artificial Sequence
  Chemically Synthesized
QVQLQESGGGLVQAGGSLRLSCAASGSIFGYGYMGWYRQAPGKERELVATITHGTSTYYADSVKGRFTISRDNAKNTVYLQMNSLKPEDTAVYYCAANGIRLYDFFYWGQGTQVTVSS

SEQ ID NO: 17055 - protein, 121 aa, Artificial Sequence
  Chemically Synthesized
QVQLQESGGGLVQAGGSLRLSCAASGYIFYFTDMGWYRQAPGKERELVAGIGEGSTNYADSVKGRFTISRDNAKNTVYLQMNSLKPEDTAVYYCAANDDVYSYDDSLYDYWGQGTQVTVSS

SEQ ID NO: 17056 - protein, 118 aa, Artificial Sequence
  Chemically Synthesized
QVQLQESGGGLVQAGGSLRLSCAASGSISRDSYMGWYRQAPGKEREFVAAITYGAITNYADSVKGRFTISRDNAKNTVYLQMNSLKPEDTAVYYCAAITYHRVYHYYWGQGTQVTVSS

SEQ ID NO: 17057 - protein, 118 aa, Artificial Sequence
  Chemically Synthesized
QVQLQESGGGLVQAGGSLRLSCAASGNISTWYAMGWYRQAPGKERELVAGITYGGNTNYADSVKGRFTISRDNAKNTVYLQMNSLKPEDTAVYYCAVVVLNNGVLYYWGQGTQVTVSS

SEQ ID NO: 17058 - protein, 118 aa, Artificial Sequence
  Chemically Synthesized
QVQLQESGGGLVQAGGSLRLSCAASGSISVRSDMGWYRQAPGKERELVAAIGAGTSTNYADSVKGRFTISRDNAKNTVYLQMNSLKPEDTAVYYCAAYIVHIGGFTYWGQGTQVTVSS

SEQ ID NO: 17059 - protein, 115 aa, Artificial Sequence
  Chemically Synthesized
QVQLQESGGGLVQAGGSLRLSCAASGTISVQDNMGWYRQAPGKEREFVATISIGGTTYYADSVKGRFTISRDNAKNTVYLQMNSLKPEDTAVYYCAGHPVCSCYWGQGTQVTVSS

SEQ ID NO: 17060 - protein, 122 aa, Artificial Sequence
  Chemically Synthesized
QVQLQESGGGLVQAGGSLRLSCAASGSISTDNYMGWYRQAPGKEREFVALLMKVLLPYADSVKGRFTISRDNAKNTVYLQMNSLKPEDTAVYYCAAPLLGSPRDGPDALSYWGQGTQVTVSS

SEQ ID NO: 17061 - protein, 122 aa, Artificial Sequence
  Chemically Synthesized
QVQLQESGGGLVQAGGSLRLSCAASGYISGWSIMGWYRQAPGKERELVASIAGGANTNYADSVKGRFTISRDNAKNTVYLQMNSLKPEDTAVYYCAVQYIPRVSYHAYFPYWGQGTQVTVSS

SEQ ID NO: 17062 - protein, 118 aa, Artificial Sequence
  Chemically Synthesized
QVQLQESGGGLVQAGGSLRLSCAASGNISGLYYMGWYRQAPGKEREFVAGIGSGASTNYADSVKGRFTISRDNAKNTVYLQMNSLKPEDTAVYYCAVVSYDGYWHGYWGQGTQVTVSS

SEQ ID NO: 17063 - protein, 117 aa, Artificial Sequence
  Chemically Synthesized
QVQLQESGGGLVQAGGSLRLSCAASGSIFGVDWMGWYRQAPGKERELVAAINQGASTNYADSVKGRFTISRDNAKNTVYLQMNSLKPEDTAVYYCAARWNDASLIYWGQGTQVTVSS

SEQ ID NO: 17064 - protein, 118 aa, Artificial Sequence
  Chemically Synthesized
QVQLQESGGGLVQAGGSLRLSCAASGYISGHRLMGWYRQAPGKEREFVAGISDGASTNYADSVKGRFTISRDNAKNTVYLQMNSLKPEDTAVYYCAALYRGDALHWYWGQGTQVTVSS

SEQ ID NO: 17065 - protein, 118 aa, Artificial Sequence
  Chemically Synthesized
QVQLQESGGGLVQAGGSLRLSCAASGNIFDYGSMGWYRQAPGKERELVAAINYGATTYYADSVKGRFTISRDNAKNTVYLQMNSLKPEDTAVYYCAVYLTGIYDHDYWGQGTQVTVSS

SEQ ID NO: 17066 - protein, 111 aa, Artificial Sequence
  Chemically Synthesized
QVQLQESGGGLVQAGGSLRLSCAASGYISGRSTMGWYRQAPGKERELVASINVGSSTNYADSVKGRFTISRDNAKNTVYLQMNSLKPEDTAVYYCAVYPYWGQGTQVTVSS

SEQ ID NO: 17067 - protein, 121 aa, Artificial Sequence
  Chemically Synthesized
QVQLQESGGGLVQAGGSLRLSCAASGYISILDPMGWYRQAPGKERELVAAIDAGTSTYYADSVKGRFTISRDNAKNTVYLQMNSLKPEDTAVYYCAAANASRTTLVSTFYWGQGTQVTVSS

SEQ ID NO: 17068 - protein, 126 aa, Artificial Sequence
  Chemically Synthesized
QVQLQESGGGLVQAGGSLRLSCAASGNISTRQSMGWYRQAPGKERELVATISYGTNTNYADSVKGRFTISRDNAKNTVYLQMNSLKPEDTAVYYCAVTGDGYAKYGSIRYLQHVYWGQGTQVTVSS

SEQ ID NO: 17069 - protein, 108 aa, Artificial Sequence
  Chemically Synthesized
QVQLQESGGGLVQAGGSLRLSCAASGNIFGSYWMGWYRQAPGKERELVALPYADSVKGRFTISRDNAKNTVYLQMNSLKPEDTAVYYCAAFVVWYSYWGQGTQVTVSS

SEQ ID NO: 17070 - protein, 126 aa, Artificial Sequence
  Chemically Synthesized
QVQLQESGGGLVQAGGSLRLSCAASGYIFTPDRMGWYRQAPGKERELVATINYGSSTYYADSVKGRFTISRDNAKNTVYLQMNSLKPEDTAVYYCAVTYLYHEADQSAYYVDHLYWGQGTQVTVSS

SEQ ID NO: 17071 - protein, 119 aa, Artificial Sequence
  Chemically Synthesized
QVQLQESGGGLVQAGGSLRLSCAASGSMTWMGWYRQAPGKEREFVAAISRGANTYYADSVKGRFTISRDNAKNTVYLQMNSLKPEDTAVYYCAAGDRRDQFSASFLVYWGQGTQVTVSS

SEQ ID NO: 17072 - protein, 116 aa, Artificial Sequence
  Chemically Synthesized
QVQLQESGGGLVQAGGSLRLSCAASGSIFRTLMGWYRQAPGKERELVATISTGAITYYADSVKGRFTISRDNAKNTVYLQMNSLKPEDTAVYYCAVGASLTTLIYWGQGTQVTVSS

SEQ ID NO: 17073 - protein, 122 aa, Artificial Sequence
  Chemically Synthesized
QVQLQESGGGLVQAGGSLRLSCAASGNIFDIAYMGWYRQAPGKEREFVAGITYGGNTYYADSVKGRFTISRDNAKNTVYLQMNSLKPEDTAVYYCAAVLYYNDQPYDVHAYWGQGTQVTVSS

SEQ ID NO: 17074 - protein, 118 aa, Artificial Sequence
  Chemically Synthesized
QVQLQESGGGLVQAGGSLRLSCAASGTISIFWGMGWYRQAPGKEREFVAGINNGSNTNYADSVKGRFTISRDNAKNTVYLQMNSLKPEDTAVYYCAAISYSRSYHSYWGQGTQVTVSS

SEQ ID NO: 17075 - protein, 122 aa, Artificial Sequence
  Chemically Synthesized
QVQLQESGGGLVQAGGSLRLSCAASGSISTSLDMGWYRQAPGKEREFVATIGLGTTTYYADSVKGRFTISRDNAKNTVYLQMNSLKPEDTAVYYCAAASDYGPVYSYGHGYWGQGTQVTVSS

SEQ ID NO: 17076 - protein, 118 aa, Artificial Sequence
  Chemically Synthesized
QVQLQESGGGLVQAGGSLRLSCAASGSIFAVAGMGWYRQAPGKEREFVAGITQGANTNYADSVKGRFTISRDNAKNTVYLQMNSLKPEDTAVYYCAAILLSDRYHGYWGQGTQVTVSS

SEQ ID NO: 17077 - protein, 121 aa, Artificial Sequence
  Chemically Synthesized
QVQLQESGGGLVQAGGSLRLSCAASGSISAVSMGWYRQAPGKERELVAAIGYGGNTYYADSVKGRFTISRDNAKNTVYLQMNSLKPEDTAVYYCAVESYGASNAYGYYDYWGQGTQVTVSS

SEQ ID NO: 17078 - protein, 111 aa, Artificial Sequence
  Chemically Synthesized
QVQLQESGGGLVQAGGSLRLSCAASGTIFVYKDMGWYRQAPGKEREFVATIDYGGSTYYADSVKGRFTISRDNAKNTVYLQMNSLKPEDTAVYYCAGYHYWGQGTQVTVSS

SEQ ID NO: 17079 - protein, 119 aa, Artificial Sequence
  Chemically Synthesized
QVQLQESGGGLVQAGGSLRLSCAASGNIFAYPYMGWYRQAPGKEREFVATIAHGTTTNYADSVKGRFTISRDNAKNTVYLQMNSLKPEDTAVYYCAALQYDYTRKHYYWGQGTQVTVSS

SEQ ID NO: 17080 - protein, 117 aa, Artificial Sequence
  Chemically Synthesized
QVQLQESGGGLVQAGGSLRLSCAASGYISDSVMGWYRQAPGKERELVAAITTGSITYYADSVKGRFTISRDNAKNTVYLQMNSLKPEDTAVYYCAVYATYYWSFWYWGQGTQVTVSS

SEQ ID NO: 17081 - protein, 122 aa, Artificial Sequence
  Chemically Synthesized
QVQLQESGGGLVQAGGSLRLSCAASGNIFTAYAMGWYRQAPGKERELVAAIGGGGTTYYADSVKGRFTISRDNAKNTVYLQMNSLKPEDTAVYYCAVARYDISVSWTTHRYWGQGTQVTVSS

SEQ ID NO: 17082 - protein, 112 aa, Artificial Sequence
  Chemically Synthesized
QVQLQESGGGLVQAGGSLRLSCAASGTISIAYSMGWYRQAPGKERELVATIDAGGSTNYADSVKGRFTISRDNAKNTVYLQMNSLKPEDTAVYYCAASLLYWGQGTQVTVSS

SEQ ID NO: 17083 - protein, 118 aa, Artificial Sequence
  Chemically Synthesized
QVQLQESGGGLVQAGGSLRLSCAASGSISAYRIMGWYRQAPGKERELVATIGPGTSTNYADSVKGRFTISRDNAKNTVYLQMNSLKPEDTAVYYCAAIGTYSGVHDYWGQGTQVTVSS

SEQ ID NO: 17084 - protein, 118 aa, Artificial Sequence
  Chemically Synthesized
QVQLQESGGGLVQAGGSLRLSCAASGNISWPYYMGWYRQAPGKEREFVAAIGTGTNTYYADSVKGRFTISRDNAKNTVYLQMNSLKPEDTAVYYCAVVTGGGEYYVYWGQGTQVTVSS

SEQ ID NO: 17085 - protein, 122 aa, Artificial Sequence
  Chemically Synthesized
QVQLQESGGGLVQAGGSLRLSCAASGYISTSYPMGWYRQAPGKERELVAAISDGTSTNYADSVKGRFTISRDNAKNTVYLQMNSLKPEDTAVYYCAVTNDWVPRGLSDHAYWGQGTQVTVSS

SEQ ID NO: 17086 - protein, 125 aa, Artificial Sequence
  Chemically Synthesized
QVQLQESGGGLVQAGGSLRLSCAASGTISVDGSMGWYRQAPGKEREFVATIGTGATTNYADSVKGRFTISRDNAKNTVYLQMNSLKPEDTAVYYCAANDPDENRNTLLVVLFMYWGQGTQVTVSS

SEQ ID NO: 17087 - protein, 118 aa, Artificial Sequence
  Chemically Synthesized
QVQLQESGGGLVQAGGSLRLSCAASGTISWQVSMGWYRQAPGKERELVAAIGDGASTYYADSVKGRFTISRDNAKNTVYLQMNSLKPEDTAVYYCAAHDYVDGAYSYWGQGTQVTVSS

SEQ ID NO: 17088 - protein, 125 aa, Artificial Sequence
  Chemically Synthesized
QVQLQESGGGLVQAGGSLRLSCAASGYIFVTGQMGWYRQAPGKEREFVAAIDKGSNTNYADSVKGRFTISRDNAKNTVYLQMNSLKPEDTAVYYCAAGDGSNNRGSVTLNSVMYWGQGTQVTVSS

SEQ ID NO: 17089 - protein, 118 aa, Artificial Sequence
  Chemically Synthesized
QVQLQESGGGLVQAGGSLRLSCAASGTISLRDPMGWYRQAPGKEREFVASISRGSNTNYADSVKGRFTISRDNAKNTVYLQMNSLKPEDTAVYYCAAISAGRALHYYWGQGTQVTVSS

SEQ ID NO: 17090 - protein, 118 aa, Artificial Sequence
  Chemically Synthesized
QVQLQESGGGLVQAGGSLRLSCAASGTISTQYIMGWYRQAPGKEREFVASINYGGITNYADSVKGRFTISRDNAKNTVYLQMNSLKPEDTAVYYCAALQYNGGRHYYWGQGTQVTVSS

SEQ ID NO: 17091 - protein, 122 aa, Artificial Sequence
  Chemically Synthesized
QVQLQESGGGLVQAGGSLRLSCAASGTISVLWRMGWYRQAPGKEREFVAGISRGASTYYADSVKGRFTISRDNAKNTVYLQMNSLKPEDTAVYYCAAVDYAPQRVTPYHSYWGQGTQVTVSS

SEQ ID NO: 17092 - protein, 118 aa, Artificial Sequence
  Chemically Synthesized
QVQLQESGGGLVQAGGSLRLSCAASGNISQHYNMGWYRQAPGKERELVATINYGATTNYADSVKGRFTISRDNAKNTVYLQMNSLKPEDTAVYYCAATWYDPSRLIYWGQGTQVTVSS

SEQ ID NO: 17093 - protein, 126 aa, Artificial Sequence
  Chemically Synthesized
QVQLQESGGGLVQAGGSLRLSCAASGNIFDYKYMGWYRQAPGKEREFVAAIDRGGTTYYADSVKGRFTISRDNAKNTVYLQMNSLKPEDTAVYYCAVYHNRQYYTRDAYHVSHLYWGQGTQVTVSS

SEQ ID NO: 17094 - protein, 118 aa, Artificial Sequence
  Chemically Synthesized
QVQLQESGGGLVQAGGSLRLSCAASGTISDYYYMGWYRQAPGKEREFVAAINGGASTNYADSVKGRFTISRDNAKNTVYLQMNSLKPEDTAVYYCAVGPRVVAYLAYWGQGTQVTVSS

SEQ ID NO: 17095 - protein, 121 aa, Artificial Sequence
  Chemically Synthesized
QVQLQESGGGLVQAGGSLRLSCAASGNISFRDDMGWYRQAPGKERELVATIDDGASTYYADSVKGRFTISRDNAKNTVYLQMNSLKPEDTAVYYCAVTYLYVNAEGASLYWGQGTQVTVSS

SEQ ID NO: 17096 - protein, 122 aa, Artificial Sequence
  Chemically Synthesized
QVQLQESGGGLVQAGGSLRLSCAASGNISGQQVMGWYRQAPGKEREFVAGINWGTITNYADSVKGRFTISRDNAKNTVYLQMNSLKPEDTAVYYCAALDYSQSTDYRFHSYWGQGTQVTVSS

SEQ ID NO: 17097 - protein, 117 aa, Artificial Sequence
  Chemically Synthesized
QVQLQESGGGLVQAGGSLRLSCAASGYIFRQLVMGWYRQAPGKERELVAAIAAGGIPYADSVKGRFTISRDNAKNTVYLQMNSLKPEDTAVYYCAVRYDARTQYGYWGQGTQVTVSS

SEQ ID NO: 17098 - protein, 117 aa, Artificial Sequence
  Chemically Synthesized
QVQLQESGGGLVQAGGSLRLSCAASGTFLLRCMGWYRQAPGKEREFVASINNGTTTNYADSVKGRFTISRDNAKNTVYLQMNSLKPEDTAVYYCAVEQDRTAGHGYWGQGTQVTVSS

SEQ ID NO: 17099 - protein, 118 aa, Artificial Sequence
  Chemically Synthesized
QVQLQESGGGLVQAGGSLRLSCAASGTISKSKHMGWYRQAPGKEREFVAAISNGATTNYADSVKGRFTISRDNAKNTVYLQMNSLKPEDTAVYYCAAVSYVDRYHYYWGQGTQVTVSS

SEQ ID NO: 17100 - protein, 118 aa, Artificial Sequence
  Chemically Synthesized
QVQLQESGGGLVQAGGSLRLSCAASGTISYDYIMGWYRQAPGKEREFVATITVGGNTYYADSVKGRFTISRDNAKNTVYLQMNSLKPEDTAVYYCAAVRDAYAPLDYWGQGTQVTVSS

SEQ ID NO: 17101 - protein, 118 aa, Artificial Sequence
  Chemically Synthesized
QVQLQESGGGLVQAGGSLRLSCAASGTISDPGSMGWYRQAPGKEREFVAGITAGGTTNYADSVKGRFTISRDNAKNTVYLQMNSLKPEDTAVYYCAALYQIVGYHYYWGQGTQVTVSS

SEQ ID NO: 17102 - protein, 118 aa, Artificial Sequence
  Chemically Synthesized
QVQLQESGGGLVQAGGSLRLSCAASGSISRLEGMGWYRQAPGKEREFVAAIAQGTTTYYADSVKGRFTISRDNAKNTVYLQMNSLKPEDTAVYYCAAVSRPLLRYYYWGQGTQVTVSS

SEQ ID NO: 17103 - protein, 118 aa, Artificial Sequence
  Chemically Synthesized
QVQLQESGGGLVQAGGSLRLSCAASGNIFDFTSMGWYRQAPGKERELVAAIGNGASTNYADSVKGRFTISRDNAKNTVYLQMNSLKPEDTAVYYCAVEKLRYDPFDYWGQGTQVTVSS

SEQ ID NO: 17104 - protein, 118 aa, Artificial Sequence
  Chemically Synthesized
QVQLQESGGGLVQAGGSLRLSCAASGNIFYYSLMGWYRQAPGKEREFVASITQGGITYYADSVKGRFTISRDNAKNTVYLQMNSLKPEDTAVYYCAVFPVWPYYLLYWGQGTQVTVSS

SEQ ID NO: 17105 - protein, 121 aa, Artificial Sequence
  Chemically Synthesized
QVQLQESGGGLVQAGGSLRLSCAASGYIFPVFIMGWYRQAPGKEREFVASIASVVVPYADSVKGRFTISRDNAKNTVYLQMNSLKPEDTAVYYCAAYLRCFCLVRRFFCYWGQGTQVTVSS

SEQ ID NO: 17106 - protein, 118 aa, Artificial Sequence
  Chemically Synthesized
QVQLQESGGGLVQAGGSLRLSCAASGNIFGLWRMGWYRQAPGKERELVAAINDGGTTNYADSVKGRFTISRDNAKNTVYLQMNSLKPEDTAVYYCAVLIQYDNYHFYWGQGTQVTVSS

SEQ ID NO: 17107 - protein, 121 aa, Artificial Sequence
  Chemically Synthesized
QVQLQESGGGLVQAGGSLRLSCAASGTISGYYDMGWYRQAPGKEREFVATIGNGSITYYADSVKGRFTISRDNAKNTVYLQMNSLKPEDTAVYYCAANDLVVSLLRTTFYWGQGTQVTVSS

SEQ ID NO: 17108 - protein, 117 aa, Artificial Sequence
  Chemically Synthesized
QVQLQESGGGLVQAGGSLRLSCAASGTIFGPDLMGWYRQAPGKEREFVAAIAIGASTNYADSVKGRFTISRDNAKNTVYLQMNSLKPEDTAVYYCAASTSTVLLFYWGQGTQVTVSS

SEQ ID NO: 17109 - protein, 117 aa, Artificial Sequence
  Chemically Synthesized
QVQLQESGGGLVQAGGSLRLSCAASGTISGPYDMGWYRQAPGKERELVASIASGANTNYADSVKGRFTISRDNAKNTVYLQMNSLKPEDTAVYYCAVYTDATSLLYWGQGTQVTVSS

SEQ ID NO: 17110 - protein, 126 aa, Artificial Sequence
  Chemically Synthesized
QVQLQESGGGLVQAGGSLRLSCAASGYISGDPDMGWYRQAPGKEREFVASISTGANTYYADSVKGRFTISRDNAKNTVYLQMNSLKPEDTAVYYCAVVGPYDYVSRAYDWYDHYYWGQGTQVTVSS

SEQ ID NO: 17111 - protein, 121 aa, Artificial Sequence
  Chemically Synthesized
QVQLQESGGGLVQAGGSLRLSCAASGTISDDGTMGWYRQAPGKERELVPVLVTVLVPYADSVKGRFTISRDNAKNTVYLQMNSLKPEDTAVYYCAVRPYDFPNSGAVLRYWGQGTQVTVSS

SEQ ID NO: 17112 - protein, 122 aa, Artificial Sequence
  Chemically Synthesized
QVQLQESGGGLVQAGGSLRLSCAASGNISYRYVMGWYRQAPGKERELVATIDYGTITYYADSVKGRFTISRDNAKNTVYLQMNSLKPEDTAVYYCAAYYYNNTYPWSSHDYWGQGTQVTVSS

SEQ ID NO: 17113 - protein, 113 aa, Artificial Sequence
  Chemically Synthesized
QVQLQESGGGLVQAGGSLRLSCAASGYISRTRSMGWYRQAPGKEREFVAGITTGGTTYYADSVKGRFTISRDNAKNTVYLQMNSLKPEDTAVYYCAADWSLYWGQGTQVTVSS

SEQ ID NO: 17114 - protein, 122 aa, Artificial Sequence
  Chemically Synthesized
QVQLQESGGGLVQAGGSLRLSCAASGTISGTANMGWYRQAPGKEREFVAAIGLGTNTNYADSVKGRFTISRDNAKNTVYLQMNSLKPEDTAVYYCAADHSARSFDYTYYVYWGQGTQVTVSS

SEQ ID NO: 17115 - protein, 118 aa, Artificial Sequence
  Chemically Synthesized
QVQLQESGGGLVQAGGSLRLSCAASGNIFDPYVMGWYRQAPGKEREFVAGIDDGANTNYADSVKGRFTISRDNAKNTVYLQMNSLKPEDTAVYYCAVVHIYSPRHYYWGQGTQVTVSS

SEQ ID NO: 17116 - protein, 118 aa, Artificial Sequence
  Chemically Synthesized
QVQLQESGGGLVQAGGSLRLSCAASGTISFERGMGWYRQAPGKERELVATIDPGGITNYADSVKGRFTISRDNAKNTVYLQMNSLKPEDTAVYYCAVANYDDNSYGYWGQGTQVTVSS

SEQ ID NO: 17117 - protein, 117 aa, Artificial Sequence
  Chemically Synthesized
QVQLQESGGGLVQAGGSLRLSCAASGYIFYADSMGWYRQAPGKERELVAGIGFGANTNYADSVKGRFTISRDNAKNTVYLQMNSLKPEDTAVYYCAADTTDPPQYYWGQGTQVTVSS

SEQ ID NO: 17118 - protein, 118 aa, Artificial Sequence
  Chemically Synthesized
QVQLQESGGGLVQAGGSLRLSCAASGTISYWYGMGWYRQAPGKERELVASIGTGTTTNYADSVKGRFTISRDNAKNTVYLQMNSLKPEDTAVYYCAADNGWWRRLRYWGQGTQVTVSS

SEQ ID NO: 17119 - protein, 112 aa, Artificial Sequence
  Chemically Synthesized
QVQLQESGGGLVQAGGSLRLSCAASGSISTQGYMGWYRQAPGKERELGSTTYYADSVKGRFTISRDNAKNTVYLQMNSLKPEDTAVYYCAVFRTQGDGYDYWGQGTQVTVSS

SEQ ID NO: 17120 - protein, 117 aa, Artificial Sequence
  Chemically Synthesized
QVQLQESGGGLVQAGGSLRLSCAASGYIFRTWYMGWYRQAPGKEREFVAGITPGGTTNYADSVKGRFTISRDNAKNTVYLQMNSLKPEDTAVYYCAFSLYVSFYVYWGQGTQVTVSS

SEQ ID NO: 17121 - protein, 118 aa, Artificial Sequence
  Chemically Synthesized
QVQLQESGGGLVQAGGSLRLSCAASGYIFDPGGMGWYRQAPGKERELVAAIALGTITNYADSVKGRFTISRDNAKNTVYLQMNSLKPEDTAVYYCAVVIYTDGWHAYWGQGTQVTVSS

SEQ ID NO: 17122 - protein, 116 aa, Artificial Sequence
  Chemically Synthesized
QVQLQESGGGLVQAGGSLRLSCAASGSISPFDHMGWYRQAPGKERELLPVLLKVLLPYADSVKGRFTISRDNAKNTVYLQMNSLKPEDTAVYYCAAWISLTTRFYWGQGTQVTVSS

SEQ ID NO: 17123 - protein, 125 aa, Artificial Sequence
  Chemically Synthesized
QVQLQESGGGLVQAGGSLRLSCAASGTISRWRTMGWYRQAPGKERELVASINTGTTTNYADSVKGRFTISRDNAKNTVYLQMNSLKPEDTAVYYCAVLGFPIPPLDTDENLHLYWGQGTQVTVSS

SEQ ID NO: 17124 - protein, 122 aa, Artificial Sequence
  Chemically Synthesized
QVQLQESGGGLVQAGGSLRLSCAASGNISDRTTMGWYRQAPGKEREFVAGITQGGSTNYADSVKGRFTISRDNAKNTVYLQMNSLKPEDTAVYYCAVLYDYAVHAYHVHYYWGQGTQVTVSS

SEQ ID NO: 17125 - protein, 118 aa, Artificial Sequence
  Chemically Synthesized
QVQLQESGGGLVQAGGSLRLSCAASGTIFIRDHMGWYRQAPGKERELVASIGLGAITNYADSVKGRFTISRDNAKNTVYLQMNSLKPEDTAVYYCAAQTAPDLSHPYWGQGTQVTVSS

SEQ ID NO: 17126 - protein, 126 aa, Artificial Sequence
  Chemically Synthesized
QVQLQESGGGLVQAGGSLRLSCAASGNIFDGGVMGWYRQAPGKERELVAGIGPGSTTNYADSVKGRFTISRDNAKNTVYLQMNSLKPEDTAVYYCAAVPGDSIQYASYGAYWHLYWGQGTQVTVSS

SEQ ID NO: 17127 - protein, 116 aa, Artificial Sequence
  Chemically Synthesized
QVQLQESGGGLVQAGGSLRLSCAASGNISTTMGWYRQAPGKEREFVAGITQGANTNYADSVKGRFTISRDNAKNTVYLQMNSLKPEDTAVYYCAAWVGGAYVHAYWGQGTQVTVSS

SEQ ID NO: 17128 - protein, 122 aa, Artificial Sequence
  Chemically Synthesized
QVQLQESGGGLVQAGGSLRLSCAASGNISDPYDMGWYRQAPGKEREFVAAITYGGITYYADSVKGRFTISRDNAKNTVYLQMNSLKPEDTAVYYCAADALPELAYLNDLEYWGQGTQVTVSS

SEQ ID NO: 17129 - protein, 122 aa, Artificial Sequence
  Chemically Synthesized
QVQLQESGGGLVQAGGSLRLSCAASGSISVSSTMGWYRQAPGKEREFVAGIGRGGSTNYADSVKGRFTISRDNAKNTVYLQMNSLKPEDTAVYYCAVLTGQTSAANLYLYYWGQGTQVTVSS

SEQ ID NO: 17130 - protein, 118 aa, Artificial Sequence
  Chemically Synthesized
QVQLQESGGGLVQAGGSLRLSCAASGNIFYTSTMGWYRQAPGKEREFVAGITYGATTNYADSVKGRFTISRDNAKNTVYLQMNSLKPEDTAVYYCAVVYSGSRTYWYWGQGTQVTVSS

SEQ ID NO: 17131 - protein, 118 aa, Artificial Sequence
  Chemically Synthesized
QVQLQESGGGLVQAGGSLRLSCAASGTISGRLVMGWYRQAPGKERELVAGIGFGGNTNYADSVKGRFTISRDNAKNTVYLQMNSLKPEDTAVYYCAAISHADPRFYYWGQGTQVTVSS

SEQ ID NO: 17132 - protein, 122 aa, Artificial Sequence
  Chemically Synthesized
QVQLQESGGGLVQAGGSLRLSCAASGYISGRLHMGWYRQAPGKEREFVASISDGGTTNYADSVKGRFTISRDNAKNTVYLQMNSLKPEDTAVYYCAAVIIPWRDHEGTHYYWGQGTQVTVSS

SEQ ID NO: 17133 - protein, 119 aa, Artificial Sequence
  Chemically Synthesized
QVQLQESGGGLVQAGGSLRLSCAASGNISWRYVMGWYRQAPGKEREFVAGINWGSNTNYADSVKGRFTISRDNAKNTVYLQMNSLKPEDTAVYYCAVIDVVDGGYHYYWGQGTQVTVSS

SEQ ID NO: 17134 - protein, 126 aa, Artificial Sequence
  Chemically Synthesized
QVQLQESGGGLVQAGGSLRLSCAASGYISYTEDMGWYRQAPGKERELVAAIDEGANTYYADSVKGRFTISRDNAKNTVYLQMNSLKPEDTAVYYCAANSTDYHTIVYDRTNHHPYWGQGTQVTVSS

SEQ ID NO: 17135 - protein, 117 aa, Artificial Sequence
  Chemically Synthesized
QVQLQESGGGLVQAGGSLRLSCAASGSISTYIVMGWYRQAPGKEREFVATINVGALPYADSVKGRFTISRDNAKNTVYLQMNSLKPEDTAVYYCAAYDEPPDLLVYWGQGTQVTVSS

SEQ ID NO: 17136 - protein, 118 aa, Artificial Sequence
  Chemically Synthesized
QVQLQESGGGLVQAGGSLRLSCAASGNISSVYGMGWYRQAPGKEREFVAGIGSGSTTNYADSVKGRFTISRDNAKNTVYLQMNSLKPEDTAVYYCAALSLDRGYLYYWGQGTQVTVSS

SEQ ID NO: 17137 - protein, 122 aa, Artificial Sequence
  Chemically Synthesized
QVQLQESGGGLVQAGGSLRLSCAASGTIFRYWAMGWYRQAPGKERELVAGIAHGTSTYYADSVKGRFTISRDNAKNTVYLQMNSLKPEDTAVYYCAAYYTPYVFSRGLYYYWGQGTQVTVSS

SEQ ID NO: 17138 - protein, 121 aa, Artificial Sequence
  Chemically Synthesized
QVQLQESGGGLVQAGGSLRLSCAASGTIFQWVQMGWYRQAPGKEREFVAGIADGANTNYADSVKGRFTISRDNAKNTVYLQMNSLKPEDTAVYYCAADYQYRKTTRLNLYWGQGTQVTVSS

SEQ ID NO: 17139 - protein, 119 aa, Artificial Sequence
  Chemically Synthesized
QVQLQESGGGLVQAGGSLRLSCAASGSIFSVMGWYRQAPGKEREFVATITKGTTTYYADSVKGRFTISRDNAKNTVYLQMNSLKPEDTAVYYCAVDNSHPYSHDWSIYWGQGTQVTVSS

SEQ ID NO: 17140 - protein, 126 aa, Artificial Sequence
  Chemically Synthesized
QVQLQESGGGLVQAGGSLRLSCAASGSISYHNKMGWYRQAPGKEREFVAAISYGGITNYADSVKGRFTISRDNAKNTVYLQMNSLKPEDTAVYYCAAVSYDYTAGLQDARRYHGYWGQGTQVTVSS

SEQ ID NO: 17141 - protein, 116 aa, Artificial Sequence
  Chemically Synthesized
QVQLQESGGGLVQAGGSLRLSCAASGNIFDRRDMGWYRQAPGKEREFVAGISYGTTTNYADSVKGRFTISRDNAKNTVYLQMNSLKPEDTAVYYCAVGPGRDHTYWGQGTQVTVSS

SEQ ID NO: 17142 - protein, 118 aa, Artificial Sequence
  Chemically Synthesized
QVQLQESGGGLVQAGGSLRLSCAASGTISTAPIMGWYRQAPGKEREFVAGISFGGTTNYADSVKGRFTISRDNAKNTVYLQMNSLKPEDTAVYYCAAVWYYSFYHWYWGQGTQVTVSS

SEQ ID NO: 17143 - protein, 122 aa, Artificial Sequence
  Chemically Synthesized
QVQLQESGGGLVQAGGSLRLSCAASGTISFWVDMGWYRQAPGKERELVAAIGSGGNTNYADSVKGRFTISRDNAKNTVYLQMNSLKPEDTAVYYCAVRYNEDVSNAYVHYYWGQGTQVTVSS

SEQ ID NO: 17144 - protein, 117 aa, Artificial Sequence
  Chemically Synthesized
QVQLQESGGGLVQAGGSLRLSCAASGYISAVIQMGWYRQAPGKERELVASIDTGVLPYADSVKGRFTISRDNAKNTVYLQMNSLKPEDTAVYYCAVPTTYFGDYVYWGQGTQVTVSS

SEQ ID NO: 17145 - protein, 112 aa, Artificial Sequence
  Chemically Synthesized
QVQLQESGGGLVQAGGSLRLSCAASGSISSREHMGWYRQAPGKERELVATIGAGSITNYADSVKGRFTISRDNAKNTVYLQMNSLKPEDTAVYYCAVTHYYWGQGTQVTVSS

SEQ ID NO: 17146 - protein, 121 aa, Artificial Sequence
  Chemically Synthesized
QVQLQESGGGLVQAGGSLRLSCAASGNIFSSYIMGWYRQAPGKEREFVAGINSGTNTNYADSVKGRFTISRDNAKNTVYLQMNSLKPEDTAVYYCAAVRRYYDNYDLLYYWGQGTQVTVSS

SEQ ID NO: 17147 - protein, 118 aa, Artificial Sequence
  Chemically Synthesized
QVQLQESGGGLVQAGGSLRLSCAASGSISSQYVMGWYRQAPGKERELVASIDFGGNTYYADSVKGRFTISRDNAKNTVYLQMNSLKPEDTAVYYCAAADYYHYWFAYWGQGTQVTVSS

SEQ ID NO: 17148 - protein, 122 aa, Artificial Sequence
  Chemically Synthesized
QVQLQESGGGLVQAGGSLRLSCAASGTIFGQLIMGWYRQAPGKEREFVAAIGKGGITNYADSVKGRFTISRDNAKNTVYLQMNSLKPEDTAVYYCAAIDYLRRTSAHDHYYWGQGTQVTVSS

SEQ ID NO: 17149 - protein, 118 aa, Artificial Sequence
  Chemically Synthesized
QVQLQESGGGLVQAGGSLRLSCAASGNISRYLGMGWYRQAPGKERELVASITWGAITNYADSVKGRFTISRDNAKNTVYLQMNSLKPEDTAVYYCAVVYRDSGYLYYWGQGTQVTVSS

SEQ ID NO: 17150 - protein, 122 aa, Artificial Sequence
  Chemically Synthesized
QVQLQESGGGLVQAGGSLRLSCAASGNISSRDDMGWYRQAPGKEREFVASIGIGGSTNYADSVKGRFTISRDNAKNTVYLQMNSLKPEDTAVYYCAVGIDGSDTTAAYLVYWGQGTQVTVSS

SEQ ID NO: 17151 - protein, 118 aa, Artificial Sequence
  Chemically Synthesized
QVQLQESGGGLVQAGGSLRLSCAASGTIFPRVVMGWYRQAPGKERELVAGIDDGSTTNYADSVKGRFTISRDNAKNTVYLQMNSLKPEDTAVYYCAVDSPPSTVHDYWGQGTQVTVSS

SEQ ID NO: 17152 - protein, 117 aa, Artificial Sequence
  Chemically Synthesized
QVQLQESGGGLVQAGGSLRLSCAASGTIFYTRYMGWYRQAPGKERELVATIAEGSNTYADSVKGRFTISRDNAKNTVYLQMNSLKPEDTAVYYCAADYYEADVHGYWGQGTQVTVSS

SEQ ID NO: 17153 - protein, 118 aa, Artificial Sequence
  Chemically Synthesized
QVQLQESGGGLVQAGGSLRLSCAASGSISLDVSMGWYRQAPGKEREFVAAIGYGGNTYYADSVKGRFTISRDNAKNTVYLQMNSLKPEDTAVYYCAALIRTHRYHSYWGQGTQVTVSS

SEQ ID NO: 17154 - protein, 118 aa, Artificial Sequence
  Chemically Synthesized
QVQLQESGGGLVQAGGSLRLSCAASGTIFLTASMGWYRQAPGKEREFVAGIDPGANTYYADSVKGRFTISRDNAKNTVYLQMNSLKPEDTAVYYCAVDLPYQTIFLYWGQGTQVTVSS

SEQ ID NO: 17155 - protein, 117 aa, Artificial Sequence
  Chemically Synthesized
QVQLQESGGGLVQAGGSLRLSCAASGTIFSRKMGWYRQAPGKEREFVAGGGTTNYADSVKGRFTISRDNAKNTVYLQMNSLKPEDTAVYYCAVSYRPSLTFTVVIYWGQGTQVTVSS

SEQ ID NO: 17156 - protein, 118 aa, Artificial Sequence
  Chemically Synthesized
QVQLQESGGGLVQAGGSLRLSCAASGTISSAKPMGWYRQAPGKERELVASIGYGGTTNYADSVKGRFTISRDNAKNTVYLQMNSLKPEDTAVYYCAATYVTGHTLVYWGQGTQVTVSS

SEQ ID NO: 17157 - protein, 126 aa, Artificial Sequence
  Chemically Synthesized
QVQLQESGGGLVQAGGSLRLSCAASGTISYFDTMGWYRQAPGKEREFVASISYGGSTYYADSVKGRFTISRDNAKNTVYLQMNSLKPEDTAVYYCAAIGHTDTHTYPYYSTRHYYWGQGTQVTVSS

SEQ ID NO: 17158 - protein, 122 aa, Artificial Sequence
  Chemically Synthesized
QVQLQESGGGLVQAGGSLRLSCAASGSISFPYRMGWYRQAPGKEREFVASIARGTSTNYADSVKGRFTISRDNAKNTVYLQMNSLKPEDTAVYYCAAIVYYPYTAPRYLYYWGQGTQVTVSS

SEQ ID NO: 17159 - protein, 122 aa, Artificial Sequence
  Chemically Synthesized
QVQLQESGGGLVQAGGSLRLSCAASGNIFDANAMGWYRQAPGKERELVAAIDYGGITYYADSVKGRFTISRDNAKNTVYLQMNSLKPEDTAVYYCAADGYADYYDRPWYAYWGQGTQVTVSS

SEQ ID NO: 17160 - protein, 122 aa, Artificial Sequence
  Chemically Synthesized
QVQLQESGGGLVQAGGSLRLSCAASGTISALYLMGWYRQAPGKEREFVAGIDYGTTTYYADSVKGRFTISRDNAKNTVYLQMNSLKPEDTAVYYCAATFYGYYRVVDDYPYWGQGTQVTVSS

SEQ ID NO: 17161 - protein, 122 aa, Artificial Sequence
  Chemically Synthesized
QVQLQESGGGLVQAGGSLRLSCAASGTIFDRVPMGWYRQAPGKERELVATITFGTTTNYADSVKGRFTISRDNAKNTVYLQMNSLKPEDTAVYYCAAYQDLSTHKTVWFGYWGQGTQVTVSS

SEQ ID NO: 17162 - protein, 118 aa, Artificial Sequence
  Chemically Synthesized
QVQLQESGGGLVQAGGSLRLSCAASGTIFALVIMGWYRQAPGKEREFVASIGRGTNTNYADSVKGRFTISRDNAKNTVYLQMNSLKPEDTAVYYCAVVNISSYEYIYWGQGTQVTVSS

SEQ ID NO: 17163 - protein, 121 aa, Artificial Sequence
  Chemically Synthesized
QVQLQESGGGLVQAGGSLRLSCAASGTISARDYMGWYRQAPGKERELVAGIGYGTTTYYADSVKGRFTISRDNAKNTVYLQMNSLKPEDTAVYYCAAYGDSRLSSLSNIYWGQGTQVTVSS

SEQ ID NO: 17164 - protein, 117 aa, Artificial Sequence
  Chemically Synthesized
QVQLQESGGGLVQAGGSLRLSCAASGSISSAFMGWYRQAPGKEREFVAGINPGANTNYADSVKGRFTISRDNAKNTVYLQMNSLKPEDTAVYYCAALIRDISVLYYWGQGTQVTVSS

SEQ ID NO: 17165 - protein, 122 aa, Artificial Sequence
  Chemically Synthesized
QVQLQESGGGLVQAGGSLRLSCAASGSISDPAVMGWYRQAPGKEREFVAGIDYGATTNYADSVKGRFTISRDNAKNTVYLQMNSLKPEDTAVYYCAVVTRGYGAVTRFLGYWGQGTQVTVSS

SEQ ID NO: 17166 - protein, 117 aa, Artificial Sequence
  Chemically Synthesized
QVQLQESGGGLVQAGGSLRLSCAASGTIFVVYYMGWYRQAPGKERELVASINKGSNTYYADSVKGRFTISRDNAKNTVYLQMNSLKPEDTAVYYCAAQKTTTISMYWGQGTQVTVSS

SEQ ID NO: 17167 - protein, 118 aa, Artificial Sequence
  Chemically Synthesized
QVQLQESGGGLVQAGGSLRLSCAASGNISAYVSMGWYRQAPGKEREFVAGINRGATTNYADSVKGRFTISRDNAKNTVYLQMNSLKPEDTAVYYCAAIQYYAAYLSYWGQGTQVTVSS

SEQ ID NO: 17168 - protein, 118 aa, Artificial Sequence
  Chemically Synthesized
QVQLQESGGGLVQAGGSLRLSCAASGTISARAGMGWYRQAPGKEREFVAGISIGTNTNYADSVKGRFTISRDNAKNTVYLQMNSLKPEDTAVYYCAVAEYDRDWLAYWGQGTQVTVSS

SEQ ID NO: 17169 - protein, 116 aa, Artificial Sequence
  Chemically Synthesized
QVQLQESGGGLVQAGGSLRLSCAASGTIFRDYAMGWYRQAPGKEREFVAAITSGSPYADSVKGRFTISRDNAKNTVYLQMNSLKPEDTAVYYCAVNLRPPKYLGYWGQGTQVTVSS

SEQ ID NO: 17170 - protein, 118 aa, Artificial Sequence
  Chemically Synthesized
QVQLQESGGGLVQAGGSLRLSCAASGTISNGYNMGWYRQAPGKERELVAAIAVGATTNYADSVKGRFTISRDNAKNTVYLQMNSLKPEDTAVYYCAAIGYDEGYHYYWGQGTQVTVSS

SEQ ID NO: 17171 - protein, 118 aa, Artificial Sequence
  Chemically Synthesized
QVQLQESGGGLVQAGGSLRLSCAASGTISPPIIMGWYRQAPGKEREFVAAIGAGSTTNYADSVKGRFTISRDNAKNTVYLQMNSLKPEDTAVYYCAAIGNISPLHGYWGQGTQVTVSS

SEQ ID NO: 17172 - protein, 118 aa, Artificial Sequence
  Chemically Synthesized
QVQLQESGGGLVQAGGSLRLSCAASGSIFDRYAMGWYRQAPGKERELVAGITDGTSTNYADSVKGRFTISRDNAKNTVYLQMNSLKPEDTAVYYCAVEGVDRNILEYWGQGTQVTVSS

SEQ ID NO: 17173 - protein, 123 aa, Artificial Sequence
  Chemically Synthesized
QVQLQESGGGLVQAGGSLRLSCAASGTIFGLGYMGWYRQAPGKEREFVATIDYGSSTNYADSVKGRFTISRDNAKNTVYLQMNSLKPEDTAVYYCAAVTKGKVTSARSYHGYWGQGTQVTVSS

SEQ ID NO: 17174 - protein, 118 aa, Artificial Sequence
  Chemically Synthesized
QVQLQESGGGLVQAGGSLRLSCAASGSIFHTTYMGWYRQAPGKERELVAGITYGTSTNYADSVKGRFTISRDNAKNTVYLQMNSLKPEDTAVYYCAADRGESLFLAYWGQGTQVTVSS

SEQ ID NO: 17175 - protein, 120 aa, Artificial Sequence
  Chemically Synthesized
QVQLQESGGGLVQAGGSLRLSCAASGNIYRPSMGWYRQAPGKEREFVALLIRVVLPYADSVKGRFTISRDNAKNTVYLQMNSLKPEDTAVYYCAAALRGDVPDGGLYGYWGQGTQVTVSS

SEQ ID NO: 17176 - protein, 118 aa, Artificial Sequence
  Chemically Synthesized
QVQLQESGGGLVQAGGSLRLSCAASGNISGRTNMGWYRQAPGKEREFVASISRGGSTNYADSVKGRFTISRDNAKNTVYLQMNSLKPEDTAVYYCAVLYVHAVNHYYWGQGTQVTVSS

SEQ ID NO: 17177 - protein, 116 aa, Artificial Sequence
  Chemically Synthesized
QVQLQESGGGLVQAGGSLRLSCAASGYISRPTAMGWYRQAPGKERELVASISDGTITYYADSVKGRFTISRDNAKNTVYLQMNSLKPEDTAVYYCAAGTSSDHAYWGQGTQVTVSS

SEQ ID NO: 17178 - protein, 122 aa, Artificial Sequence
  Chemically Synthesized
QVQLQESGGGLVQAGGSLRLSCAASGSISSYSRMGWYRQAPGKEREFVAAITEGSSTYYADSVKGRFTISRDNAKNTVYLQMNSLKPEDTAVYYCAAVSRTGGLYVVYHGYWGQGTQVTVSS

SEQ ID NO: 17179 - protein, 118 aa, Artificial Sequence
  Chemically Synthesized
QVQLQESGGGLVQAGGSLRLSCAASGYIFRYDGMGWYRQAPGKEREFVAGIDAGTTTNYADSVKGRFTISRDNAKNTVYLQMNSLKPEDTAVYYCAAVVKTTLTTIYWGQGTQVTVSS

SEQ ID NO: 17180 - protein, 122 aa, Artificial Sequence
  Chemically Synthesized
QVQLQESGGGLVQAGGSLRLSCAASGYISRDTSMGWYRQAPGKERELVAAIAYGGNTYYADSVKGRFTISRDNAKNTVYLQMNSLKPEDTAVYYCAAYLTDGRERSYSHYYWGQGTQVTVSS

SEQ ID NO: 17181 - protein, 126 aa, Artificial Sequence
  Chemically Synthesized
QVQLQESGGGLVQAGGSLRLSCAASGTIFYDSNMGWYRQAPGKEREFVAAIAYGSNTNYADSVKGRFTISRDNAKNTVYLQMNSLKPEDTAVYYCAVGAHTTDHPDAGNVPYHSYWGQGTQVTVSS

SEQ ID NO: 17182 - protein, 122 aa, Artificial Sequence
  Chemically Synthesized
QVQLQESGGGLVQAGGSLRLSCAASGNIFDLYIMGWYRQAPGKERELVAAIGIGGTTYYADSVKGRFTISRDNAKNTVYLQMNSLKPEDTAVYYCAASGGLARVYTDSLWYWGQGTQVTVSS

SEQ ID NO: 17183 - protein, 118 aa, Artificial Sequence
  Chemically Synthesized
QVQLQESGGGLVQAGGSLRLSCAASGTIFGSYYMGWYRQAPGKERELVAAIAPGANTNYADSVKGRFTISRDNAKNTVYLQMNSLKPEDTAVYYCAVVVRIDGYHGYWGQGTQVTVSS

SEQ ID NO: 17184 - protein, 118 aa, Artificial Sequence
  Chemically Synthesized
QVQLQESGGGLVQAGGSLRLSCAASGTIFYWTRMGWYRQAPGKEREFVAGIAEGSNTYYADSVKGRFTISRDNAKNTVYLQMNSLKPEDTAVYYCAVVYYDDAWFSYWGQGTQVTVSS

SEQ ID NO: 17185 - protein, 118 aa, Artificial Sequence
  Chemically Synthesized
QVQLQESGGGLVQAGGSLRLSCAASGYISYLPIMGWYRQAPGKEREFVAAIAYGGIINYADSVKGRFTISRDNAKNTVYLQMNSLKPEDTAVYYCAAHVVDLILFLYWGQGTQVTVSS

SEQ ID NO: 17186 - protein, 118 aa, Artificial Sequence
  Chemically Synthesized
QVQLQESGGGLVQAGGSLRLSCAASGYISTRYGMGWYRQAPGKEREFVAGITRGGITNYADSVKGRFTISRDNAKNTVYLQMNSLKPEDTAVYYCAVVYYIDTYHHYWGQGTQVTVSS

SEQ ID NO: 17187 - protein, 118 aa, Artificial Sequence
  Chemically Synthesized
QVQLQESGGGLVQAGGSLRLSCAASGTISRDERMGWYRQAPGKERELVAGIGVGGNTNYADSVKGRFTISRDNAKNTVYLQMNSLKPEDTAVYYCAVRPPGGYLLYYWGQGTQVTVSS

SEQ ID NO: 17188 - protein, 126 aa, Artificial Sequence
  Chemically Synthesized
QVQLQESGGGLVQAGGSLRLSCAASGTISGAYVMGWYRQAPGKEREFVASITDGGNTNYADSVKGRFTISRDNAKNTVYLQMNSLKPEDTAVYYCAVYVGNDESGQPTAYTIYAYWGQGTQVTVSS

SEQ ID NO: 17189 - protein, 118 aa, Artificial Sequence
  Chemically Synthesized
QVQLQESGGGLVQAGGSLRLSCAASGTISATGSMGWYRQAPGKEREFVAGIGVGATTNYADSVKGRFTISRDNAKNTVYLQMNSLKPEDTAVYYCAAIFYDRAYHPYWGQGTQVTVSS

SEQ ID NO: 17190 - protein, 118 aa, Artificial Sequence
  Chemically Synthesized
QVQLQESGGGLVQAGGSLRLSCAASGYISTPSYMGWYRQAPGKEREFVAGISFGASTNYADSVKGRFTISRDNAKNTVYLQMNSLKPEDTAVYYCAAVLYTVVYHYYWGQGTQVTVSS

SEQ ID NO: 17191 - protein, 118 aa, Artificial Sequence
  Chemically Synthesized
QVQLQESGGGLVQAGGSLRLSCAASGNISHDYYMGWYRQAPGKEREFVATIGYGANTNYADSVKGRFTISRDNAKNTVYLQMNSLKPEDTAVYYCAATDAASGVHPYWGQGTQVTVSS

SEQ ID NO: 17192 - protein, 118 aa, Artificial Sequence
  Chemically Synthesized
QVQLQESGGGLVQAGGSLRLSCAASGYIFDRYVMGWYRQAPGKEREFVAGISEGSNTNYADSVKGRFTISRDNAKNTVYLQMNSLKPEDTAVYYCAALQWREDYHWYWGQGTQVTVSS

SEQ ID NO: 17193 - protein, 122 aa, Artificial Sequence
  Chemically Synthesized
QVQLQESGGGLVQAGGSLRLSCAASGNISTTLLMGWYRQAPGKEREFVATINDGTNTNYADSVKGRFTISRDNAKNTVYLQMNSLKPEDTAVYYCAVVYRTTLTRNRYYYYWGQGTQVTVSS

SEQ ID NO: 17194 - protein, 118 aa, Artificial Sequence
  Chemically Synthesized
QVQLQESGGGLVQAGGSLRLSCAASGNISHGYYMGWYRQAPGKEREFVAAINTGTSTNYADSVKGRFTISRDNAKNTVYLQMNSLKPEDTAVYYCAAIYFEFRYFYYWGQGTQVTVSS

SEQ ID NO: 17195 - protein, 118 aa, Artificial Sequence
  Chemically Synthesized
QVQLQESGGGLVQAGGSLRLSCAASGSIFAYPYMGWYRQAPGKERELVATIDYGASTYYADSVKGRFTISRDNAKNTVYLQMNSLKPEDTAVYYCAVWWYPYHYHYYWGQGTQVTVSS

SEQ ID NO: 17196 - protein, 118 aa, Artificial Sequence
  Chemically Synthesized
QVQLQESGGGLVQAGGSLRLSCAASGTISGRYAMGWYRQAPGKEREFVAAINRGGSTYYADSVKGRFTISRDNAKNTVYLQMNSLKPEDTAVYYCAAVNSFYPYHGYWGQGTQVTVSS

SEQ ID NO: 17197 - protein, 122 aa, Artificial Sequence
  Chemically Synthesized
QVQLQESGGGLVQAGGSLRLSCAASGYISYYTAMGWYRQAPGKEREFVAGIGDGSNTNYADSVKGRFTISRDNAKNTVYLQMNSLKPEDTAVYYCAAYRDRRYAHQVRLFYWGQGTQVTVSS

SEQ ID NO: 17198 - protein, 118 aa, Artificial Sequence
  Chemically Synthesized
QVQLQESGGGLVQAGGSLRLSCAASGTISSYTSMGWYRQAPGKEREFVAAIGSGTITNYADSVKGRFTISRDNAKNTVYLQMNSLKPEDTAVYYCAVLVAQHGWHYYWGQGTQVTVSS

SEQ ID NO: 17199 - protein, 117 aa, Artificial Sequence
  Chemically Synthesized
QVQLQESGGGLVQAGGSLRLSCAASGYILVLLMGWYRQAPGKERELVAAIDYGSSTNYADSVKGRFTISRDNAKNTVYLQMNSLKPEDTAVYYCAANGPGVRYHSYWGQGTQVTVSS

SEQ ID NO: 17200 - protein, 118 aa, Artificial Sequence
  Chemically Synthesized
QVQLQESGGGLVQAGGSLRLSCAASGNIFTIDTMGWYRQAPGKEREFVAAITYGANTNYADSVKGRFTISRDNAKNTVYLQMNSLKPEDTAVYYCAAILYRQTYYWYWGQGTQVTVSS

SEQ ID NO: 17201 - protein, 126 aa, Artificial Sequence
  Chemically Synthesized
QVQLQESGGGLVQAGGSLRLSCAASGTISVRYIMGWYRQAPGKEREFVAGIGYGAITYYADSVKGRFTISRDNAKNTVYLQMNSLKPEDTAVYYCAVPWSDAYVADTYIFPYLQYWGQGTQVTVSS

SEQ ID NO: 17202 - protein, 118 aa, Artificial Sequence
  Chemically Synthesized
QVQLQESGGGLVQAGGSLRLSCAASGNISRWISMGWYRQAPGKEREFVASISRGGITNYADSVKGRFTISRDNAKNTVYLQMNSLKPEDTAVYYCAALFQRDEYYYYWGQGTQVTVSS

SEQ ID NO: 17203 - protein, 118 aa, Artificial Sequence
  Chemically Synthesized
QVQLQESGGGLVQAGGSLRLSCAASGSIFGETDMGWYRQAPGKERELVASINNGASTYYADSVKGRFTISRDNAKNTVYLQMNSLKPEDTAVYYCAAASVLRYVYYYWGQGTQVTVSS

SEQ ID NO: 17204 - protein, 118 aa, Artificial Sequence
  Chemically Synthesized
QVQLQESGGGLVQAGGSLRLSCAASGTISDGPSMGWYRQAPGKEREFVAGINDGGTTYYADSVKGRFTISRDNAKNTVYLQMNSLKPEDTAVYYCAVLYYSRHVYYYWGQGTQVTVSS

SEQ ID NO: 17205 - protein, 118 aa, Artificial Sequence
  Chemically Synthesized
QVQLQESGGGLVQAGGSLRLSCAASGSISQDSSMGWYRQAPGKEREFVATISRGTTTNYADSVKGRFTISRDNAKNTVYLQMNSLKPEDTAVYYCAALFYDDRRHFYWGQGTQVTVSS

SEQ ID NO: 17206 - protein, 119 aa, Artificial Sequence
  Chemically Synthesized
QVQLQESGGGLVQAGGSLRLSCAASGSISLEYRMGWYRQAPGKERELVASIGDGGTTNYADSVKGRFTISRDNAKNTVYLQMNSLKPEDTAVYYCAAVYYIDGQYHGYWGQGTQVTVSS

SEQ ID NO: 17207 - protein, 121 aa, Artificial Sequence
  Chemically Synthesized
QVQLQESGGGLVQAGGSLRLSCAASGYISDYDKMGWYRQAPGKEREFVAGIADGASTYYADSVKGRFTISRDNAKNTVYLQMNSLKPEDTAVYYCALFTRGTSTSVCRFYWGQGTQVTVSS

SEQ ID NO: 17208 - protein, 118 aa, Artificial Sequence
  Chemically Synthesized
QVQLQESGGGLVQAGGSLRLSCAASGNISRSYKMGWYRQAPGKEREFVATITEGATTYYADSVKGRFTISRDNAKNTVYLQMNSLKPEDTAVYYCAAVDYDTAWHGYWGQGTQVTVSS

SEQ ID NO: 17209 - protein, 125 aa, Artificial Sequence
  Chemically Synthesized
QVQLQESGGGLVQAGGSLRLSCAASGTIFSTLMGWYRQAPGKERELVATIARGGSTNYADSVKGRFTISRDNAKNTVYLQMNSLKPEDTAVYYCAVAVYAYYPYYARGLIWLWYWGQGTQVTVSS

SEQ ID NO: 17210 - protein, 126 aa, Artificial Sequence
  Chemically Synthesized
QVQLQESGGGLVQAGGSLRLSCAASGSISVYYVMGWYRQAPGKEREFVAAISAGSTTNYADSVKGRFTISRDNAKNTVYLQMNSLKPEDTAVYYCAAIGRTYGDTYPRYTVYYNYWGQGTQVTVSS

SEQ ID NO: 17211 - protein, 118 aa, Artificial Sequence
  Chemically Synthesized
QVQLQESGGGLVQAGGSLRLSCAASGTIFARYAMGWYRQAPGKEREFVATIDPGSNTNYADSVKGRFTISRDNAKNTVYLQMNSLKPEDTAVYYCAVNGRGNHYYEYWGQGTQVTVSS

SEQ ID NO: 17212 - protein, 120 aa, Artificial Sequence
  Chemically Synthesized
QVQLQESGGGLVQAGGSLRLSCAASGSISTTRDMGWYRQAPGKERELVAAIDYGGNTYYADSVKGRFTISRDNAKNTVYLQMNSLKPEDTAVYYCAVYSTLLTLLLRFYWGQGTQVTVSS

SEQ ID NO: 17213 - protein, 117 aa, Artificial Sequence
  Chemically Synthesized
QVQLQESGGGLVQAGGSLRLSCAASGSISYSQLMGWYRQAPGKEREFVASITSGGTTNYADSVKGRFTISRDNAKNTVYLQMNSLKPEDTAVYYCAFMTLTKTSMYWGQGTQVTVSS

SEQ ID NO: 17214 - protein, 118 aa, Artificial Sequence
  Chemically Synthesized
QVQLQESGGGLVQAGGSLRLSCAASGTIFSLLVMGWYRQAPGKERELVASIDYGGNTYYADSVKGRFTISRDNAKNTVYLQMNSLKPEDTAVYYCAVPWRRNWQYWYWGQGTQVTVSS

SEQ ID NO: 17215 - protein, 124 aa, Artificial Sequence
  Chemically Synthesized
QVQLQESGGGLVQAGGSLRLSCAASGNISRPWTMGWYRQAPGKEREFVAGITVGSNTNYADSVKGRFTISRDNAKNTVYLQMNSLKPEDTAVYYCAALYIQRYENYVGQRHWYWGQGTQVTVSS

SEQ ID NO: 17216 - protein, 117 aa, Artificial Sequence
  Chemically Synthesized
QVQLQESGGGLVQAGGSLRLSCAASGTIFITNGMGWYRQAPGKEREFVAGIDIGSTTNYADSVKGRFTISRDNAKNTVYLQMNSLKPEDTAVYYCAASDAISSCLYWGQGTQVTVSS

SEQ ID NO: 17217 - protein, 118 aa, Artificial Sequence
  Chemically Synthesized
QVQLQESGGGLVQAGGSLRLSCAASGNISHRTNMGWYRQAPGKEREFVASIGSGSNTYYADSVKGRFTISRDNAKNTVYLQMNSLKPEDTAVYYCAAVNYYGGYHGYWGQGTQVTVSS

SEQ ID NO: 17218 - protein, 118 aa, Artificial Sequence
  Chemically Synthesized
QVQLQESGGGLVQAGGSLRLSCAASGTISRVAAMGWYRQAPGKEREFVAGIDFGASTNYADSVKGRFTISRDNAKNTVYLQMNSLKPEDTAVYYCAAIDGYPYHYYYWGQGTQVTVSS

SEQ ID NO: 17219 - protein, 118 aa, Artificial Sequence
  Chemically Synthesized
QVQLQESGGGLVQAGGSLRLSCAASGTISRKLYMGWYRQAPGKEREFVASIDDGANTYYADSVKGRFTISRDNAKNTVYLQMNSLKPEDTAVYYCAVVNNRGRYYYYWGQGTQVTVSS

SEQ ID NO: 17220 - protein, 118 aa, Artificial Sequence
  Chemically Synthesized
QVQLQESGGGLVQAGGSLRLSCAASGNIFNAYYMGWYRQAPGKEREFVASISLGGTTNYADSVKGRFTISRDNAKNTVYLQMNSLKPEDTAVYYCAAVRYDEKWLYYWGQGTQVTVSS

SEQ ID NO: 17221 - protein, 114 aa, Artificial Sequence
  Chemically Synthesized
QVQLQESGGGLVQAGGSLRLSCAASGYIFYTPYMGWYRQAPGKEREFVANYADSVKGRFTISRDNAKNTVYLQMNSLKPEDTAVYYCAVVDRGAADYVSGLAYWGQGTQVTVSS

SEQ ID NO: 17222 - protein, 126 aa, Artificial Sequence
  Chemically Synthesized
QVQLQESGGGLVQAGGSLRLSCAASGTIFGGPVMGWYRQAPGKERELVATINPGSTTYYADSVKGRFTISRDNAKNTVYLQMNSLKPEDTAVYYCAARVGISSDQEDPEFYRLGYWGQGTQVTVSS

SEQ ID NO: 17223 - protein, 118 aa, Artificial Sequence
  Chemically Synthesized
QVQLQESGGGLVQAGGSLRLSCAASGTISYRHAMGWYRQAPGKEREFVATIGNGTNTYYADSVKGRFTISRDNAKNTVYLQMNSLKPEDTAVYYCAAVNTSDHQHYYWGQGTQVTVSS

SEQ ID NO: 17224 - protein, 126 aa, Artificial Sequence
  Chemically Synthesized
QVQLQESGGGLVQAGGSLRLSCAASGSIFIYTEMGWYRQAPGKEREFVASISTGSTTNYADSVKGRFTISRDNAKNTVYLQMNSLKPEDTAVYYCAAFDGPAYWDVLSPAAWFDYWGQGTQVTVSS

SEQ ID NO: 17225 - protein, 118 aa, Artificial Sequence
  Chemically Synthesized
QVQLQESGGGLVQAGGSLRLSCAASGTISEPGYMGWYRQAPGKEREFVASITGGGTTNYADSVKGRFTISRDNAKNTVYLQMNSLKPEDTAVYYCAVAWIRQGYHGYWGQGTQVTVSS

SEQ ID NO: 17226 - protein, 118 aa, Artificial Sequence
  Chemically Synthesized
QVQLQESGGGLVQAGGSLRLSCAASGTISYLEYMGWYRQAPGKERELVAGIGGGGITNYADSVKGRFTISRDNAKNTVYLQMNSLKPEDTAVYYCAVISYTYRWYSYWGQGTQVTVSS

SEQ ID NO: 17227 - protein, 118 aa, Artificial Sequence
  Chemically Synthesized
QVQLQESGGGLVQAGGSLRLSCAASGSISYYRSMGWYRQAPGKEREFVAAIGTGGTTNYADSVKGRFTISRDNAKNTVYLQMNSLKPEDTAVYYCAAVGEQYPYYGYWGQGTQVTVSS

SEQ ID NO: 17228 - protein, 118 aa, Artificial Sequence
  Chemically Synthesized
QVQLQESGGGLVQAGGSLRLSCAASGTISGSYYMGWYRQAPGKEREFVATITPGANTNYADSVKGRFTISRDNAKNTVYLQMNSLKPEDTAVYYCAALGYATVYHYYWGQGTQVTVSS

SEQ ID NO: 17229 - protein, 122 aa, Artificial Sequence
  Chemically Synthesized
QVQLQESGGGLVQAGGSLRLSCAASGTISPFSVMGWYRQAPGKEREFVASINRGSTTNYADSVKGRFTISRDNAKNTVYLQMNSLKPEDTAVYYCAAVDYRRGDAVQYYSYWGQGTQVTVSS

SEQ ID NO: 17230 - protein, 119 aa, Artificial Sequence
  Chemically Synthesized
QVQLQESGGGLVQAGGSLRLSCAASGSISGESVYMGWYRQAPGKEREFVASIDTGSNTYYADSVKGRFTISRDNAKNTVYLQMNSLKPEDTAVYYCAVVYRTEGYYYYWGQGTQVTVSS

SEQ ID NO: 17231 - protein, 118 aa, Artificial Sequence
  Chemically Synthesized
QVQLQESGGGLVQAGGSLRLSCAASGNIFGAVYMGWYRQAPGKEREFVAAISYGTITNYADSVKGRFTISRDNAKNTVYLQMNSLKPEDTAVYYCAAFPYYYWTHWYWGQGTQVTVSS

SEQ ID NO: 17232 - protein, 122 aa, Artificial Sequence
  Chemically Synthesized
QVQLQESGGGLVQAGGSLRLSCAASGSFLTTLMGWYRQAPGKEREFVAGIDNGSSTYYADSVKGRFTISRDNAKNTVYLQMNSLKPEDTAVYYCAVGPYGYGDNYDQNYDYWGQGTQVTVSS

SEQ ID NO: 17233 - protein, 118 aa, Artificial Sequence
  Chemically Synthesized
QVQLQESGGGLVQAGGSLRLSCAASGNIFPQSVMGWYRQAPGKEREFVAGISYGGNTNYADSVKGRFTISRDNAKNTVYLQMNSLKPEDTAVYYCAARARALPYHYYWGQGTQVTVSS

SEQ ID NO: 17234 - protein, 124 aa, Artificial Sequence
  Chemically Synthesized
QVQLQESGGGLVQAGGSLRLSCAASGNISRDTYMGWYRQAPGKEREFVASIASGGNTNYADSVKGRFTISRDNAKNTVYLQMNSLKPEDTAVYYCAAVSFYSYAAGLAGYHYYWGQGTQVTVSS

SEQ ID NO: 17235 - protein, 126 aa, Artificial Sequence
  Chemically Synthesized
QVQLQESGGGLVQAGGSLRLSCAASGTIFHSVPMGWYRQAPGKERELVASINAGSITNYADSVKGRFTISRDNAKNTVYLQMNSLKPEDTAVYYCAAGDDGVWRVLWYALYLFDYWGQGTQVTVSS

SEQ ID NO: 17236 - protein, 118 aa, Artificial Sequence
  Chemically Synthesized
QVQLQESGGGLVQAGGSLRLSCAASGSISDRYYMGWYRQAPGKERELVASIGGGGTTYYADSVKGRFTISRDNAKNTVYLQMNSLKPEDTAVYYCAALGRDLTYHWYWGQGTQVTVSS

SEQ ID NO: 17237 - protein, 121 aa, Artificial Sequence
  Chemically Synthesized
QVQLQESGGGLVQAGGSLRLSCAASGNFFRVVMGWYRQAPGKEREFVAGINGGANTYYADSVKGRFTISRDNAKNTVYLQMNSLKPEDTAVYYCAADGWYYYDLLGWHRYWGQGTQVTVSS

SEQ ID NO: 17238 - protein, 118 aa, Artificial Sequence
  Chemically Synthesized
QVQLQESGGGLVQAGGSLRLSCAASGYIFGGDYMGWYRQAPGKERELVASITGGSTTYYADSVKGRFTISRDNAKNTVYLQMNSLKPEDTAVYYCAVVNAYGYWLDYWGQGTQVTVSS

SEQ ID NO: 17239 - protein, 119 aa, Artificial Sequence
  Chemically Synthesized
QVQLQESGGGLVQAGGSLRLSCAASGTISVSPYMGWYRQAPGKEREFVATIDAGSITNYADSVKGRFTISRDNAKNTVYLQMNSLKPEDTAVYYCAVVSQGIQGWHGYWGQGTQVTVSS

SEQ ID NO: 17240 - protein, 122 aa, Artificial Sequence
  Chemically Synthesized
QVQLQESGGGLVQAGGSLRLSCAASGTISVDVNMGWYRQAPGKEREFVAAIDDGANTNYADSVKGRFTISRDNAKNTVYLQMNSLKPEDTAVYYCAARASIPGDSRVDHWYWGQGTQVTVSS

SEQ ID NO: 17241 - protein, 122 aa, Artificial Sequence
  Chemically Synthesized
QVQLQESGGGLVQAGGSLRLSCAASGTIFDRDSMGWYRQAPGKEREFVASISVGTITNYADSVKGRFTISRDNAKNTVYLQMNSLKPEDTAVYYCAVVYYPDGSRGGYYYYWGQGTQVTVSS

SEQ ID NO: 17242 - protein, 118 aa, Artificial Sequence
  Chemically Synthesized
QVQLQESGGGLVQAGGSLRLSCAASGTISSLDAMGWYRQAPGKEREFVAAIGAGSSTNYADSVKGRFTISRDNAKNTVYLQMNSLKPEDTAVYYCAAIYGYRDYHYYWGQGTQVTVSS

SEQ ID NO: 17243 - protein, 122 aa, Artificial Sequence
  Chemically Synthesized
QVQLQESGGGLVQAGGSLRLSCAASGYISQVRAMGWYRQAPGKEREFVAGIGDGSSTNYADSVKGRFTISRDNAKNTVYLQMNSLKPEDTAVYYCAVVVTERTDPHGVHAYWGQGTQVTVSS

SEQ ID NO: 17244 - protein, 122 aa, Artificial Sequence
  Chemically Synthesized
QVQLQESGGGLVQAGGSLRLSCAASGYISTVTFMGWYRQAPGKERELVAAIDPGGNTYYADSVKGRFTISRDNAKNTVYLQMNSLKPEDTAVYYCAVHAPSYIGTGGVLGYWGQGTQVTVSS

SEQ ID NO: 17245 - protein, 118 aa, Artificial Sequence
  Chemically Synthesized
QVQLQESGGGLVQAGGSLRLSCAASGNISSRAIMGWYRQAPGKERELVAGIGDGTNTNYADSVKGRFTISRDNAKNTVYLQMNSLKPEDTAVYYCAVVDYQVQYLGYWGQGTQVTVSS

SEQ ID NO: 17246 - protein, 118 aa, Artificial Sequence
  Chemically Synthesized
QVQLQESGGGLVQAGGSLRLSCAASGYISRPLSMGWYRQAPGKERELVAAIGRGGTTYYADSVKGRFTISRDNAKNTVYLQMNSLKPEDTAVYYCAAAGYAYSRYLYWGQGTQVTVSS

SEQ ID NO: 17247 - protein, 118 aa, Artificial Sequence
  Chemically Synthesized
QVQLQESGGGLVQAGGSLRLSCAASGNISSYVGMGWYRQAPGKERELVASIGHGSNTNYADSVKGRFTISRDNAKNTVYLQMNSLKPEDTAVYYCAADRTYVGSLDYWGQGTQVTVSS

SEQ ID NO: 17248 - protein, 119 aa, Artificial Sequence
  Chemically Synthesized
QVQLQESGGGLVQAGGSLRLSCAASGNIFYFRGMGWYRQAPGKEREFVAGITRGAITNYADSVKGRFTISRDNAKNTVYLQMNSLKPEDTAVYYCAVVAQELDGIHAYWGQGTQVTVSS

SEQ ID NO: 17249 - protein, 118 aa, Artificial Sequence
  Chemically Synthesized
QVQLQESGGGLVQAGGSLRLSCAASGYISLAGDMGWYRQAPGKERELVATISGGGSTYYADSVKGRFTISRDNAKNTVYLQMNSLKPEDTAVYYCAAPYIRHDTLGYWGQGTQVTVSS

SEQ ID NO: 17250 - protein, 118 aa, Artificial Sequence
  Chemically Synthesized
QVQLQESGGGLVQAGGSLRLSCAASGSIFGGYTMGWYRQAPGKEREFVASISDGSNTNYADSVKGRFTISRDNAKNTVYLQMNSLKPEDTAVYYCAAVKSSNYRHYYWGQGTQVTVSS

SEQ ID NO: 17251 - protein, 116 aa, Artificial Sequence
  Chemically Synthesized
QVQLQESGGGLVQAGGSLRLSCAASGTISFSSYMGWYRQAPGKERELVAAMLTVVIPYADSVKGRFTISRDNAKNTVYLQMNSLKPEDTAVYYCALLVTLTSVIYWGQGTQVTVSS

SEQ ID NO: 17252 - protein, 118 aa, Artificial Sequence
  Chemically Synthesized
QVQLQESGGGLVQAGGSLRLSCAASGSISGASVMGWYRQAPGKERELVAAIGHGGNTYYADSVKGRFTISRDNAKNTVYLQMNSLKPEDTAVYYCAVDNTGGSFHLYWGQGTQVTVSS

SEQ ID NO: 17253 - protein, 122 aa, Artificial Sequence
  Chemically Synthesized
QVQLQESGGGLVQAGGSLRLSCAASGNISASLTMGWYRQAPGKERELVAAIGFGSSTYYADSVKGRFTISRDNAKNTVYLQMNSLKPEDTAVYYCAVDYHQLGGDYSTHLYWGQGTQVTVSS

SEQ ID NO: 17254 - protein, 122 aa, Artificial Sequence
  Chemically Synthesized
QVQLQESGGGLVQAGGSLRLSCAASGYISWGPEMGWYRQAPGKEREFVASIGYGGITYYADSVKGRFTISRDNAKNTVYLQMNSLKPEDTAVYYCAAEVDDYDTDDSQLPYWGQGTQVTVSS

SEQ ID NO: 17255 - protein, 118 aa, Artificial Sequence
  Chemically Synthesized
QVQLQESGGGLVQAGGSLRLSCAASGYISYYTYMGWYRQAPGKERELVASITRGSNTNYADSVKGRFTISRDNAKNTVYLQMNSLKPEDTAVYYCAAVVDLIYDLYYWGQGTQVTVSS

SEQ ID NO: 17256 - protein, 118 aa, Artificial Sequence
  Chemically Synthesized
QVQLQESGGGLVQAGGSLRLSCAASGSIFRQSYMGWYRQAPGKEREFVAAIGSGGSTNYADSVKGRFTISRDNAKNTVYLQMNSLKPEDTAVYYCAALSAQQYHHYYWGQGTQVTVSS

SEQ ID NO: 17257 - protein, 118 aa, Artificial Sequence
  Chemically Synthesized
QVQLQESGGGLVQAGGSLRLSCAASGTISSSQVMGWYRQAPGKEREFVASIGYGANTNYADSVKGRFTISRDNAKNTVYLQMNSLKPEDTAVYYCAALYFRQWYHHYWGQGTQVTVSS

SEQ ID NO: 17258 - protein, 118 aa, Artificial Sequence
  Chemically Synthesized
QVQLQESGGGLVQAGGSLRLSCAASGNISVPTYMGWYRQAPGKEREFVAGIAWGSITNYADSVKGRFTISRDNAKNTVYLQMNSLKPEDTAVYYCAALQYRDVYHYYWGQGTQVTVSS

SEQ ID NO: 17259 - protein, 118 aa, Artificial Sequence
  Chemically Synthesized
QVQLQESGGGLVQAGGSLRLSCAASGTISYGTYMGWYRQAPGKEREFVASIGYGANTNYADSVKGRFTISRDNAKNTVYLQMNSLKPEDTAVYYCAALDRGEAYHYYWGQGTQVTVSS

SEQ ID NO: 17260 - protein, 126 aa, Artificial Sequence
  Chemically Synthesized
QVQLQESGGGLVQAGGSLRLSCAASGTISQQYTMGWYRQAPGKERELVAAIAGGATTYYADSVKGRFTISRDNAKNTVYLQMNSLKPEDTAVYYCAAAYKLWRDYVPDGTHALRYWGQGTQVTVSS

SEQ ID NO: 17261 - protein, 118 aa, Artificial Sequence
  Chemically Synthesized
QVQLQESGGGLVQAGGSLRLSCAASGNIFKNYYMGWYRQAPGKEREFVASIATGTNTNYADSVKGRFTISRDNAKNTVYLQMNSLKPEDTAVYYCAAVVYADYYHYYWGQGTQVTVSS

SEQ ID NO: 17262 - protein, 119 aa, Artificial Sequence
  Chemically Synthesized
QVQLQESGGGLVQAGGSLRLSCAASGSIFPPTYMGWYRQAPGKEREFVAAIGATGGNTNYADSVKGRFTISRDNAKNTVYLQMNSLKPEDTAVYYCAATGYTVGWHYYWGQGTQVTVSS

SEQ ID NO: 17263 - protein, 118 aa, Artificial Sequence
  Chemically Synthesized
QVQLQESGGGLVQAGGSLRLSCAASGSIFGHGAMGWYRQAPGKEREFVASIGYGTTTNYADSVKGRFTISRDNAKNTVYLQMNSLKPEDTAVYYCAAVYYRAYYHAYWGQGTQVTVSS

SEQ ID NO: 17264 - protein, 118 aa, Artificial Sequence
  Chemically Synthesized
QVQLQESGGGLVQAGGSLRLSCAASGTISGYDIMGWYRQAPGKEREFVAGINYGGNTNYADSVKGRFTISRDNAKNTVYLQMNSLKPEDTAVYYCAAIVRYDSWHWYWGQGTQVTVSS

SEQ ID NO: 17265 - protein, 120 aa, Artificial Sequence
  Chemically Synthesized
QVQLQESGGGLVQAGGSLRLSCAASGYISPLGPMGWYRQAPGKEREFVASINAGGSTYYADSVKGRFTISRDNAKNTVYLQMNSLKPEDTAVYYCAAIAYGDDNTYHGYWGQGTQVTVSS

SEQ ID NO: 17266 - protein, 118 aa, Artificial Sequence
  Chemically Synthesized
QVQLQESGGGLVQAGGSLRLSCAASGNIFPYYSMGWYRQAPGKERELVATIASGATTYYADSVKGRFTISRDNAKNTVYLQMNSLKPEDTAVYYCAVSRPPTWYHYYWGQGTQVTVSS

SEQ ID NO: 17267 - protein, 122 aa, Artificial Sequence
  Chemically Synthesized
QVQLQESGGGLVQAGGSLRLSCAASGTISDYFVMGWYRQAPGKEREFVAAINDGTTTNYADSVKGRFTISRDNAKNTVYLQMNSLKPEDTAVYYCAAVYRGGIRSYAYHYYWGQGTQVTVSS

SEQ ID NO: 17268 - protein, 118 aa, Artificial Sequence
  Chemically Synthesized
QVQLQESGGGLVQAGGSLRLSCAASGSISRPIAMGWYRQAPGKERELVAAIAYGGTTNYADSVKGRFTISRDNAKNTVYLQMNSLKPEDTAVYYCAVVGYAYRYYFYWGQGTQVTVSS

SEQ ID NO: 17269 - protein, 117 aa, Artificial Sequence
  Chemically Synthesized
QVQLQESGGGLVQAGGSLRLSCAASGTISTTSMGWYRQAPGKEREFVAAISAGASTNYADSVKGRFTISRDNAKNTVYLQMNSLKPEDTAVYYCAAVRNPELQLQYWGQGTQVTVSS

SEQ ID NO: 17270 - protein, 122 aa, Artificial Sequence
  Chemically Synthesized
QVQLQESGGGLVQAGGSLRLSCAASGYIFQRGTMGWYRQAPGKEREFVASITSGASTNYADSVKGRFTISRDNAKNTVYLQMNSLKPEDTAVYYCAAVYWRRSQYPRYLTYWGQGTQVTVSS

SEQ ID NO: 17271 - protein, 118 aa, Artificial Sequence
  Chemically Synthesized
QVQLQESGGGLVQAGGSLRLSCAASGNIFPSYLMGWYRQAPGKEREFVATIATGSNTYYADSVKGRFTISRDNAKNTVYLQMNSLKPEDTAVYYCAVYWIALDFFRYWGQGTQVTVSS

SEQ ID NO: 17272 - protein, 118 aa, Artificial Sequence
  Chemically Synthesized
QVQLQESGGGLVQAGGSLRLSCAASGYISEYGVMGWYRQAPGKEREFVAGIDAGSTTNYADSVKGRFTISRDNAKNTVYLQMNSLKPEDTAVYYCAAVYRSTQWHFYWGQGTQVTVSS

SEQ ID NO: 17273 - protein, 118 aa, Artificial Sequence
  Chemically Synthesized
QVQLQESGGGLVQAGGSLRLSCAASGNISDSYFMGWYRQAPGKERELVAAIGDGGNTYYADSVKGRFTISRDNAKNTVYLQMNSLKPEDTAVYYCAAGLERTWTYYYWGQGTQVTVSS

SEQ ID NO: 17274 - protein, 120 aa, Artificial Sequence
  Chemically Synthesized
QVQLQESGGGLVQAGGSLRLSCAASGSIFSVDNMGWYRQAPGKERELVATITEGGSTYYADSVKGRFTISRDNAKNTVYLQMNSLKPEDTAVYYCAVRYPLPVTLLVMYWGQGTQVTVSS

SEQ ID NO: 17275 - protein, 122 aa, Artificial Sequence
  Chemically Synthesized
QVQLQESGGGLVQAGGSLRLSCAASGSISDDLYMGWYRQAPGKEREFVAGINLGSSTYYADSVKGRFTISRDNAKNTVYLQMNSLKPEDTAVYYCAARGYHPSRGWGIFHYWGQGTQVTVSS

SEQ ID NO: 17276 - protein, 117 aa, Artificial Sequence
  Chemically Synthesized
QVQLQESGGGLVQAGGSLRLSCAASGTISGSPYMGWYRQAPGKERELVAGIGPGGTTYADSVKGRFTISRDNAKNTVYLQMNSLKPEDTAVYYCAVPTRISEYHSYWGQGTQVTVSS

SEQ ID NO: 17277 - protein, 118 aa, Artificial Sequence
  Chemically Synthesized
QVQLQESGGGLVQAGGSLRLSCAASGYISRRLFMGWYRQAPGKERELVASIDDGATTYYADSVKGRFTISRDNAKNTVYLQMNSLKPEDTAVYYCAVEYVLGYPFGYWGQGTQVTVSS

SEQ ID NO: 17278 - protein, 111 aa, Artificial Sequence
  Chemically Synthesized
QVQLQESGGGLVQAGGSLRLSCAASGTIFLDRDMGWYRQAPGKEREFVAGITQGCYYQYADSVKGRFTISRDNAKNTVYLQMNSLKPEDTAVYYCAAFHYWGQGTQVTVSS

SEQ ID NO: 17279 - protein, 118 aa, Artificial Sequence
  Chemically Synthesized
QVQLQESGGGLVQAGGSLRLSCAASGNIFYSHYMGWYRQAPGKEREFVATIDQGANTYYADSVKGRFTISRDNAKNTVYLQMNSLKPEDTAVYYCAVDLAFQAKFVYWGQGTQVTVSS

SEQ ID NO: 17280 - protein, 122 aa, Artificial Sequence
  Chemically Synthesized
QVQLQESGGGLVQAGGSLRLSCAASGNISQFVTMGWYRQAPGKERELVAAIDDGSSTNYADSVKGRFTISRDNAKNTVYLQMNSLKPEDTAVYYCAVYYPLYDRDTAIYAYWGQGTQVTVSS

SEQ ID NO: 17281 - protein, 121 aa, Artificial Sequence
  Chemically Synthesized
QVQLQESGGGLVQAGGSLRLSCAASGYISVSRSMGWYRQAPGKEREFVAGIGGGTTTYYADSVKGRFTISRDNAKNTVYLQMNSLKPEDTAVYYCAAYFANSGLEHWSLYWGQGTQVTVSS

SEQ ID NO: 17282 - protein, 117 aa, Artificial Sequence
  Chemically Synthesized
QVQLQESGGGLVQAGGSLRLSCAASGYISDTGYMGWYRQAPGKERELVATIGFGSTTNYADSVKGRFTISRDNAKNTVYLQMNSLKPEDTAVYYCAAGGNWYDHQYWGQGTQVTVSS

SEQ ID NO: 17283 - protein, 118 aa, Artificial Sequence
  Chemically Synthesized
QVQLQESGGGLVQAGGSLRLSCAASGNISVYNLMGWYRQAPGKEREFVAAIGNGTTTNYADSVKGRFTISRDNAKNTVYLQMNSLKPEDTAVYYCAVVRNGAPPFPYWGQGTQVTVSS

SEQ ID NO: 17284 - protein, 112 aa, Artificial Sequence
  Chemically Synthesized
QVQLQESGGGLVQAGGSLRLSCAASGYMGWYRQAPGKERELVAGITAGAITNYADSVKGRFTISRDNAKNTVYLQMNSLKPEDTAVYYCAVYILVPLYHWYWGQGTQVTVSS

SEQ ID NO: 17285 - protein, 122 aa, Artificial Sequence
  Chemically Synthesized
QVQLQESGGGLVQAGGSLRLSCAASGTIFPAYTMGWYRQAPGKERELVASINQGTNTNYADSVKGRFTISRDNAKNTVYLQMNSLKPEDTAVYYCAVQNKYEDSGVPYFLYWGQGTQVTVSS

SEQ ID NO: 17286 - protein, 121 aa, Artificial Sequence
  Chemically Synthesized
QVQLQESGGGLVQAGGSLRLSCAASGSIFRDLDMGWYRQAPGKEREFVASILVVLLPYADSVKGRFTISRDNAKNTVYLQMNSLKPEDTAVYYCAVTDVYYLGARDDHLYWGQGTQVTVSS

SEQ ID NO: 17287 - protein, 125 aa, Artificial Sequence
  Chemically Synthesized
QVQLQESGGGLVQAGGSLRLSCAASGSISGYSLMGWYRQAPGKERELVASISLGGNTYYADSVKGRFTISRDNAKNTVYLQMNSLKPEDTAVYYCAAINLQDYTFRTILLGNFYWGQGTQVTVSS

SEQ ID NO: 17288 - protein, 118 aa, Artificial Sequence
  Chemically Synthesized
QVQLQESGGGLVQAGGSLRLSCAASGYISPYYVMGWYRQAPGKEREFVAGISYGSITNYADSVKGRFTISRDNAKNTVYLQMNSLKPEDTAVYYCAVDNRRNYILGYWGQGTQVTVSS

SEQ ID NO: 17289 - protein, 118 aa, Artificial Sequence
  Chemically Synthesized
QVQLQESGGGLVQAGGSLRLSCAASGSIFDSDYMGWYRQAPGKERELVATISYGASTNYADSVKGRFTISRDNAKNTVYLQMNSLKPEDTAVYYCAADDSNYAGHVYWGQGTQVTVSS

SEQ ID NO: 17290 - protein, 118 aa, Artificial Sequence
  Chemically Synthesized
QVQLQESGGGLVQAGGSLRLSCAASGYIFPVVEMGWYRQAPGKERELVASINRGSTTYYADSVKGRFTISRDNAKNTVYLQMNSLKPEDTAVYYCAAGALFYDDYSYWGQGTQVTVSS

SEQ ID NO: 17291 - protein, 117 aa, Artificial Sequence
  Chemically Synthesized
QVQLQESGGGLVQAGGSLRLSCAASGTISYQGYMGWYRQAPGKERELVATIAPGGTTNYADSVKGRFTISRDNAKNTVYLQMNSLKPEDTAVYYCAVRYTRWEYVYWGQGTQVTVSS

SEQ ID NO: 17292 - protein, 122 aa, Artificial Sequence
  Chemically Synthesized
QVQLQESGGGLVQAGGSLRLSCAASGNISDQNIMGWYRQAPGKEREFVAAIAPGSSTNYADSVKGRFTISRDNAKNTVYLQMNSLKPEDTAVYYCAAYTAEPDYGYGYHIYWGQGTQVTVSS

SEQ ID NO: 17293 - protein, 118 aa, Artificial Sequence
  Chemically Synthesized
QVQLQESGGGLVQAGGSLRLSCAASGNIFARYSMGWYRQAPGKEREFVAAINPGTITYYADSVKGRFTISRDNAKNTVYLQMNSLKPEDTAVYYCAALTPDGPRFTYWGQGTQVTVSS

SEQ ID NO: 17294 - protein, 118 aa, Artificial Sequence
  Chemically Synthesized
QVQLQESGGGLVQAGGSLRLSCAASGSISLRYPMGWYRQAPGKERELVASITVGSTTYYADSVKGRFTISRDNAKNTVYLQMNSLKPEDTAVYYCAAETTYNDYLVYWGQGTQVTVSS

SEQ ID NO: 17295 - protein, 126 aa, Artificial Sequence
  Chemically Synthesized
QVQLQESGGGLVQAGGSLRLSCAASGTIFQLGDMGWYRQAPGKEREFVAGIGTGASTYYADSVKGRFTISRDNAKNTVYLQMNSLKPEDTAVYYCAVYLPYLYNFWPYDYGTHWYWGQGTQVTVSS

SEQ ID NO: 17296 - protein, 120 aa, Artificial Sequence
  Chemically Synthesized
QVQLQESGGGLVQAGGSLRLSCAASGSISGGLMGWYRQAPGKEREFVASIDPGSNTYYADSVKGRFTISRDNAKNTVYLQMNSLKPEDTAVYYCAVGAYPYSLSTLLMYWGQGTQVTVSS

SEQ ID NO: 17297 - protein, 118 aa, Artificial Sequence
  Chemically Synthesized
QVQLQESGGGLVQAGGSLRLSCAASGTISLTPVMGWYRQAPGKERELVATIAFGGSTYYADSVKGRFTISRDNAKNTVYLQMNSLKPEDTAVYYCAADDSDLQLVCYWGQGTQVTVSS

SEQ ID NO: 17298 - protein, 122 aa, Artificial Sequence
  Chemically Synthesized
QVQLQESGGGLVQAGGSLRLSCAASGSISRYSSMGWYRQAPGKEREFVAGIAAGSNTNYADSVKGRFTISRDNAKNTVYLQMNSLKPEDTAVYYCAASGDDTLDRPILPIYWGQGTQVTVSS

SEQ ID NO: 17299 - protein, 121 aa, Artificial Sequence
  Chemically Synthesized
QVQLQESGGGLVQAGGSLRLSCAASGYIFALPAMGWYRQAPGKERELVATIDPGGTTYYADSVKGRFTISRDNAKNTVYLQMNSLKPEDTAVYYCAVYYPFDDYVRSTFYWGQGTQVTVSS

SEQ ID NO: 17300 - protein, 118 aa, Artificial Sequence
  Chemically Synthesized
QVQLQESGGGLVQAGGSLRLSCAASGTIFYYDYMGWYRQAPGKEREFVAAIDYGTSTNYADSVKGRFTISRDNAKNTVYLQMNSLKPEDTAVYYCAVVSGRAISHYYWGQGTQVTVSS

SEQ ID NO: 17301 - protein, 125 aa, Artificial Sequence
  Chemically Synthesized
QVQLQESGGGLVQAGGSLRLSCAASGSIFELADMGWYRQAPGKERELVASISTGTITYYADSVKGRFTISRDNAKNTVYLQMNSLKPEDTAVYYCAVLYGKWYYYKLVVDDYSYWGQGTQVTVSS

SEQ ID NO: 17302 - protein, 119 aa, Artificial Sequence
  Chemically Synthesized
QVQLQESGGGLVQAGGSLRLSCAASGTIFPTVSMGWYRQAPGKERELVAAISRGTNTNYADSVKGRFTISRDNAKNTVYLQMNSLKPEDTAVYYCAVAWDQPSADSYYWGQGTQVTVSS

SEQ ID NO: 17303 - protein, 125 aa, Artificial Sequence
  Chemically Synthesized
QVQLQESGGGLVQAGGSLRLSCAASGYISDWGGMGWYRQAPGKERELVASIGYGSKPYADSVKGRFTISRDNAKNTVYLQMNSLKPEDTAVYYCAAIFSVDIAWVYSIRQDHIYWGQGTQVTVSS

SEQ ID NO: 17304 - protein, 122 aa, Artificial Sequence
  Chemically Synthesized
QVQLQESGGGLVQAGGSLRLSCAASGTISYSDAMGWYRQAPGKERELVATIGRGGTTNYADSVKGRFTISRDNAKNTVYLQMNSLKPEDTAVYYCAVTRPYYRGGYSGFSYWGQGTQVTVSS

SEQ ID NO: 17305 - protein, 122 aa, Artificial Sequence
  Chemically Synthesized
QVQLQESGGGLVQAGGSLRLSCAASGTISDGYVMGWYRQAPGKERELVATITYGATTYYADSVKGRFTISRDNAKNTVYLQMNSLKPEDTAVYYCAVVVFFRFRTDVNHYYWGQGTQVTVSS

SEQ ID NO: 17306 - protein, 112 aa, Artificial Sequence
  Chemically Synthesized
QVQLQESGGGLVQAGGSLRLSCAASGYISDQWRMGWYRQAPGKERELVAGISRGSTTNYADSVKGRFTISRDNAKNTVYLQMNSLKPEDTAVYYCAVVCFYWGQGTQVTVSS

SEQ ID NO: 17307 - protein, 126 aa, Artificial Sequence
  Chemically Synthesized
QVQLQESGGGLVQAGGSLRLSCAASGTISGGGYMGWYRQAPGKEREFVASIGWGTTTYYADSVKGRFTISRDNAKNTVYLQMNSLKPEDTAVYYCAAAWNGYQDSNRYQIYPYYYWGQGTQVTVSS

SEQ ID NO: 17308 - protein, 122 aa, Artificial Sequence
  Chemically Synthesized
QVQLQESGGGLVQAGGSLRLSCAASGSISNIGYMGWYRQAPGKERELVATISQGTITYYADSVKGRFTISRDNAKNTVYLQMNSLKPEDTAVYYCAAAIENLDDDISALGYWGQGTQVTVSS

SEQ ID NO: 17309 - protein, 117 aa, Artificial Sequence
  Chemically Synthesized
QVQLQESGGGLVQAGGSLRLSCAASGNIFPYIRMGWYRQAPGKEREFVATIGYGATTYYADSVKGRFTISRDNAKNTVYLQMNSLKPEDTAVYYCAAAYPYVYYYYWGQGTQVTVSS

SEQ ID NO: 17310 - protein, 126 aa, Artificial Sequence
  Chemically Synthesized
QVQLQESGGGLVQAGGSLRLSCAASGNISGSRYMGWYRQAPGKERELVASISTGTSTYYADSVKGRFTISRDNAKNTVYLQMNSLKPEDTAVYYCAVNQITGPRHGTDSYDGYPYWGQGTQVTVSS

SEQ ID NO: 17311 - protein, 118 aa, Artificial Sequence
  Chemically Synthesized
QVQLQESGGGLVQAGGSLRLSCAASGSISTFVYMGWYRQAPGKEREFVATITTGTNTNYADSVKGRFTISRDNAKNTVYLQMNSLKPEDTAVYYCAAGDRASLHHNYWGQGTQVTVSS

SEQ ID NO: 17312 - protein, 117 aa, Artificial Sequence
  Chemically Synthesized
QVQLQESGGGLVQAGGSLRLSCAASGNISAGTVMGWYRQAPGKERELVATIGGGASTNYADSVKGRFTISRDNAKNTVYLQMNSLKPEDTAVYYCAASGLFRTNFYWGQGTQVTVSS

SEQ ID NO: 17313 - protein, 118 aa, Artificial Sequence
  Chemically Synthesized
QVQLQESGGGLVQAGGSLRLSCAASGYISRTDYMGWYRQAPGKEREFVATITVGSITNYADSVKGRFTISRDNAKNTVYLQMNSLKPEDTAVYYCAVLYLVPEGYDYWGQGTQVTVSS

SEQ ID NO: 17314 - protein, 126 aa, Artificial Sequence
  Chemically Synthesized
QVQLQESGGGLVQAGGSLRLSCAASGTISVLLLMGWYRQAPGKERELVATITVGGNTNYADSVKGRFTISRDNAKNTVYLQMNSLKPEDTAVYYCAVGYDNYAESSGPDFRPFSYWGQGTQVTVSS

SEQ ID NO: 17315 - protein, 119 aa, Artificial Sequence
  Chemically Synthesized
QVQLQESGGGLVQAGGSLRLSCAASGNIFADSYMGWYRQAPGKERELVAAIGVGGTTTNYADSVKGRFTISRDNAKNTVYLQMNSLKPEDTAVYYCAVTDLYDNVHKYWGQGTQVTVSS

SEQ ID NO: 17316 - protein, 118 aa, Artificial Sequence
  Chemically Synthesized
QVQLQESGGGLVQAGGSLRLSCAASGSISSRVAMGWYRQAPGKERELVATITDGANTYYADSVKGRFTISRDNAKNTVYLQMNSLKPEDTAVYYCAVRPTYYYRHTYWGQGTQVTVSS

SEQ ID NO: 17317 - protein, 122 aa, Artificial Sequence
  Chemically Synthesized
QVQLQESGGGLVQAGGSLRLSCAASGTISTYPKMGWYRQAPGKERELVAAIAAGTTTNYADSVKGRFTISRDNAKNTVYLQMNSLKPEDTAVYYCAVPYGYDAYLVFIFDYWGQGTQVTVSS

SEQ ID NO: 17318 - protein, 118 aa, Artificial Sequence
  Chemically Synthesized
QVQLQESGGGLVQAGGSLRLSCAASGNISRGQFMGWYRQAPGKERELVASIADGAITNYADSVKGRFTISRDNAKNTVYLQMNSLKPEDTAVYYCAANVPYVGVYGYWGQGTQVTVSS

SEQ ID NO: 17319 - protein, 111 aa, Artificial Sequence
  Chemically Synthesized
QVQLQESGGGLVQAGGSLRLSCAASGSISVFSVMGWYRQAPGKEREFVAGISVGGSTNYADSVKGRFTISRDNAKNTVYLQMNSLKPEDTAVYYCAALMYWGQGTQVTVSS

SEQ ID NO: 17320 - protein, 118 aa, Artificial Sequence
  Chemically Synthesized
QVQLQESGGGLVQAGGSLRLSCAASGYIFVSGVMGWYRQAPGKEREFVASITDGATTYYADSVKGRFTISRDNAKNTVYLQMNSLKPEDTAVYYCAVSTTYAYDFGYWGQGTQVTVSS

SEQ ID NO: 17321 - protein, 118 aa, Artificial Sequence
  Chemically Synthesized
QVQLQESGGGLVQAGGSLRLSCAASGNISRAIDMGWYRQAPGKEREFVATISWGSITYYADSVKGRFTISRDNAKNTVYLQMNSLKPEDTAVYYCAAYFYVLLEYAYWGQGTQVTVSS

SEQ ID NO: 17322 - protein, 117 aa, Artificial Sequence
  Chemically Synthesized
QVQLQESGGGLVQAGGSLRLSCAASGTIFQWAYMGWYRQAPGKEREFATINPGANTNYADSVKGRFTISRDNAKNTVYLQMNSLKPEDTAVYYCAVTTDDTDPYSYWGQGTQVTVSS

SEQ ID NO: 17323 - protein, 109 aa, Artificial Sequence
  Chemically Synthesized
QVQLQESGGGLVQAGGSLRLSCAASGNISPRESMGWYRQAPGKEREFVATITSGSSTYYADSVKGRFTISRDNAKNTVYLQMNSLKPEDTAVYYCAVYWGQGTQVTVSS

SEQ ID NO: 17324 - protein, 121 aa, Artificial Sequence
  Chemically Synthesized
QVQLQESGGGLVQAGGSLRLSCAASGTIFIGQHMGWYRQAPGKEREFVAGISPGAITYYADSVKGRFTISRDNAKNTVYLQMNSLKPEDTAVYYCAARYDYFDSTVTTIYWGQGTQVTVSS

SEQ ID NO: 17325 - protein, 122 aa, Artificial Sequence
  Chemically Synthesized
QVQLQESGGGLVQAGGSLRLSCAASGYISYVAYMGWYRQAPGKEREFVASIGNGASTNYADSVKGRFTISRDNAKNTVYLQMNSLKPEDTAVYYCAAFDRVYAWGYDWYEYWGQGTQVTVSS

SEQ ID NO: 17326 - protein, 113 aa, Artificial Sequence
  Chemically Synthesized
QVQLQESGGGLVQAGGSLRLSCAASGYRSMGWYRQAPGKERELVATIAQGTNTYYADSVKGRFTISRDNAKNTVYLQMNSLKPEDTAVYYCAYEYVLYYHQYWGQGTQVTVSS

SEQ ID NO: 17327 - protein, 117 aa, Artificial Sequence
  Chemically Synthesized
QVQLQESGGGLVQAGGSLRLSCAASGYIFCRTMGWYRQAPGKERELVATIGPGASTYYADSVKGRFTISRDNAKNTVYLQMNSLKPEDTAVYYCAVSRRYSDDHYYWGQGTQVTVSS

SEQ ID NO: 17328 - protein, 115 aa, Artificial Sequence
  Chemically Synthesized
QVQLQESGGGLVQAGGSLRLSCAASGSISPGYVMGWYRQAPGKERELVATINPGANTYYADSVKGRFTISRDNAKNTVYLQMNSLKPEDTAVYYCALTLTTTIYWGQGTQVTVSS

SEQ ID NO: 17329 - protein, 118 aa, Artificial Sequence
  Chemically Synthesized
QVQLQESGGGLVQAGGSLRLSCAASGNIFQDTQMGWYRQAPGKERELVATIGQGASTNYADSVKGRFTISRDNAKNTVYLQMNSLKPEDTAVYYCAVGPSHRPLHLYWGQGTQVTVSS

SEQ ID NO: 17330 - protein, 118 aa, Artificial Sequence
  Chemically Synthesized
QVQLQESGGGLVQAGGSLRLSCAASGYIFGRILMGWYRQAPGKEREFVAGIARGASTYYADSVKGRFTISRDNAKNTVYLQMNSLKPEDTAVYYCAATSYARYGFQYWGQGTQVTVSS

SEQ ID NO: 17331 - protein, 118 aa, Artificial Sequence
  Chemically Synthesized
QVQLQESGGGLVQAGGSLRLSCAASGTISRYGYMGWYRQAPGKERELVAGITYGGTTYYADSVKGRFTISRDNAKNTVYLQMNSLKPEDTAVYYCAVPTYNDYYYYYWGQGTQVTVSS

SEQ ID NO: 17332 - protein, 122 aa, Artificial Sequence
  Chemically Synthesized
QVQLQESGGGLVQAGGSLRLSCAASGYIFPDYAMGWYRQAPGKERELVAGISGGGSTYYADSVKGRFTISRDNAKNTVYLQMNSLKPEDTAVYYCAAYGPAYNGTYSYYYYWGQGTQVTVSS

SEQ ID NO: 17333 - protein, 125 aa, Artificial Sequence
  Chemically Synthesized
QVQLQESGGGLVQAGGSLRLSCAASGSIFAGDAMGWYRQAPGKEREFVAAINGGTTTYYADSVKGRFTISRDNAKNTVYLQMNSLKPEDTAVYYCAAYRGSDLLYHQGDSDHWYWGQGTQVTVSS

SEQ ID NO: 17334 - protein, 116 aa, Artificial Sequence
  Chemically Synthesized
QVQLQESGGGLVQAGGSLRLSCAASGNILTLTMGWYRQAPGKERELVATITYGSTTNYADSVKGRFTISRDNAKNTVYLQMNSLKPEDTAVYYCAVRPGYYFSYYWGQGTQVTVSS

SEQ ID NO: 17335 - protein, 118 aa, Artificial Sequence
  Chemically Synthesized
QVQLQESGGGLVQAGGSLRLSCAASGSIFDFDIMGWYRQAPGKEREFVASIAGGGTTNYADSVKGRFTISRDNAKNTVYLQMNSLKPEDTAVYYCAATWADSYDLQYWGQGTQVTVSS

SEQ ID NO: 17336 - protein, 122 aa, Artificial Sequence
  Chemically Synthesized
QVQLQESGGGLVQAGGSLRLSCAASGSISDSGYMGWYRQAPGKEREFVAAINYGASTYYADSVKGRFTISRDNAKNTVYLQMNSLKPEDTAVYYCAADVIYDYSESRIYYYWGQGTQVTVSS

SEQ ID NO: 17337 - protein, 122 aa, Artificial Sequence
  Chemically Synthesized
QVQLQESGGGLVQAGGSLRLSCAASGYIFAGRYMGWYRQAPGKEREFVATIARGSTTNYADSVKGRFTISRDNAKNTVYLQMNSLKPEDTAVYYCAAYRYGFVPWYVVHRYWGQGTQVTVSS

SEQ ID NO: 17338 - protein, 118 aa, Artificial Sequence
  Chemically Synthesized
QVQLQESGGGLVQAGGSLRLSCAASGSIFPYLYMGWYRQAPGKEREFVAAINAGTITNYADSVKGRFTISRDNAKNTVYLQMNSLKPEDTAVYYCAAGFYSDRGHRYWGQGTQVTVSS

SEQ ID NO: 17339 - protein, 122 aa, Artificial Sequence
  Chemically Synthesized
QVQLQESGGGLVQAGGSLRLSCAASGTISDAPAMGWYRQAPGKERELVATISYGGITYYADSVKGRFTISRDNAKNTVYLQMNSLKPEDTAVYYCAVYTIWPSLVHLGYDYWGQGTQVTVSS

SEQ ID NO: 17340 - protein, 118 aa, Artificial Sequence
  Chemically Synthesized
QVQLQESGGGLVQAGGSLRLSCAASGNISYRIVMGWYRQAPGKERELVASIAYGSTTNYADSVKGRFTISRDNAKNTVYLQMNSLKPEDTAVYYCAVLDYDGQSLDYWGQGTQVTVSS

SEQ ID NO: 17341 - protein, 121 aa, Artificial Sequence
  Chemically Synthesized
QVQLQESGGGLVQAGGSLRLSCAASGYISDNNNMGWYRQAPGKERELVASINLGTTTYYADSVKGRFTISRDNAKNTVYLQMNSLKPEDTAVYYCAAFALYVWWISLSLYWGQGTQVTVSS

SEQ ID NO: 17342 - protein, 117 aa, Artificial Sequence
  Chemically Synthesized
QVQLQESGGGLVQAGGSLRLSCAASGSIFPDNYMGWYRQAPGKEREFVAVLVTVVLPYADSVKGRFTISRDNAKNTVYLQMNSLKPEDTAVYYCAVGDYDPSGYAYWGQGTQVTVSS

SEQ ID NO: 17343 - protein, 118 aa, Artificial Sequence
  Chemically Synthesized
QVQLQESGGGLVQAGGSLRLSCAASGNIFDPRIMGWYRQAPGKERELVAAITDGTITYYADSVKGRFTISRDNAKNTVYLQMNSLKPEDTAVYYCAVFWAHQPGFSYWGQGTQVTVSS

SEQ ID NO: 17344 - protein, 118 aa, Artificial Sequence
  Chemically Synthesized
QVQLQESGGGLVQAGGSLRLSCAASGYIFDFTWMGWYRQAPGKERELVAGISTGASTYYADSVKGRFTISRDNAKNTVYLQMNSLKPEDTAVYYCAARDATVGALHYWGQGTQVTVSS

SEQ ID NO: 17345 - protein, 122 aa, Artificial Sequence
  Chemically Synthesized
QVQLQESGGGLVQAGGSLRLSCAASGTISTDVIMGWYRQAPGKEREFVATISNGANTYYADSVKGRFTISRDNAKNTVYLQMNSLKPEDTAVYYCAAGVGGTYYFYNRHNYWGQGTQVTVSS

SEQ ID NO: 17346 - protein, 117 aa, Artificial Sequence
  Chemically Synthesized
QVQLQESGGGLVQAGGSLRLSCAASGTISSITMGWYRQAPGKEREFVATIADGGTTYYADSVKGRFTISRDNAKNTVYLQMNSLKPEDTAVYYCAVVDDGQRNLAYWGQGTQVTVSS

SEQ ID NO: 17347 - protein, 125 aa, Artificial Sequence
  Chemically Synthesized
QVQLQESGGGLVQAGGSLRLSCAASGTISASAMGWYRQAPGKERELVAGITYGATTNYADSVKGRFTISRDNAKNTVYLQMNSLKPEDTAVYYCAVLDRDTYVISRDDNRGHWYWGQGTQVTVSS

SEQ ID NO: 17348 - protein, 122 aa, Artificial Sequence
  Chemically Synthesized
QVQLQESGGGLVQAGGSLRLSCAASGSIFWSRQMGWYRQAPGKEREFVASITAGGNTYYADSVKGRFTISRDNAKNTVYLQMNSLKPEDTAVYYCAVRVKGRPYHYRSHYYWGQGTQVTVSS

SEQ ID NO: 17349 - protein, 121 aa, Artificial Sequence
  Chemically Synthesized
QVQLQESGGGLVQAGGSLRLSCAASGTISDDYVMGWYRQAPGKEREFVASISSVVIPYADSVKGRFTISRDNAKNTVYLQMNSLKPEDTAVYYCAARSTGLWPDVIDHRYWGQGTQVTVSS

SEQ ID NO: 17350 - protein, 121 aa, Artificial Sequence
  Chemically Synthesized
QVQLQESGGGLVQAGGSLRLSCAASGNISDVLDMGWYRQAPGKERELLPVLVSVLLPYADSVKGRFTISRDNAKNTVYLQMNSLKPEDTAVYYCAVLGHSNINWWRTFYYWGQGTQVTVSS

SEQ ID NO: 17351 - protein, 119 aa, Artificial Sequence
  Chemically Synthesized
QVQLQESGGGLVQAGGSLRLSCAASGNISARQSMGWYRQAPGKEREFVAGIDDGSSTNYADSVKGRFTISRDNAKNTVYLQMNSLKPEDTAVYYCATTTLTTTSTVIYWGQGTQVTVSS

SEQ ID NO: 17352 - protein, 120 aa, Artificial Sequence
  Chemically Synthesized
QVQLQESGGGLVQAGGSLRLSCAASGSISDYQTMGWYRQAPGKERELVAGISRGGSTYADSVKGRFTISRDNAKNTVYLQMNSLKPEDTAVYYCAADSDDYIYYVPYFYWGQGTQVTVSS

SEQ ID NO: 17353 - protein, 122 aa, Artificial Sequence
  Chemically Synthesized
QVQLQESGGGLVQAGGSLRLSCAASGNISTRVFMGWYRQAPGKERELVAGITSGATTYYADSVKGRFTISRDNAKNTVYLQMNSLKPEDTAVYYCAVTDQRGAPQYYYHLYWGQGTQVTVSS

SEQ ID NO: 17354 - protein, 118 aa, Artificial Sequence
  Chemically Synthesized
QVQLQESGGGLVQAGGSLRLSCAASGYISDAFTMGWYRQAPGKEREFVAGIDFGTITYYADSVKGRFTISRDNAKNTVYLQMNSLKPEDTAVYYCAAVVTVYGWYEYWGQGTQVTVSS

SEQ ID NO: 17355 - protein, 117 aa, Artificial Sequence
  Chemically Synthesized
QVQLQESGGGLVQAGGSLRLSCAASGTISSTRNMGWYRQAPGKEREFVASIGAGGSTYYADSVKGRFTISRDNAKNTVYLQMNSLKPEDTAVYYCAAQYDYGTFRYWGQGTQVTVSS

SEQ ID NO: 17356 - protein, 118 aa, Artificial Sequence
  Chemically Synthesized
QVQLQESGGGLVQAGGSLRLSCAASGNIFYWDYMGWYRQAPGKERELVAAIDDGTSTYYADSVKGRFTISRDNAKNTVYLQMNSLKPEDTAVYYCAAYDYAQYAFYYWGQGTQVTVSS

SEQ ID NO: 17357 - protein, 126 aa, Artificial Sequence
  Chemically Synthesized
QVQLQESGGGLVQAGGSLRLSCAASGYIFDVTAMGWYRQAPGKEREFVAAIDGGTSTYYADSVKGRFTISRDNAKNTVYLQMNSLKPEDTAVYYCAAGYVGRYRRDDPYSDGYRYWGQGTQVTVSS

SEQ ID NO: 17358 - protein, 122 aa, Artificial Sequence
  Chemically Synthesized
QVQLQESGGGLVQAGGSLRLSCAASGYIFRGRKMGWYRQAPGKERELVAGINDGSSTNYADSVKGRFTISRDNAKNTVYLQMNSLKPEDTAVYYCAAWHGYEVGSTWDYIYWGQGTQVTVSS

SEQ ID NO: 17359 - protein, 122 aa, Artificial Sequence
  Chemically Synthesized
QVQLQESGGGLVQAGGSLRLSCAASGTISLVDGMGWYRQAPGKEREFVASIDWGGSTNYADSVKGRFTISRDNAKNTVYLQMNSLKPEDTAVYYCAVRADWVQAFGYYFLYWGQGTQVTVSS

SEQ ID NO: 17360 - protein, 118 aa, Artificial Sequence
  Chemically Synthesized
QVQLQESGGGLVQAGGSLRLSCAASGTIFAYEDMGWYRQAPGKEREFVASIGTGGITYYADSVKGRFTISRDNAKNTVYLQMNSLKPEDTAVYYCAAVAYDDAGYFYWGQGTQVTVSS

SEQ ID NO: 17361 - protein, 122 aa, Artificial Sequence
  Chemically Synthesized
QVQLQESGGGLVQAGGSLRLSCAASGYISGIYRMGWYRQAPGKEREFVAGITYGSITYYADSVKGRFTISRDNAKNTVYLQMNSLKPEDTAVYYCAAGYLYNYDDRVLLIYWGQGTQVTVSS

SEQ ID NO: 17362 - protein, 118 aa, Artificial Sequence
  Chemically Synthesized
QVQLQESGGGLVQAGGSLRLSCAASGTISDASDMGWYRQAPGKERELVAGISYGTNTNYADSVKGRFTISRDNAKNTVYLQMNSLKPEDTAVYYCAVTYTGPTGLVYWGQGTQVTVSS

SEQ ID NO: 17363 - protein, 117 aa, Artificial Sequence
  Chemically Synthesized
QVQLQESGGGLVQAGGSLRLSCAASGNISRTGMGWYRQAPGKEREFVAAITYGTTTNYADSVKGRFTISRDNAKNTVYLQMNSLKPEDTAVYYCAVSGDWSGGYAYWGQGTQVTVSS

SEQ ID NO: 17364 - protein, 122 aa, Artificial Sequence
  Chemically Synthesized
QVQLQESGGGLVQAGGSLRLSCAASGTIFNDYGMGWYRQAPGKEREFVAGIAFGASTYYADSVKGRFTISRDNAKNTVYLQMNSLKPEDTAVYYCAARQYVGGQRAYYHAYWGQGTQVTVSS

SEQ ID NO: 17365 - protein, 122 aa, Artificial Sequence
  Chemically Synthesized
QVQLQESGGGLVQAGGSLRLSCAASGSISDVVSMGWYRQAPGKEREFVAGINYGANTYYADSVKGRFTISRDNAKNTVYLQMNSLKPEDTAVYYCAVYYRDYDGDYVRHQYWGQGTQVTVSS

SEQ ID NO: 17366 - protein, 118 aa, Artificial Sequence
  Chemically Synthesized
QVQLQESGGGLVQAGGSLRLSCAASGNISYFPAMGWYRQAPGKERELVAAIAYGTITNYADSVKGRFTISRDNAKNTVYLQMNSLKPEDTAVYYCAVGDSWDWPHAYWGQGTQVTVSS

SEQ ID NO: 17367 - protein, 126 aa, Artificial Sequence
  Chemically Synthesized
QVQLQESGGGLVQAGGSLRLSCAASGYISRRSNMGWYRQAPGKEREFVATIGRGATTYYADSVKGRFTISRDNAKNTVYLQMNSLKPEDTAVYYCAADEDSYHYDYLDYIDELYYWGQGTQVTVSS

SEQ ID NO: 17368 - protein, 117 aa, Artificial Sequence
  Chemically Synthesized
QVQLQESGGGLVQAGGSLRLSCAASGTISISGRMGWYRQAPGKERELVASIGPGGSTNYADSVKGRFTISRDNAKNTVYLQMNSLKPEDTAVYYCAVRGWHESTFYWGQGTQVTVSS

SEQ ID NO: 17369 - protein, 118 aa, Artificial Sequence
  Chemically Synthesized
QVQLQESGGGLVQAGGSLRLSCAASGSIFPWSRMGWYRQAPGKEREFVAAIGYGSSTNYADSVKGRFTISRDNAKNTVYLQMNSLKPEDTAVYYCAALSHRYGRYDYWGQGTQVTVSS

SEQ ID NO: 17370 - protein, 121 aa, Artificial Sequence
  Chemically Synthesized
QVQLQESGGGLVQAGGSLRLSCAASGSIFTQYPMGWYRQAPGKERELVATIADGATTYYADSVKGRFTISRDNAKNTVYLQMNSLKPEDTAVYYCAVPVDVYPKILAILYWGQGTQVTVSS

SEQ ID NO: 17371 - protein, 118 aa, Artificial Sequence
  Chemically Synthesized
QVQLQESGGGLVQAGGSLRLSCAASGNISVRARMGWYRQAPGKEREFVASITTGTNTYYADSVKGRFTISRDNAKNTVYLQMNSLKPEDTAVYYCAAKRAYGYVLLYWGQGTQVTVSS

SEQ ID NO: 17372 - protein, 118 aa, Artificial Sequence
  Chemically Synthesized
QVQLQESGGGLVQAGGSLRLSCAASGNIFDRRIMGWYRQAPGKEREFVAAIGKGSTTNYADSVKGRFTISRDNAKNTVYLQMNSLKPEDTAVYYCAAEILYADGYGYWGQGTQVTVSS

SEQ ID NO: 17373 - protein, 122 aa, Artificial Sequence
  Chemically Synthesized
QVQLQESGGGLVQAGGSLRLSCAASGNISGDDGMGWYRQAPGKEREFVASINLGGITNYADSVKGRFTISRDNAKNTVYLQMNSLKPEDTAVYYCAVNHYPGYRHDIYYRYWGQGTQVTVSS

SEQ ID NO: 17374 - protein, 122 aa, Artificial Sequence
  Chemically Synthesized
QVQLQESGGGLVQAGGSLRLSCAASGTISGDDAMGWYRQAPGKERELVAGINYGAITYYADSVKGRFTISRDNAKNTVYLQMNSLKPEDTAVYYCAALAYGYDDDTDWFYYWGQGTQVTVSS

SEQ ID NO: 17375 - protein, 122 aa, Artificial Sequence
  Chemically Synthesized
QVQLQESGGGLVQAGGSLRLSCAASGNIFGTNYMGWYRQAPGKERELVAGINVGTSTNYADSVKGRFTISRDNAKNTVYLQMNSLKPEDTAVYYCAVIGRVGRVDYGSLEYWGQGTQVTVSS

SEQ ID NO: 17376 - protein, 125 aa, Artificial Sequence
  Chemically Synthesized
QVQLQESGGGLVQAGGSLRLSCAASGYISRATRMGWYRQAPGKEREFVAGIDTGANTYYADSVKGRFTISRDNAKNTVYLQMNSLKPEDTAVYYCAVSLSCRKFRLTTTSCIIYWGQGTQVTVSS

SEQ ID NO: 17377 - protein, 118 aa, Artificial Sequence
  Chemically Synthesized
QVQLQESGGGLVQAGGSLRLSCAASGNISQYYSMGWYRQAPGKERELVAAIAYGSSTNYADSVKGRFTISRDNAKNTVYLQMNSLKPEDTAVYYCAAHDADPDSFYYWGQGTQVTVSS

SEQ ID NO: 17378 - protein, 122 aa, Artificial Sequence
  Chemically Synthesized
QVQLQESGGGLVQAGGSLRLSCAASGSISVDPYMGWYRQAPGKERELVATIGEGATTYYADSVKGRFTISRDNAKNTVYLQMNSLKPEDTAVYYCAANVDPSDARWYWHRYWGQGTQVTVSS

SEQ ID NO: 17379 - protein, 122 aa, Artificial Sequence
  Chemically Synthesized
QVQLQESGGGLVQAGGSLRLSCAASGYISYHLDMGWYRQAPGKERELVASIDGGATTYYADSVKGRFTISRDNAKNTVYLQMNSLKPEDTAVYYCAVDLFLYLKGYWPLDYWGQGTQVTVSS

SEQ ID NO: 17380 - protein, 110 aa, Artificial Sequence
  Chemically Synthesized
QVQLQESGGGLVQAGGSLRLSCAASGNISRGGDMGWYRQAPGKEREFVATINLGATTNYADSVKGRFTISRDNAKNTVYLQMNSLKPEDTAVYYCAHPYWGQGTQVTVSS

SEQ ID NO: 17381 - protein, 126 aa, Artificial Sequence
  Chemically Synthesized
QVQLQESGGGLVQAGGSLRLSCAASGTIFYHVAMGWYRQAPGKERELVAGIDHGGTTNYADSVKGRFTISRDNAKNTVYLQMNSLKPEDTAVYYCAVSYDARDVYANAYNGDLWYWGQGTQVTVSS

SEQ ID NO: 17382 - protein, 118 aa, Artificial Sequence
  Chemically Synthesized
QVQLQESGGGLVQAGGSLRLSCAASGTISFYPYMGWYRQAPGKEREFVASINIGGITYYADSVKGRFTISRDNAKNTVYLQMNSLKPEDTAVYYCAANSFRTYYYGYWGQGTQVTVSS

SEQ ID NO: 17383 - protein, 118 aa, Artificial Sequence
  Chemically Synthesized
QVQLQESGGGLVQAGGSLRLSCAASGTIFGDTIMGWYRQAPGKERELVATIGDGSTTNYADSVKGRFTISRDNAKNTVYLQMNSLKPEDTAVYYCAAWHDLSPEFDYWGQGTQVTVSS

SEQ ID NO: 17384 - protein, 116 aa, Artificial Sequence
  Chemically Synthesized
QVQLQESGGGLVQAGGSLRLSCAASGNIFPVPNMGWYRQAPGKERELVASIAPGTSTYYADSVKGRFTISRDNAKNTVYLQMNSLKPEDTAVYYCAAAAGDRLGYWGQGTQVTVSS

SEQ ID NO: 17385 - protein, 122 aa, Artificial Sequence
  Chemically Synthesized
QVQLQESGGGLVQAGGSLRLSCAASGNIFNYRSMGWYRQAPGKERELVAAITQGATTYYADSVKGRFTISRDNAKNTVYLQMNSLKPEDTAVYYCAVTEFRRPPNYPKYRYWGQGTQVTVSS

SEQ ID NO: 17386 - protein, 118 aa, Artificial Sequence
  Chemically Synthesized
QVQLQESGGGLVQAGGSLRLSCAASGTISGDSRMGWYRQAPGKEREFVASIGYGGNTYYADSVKGRFTISRDNAKNTVYLQMNSLKPEDTAVYYCAAVAREDDVHWYWGQGTQVTVSS

SEQ ID NO: 17387 - protein, 118 aa, Artificial Sequence
  Chemically Synthesized
QVQLQESGGGLVQAGGSLRLSCAASGSIFGPYAMGWYRQAPGKEREFVAAISDGGITYYADSVKGRFTISRDNAKNTVYLQMNSLKPEDTAVYYCAATPTHDRTYYYWGQGTQVTVSS

SEQ ID NO: 17388 - protein, 126 aa, Artificial Sequence
  Chemically Synthesized
QVQLQESGGGLVQAGGSLRLSCAASGTISFAYLMGWYRQAPGKERELVAGIGGGSSTYYADSVKGRFTISRDNAKNTVYLQMNSLKPEDTAVYYCAVQRYTDYTGYDAIVYWLSYWGQGTQVTVSS

SEQ ID NO: 17389 - protein, 122 aa, Artificial Sequence
  Chemically Synthesized
QVQLQESGGGLVQAGGSLRLSCAASGYISRYAAMGWYRQAPGKERELVAAITPGSTTYYADSVKGRFTISRDNAKNTVYLQMNSLKPEDTAVYYCAVWSYSQNRSGQQYRYWGQGTQVTVSS

SEQ ID NO: 17390 - protein, 117 aa, Artificial Sequence
  Chemically Synthesized
QVQLQESGGGLVQAGGSLRLSCAASGYISSSTMGWYRQAPGKEREFVATIAHGGSTNYADSVKGRFTISRDNAKNTVYLQMNSLKPEDTAVYYCAVGFRTRHGLVYWGQGTQVTVSS

SEQ ID NO: 17391 - protein, 118 aa, Artificial Sequence
  Chemically Synthesized
QVQLQESGGGLVQAGGSLRLSCAASGYISAGNRMGWYRQAPGKERELVASITFGANTNYADSVKGRFTISRDNAKNTVYLQMNSLKPEDTAVYYCAARHGSSLRLLYWGQGTQVTVSS

SEQ ID NO: 17392 - protein, 118 aa, Artificial Sequence
  Chemically Synthesized
QVQLQESGGGLVQAGGSLRLSCAASGNISNVYTMGWYRQAPGKERELVAAITRGANTNYADSVKGRFTISRDNAKNTVYLQMNSLKPEDTAVYYCAAGVNYYRQFNYWGQGTQVTVSS

SEQ ID NO: 17393 - protein, 118 aa, Artificial Sequence
  Chemically Synthesized
QVQLQESGGGLVQAGGSLRLSCAASGNISTSGIMGWYRQAPGKERELVAGIAEGGITYYADSVKGRFTISRDNAKNTVYLQMNSLKPEDTAVYYCAAGTYPVTYFYYWGQGTQVTVSS

SEQ ID NO: 17394 - protein, 118 aa, Artificial Sequence
  Chemically Synthesized
QVQLQESGGGLVQAGGSLRLSCAASGYIFDPTYMGWYRQAPGKEREFVATINAGAITNYADSVKGRFTISRDNAKNTVYLQMNSLKPEDTAVYYCAVTFAYRYRYEYWGQGTQVTVSS

SEQ ID NO: 17395 - protein, 118 aa, Artificial Sequence
  Chemically Synthesized
QVQLQESGGGLVQAGGSLRLSCAASGYISDSYEMGWYRQAPGKERELVATITSGGITYYADSVKGRFTISRDNAKNTVYLQMNSLKPEDTAVYYCAVWALDYDTHLYWGQGTQVTVSS

SEQ ID NO: 17396 - protein, 118 aa, Artificial Sequence
  Chemically Synthesized
QVQLQESGGGLVQAGGSLRLSCAASGYIFRWSDMGWYRQAPGKEREFVATIGYGGTTYYADSVKGRFTISRDNAKNTVYLQMNSLKPEDTAVYYCAAIGERYARHVYWGQGTQVTVSS

SEQ ID NO: 17397 - protein, 121 aa, Artificial Sequence
  Chemically Synthesized
QVQLQESGGGLVQAGGSLRLSCAASGSIFYATYMGWYRQAPGKEREFVASINEGGSTYYADSVKGRFTISRDNAKNTVYLQMNSLKPEDTAVYYCAADVDYSTVVRTVFYWGQGTQVTVSS

SEQ ID NO: 17398 - protein, 118 aa, Artificial Sequence
  Chemically Synthesized
QVQLQESGGGLVQAGGSLRLSCAASGTIFAIISMGWYRQAPGKEREFVATITRGSTTYYADSVKGRFTISRDNAKNTVYLQMNSLKPEDTAVYYCAAWYGYLRGFEYWGQGTQVTVSS

SEQ ID NO: 17399 - protein, 118 aa, Artificial Sequence
  Chemically Synthesized
QVQLQESGGGLVQAGGSLRLSCAASGNIFAGLAMGWYRQAPGKERELVAGIDDGGTTYYADSVKGRFTISRDNAKNTVYLQMNSLKPEDTAVYYCAAYGPEEGGHDYWGQGTQVTVSS

SEQ ID NO: 17400 - protein, 118 aa, Artificial Sequence
  Chemically Synthesized
QVQLQESGGGLVQAGGSLRLSCAASGSIFLSYSMGWYRQAPGKERELVAAISVGAITYYADSVKGRFTISRDNAKNTVYLQMNSLKPEDTAVYYCAAHPRVVHVHWYWGQGTQVTVSS

SEQ ID NO: 17401 - protein, 122 aa, Artificial Sequence
  Chemically Synthesized
QVQLQESGGGLVQAGGSLRLSCAASGNISTGEDMGWYRQAPGKEREFVAGISYGGSTNYADSVKGRFTISRDNAKNTVYLQMNSLKPEDTAVYYCAVGNFYPENQAYVYVYWGQGTQVTVSS

SEQ ID NO: 17402 - protein, 125 aa, Artificial Sequence
  Chemically Synthesized
QVQLQESGGGLVQAGGSLRLSCAASGTISYTVYMGWYRQAPGKERELVAAITAGSNTNYADSVKGRFTISRDNAKNTVYLQMNSLKPEDTAVYYCAVPDQRTQSHRDHKQATIYWGQGTQVTVSS

SEQ ID NO: 17403 - protein, 122 aa, Artificial Sequence
  Chemically Synthesized
QVQLQESGGGLVQAGGSLRLSCAASGNIFYVGDMGWYRQAPGKEREFVATIDVGTTTNYADSVKGRFTISRDNAKNTVYLQMNSLKPEDTAVYYCAADSQYYTYNTDPHIYWGQGTQVTVSS

SEQ ID NO: 17404 - protein, 109 aa, Artificial Sequence
  Chemically Synthesized
QVQLQESGGGLVQAGGSLRLSCAASGNISPSIMGWYRQAPGKERELVVYADSVKGRFTISRDNAKNTVYLQMNSLKPEDTAVYYCAADTGTYPYPDLYWGQGTQVTVSS

SEQ ID NO: 17405 - protein, 117 aa, Artificial Sequence
  Chemically Synthesized
QVQLQESGGGLVQAGGSLRLSCAASGTIFEPDYMGWYRQAPGKEREFVATIGLVLLPYADSVKGRFTISRDNAKNTVYLQMNSLKPEDTAVYYCAASDSYLLRLYYWGQGTQVTVSS

SEQ ID NO: 17406 - protein, 118 aa, Artificial Sequence
  Chemically Synthesized
QVQLQESGGGLVQAGGSLRLSCAASGTISTGGVMGWYRQAPGKERELVAGIAAGANTNYADSVKGRFTISRDNAKNTVYLQMNSLKPEDTAVYYCAAYPRYETEHDYWGQGTQVTVSS

SEQ ID NO: 17407 - protein, 118 aa, Artificial Sequence
  Chemically Synthesized
QVQLQESGGGLVQAGGSLRLSCAASGYISYGEQMGWYRQAPGKEREFVASISIGANTYYADSVKGRFTISRDNAKNTVYLQMNSLKPEDTAVYYCAAWVRRHVYHPYWGQGTQVTVSS

SEQ ID NO: 17408 - protein, 118 aa, Artificial Sequence
  Chemically Synthesized
QVQLQESGGGLVQAGGSLRLSCAASGNISGRWGMGWYRQAPGKERELVATIGTGSNTNYADSVKGRFTISRDNAKNTVYLQMNSLKPEDTAVYYCAAEDWPFYSHDYWGQGTQVTVSS

SEQ ID NO: 17409 - protein, 118 aa, Artificial Sequence
  Chemically Synthesized
QVQLQESGGGLVQAGGSLRLSCAASGNIFYVFYMGWYRQAPGKEREFVATIGYGANTNYADSVKGRFTISRDNAKNTVYLQMNSLKPEDTAVYYCAVWSGRYYRLGYWGQGTQVTVSS

SEQ ID NO: 17410 - protein, 117 aa, Artificial Sequence
  Chemically Synthesized
QVQLQESGGGLVQAGGSLRLSCAASGSISYGRQMGWYRQAPGKEREFVATITGGSTNYADSVKGRFTISRDNAKNTVYLQMNSLKPEDTAVYYCAVRRWVWWSFLYWGQGTQVTVSS

SEQ ID NO: 17411 - protein, 122 aa, Artificial Sequence
  Chemically Synthesized
QVQLQESGGGLVQAGGSLRLSCAASGYIFDGYGMGWYRQAPGKEREFVAAINDGGTTNYADSVKGRFTISRDNAKNTVYLQMNSLKPEDTAVYYCAVTDNGDIIGGTAHYYWGQGTQVTVSS

SEQ ID NO: 17412 - protein, 119 aa, Artificial Sequence
  Chemically Synthesized
QVQLQESGGGLVQAGGSLRLSCAASGSIFRRWPMGWYRQAPGKEREFVASIDRGSSTYYADSVKGRFTISRDNAKNTVYLQMNSLKPEDTAVYYCAVRYQYYGLLNDYWGQGTQVTVSS

SEQ ID NO: 17413 - protein, 125 aa, Artificial Sequence
  Chemically Synthesized
QVQLQESGGGLVQAGGSLRLSCAASGSISTQDDMGWYRQAPGKEREFVAAIAYGGITNYADSVKGRFTISRDNAKNTVYLQMNSLKPEDTAVYYCAVSLDRDFDSYRSVVTFLYWGQGTQVTVSS

SEQ ID NO: 17414 - protein, 122 aa, Artificial Sequence
  Chemically Synthesized
QVQLQESGGGLVQAGGSLRLSCAASGTISRSLYMGWYRQAPGKERELVATIGPGTITNYADSVKGRFTISRDNAKNTVYLQMNSLKPEDTAVYYCAARDNELWREYYFYYYWGQGTQVTVSS

SEQ ID NO: 17415 - protein, 118 aa, Artificial Sequence
  Chemically Synthesized
QVQLQESGGGLVQAGGSLRLSCAASGNISEYYNMGWYRQAPGKERELVATIARGGNTYYADSVKGRFTISRDNAKNTVYLQMNSLKPEDTAVYYCAARYTVGHDYGYWGQGTQVTVSS

SEQ ID NO: 17416 - protein, 122 aa, Artificial Sequence
  Chemically Synthesized
QVQLQESGGGLVQAGGSLRLSCAASGSIFPGDRMGWYRQAPGKEREFVAGIDHGAITYYADSVKGRFTISRDNAKNTVYLQMNSLKPEDTAVYYCAAHILYRFVGHTPHWYWGQGTQVTVSS

SEQ ID NO: 17417 - protein, 118 aa, Artificial Sequence
  Chemically Synthesized
QVQLQESGGGLVQAGGSLRLSCAASGYISLYSGMGWYRQAPGKEREFVASIATGTITYYADSVKGRFTISRDNAKNTVYLQMNSLKPEDTAVYYCAVYLFYIPGYRYWGQGTQVTVSS

SEQ ID NO: 17418 - protein, 122 aa, Artificial Sequence
  Chemically Synthesized
QVQLQESGGGLVQAGGSLRLSCAASGTIFDTYWMGWYRQAPGKEREFVAAIDNGANTNYADSVKGRFTISRDNAKNTVYLQMNSLKPEDTAVYYCAAYQAYRPGTGYLLYYWGQGTQVTVSS

SEQ ID NO: 17419 - protein, 117 aa, Artificial Sequence
  Chemically Synthesized
QVQLQESGGGLVQAGGSLRLSCAASGNIFRASSMGWYRQAPGKEREFVPLLIRVVLPYADSVKGRFTISRDNAKNTVYLQMNSLKPEDTAVYYCAADFTFEDTYLYWGQGTQVTVSS

SEQ ID NO: 17420 - protein, 121 aa, Artificial Sequence
  Chemically Synthesized
QVQLQESGGGLVQAGGSLRLSCAASGNIFPLGYMGWYRQAPGKEREFVAGIAAGASPYADSVKGRFTISRDNAKNTVYLQMNSLKPEDTAVYYCAVITGTGSYTFAYLWYWGQGTQVTVSS

SEQ ID NO: 17421 - protein, 118 aa, Artificial Sequence
  Chemically Synthesized
QVQLQESGGGLVQAGGSLRLSCAASGNIFDYGAMGWYRQAPGKEREFVATIGVGGTTNYADSVKGRFTISRDNAKNTVYLQMNSLKPEDTAVYYCAVVYRRSDYFRYWGQGTQVTVSS

SEQ ID NO: 17422 - protein, 118 aa, Artificial Sequence
  Chemically Synthesized
QVQLQESGGGLVQAGGSLRLSCAASGTIFGPGYMGWYRQAPGKERELVAGIGQGASTYYADSVKGRFTISRDNAKNTVYLQMNSLKPEDTAVYYCAAYNTGNYGYTYWGQGTQVTVSS

SEQ ID NO: 17423 - protein, 122 aa, Artificial Sequence
  Chemically Synthesized
QVQLQESGGGLVQAGGSLRLSCAASGTIFHPLGMGWYRQAPGKEREFVATIGYGGSTYYADSVKGRFTISRDNAKNTVYLQMNSLKPEDTAVYYCAVGGWTPAFLAVPAFYWGQGTQVTVSS

SEQ ID NO: 17424 - protein, 126 aa, Artificial Sequence
  Chemically Synthesized
QVQLQESGGGLVQAGGSLRLSCAASGSIFTDQAMGWYRQAPGKERELVASINTGGNTYYADSVKGRFTISRDNAKNTVYLQMNSLKPEDTAVYYCAATVQDYDVINRYDHYAFAYWGQGTQVTVSS

SEQ ID NO: 17425 - protein, 122 aa, Artificial Sequence
  Chemically Synthesized
QVQLQESGGGLVQAGGSLRLSCAASGTISVGGYMGWYRQAPGKEREFVASIAFGGTTNYADSVKGRFTISRDNAKNTVYLQMNSLKPEDTAVYYCAARPVLVYEAYYWHWYWGQGTQVTVSS

SEQ ID NO: 17426 - protein, 116 aa, Artificial Sequence
  Chemically Synthesized
QVQLQESGGGLVQAGGSLRLSCAASGTIFPLFDMGWYRQAPGKEREFVAAIGSGASTNYADSVKGRFTISRDNAKNTVYLQMNSLKPEDTAVYYCAAPYDLDLNYWGQGTQVTVSS

SEQ ID NO: 17427 - protein, 125 aa, Artificial Sequence
  Chemically Synthesized
QVQLQESGGGLVQAGGSLRLSCAASGTISYTAYMGWYRQAPGKEREFVAGIGNGSNTNYADSVKGRFTISRDNAKNTVYLQMNSLKPEDTAVYYCAAGTDYPVDSLGLRTVLLYWGQGTQVTVSS

SEQ ID NO: 17428 - protein, 118 aa, Artificial Sequence
  Chemically Synthesized
QVQLQESGGGLVQAGGSLRLSCAASGSISPDRAMGWYRQAPGKERELVAAIGTGGSTYYADSVKGRFTISRDNAKNTVYLQMNSLKPEDTAVYYCAVGDATDSALTYWGQGTQVTVSS

SEQ ID NO: 17429 - protein, 117 aa, Artificial Sequence
  Chemically Synthesized
QVQLQESGGGLVQAGGSLRLSCAASGTIFRGHDMGWYRQAPGKERELVATISSVLIPYADSVKGRFTISRDNAKNTVYLQMNSLKPEDTAVYYCAVIGPYDYWYTYWGQGTQVTVSS

SEQ ID NO: 17430 - protein, 117 aa, Artificial Sequence
  Chemically Synthesized
QVQLQESGGGLVQAGGSLRLSCAASGNISRPTLMGWYRQAPGKEREFVASIAQGSSTNYADSVKGRFTISRDNAKNTVYLQMNSLKPEDTAVYYCAAYYEYPSSIYWGQGTQVTVSS

SEQ ID NO: 17431 - protein, 119 aa, Artificial Sequence
  Chemically Synthesized
QVQLQESGGGLVQAGGSLRLSCAASGSISERGQMGWYRQAPGKERELVPLLMLVLVPYADSVKGRFTISRDNAKNTVYLQMNSLKPEDTAVYYCAASDVTDHYDAHDYWGQGTQVTVSS

SEQ ID NO: 17432 - protein, 126 aa, Artificial Sequence
  Chemically Synthesized
QVQLQESGGGLVQAGGSLRLSCAASGTISYQPDMGWYRQAPGKEREFVAGISNGAITNYADSVKGRFTISRDNAKNTVYLQMNSLKPEDTAVYYCAAYYHDDVYGYGVDSRLYGYWGQGTQVTVSS

SEQ ID NO: 17433 - protein, 118 aa, Artificial Sequence
  Chemically Synthesized
QVQLQESGGGLVQAGGSLRLSCAASGTIFDTVDMGWYRQAPGKERELVAAIDDGTTTYYADSVKGRFTISRDNAKNTVYLQMNSLKPEDTAVYYCAASTGLVHPYYYWGQGTQVTVSS

SEQ ID NO: 17434 - protein, 126 aa, Artificial Sequence
  Chemically Synthesized
QVQLQESGGGLVQAGGSLRLSCAASGTISYYASMGWYRQAPGKERELVAGIDYGSNTYYADSVKGRFTISRDNAKNTVYLQMNSLKPEDTAVYYCAVYSRYGPYGPTPYQDYYPYWGQGTQVTVSS

SEQ ID NO: 17435 - protein, 117 aa, Artificial Sequence
  Chemically Synthesized
QVQLQESGGGLVQAGGSLRLSCAASGSISRRHAMGWYRQAPGKERELVAAIDIGGSTYADSVKGRFTISRDNAKNTVYLQMNSLKPEDTAVYYCAVQVDRPDYFYYWGQGTQVTVSS

SEQ ID NO: 17436 - protein, 117 aa, Artificial Sequence
  Chemically Synthesized
QVQLQESGGGLVQAGGSLRLSCAASGSIFALSMGWYRQAPGKERELVAGIGPGGTTNYADSVKGRFTISRDNAKNTVYLQMNSLKPEDTAVYYCAAGCSVLVDFGYWGQGTQVTVSS

SEQ ID NO: 17437 - protein, 117 aa, Artificial Sequence
  Chemically Synthesized
QVQLQESGGGLVQAGGSLRLSCAASGNIFSLCMGWYRQAPGKEREFVATIGDGTNTNYADSVKGRFTISRDNAKNTVYLQMNSLKPEDTAVYYCAADPQGAESFTYWGQGTQVTVSS

SEQ ID NO: 17438 - protein, 118 aa, Artificial Sequence
  Chemically Synthesized
QVQLQESGGGLVQAGGSLRLSCAASGSISLYYPMGWYRQAPGKEREFVAAITAGATTYYADSVKGRFTISRDNAKNTVYLQMNSLKPEDTAVYYCAARHYAQYIFRYWGQGTQVTVSS

SEQ ID NO: 17439 - protein, 122 aa, Artificial Sequence
  Chemically Synthesized
QVQLQESGGGLVQAGGSLRLSCAASGSISAYGHMGWYRQAPGKEREFVATINDGGNTYYADSVKGRFTISRDNAKNTVYLQMNSLKPEDTAVYYCAVRATDSEYIQGRHGYWGQGTQVTVSS

SEQ ID NO: 17440 - protein, 111 aa, Artificial Sequence
  Chemically Synthesized
QVQLQESGGGLVQAGGSLRLSCAASGSIFINDNMGWYRQAPGKEREHYADSVKGRFTISRDNAKNTVYLQMNSLKPEDTAVYYCAVPPSAIWDAYDTHYYWGQGTQVTVSS

SEQ ID NO: 17441 - protein, 121 aa, Artificial Sequence
  Chemically Synthesized
QVQLQESGGGLVQAGGSLRLSCAASGSIFVYDPMGWYRQAPGKERELVAGINAGTNTNYADSVKGRFTISRDNAKNTVYLQMNSLKPEDTAVYYCAALQFTYDWVTKFDYWGQGTQVTVSS

SEQ ID NO: 17442 - protein, 118 aa, Artificial Sequence
  Chemically Synthesized
QVQLQESGGGLVQAGGSLRLSCAASGTISSLYAMGWYRQAPGKEREFVATISIGTNTNYADSVKGRFTISRDNAKNTVYLQMNSLKPEDTAVYYCAVHRVMFSGSMYWGQGTQVTVSS

SEQ ID NO: 17443 - protein, 118 aa, Artificial Sequence
  Chemically Synthesized
QVQLQESGGGLVQAGGSLRLSCAASGNIFRAQSMGWYRQAPGKERELVASITRGTSTYYADSVKGRFTISRDNAKNTVYLQMNSLKPEDTAVYYCAAHYGIGYDHGYWGQGTQVTVSS

SEQ ID NO: 17444 - protein, 127 aa, Artificial Sequence
  Chemically Synthesized
QVQLQESGGGLVQAGGSLRLSCAASGSISDGGYMGWYRQAPGKEREFVATIAYGGSTYYADSVKGRFTISRDNAKNTVYLQMNSLKPEDTAVYYCAVDRAEYGPRWYHAWATYLRYWGQGTQVTVSS

SEQ ID NO: 17445 - protein, 112 aa, Artificial Sequence
  Chemically Synthesized
QVQLQESGGGLVQAGGSLRLSCAASGYISGGRYMGWYRQAPGKERELVAAIGQGTNTYYADSVKGRFTISRDNAKNTVYLQMNSLKPEDTAVYYCAVGPLYWGQGTQVTVSS

SEQ ID NO: 17446 - protein, 118 aa, Artificial Sequence
  Chemically Synthesized
QVQLQESGGGLVQAGGSLRLSCAASGSISDSSSMGWYRQAPGKEREFVAAINSGGNTYYADSVKGRFTISRDNAKNTVYLQMNSLKPEDTAVYYCAAILPYKPSLNYWGQGTQVTVSS

SEQ ID NO: 17447 - protein, 118 aa, Artificial Sequence
  Chemically Synthesized
QVQLQESGGGLVQAGGSLRLSCAASGYISYYAVMGWYRQAPGKEREFVAGINLGAITYYADSVKGRFTISRDNAKNTVYLQMNSLKPEDTAVYYCAVALGDRYVYAYWGQGTQVTVSS

SEQ ID NO: 17448 - protein, 118 aa, Artificial Sequence
  Chemically Synthesized
QVQLQESGGGLVQAGGSLRLSCAASGSIFRPRGMGWYRQAPGKEREFVAAIGRGGNTNYADSVKGRFTISRDNAKNTVYLQMNSLKPEDTAVYYCAVITLQRDLFNYWGQGTQVTVSS

SEQ ID NO: 17449 - protein, 119 aa, Artificial Sequence
  Chemically Synthesized
QVQLQESGGGLVQAGGSLRLSCAASGSISDKYPMGWYRQAPGKEREFVAAIDNGASTNYADSVKGRFTISRDNAKNTVYLQMNSLKPEDTAVYYCAVGGPDACCCLSYWGQGTQVTVSS

SEQ ID NO: 17450 - protein, 118 aa, Artificial Sequence
  Chemically Synthesized
QVQLQESGGGLVQAGGSLRLSCAASGNISDLYIMGWYRQAPGKERELVAGINVGTSTYYADSVKGRFTISRDNAKNTVYLQMNSLKPEDTAVYYCAAIASYYRIFLYWGQGTQVTVSS

SEQ ID NO: 17451 - protein, 117 aa, Artificial Sequence
  Chemically Synthesized
QVQLQESGGGLVQAGGSLRLSCAASGNIFDSVMGWYRQAPGKEREFVASIDDGSITNYADSVKGRFTISRDNAKNTVYLQMNSLKPEDTAVYYCAVLQGIFTVHAYWGQGTQVTVSS

SEQ ID NO: 17452 - protein, 118 aa, Artificial Sequence
  Chemically Synthesized
QVQLQESGGGLVQAGGSLRLSCAASGNIFDDQYMGWYRQAPGKERELVAAITAGGNTNYADSVKGRFTISRDNAKNTVYLQMNSLKPEDTAVYYCAAYYYGHTNLEYWGQGTQVTVSS

SEQ ID NO: 17453 - protein, 122 aa, Artificial Sequence
  Chemically Synthesized
QVQLQESGGGLVQAGGSLRLSCAASGNIFGDYYMGWYRQAPGKERELVAGIADGAITNYADSVKGRFTISRDNAKNTVYLQMNSLKPEDTAVYYCAVYEDFYNGWPSGHVYWGQGTQVTVSS

SEQ ID NO: 17454 - protein, 120 aa, Artificial Sequence
  Chemically Synthesized
QVQLQESGGGLVQAGGSLRLSCAASGNISVRAGMGWYRQAPGKERELVAAIGDGSNTNYADSVKGRFTISRDNAKNTVYLQMNSLKPEDTAVYYCAVYIYDGVSTHHKYWGQGTQVTVSS

SEQ ID NO: 17455 - protein, 116 aa, Artificial Sequence
  Chemically Synthesized
QVQLQESGGGLVQAGGSLRLSCAASGSISSYMGWYRQAPGKERELVASITDGGITYYADSVKGRFTISRDNAKNTVYLQMNSLKPEDTAVYYCAVGPPYYIVHVYWGQGTQVTVSS

SEQ ID NO: 17456 - protein, 122 aa, Artificial Sequence
  Chemically Synthesized
QVQLQESGGGLVQAGGSLRLSCAASGNIFRDDDMGWYRQAPGKERELVAGISWGGITYYADSVKGRFTISRDNAKNTVYLQMNSLKPEDTAVYYCAVYSNDTSFIQSRHRYWGQGTQVTVSS

SEQ ID NO: 17457 - protein, 118 aa, Artificial Sequence
  Chemically Synthesized
QVQLQESGGGLVQAGGSLRLSCAASGSISDVLGMGWYRQAPGKERELVAAINTGTSTNYADSVKGRFTISRDNAKNTVYLQMNSLKPEDTAVYYCAVENYDYVVYLYWGQGTQVTVSS

SEQ ID NO: 17458 - protein, 122 aa, Artificial Sequence
  Chemically Synthesized
QVQLQESGGGLVQAGGSLRLSCAASGTISTRQYMGWYRQAPGKERELVASITHGGSTYYADSVKGRFTISRDNAKNTVYLQMNSLKPEDTAVYYCAVEIIDYVRRPNPLPYWGQGTQVTVSS

SEQ ID NO: 17459 - protein, 122 aa, Artificial Sequence
  Chemically Synthesized
QVQLQESGGGLVQAGGSLRLSCAASGSISGVPYMGWYRQAPGKERELVATIAIGSNTNYADSVKGRFTISRDNAKNTVYLQMNSLKPEDTAVYYCAARRYYGNSISYDFLYWGQGTQVTVSS

SEQ ID NO: 17460 - protein, 118 aa, Artificial Sequence
  Chemically Synthesized
QVQLQESGGGLVQAGGSLRLSCAASGYIFTLYGMGWYRQAPGKEREFVAGIDVGGTTYYADSVKGRFTISRDNAKNTVYLQMNSLKPEDTAVYYCAVYSGKKDILTYWGQGTQVTVSS

SEQ ID NO: 17461 - protein, 122 aa, Artificial Sequence
  Chemically Synthesized
QVQLQESGGGLVQAGGSLRLSCAASGTIFYSKYMGWYRQAPGKERELVATIDYGGNTNYADSVKGRFTISRDNAKNTVYLQMNSLKPEDTAVYYCAVSQSNFESRRSSYLYWGQGTQVTVSS

SEQ ID NO: 17462 - protein, 122 aa, Artificial Sequence
  Chemically Synthesized
QVQLQESGGGLVQAGGSLRLSCAASGNIFQGGDMGWYRQAPGKERELVASIASGASTYYADSVKGRFTISRDNAKNTVYLQMNSLKPEDTAVYYCAAGYRTLYRTYYRHGYWGQGTQVTVSS

SEQ ID NO: 17463 - protein, 118 aa, Artificial Sequence
  Chemically Synthesized
QVQLQESGGGLVQAGGSLRLSCAASGSISGRYTMGWYRQAPGKERELVAAIGYGGSTNYADSVKGRFTISRDNAKNTVYLQMNSLKPEDTAVYYCAASGGVATALGYWGQGTQVTVSS

SEQ ID NO: 17464 - protein, 118 aa, Artificial Sequence
  Chemically Synthesized
QVQLQESGGGLVQAGGSLRLSCAASGNISSRYSMGWYRQAPGKEREFVAGIDEGGSTYYADSVKGRFTISRDNAKNTVYLQMNSLKPEDTAVYYCAVGTRYYNYHDYWGQGTQVTVSS

SEQ ID NO: 17465 - protein, 122 aa, Artificial Sequence
  Chemically Synthesized
QVQLQESGGGLVQAGGSLRLSCAASGSISDEYKMGWYRQAPGKEREFVASISYGGITYYADSVKGRFTISRDNAKNTVYLQMNSLKPEDTAVYYCAVRQQSFVDYDSTYDYWGQGTQVTVSS

SEQ ID NO: 17466 - protein, 111 aa, Artificial Sequence
  Chemically Synthesized
QVQLQESGGGLVQAGGSLRLSCAASGNISTVVMGWYRQAPGKERELVATINTGATTYYADSVKGRFTISRDNAKNTVYLQMNSLKPEDTAVYYCAAALLYWGQGTQVTVSS

SEQ ID NO: 17467 - protein, 122 aa, Artificial Sequence
  Chemically Synthesized
QVQLQESGGGLVQAGGSLRLSCAASGYIFYRDGMGWYRQAPGKERELVAAISIGGNTYYADSVKGRFTISRDNAKNTVYLQMNSLKPEDTAVYYCAAYVRNIRCYYLLPWYWGQGTQVTVSS

SEQ ID NO: 17468 - protein, 118 aa, Artificial Sequence
  Chemically Synthesized
QVQLQESGGGLVQAGGSLRLSCAASGNISPTLYMGWYRQAPGKERELVAAITAGGSTNYADSVKGRFTISRDNAKNTVYLQMNSLKPEDTAVYYCAATYGPNDVHSYWGQGTQVTVSS

SEQ ID NO: 17469 - protein, 117 aa, Artificial Sequence
  Chemically Synthesized
QVQLQESGGGLVQAGGSLRLSCAASGYIFHTPSMGWYRQAPGKEREFVASIGIGAIPYADSVKGRFTISRDNAKNTVYLQMNSLKPEDTAVYYCAAWPYIASWYYYWGQGTQVTVSS

SEQ ID NO: 17470 - protein, 118 aa, Artificial Sequence
  Chemically Synthesized
QVQLQESGGGLVQAGGSLRLSCAASGYIFDGDYMGWYRQAPGKEREFVAAISYGGSTYYADSVKGRFTISRDNAKNTVYLQMNSLKPEDTAVYYCAAYKRVGVWFDYWGQGTQVTVSS

SEQ ID NO: 17471 - protein, 125 aa, Artificial Sequence
  Chemically Synthesized
QVQLQESGGGLVQAGGSLRLSCAASGTISEAFNMGWYRQAPGKERELVAGITTGSTTNYADSVKGRFTISRDNAKNTVYLQMNSLKPEDTAVYYCAAYVRDADGRGYDSFSSFYWGQGTQVTVSS

SEQ ID NO: 17472 - protein, 122 aa, Artificial Sequence
  Chemically Synthesized
QVQLQESGGGLVQAGGSLRLSCAASGSIFDDQVMGWYRQAPGKEREFVAGITGGTTYYADSVKGRFTISRDNAKNTVYLQMNSLKPEDTAVYYCAVYSYREVYQSRYVGVYWGQGTQVTVSS

SEQ ID NO: 17473 - protein, 111 aa, Artificial Sequence
  Chemically Synthesized
QVQLQESGGGLVQAGGSLRLSCAASGNIFTYGYMGWYRQAPGKERELVATIGGGSTTNYADSVKGRFTISRDNAKNTVYLQMNSLKPEDTAVYYCAAHPYWGQGTQVTVSS

SEQ ID NO: 17474 - protein, 122 aa, Artificial Sequence
  Chemically Synthesized
QVQLQESGGGLVQAGGSLRLSCAASGSISDTNKMGWYRQAPGKERELVATISYGGTTNYADSVKGRFTISRDNAKNTVYLQMNSLKPEDTAVYYCAVGDDDYQVYVIYFQYWGQGTQVTVSS

SEQ ID NO: 17475 - protein, 122 aa, Artificial Sequence
  Chemically Synthesized
QVQLQESGGGLVQAGGSLRLSCAASGTISALGIMGWYRQAPGKEREFVAAISYGGTTNYADSVKGRFTISRDNAKNTVYLQMNSLKPEDTAVYYCAADYAYRTLHTTTYLYWGQGTQVTVSS

SEQ ID NO: 17476 - protein, 117 aa, Artificial Sequence
  Chemically Synthesized
QVQLQESGGGLVQAGGSLRLSCAASGYIFDYDVMGWYRQAPGKEREFVAGINSVVLPYADSVKGRFTISRDNAKNTVYLQMNSLKPEDTAVYYCAVYGVASTSFWYWGQGTQVTVSS

SEQ ID NO: 17477 - protein, 117 aa, Artificial Sequence
  Chemically Synthesized
QVQLQESGGGLVQAGGSLRLSCAASGTISLGINMGWYRQAPGKERELVAASSGWYYQYADSVKGRFTISRDNAKNTVYLQMNSLKPEDTAVYYCAAYYDYYSALYYWGQGTQVTVSS

SEQ ID NO: 17478 - protein, 122 aa, Artificial Sequence
  Chemically Synthesized
QVQLQESGGGLVQAGGSLRLSCAASGTISRPGIMGWYRQAPGKEREFVASIDRGSTTNYADSVKGRFTISRDNAKNTVYLQMNSLKPEDTAVYYCAVADYRPYSRYDAHKYWGQGTQVTVSS

SEQ ID NO: 17479 - protein, 124 aa, Artificial Sequence
  Chemically Synthesized
QVQLQESGGGLVQAGGSLRLSCAASGSIFYLLRMGWYRQAPGKEREFVATIAFGGITNYADSVKGRFTISRDNAKNTVYLQMNSLKPEDTAVYYCAAGQDGGYIWYYFSDHDYWGQGTQVTVSS

SEQ ID NO: 17480 - protein, 125 aa, Artificial Sequence
  Chemically Synthesized
QVQLQESGGGLVQAGGSLRLSCAASGTISRTPYMGWYRQAPGKERELVAGIASGATTYYADSVKGRFTISRDNAKNTVYLQMNSLKPEDTAVYYCAAIVDSYQYWTLLTTTTLYWGQGTQVTVSS

SEQ ID NO: 17481 - protein, 118 aa, Artificial Sequence
  Chemically Synthesized
QVQLQESGGGLVQAGGSLRLSCAASGSISDTNYMGWYRQAPGKERELVATISEGSTTYYADSVKGRFTISRDNAKNTVYLQMNSLKPEDTAVYYCAVYDLSQYDHSYWGQGTQVTVSS

SEQ ID NO: 17482 - protein, 117 aa, Artificial Sequence
  Chemically Synthesized
QVQLQESGGGLVQAGGSLRLSCAASGYIFIDYAMGWYRQAPGKEREFVATIDYGTSTNYADSVKGRFTISRDNAKNTVYLQMNSLKPEDTAVYYCAVIWYDDYGYYWGQGTQVTVSS

SEQ ID NO: 17483 - protein, 122 aa, Artificial Sequence
  Chemically Synthesized
QVQLQESGGGLVQAGGSLRLSCAASGTISGDQAMGWYRQAPGKERELVAGITYGGSTNYADSVKGRFTISRDNAKNTVYLQMNSLKPEDTAVYYCAAGYTVVIDDHNGHFYWGQGTQVTVSS

SEQ ID NO: 17484 - protein, 122 aa, Artificial Sequence
  Chemically Synthesized
QVQLQESGGGLVQAGGSLRLSCAASGTISDKGAMGWYRQAPGKERELVAGINPGASTNYADSVKGRFTISRDNAKNTVYLQMNSLKPEDTAVYYCAVYDKDFITRGADLSYWGQGTQVTVSS

SEQ ID NO: 17485 - protein, 126 aa, Artificial Sequence
  Chemically Synthesized
QVQLQESGGGLVQAGGSLRLSCAASGTIFGQRAMGWYRQAPGKERELVAAIAPGTITYYADSVKGRFTISRDNAKNTVYLQMNSLKPEDTAVYYCAVGTYWYYIAEWFTLPYHRYWGQGTQVTVSS

SEQ ID NO: 17486 - protein, 121 aa, Artificial Sequence
  Chemically Synthesized
QVQLQESGGGLVQAGGSLRLSCAASGTILRPPMGWYRQAPGKERELVATIGEGTSTNYADSVKGRFTISRDNAKNTVYLQMNSLKPEDTAVYYCAVVGDHRYIRWTWHPYWGQGTQVTVSS

SEQ ID NO: 17487 - protein, 126 aa, Artificial Sequence
  Chemically Synthesized
QVQLQESGGGLVQAGGSLRLSCAASGTISYPVYMGWYRQAPGKEREFVAAISYGGTTYYADSVKGRFTISRDNAKNTVYLQMNSLKPEDTAVYYCAVYTRIYSDRTDDFEWYHTYWGQGTQVTVSS

SEQ ID NO: 17488 - protein, 122 aa, Artificial Sequence
  Chemically Synthesized
QVQLQESGGGLVQAGGSLRLSCAASGTIFGQVYMGWYRQAPGKERELVAGITYGGNTYYADSVKGRFTISRDNAKNTVYLQMNSLKPEDTAVYYCAAIYHYYGRRTNTFAYWGQGTQVTVSS

SEQ ID NO: 17489 - protein, 118 aa, Artificial Sequence
  Chemically Synthesized
QVQLQESGGGLVQAGGSLRLSCAASGNISMGWYRQAPGKEREFVAGISEGSSTYYADSVKGRFTISRDNAKNTVYLQMNSLKPEDTAVYYCAALPYHTYDQIGGLTYWGQGTQVTVSS

SEQ ID NO: 17490 - protein, 121 aa, Artificial Sequence
  Chemically Synthesized
QVQLQESGGGLVQAGGSLRLSCAASGSISNRRAMGWYRQAPGKEREFVATIGPGASTNYADSVKGRFTISRDNAKNTVYLQMNSLKPEDTAVYYCAAYPVSLFRVVSFFYWGQGTQVTVSS

SEQ ID NO: 17491 - protein, 117 aa, Artificial Sequence
  Chemically Synthesized
QVQLQESGGGLVQAGGSLRLSCAASGYIFGNSMGWYRQAPGKERELVAGIDSGANTNYADSVKGRFTISRDNAKNTVYLQMNSLKPEDTAVYYCAVYWVDSNWLDYWGQGTQVTVSS

SEQ ID NO: 17492 - protein, 116 aa, Artificial Sequence
  Chemically Synthesized
QVQLQESGGGLVQAGGSLRLSCAASGSISADMGWYRQAPGKERELVATIDYGWYYQYADSVKGRFTISRDNAKNTVYLQMNSLKPEDTAVYYCAADFHSTSWYDYWGQGTQVTVSS

SEQ ID NO: 17493 - protein, 109 aa, Artificial Sequence
  Chemically Synthesized
QVQLQESGGGLVQAGGSLRLSCAASGNISGLQYMGWYRQAPGKEREFVAAIAHGGIPYADSVKGRFTISRDNAKNTVYLQMNSLKPEDTAVYYCAADYWGQGTQVTVSS

SEQ ID NO: 17494 - protein, 116 aa, Artificial Sequence
  Chemically Synthesized
QVQLQESGGGLVQAGGSLRLSCAASGNISRQPSMGWYRQAPGKERELVASISRGGTTYYADSVKGRFTISRDNAKNTVYLQMNSLKPEDTAVYYCAVTLFTTVLYWGQGTQVTVSS

SEQ ID NO: 17495 - protein, 122 aa, Artificial Sequence
  Chemically Synthesized
QVQLQESGGGLVQAGGSLRLSCAASGNIFANLIMGWYRQAPGKERELVATIANGGSTYYADSVKGRFTISRDNAKNTVYLQMNSLKPEDTAVYYCAVGRTAPTRQSQNYDYWGQGTQVTVSS

SEQ ID NO: 17496 - protein, 118 aa, Artificial Sequence
  Chemically Synthesized
QVQLQESGGGLVQAGGSLRLSCAASGNISGNPKMGWYRQAPGKERELVASIGSGGNTYYADSVKGRFTISRDNAKNTVYLQMNSLKPEDTAVYYCAAYYENANIHTYWGQGTQVTVSS

SEQ ID NO: 17497 - protein, 118 aa, Artificial Sequence
  Chemically Synthesized
QVQLQESGGGLVQAGGSLRLSCAASGNIFRFLYMGWYRQAPGKERELVAGITYGASTYYADSVKGRFTISRDNAKNTVYLQMNSLKPEDTAVYYCAVNRGAGPTHPYWGQGTQVTVSS

SEQ ID NO: 17498 - protein, 117 aa, Artificial Sequence
  Chemically Synthesized
QVQLQESGGGLVQAGGSLRLSCAASGTIFDTDRMGWYRQAPGKEREFVASITEGSTTYYADSVKGRFTISRDNAKNTVYLQMNSLKPEDTAVYYCAVLCMLTTTLYWGQGTQVTVSS

SEQ ID NO: 17499 - protein, 117 aa, Artificial Sequence
  Chemically Synthesized
QVQLQESGGGLVQAGGSLRLSCAASGSIFSATQMGWYRQAPGKEREFVAGIDYGASTNYADSVKGRFTISRDNAKNTVYLQMNSLKPEDTAVYYCAANWYDLSTIYWGQGTQVTVSS

SEQ ID NO: 17500 - protein, 118 aa, Artificial Sequence
  Chemically Synthesized
QVQLQESGGGLVQAGGSLRLSCAASGTIFDLIDMGWYRQAPGKEREFVAAITVGGITYYADSVKGRFTISRDNAKNTVYLQMNSLKPEDTAVYYCAVIPSGDWSFFYWGQGTQVTVSS

SEQ ID NO: 17501 - protein, 118 aa, Artificial Sequence
  Chemically Synthesized
QVQLQESGGGLVQAGGSLRLSCAASGNISNALHMGWYRQAPGKEREFVAAINAGGNTYYADSVKGRFTISRDNAKNTVYLQMNSLKPEDTAVYYCAVVYYDFHYHSYWGQGTQVTVSS

SEQ ID NO: 17502 - protein, 118 aa, Artificial Sequence
  Chemically Synthesized
QVQLQESGGGLVQAGGSLRLSCAASGTIFGQGRMGWYRQAPGKEREFVASIDQGGNTNYADSVKGRFTISRDNAKNTVYLQMNSLKPEDTAVYYCAASAQDIDVLRYWGQGTQVTVSS

SEQ ID NO: 17503 - protein, 121 aa, Artificial Sequence
  Chemically Synthesized
QVQLQESGGGLVQAGGSLRLSCAASGNIFLLGMGWYRQAPGKERELVATITSGGTTNYADSVKGRFTISRDNAKNTVYLQMNSLKPEDTAVYYCAVLSGQAIFRHQQYYYWGQGTQVTVSS

SEQ ID NO: 17504 - protein, 112 aa, Artificial Sequence
  Chemically Synthesized
QVQLQESGGGLVQAGGSLRLSCAASGTISARYAMGWYRQAPGKEREFVAGIDYGGNTYYADSVKGRFTISRDNAKNTVYLQMNSLKPEDTAVYYCAADVMYWGQGTQVTVSS

SEQ ID NO: 17505 - protein, 118 aa, Artificial Sequence
  Chemically Synthesized
QVQLQESGGGLVQAGGSLRLSCAASGSIFPEDYMGWYRQAPGKEREFVAGIADGGTTNYADSVKGRFTISRDNAKNTVYLQMNSLKPEDTAVYYCAARDPGIGWLRYWGQGTQVTVSS

SEQ ID NO: 17506 - protein, 118 aa, Artificial Sequence
  Chemically Synthesized
QVQLQESGGGLVQAGGSLRLSCAASGTISDLQYMGWYRQAPGKERELVATISAGGNTYYADSVKGRFTISRDNAKNTVYLQMNSLKPEDTAVYYCAVGHKPVYTHRYWGQGTQVTVSS

SEQ ID NO: 17507 - protein, 118 aa, Artificial Sequence
  Chemically Synthesized
QVQLQESGGGLVQAGGSLRLSCAASGNISRLYYMGWYRQAPGKERELVAGISVGSTTNYADSVKGRFTISRDNAKNTVYLQMNSLKPEDTAVYYCAVAYDVDSVLGYWGQGTQVTVSS

SEQ ID NO: 17508 - protein, 118 aa, Artificial Sequence
  Chemically Synthesized
QVQLQESGGGLVQAGGSLRLSCAASGTIFGDHSMGWYRQAPGKERELVATIASGGNTNYADSVKGRFTISRDNAKNTVYLQMNSLKPEDTAVYYCAVWRYDYRPLDYWGQGTQVTVSS

SEQ ID NO: 17509 - protein, 117 aa, Artificial Sequence
  Chemically Synthesized
QVQLQESGGGLVQAGGSLRLSCAASGSISWDWDMGWYRQAPGKEREFVAAIDQGGNTNYADSVKGRFTISRDNAKNTVYLQMNSLKPEDTAVYYCAADYWYDAYAYWGQGTQVTVSS

SEQ ID NO: 17510 - protein, 118 aa, Artificial Sequence
  Chemically Synthesized
QVQLQESGGGLVQAGGSLRLSCAASGTISTTSRMGWYRQAPGKERELVASIDYGGNTNYADSVKGRFTISRDNAKNTVYLQMNSLKPEDTAVYYCAVFDLDPSYHIYWGQGTQVTVSS

SEQ ID NO: 17511 - protein, 115 aa, Artificial Sequence
  Chemically Synthesized
QVQLQESGGGLVQAGGSLRLSCAASGYISNYERMGWYRQAPGKEREGTTTYYADSVKGRFTISRDNAKNTVYLQMNSLKPEDTAVYYCAAYDLIFADDGYDHVYWGQGTQVTVSS

SEQ ID NO: 17512 - protein, 118 aa, Artificial Sequence
  Chemically Synthesized
QVQLQESGGGLVQAGGSLRLSCAASGSISYYDYMGWYRQAPGKERELVASINSGTNTYYADSVKGRFTISRDNAKNTVYLQMNSLKPEDTAVYYCAAYVPYIFTYQYWGQGTQVTVSS

SEQ ID NO: 17513 - protein, 111 aa, Artificial Sequence
  Chemically Synthesized
QVQLQESGGGLVQAGGSLRLSCAASGNISNWYQMGWYRQAPGKEREFVAGITYGSNTYYADSVKGRFTISRDNAKNTVYLQMNSLKPEDTAVYYCAVHPYWGQGTQVTVSS

SEQ ID NO: 17514 - protein, 118 aa, Artificial Sequence
  Chemically Synthesized
QVQLQESGGGLVQAGGSLRLSCAASGTIFVADSMGWYRQAPGKEREFVASISSGTSTYYADSVKGRFTISRDNAKNTVYLQMNSLKPEDTAVYYCAASLDLRSYYPYWGQGTQVTVSS

SEQ ID NO: 17515 - protein, 125 aa, Artificial Sequence
  Chemically Synthesized
QVQLQESGGGLVQAGGSLRLSCAASGTIFSGRYMGWYRQAPGKERELVASIGGGGTTNYADSVKGRFTISRDNAKNTVYLQMNSLKPEDTAVYYCAARHKGSRPLTGETLLSFYWGQGTQVTVSS

SEQ ID NO: 17516 - protein, 117 aa, Artificial Sequence
  Chemically Synthesized
QVQLQESGGGLVQAGGSLRLSCAASGYFLVLTMGWYRQAPGKEREFVAGIGKGANTYYADSVKGRFTISRDNAKNTVYLQMNSLKPEDTAVYYCAVGYRVYTAYGYWGQGTQVTVSS

SEQ ID NO: 17517 - protein, 122 aa, Artificial Sequence
  Chemically Synthesized
QVQLQESGGGLVQAGGSLRLSCAASGTIFATDDMGWYRQAPGKEREFVAAITGGSITYYADSVKGRFTISRDNAKNTVYLQMNSLKPEDTAVYYCAANYDGRTAGWGAYTYWGQGTQVTVSS

SEQ ID NO: 17518 - protein, 118 aa, Artificial Sequence
  Chemically Synthesized
QVQLQESGGGLVQAGGSLRLSCAASGNIFRIFSMGWYRQAPGKEREFVAGINIGTITNYADSVKGRFTISRDNAKNTVYLQMNSLKPEDTAVYYCAAYPLGVVFYNYWGQGTQVTVSS

SEQ ID NO: 17519 - protein, 122 aa, Artificial Sequence
  Chemically Synthesized
QVQLQESGGGLVQAGGSLRLSCAASGTIFKLPSMGWYRQAPGKERELVASITQGTITNYADSVKGRFTISRDNAKNTVYLQMNSLKPEDTAVYYCAADVGNYVDPEYLYGYWGQGTQVTVSS

SEQ ID NO: 17520 - protein, 118 aa, Artificial Sequence
  Chemically Synthesized
QVQLQESGGGLVQAGGSLRLSCAASGYISYTGYMGWYRQAPGKERELVATIDYGSITNYADSVKGRFTISRDNAKNTVYLQMNSLKPEDTAVYYCAVVGPPNNGYDYWGQGTQVTVSS

SEQ ID NO: 17521 - protein, 126 aa, Artificial Sequence
  Chemically Synthesized
QVQLQESGGGLVQAGGSLRLSCAASGTIFQQDYMGWYRQAPGKEREFVAAIDYGGTTYYADSVKGRFTISRDNAKNTVYLQMNSLKPEDTAVYYCAAGDHSTDRSDPGRGPWFRYWGQGTQVTVSS

SEQ ID NO: 17522 - protein, 126 aa, Artificial Sequence
  Chemically Synthesized
QVQLQESGGGLVQAGGSLRLSCAASGTISYGANMGWYRQAPGKERELVATIDYGTITYYADSVKGRFTISRDNAKNTVYLQMNSLKPEDTAVYYCAARGWFRYYDYYRELYHLYYWGQGTQVTVSS

SEQ ID NO: 17523 - protein, 122 aa, Artificial Sequence
  Chemically Synthesized
QVQLQESGGGLVQAGGSLRLSCAASGNIFRDRIMGWYRQAPGKERELVAGISAGTITNYADSVKGRFTISRDNAKNTVYLQMNSLKPEDTAVYYCAVHIGRTNGYADLYRYWGQGTQVTVSS

SEQ ID NO: 17524 - protein, 117 aa, Artificial Sequence
  Chemically Synthesized
QVQLQESGGGLVQAGGSLRLSCAASGNISDDRYMGWYRQAPGKERELVAVLMTVVVPYADSVKGRFTISRDNAKNTVYLQMNSLKPEDTAVYYCAVYDIRGAPYPYWGQGTQVTVSS

SEQ ID NO: 17525 - protein, 119 aa, Artificial Sequence
  Chemically Synthesized
QVQLQESGGGLVQAGGSLRLSCAASGYISTFGIMGWYRQAPGKEREFVATIDEGGASTYYADSVKGRFTISRDNAKNTVYLQMNSLKPEDTAVYYCAAGDYLNTWLTYWGQGTQVTVSS

SEQ ID NO: 17526 - protein, 118 aa, Artificial Sequence
  Chemically Synthesized
QVQLQESGGGLVQAGGSLRLSCAASGTISGGRSMGWYRQAPGKEREFVAGIGTGSNTYYADSVKGRFTISRDNAKNTVYLQMNSLKPEDTAVYYCAAWTYGISTLDYWGQGTQVTVSS

SEQ ID NO: 17527 - protein, 118 aa, Artificial Sequence
  Chemically Synthesized
QVQLQESGGGLVQAGGSLRLSCAASGNISYGSVMGWYRQAPGKERELVAAINVGTSTNYADSVKGRFTISRDNAKNTVYLQMNSLKPEDTAVYYCAVPPRYDVVYPYWGQGTQVTVSS

SEQ ID NO: 17528 - protein, 117 aa, Artificial Sequence
  Chemically Synthesized
QVQLQESGGGLVQAGGSLRLSCAASGSIFRSRMGWYRQAPGKERELVAGITYGTSTNYADSVKGRFTISRDNAKNTVYLQMNSLKPEDTAVYYCAAQSQNDPSHPYWGQGTQVTVSS

SEQ ID NO: 17529 - protein, 118 aa, Artificial Sequence
  Chemically Synthesized
QVQLQESGGGLVQAGGSLRLSCAASGIFLFTVMGWYRQAPGKERELVATIASYGTNTNYADSVKGRFTISRDNAKNTVYLQMNSLKPEDTAVYYCAVNDFTHWYLSYWGQGTQVTVSS

SEQ ID NO: 17530 - protein, 126 aa, Artificial Sequence
  Chemically Synthesized
QVQLQESGGGLVQAGGSLRLSCAASGYISRRYYMGWYRQAPGKEREFVASIGDGGTTNYADSVKGRFTISRDNAKNTVYLQMNSLKPEDTAVYYCAAPSPRAAGWVDDDYREHVYWGQGTQVTVSS

SEQ ID NO: 17531 - protein, 117 aa, Artificial Sequence
  Chemically Synthesized
QVQLQESGGGLVQAGGSLRLSCAASGYISDYSDMGWYRQAPGKERELVAAIATGTTTYADSVKGRFTISRDNAKNTVYLQMNSLKPEDTAVYYCAVYLWGAGDLYYWGQGTQVTVSS

SEQ ID NO: 17532 - protein, 122 aa, Artificial Sequence
  Chemically Synthesized
QVQLQESGGGLVQAGGSLRLSCAASGTIFTPYYMGWYRQAPGKERELVASIAGGATTNYADSVKGRFTISRDNAKNTVYLQMNSLKPEDTAVYYCAARRVGGTPSSYYFPYWGQGTQVTVSS

SEQ ID NO: 17533 - protein, 128 aa, Artificial Sequence
  Chemically Synthesized
QVQLQESGGGLVQAGGSLRLSCAASGTISPYADMGWYRQAPGKERELVAAISSGATTYYADSVKGRFTISRDNAKNTVYLQMNSLKPEDTAVYYCAVWFPDEGPPGTALYVYDAYDYWGQGTQVTVSS

SEQ ID NO: 17534 - protein, 122 aa, Artificial Sequence
  Chemically Synthesized
QVQLQESGGGLVQAGGSLRLSCAASGYIFPSSYMGWYRQAPGKEREFVAAIASGGITYYADSVKGRFTISRDNAKNTVYLQMNSLKPEDTAVYYCAAYRWRNSYLYNPFHYWGQGTQVTVSS

SEQ ID NO: 17535 - protein, 118 aa, Artificial Sequence
  Chemically Synthesized
QVQLQESGGGLVQAGGSLRLSCAASGTIFGWTSMGWYRQAPGKERELVAGINYGGITNYADSVKGRFTISRDNAKNTVYLQMNSLKPEDTAVYYCAASADAGHPLGYWGQGTQVTVSS

SEQ ID NO: 17536 - protein, 119 aa, Artificial Sequence
  Chemically Synthesized
QVQLQESGGGLVQAGGSLRLSCAASGSISYVDAMGWYRQAPGKERELVAGITTTYYADSVKGRFTISRDNAKNTVYLQMNSLKPEDTAVYYCAADHREKSDEYPPYTYWGQGTQVTVSS

SEQ ID NO: 17537 - protein, 126 aa, Artificial Sequence
  Chemically Synthesized
QVQLQESGGGLVQAGGSLRLSCAASGTIFASPRMGWYRQAPGKEREFVASITVGSSTYYADSVKGRFTISRDNAKNTVYLQMNSLKPEDTAVYYCAATTYQYAYRRGFDYWYFSYWGQGTQVTVSS

SEQ ID NO: 17538 - protein, 121 aa, Artificial Sequence
  Chemically Synthesized
QVQLQESGGGLVQAGGSLRLSCAASGNISSPKYMGWYRQAPGKERELLPVLIRVLVPYADSVKGRFTISRDNAKNTVYLQMNSLKPEDTAVYYCAASLDGGYGWLYRHRYWGQGTQVTVSS

SEQ ID NO: 17539 - protein, 122 aa, Artificial Sequence
  Chemically Synthesized
QVQLQESGGGLVQAGGSLRLSCAASGTISGYTYMGWYRQAPGKERELVAAIAYGGTTYYADSVKGRFTISRDNAKNTVYLQMNSLKPEDTAVYYCAVGTYEGDANVYSHFYWGQGTQVTVSS

SEQ ID NO: 17540 - protein, 122 aa, Artificial Sequence
  Chemically Synthesized
QVQLQESGGGLVQAGGSLRLSCAASGSISPGYYMGWYRQAPGKEREFVAGIGVGTNTYYADSVKGRFTISRDNAKNTVYLQMNSLKPEDTAVYYCAAGYHTDNTDYPRLAYWGQGTQVTVSS

SEQ ID NO: 17541 - protein, 118 aa, Artificial Sequence
  Chemically Synthesized
QVQLQESGGGLVQAGGSLRLSCAASGNISRGDVMGWYRQAPGKEREFVAGIDYGGITYYADSVKGRFTISRDNAKNTVYLQMNSLKPEDTAVYYCAVDDWDDLLYPYWGQGTQVTVSS

SEQ ID NO: 17542 - protein, 126 aa, Artificial Sequence
  Chemically Synthesized
QVQLQESGGGLVQAGGSLRLSCAASGNISLSHEMGWYRQAPGKERELVASISYGTITYYADSVKGRFTISRDNAKNTVYLQMNSLKPEDTAVYYCAVVYGQHGDVEIRRYAVLGYWGQGTQVTVSS

SEQ ID NO: 17543 - protein, 121 aa, Artificial Sequence
  Chemically Synthesized
QVQLQESGGGLVQAGGSLRLSCAASGNIFTDYGMGWYRQAPGKERELVASITHGTSTYYADSVKGRFTISRDNAKNTVYLQMNSLKPEDTAVYYCAATLIGYPYVGSLYYWGQGTQVTVSS

SEQ ID NO: 17544 - protein, 117 aa, Artificial Sequence
  Chemically Synthesized
QVQLQESGGGLVQAGGSLRLSCAASGNISYPYQMGWYRQAPGKEREFVATINRGGKPYADSVKGRFTISRDNAKNTVYLQMNSLKPEDTAVYYCAARWSNRYAYYYWGQGTQVTVSS

SEQ ID NO: 17545 - protein, 116 aa, Artificial Sequence
  Chemically Synthesized
QVQLQESGGGLVQAGGSLRLSCAASGTIFSYVRMGWYRQAPGKEREFVAAITDGTITYADSVKGRFTISRDNAKNTVYLQMNSLKPEDTAVYYCAVYSTVCCVLYWGQGTQVTVSS

SEQ ID NO: 17546 - protein, 122 aa, Artificial Sequence
  Chemically Synthesized
QVQLQESGGGLVQAGGSLRLSCAASGNISYYTQMGWYRQAPGKERELVAGIAWGSITYYADSVKGRFTISRDNAKNTVYLQMNSLKPEDTAVYYCAASRKWYYLAFDEHYYWGQGTQVTVSS

SEQ ID NO: 17547 - protein, 118 aa, Artificial Sequence
  Chemically Synthesized
QVQLQESGGGLVQAGGSLRLSCAASGTISPYRNMGWYRQAPGKEREFVATINWGGNTYYADSVKGRFTISRDNAKNTVYLQMNSLKPEDTAVYYCAADYAYVTNHAYWGQGTQVTVSS

SEQ ID NO: 17548 - protein, 118 aa, Artificial Sequence
  Chemically Synthesized
QVQLQESGGGLVQAGGSLRLSCAASGTISPAAGMGWYRQAPGKEREFVASIDGGTTTNYADSVKGRFTISRDNAKNTVYLQMNSLKPEDTAVYYCAVTSVRDTRHGYWGQGTQVTVSS

SEQ ID NO: 17549 - protein, 118 aa, Artificial Sequence
  Chemically Synthesized
QVQLQESGGGLVQAGGSLRLSCAASGTIFSRVQMGWYRQAPGKERELVATINRGAITYYADSVKGRFTISRDNAKNTVYLQMNSLKPEDTAVYYCAARYRSYVNLQYWGQGTQVTVSS

SEQ ID NO: 17550 - protein, 118 aa, Artificial Sequence
  Chemically Synthesized
QVQLQESGGGLVQAGGSLRLSCAASGSIFRGRHMGWYRQAPGKERELVAGIARGGSTYYADSVKGRFTISRDNAKNTVYLQMNSLKPEDTAVYYCAAGQLYPRAHYYWGQGTQVTVSS

SEQ ID NO: 17551 - protein, 122 aa, Artificial Sequence
  Chemically Synthesized
QVQLQESGGGLVQAGGSLRLSCAASGTISDRARMGWYRQAPGKERELVATIGRGGTTYYADSVKGRFTISRDNAKNTVYLQMNSLKPEDTAVYYCAAQVLFYHGRHYYHTYWGQGTQVTVSS

SEQ ID NO: 17552 - protein, 118 aa, Artificial Sequence
  Chemically Synthesized
QVQLQESGGGLVQAGGSLRLSCAASGTISALTIMGWYRQAPGKERELVAGINPGTSTNYADSVKGRFTISRDNAKNTVYLQMNSLKPEDTAVYYCAANAGDYYWHGYWGQGTQVTVSS

SEQ ID NO: 17553 - protein, 122 aa, Artificial Sequence
  Chemically Synthesized
QVQLQESGGGLVQAGGSLRLSCAASGSIFGVIRMGWYRQAPGKEREFVASITYGSSTNYADSVKGRFTISRDNAKNTVYLQMNSLKPEDTAVYYCAAYRKAAYYHSYVHGYWGQGTQVTVSS

SEQ ID NO: 17554 - protein, 118 aa, Artificial Sequence
  Chemically Synthesized
QVQLQESGGGLVQAGGSLRLSCAASGYISVAYYMGWYRQAPGKEREFVAAIGRGTTTYYADSVKGRFTISRDNAKNTVYLQMNSLKPEDTAVYYCAVTVRRLYRFGYWGQGTQVTVSS

SEQ ID NO: 17555 - protein, 118 aa, Artificial Sequence
  Chemically Synthesized
QVQLQESGGGLVQAGGSLRLSCAASGYISYYDAMGWYRQAPGKERELVAGIGIGSITNYADSVKGRFTISRDNAKNTVYLQMNSLKPEDTAVYYCAVTWYNLHWYYYWGQGTQVTVSS

SEQ ID NO: 17556 - protein, 118 aa, Artificial Sequence
  Chemically Synthesized
QVQLQESGGGLVQAGGSLRLSCAASGYIFPRYYMGWYRQAPGKEREFVASIGWGGITNYADSVKGRFTISRDNAKNTVYLQMNSLKPEDTAVYYCAVTRVTHQRYYYWGQGTQVTVSS

SEQ ID NO: 17557 - protein, 118 aa, Artificial Sequence
  Chemically Synthesized
QVQLQESGGGLVQAGGSLRLSCAASGTIFWTRTMGWYRQAPGKERELVAGITSGAITYYADSVKGRFTISRDNAKNTVYLQMNSLKPEDTAVYYCAVYYASNGSHRYWGQGTQVTVSS

SEQ ID NO: 17558 - protein, 122 aa, Artificial Sequence
  Chemically Synthesized
QVQLQESGGGLVQAGGSLRLSCAASGYISGRYRMGWYRQAPGKEREFVAAIGVGTSTNYADSVKGRFTISRDNAKNTVYLQMNSLKPEDTAVYYCAVNVRYKWGAHYGHFYWGQGTQVTVSS

SEQ ID NO: 17559 - protein, 122 aa, Artificial Sequence
  Chemically Synthesized
QVQLQESGGGLVQAGGSLRLSCAASGSISGAYYMGWYRQAPGKERELVAGIATGGTTYYADSVKGRFTISRDNAKNTVYLQMNSLKPEDTAVYYCAVATYIYYRTRPYYRYWGQGTQVTVSS

SEQ ID NO: 17560 - protein, 118 aa, Artificial Sequence
  Chemically Synthesized
QVQLQESGGGLVQAGGSLRLSCAASGYISRASYMGWYRQAPGKEREFVASITAGGSTYYADSVKGRFTISRDNAKNTVYLQMNSLKPEDTAVYYCAVRQYSTRYHGYWGQGTQVTVSS

SEQ ID NO: 17561 - protein, 118 aa, Artificial Sequence
  Chemically Synthesized
QVQLQESGGGLVQAGGSLRLSCAASGTIFGGGYMGWYRQAPGKEREFVAGITYGASTYYADSVKGRFTISRDNAKNTVYLQMNSLKPEDTAVYYCAVKPSWKGYHRYWGQGTQVTVSS

SEQ ID NO: 17562 - protein, 118 aa, Artificial Sequence
  Chemically Synthesized
QVQLQESGGGLVQAGGSLRLSCAASGNIFALYKMGWYRQAPGKERELVATISYGGTTYYADSVKGRFTISRDNAKNTVYLQMNSLKPEDTAVYYCAAYIYTTRYYRYWGQGTQVTVSS

SEQ ID NO: 17563 - protein, 118 aa, Artificial Sequence
  Chemically Synthesized
QVQLQESGGGLVQAGGSLRLSCAASGTISSLYSMGWYRQAPGKERELVATINSGASTNYADSVKGRFTISRDNAKNTVYLQMNSLKPEDTAVYYCAARYWYKRPYYYWGQGTQVTVSS

SEQ ID NO: 17564 - protein, 118 aa, Artificial Sequence
  Chemically Synthesized
QVQLQESGGGLVQAGGSLRLSCAASGNISRFTYMGWYRQAPGKEREFVASIDYGATTNYADSVKGRFTISRDNAKNTVYLQMNSLKPEDTAVYYCAALLWAYRRHSYWGQGTQVTVSS

SEQ ID NO: 17565 - protein, 126 aa, Artificial Sequence
  Chemically Synthesized
QVQLQESGGGLVQAGGSLRLSCAASGNISLGYRMGWYRQAPGKEREFVASIGVGGSTYYADSVKGRFTISRDNAKNTVYLQMNSLKPEDTAVYYCAVRNYVRGYYWYYGGRRHPYWGQGTQVTVSS

SEQ ID NO: 17566 - protein, 118 aa, Artificial Sequence
  Chemically Synthesized
QVQLQESGGGLVQAGGSLRLSCAASGTISYILRMGWYRQAPGKEREFVAAISRGSSTNYADSVKGRFTISRDNAKNTVYLQMNSLKPEDTAVYYCAATGYDYRPFRYWGQGTQVTVSS

SEQ ID NO: 17567 - protein, 121 aa, Artificial Sequence
  Chemically Synthesized
QVQLQESGGGLVQAGGSLRLSCAASGNISTLTKMGWYRQAPGKEREFVASITSVLLPYADSVKGRFTISRDNAKNTVYLQMNSLKPEDTAVYYCAAYGEAYYDPLPYHVYWGQGTQVTVSS

SEQ ID NO: 17568 - protein, 122 aa, Artificial Sequence
  Chemically Synthesized
QVQLQESGGGLVQAGGSLRLSCAASGNIFGKQYMGWYRQAPGKEREFVATIGGGGITNYADSVKGRFTISRDNAKNTVYLQMNSLKPEDTAVYYCAVVFYRYGIQHRTYVYWGQGTQVTVSS

SEQ ID NO: 17569 - protein, 126 aa, Artificial Sequence
  Chemically Synthesized
QVQLQESGGGLVQAGGSLRLSCAASGTISWGQRMGWYRQAPGKEREFVASITKGGTTYYADSVKGRFTISRDNAKNTVYLQMNSLKPEDTAVYYCAVRSQYIPYHDAARIRRYYYWGQGTQVTVSS

SEQ ID NO: 17570 - protein, 117 aa, Artificial Sequence
  Chemically Synthesized
QVQLQESGGGLVQAGGSLRLSCAASGTISLYNYMGWYRQAPGKEREFVASIADGSNTYADSVKGRFTISRDNAKNTVYLQMNSLKPEDTAVYYCAVNDDFPYYHSYWGQGTQVTVSS

SEQ ID NO: 17571 - protein, 118 aa, Artificial Sequence
  Chemically Synthesized
QVQLQESGGGLVQAGGSLRLSCAASGNISGRHAMGWYRQAPGKEREFVATITTGGNTNYADSVKGRFTISRDNAKNTVYLQMNSLKPEDTAVYYCAVRGYAYRYYGYWGQGTQVTVSS

SEQ ID NO: 17572 - protein, 126 aa, Artificial Sequence
  Chemically Synthesized
QVQLQESGGGLVQAGGSLRLSCAASGSIFKYRYMGWYRQAPGKERELVASIAYGGSTNYADSVKGRFTISRDNAKNTVYLQMNSLKPEDTAVYYCAAVPWWKVNYGSLGSGYHYYWGQGTQVTVSS

SEQ ID NO: 17573 - protein, 126 aa, Artificial Sequence
  Chemically Synthesized
QVQLQESGGGLVQAGGSLRLSCAASGYISRWRRMGWYRQAPGKEREFVASITTGGNTNYADSVKGRFTISRDNAKNTVYLQMNSLKPEDTAVYYCAAAVLWKQGYDQREYRWLSYWGQGTQVTVSS

SEQ ID NO: 17574 - protein, 126 aa, Artificial Sequence
  Chemically Synthesized
QVQLQESGGGLVQAGGSLRLSCAASGNIFRVRRMGWYRQAPGKERELVATIDYGTNTYYADSVKGRFTISRDNAKNTVYLQMNSLKPEDTAVYYCAVYAVYPPSGGRPYYRAHRYWGQGTQVTVSS

SEQ ID NO: 17575 - protein, 116 aa, Artificial Sequence
  Chemically Synthesized
QVQLQESGGGLVQAGGSLRLSCAASGTISLAPYMGWYRQAPGKERELVAAISPGSITYYADSVKGRFTISRDNAKNTVYLQMNSLKPEDTAVYYCAYLYAAELTYWGQGTQVTVSS

SEQ ID NO: 17576 - protein, 118 aa, Artificial Sequence
  Chemically Synthesized
QVQLQESGGGLVQAGGSLRLSCAASGSISRIRAMGWYRQAPGKEREFVAGISTGATTNYADSVKGRFTISRDNAKNTVYLQMNSLKPEDTAVYYCAAIAGVFSLYYYWGQGTQVTVSS

SEQ ID NO: 17577 - protein, 117 aa, Artificial Sequence
  Chemically Synthesized
QVQLQESGGGLVQAGGSLRLSCAASGNIFAPPTMGWYRQAPGKERELVAGIGDGASTYYADSVKGRFTISRDNAKNTVYLQMNSLKPEDTAVYYCAVGLTSRTVFYWGQGTQVTVSS

SEQ ID NO: 17578 - protein, 118 aa, Artificial Sequence
  Chemically Synthesized
QVQLQESGGGLVQAGGSLRLSCAASGNISLYPEMGWYRQAPGKERELVAGIAGGAITYYADSVKGRFTISRDNAKNTVYLQMNSLKPEDTAVYYCAVGYSLLTNLDYWGQGTQVTVSS

SEQ ID NO: 17579 - protein, 118 aa, Artificial Sequence
  Chemically Synthesized
QVQLQESGGGLVQAGGSLRLSCAASGNIFRYASMGWYRQAPGKERELVAGITYGGITYYADSVKGRFTISRDNAKNTVYLQMNSLKPEDTAVYYCAVRGIPRLSLSYWGQGTQVTVSS

SEQ ID NO: 17580 - protein, 120 aa, Artificial Sequence
  Chemically Synthesized
QVQLQESGGGLVQAGGSLRLSCAASGSISQSTMGWYRQAPGKEREFVATIAYGGNTNYADSVKGRFTISRDNAKNTVYLQMNSLKPEDTAVYYCAVSTWVFVLVTTTMYWGQGTQVTVSS

SEQ ID NO: 17581 - protein, 126 aa, Artificial Sequence
  Chemically Synthesized
QVQLQESGGGLVQAGGSLRLSCAASGSISHLYVMGWYRQAPGKERELVAGITTGTITNYADSVKGRFTISRDNAKNTVYLQMNSLKPEDTAVYYCAVDRGDGQRNTVGDAYQHYYWGQGTQVTVSS

SEQ ID NO: 17582 - protein, 113 aa, Artificial Sequence
  Chemically Synthesized
QVQLQESGGGLVQAGGSLRLSCAASGNISVRYDMGWYRQAPGKEREFVASIGPGTITYYADSVKGRFTISRDNAKNTVYLQMNSLKPEDTAVYYCATLLTLYWGQGTQVTVSS

SEQ ID NO: 17583 - protein, 118 aa, Artificial Sequence
  Chemically Synthesized
QVQLQESGGGLVQAGGSLRLSCAASGNIFWGASMGWYRQAPGKERELVAAIGAGGSTNYADSVKGRFTISRDNAKNTVYLQMNSLKPEDTAVYYCAVYYRYLPWLQYWGQGTQVTVSS

SEQ ID NO: 17584 - protein, 117 aa, Artificial Sequence
  Chemically Synthesized
QVQLQESGGGLVQAGGSLRLSCAASGSISSLSMGWYRQAPGKEREFVASITNGATTYYADSVKGRFTISRDNAKNTVYLQMNSLKPEDTAVYYCAVTYYGLVDHRYWGQGTQVTVSS

SEQ ID NO: 17585 - protein, 122 aa, Artificial Sequence
  Chemically Synthesized
QVQLQESGGGLVQAGGSLRLSCAASGSISLYTIMGWYRQAPGKERELVAAIDTGGNTYYADSVKGRFTISRDNAKNTVYLQMNSLKPEDTAVYYCAVGHNTTYHQGDPFLYWGQGTQVTVSS

SEQ ID NO: 17586 - protein, 118 aa, Artificial Sequence
  Chemically Synthesized
QVQLQESGGGLVQAGGSLRLSCAASGNISSPGAMGWYRQAPGKEREFVAAIARGTSTYYADSVKGRFTISRDNAKNTVYLQMNSLKPEDTAVYYCAVNYYHTYGFDYWGQGTQVTVSS

SEQ ID NO: 17587 - protein, 122 aa, Artificial Sequence
  Chemically Synthesized
QVQLQESGGGLVQAGGSLRLSCAASGTISYASGMGWYRQAPGKERELVASINTGATTYYADSVKGRFTISRDNAKNTVYLQMNSLKPEDTAVYYCAADQNRWDYQYRDYGYWGQGTQVTVSS

SEQ ID NO: 17588 - protein, 118 aa, Artificial Sequence
  Chemically Synthesized
QVQLQESGGGLVQAGGSLRLSCAASGNISYNYQMGWYRQAPGKERELVATIDSGTITNYADSVKGRFTISRDNAKNTVYLQMNSLKPEDTAVYYCAVILSTEEPLRYWGQGTQVTVSS

SEQ ID NO: 17589 - protein, 114 aa, Artificial Sequence
  Chemically Synthesized
QVQLQESGGGLVQAGGSLRLSCAASGYIFYSFLMGWYRQAPGKERELLLSVLLPYADSVKGRFTISRDNAKNTVYLQMNSLKPEDTAVYYCAVSVSGNRNYWYWGQGTQVTVSS

SEQ ID NO: 17590 - protein, 118 aa, Artificial Sequence
  Chemically Synthesized
QVQLQESGGGLVQAGGSLRLSCAASGYISGYDIMGWYRQAPGKERELVAGIAYGAITYYADSVKGRFTISRDNAKNTVYLQMNSLKPEDTAVYYCAVYSTLDDKFHYWGQGTQVTVSS

SEQ ID NO: 17591 - protein, 110 aa, Artificial Sequence
  Chemically Synthesized
QVQLQESGGGLVQAGGSLRLSCAASGYIFSHDTMGWYRQAPGKEREFVYQYADSVKGRFTISRDNAKNTVYLQMNSLKPEDTAVYYCAAYLPTGYVHRYWGQGTQVTVSS

SEQ ID NO: 17592 - protein, 118 aa, Artificial Sequence
  Chemically Synthesized
QVQLQESGGGLVQAGGSLRLSCAASGYISGGYDMGWYRQAPGKEREFVASIAWGGTTNYADSVKGRFTISRDNAKNTVYLQMNSLKPEDTAVYYCAAFDRDYPLFAYWGQGTQVTVSS

SEQ ID NO: 17593 - protein, 122 aa, Artificial Sequence
  Chemically Synthesized
QVQLQESGGGLVQAGGSLRLSCAASGNISDTTSMGWYRQAPGKEREFVATIDPGTNTNYADSVKGRFTISRDNAKNTVYLQMNSLKPEDTAVYYCAVNYRPSTPRDYAHRYWGQGTQVTVSS

SEQ ID NO: 17594 - protein, 122 aa, Artificial Sequence
  Chemically Synthesized
QVQLQESGGGLVQAGGSLRLSCAASGYIFYSTLMGWYRQAPGKERELVATIADGGTTYYADSVKGRFTISRDNAKNTVYLQMNSLKPEDTAVYYCAANTIGIAWDGGVHDYWGQGTQVTVSS

SEQ ID NO: 17595 - protein, 121 aa, Artificial Sequence
  Chemically Synthesized
QVQLQESGGGLVQAGGSLRLSCAASGYISDYGMGWYRQAPGKERELVAAITWGGTTNYADSVKGRFTISRDNAKNTVYLQMNSLKPEDTAVYYCAADVAYVTSNTPAHLYWGQGTQVTVSS

SEQ ID NO: 17596 - protein, 109 aa, Artificial Sequence
  Chemically Synthesized
QVQLQESGGGLVQAGGSLRLSCAASGNISLDGGMGWYRQAPGKERELVAAIDDGTITNYADSVKGRFTISRDNAKNTVYLQMNSLKPEDTAVYYCAPYWGQGTQVTVSS

SEQ ID NO: 17597 - protein, 121 aa, Artificial Sequence
  Chemically Synthesized
QVQLQESGGGLVQAGGSLRLSCAASGNISESTMGWYRQAPGKERELVAAIAEGTSTNYADSVKGRFTISRDNAKNTVYLQMNSLKPEDTAVYYCAARGYYYGYTNDDLYYWGQGTQVTVSS

SEQ ID NO: 17598 - protein, 121 aa, Artificial Sequence
  Chemically Synthesized
QVQLQESGGGLVQAGGSLRLSCAASGNISDYAVMGWYRQAPGKERELVATITEGTSTNYADSVKGRFTISRDNAKNTVYLQMNSLKPEDTAVYYCAAYYTLSYYYFYHEYWGQGTQVTVSS

SEQ ID NO: 17599 - protein, 118 aa, Artificial Sequence
  Chemically Synthesized
QVQLQESGGGLVQAGGSLRLSCAASGTIFDNVYMGWYRQAPGKEREFVAAIDTGAITYYADSVKGRFTISRDNAKNTVYLQMNSLKPEDTAVYYCAVDAAYRTQLWYWGQGTQVTVSS

SEQ ID NO: 17600 - protein, 118 aa, Artificial Sequence
  Chemically Synthesized
QVQLQESGGGLVQAGGSLRLSCAASGNISDGWYMGWYRQAPGKERELVASIGYGGITYYADSVKGRFTISRDNAKNTVYLQMNSLKPEDTAVYYCAVIYQSSIVYQYWGQGTQVTVSS

SEQ ID NO: 17601 - protein, 118 aa, Artificial Sequence
  Chemically Synthesized
QVQLQESGGGLVQAGGSLRLSCAASGYIFSELYMGWYRQAPGKERELVATIGYGTNTNYADSVKGRFTISRDNAKNTVYLQMNSLKPEDTAVYYCAVGNYTYVRFQYWGQGTQVTVSS

SEQ ID NO: 17602 - protein, 110 aa, Artificial Sequence
  Chemically Synthesized
QVQLQESGGGLVQAGGSLRLSCAASGTISTRQHMGWYRQAPGKEREFVAGISDGTSTNYADSVKGRFTISRDNAKNTVYLQMNSLKPEDTAVYYCANFYWGQGTQVTVSS

SEQ ID NO: 17603 - protein, 117 aa, Artificial Sequence
  Chemically Synthesized
QVQLQESGGGLVQAGGSLRLSCAASGNISSIRMGWYRQAPGKERELVAAITPGSTTNYADSVKGRFTISRDNAKNTVYLQMNSLKPEDTAVYYCAVVTVRYTWHWYWGQGTQVTVSS

SEQ ID NO: 17604 - protein, 122 aa, Artificial Sequence
  Chemically Synthesized
QVQLQESGGGLVQAGGSLRLSCAASGYIFFSYVMGWYRQAPGKEREFVASISYGGITYYADSVKGRFTISRDNAKNTVYLQMNSLKPEDTAVYYCAAVGLVTLFNYGNLGYWGQGTQVTVSS

SEQ ID NO: 17605 - protein, 122 aa, Artificial Sequence
  Chemically Synthesized
QVQLQESGGGLVQAGGSLRLSCAASGSISYYAWMGWYRQAPGKERELVAGIATGATTYYADSVKGRFTISRDNAKNTVYLQMNSLKPEDTAVYYCAVAPTVYGVDSNGLTYWGQGTQVTVSS

SEQ ID NO: 17606 - protein, 118 aa, Artificial Sequence
  Chemically Synthesized
QVQLQESGGGLVQAGGSLRLSCAASGTIFDTSTMGWYRQAPGKEREFVASISKGSITYYADSVKGRFTISRDNAKNTVYLQMNSLKPEDTAVYYCAVGLSAQGYYVYWGQGTQVTVSS

SEQ ID NO: 17607 - protein, 117 aa, Artificial Sequence
  Chemically Synthesized
QVQLQESGGGLVQAGGSLRLSCAASGSISGQLWMGWYRQAPGKEREFVAGISSVLVPYADSVKGRFTISRDNAKNTVYLQMNSLKPEDTAVYYCAVGDYYAGGLTYWGQGTQVTVSS

SEQ ID NO: 17608 - protein, 116 aa, Artificial Sequence
  Chemically Synthesized
QVQLQESGGGLVQAGGSLRLSCAASGTIFTPYVMGWYRQAPGKERELDYGASTYYADSVKGRFTISRDNAKNTVYLQMNSLKPEDTAVYYCAVQDDGKPQNYYRYWGQGTQVTVSS

SEQ ID NO: 17609 - protein, 126 aa, Artificial Sequence
  Chemically Synthesized
QVQLQESGGGLVQAGGSLRLSCAASGNISWTYYMGWYRQAPGKERELVAAIDLGTTTYYADSVKGRFTISRDNAKNTVYLQMNSLKPEDTAVYYCAVVFTPYLGLADHQAEALLYWGQGTQVTVSS

SEQ ID NO: 17610 - protein, 118 aa, Artificial Sequence
  Chemically Synthesized
QVQLQESGGGLVQAGGSLRLSCAASGYISYSGHMGWYRQAPGKEREFVAGINAGGNTYYADSVKGRFTISRDNAKNTVYLQMNSLKPEDTAVYYCAADRREGLTHGYWGQGTQVTVSS

SEQ ID NO: 17611 - protein, 122 aa, Artificial Sequence
  Chemically Synthesized
QVQLQESGGGLVQAGGSLRLSCAASGTISARAYMGWYRQAPGKEREFVAGIGFGSITYYADSVKGRFTISRDNAKNTVYLQMNSLKPEDTAVYYCAAGYRARWNPPRLHRYWGQGTQVTVSS

SEQ ID NO: 17612 - protein, 118 aa, Artificial Sequence
  Chemically Synthesized
QVQLQESGGGLVQAGGSLRLSCAASGNIFQDFDMGWYRQAPGKEREFVASIDDGANTYYADSVKGRFTISRDNAKNTVYLQMNSLKPEDTAVYYCAVADSGRGALIYWGQGTQVTVSS

SEQ ID NO: 17613 - protein, 118 aa, Artificial Sequence
  Chemically Synthesized
QVQLQESGGGLVQAGGSLRLSCAASGNISDHFHMGWYRQAPGKERELVAGIGVGTNTYYADSVKGRFTISRDNAKNTVYLQMNSLKPEDTAVYYCAASWDTDGYLDYWGQGTQVTVSS

SEQ ID NO: 17614 - protein, 118 aa, Artificial Sequence
  Chemically Synthesized
QVQLQESGGGLVQAGGSLRLSCAASGYISYRPCMGWYRQAPGKERELVAGIAIGTSTNYADSVKGRFTISRDNAKNTVYLQMNSLKPEDTAVYYCAVRVYHYAFHYYWGQGTQVTVSS

SEQ ID NO: 17615 - protein, 125 aa, Artificial Sequence
  Chemically Synthesized
QVQLQESGGGLVQAGGSLRLSCAASGNIFYPLSMGWYRQAPGKERELVASITTVVIPYADSVKGRFTISRDNAKNTVYLQMNSLKPEDTAVYYCAVTDSLTTYIWRATRVYFRYWGQGTQVTVSS

SEQ ID NO: 17616 - protein, 122 aa, Artificial Sequence
  Chemically Synthesized
QVQLQESGGGLVQAGGSLRLSCAASGTISSVSYMGWYRQAPGKEREFVAAIAPGGITYYADSVKGRFTISRDNAKNTVYLQMNSLKPEDTAVYYCAAHTDQVVQRDQGYDYWGQGTQVTVSS

SEQ ID NO: 17617 - protein, 126 aa, Artificial Sequence
  Chemically Synthesized
QVQLQESGGGLVQAGGSLRLSCAASGYISIAHVMGWYRQAPGKERELVATIGPGSITNYADSVKGRFTISRDNAKNTVYLQMNSLKPEDTAVYYCAVEYYKFKSQSYAYVLEYQYWGQGTQVTVSS

SEQ ID NO: 17618 - protein, 115 aa, Artificial Sequence
  Chemically Synthesized
QVQLQESGGGLVQAGGSLRLSCAASGYISNYQQMGWYRQAPGKERELVAAITYGSITYYADSVKGRFTISRDNAKNTVYLQMNSLKPEDTAVYYCAVRDDKGVYWGQGTQVTVSS

SEQ ID NO: 17619 - protein, 122 aa, Artificial Sequence
  Chemically Synthesized
QVQLQESGGGLVQAGGSLRLSCAASGTIFWVVAMGWYRQAPGKERELVASIDDGSTTNYADSVKGRFTISRDNAKNTVYLQMNSLKPEDTAVYYCAVQTDTYGDQVDGYYYWGQGTQVTVSS

SEQ ID NO: 17620 - protein, 122 aa, Artificial Sequence
  Chemically Synthesized
QVQLQESGGGLVQAGGSLRLSCAASGNIFHRWTMGWYRQAPGKEREFVASIDHGGNTYYADSVKGRFTISRDNAKNTVYLQMNSLKPEDTAVYYCAAQKSQYHYQVAYHRYWGQGTQVTVSS

SEQ ID NO: 17621 - protein, 122 aa, Artificial Sequence
  Chemically Synthesized
QVQLQESGGGLVQAGGSLRLSCAASGSIFQWQYMGWYRQAPGKEREFVASISIGSTTYYADSVKGRFTISRDNAKNTVYLQMNSLKPEDTAVYYCAATGYGSAVDDSDLDYWGQGTQVTVSS

SEQ ID NO: 17622 - protein, 119 aa, Artificial Sequence
  Chemically Synthesized
QVQLQESGGGLVQAGGSLRLSCAASGYISYFYTMGWYRQAPGKERELVASISQGTNTNYADSVKGRFTISRDNAKNTVYLQMNSLKPEDTAVYYCAARVDWYYYYLAYWGQGTQVTVSS

SEQ ID NO: 17623 - protein, 109 aa, Artificial Sequence
  Chemically Synthesized
QVQLQESGGGLVQAGGSLRLSCAASGTISPYWSMGWYRQAPGKERELVAAIAYGANTYYADSVKGRFTISRDNAKNTVYLQMNSLKPEDTAVYYCAVYWGQGTQVTVSS

SEQ ID NO: 17624 - protein, 122 aa, Artificial Sequence
  Chemically Synthesized
QVQLQESGGGLVQAGGSLRLSCAASGYISPTALMGWYRQAPGKEREFVAGISYGTTTNYADSVKGRFTISRDNAKNTVYLQMNSLKPEDTAVYYCAVLLEYVHEESLEHRYWGQGTQVTVSS

SEQ ID NO: 17625 - protein, 126 aa, Artificial Sequence
  Chemically Synthesized
QVQLQESGGGLVQAGGSLRLSCAASGYISNGDNMGWYRQAPGKERELVASIAWGGITNYADSVKGRFTISRDNAKNTVYLQMNSLKPEDTAVYYCAVDLDGDQDVDGLGGYGHDYWGQGTQVTVSS

SEQ ID NO: 17626 - protein, 121 aa, Artificial Sequence
  Chemically Synthesized
QVQLQESGGGLVQAGGSLRLSCAASGNISLRDYMGWYRQAPGKERELVAGIDVGANTNYADSVKGRFTISRDNAKNTVYLQMNSLKPEDTAVYYCAAFVNVGVVFDDIFYWGQGTQVTVSS

SEQ ID NO: 17627 - protein, 122 aa, Artificial Sequence
  Chemically Synthesized
QVQLQESGGGLVQAGGSLRLSCAASGTIFLASTMGWYRQAPGKEREFVAAIGYGATTNYADSVKGRFTISRDNAKNTVYLQMNSLKPEDTAVYYCAVYVESKDTDEYGYAYWGQGTQVTVSS

SEQ ID NO: 17628 - protein, 126 aa, Artificial Sequence
  Chemically Synthesized
QVQLQESGGGLVQAGGSLRLSCAASGTISKRPRMGWYRQAPGKERELVATISWGANTYYADSVKGRFTISRDNAKNTVYLQMNSLKPEDTAVYYCAAWDRWWRDYLVSKTHLHHYWGQGTQVTVSS

SEQ ID NO: 17629 - protein, 122 aa, Artificial Sequence
  Chemically Synthesized
QVQLQESGGGLVQAGGSLRLSCAASGTIFAQDDMGWYRQAPGKEREFVAAIDEGANTNYADSVKGRFTISRDNAKNTVYLQMNSLKPEDTAVYYCAADKHYDTPDGFHYYYWGQGTQVTVSS

SEQ ID NO: 17630 - protein, 117 aa, Artificial Sequence
  Chemically Synthesized
QVQLQESGGGLVQAGGSLRLSCAASGNISTDYSMGWYRQAPGKERELVAVLLLVVVPYADSVKGRFTISRDNAKNTVYLQMNSLKPEDTAVYYCAAQVDLGTRYYYWGQGTQVTVSS

SEQ ID NO: 17631 - protein, 118 aa, Artificial Sequence
  Chemically Synthesized
QVQLQESGGGLVQAGGSLRLSCAASGSISWYVVMGWYRQAPGKEREFVATITTGTNTNYADSVKGRFTISRDNAKNTVYLQMNSLKPEDTAVYYCAVPTDNPDGHAYWGQGTQVTVSS

SEQ ID NO: 17632 - protein, 121 aa, Artificial Sequence
  Chemically Synthesized
QVQLQESGGGLVQAGGSLRLSCAASGNISVRRMGWYRQAPGKERELVAGIGWGGTTYYADSVKGRFTISRDNAKNTVYLQMNSLKPEDTAVYYCAAEWSTQYDTYVEHFYWGQGTQVTVSS

SEQ ID NO: 17633 - protein, 121 aa, Artificial Sequence
  Chemically Synthesized
QVQLQESGGGLVQAGGSLRLSCAASGNISTLCMGWYRQAPGKEREFVAGIALGATTYYADSVKGRFTISRDNAKNTVYLQMNSLKPEDTAVYYCAVYTTTVHDYDDWYYYWGQGTQVTVSS

SEQ ID NO: 17634 - protein, 118 aa, Artificial Sequence
  Chemically Synthesized
QVQLQESGGGLVQAGGSLRLSCAASGTIFYDDQMGWYRQAPGKEREFVATIDIGANTNYADSVKGRFTISRDNAKNTVYLQMNSLKPEDTAVYYCAVVPYDQDYHLYWGQGTQVTVSS

SEQ ID NO: 17635 - protein, 118 aa, Artificial Sequence
  Chemically Synthesized
QVQLQESGGGLVQAGGSLRLSCAASGSIFDWDSMGWYRQAPGKERELVAAIGRGASTYYADSVKGRFTISRDNAKNTVYLQMNSLKPEDTAVYYCAATTRGYPGYYYWGQGTQVTVSS

SEQ ID NO: 17636 - protein, 126 aa, Artificial Sequence
  Chemically Synthesized
QVQLQESGGGLVQAGGSLRLSCAASGYISDSAVMGWYRQAPGKEREFVAGIDTGASTNYADSVKGRFTISRDNAKNTVYLQMNSLKPEDTAVYYCAAFVWYERWQDDYGWASYPYWGQGTQVTVSS

SEQ ID NO: 17637 - protein, 117 aa, Artificial Sequence
  Chemically Synthesized
QVQLQESGGGLVQAGGSLRLSCAASGSIFGSTMGWYRQAPGKERELVATIAQGSNTYYADSVKGRFTISRDNAKNTVYLQMNSLKPEDTAVYYCAAKGYGVDAYDYWGQGTQVTVSS

SEQ ID NO: 17638 - protein, 121 aa, Artificial Sequence
  Chemically Synthesized
QVQLQESGGGLVQAGGSLRLSCAASGNIFYYEDMGWYRQAPGKEREFVAGITTGSNTNYADSVKGRFTISRDNAKNTVYLQMNSLKPEDTAVYYCAAYERVGTVTSTFIYWGQGTQVTVSS

SEQ ID NO: 17639 - protein, 117 aa, Artificial Sequence
  Chemically Synthesized
QVQLQESGGGLVQAGGSLRLSCAASGSIFDQFEMGWYRQAPGKEREFVAGITEVLIPYADSVKGRFTISRDNAKNTVYLQMNSLKPEDTAVYYCAAYRYGRRPFYYWGQGTQVTVSS

SEQ ID NO: 17640 - protein, 122 aa, Artificial Sequence
  Chemically Synthesized
QVQLQESGGGLVQAGGSLRLSCAASGSISPYYYMGWYRQAPGKEREFVAGISPGGNTYYADSVKGRFTISRDNAKNTVYLQMNSLKPEDTAVYYCAVWRRYRASRVPYYYYWGQGTQVTVSS

SEQ ID NO: 17641 - protein, 121 aa, Artificial Sequence
  Chemically Synthesized
QVQLQESGGGLVQAGGSLRLSCAASGNIFYGWRMGWYRQAPGKERELVAAIAVGAITNYADSVKGRFTISRDNAKNTVYLQMNSLKPEDTAVYYCAATTARSWLPNSVMYWGQGTQVTVSS

SEQ ID NO: 17642 - protein, 118 aa, Artificial Sequence
  Chemically Synthesized
QVQLQESGGGLVQAGGSLRLSCAASGNIFLDYYMGWYRQAPGKERELVATIDYGAITNYADSVKGRFTISRDNAKNTVYLQMNSLKPEDTAVYYCAVVRGVTLTLPYWGQGTQVTVSS

SEQ ID NO: 17643 - protein, 118 aa, Artificial Sequence
  Chemically Synthesized
QVQLQESGGGLVQAGGSLRLSCAASGTISDVYAMGWYRQAPGKEREFVATIGGGTTTYYADSVKGRFTISRDNAKNTVYLQMNSLKPEDTAVYYCAVYVTDGYPFAYWGQGTQVTVSS

SEQ ID NO: 17644 - protein, 126 aa, Artificial Sequence
  Chemically Synthesized
QVQLQESGGGLVQAGGSLRLSCAASGNISEVYLMGWYRQAPGKERELVAAIDTGASTNYADSVKGRFTISRDNAKNTVYLQMNSLKPEDTAVYYCAAYYINVDVDGHLSDGWLSYWGQGTQVTVSS

SEQ ID NO: 17645 - protein, 118 aa, Artificial Sequence
  Chemically Synthesized
QVQLQESGGGLVQAGGSLRLSCAASGSISLSDLMGWYRQAPGKEREFVASIDVGATTNYADSVKGRFTISRDNAKNTVYLQMNSLKPEDTAVYYCAANYHYTGDYYYWGQGTQVTVSS

SEQ ID NO: 17646 - protein, 117 aa, Artificial Sequence
  Chemically Synthesized
QVQLQESGGGLVQAGGSLRLSCAASGNIFIYITMGWYRQAPGKERELVASITYGSITYYADSVKGRFTISRDNAKNTVYLQMNSLKPEDTAVYYCAVEPTIAALSYWGQGTQVTVSS

SEQ ID NO: 17647 - protein, 115 aa, Artificial Sequence
  Chemically Synthesized
QVQLQESGGGLVQAGGSLRLSCAASGSMGWYRQAPGKERELVASISGGTTNYADSVKGRFTISRDNAKNTVYLQMNSLKPEDTAVYYCAVWRHLNTDRTYSHDYWGQGTQVTVSS

SEQ ID NO: 17648 - protein, 118 aa, Artificial Sequence
  Chemically Synthesized
QVQLQESGGGLVQAGGSLRLSCAASGSIFYGTVMGWYRQAPGKERELVAGINRGASTYYADSVKGRFTISRDNAKNTVYLQMNSLKPEDTAVYYCAVWGRTYYRYRYWGQGTQVTVSS

SEQ ID NO: 17649 - protein, 118 aa, Artificial Sequence
  Chemically Synthesized
QVQLQESGGGLVQAGGSLRLSCAASGNISRDYPMGWYRQAPGKERELVAAIGNGTSTNYADSVKGRFTISRDNAKNTVYLQMNSLKPEDTAVYYCAVHYPYPNEHDYWGQGTQVTVSS

SEQ ID NO: 17650 - protein, 116 aa, Artificial Sequence
  Chemically Synthesized
QVQLQESGGGLVQAGGSLRLSCAASGTISWDVFMGWYRQAPGKERELVATIDAGAITYYADSVKGRFTISRDNAKNTVYLQMNSLKPEDTAVYYCAVTRYAGDMYWGQGTQVTVSS

SEQ ID NO: 17651 - protein, 114 aa, Artificial Sequence
  Chemically Synthesized
QVQLQESGGGLVQAGGSLRLSCAASGYISARTDMGWYRQAPGKEREFVATISRGSNTNYADSVKGRFTISRDNAKNTVYLQMNSLKPEDTAVYYCAAYQSCFYWGQGTQVTVSS

SEQ ID NO: 17652 - protein, 121 aa, Artificial Sequence
  Chemically Synthesized
QVQLQESGGGLVQAGGSLRLSCAASGSISPYKEMGWYRQAPGKEREFVAGIGSGGTTYYADSVKGRFTISRDNAKNTVYLQMNSLKPEDTAVYYCAVDAYLSSDVYASFYWGQGTQVTVSS

SEQ ID NO: 17653 - protein, 118 aa, Artificial Sequence
  Chemically Synthesized
QVQLQESGGGLVQAGGSLRLSCAASGTIFSLRYMGWYRQAPGKEREFVAAISTGGTTNYADSVKGRFTISRDNAKNTVYLQMNSLKPEDTAVYYCAAPAYNPFPFPYWGQGTQVTVSS

SEQ ID NO: 17654 - protein, 126 aa, Artificial Sequence
  Chemically Synthesized
QVQLQESGGGLVQAGGSLRLSCAASGNISLDPFMGWYRQAPGKEREFVASITDGTSTYYADSVKGRFTISRDNAKNTVYLQMNSLKPEDTAVYYCAATNDISLPYWYWWDGEFIYWGQGTQVTVSS

SEQ ID NO: 17655 - protein, 121 aa, Artificial Sequence
  Chemically Synthesized
QVQLQESGGGLVQAGGSLRLSCAASGYISAAYDMGWYRQAPGKERELVASIGYGSITNYADSVKGRFTISRDNAKNTVYLQMNSLKPEDTAVYYCAAVTGYPDYSFVTIYWGQGTQVTVSS

SEQ ID NO: 17656 - protein, 126 aa, Artificial Sequence
  Chemically Synthesized
QVQLQESGGGLVQAGGSLRLSCAASGNISYGIPMGWYRQAPGKERELVAGINTGTITYYADSVKGRFTISRDNAKNTVYLQMNSLKPEDTAVYYCAAYTGLVYPPYTAYAWWYGYWGQGTQVTVSS

SEQ ID NO: 17657 - protein, 122 aa, Artificial Sequence
  Chemically Synthesized
QVQLQESGGGLVQAGGSLRLSCAASGTIFDEYNMGWYRQAPGKEREFVATIAVGTTTYYADSVKGRFTISRDNAKNTVYLQMNSLKPEDTAVYYCAASADSNKGGYTYLAYWGQGTQVTVSS

SEQ ID NO: 17658 - protein, 119 aa, Artificial Sequence
  Chemically Synthesized
QVQLQESGGGLVQAGGSLRLSCAASGSIFDQPDMGWYRQAPGKEREFVASIAAGTSTYYADSVKGRFTISRDNAKNTVYLQMNSLKPEDTAVYYCADTDWPGYTRYYYWGQGTQVTVSS

SEQ ID NO: 17659 - protein, 122 aa, Artificial Sequence
  Chemically Synthesized
QVQLQESGGGLVQAGGSLRLSCAASGNIFRYYVMGWYRQAPGKERELVATISGGASTNYADSVKGRFTISRDNAKNTVYLQMNSLKPEDTAVYYCAAYYYPSVYTSYAHYYWGQGTQVTVSS

SEQ ID NO: 17660 - protein, 122 aa, Artificial Sequence
  Chemically Synthesized
QVQLQESGGGLVQAGGSLRLSCAASGTISYNTFMGWYRQAPGKERELVAAIASGGSTYYADSVKGRFTISRDNAKNTVYLQMNSLKPEDTAVYYCAVLRRTRTDTPDTHSYWGQGTQVTVSS

SEQ ID NO: 17661 - protein, 118 aa, Artificial Sequence
  Chemically Synthesized
QVQLQESGGGLVQAGGSLRLSCAASGNISTSYGMGWYRQAPGKERELVATIDDGTSTYYADSVKGRFTISRDNAKNTVYLQMNSLKPEDTAVYYCAVGHRVWTIHTYWGQGTQVTVSS

SEQ ID NO: 17662 - protein, 118 aa, Artificial Sequence
  Chemically Synthesized
QVQLQESGGGLVQAGGSLRLSCAASGNIFTTYVMGWYRQAPGKERELVAAIDYGGTTNYADSVKGRFTISRDNAKNTVYLQMNSLKPEDTAVYYCAVVNGPYDYHVYWGQGTQVTVSS

SEQ ID NO: 17663 - protein, 118 aa, Artificial Sequence
  Chemically Synthesized
QVQLQESGGGLVQAGGSLRLSCAASGNISYYYYMGWYRQAPGKERELVAAIDPGGNTNYADSVKGRFTISRDNAKNTVYLQMNSLKPEDTAVYYCAAGSGDPNTHAYWGQGTQVTVSS

SEQ ID NO: 17664 - protein, 126 aa, Artificial Sequence
  Chemically Synthesized
QVQLQESGGGLVQAGGSLRLSCAASGYISRQLTMGWYRQAPGKEREFVAAIADGAITNYADSVKGRFTISRDNAKNTVYLQMNSLKPEDTAVYYCAAWVPAQYYGTDTLPDTYAYWGQGTQVTVSS

SEQ ID NO: 17665 - protein, 122 aa, Artificial Sequence
  Chemically Synthesized
QVQLQESGGGLVQAGGSLRLSCAASGYISSASIMGWYRQAPGKEREFVAGIDSGASTNYADSVKGRFTISRDNAKNTVYLQMNSLKPEDTAVYYCAASRSGDVPRYWSLRYWGQGTQVTVSS

SEQ ID NO: 17666 - protein, 122 aa, Artificial Sequence
  Chemically Synthesized
QVQLQESGGGLVQAGGSLRLSCAASGNISYYKDMGWYRQAPGKEREFVAAINFGTITNYADSVKGRFTISRDNAKNTVYLQMNSLKPEDTAVYYCAVTYPTPDRVAGDHNYWGQGTQVTVSS

SEQ ID NO: 17667 - protein, 126 aa, Artificial Sequence
  Chemically Synthesized
QVQLQESGGGLVQAGGSLRLSCAASGTISGAYTMGWYRQAPGKERELVATINTGGITYYADSVKGRFTISRDNAKNTVYLQMNSLKPEDTAVYYCAAGYGWVIGGAGLVSFYHSYWGQGTQVTVSS

SEQ ID NO: 17668 - protein, 122 aa, Artificial Sequence
  Chemically Synthesized
QVQLQESGGGLVQAGGSLRLSCAASGNISAASDMGWYRQAPGKERELVAAITVGSNTNYADSVKGRFTISRDNAKNTVYLQMNSLKPEDTAVYYCAARGNQDRRALLSHGYWGQGTQVTVSS

SEQ ID NO: 17669 - protein, 118 aa, Artificial Sequence
  Chemically Synthesized
QVQLQESGGGLVQAGGSLRLSCAASGYISAQYYMGWYRQAPGKERELVAGIATGGNTNYADSVKGRFTISRDNAKNTVYLQMNSLKPEDTAVYYCAAFYQFDGDFTYWGQGTQVTVSS

SEQ ID NO: 17670 - protein, 125 aa, Artificial Sequence
  Chemically Synthesized
QVQLQESGGGLVQAGGSLRLSCAASGNIFGYDGMGWYRQAPGKERELVAAIDYGTSTYYADSVKGRFTISRDNAKNTVYLQMNSLKPEDTAVYYCAAYWNELVLLLLTRSLTLYWGQGTQVTVSS

SEQ ID NO: 17671 - protein, 112 aa, Artificial Sequence
  Chemically Synthesized
QVQLQESGGGLVQAGGSLRLSCAASGNISTDFAMGWYRQAPGKEREFVATINTGTTTNYADSVKGRFTISRDNAKNTVYLQMNSLKPEDTAVYYCARPIHYWGQGTQVTVSS

SEQ ID NO: 17672 - protein, 118 aa, Artificial Sequence
  Chemically Synthesized
QVQLQESGGGLVQAGGSLRLSCAASGSIFAINLMGWYRQAPGKEREFVAAIDYGAITNYADSVKGRFTISRDNAKNTVYLQMNSLKPEDTAVYYCAVEVPLTRDWVYWGQGTQVTVSS

SEQ ID NO: 17673 - protein, 118 aa, Artificial Sequence
  Chemically Synthesized
QVQLQESGGGLVQAGGSLRLSCAASGTISSLGPMGWYRQAPGKERELVATITFGANTNYADSVKGRFTISRDNAKNTVYLQMNSLKPEDTAVYYCAADDVTYWPYAYWGQGTQVTVSS

SEQ ID NO: 17674 - protein, 118 aa, Artificial Sequence
  Chemically Synthesized
QVQLQESGGGLVQAGGSLRLSCAASGYISYPPVMGWYRQAPGKEREFVASITYGGITNYADSVKGRFTISRDNAKNTVYLQMNSLKPEDTAVYYCAAATDSDDYYPYWGQGTQVTVSS

SEQ ID NO: 17675 - protein, 121 aa, Artificial Sequence
  Chemically Synthesized
QVQLQESGGGLVQAGGSLRLSCAASGNILLRVMGWYRQAPGKERELVASINHGTITNYADSVKGRFTISRDNAKNTVYLQMNSLKPEDTAVYYCAAAVRYIGYKPTALSYWGQGTQVTVSS

SEQ ID NO: 17676 - protein, 118 aa, Artificial Sequence
  Chemically Synthesized
QVQLQESGGGLVQAGGSLRLSCAASGNISQWVVMGWYRQAPGKERELVATITWGSNTNYADSVKGRFTISRDNAKNTVYLQMNSLKPEDTAVYYCAAYLGYAQAYWYWGQGTQVTVSS

SEQ ID NO: 17677 - protein, 117 aa, Artificial Sequence
  Chemically Synthesized
QVQLQESGGGLVQAGGSLRLSCAASGNIFRDYEMGWYRQAPGKEREFVAGIELVVLPYADSVKGRFTISRDNAKNTVYLQMNSLKPEDTAVYYCAVYDDNGQYHVYWGQGTQVTVSS

SEQ ID NO: 17678 - protein, 118 aa, Artificial Sequence
  Chemically Synthesized
QVQLQESGGGLVQAGGSLRLSCAASGTIFQYVLMGWYRQAPGKEREFVASITGGSTTYYADSVKGRFTISRDNAKNTVYLQMNSLKPEDTAVYYCAADYAQLFLHGYWGQGTQVTVSS

SEQ ID NO: 17679 - protein, 117 aa, Artificial Sequence
  Chemically Synthesized
QVQLQESGGGLVQAGGSLRLSCAASGYISKFRVMGWYRQAPGKERELVAAITVGGNTYYADSVKGRFTISRDNAKNTVYLQMNSLKPEDTAVYYCAVDHDHTPYKYWGQGTQVTVSS

SEQ ID NO: 17680 - protein, 119 aa, Artificial Sequence
  Chemically Synthesized
QVQLQESGGGLVQAGGSLRLSCAASGSIFSNGYHMGWYRQAPGKEREFVAAIATGGNTYYADSVKGRFTISRDNAKNTVYLQMNSLKPEDTAVYYCAVTHDTFAWLGYWGQGTQVTVSS

SEQ ID NO: 17681 - protein, 118 aa, Artificial Sequence
  Chemically Synthesized
QVQLQESGGGLVQAGGSLRLSCAASGTISVAGNMGWYRQAPGKERELVATITFGTSTNYADSVKGRFTISRDNAKNTVYLQMNSLKPEDTAVYYCAVGVYASFAHDYWGQGTQVTVSS

SEQ ID NO: 17682 - protein, 119 aa, Artificial Sequence
  Chemically Synthesized
QVQLQESGGGLVQAGGSLRLSCAASGSISQQLNMGWYRQAPGKEREFVVTNYADSVKGRFTISRDNAKNTVYLQMNSLKPEDTAVYYCAAQWENVRAGTRDFYPQHGYWGQGTQVTVSS

SEQ ID NO: 17683 - protein, 121 aa, Artificial Sequence
  Chemically Synthesized
QVQLQESGGGLVQAGGSLRLSCAASGNISDRSYMGWYRQAPGKERELVAGINSVVLPYADSVKGRFTISRDNAKNTVYLQMNSLKPEDTAVYYCAVGHPRKPYDDSYHDYWGQGTQVTVSS

SEQ ID NO: 17684 - protein, 118 aa, Artificial Sequence
  Chemically Synthesized
QVQLQESGGGLVQAGGSLRLSCAASGSISYTSFMGWYRQAPGKERELVAAITRGGNTNYADSVKGRFTISRDNAKNTVYLQMNSLKPEDTAVYYCAAYFKLYRWHYYWGQGTQVTVSS

SEQ ID NO: 17685 - protein, 113 aa, Artificial Sequence
  Chemically Synthesized
QVQLQESGGGLVQAGGSLRLSCAASGYIFYLIYMGWYRQAPGKERELVATITYGATTYYADSVKGRFTISRDNAKNTVYLQMNSLKPEDTAVYYCAPSYYYYWGQGTQVTVSS

SEQ ID NO: 17686 - protein, 118 aa, Artificial Sequence
  Chemically Synthesized
QVQLQESGGGLVQAGGSLRLSCAASGNISSRYRMGWYRQAPGKEREFVASISSGGNTNYADSVKGRFTISRDNAKNTVYLQMNSLKPEDTAVYYCAVAAVFTVQYPYWGQGTQVTVSS

SEQ ID NO: 17687 - protein, 118 aa, Artificial Sequence
  Chemically Synthesized
QVQLQESGGGLVQAGGSLRLSCAASGYISDRPYMGWYRQAPGKEREFVAGITTGGSTNYADSVKGRFTISRDNAKNTVYLQMNSLKPEDTAVYYCAVHYTWYYYFYYWGQGTQVTVSS

SEQ ID NO: 17688 - protein, 125 aa, Artificial Sequence
  Chemically Synthesized
QVQLQESGGGLVQAGGSLRLSCAASGNIFNTRYMGWYRQAPGKEREFVASMLTVVVPYADSVKGRFTISRDNAKNTVYLQMNSLKPEDTAVYYCAAALRWLRPDIGNHDSRYEYWGQGTQVTVSS

SEQ ID NO: 17689 - protein, 118 aa, Artificial Sequence
  Chemically Synthesized
QVQLQESGGGLVQAGGSLRLSCAASGTIFRVSAMGWYRQAPGKERELVAGINGGAITYYADSVKGRFTISRDNAKNTVYLQMNSLKPEDTAVYYCAVYGGWLRSHRYWGQGTQVTVSS

SEQ ID NO: 17690 - protein, 118 aa, Artificial Sequence
  Chemically Synthesized
QVQLQESGGGLVQAGGSLRLSCAASGNIFADYTMGWYRQAPGKERELVASITDGSITYYADSVKGRFTISRDNAKNTVYLQMNSLKPEDTAVYYCAVYWGDGTDYYYWGQGTQVTVSS

SEQ ID NO: 17691 - protein, 118 aa, Artificial Sequence
  Chemically Synthesized
QVQLQESGGGLVQAGGSLRLSCAASGNISRPWSMGWYRQAPGKERELVASIGVGSNTNYADSVKGRFTISRDNAKNTVYLQMNSLKPEDTAVYYCAAYSYGQYLYIYWGQGTQVTVSS

SEQ ID NO: 17692 - protein, 122 aa, Artificial Sequence
  Chemically Synthesized
QVQLQESGGGLVQAGGSLRLSCAASGNISRARRMGWYRQAPGKEREFVASIAIGTSTNYADSVKGRFTISRDNAKNTVYLQMNSLKPEDTAVYYCAAVYRRWYVYDRSHRYWGQGTQVTVSS

SEQ ID NO: 17693 - protein, 118 aa, Artificial Sequence
  Chemically Synthesized
QVQLQESGGGLVQAGGSLRLSCAASGTIFVATNMGWYRQAPGKERELVATIAYGAITYYADSVKGRFTISRDNAKNTVYLQMNSLKPEDTAVYYCAAYLGYGRWFVYWGQGTQVTVSS

SEQ ID NO: 17694 - protein, 118 aa, Artificial Sequence
  Chemically Synthesized
QVQLQESGGGLVQAGGSLRLSCAASGSIFGLRYMGWYRQAPGKEREFVAAITRGASTYYADSVKGRFTISRDNAKNTVYLQMNSLKPEDTAVYYCAVWRFRRDGFAYWGQGTQVTVSS

SEQ ID NO: 17695 - protein, 118 aa, Artificial Sequence
  Chemically Synthesized
QVQLQESGGGLVQAGGSLRLSCAASGSISEIRRMGWYRQAPGKEREFVAAIGQGGSTYYADSVKGRFTISRDNAKNTVYLQMNSLKPEDTAVYYCAVGWSYIYRHRYWGQGTQVTVSS

SEQ ID NO: 17696 - protein, 117 aa, Artificial Sequence
  Chemically Synthesized
QVQLQESGGGLVQAGGSLRLSCAASGYISTCLMGWYRQAPGKERELVASITAGSNTNYADSVKGRFTISRDNAKNTVYLQMNSLKPEDTAVYYCAAGGNQYITHQYWGQGTQVTVSS

SEQ ID NO: 17697 - protein, 117 aa, Artificial Sequence
  Chemically Synthesized
QVQLQESGGGLVQAGGSLRLSCAASGTISGTPYMGWYRQAPGKERELVASITWGAITNYADSVKGRFTISRDNAKNTVYLQMNSLKPEDTAVYYCAVSLTLLLLLYWGQGTQVTVSS

SEQ ID NO: 17698 - protein, 126 aa, Artificial Sequence
  Chemically Synthesized
QVQLQESGGGLVQAGGSLRLSCAASGTISAPNPMGWYRQAPGKEREFVATITYGTNYLYADSVKGRFTISRDNAKNTVYLQMNSLKPEDTAVYYCAVGGFRVRYIDGSWEFQFDYWGQGTQVTVSS

SEQ ID NO: 17699 - protein, 122 aa, Artificial Sequence
  Chemically Synthesized
QVQLQESGGGLVQAGGSLRLSCAASGTISDGYPMGWYRQAPGKEREFVASIAKGGSTYYADSVKGRFTISRDNAKNTVYLQMNSLKPEDTAVYYCAARRFKYYSRYNIHHYWGQGTQVTVSS

SEQ ID NO: 17700 - protein, 118 aa, Artificial Sequence
  Chemically Synthesized
QVQLQESGGGLVQAGGSLRLSCAASGNIFVTIQMGWYRQAPGKERELVAGIGFGSNTYYADSVKGRFTISRDNAKNTVYLQMNSLKPEDTAVYYCAATLTLGRGLSYWGQGTQVTVSS

SEQ ID NO: 17701 - protein, 125 aa, Artificial Sequence
  Chemically Synthesized
QVQLQESGGGLVQAGGSLRLSCAASGNIFTYDMGWYRQAPGKEREFVAGIAAGGTTNYADSVKGRFTISRDNAKNTVYLQMNSLKPEDTAVYYCAASHKVTTDGDDDYRHPYDYWGQGTQVTVSS

SEQ ID NO: 17702 - protein, 122 aa, Artificial Sequence
  Chemically Synthesized
QVQLQESGGGLVQAGGSLRLSCAASGSISPVTRMGWYRQAPGKERELVAAISNGSTTYYADSVKGRFTISRDNAKNTVYLQMNSLKPEDTAVYYCAVYDRWIRLFVPGHYYWGQGTQVTVSS

SEQ ID NO: 17703 - protein, 119 aa, Artificial Sequence
  Chemically Synthesized
QVQLQESGGGLVQAGGSLRLSCAASGTISDGLFMGWYRQAPGKERELVATIGGGGSTYYADSVKGRFTISRDNAKNTVYLQMNSLKPEDTAVYYCAAYWVYYRDSHEYWGQGTQVTVSS

SEQ ID NO: 17704 - protein, 122 aa, Artificial Sequence
  Chemically Synthesized
QVQLQESGGGLVQAGGSLRLSCAASGTIFTLIGMGWYRQAPGKEREFVAGISIGAITNYADSVKGRFTISRDNAKNTVYLQMNSLKPEDTAVYYCAVSYGAYAIDYLAYSYWGQGTQVTVSS

SEQ ID NO: 17705 - protein, 118 aa, Artificial Sequence
  Chemically Synthesized
QVQLQESGGGLVQAGGSLRLSCAASGYIFLVDGMGWYRQAPGKEREFVATIAGGTSTYYADSVKGRFTISRDNAKNTVYLQMNSLKPEDTAVYYCAAPWVPAAELRYWGQGTQVTVSS

SEQ ID NO: 17706 - protein, 126 aa, Artificial Sequence
  Chemically Synthesized
QVQLQESGGGLVQAGGSLRLSCAASGYISTDYAMGWYRQAPGKEREFVASINYGGITNYADSVKGRFTISRDNAKNTVYLQMNSLKPEDTAVYYCAAIPTYDTRSRDGGPWTLTYWGQGTQVTVSS

SEQ ID NO: 17707 - protein, 122 aa, Artificial Sequence
  Chemically Synthesized
QVQLQESGGGLVQAGGSLRLSCAASGTIFGPGYMGWYRQAPGKERELVATIGTGAITYYADSVKGRFTISRDNAKNTVYLQMNSLKPEDTAVYYCAVDVDDHGVSQDAHTYWGQGTQVTVSS

SEQ ID NO: 17708 - protein, 118 aa, Artificial Sequence
  Chemically Synthesized
QVQLQESGGGLVQAGGSLRLSCAASGTIFQDWIMGWYRQAPGKERELVAGIDVGASTYYADSVKGRFTISRDNAKNTVYLQMNSLKPEDTAVYYCAAPRLLYDHHTYWGQGTQVTVSS

SEQ ID NO: 17709 - protein, 118 aa, Artificial Sequence
  Chemically Synthesized
QVQLQESGGGLVQAGGSLRLSCAASGTISRRYYMGWYRQAPGKERELVAGIGRGTNTYYADSVKGRFTISRDNAKNTVYLQMNSLKPEDTAVYYCAVISRYRLDHIYWGQGTQVTVSS

SEQ ID NO: 17710 - protein, 113 aa, Artificial Sequence
  Chemically Synthesized
QVQLQESGGGLVQAGGSLRLSCAASGYISVPVYMGWYRQAPGKERELVAGIGLGANTYYADSVKGRFTISRDNAKNTVYLQMNSLKPEDTAVYYCAVAGLLYWGQGTQVTVSS

SEQ ID NO: 17711 - protein, 122 aa, Artificial Sequence
  Chemically Synthesized
QVQLQESGGGLVQAGGSLRLSCAASGNIFQGGDMGWYRQAPGKEREFVASIDAGSSTYYADSVKGRFTISRDNAKNTVYLQMNSLKPEDTAVYYCAVHLTDVIYYGPVHAYWGQGTQVTVSS

SEQ ID NO: 17712 - protein, 126 aa, Artificial Sequence
  Chemically Synthesized
QVQLQESGGGLVQAGGSLRLSCAASGNISSSWSMGWYRQAPGKERELVATIGLGGITNYADSVKGRFTISRDNAKNTVYLQMNSLKPEDTAVYYCAVAYAYITYYLPDYYVRHYYWGQGTQVTVSS

SEQ ID NO: 17713 - protein, 118 aa, Artificial Sequence
  Chemically Synthesized
QVQLQESGGGLVQAGGSLRLSCAASGTIFSFDEMGWYRQAPGKERELVASIGNGTNTNYADSVKGRFTISRDNAKNTVYLQMNSLKPEDTAVYYCAVRRNSADHYAYWGQGTQVTVSS

SEQ ID NO: 17714 - protein, 122 aa, Artificial Sequence
  Chemically Synthesized
QVQLQESGGGLVQAGGSLRLSCAASGSISQQTDMGWYRQAPGKEREFVAAISYGGNTYYADSVKGRFTISRDNAKNTVYLQMNSLKPEDTAVYYCAVDDLDDPYVLGAHIYWGQGTQVTVSS

SEQ ID NO: 17715 - protein, 118 aa, Artificial Sequence
  Chemically Synthesized
QVQLQESGGGLVQAGGSLRLSCAASGTISPSYNMGWYRQAPGKERELVATIGDGSNTYYADSVKGRFTISRDNAKNTVYLQMNSLKPEDTAVYYCAAISWYGYYHPYWGQGTQVTVSS

SEQ ID NO: 17716 - protein, 126 aa, Artificial Sequence
  Chemically Synthesized
QVQLQESGGGLVQAGGSLRLSCAASGSISNVDGMGWYRQAPGKERELVASITYGGITYYADSVKGRFTISRDNAKNTVYLQMNSLKPEDTAVYYCAVRAPTDEYLDYFRYSDLYYWGQGTQVTVSS

SEQ ID NO: 17717 - protein, 117 aa, Artificial Sequence
  Chemically Synthesized
QVQLQESGGGLVQAGGSLRLSCAASGTISYAWMGWYRQAPGKEREFVATITVGGITYYADSVKGRFTISRDNAKNTVYLQMNSLKPEDTAVYYCAVVRSIGPFYNYWGQGTQVTVSS

SEQ ID NO: 17718 - protein, 118 aa, Artificial Sequence
  Chemically Synthesized
QVQLQESGGGLVQAGGSLRLSCAASGSIFSRPVMGWYRQAPGKERELVASITVGSTTNYADSVKGRFTISRDNAKNTVYLQMNSLKPEDTAVYYCAAQGAGSASLYYWGQGTQVTVSS

SEQ ID NO: 17719 - protein, 119 aa, Artificial Sequence
  Chemically Synthesized
QVQLQESGGGLVQAGGSLRLSCAASGNISYLSVMGWYRQAPGKEREFVATISRGATTNYADSVKGRFTISRDNAKNTVYLQMNSLKPEDTAVYYCAVLTTFCTLLLLYWGQGTQVTVSS

SEQ ID NO: 17720 - protein, 118 aa, Artificial Sequence
  Chemically Synthesized
QVQLQESGGGLVQAGGSLRLSCAASGTISGDPYMGWYRQAPGKEREFVATINFGGSTYYADSVKGRFTISRDNAKNTVYLQMNSLKPEDTAVYYCAASYTDQPDYQYWGQGTQVTVSS

SEQ ID NO: 17721 - protein, 118 aa, Artificial Sequence
  Chemically Synthesized
QVQLQESGGGLVQAGGSLRLSCAASGYISRRVYMGWYRQAPGKERELVAAIDQGTITYYADSVKGRFTISRDNAKNTVYLQMNSLKPEDTAVYYCAADNTSRWYHWYWGQGTQVTVSS

SEQ ID NO: 17722 - protein, 126 aa, Artificial Sequence
  Chemically Synthesized
QVQLQESGGGLVQAGGSLRLSCAASGYIFPLTYMGWYRQAPGKERELVAAISLGGNTNYADSVKGRFTISRDNAKNTVYLQMNSLKPEDTAVYYCAVNDWTPARPTGVDDYLYTYWGQGTQVTVSS

SEQ ID NO: 17723 - protein, 118 aa, Artificial Sequence
  Chemically Synthesized
QVQLQESGGGLVQAGGSLRLSCAASGNISALRVMGWYRQAPGKEREFVAAITYGTITNYADSVKGRFTISRDNAKNTVYLQMNSLKPEDTAVYYCAAEHLNRGVHYYWGQGTQVTVSS

SEQ ID NO: 17724 - protein, 117 aa, Artificial Sequence
  Chemically Synthesized
QVQLQESGGGLVQAGGSLRLSCAASGYIFVVTMGWYRQAPGKERELVAGITEGTSTNYADSVKGRFTISRDNAKNTVYLQMNSLKPEDTAVYYCAAVRIAGRGHRYWGQGTQVTVSS

SEQ ID NO: 17725 - protein, 118 aa, Artificial Sequence
  Chemically Synthesized
QVQLQESGGGLVQAGGSLRLSCAASGNISIFREMGWYRQAPGKERELVASIGYGANTNYADSVKGRFTISRDNAKNTVYLQMNSLKPEDTAVYYCAVDREEYSSLRYWGQGTQVTVSS

SEQ ID NO: 17726 - protein, 118 aa, Artificial Sequence
  Chemically Synthesized
QVQLQESGGGLVQAGGSLRLSCAASGSIFDDTKMGWYRQAPGKEREFVASIGAGGTTNYADSVKGRFTISRDNAKNTVYLQMNSLKPEDTAVYYCAVPGRGYYSYLYWGQGTQVTVSS

SEQ ID NO: 17727 - protein, 112 aa, Artificial Sequence
  Chemically Synthesized
QVQLQESGGGLVQAGGSLRLSCAASGYISQSAYMGWYRQAPGKERELVATINYGTITYYADSVKGRFTISRDNAKNTVYLQMNSLKPEDTAVYYCAVRHYYWGQGTQVTVSS

SEQ ID NO: 17728 - protein, 118 aa, Artificial Sequence
  Chemically Synthesized
QVQLQESGGGLVQAGGSLRLSCAASGNISAAYYMGWYRQAPGKEREFVAGIGPGTTTYYADSVKGRFTISRDNAKNTVYLQMNSLKPEDTAVYYCAVFYLYDVDHKYWGQGTQVTVSS

SEQ ID NO: 17729 - protein, 117 aa, Artificial Sequence
  Chemically Synthesized
QVQLQESGGGLVQAGGSLRLSCAASGYISYGRNMGWYRQAPGKEREFVATIATGTNTNYADSVKGRFTISRDNAKNTVYLQMNSLKPEDTAVYYCAVLFSRVRVFYWGQGTQVTVSS

SEQ ID NO: 17730 - protein, 118 aa, Artificial Sequence
  Chemically Synthesized
QVQLQESGGGLVQAGGSLRLSCAASGYIFFRARMGWYRQAPGKERELVATINSGGTTYYADSVKGRFTISRDNAKNTVYLQMNSLKPEDTAVYYCAALYREGYRHDYWGQGTQVTVSS

SEQ ID NO: 17731 - protein, 118 aa, Artificial Sequence
  Chemically Synthesized
QVQLQESGGGLVQAGGSLRLSCAASGTIFTGPSMGWYRQAPGKERELVAAIDVGGITNYADSVKGRFTISRDNAKNTVYLQMNSLKPEDTAVYYCAVTSGINYDLGYWGQGTQVTVSS

SEQ ID NO: 17732 - protein, 120 aa, Artificial Sequence
  Chemically Synthesized
QVQLQESGGGLVQAGGSLRLSCAASGNISAYDGMGWYRQAPGKEREFVATINGGTTTYYADSVKGRFTISRDNAKNTVYLQMNSLKPEDTAVYYCAANINAGDSQVHTYWGQGTQVTVSS

SEQ ID NO: 17733 - protein, 118 aa, Artificial Sequence
  Chemically Synthesized
QVQLQESGGGLVQAGGSLRLSCAASGTIFPPSFMGWYRQAPGKEREFVASIDKGGITYYADSVKGRFTISRDNAKNTVYLQMNSLKPEDTAVYYCAVIYFYYERHDYWGQGTQVTVSS

SEQ ID NO: 17734 - protein, 126 aa, Artificial Sequence
  Chemically Synthesized
QVQLQESGGGLVQAGGSLRLSCAASGYISAPWYMGWYRQAPGKERELVAAIAWGGNTNYADSVKGRFTISRDNAKNTVYLQMNSLKPEDTAVYYCAVRYPYYAYVHVGLLGTLVYWGQGTQVTVSS

SEQ ID NO: 17735 - protein, 118 aa, Artificial Sequence
  Chemically Synthesized
QVQLQESGGGLVQAGGSLRLSCAASGTIFAAFFMGWYRQAPGKEREFVATITLGASTNYADSVKGRFTISRDNAKNTVYLQMNSLKPEDTAVYYCAAWYDADFDYGYWGQGTQVTVSS

SEQ ID NO: 17736 - protein, 126 aa, Artificial Sequence
  Chemically Synthesized
QVQLQESGGGLVQAGGSLRLSCAASGNIFDRKDMGWYRQAPGKERELVAAIGLGASTNYADSVKGRFTISRDNAKNTVYLQMNSLKPEDTAVYYCAVPSYAADYVGGYDHAYHHYWGQGTQVTVSS

SEQ ID NO: 17737 - protein, 119 aa, Artificial Sequence
  Chemically Synthesized
QVQLQESGGGLVQAGGSLRLSCAASGNIFRTAQMGWYRQAPGKEREFVATINRGGSSTNYADSVKGRFTISRDNAKNTVYLQMNSLKPEDTAVYYCAATRVWGNRHRYWGQGTQVTVSS

SEQ ID NO: 17738 - protein, 122 aa, Artificial Sequence
  Chemically Synthesized
QVQLQESGGGLVQAGGSLRLSCAASGSIFGSLTMGWYRQAPGKEREFVASISYGSTTNYADSVKGRFTISRDNAKNTVYLQMNSLKPEDTAVYYCAALYRPRVIWAYYYLYWGQGTQVTVSS

SEQ ID NO: 17739 - protein, 118 aa, Artificial Sequence
  Chemically Synthesized
QVQLQESGGGLVQAGGSLRLSCAASGSIFLSPYMGWYRQAPGKERELVASISTGASTYYADSVKGRFTISRDNAKNTVYLQMNSLKPEDTAVYYCAARATDHYRFPYWGQGTQVTVSS

SEQ ID NO: 17740 - protein, 124 aa, Artificial Sequence
  Chemically Synthesized
QVQLQESGGGLVQAGGSLRLSCAASGYIFYYLYMGWYRQAPGKEREFVAGIGYGTNTNYADSVKGRFTISRDNAKNTVYLQMNSLKPEDTAVYYCAVYHRDSHYSVHPYARYYWGQGTQVTVSS

SEQ ID NO: 17741 - protein, 122 aa, Artificial Sequence
  Chemically Synthesized
QVQLQESGGGLVQAGGSLRLSCAASGTISLYGDMGWYRQAPGKERELVASISLGTTTYYADSVKGRFTISRDNAKNTVYLQMNSLKPEDTAVYYCAAAGTSTRPRADSYIYWGQGTQVTVSS

SEQ ID NO: 17742 - protein, 112 aa, Artificial Sequence
  Chemically Synthesized
QVQLQESGGGLVQAGGSLRLSCAASGTISDGYIMGWYRQAPGKERELVAGIGASTNYADSVKGRFTISRDNAKNTVYLQMNSLKPEDTAVYYCASPNGHGYWGQGTQVTVSS

SEQ ID NO: 17743 - protein, 115 aa, Artificial Sequence
  Chemically Synthesized
QVQLQESGGGLVQAGGSLRLSCAASGNIFRDTTMGWYRQAPGKEREFVASISAGGSTYYADSVKGRFTISRDNAKNTVYLQMNSLKPEDTAVYYCAADRSTYRYWGQGTQVTVSS

SEQ ID NO: 17744 - protein, 122 aa, Artificial Sequence
  Chemically Synthesized
QVQLQESGGGLVQAGGSLRLSCAASGNIFVPVIMGWYRQAPGKERELVATIAGGTITNYADSVKGRFTISRDNAKNTVYLQMNSLKPEDTAVYYCAAIVPSQWYRPRSYPYWGQGTQVTVSS

SEQ ID NO: 17745 - protein, 122 aa, Artificial Sequence
  Chemically Synthesized
QVQLQESGGGLVQAGGSLRLSCAASGSIFYYVVMGWYRQAPGKEREFVAAIDDGTNTNYADSVKGRFTISRDNAKNTVYLQMNSLKPEDTAVYYCAVQTYRLRIVDSVFVYWGQGTQVTVSS

SEQ ID NO: 17746 - protein, 124 aa, Artificial Sequence
  Chemically Synthesized
QVQLQESGGGLVQAGGSLRLSCAASGYISYRYMGWYRQAPGKEREFVATITPGSITNYADSVKGRFTISRDNAKNTVYLQMNSLKPEDTAVYYCAVLKNIYYYDATSPADHYYWGQGTQVTVSS

SEQ ID NO: 17747 - protein, 117 aa, Artificial Sequence
  Chemically Synthesized
QVQLQESGGGLVQAGGSLRLSCAASGSISYLSYMGWYRQAPGKEREFVAGISYGASTNYADSVKGRFTISRDNAKNTVYLQMNSLKPEDTAVYYCAVEGQHASSMYWGQGTQVTVSS

SEQ ID NO: 17748 - protein, 118 aa, Artificial Sequence
  Chemically Synthesized
QVQLQESGGGLVQAGGSLRLSCAASGYIFSAYLMGWYRQAPGKEREFVAAISSGSTTYYADSVKGRFTISRDNAKNTVYLQMNSLKPEDTAVYYCAVTPWTYAWLGYWGQGTQVTVSS

SEQ ID NO: 17749 - protein, 122 aa, Artificial Sequence
  Chemically Synthesized
QVQLQESGGGLVQAGGSLRLSCAASGNIFWVYYMGWYRQAPGKEREFVASIGPGASTNYADSVKGRFTISRDNAKNTVYLQMNSLKPEDTAVYYCAAQDYLNLVLVYHHAYWGQGTQVTVSS

SEQ ID NO: 17750 - protein, 118 aa, Artificial Sequence
  Chemically Synthesized
QVQLQESGGGLVQAGGSLRLSCAASGNISSDPLMGWYRQAPGKEREFVATISYGATTYYADSVKGRFTISRDNAKNTVYLQMNSLKPEDTAVYYCAVRSSAAVLHYYWGQGTQVTVSS

SEQ ID NO: 17751 - protein, 118 aa, Artificial Sequence
  Chemically Synthesized
QVQLQESGGGLVQAGGSLRLSCAASGYIFLFPTMGWYRQAPGKERELVATIAGGAITNYADSVKGRFTISRDNAKNTVYLQMNSLKPEDTAVYYCAVDSLGDDGHRYWGQGTQVTVSS

SEQ ID NO: 17752 - protein, 126 aa, Artificial Sequence
  Chemically Synthesized
QVQLQESGGGLVQAGGSLRLSCAASGTIFLSFTMGWYRQAPGKEREFVAAITGGGTTYYADSVKGRFTISRDNAKNTVYLQMNSLKPEDTAVYYCAVPIDDEYLYVGGHYDYHTYWGQGTQVTVSS

SEQ ID NO: 17753 - protein, 111 aa, Artificial Sequence
  Chemically Synthesized
QVQLQESGGGLVQAGGSLRLSCAASGTISLQSMGWYRQAPGKEREFVASIAWGGNTNYADSVKGRFTISRDNAKNTVYLQMNSLKPEDTAVYYCATSTIYWGQGTQVTVSS

SEQ ID NO: 17754 - protein, 122 aa, Artificial Sequence
  Chemically Synthesized
QVQLQESGGGLVQAGGSLRLSCAASGTISNSYFMGWYRQAPGKERELVASISTGSNTNYADSVKGRFTISRDNAKNTVYLQMNSLKPEDTAVYYCAAFTTSYPPDNWEYHYWGQGTQVTVSS

SEQ ID NO: 17755 - protein, 118 aa, Artificial Sequence
  Chemically Synthesized
QVQLQESGGGLVQAGGSLRLSCAASGNISGENQMGWYRQAPGKERELVASISLGAITYYADSVKGRFTISRDNAKNTVYLQMNSLKPEDTAVYYCAVGPTEHYGHFYWGQGTQVTVSS

SEQ ID NO: 17756 - protein, 122 aa, Artificial Sequence
  Chemically Synthesized
QVQLQESGGGLVQAGGSLRLSCAASGTIFRYGVMGWYRQAPGKERELVAAIGSGGITYYADSVKGRFTISRDNAKNTVYLQMNSLKPEDTAVYYCAAYTADGTSGYHYLDYWGQGTQVTVSS

SEQ ID NO: 17757 - protein, 117 aa, Artificial Sequence
  Chemically Synthesized
QVQLQESGGGLVQAGGSLRLSCAASGSIFTAYAMGWYRQAPGKEREFVAGIGAGGSTNYADSVKGRFTISRDNAKNTVYLQMNSLKPEDTAVYYCAVPLGQPWHDYWGQGTQVTVSS

SEQ ID NO: 17758 - protein, 118 aa, Artificial Sequence
  Chemically Synthesized
QVQLQESGGGLVQAGGSLRLSCAASGSIFVYKLMGWYRQAPGKEREFVAAITEGGTTNYADSVKGRFTISRDNAKNTVYLQMNSLKPEDTAVYYCAVYDEGYDVFDYWGQGTQVTVSS

SEQ ID NO: 17759 - protein, 118 aa, Artificial Sequence
  Chemically Synthesized
QVQLQESGGGLVQAGGSLRLSCAASGNIFHYVYMGWYRQAPGKEREFVAGIGPGATTYYADSVKGRFTISRDNAKNTVYLQMNSLKPEDTAVYYCAAPYITWYGHDYWGQGTQVTVSS

SEQ ID NO: 17760 - protein, 118 aa, Artificial Sequence
  Chemically Synthesized
QVQLQESGGGLVQAGGSLRLSCAASGTISYYDVMGWYRQAPGKEREFVATIAGGTTTYYADSVKGRFTISRDNAKNTVYLQMNSLKPEDTAVYYCAVQILYAPYHRYWGQGTQVTVSS

SEQ ID NO: 17761 - protein, 118 aa, Artificial Sequence
  Chemically Synthesized
QVQLQESGGGLVQAGGSLRLSCAASGNIFTRRVMGWYRQAPGKEREFVASISFGTTTNYADSVKGRFTISRDNAKNTVYLQMNSLKPEDTAVYYCAVRNLERHTLTYWGQGTQVTVSS

SEQ ID NO: 17762 - protein, 118 aa, Artificial Sequence
  Chemically Synthesized
QVQLQESGGGLVQAGGSLRLSCAASGTISGIDIMGWYRQAPGKEREFVAAIAYGTTTNYADSVKGRFTISRDNAKNTVYLQMNSLKPEDTAVYYCAVPRFGVGYHVYWGQGTQVTVSS

SEQ ID NO: 17763 - protein, 118 aa, Artificial Sequence
  Chemically Synthesized
QVQLQESGGGLVQAGGSLRLSCAASGTISEHGVMGWYRQAPGKEREFVAAITQGASTNYADSVKGRFTISRDNAKNTVYLQMNSLKPEDTAVYYCAALDVILTPLPYWGQGTQVTVSS

SEQ ID NO: 17764 - protein, 118 aa, Artificial Sequence
  Chemically Synthesized
QVQLQESGGGLVQAGGSLRLSCAASGTIFDGPIMGWYRQAPGKEREFVASIAYGTITNYADSVKGRFTISRDNAKNTVYLQMNSLKPEDTAVYYCAVRPEWLDPHVYWGQGTQVTVSS

SEQ ID NO: 17765 - protein, 122 aa, Artificial Sequence
  Chemically Synthesized
QVQLQESGGGLVQAGGSLRLSCAASGSISGYIIMGWYRQAPGKEREFVAAISVGSSTNYADSVKGRFTISRDNAKNTVYLQMNSLKPEDTAVYYCAAGYQNQYKYQSYHVYWGQGTQVTVSS

SEQ ID NO: 17766 - protein, 118 aa, Artificial Sequence
  Chemically Synthesized
QVQLQESGGGLVQAGGSLRLSCAASGSISRRSVMGWYRQAPGKERELVAAINYGATTNYADSVKGRFTISRDNAKNTVYLQMNSLKPEDTAVYYCAVFYYDPPPHIYWGQGTQVTVSS

SEQ ID NO: 17767 - protein, 118 aa, Artificial Sequence
  Chemically Synthesized
QVQLQESGGGLVQAGGSLRLSCAASGTISRTYVMGWYRQAPGKEREFVAAITDGGNTNYADSVKGRFTISRDNAKNTVYLQMNSLKPEDTAVYYCAAVYLYYGYHRYWGQGTQVTVSS

SEQ ID NO: 17768 - protein, 112 aa, Artificial Sequence
  Chemically Synthesized
QVQLQESGGGLVQAGGSLRLSCAASGNISDAIVMGWYRQAPGKEREFVAAISYGSITNYADSVKGRFTISRDNAKNTVYLQMNSLKPEDTAVYYCAGQHAYWGQGTQVTVSS

SEQ ID NO: 17769 - protein, 122 aa, Artificial Sequence
  Chemically Synthesized
QVQLQESGGGLVQAGGSLRLSCAASGSISTILIMGWYRQAPGKEREFVAAISVGSTTNYADSVKGRFTISRDNAKNTVYLQMNSLKPEDTAVYYCAAYVYPKGYRYGGHRYWGQGTQVTVSS

SEQ ID NO: 17770 - protein, 123 aa, Artificial Sequence
  Chemically Synthesized
QVQLQESGGGLVQAGGSLRLSCAASGNISRLYVMGWYRQAPGKEREFVAAISLGGASTNYADSVKGRFTISRDNAKNTVYLQMNSLKPEDTAVYYCAAPNLSDAHKGVRHAYWGQGTQVTVSS

SEQ ID NO: 17771 - protein, 118 aa, Artificial Sequence
  Chemically Synthesized
QVQLQESGGGLVQAGGSLRLSCAASGNISYALLMGWYRQAPGKEREFVASISYGTSTNYADSVKGRFTISRDNAKNTVYLQMNSLKPEDTAVYYCAVGYWGQPYHTYWGQGTQVTVSS

SEQ ID NO: 17772 - protein, 122 aa, Artificial Sequence
  Chemically Synthesized
QVQLQESGGGLVQAGGSLRLSCAASGSISHLIVMGWYRQAPGKEREFVAAISTGGTTNYADSVKGRFTISRDNAKNTVYLQMNSLKPEDTAVYYCAVGTYVAENSVAYHAYWGQGTQVTVSS

SEQ ID NO: 17773 - protein, 122 aa, Artificial Sequence
  Chemically Synthesized
QVQLQESGGGLVQAGGSLRLSCAASGNIFDAVVMGWYRQAPGKEREFVASIDFGAITNYADSVKGRFTISRDNAKNTVYLQMNSLKPEDTAVYYCAAYWRHDFGPQRGYQYWGQGTQVTVSS

SEQ ID NO: 17774 - protein, 126 aa, Artificial Sequence
  Chemically Synthesized
QVQLQESGGGLVQAGGSLRLSCAASGYISDYSIMGWYRQAPGKEREFVAGIATGTSTNYADSVKGRFTISRDNAKNTVYLQMNSLKPEDTAVYYCAALSIADEYVPGTDTYYYTYWGQGTQVTVSS

SEQ ID NO: 17775 - protein, 118 aa, Artificial Sequence
  Chemically Synthesized
QVQLQESGGGLVQAGGSLRLSCAASGSISDFGIMGWYRQAPGKEREFVATINYGGSTYYADSVKGRFTISRDNAKNTVYLQMNSLKPEDTAVYYCAALDVIRSYLAYWGQGTQVTVSS

SEQ ID NO: 17776 - protein, 118 aa, Artificial Sequence
  Chemically Synthesized
QVQLQESGGGLVQAGGSLRLSCAASGYISRVIIMGWYRQAPGKEREFVAAITLGGITNYADSVKGRFTISRDNAKNTVYLQMNSLKPEDTAVYYCAVGTVNRGYHLYWGQGTQVTVSS

SEQ ID NO: 17777 - protein, 118 aa, Artificial Sequence
  Chemically Synthesized
QVQLQESGGGLVQAGGSLRLSCAASGTIFKGWLMGWYRQAPGKEREFVAAIAYGAITNYADSVKGRFTISRDNAKNTVYLQMNSLKPEDTAVYYCAARWFGYGEHTYWGQGTQVTVSS

SEQ ID NO: 17778 - protein, 118 aa, Artificial Sequence
  Chemically Synthesized
QVQLQESGGGLVQAGGSLRLSCAASGYIFRLSVMGWYRQAPGKEREFVASIAVGGITYYADSVKGRFTISRDNAKNTVYLQMNSLKPEDTAVYYCAAYDLRPPVHGYWGQGTQVTVSS

SEQ ID NO: 17779 - protein, 122 aa, Artificial Sequence
  Chemically Synthesized
QVQLQESGGGLVQAGGSLRLSCAASGSISQVVIMGWYRQAPGKEREFVAAITYGASTNYADSVKGRFTISRDNAKNTVYLQMNSLKPEDTAVYYCAAGDISPVRPSTYHQYWGQGTQVTVSS

SEQ ID NO: 17780 - protein, 122 aa, Artificial Sequence
  Chemically Synthesized
QVQLQESGGGLVQAGGSLRLSCAASGNIFDWLYMGWYRQAPGKERELVAGIGQGGSTNYADSVKGRFTISRDNAKNTVYLQMNSLKPEDTAVYYCAVHYFPSAANPWTYAYWGQGTQVTVSS

SEQ ID NO: 17781 - protein, 118 aa, Artificial Sequence
  Chemically Synthesized
QVQLQESGGGLVQAGGSLRLSCAASGTIFGTPVMGWYRQAPGKEREFVAGIGVGTNTYYADSVKGRFTISRDNAKNTVYLQMNSLKPEDTAVYYCAAYDGNARRLKYWGQGTQVTVSS

SEQ ID NO: 17782 - protein, 118 aa, Artificial Sequence
  Chemically Synthesized
QVQLQESGGGLVQAGGSLRLSCAASGNISTSRVMGWYRQAPGKEREFVAGIGRGSNTYYADSVKGRFTISRDNAKNTVYLQMNSLKPEDTAVYYCAAPDNIDYTHRYWGQGTQVTVSS

SEQ ID NO: 17783 - protein, 119 aa, Artificial Sequence
  Chemically Synthesized
QVQLQESGGGLVQAGGSLRLSCAASGNIFARFIMGWYRQAPGKEREFVAGIGFGTNTYYADSVKGRFTISRDNAKNTVYLQMNSLKPEDTAVYYCAVGYRDSDDYHKYWGQGTQVTVSS

SEQ ID NO: 17784 - protein, 118 aa, Artificial Sequence
  Chemically Synthesized
QVQLQESGGGLVQAGGSLRLSCAASGNISWGSVMGWYRQAPGKEREFVASITEGSTTYYADSVKGRFTISRDNAKNTVYLQMNSLKPEDTAVYYCAVAYRKRRIHYYWGQGTQVTVSS

SEQ ID NO: 17785 - protein, 118 aa, Artificial Sequence
  Chemically Synthesized
QVQLQESGGGLVQAGGSLRLSCAASGSIFKNWAMGWYRQAPGKERELVAGISYGTSTYYADSVKGRFTISRDNAKNTVYLQMNSLKPEDTAVYYCAAYTGVYDYHVYWGQGTQVTVSS

SEQ ID NO: 17786 - protein, 126 aa, Artificial Sequence
  Chemically Synthesized
QVQLQESGGGLVQAGGSLRLSCAASGSISQYDYMGWYRQAPGKERELVAGINGGSSTYYADSVKGRFTISRDNAKNTVYLQMNSLKPEDTAVYYCAVVDLYYYDDWYLSDDAHDYWGQGTQVTVSS

SEQ ID NO: 17787 - protein, 115 aa, Artificial Sequence
  Chemically Synthesized
QVQLQESGGGLVQAGGSLRLSCAASGNIFSQDTMGWYRQAPGKERELVAAINVGSSTYYADSVKGRFTISRDNAKNTVYLQMNSLKPEDTAVYYCAAINWDHIYWGQGTQVTVSS

SEQ ID NO: 17788 - protein, 118 aa, Artificial Sequence
  Chemically Synthesized
QVQLQESGGGLVQAGGSLRLSCAASGNIFYVWYMGWYRQAPGKERELVAAIAYGTTTYYADSVKGRFTISRDNAKNTVYLQMNSLKPEDTAVYYCAVGHPGGDHLNYWGQGTQVTVSS

SEQ ID NO: 17789 - protein, 118 aa, Artificial Sequence
  Chemically Synthesized
QVQLQESGGGLVQAGGSLRLSCAASGNISKGYSMGWYRQAPGKEREFVAGITRGTNTYYADSVKGRFTISRDNAKNTVYLQMNSLKPEDTAVYYCAVLWWGADRHWYWGQGTQVTVSS

SEQ ID NO: 17790 - protein, 118 aa, Artificial Sequence
  Chemically Synthesized
QVQLQESGGGLVQAGGSLRLSCAASGSISYVGPMGWYRQAPGKEREFVAGIGRGSSTYYADSVKGRFTISRDNAKNTVYLQMNSLKPEDTAVYYCAVPYPHVPGLRYWGQGTQVTVSS

SEQ ID NO: 17791 - protein, 120 aa, Artificial Sequence
  Chemically Synthesized
QVQLQESGGGLVQAGGSLRLSCAASGNIFRDWKMGWYRQAPGKEREFVAGIGTGTNTYYADSVKGRFTISRDNAKNTVYLQMNSLKPEDTAVYYCAVVVPYQVSTYYRYWGQGTQVTVSS

SEQ ID NO: 17792 - protein, 122 aa, Artificial Sequence
  Chemically Synthesized
QVQLQESGGGLVQAGGSLRLSCAASGTIFYLIIMGWYRQAPGKEREFVAGIGRGASTYYADSVKGRFTISRDNAKNTVYLQMNSLKPEDTAVYYCAAISIVRDYNERGHRYWGQGTQVTVSS

SEQ ID NO: 17793 - protein, 122 aa, Artificial Sequence
  Chemically Synthesized
QVQLQESGGGLVQAGGSLRLSCAASGNISGPFIMGWYRQAPGKEREFVAGIGKGTNTYYADSVKGRFTISRDNAKNTVYLQMNSLKPEDTAVYYCAAVVYDARNPVPYLYYWGQGTQVTVSS

SEQ ID NO: 17794 - protein, 118 aa, Artificial Sequence
  Chemically Synthesized
QVQLQESGGGLVQAGGSLRLSCAASGYIFKGNHMGWYRQAPGKEREFVATINPGAITYYADSVKGRFTISRDNAKNTVYLQMNSLKPEDTAVYYCAVNAWDSGYHRYWGQGTQVTVSS

SEQ ID NO: 17795 - protein, 118 aa, Artificial Sequence
  Chemically Synthesized
QVQLQESGGGLVQAGGSLRLSCAASGYISFGYYMGWYRQAPGKEREFVAGIAFGTSTYYADSVKGRFTISRDNAKNTVYLQMNSLKPEDTAVYYCAAHGTWDRYHDYWGQGTQVTVSS

SEQ ID NO: 17796 - protein, 122 aa, Artificial Sequence
  Chemically Synthesized
QVQLQESGGGLVQAGGSLRLSCAASGSISVYDDMGWYRQAPGKERELVAAIGYGSSTYYADSVKGRFTISRDNAKNTVYLQMNSLKPEDTAVYYCAVYLYTPSDFASDFVYWGQGTQVTVSS

SEQ ID NO: 17797 - protein, 117 aa, Artificial Sequence
  Chemically Synthesized
QVQLQESGGGLVQAGGSLRLSCAASGYIFTSYTMGWYRQAPGKEREFVAGIAYGSSTYYADSVKGRFTISRDNAKNTVYLQMNSLKPEDTAVYYCAAHGRLSVYDYWGQGTQVTVSS

SEQ ID NO: 17798 - protein, 118 aa, Artificial Sequence
  Chemically Synthesized
QVQLQESGGGLVQAGGSLRLSCAASGSISDDYIMGWYRQAPGKEREFVAGIAFGGSTYYADSVKGRFTISRDNAKNTVYLQMNSLKPEDTAVYYCAAYYWRTVKLDYWGQGTQVTVSS

SEQ ID NO: 17799 - protein, 118 aa, Artificial Sequence
  Chemically Synthesized
QVQLQESGGGLVQAGGSLRLSCAASGYISYYPSMGWYRQAPGKEREFVAGITRGSNTYYADSVKGRFTISRDNAKNTVYLQMNSLKPEDTAVYYCAVLYSRSYLFWYWGQGTQVTVSS

SEQ ID NO: 17800 - protein, 126 aa, Artificial Sequence
  Chemically Synthesized
QVQLQESGGGLVQAGGSLRLSCAASGYIFRRSSMGWYRQAPGKEREFVAAIDIGTTTYYADSVKGRFTISRDNAKNTVYLQMNSLKPEDTAVYYCAADAITQYNYLDQGIDYLVYWGQGTQVTVSS

SEQ ID NO: 17801 - protein, 118 aa, Artificial Sequence
  Chemically Synthesized
QVQLQESGGGLVQAGGSLRLSCAASGYISDQWPMGWYRQAPGKEREFVAGIGYGTTTYYADSVKGRFTISRDNAKNTVYLQMNSLKPEDTAVYYCAVPTRTDYRYRYWGQGTQVTVSS

SEQ ID NO: 17802 - protein, 118 aa, Artificial Sequence
  Chemically Synthesized
QVQLQESGGGLVQAGGSLRLSCAASGTISYPGDMGWYRQAPGKERELVATINPGSNYQYADSVKGRFTISRDNAKNTVYLQMNSLKPEDTAVYYCAAYDGYYTRFDYWGQGTQVTVSS

SEQ ID NO: 17803 - protein, 114 aa, Artificial Sequence
  Chemically Synthesized
QVQLQESGGGLVQAGGSLRLSCAASGNISLTHQMGWYRQAPGKERELVAGIDDGSNTNYADSVKGRFTISRDNAKNTVYLQMNSLKPEDTAVYYCAVSWELDYWGQGTQVTVSS

SEQ ID NO: 17804 - protein, 126 aa, Artificial Sequence
  Chemically Synthesized
QVQLQESGGGLVQAGGSLRLSCAASGYIFATAIMGWYRQAPGKEREFVASIDYGTTTNYADSVKGRFTISRDNAKNTVYLQMNSLKPEDTAVYYCAAGAPNLADYYYVYYGDLSYWGQGTQVTVSS

SEQ ID NO: 17805 - protein, 115 aa, Artificial Sequence
  Chemically Synthesized
QVQLQESGGGLVQAGGSLRLSCAASGNISDKWVMGWYRQAPGKEREFVAAITTGGNTNYADSVKGRFTISRDNAKNTVYLQMNSLKPEDTAVYYCAALTQFHRYWGQGTQVTVSS

SEQ ID NO: 17806 - protein, 119 aa, Artificial Sequence
  Chemically Synthesized
QVQLQESGGGLVQAGGSLRLSCAASGNISGYGSMGWYRQAPGKERELVQGGSTNYADSVKGRFTISRDNAKNTVYLQMNSLKPEDTAVYYCALTSLVTLTTLVSISLYWGQGTQVTVSS

SEQ ID NO: 17807 - protein, 120 aa, Artificial Sequence
  Chemically Synthesized
QVQLQESGGGLVQAGGSLRLSCAASGNIFTITMGWYRQAPGKEREFVAAINFGTNTNYADSVKGRFTISRDNAKNTVYLQMNSLKPEDTAVYYCAAFPDTATHAPSYPYWGQGTQVTVSS

SEQ ID NO: 17808 - protein, 117 aa, Artificial Sequence
  Chemically Synthesized
QVQLQESGGGLVQAGGSLRLSCAASGTIFGLDTMGWYRQAPGKERELVAGIGAGSTTYYADSVKGRFTISRDNAKNTVYLQMNSLKPEDTAVYYCAANSLPSDDFYWGQGTQVTVSS

SEQ ID NO: 17809 - protein, 118 aa, Artificial Sequence
  Chemically Synthesized
QVQLQESGGGLVQAGGSLRLSCAASGSISAPLVMGWYRQAPGKEREFVAGIARGGNTNYADSVKGRFTISRDNAKNTVYLQMNSLKPEDTAVYYCAVIAKAASWHTYWGQGTQVTVSS

SEQ ID NO: 17810 - protein, 118 aa, Artificial Sequence
  Chemically Synthesized
QVQLQESGGGLVQAGGSLRLSCAASGTISVPGLMGWYRQAPGKEREFVAGISNGSNTYYADSVKGRFTISRDNAKNTVYLQMNSLKPEDTAVYYCAQHSNRGADYDYWGQGTQVTVSS

SEQ ID NO: 17811 - protein, 114 aa, Artificial Sequence
  Chemically Synthesized
QVQLQESGGGLVQAGGSLRLSCAASGNISDRFRMGWYRQAPGKERELVAAIDTNYADSVKGRFTISRDNAKNTVYLQMNSLKPEDTAVYYCAADDYYGSAYGYWGQGTQVTVSS

SEQ ID NO: 17812 - protein, 118 aa, Artificial Sequence
  Chemically Synthesized
QVQLQESGGGLVQAGGSLRLSCAASGTISDSAAMGWYRQAPGKEREFVAGIDHGSSTYYADSVKGRFTISRDNAKNTVYLQMNSLKPEDTAVYYCAVTGGWDGDYLYWGQGTQVTVSS

SEQ ID NO: 17813 - protein, 122 aa, Artificial Sequence
  Chemically Synthesized
QVQLQESGGGLVQAGGSLRLSCAASGYISRYGYMGWYRQAPGKERELVAGIAIGTTTYYADSVKGRFTISRDNAKNTVYLQMNSLKPEDTAVYYCAVYIYDADYSSSRHRYWGQGTQVTVSS

SEQ ID NO: 17814 - protein, 118 aa, Artificial Sequence
  Chemically Synthesized
QVQLQESGGGLVQAGGSLRLSCAASGTISSVYDMGWYRQAPGKEREFVAGIDEGSITNYADSVKGRFTISRDNAKNTVYLQMNSLKPEDTAVYYCAVGWYGSIYHYYWGQGTQVTVSS

SEQ ID NO: 17815 - protein, 118 aa, Artificial Sequence
  Chemically Synthesized
QVQLQESGGGLVQAGGSLRLSCAASGTISGIDEMGWYRQAPGKERELVATIGQGSSTNYADSVKGRFTISRDNAKNTVYLQMNSLKPEDTAVYYCAADYELYYSHSYWGQGTQVTVSS

SEQ ID NO: 17816 - protein, 119 aa, Artificial Sequence
  Chemically Synthesized
QVQLQESGGGLVQAGGSLRLSCAASGSIFSHPVMGWYRQAPGKERELVAGIGFDGSTTNYADSVKGRFTISRDNAKNTVYLQMNSLKPEDTAVYYCAANTTWDFYHDYWGQGTQVTVSS

SEQ ID NO: 17817 - protein, 118 aa, Artificial Sequence
  Chemically Synthesized
QVQLQESGGGLVQAGGSLRLSCAASGYIFVWYEMGWYRQAPGKERELVASIDVGGSTYYADSVKGRFTISRDNAKNTVYLQMNSLKPEDTAVYYCAATDYRAGGLVYWGQGTQVTVSS

SEQ ID NO: 17818 - protein, 118 aa, Artificial Sequence
  Chemically Synthesized
QVQLQESGGGLVQAGGSLRLSCAASGTISKADNMGWYRQAPGKERELVAAITVGGITNYADSVKGRFTISRDNAKNTVYLQMNSLKPEDTAVYYCAVLASQYHYFYYWGQGTQVTVSS

SEQ ID NO: 17819 - protein, 122 aa, Artificial Sequence
  Chemically Synthesized
QVQLQESGGGLVQAGGSLRLSCAASGYIFRDADMGWYRQAPGKEREFVATINWGSSTNYADSVKGRFTISRDNAKNTVYLQMNSLKPEDTAVYYCAVGYYVWEGLYNYLYYWGQGTQVTVSS

SEQ ID NO: 17820 - protein, 122 aa, Artificial Sequence
  Chemically Synthesized
QVQLQESGGGLVQAGGSLRLSCAASGSISNRWDMGWYRQAPGKEREFVAGIADVTNTNYADSVKGRFTISRDNAKNTVYLQMNSLKPEDTAVYYCAAGVYDWNYAEPYHYYWGQGTQVTVSS

SEQ ID NO: 17821 - protein, 126 aa, Artificial Sequence
  Chemically Synthesized
QVQLQESGGGLVQAGGSLRLSCAASGSISTQDYMGWYRQAPGKERELVAAISLGGNTYYADSVKGRFTISRDNAKNTVYLQMNSLKPEDTAVYYCAVGYYTPFFSYGISKRAHEYWGQGTQVTVSS

SEQ ID NO: 17822 - protein, 118 aa, Artificial Sequence
  Chemically Synthesized
QVQLQESGGGLVQAGGSLRLSCAASGTIFTFDSMGWYRQAPGKEREFVASIDHGGTTYYADSVKGRFTISRDNAKNTVYLQMNSLKPEDTAVYYCAVSYRAGRAHEYWGQGTQVTVSS

SEQ ID NO: 17823 - protein, 117 aa, Artificial Sequence
  Chemically Synthesized
QVQLQESGGGLVQAGGSLRLSCAASGTIFRDRHMGWYRQAPGKERELVASINSVLVPYADSVKGRFTISRDNAKNTVYLQMNSLKPEDTAVYYCAVVYQDIYGLAYWGQGTQVTVSS

SEQ ID NO: 17824 - protein, 122 aa, Artificial Sequence
  Chemically Synthesized
QVQLQESGGGLVQAGGSLRLSCAASGTISDGGDMGWYRQAPGKEREFVAAIDDGANTYYADSVKGRFTISRDNAKNTVYLQMNSLKPEDTAVYYCAVGAYDSTSYADYYYYWGQGTQVTVSS

SEQ ID NO: 17825 - protein, 122 aa, Artificial Sequence
  Chemically Synthesized
QVQLQESGGGLVQAGGSLRLSCAASGTISGGYYMGWYRQAPGKERELVATIDTGSNTNYADSVKGRFTISRDNAKNTVYLQMNSLKPEDTAVYYCAAETGNVASLYREHDYWGQGTQVTVSS

SEQ ID NO: 17826 - protein, 118 aa, Artificial Sequence
  Chemically Synthesized
QVQLQESGGGLVQAGGSLRLSCAASGTISYDTEMGWYRQAPGKEREFVASIDDGANTYYADSVKGRFTISRDNAKNTVYLQMNSLKPEDTAVYYCAVAWYQYGYHDYWGQGTQVTVSS

SEQ ID NO: 17827 - protein, 122 aa, Artificial Sequence
  Chemically Synthesized
QVQLQESGGGLVQAGGSLRLSCAASGNISNSLDMGWYRQAPGKEREFVAGIGYGASTNYADSVKGRFTISRDNAKNTVYLQMNSLKPEDTAVYYCAVGEYSWITLYSYHWYWGQGTQVTVSS

SEQ ID NO: 17828 - protein, 118 aa, Artificial Sequence
  Chemically Synthesized
QVQLQESGGGLVQAGGSLRLSCAASGTISQTDLMGWYRQAPGKEREFVASIGGGANTNYADSVKGRFTISRDNAKNTVYLQMNSLKPEDTAVYYCAVGSPDPAHLYYWGQGTQVTVSS

SEQ ID NO: 17829 - protein, 122 aa, Artificial Sequence
  Chemically Synthesized
QVQLQESGGGLVQAGGSLRLSCAASGNISSHYDMGWYRQAPGKEREFVAAIDAGATTYYADSVKGRFTISRDNAKNTVYLQMNSLKPEDTAVYYCAVAWGYYRDYAYDHLYWGQGTQVTVSS

SEQ ID NO: 17830 - protein, 126 aa, Artificial Sequence
  Chemically Synthesized
QVQLQESGGGLVQAGGSLRLSCAASGNIFSGGGMGWYRQAPGKERELVASIDEGGNTNYADSVKGRFTISRDNAKNTVYLQMNSLKPEDTAVYYCAVGAKYDDRDFRGPYAGYAYWGQGTQVTVSS

SEQ ID NO: 17831 - protein, 118 aa, Artificial Sequence
  Chemically Synthesized
QVQLQESGGGLVQAGGSLRLSCAASGSIFNTAIMGWYRQAPGKEREFVAGIDTGSTTYYADSVKGRFTISRDNAKNTVYLQMNSLKPEDTAVYYCAAQHYTVTRYDYWGQGTQVTVSS

SEQ ID NO: 17832 - protein, 118 aa, Artificial Sequence
  Chemically Synthesized
QVQLQESGGGLVQAGGSLRLSCAASGTISYDTLMGWYRQAPGKEREFVAGIASGGSTYYADSVKGRFTISRDNAKNTVYLQMNSLKPEDTAVYYCAAQHYTVTRYDYWGQGTQVTVSS

SEQ ID NO: 17833 - protein, 118 aa, Artificial Sequence
  Chemically Synthesized
QVQLQESGGGLVQAGGSLRLSCAASGYISRDYLMGWYRQAPGKEREFVAGITGGTSTYYADSVKGRFTISRDNAKNTVYLQMNSLKPEDTAVYYCAAQHYTVTRYDYWGQGTQVTVSS

SEQ ID NO: 17834 - protein, 118 aa, Artificial Sequence
  Chemically Synthesized
QVQLQESGGGLVQAGGSLRLSCAASGNISADYLMGWYRQAPGKEREFVAGIGYGTITYYADSVKGRFTISRDNAKNTVYLQMNSLKPEDTAVYYCAAFGPKSQNHDYWGQGTQVTVSS

SEQ ID NO: 17835 - protein, 118 aa, Artificial Sequence
  Chemically Synthesized
QVQLQESGGGLVQAGGSLRLSCAASGNISADYLMGWYRQAPGKEREFVAGIGYGTITYYADSVKGRFTISRDNAKNTVYLQMNSLKPEDTAVYYCAAFYQYDATHDYWGQGTQVTVSS

SEQ ID NO: 17836 - protein, 122 aa, Artificial Sequence
  Chemically Synthesized
QVQLQESGGGLVQAGGSLRLSCAASGNISDGDVMGWYRQAPGKERELVATISNGSTTNYADSVKGRFTISRDNAKNTVYLQMNSLKPEDTAVYYCAAVAGPYHLRTCLPSYWGQGTQVTVSS

SEQ ID NO: 17837 - protein, 118 aa, Artificial Sequence
  Chemically Synthesized
QVQLQESGGGLVQAGGSLRLSCAASGSIFNTAIMGWYRQAPGKEREFVAGIGYGTITYYADSVKGRFTISRDNAKNTVYLQMNSLKPEDTAVYYCAAQHYTVTRYDYWGQGTQVTVSS

SEQ ID NO: 17838 - protein, 118 aa, Artificial Sequence
  Chemically Synthesized
QVQLQESGGGLVQAGGSLRLSCAASGYISQSIIMGWYRQAPGKEREFVAGIDDGSTTYYADSVKGRFTISRDNAKNTVYLQMNSLKPEDTAVYYCAAFSWSYGDLDYWGQGTQVTVSS

SEQ ID NO: 17839 - protein, 118 aa, Artificial Sequence
  Chemically Synthesized
QVQLQESGGGLVQAGGSLRLSCAASGSIFNTAIMGWYRQAPGKEREFVAGIDTGSTTYYADSVKGRFTISRDNAKNTVYLQMNSLKPEDTAVYYCAAFGPKSQNHDYWGQGTQVTVSS

SEQ ID NO: 17840 - protein, 118 aa, Artificial Sequence
  Chemically Synthesized
QVQLQESGGGLVQAGGSLRLSCAASGYISRDYLMGWYRQAPGKEREFVAGIGYGTITYYADSVKGRFTISRDNAKNTVYLQMNSLKPEDTAVYYCAAQHYTVTRYDYWGQGTQVTVSS

SEQ ID NO: 17841 - protein, 118 aa, Artificial Sequence
  Chemically Synthesized
QVQLQESGGGLVQAGGSLRLSCAASGSIFNTAIMGWYRQAPGKEREFVAGIDTGSTTYYADSVKGRFTISRDNAKNTVYLQMNSLKPEDTAVYYCAAFYQYDATHDYWGQGTQVTVSS

SEQ ID NO: 17842 - protein, 118 aa, Artificial Sequence
  Chemically Synthesized
QVQLQESGGGLVQAGGSLRLSCAASGNISADYLMGWYRQAPGKEREFVAGITGGTSTYYADSVKGRFTISRDNAKNTVYLQMNSLKPEDTAVYYCAAFYQYDATHDYWGQGTQVTVSS

SEQ ID NO: 17843 - protein, 121 aa, Artificial Sequence
  Chemically Synthesized
QVQLQESGGGLVQAGGSLRLSCAASGSIFGANLMGWYRQAPGKERELVPLLMLVVIPYADSVKGRFTISRDNAKNTVYLQMNSLKPEDTAVYYCAVIWGDYRADYWLHLYWGQGTQVTVSS

SEQ ID NO: 17844 - protein, 118 aa, Artificial Sequence
  Chemically Synthesized
QVQLQESGGGLVQAGGSLRLSCAASGTISYDTLMGWYRQAPGKEREFVAGIASGGSTYYADSVKGRFTISRDNAKNTVYLQMNSLKPEDTAVYYCAAFYQYDATHDYWGQGTQVTVSS

SEQ ID NO: 17845 - protein, 111 aa, Artificial Sequence
  Chemically Synthesized
QVQLQESGGGLVQAGGSLRLSCAASGYISAPSYMGWYRQAPGKERELVASIAAGSSTNYADSVKGRFTISRDNAKNTVYLQMNSLKPEDTAVYYCAATIYWGQGTQVTVSS

SEQ ID NO: 17846 - protein, 118 aa, Artificial Sequence
  Chemically Synthesized
QVQLQESGGGLVQAGGSLRLSCAASGTISYDTLMGWYRQAPGKEREFVAGIGYGTITYYADSVKGRFTISRDNAKNTVYLQMNSLKPEDTAVYYCAAQHYTVTRYDYWGQGTQVTVSS

SEQ ID NO: 17847 - protein, 118 aa, Artificial Sequence
  Chemically Synthesized
QVQLQESGGGLVQAGGSLRLSCAASGYISRDYLMGWYRQAPGKEREFVAGITGGTSTYYADSVKGRFTISRDNAKNTVYLQMNSLKPEDTAVYYCAAFGPKSQNHDYWGQGTQVTVSS

SEQ ID NO: 17848 - protein, 118 aa, Artificial Sequence
  Chemically Synthesized
QVQLQESGGGLVQAGGSLRLSCAASGSISQADLMGWYRQAPGKEREFVAGITKGTTTYYADSVKGRFTISRDNAKNTVYLQMNSLKPEDTAVYYCAAQHYTVTRYDYWGQGTQVTVSS

SEQ ID NO: 17849 - protein, 118 aa, Artificial Sequence
  Chemically Synthesized
QVQLQESGGGLVQAGGSLRLSCAASGTISVPGLMGWYRQAPGKEREFVAGIADGTTTYYADSVKGRFTISRDNAKNTVYLQMNSLKPEDTAVYYCAAYSWPDPGLTYWGQGTQVTVSS

SEQ ID NO: 17850 - protein, 118 aa, Artificial Sequence
  Chemically Synthesized
QVQLQESGGGLVQAGGSLRLSCAASGSIFNTAIMGWYRQAPGKEREFVAGIASGGSTYYADSVKGRFTISRDNAKNTVYLQMNSLKPEDTAVYYCAAFGPKSQNHDYWGQGTQVTVSS

SEQ ID NO: 17851 - protein, 118 aa, Artificial Sequence
  Chemically Synthesized
QVQLQESGGGLVQAGGSLRLSCAASGNISADYLMGWYRQAPGKEREFVAGIGYGTITYYADSVKGRFTISRDNAKNTVYLQMNSLKPEDTAVYYCAVYGWPTPYLDYWGQGTQVTVSS

SEQ ID NO: 17852 - protein, 118 aa, Artificial Sequence
  Chemically Synthesized
QVQLQESGGGLVQAGGSLRLSCAASGSIFNTAIMGWYRQAPGKEREFVAGITGGTSTYYADSVKGRFTISRDNAKNTVYLQMNSLKPEDTAVYYCAAFYQYDATHDYWGQGTQVTVSS

SEQ ID NO: 17853 - protein, 118 aa, Artificial Sequence
  Chemically Synthesized
QVQLQESGGGLVQAGGSLRLSCAASGSISYTYLMGWYRQAPGKERELVAGISNGGSTYYADSVKGRFTISRDNAKNTVYLQMNSLKPEDTAVYYCAAQHYTVTRYDYWGQGTQVTVSS

SEQ ID NO: 17854 - protein, 118 aa, Artificial Sequence
  Chemically Synthesized
QVQLQESGGGLVQAGGSLRLSCAASGSIFNTAIMGWYRQAPGKEREFVAGIDTGSTTYYADSVKGRFTISRDNAKNTVYLQMNSLKPEDTAVYYCAVYGWPTPYLDYWGQGTQVTVSS

SEQ ID NO: 17855 - protein, 118 aa, Artificial Sequence
  Chemically Synthesized
QVQLQESGGGLVQAGGSLRLSCAASGNISADYLMGWYRQAPGKEREFVAGIGYGTITYYADSVKGRFTISRDNAKNTVYLQMNSLKPEDTAVYYCAVYSYPEAGHDYWGQGTQVTVSS

SEQ ID NO: 17856 - protein, 118 aa, Artificial Sequence
  Chemically Synthesized
QVQLQESGGGLVQAGGSLRLSCAASGNISADYLMGWYRQAPGKEREFVAGIGYGTITYYADSVKGRFTISRDNAKNTVYLQMNSLKPEDTAVYYCAAFDPVDVAFDYWGQGTQVTVSS

SEQ ID NO: 17857 - protein, 118 aa, Artificial Sequence
  Chemically Synthesized
QVQLQESGGGLVQAGGSLRLSCAASGSISQADLMGWYRQAPGKEREFVAGIGYGTITYYADSVKGRFTISRDNAKNTVYLQMNSLKPEDTAVYYCAAQHYTVTRYDYWGQGTQVTVSS

SEQ ID NO: 17858 - protein, 118 aa, Artificial Sequence
  Chemically Synthesized
QVQLQESGGGLVQAGGSLRLSCAASGNISGETYMGWYRQAPGKEREFVAGIATGTSTYYADSVKGRFTISRDNAKNTVYLQMNSLKPEDTAVYYCAAQHYTVTRYDYWGQGTQVTVSS

SEQ ID NO: 17859 - protein, 126 aa, Artificial Sequence
  Chemically Synthesized
QVQLQESGGGLVQAGGSLRLSCAASGYIFQHYSMGWYRQAPGKEREFVASIGRGGTTYYADSVKGRFTISRDNAKNTVYLQMNSLKPEDTAVYYCAVKDGPYPPYAVQRQEYYRYWGQGTQVTVSS

SEQ ID NO: 17860 - protein, 126 aa, Artificial Sequence
  Chemically Synthesized
QVQLQESGGGLVQAGGSLRLSCAASGSIFITSVMGWYRQAPGKEREFVASISGGSNTYYADSVKGRFTISRDNAKNTVYLQMNSLKPEDTAVYYCAVGEWRYYWNLPSLYDYHDYWGQGTQVTVSS

SEQ ID NO: 17861 - protein, 122 aa, Artificial Sequence
  Chemically Synthesized
QVQLQESGGGLVQAGGSLRLSCAASGYIFGTQYMGWYRQAPGKEREFVASIAAGTSTYYADSVKGRFTISRDNAKNTVYLQMNSLKPEDTAVYYCAATDYYSDAGDYTHWYWGQGTQVTVSS

SEQ ID NO: 17862 - protein, 118 aa, Artificial Sequence
  Chemically Synthesized
QVQLQESGGGLVQAGGSLRLSCAASGNIFVYWYMGWYRQAPGKEREFVAGISAGGSTYYADSVKGRFTISRDNAKNTVYLQMNSLKPEDTAVYYCAVIVVLRLNYRYWGQGTQVTVSS

SEQ ID NO: 17863 - protein, 118 aa, Artificial Sequence
  Chemically Synthesized
QVQLQESGGGLVQAGGSLRLSCAASGTISGYWFMGWYRQAPGKERELVAAIGGGATTYYADSVKGRFTISRDNAKNTVYLQMNSLKPEDTAVYYCAVGGVADRRLVYWGQGTQVTVSS

SEQ ID NO: 17864 - protein, 122 aa, Artificial Sequence
  Chemically Synthesized
QVQLQESGGGLVQAGGSLRLSCAASGNIFAIDVMGWYRQAPGKERELVASIGDGATNQYADSVKGRFTISRDNAKNTVYLQMNSLKPEDTAVYYCAVYPYTQGAWQPAYAYWGQGTQVTVSS

SEQ ID NO: 17865 - protein, 122 aa, Artificial Sequence
  Chemically Synthesized
QVQLQESGGGLVQAGGSLRLSCAASGNISPIGRMGWYRQAPGKEREFVASIALGASTNYADSVKGRFTISRDNAKNTVYLQMNSLKPEDTAVYYCAVVISHFDSTTIAFNYWGQGTQVTVSS

SEQ ID NO: 17866 - protein, 117 aa, Artificial Sequence
  Chemically Synthesized
QVQLQESGGGLVQAGGSLRLSCAASGSIFRAYMGWYRQAPGKEREFVASISDGGSTYYADSVKGRFTISRDNAKNTVYLQMNSLKPEDTAVYYCAVGLSGGLYYLYWGQGTQVTVSS

SEQ ID NO: 17867 - protein, 118 aa, Artificial Sequence
  Chemically Synthesized
QVQLQESGGGLVQAGGSLRLSCAASGTISPRGDMGWYRQAPGKERELVAGIDYGASTNYADSVKGRFTISRDNAKNTVYLQMNSLKPEDTAVYYCAVGSSQPFHYEYWGQGTQVTVSS

SEQ ID NO: 17868 - protein, 117 aa, Artificial Sequence
  Chemically Synthesized
QVQLQESGGGLVQAGGSLRLSCAASGNIFLRAFMGWYRQAPGKERELVAGIGGGTTNYADSVKGRFTISRDNAKNTVYLQMNSLKPEDTAVYYCAVYERARTVHGYWGQGTQVTVSS

SEQ ID NO: 17869 - protein, 116 aa, Artificial Sequence
  Chemically Synthesized
QVQLQESGGGLVQAGGSLRLSCAASGSISAAGDMGWYRQAPGKEREFVAGIAGGGTTNYADSVKGRFTISRDNAKNTVYLQMNSLKPEDTAVYYCAVTVTTTVIYWGQGTQVTVSS

SEQ ID NO: 17870 - protein, 126 aa, Artificial Sequence
  Chemically Synthesized
QVQLQESGGGLVQAGGSLRLSCAASGNIFGLLVMGWYRQAPGKEREFVATIGAGANTNYADSVKGRFTISRDNAKNTVYLQMNSLKPEDTAVYYCAVGQDPDSWDEVDGYNGHGYWGQGTQVTVSS

SEQ ID NO: 17871 - protein, 112 aa, Artificial Sequence
  Chemically Synthesized
QVQLQESGGGLVQAGGSLRLSCAASGSISRYDYMGWYRQAPGKEREFVASIGSGGITYYADSVKGRFTISRDNAKNTVYLQMNSLKPEDTAVYYCATDYGYWGQGTQVTVSS

SEQ ID NO: 17872 - protein, 117 aa, Artificial Sequence
  Chemically Synthesized
QVQLQESGGGLVQAGGSLRLSCAASGSISNVRMGWYRQAPGKEREFVATIASGSITYYADSVKGRFTISRDNAKNTVYLQMNSLKPEDTAVYYCAAEGVFLDRLYYWGQGTQVTVSS

SEQ ID NO: 17873 - protein, 119 aa, Artificial Sequence
  Chemically Synthesized
QVQLQESGGGLVQAGGSLRLSCAASGYISGSGLIMGWYRQAPGKEREFVAGISIGGITYYADSVKGRFTISRDNAKNTVYLQMNSLKPEDTAVYYCAVLGAWYNGLYYWGQGTQVTVSS

SEQ ID NO: 17874 - protein, 121 aa, Artificial Sequence
  Chemically Synthesized
QVQLQESGGGLVQAGGSLRLSCAASGSISQGPYMGWYRQAPGKEREFVASINSVVVPYADSVKGRFTISRDNAKNTVYLQMNSLKPEDTAVYYCAAGSPWYYFLVSLHYYWGQGTQVTVSS

SEQ ID NO: 17875 - protein, 124 aa, Artificial Sequence
  Chemically Synthesized
QVQLQESGGGLVQAGGSLRLSCAASGTIFPRYDMGWYRQAPGKEREFVASIAYGTSTYYADSVKGRFTISRDNAKNTVYLQMNSLKPEDTAVYYCAAVDGAYTYDGYVHAIYYWGQGTQVTVSS

SEQ ID NO: 17876 - protein, 118 aa, Artificial Sequence
  Chemically Synthesized
QVQLQESGGGLVQAGGSLRLSCAASGTISGDTPMGWYRQAPGKEREFVAAISVGGITYYADSVKGRFTISRDNAKNTVYLQMNSLKPEDTAVYYCAVWDYDHLLHVYWGQGTQVTVSS

SEQ ID NO: 17877 - protein, 118 aa, Artificial Sequence
  Chemically Synthesized
QVQLQESGGGLVQAGGSLRLSCAASGTIFEYADMGWYRQAPGKEREFVASIGPGSTTYYADSVKGRFTISRDNAKNTVYLQMNSLKPEDTAVYYCAAKTPGRGDHGYWGQGTQVTVSS

SEQ ID NO: 17878 - protein, 121 aa, Artificial Sequence
  Chemically Synthesized
QVQLQESGGGLVQAGGSLRLSCAASGTISAPSGMGWYRQAPGKERELVATISDGGITYYADSVKGRFTISRDNAKNTVYLQMNSLKPEDTAVYYCAAYTGRRYPGDYYSYWGQGTQVTVSS

SEQ ID NO: 17879 - protein, 118 aa, Artificial Sequence
  Chemically Synthesized
QVQLQESGGGLVQAGGSLRLSCAASGSISAPYAMGWYRQAPGKERELVATITWGGTTNYADSVKGRFTISRDNAKNTVYLQMNSLKPEDTAVYYCAAYSPDNVTHAYWGQGTQVTVSS

SEQ ID NO: 17880 - protein, 126 aa, Artificial Sequence
  Chemically Synthesized
QVQLQESGGGLVQAGGSLRLSCAASGYISSGFDMGWYRQAPGKERELVATITYGASTYYADSVKGRFTISRDNAKNTVYLQMNSLKPEDTAVYYCAADQDDSTDYLGLTFDVHDYWGQGTQVTVSS

SEQ ID NO: 17881 - protein, 127 aa, Artificial Sequence
  Chemically Synthesized
QVQLQESGGGLVQAGGSLRLSCAASGSIFEDLPMGWYRQAPGKEREFVATITDGTNTYYADSVKGRFTISRDNAKNTVYLQMNSLKPEDTAVYYCAVWAYSVRYIPDKATDWDYDYWGQGTQVTVSS

SEQ ID NO: 17882 - protein, 118 aa, Artificial Sequence
  Chemically Synthesized
QVQLQESGGGLVQAGGSLRLSCAASGNIFTPTWMGWYRQAPGKERELVAAIGQGSNTNYADSVKGRFTISRDNAKNTVYLQMNSLKPEDTAVYYCAAGRNHQQPHWYWGQGTQVTVSS

SEQ ID NO: 17883 - protein, 122 aa, Artificial Sequence
  Chemically Synthesized
QVQLQESGGGLVQAGGSLRLSCAASGNISDTTTMGWYRQAPGKEREFVASIARGGSTNYADSVKGRFTISRDNAKNTVYLQMNSLKPEDTAVYYCAVSIDYYNEVGKPYNYWGQGTQVTVSS

SEQ ID NO: 17884 - protein, 122 aa, Artificial Sequence
  Chemically Synthesized
QVQLQESGGGLVQAGGSLRLSCAASGNIFRRHYMGWYRQAPGKEREFVAGITPGSTTYYADSVKGRFTISRDNAKNTVYLQMNSLKPEDTAVYYCAVDTSTSDTANAWHGYWGQGTQVTVSS

SEQ ID NO: 17885 - protein, 118 aa, Artificial Sequence
  Chemically Synthesized
QVQLQESGGGLVQAGGSLRLSCAASGYISNGNYMGWYRQAPGKERELVASIGSGAITNYADSVKGRFTISRDNAKNTVYLQMNSLKPEDTAVYYCAAGADSTHYYIYWGQGTQVTVSS

SEQ ID NO: 17886 - protein, 118 aa, Artificial Sequence
  Chemically Synthesized
QVQLQESGGGLVQAGGSLRLSCAASGNIFVFLGMGWYRQAPGKEREFVATIDTGGTTYYADSVKGRFTISRDNAKNTVYLQMNSLKPEDTAVYYCAVYYYLYGDFAYWGQGTQVTVSS

SEQ ID NO: 17887 - protein, 117 aa, Artificial Sequence
  Chemically Synthesized
QVQLQESGGGLVQAGGSLRLSCAASGTIFSLTMGWYRQAPGKERELVAGIGDGTTTNYADSVKGRFTISRDNAKNTVYLQMNSLKPEDTAVYYCAAYVYRKDYLAYWGQGTQVTVSS

SEQ ID NO: 17888 - protein, 122 aa, Artificial Sequence
  Chemically Synthesized
QVQLQESGGGLVQAGGSLRLSCAASGTIFYYSNMGWYRQAPGKERELVAGINNGGITNYADSVKGRFTISRDNAKNTVYLQMNSLKPEDTAVYYCAADLNYDYDYTTYFSYWGQGTQVTVSS

SEQ ID NO: 17889 - protein, 118 aa, Artificial Sequence
  Chemically Synthesized
QVQLQESGGGLVQAGGSLRLSCAASGTISAGLYMGWYRQAPGKERELVATISAGTIYLYADSVKGRFTISRDNAKNTVYLQMNSLKPEDTAVYYCAAIRVYAWTFGYWGQGTQVTVSS

SEQ ID NO: 17890 - protein, 125 aa, Artificial Sequence
  Chemically Synthesized
QVQLQESGGGLVQAGGSLRLSCAASGYIFFSRDMGWYRQAPGKERELVATISGGGSTYYADSVKGRFTISRDNAKNTVYLQMNSLKPEDTAVYYCAAYDQYYYYPDYVVQDYGYWGQGTQVTVSS

SEQ ID NO: 17891 - protein, 118 aa, Artificial Sequence
  Chemically Synthesized
QVQLQESGGGLVQAGGSLRLSCAASGNISFIRTMGWYRQAPGKEREFVAGIDYGSNTYYADSVKGRFTISRDNAKNTVYLQMNSLKPEDTAVYYCAVFLYSDVVHPYWGQGTQVTVSS

SEQ ID NO: 17892 - protein, 118 aa, Artificial Sequence
  Chemically Synthesized
QVQLQESGGGLVQAGGSLRLSCAASGNIFPTSLMGWYRQAPGKERELVAGIGSGSTTNYADSVKGRFTISRDNAKNTVYLQMNSLKPEDTAVYYCAVPGFKWVRLYYWGQGTQVTVSS

SEQ ID NO: 17893 - protein, 118 aa, Artificial Sequence
  Chemically Synthesized
QVQLQESGGGLVQAGGSLRLSCAASGTIFTWDFMGWYRQAPGKERELVATIATGSTTYYADSVKGRFTISRDNAKNTVYLQMNSLKPEDTAVYYCAVTGWVGYLHYYWGQGTQVTVSS

SEQ ID NO: 17894 - protein, 113 aa, Artificial Sequence
  Chemically Synthesized
QVQLQESGGGLVQAGGSLRLSCAASGTISSDPSMGWYRQAPGKERELVAGIATGTITNYADSVKGRFTISRDNAKNTVYLQMNSLKPEDTAVYYCAAWSLNYWGQGTQVTVSS

SEQ ID NO: 17895 - protein, 117 aa, Artificial Sequence
  Chemically Synthesized
QVQLQESGGGLVQAGGSLRLSCAASGTISNATRMGWYRQAPGKERELVAAIAQGTNTNYADSVKGRFTISRDNAKNTVYLQMNSLKPEDTAVYYCAAGLINGVTLYWGQGTQVTVSS

SEQ ID NO: 17896 - protein, 122 aa, Artificial Sequence
  Chemically Synthesized
QVQLQESGGGLVQAGGSLRLSCAASGNIFFTRRMGWYRQAPGKERELVASIGVGSITNYADSVKGRFTISRDNAKNTVYLQMNSLKPEDTAVYYCAAYDGPVKDSKGRHYYWGQGTQVTVSS

SEQ ID NO: 17897 - protein, 125 aa, Artificial Sequence
  Chemically Synthesized
QVQLQESGGGLVQAGGSLRLSCAASGTIFNVGDMGWYRQAPGKEREFVATISRGGSTYYADSVKGRFTISRDNAKNTVYLQMNSLKPEDTAVYYCAAYHYSSPLVPASTVLTMYWGQGTQVTVSS

SEQ ID NO: 17898 - protein, 118 aa, Artificial Sequence
  Chemically Synthesized
QVQLQESGGGLVQAGGSLRLSCAASGNIFTLVVMGWYRQAPGKERELVAAIGIGANTNYADSVKGRFTISRDNAKNTVYLQMNSLKPEDTAVYYCAAYARGYYPLPYWGQGTQVTVSS

SEQ ID NO: 17899 - protein, 122 aa, Artificial Sequence
  Chemically Synthesized
QVQLQESGGGLVQAGGSLRLSCAASGYIFTYDSMGWYRQAPGKERELVAGITGGTSTYYADSVKGRFTISRDNAKNTVYLQMNSLKPEDTAVYYCAARDYRYYSSSQYHKYWGQGTQVTVSS

SEQ ID NO: 17900 - protein, 118 aa, Artificial Sequence
  Chemically Synthesized
QVQLQESGGGLVQAGGSLRLSCAASGTISYDQDMGWYRQAPGKERELVAAINYGATTYYADSVKGRFTISRDNAKNTVYLQMNSLKPEDTAVYYCAVAPDTYVSHDYWGQGTQVTVSS

SEQ ID NO: 17901 - protein, 116 aa, Artificial Sequence
  Chemically Synthesized
QVQLQESGGGLVQAGGSLRLSCAASGYIFASTDMGWYRQAPGKEREFVATIGAGANTNYADSVKGRFTISRDNAKNTVYLQMNSLKPEDTAVYYCAAIITWYAGYWGQGTQVTVSS

SEQ ID NO: 17902 - protein, 118 aa, Artificial Sequence
  Chemically Synthesized
QVQLQESGGGLVQAGGSLRLSCAASGSISVTYQMGWYRQAPGKEREFVASIDIGGTTNYADSVKGRFTISRDNAKNTVYLQMNSLKPEDTAVYYCAAYKYSDTTFGYWGQGTQVTVSS

SEQ ID NO: 17903 - protein, 118 aa, Artificial Sequence
  Chemically Synthesized
QVQLQESGGGLVQAGGSLRLSCAASGTIFKGYWMGWYRQAPGKEREFVAAINHGGNTNYADSVKGRFTISRDNAKNTVYLQMNSLKPEDTAVYYCAVKGDGYVFFDYWGQGTQVTVSS

SEQ ID NO: 17904 - protein, 118 aa, Artificial Sequence
  Chemically Synthesized
QVQLQESGGGLVQAGGSLRLSCAASGYISDSFYMGWYRQAPGKEREFVASIDQGGITYYADSVKGRFTISRDNAKNTVYLQMNSLKPEDTAVYYCAALTAFIRPHGYWGQGTQVTVSS

SEQ ID NO: 17905 - protein, 118 aa, Artificial Sequence
  Chemically Synthesized
QVQLQESGGGLVQAGGSLRLSCAASGNISIIWYMGWYRQAPGKERELVAAIDSGSSTNYADSVKGRFTISRDNAKNTVYLQMNSLKPEDTAVYYCAVVRYAIYDLDYWGQGTQVTVSS

SEQ ID NO: 17906 - protein, 122 aa, Artificial Sequence
  Chemically Synthesized
QVQLQESGGGLVQAGGSLRLSCAASGNIFDWPPMGWYRQAPGKERELVAAIATGSTTYYADSVKGRFTISRDNAKNTVYLQMNSLKPEDTAVYYCAAIYSYHPANADLHRYWGQGTQVTVSS

SEQ ID NO: 17907 - protein, 117 aa, Artificial Sequence
  Chemically Synthesized
QVQLQESGGGLVQAGGSLRLSCAASGTISQDTKMGWYRQAPGKEREFVAAIGRGSSTYYADSVKGRFTISRDNAKNTVYLQMNSLKPEDTAVYYCAVETYDRSHDYWGQGTQVTVSS

SEQ ID NO: 17908 - protein, 127 aa, Artificial Sequence
  Chemically Synthesized
QVQLQESGGGLVQAGGSLRLSCAASGYISVTDQMGWYRQAPGKERELVAAINSGATTYYADSVKGRFTISRDNAKNTVYLQMNSLKPEDTAVYYCAVTDENRWGYFYHFLRSRHVYWGQGTQVTVSS

SEQ ID NO: 17909 - protein, 126 aa, Artificial Sequence
  Chemically Synthesized
QVQLQESGGGLVQAGGSLRLSCAASGTIFWRDPMGWYRQAPGKERELVAAIGSGATTNYADSVKGRFTISRDNAKNTVYLQMNSLKPEDTAVYYCAVDIHDGLYASAQTTPRYPYWGQGTQVTVSS

SEQ ID NO: 17910 - protein, 118 aa, Artificial Sequence
  Chemically Synthesized
QVQLQESGGGLVQAGGSLRLSCAASGYIFAKPVMGWYRQAPGKEREFVASITFGSSTNYADSVKGRFTISRDNAKNTVYLQMNSLKPEDTAVYYCAVSGKGRDPHAYWGQGTQVTVSS

SEQ ID NO: 17911 - protein, 126 aa, Artificial Sequence
  Chemically Synthesized
QVQLQESGGGLVQAGGSLRLSCAASGNISYPHVMGWYRQAPGKERELVATISTGGTTNYADSVKGRFTISRDNAKNTVYLQMNSLKPEDTAVYYCAVVRYDARGYVDRYEFWHRYWGQGTQVTVSS

SEQ ID NO: 17912 - protein, 126 aa, Artificial Sequence
  Chemically Synthesized
QVQLQESGGGLVQAGGSLRLSCAASGYISVDTVMGWYRQAPGKERELVATINTGTITYYADSVKGRFTISRDNAKNTVYLQMNSLKPEDTAVYYCAADSPKAPTNEGDAGNTLNYWGQGTQVTVSS

SEQ ID NO: 17913 - protein, 118 aa, Artificial Sequence
  Chemically Synthesized
QVQLQESGGGLVQAGGSLRLSCAASGYIFQGDYMGWYRQAPGKEREFVAGIGYGAITYYADSVKGRFTISRDNAKNTVYLQMNSLKPEDTAVYYCAAPVHLREGYQYWGQGTQVTVSS

SEQ ID NO: 17914 - protein, 118 aa, Artificial Sequence
  Chemically Synthesized
QVQLQESGGGLVQAGGSLRLSCAASGTISQQDYMGWYRQAPGKEREFVASITYGASTNYADSVKGRFTISRDNAKNTVYLQMNSLKPEDTAVYYCAVYGDDNTILAYWGQGTQVTVSS

SEQ ID NO: 17915 - protein, 118 aa, Artificial Sequence
  Chemically Synthesized
QVQLQESGGGLVQAGGSLRLSCAASGSISYVYYMGWYRQAPGKERELVAGITYGTNTYYADSVKGRFTISRDNAKNTVYLQMNSLKPEDTAVYYCAAYIWDGYVYSYWGQGTQVTVSS

SEQ ID NO: 17916 - protein, 119 aa, Artificial Sequence
  Chemically Synthesized
QVQLQESGGGLVQAGGSLRLSCAASGTIFRAAYVMGWYRQAPGKERELVATIASGSSTYYADSVKGRFTISRDNAKNTVYLQMNSLKPEDTAVYYCAVYTYKSRAYAYWGQGTQVTVSS

SEQ ID NO: 17917 - protein, 118 aa, Artificial Sequence
  Chemically Synthesized
QVQLQESGGGLVQAGGSLRLSCAASGTISYVWYMGWYRQAPGKERELVAGITNGGNTYYADSVKGRFTISRDNAKNTVYLQMNSLKPEDTAVYYCAAYGYYGGRFSYWGQGTQVTVSS

SEQ ID NO: 17918 - protein, 122 aa, Artificial Sequence
  Chemically Synthesized
QVQLQESGGGLVQAGGSLRLSCAASGYIFTYYRMGWYRQAPGKEREFVAGITRGGSTNYADSVKGRFTISRDNAKNTVYLQMNSLKPEDTAVYYCAVEFDLGQIDGPHHYYWGQGTQVTVSS

SEQ ID NO: 17919 - protein, 117 aa, Artificial Sequence
  Chemically Synthesized
QVQLQESGGGLVQAGGSLRLSCAASGSISDDVYMGWYRQAPGKERELLPLLILVVVPYADSVKGRFTISRDNAKNTVYLQMNSLKPEDTAVYYCAAVWQRDGAYSYWGQGTQVTVSS

SEQ ID NO: 17920 - protein, 126 aa, Artificial Sequence
  Chemically Synthesized
QVQLQESGGGLVQAGGSLRLSCAASGYISRPYHMGWYRQAPGKEREFVAGIAIGANTNYADSVKGRFTISRDNAKNTVYLQMNSLKPEDTAVYYCAVLTNSLLSNRGTYRGYHAYWGQGTQVTVSS

SEQ ID NO: 17921 - protein, 126 aa, Artificial Sequence
  Chemically Synthesized
QVQLQESGGGLVQAGGSLRLSCAASGYISTLLFMGWYRQAPGKERELVAAINGGASTYYADSVKGRFTISRDNAKNTVYLQMNSLKPEDTAVYYCAVYAAAADVGGDYGYYILDYWGQGTQVTVSS

SEQ ID NO: 17922 - protein, 117 aa, Artificial Sequence
  Chemically Synthesized
QVQLQESGGGLVQAGGSLRLSCAASGYIFSHFMGWYRQAPGKEREFVAGISAGASTYYADSVKGRFTISRDNAKNTVYLQMNSLKPEDTAVYYCAAPEAGYYRHSYWGQGTQVTVSS

SEQ ID NO: 17923 - protein, 118 aa, Artificial Sequence
  Chemically Synthesized
QVQLQESGGGLVQAGGSLRLSCAASGNIFGTFYMGWYRQAPGKERELVAGITNGGNTYYADSVKGRFTISRDNAKNTVYLQMNSLKPEDTAVYYCAVYRHYGGIHRYWGQGTQVTVSS

SEQ ID NO: 17924 - protein, 126 aa, Artificial Sequence
  Chemically Synthesized
QVQLQESGGGLVQAGGSLRLSCAASGYISTFRAMGWYRQAPGKERELVATIDDGGNTNYADSVKGRFTISRDNAKNTVYLQMNSLKPEDTAVYYCAARALAYHDYDADYPNEFYYWGQGTQVTVSS

SEQ ID NO: 17925 - protein, 118 aa, Artificial Sequence
  Chemically Synthesized
QVQLQESGGGLVQAGGSLRLSCAASGSISGAWYMGWYRQAPGKERELVAGITTGTNTYYADSVKGRFTISRDNAKNTVYLQMNSLKPEDTAVYYCAAYYAVTWPHGYWGQGTQVTVSS

SEQ ID NO: 17926 - protein, 126 aa, Artificial Sequence
  Chemically Synthesized
QVQLQESGGGLVQAGGSLRLSCAASGTISVRAIMGWYRQAPGKEREFVAAIDGGGTTYYADSVKGRFTISRDNAKNTVYLQMNSLKPEDTAVYYCAAYPIYYQIGTSAQGAWHVYWGQGTQVTVSS

SEQ ID NO: 17927 - protein, 118 aa, Artificial Sequence
  Chemically Synthesized
QVQLQESGGGLVQAGGSLRLSCAASGNISLVWYMGWYRQAPGKERELVAGITYGSNTYYADSVKGRFTISRDNAKNTVYLQMNSLKPEDTAVYYCAAYDIGRRPFPYWGQGTQVTVSS

SEQ ID NO: 17928 - protein, 118 aa, Artificial Sequence
  Chemically Synthesized
QVQLQESGGGLVQAGGSLRLSCAASGTISRAWYMGWYRQAPGKERELVAGITRGTSTYYADSVKGRFTISRDNAKNTVYLQMNSLKPEDTAVYYCAVYTTITSHLTYWGQGTQVTVSS

SEQ ID NO: 17929 - protein, 118 aa, Artificial Sequence
  Chemically Synthesized
QVQLQESGGGLVQAGGSLRLSCAASGNIFGGYYMGWYRQAPGKERELVAGIAQGTNTYYADSVKGRFTISRDNAKNTVYLQMNSLKPEDTAVYYCAAFVYFGRRYTYWGQGTQVTVSS

SEQ ID NO: 17930 - protein, 126 aa, Artificial Sequence
  Chemically Synthesized
QVQLQESGGGLVQAGGSLRLSCAASGTISTFRYMGWYRQAPGKEREFVASIDYGTNTNYADSVKGRFTISRDNAKNTVYLQMNSLKPEDTAVYYCAAREDRIAYRDDIDYSVYQYWGQGTQVTVSS

SEQ ID NO: 17931 - protein, 122 aa, Artificial Sequence
  Chemically Synthesized
QVQLQESGGGLVQAGGSLRLSCAASGTIFDGHSMGWYRQAPGKEREFVASIDRGANTNYADSVKGRFTISRDNAKNTVYLQMNSLKPEDTAVYYCAVLIDTVPPQGYYFWYWGQGTQVTVSS

SEQ ID NO: 17932 - protein, 118 aa, Artificial Sequence
  Chemically Synthesized
QVQLQESGGGLVQAGGSLRLSCAASGTIFGAYLMGWYRQAPGKERELVAGIGRGTNTNYADSVKGRFTISRDNAKNTVYLQMNSLKPEDTAVYYCAVYAYRTGIYQYWGQGTQVTVSS

SEQ ID NO: 17933 - protein, 115 aa, Artificial Sequence
  Chemically Synthesized
QVQLQESGGGLVQAGGSLRLSCAASGSMGWYRQAPGKERELVATIDNGGNTNYADSVKGRFTISRDNAKNTVYLQMNSLKPEDTAVYYCAAIQETDSTTTTFIYWGQGTQVTVSS

SEQ ID NO: 17934 - protein, 118 aa, Artificial Sequence
  Chemically Synthesized
QVQLQESGGGLVQAGGSLRLSCAASGNISYFWYMGWYRQAPGKERELVAGIATGTSTYYADSVKGRFTISRDNAKNTVYLQMNSLKPEDTAVYYCAAYAYSTRGFEYWGQGTQVTVSS

SEQ ID NO: 17935 - protein, 112 aa, Artificial Sequence
  Chemically Synthesized
QVQLQESGGGLVQAGGSLRLSCAASGNIFSSDDMGWYRQAPGKEREFVASINGGATTYYADSVKGRFTISRDNAKNTVYLQMNSLKPEDTAVYYCAVSHYYWGQGTQVTVSS

SEQ ID NO: 17936 - protein, 118 aa, Artificial Sequence
  Chemically Synthesized
QVQLQESGGGLVQAGGSLRLSCAASGNISPLRTMGWYRQAPGKEREFVAGINSGASTNYADSVKGRFTISRDNAKNTVYLQMNSLKPEDTAVYYCAASPVVLDNLEYWGQGTQVTVSS

SEQ ID NO: 17937 - protein, 122 aa, Artificial Sequence
  Chemically Synthesized
QVQLQESGGGLVQAGGSLRLSCAASGTIFNVYWMGWYRQAPGKERELVAAIGTGSITYYADSVKGRFTISRDNAKNTVYLQMNSLKPEDTAVYYCAAYAYGDGWEYYVYDYWGQGTQVTVSS

SEQ ID NO: 17938 - protein, 116 aa, Artificial Sequence
  Chemically Synthesized
QVQLQESGGGLVQAGGSLRLSCAASGSISVYFIMGWYRQAPGKERELVASITDGSSTYYADSVKGRFTISRDNAKNTVYLQMNSLKPEDTAVYYCAALRRRGFAYWGQGTQVTVSS

SEQ ID NO: 17939 - protein, 122 aa, Artificial Sequence
  Chemically Synthesized
QVQLQESGGGLVQAGGSLRLSCAASGSISPKYTMGWYRQAPGKEREFVATITRGASTNYADSVKGRFTISRDNAKNTVYLQMNSLKPEDTAVYYCAARYDISFYVYYAFYYWGQGTQVTVSS

SEQ ID NO: 17940 - protein, 122 aa, Artificial Sequence
  Chemically Synthesized
QVQLQESGGGLVQAGGSLRLSCAASGTIFDNVIMGWYRQAPGKERELVAAIDYGATTYYADSVKGRFTISRDNAKNTVYLQMNSLKPEDTAVYYCAVYTVKWPYYYGYYYYWGQGTQVTVSS

SEQ ID NO: 17941 - protein, 126 aa, Artificial Sequence
  Chemically Synthesized
QVQLQESGGGLVQAGGSLRLSCAASGTISSSYPMGWYRQAPGKEREFVATIGYGATTYYADSVKGRFTISRDNAKNTVYLQMNSLKPEDTAVYYCAAYGIVRIVLPYPSIYIYWYWGQGTQVTVSS

SEQ ID NO: 17942 - protein, 122 aa, Artificial Sequence
  Chemically Synthesized
QVQLQESGGGLVQAGGSLRLSCAASGTIFAYVGMGWYRQAPGKERELVAAIDVGGTTYYADSVKGRFTISRDNAKNTVYLQMNSLKPEDTAVYYCAAYRDNYLDDGTDHPYWGQGTQVTVSS

SEQ ID NO: 17943 - protein, 118 aa, Artificial Sequence
  Chemically Synthesized
QVQLQESGGGLVQAGGSLRLSCAASGTISTGFAMGWYRQAPGKERELVATISDGGTTNYADSVKGRFTISRDNAKNTVYLQMNSLKPEDTAVYYCAAVYDYAYQLYYWGQGTQVTVSS

SEQ ID NO: 17944 - protein, 118 aa, Artificial Sequence
  Chemically Synthesized
QVQLQESGGGLVQAGGSLRLSCAASGTIFGHGTMGWYRQAPGKEREFVASISYGTTTYYADSVKGRFTISRDNAKNTVYLQMNSLKPEDTAVYYCAVYRDPRDTYWYWGQGTQVTVSS

SEQ ID NO: 17945 - protein, 118 aa, Artificial Sequence
  Chemically Synthesized
QVQLQESGGGLVQAGGSLRLSCAASGYISGYAIMGWYRQAPGKERELVATISYGSNTYYADSVKGRFTISRDNAKNTVYLQMNSLKPEDTAVYYCAAYRNETRQHYYWGQGTQVTVSS

SEQ ID NO: 17946 - protein, 118 aa, Artificial Sequence
  Chemically Synthesized
QVQLQESGGGLVQAGGSLRLSCAASGTISADRDMGWYRQAPGKEREFVATISGGSSTNYADSVKGRFTISRDNAKNTVYLQMNSLKPEDTAVYYCAVYTAPGDLHYYWGQGTQVTVSS

SEQ ID NO: 17947 - protein, 118 aa, Artificial Sequence
  Chemically Synthesized
QVQLQESGGGLVQAGGSLRLSCAASGTIFRVHNMGWYRQAPGKEREFVASISDGSTTYYADSVKGRFTISRDNAKNTVYLQMNSLKPEDTAVYYCAVNLSGVNALNYWGQGTQVTVSS

SEQ ID NO: 17948 - protein, 117 aa, Artificial Sequence
  Chemically Synthesized
QVQLQESGGGLVQAGGSLRLSCAASGYISYLGYMGWYRQAPGKERELVATIGVGANTYYADSVKGRFTISRDNAKNTVYLQMNSLKPEDTAVYYCAVFIALTYDHYWGQGTQVTVSS

SEQ ID NO: 17949 - protein, 118 aa, Artificial Sequence
  Chemically Synthesized
QVQLQESGGGLVQAGGSLRLSCAASGTISLYDIMGWYRQAPGKEREFVAGINYGSITYYADSVKGRFTISRDNAKNTVYLQMNSLKPEDTAVYYCAVLFNVSVLHQYWGQGTQVTVSS

SEQ ID NO: 17950 - protein, 117 aa, Artificial Sequence
  Chemically Synthesized
QVQLQESGGGLVQAGGSLRLSCAASGTIFQTLTMGWYRQAPGKEREFVAAIDDGATTYYADSVKGRFTISRDNAKNTVYLQMNSLKPEDTAVYYCAVGDYLDWSMYWGQGTQVTVSS

SEQ ID NO: 17951 - protein, 116 aa, Artificial Sequence
  Chemically Synthesized
QVQLQESGGGLVQAGGSLRLSCAASGYISDTYYMGWYRQAPGKEREFVAGISDVLLPYADSVKGRFTISRDNAKNTVYLQMNSLKPEDTAVYYCAATYTPEPVFYWGQGTQVTVSS

SEQ ID NO: 17952 - protein, 117 aa, Artificial Sequence
  Chemically Synthesized
QVQLQESGGGLVQAGGSLRLSCAASGNISGAQMGWYRQAPGKERELVATITGGTSTNYADSVKGRFTISRDNAKNTVYLQMNSLKPEDTAVYYCAVGYYVQAGYGYWGQGTQVTVSS

SEQ ID NO: 17953 - protein, 117 aa, Artificial Sequence
  Chemically Synthesized
QVQLQESGGGLVQAGGSLRLSCAASGTISPTTIMGWYRQAPGKERELVASIAIGSNTNYADSVKGRFTISRDNAKNTVYLQMNSLKPEDTAVYYCAVADRGESTIYWGQGTQVTVSS

SEQ ID NO: 17954 - protein, 118 aa, Artificial Sequence
  Chemically Synthesized
QVQLQESGGGLVQAGGSLRLSCAASGYIFPPDEMGWYRQAPGKEREFVATIDSGTSTNYADSVKGRFTISRDNAKNTVYLQMNSLKPEDTAVYYCAAEVPSRYNYDYWGQGTQVTVSS

SEQ ID NO: 17955 - protein, 122 aa, Artificial Sequence
  Chemically Synthesized
QVQLQESGGGLVQAGGSLRLSCAASGTIFYHFTMGWYRQAPGKERELVAAITAGGSTYYADSVKGRFTISRDNAKNTVYLQMNSLKPEDTAVYYCAVPDTYQDDYYLPHAYWGQGTQVTVSS

SEQ ID NO: 17956 - protein, 109 aa, Artificial Sequence
  Chemically Synthesized
QVQLQESGGGLVQAGGSLRLSCAASGYIFDWEYMGWYRQAPGKEREFLPLLMVVVVPYADSVKGRFTISRDNAKNTVYLQMNSLKPEDTAVYYCAADYWGQGTQVTVSS

SEQ ID NO: 17957 - protein, 117 aa, Artificial Sequence
  Chemically Synthesized
QVQLQESGGGLVQAGGSLRLSCAASGTISSLLMGWYRQAPGKEREFVASIADGAITYYADSVKGRFTISRDNAKNTVYLQMNSLKPEDTAVYYCAVDDDTATVYDYWGQGTQVTVSS

SEQ ID NO: 17958 - protein, 122 aa, Artificial Sequence
  Chemically Synthesized
QVQLQESGGGLVQAGGSLRLSCAASGTISPYDWMGWYRQAPGKEREFVASINAGGITNYADSVKGRFTISRDNAKNTVYLQMNSLKPEDTAVYYCAVQRYYGGAYHYYLPYWGQGTQVTVSS

SEQ ID NO: 17959 - protein, 121 aa, Artificial Sequence
  Chemically Synthesized
QVQLQESGGGLVQAGGSLRLSCAASGYIFTQAYMGWYRQAPGKERELVATIATGTSTYADSVKGRFTISRDNAKNTVYLQMNSLKPEDTAVYYCAVSGPWRQIGYLLFNYWGQGTQVTVSS

SEQ ID NO: 17960 - protein, 124 aa, Artificial Sequence
  Chemically Synthesized
QVQLQESGGGLVQAGGSLRLSCAASGTIFAGVMGWYRQAPGKERELVAGIGHGGITYYADSVKGRFTISRDNAKNTVYLQMNSLKPEDTAVYYCAAITSKKTRTRLTLSLTLYWGQGTQVTVSS

SEQ ID NO: 17961 - protein, 126 aa, Artificial Sequence
  Chemically Synthesized
QVQLQESGGGLVQAGGSLRLSCAASGSISVVDIMGWYRQAPGKEREFVATIDGGATTNYADSVKGRFTISRDNAKNTVYLQMNSLKPEDTAVYYCAVVGDDYTEPDIAYRPPHRYWGQGTQVTVSS

SEQ ID NO: 17962 - protein, 118 aa, Artificial Sequence
  Chemically Synthesized
QVQLQESGGGLVQAGGSLRLSCAASGNIFGPYAMGWYRQAPGKEREFVASIGLGSNTYYADSVKGRFTISRDNAKNTVYLQMNSLKPEDTAVYYCAVGDDYALYLFYWGQGTQVTVSS

SEQ ID NO: 17963 - protein, 126 aa, Artificial Sequence
  Chemically Synthesized
QVQLQESGGGLVQAGGSLRLSCAASGYIFVVGDMGWYRQAPGKEREFVAAITYGATTYYADSVKGRFTISRDNAKNTVYLQMNSLKPEDTAVYYCAVPYGDQWSYLDWLRYHHGYWGQGTQVTVSS

SEQ ID NO: 17964 - protein, 126 aa, Artificial Sequence
  Chemically Synthesized
QVQLQESGGGLVQAGGSLRLSCAASGTISGSAMGWYRQAPGKERELVATISTGTITYYADSVKGRFTISRDNAKNTVYLQMNSLKPEDTAVYYCAVPALLREWWDVGGDYATLSYWGQGTQVTVSS

SEQ ID NO: 17965 - protein, 118 aa, Artificial Sequence
  Chemically Synthesized
QVQLQESGGGLVQAGGSLRLSCAASGSISYRDRMGWYRQAPGKEREFVASINDGSSTYYADSVKGRFTISRDNAKNTVYLQMNSLKPEDTAVYYCAASVPTSNRLKYWGQGTQVTVSS

SEQ ID NO: 17966 - protein, 118 aa, Artificial Sequence
  Chemically Synthesized
QVQLQESGGGLVQAGGSLRLSCAASGSISYAPVMGWYRQAPGKERELVATITSGGNTNYADSVKGRFTISRDNAKNTVYLQMNSLKPEDTAVYYCAAIYQEDTVHVYWGQGTQVTVSS

SEQ ID NO: 17967 - protein, 126 aa, Artificial Sequence
  Chemically Synthesized
QVQLQESGGGLVQAGGSLRLSCAASGSISDGTAMGWYRQAPGKEREFVAGIGRGASTNYADSVKGRFTISRDNAKNTVYLQMNSLKPEDTAVYYCAVGAYYSTDWGSDIRAYYGYWGQGTQVTVSS

SEQ ID NO: 17968 - protein, 107 aa, Artificial Sequence
  Chemically Synthesized
QVQLQESGGGLVQAGGSLRLSCAASGNISYEHDMGWYRQAPGKEREYYADSVKGRFTISRDNAKNTVYLQMNSLKPEDTAVYYCAADQDYGYGYRYWGQGTQVTVSS

SEQ ID NO: 17969 - protein, 117 aa, Artificial Sequence
  Chemically Synthesized
QVQLQESGGGLVQAGGSLRLSCAASGTIFGWVYMGWYRQAPGKERELVAGIAGGRYLYADSVKGRFTISRDNAKNTVYLQMNSLKPEDTAVYYCAADYINSAVLRYWGQGTQVTVSS

SEQ ID NO: 17970 - protein, 115 aa, Artificial Sequence
  Chemically Synthesized
QVQLQESGGGLVQAGGSLRLSCAASGNIFDTERMGWYRQAPGKERELVAAIDWGGNTYYADSVKGRFTISRDNAKNTVYLQMNSLKPEDTAVYYCAVLSDPHDYWGQGTQVTVSS

SEQ ID NO: 17971 - protein, 115 aa, Artificial Sequence
  Chemically Synthesized
QVQLQESGGGLVQAGGSLRLSCAASGNISDIYAMGWYRQAPGKEREFVASITPGGNTYYADSVKGRFTISRDNAKNTVYLQMNSLKPEDTAVYYCAVLDGALTYWGQGTQVTVSS

SEQ ID NO: 17972 - protein, 125 aa, Artificial Sequence
  Chemically Synthesized
QVQLQESGGGLVQAGGSLRLSCAASGTISGVYSMGWYRQAPGKEREFVASINEGGNTNYADSVKGRFTISRDNAKNTVYLQMNSLKPEDTAVYYCAVNRPVQLSYSQDSLTCIYWGQGTQVTVSS

SEQ ID NO: 17973 - protein, 118 aa, Artificial Sequence
  Chemically Synthesized
QVQLQESGGGLVQAGGSLRLSCAASGYIFPDSIMGWYRQAPGKERELVATISLGAITYYADSVKGRFTISRDNAKNTVYLQMNSLKPEDTAVYYCAVYYSDATYFAYWGQGTQVTVSS

SEQ ID NO: 17974 - protein, 121 aa, Artificial Sequence
  Chemically Synthesized
QVQLQESGGGLVQAGGSLRLSCAASGLFLLRTMGWYRQAPGKERELVAGIALGANTNYADSVKGRFTISRDNAKNTVYLQMNSLKPEDTAVYYCAVGPSQSWYEGLWFAYWGQGTQVTVSS

SEQ ID NO: 17975 - protein, 116 aa, Artificial Sequence
  Chemically Synthesized
QVQLQESGGGLVQAGGSLRLSCAASGSIFWTDMGWYRQAPGKERELVAAITTGSNTYYADSVKGRFTISRDNAKNTVYLQMNSLKPEDTAVYYCAATILVDDPLYWGQGTQVTVSS

SEQ ID NO: 17976 - protein, 111 aa, Artificial Sequence
  Chemically Synthesized
QVQLQESGGGLVQAGGSLRLSCAASGSISRPGYMGWYRQAPGKEREFVASIDDGANTNYADSVKGRFTISRDNAKNTVYLQMNSLKPEDTAVYYCAALTYWGQGTQVTVSS

SEQ ID NO: 17977 - protein, 116 aa, Artificial Sequence
  Chemically Synthesized
QVQLQESGGGLVQAGGSLRLSCAASGNIFQARGMGWYRQAPGKERELVALLLVVLVPYADSVKGRFTISRDNAKNTVYLQMNSLKPEDTAVYYCAVTSTNSTLIYWGQGTQVTVSS

SEQ ID NO: 17978 - protein, 121 aa, Artificial Sequence
  Chemically Synthesized
QVQLQESGGGLVQAGGSLRLSCAASGSISEPDSMGWYRQAPGKERELVATIATGSNTYYADSVKGRFTISRDNAKNTVYLQMNSLKPEDTAVYYCAALGSTRVKTVVFFYWGQGTQVTVSS

SEQ ID NO: 17979 - protein, 108 aa, Artificial Sequence
  Chemically Synthesized
QVQLQESGGGLVQAGGSLRLSCAASGYISARYDMGWYRQAPGKEREFVAGIGTVLLPYADSVKGRFTISRDNAKNTVYLQMNSLKPEDTAVYYCALYWGQGTQVTVSS

SEQ ID NO: 17980 - protein, 111 aa, Artificial Sequence
  Chemically Synthesized
QVQLQESGGGLVQAGGSLRLSCAASGNISSSAYMGWYRQAPGKEREFVASITGGTTNYADSVKGRFTISRDNAKNTVYLQMNSLKPEDTAVYYCAVLTIYWGQGTQVTVSS

SEQ ID NO: 17981 - protein, 117 aa, Artificial Sequence
  Chemically Synthesized
QVQLQESGGGLVQAGGSLRLSCAASGNISATYIMGWYRQAPGKEREFVATISSGGITNYADSVKGRFTISRDNAKNTVYLQMNSLKPEDTAVYYCAATVSCTTFIYWGQGTQVTVSS

SEQ ID NO: 17982 - protein, 118 aa, Artificial Sequence
  Chemically Synthesized
QVQLQESGGGLVQAGGSLRLSCAASGNIFDGTFMGWYRQAPGKERELVATIDKGGTTYYADSVKGRFTISRDNAKNTVYLQMNSLKPEDTAVYYCAVRVTYQLVLTYWGQGTQVTVSS

SEQ ID NO: 17983 - protein, 116 aa, Artificial Sequence
  Chemically Synthesized
QVQLQESGGGLVQAGGSLRLSCAASGNIFDTMGWYRQAPGKERELVASISQGTNTYYADSVKGRFTISRDNAKNTVYLQMNSLKPEDTAVYYCAVELGYYSQYIYWGQGTQVTVSS

SEQ ID NO: 17984 - protein, 122 aa, Artificial Sequence
  Chemically Synthesized
QVQLQESGGGLVQAGGSLRLSCAASGNIFDYVGMGWYRQAPGKERELVAGIDIGASTNYADSVKGRFTISRDNAKNTVYLQMNSLKPEDTAVYYCAALIRNQLRNEVTLEYWGQGTQVTVSS

SEQ ID NO: 17985 - protein, 118 aa, Artificial Sequence
  Chemically Synthesized
QVQLQESGGGLVQAGGSLRLSCAASGSIFPRTDMGWYRQAPGKEREFVAAITAGTSTYYADSVKGRFTISRDNAKNTVYLQMNSLKPEDTAVYYCAARYGYFGYHGYWGQGTQVTVSS

SEQ ID NO: 17986 - protein, 118 aa, Artificial Sequence
  Chemically Synthesized
QVQLQESGGGLVQAGGSLRLSCAASGSIFVGRAMGWYRQAPGKERELVASISAGGNTYYADSVKGRFTISRDNAKNTVYLQMNSLKPEDTAVYYCAVHERADDPHYYWGQGTQVTVSS

SEQ ID NO: 17987 - protein, 122 aa, Artificial Sequence
  Chemically Synthesized
QVQLQESGGGLVQAGGSLRLSCAASGTIFVDYLMGWYRQAPGKERELVAAISYGTTTNYADSVKGRFTISRDNAKNTVYLQMNSLKPEDTAVYYCAAPLDKPGGTYFGYAYWGQGTQVTVSS

SEQ ID NO: 17988 - protein, 117 aa, Artificial Sequence
  Chemically Synthesized
QVQLQESGGGLVQAGGSLRLSCAASGNIFGIGEMGWYRQAPGKERELVASIDRGGSTYYADSVKGRFTISRDNAKNTVYLQMNSLKPEDTAVYYCAVVTRDDDYYYWGQGTQVTVSS

SEQ ID NO: 17989 - protein, 118 aa, Artificial Sequence
  Chemically Synthesized
QVQLQESGGGLVQAGGSLRLSCAASGSISDGIYMGWYRQAPGKERELVASIDGGGNTNYADSVKGRFTISRDNAKNTVYLQMNSLKPEDTAVYYCAAYRYPVGALRYWGQGTQVTVSS

SEQ ID NO: 17990 - protein, 118 aa, Artificial Sequence
  Chemically Synthesized
QVQLQESGGGLVQAGGSLRLSCAASGYISGDNGMGWYRQAPGKEREFVAAIAWGTITYYADSVKGRFTISRDNAKNTVYLQMNSLKPEDTAVYYCAARGEQYRDHSYWGQGTQVTVSS

SEQ ID NO: 17991 - protein, 118 aa, Artificial Sequence
  Chemically Synthesized
QVQLQESGGGLVQAGGSLRLSCAASGTIFRLLTMGWYRQAPGKERELVASISYGSTTNYADSVKGRFTISRDNAKNTVYLQMNSLKPEDTAVYYCAANQSDDDVHDYWGQGTQVTVSS

SEQ ID NO: 17992 - protein, 118 aa, Artificial Sequence
  Chemically Synthesized
QVQLQESGGGLVQAGGSLRLSCAASGNISLKAPMGWYRQAPGKEREFVASIARGSITYYADSVKGRFTISRDNAKNTVYLQMNSLKPEDTAVYYCAAIDNEYYYLAYWGQGTQVTVSS

SEQ ID NO: 17993 - protein, 118 aa, Artificial Sequence
  Chemically Synthesized
QVQLQESGGGLVQAGGSLRLSCAASGNISRNTDMGWYRQAPGKERELVAAINDGASTYYADSVKGRFTISRDNAKNTVYLQMNSLKPEDTAVYYCAVKRNSDYDHTYWGQGTQVTVSS

SEQ ID NO: 17994 - protein, 118 aa, Artificial Sequence
  Chemically Synthesized
QVQLQESGGGLVQAGGSLRLSCAASGNISGDYYMGWYRQAPGKEREFVAAITVGGTTNYADSVKGRFTISRDNAKNTVYLQMNSLKPEDTAVYYCAAEHQVTDRYVYWGQGTQVTVSS

SEQ ID NO: 17995 - protein, 118 aa, Artificial Sequence
  Chemically Synthesized
QVQLQESGGGLVQAGGSLRLSCAASGNIFTPRHMGWYRQAPGKERELVATISYGGTTYYADSVKGRFTISRDNAKNTVYLQMNSLKPEDTAVYYCAVAPDKFDVHAYWGQGTQVTVSS

SEQ ID NO: 17996 - protein, 115 aa, Artificial Sequence
  Chemically Synthesized
QVQLQESGGGLVQAGGSLRLSCAASGSISATYDMGWYRQAPGKEREFVVVPYADSVKGRFTISRDNAKNTVYLQMNSLKPEDTAVYYCAASIDVQPPYQWGLDYWGQGTQVTVSS

SEQ ID NO: 17997 - protein, 116 aa, Artificial Sequence
  Chemically Synthesized
QVQLQESGGGLVQAGGSLRLSCAASGNISYYLTMGWYRQAPGKERELVAAITSGANTYYADSVKGRFTISRDNAKNTVYLQMNSLKPEDTAVYYCAVKYGSYSTYWGQGTQVTVSS

SEQ ID NO: 17998 - protein, 118 aa, Artificial Sequence
  Chemically Synthesized
QVQLQESGGGLVQAGGSLRLSCAASGTISYPYYMGWYRQAPGKEREFVAGINKGSTTYYADSVKGRFTISRDNAKNTVYLQMNSLKPEDTAVYYCAVDPYYAYDHWYWGQGTQVTVSS

SEQ ID NO: 17999 - protein, 111 aa, Artificial Sequence
  Chemically Synthesized
QVQLQESGGGLVQAGGSLRLSCAASGSIFRVNMGWYRQAPGKERELVAGITTGSTTYYADSVKGRFTISRDNAKNTVYLQMNSLKPEDTAVYYCAVSRMYWGQGTQVTVSS

SEQ ID NO: 18000 - protein, 121 aa, Artificial Sequence
  Chemically Synthesized
QVQLQESGGGLVQAGGSLRLSCAASGTILRLGMGWYRQAPGKEREFVASIANGTSTYYADSVKGRFTISRDNAKNTVYLQMNSLKPEDTAVYYCAADDVRYGSRYVVHVYWGQGTQVTVSS

SEQ ID NO: 18001 - protein, 117 aa, Artificial Sequence
  Chemically Synthesized
QVQLQESGGGLVQAGGSLRLSCAASGTISGYQMGWYRQAPGKEREFVASIDIGGTTYYADSVKGRFTISRDNAKNTVYLQMNSLKPEDTAVYYCAAYRPTDLSYDYWGQGTQVTVSS

SEQ ID NO: 18002 - protein, 118 aa, Artificial Sequence
  Chemically Synthesized
QVQLQESGGGLVQAGGSLRLSCAASGTISSYYAMGWYRQAPGKERELVAGISDGGNTNYADSVKGRFTISRDNAKNTVYLQMNSLKPEDTAVYYCAVYAGSVPVFAYWGQGTQVTVSS

SEQ ID NO: 18003 - protein, 121 aa, Artificial Sequence
  Chemically Synthesized
QVQLQESGGGLVQAGGSLRLSCAASGNISYPPHMGWYRQAPGKEREFVASIADGTSTNYADSVKGRFTISRDNAKNTVYLQMNSLKPEDTAVYYCAVVFGCTVRLTLLMYWGQGTQVTVSS

SEQ ID NO: 18004 - protein, 120 aa, Artificial Sequence
  Chemically Synthesized
QVQLQESGGGLVQAGGSLRLSCAASGSISAITFMGWYRQAPGKERELVAAITRGSNTYYADSVKGRFTISRDNAKNTVYLQMNSLKPEDTAVYYCAAYVVQYETLLCMYWGQGTQVTVSS

SEQ ID NO: 18005 - protein, 117 aa, Artificial Sequence
  Chemically Synthesized
QVQLQESGGGLVQAGGSLRLSCAASGSIFLHGSMGWYRQAPGKERELVAAIGRVVVPYADSVKGRFTISRDNAKNTVYLQMNSLKPEDTAVYYCAAPYLDTPTLSYWGQGTQVTVSS

SEQ ID NO: 18006 - protein, 117 aa, Artificial Sequence
  Chemically Synthesized
QVQLQESGGGLVQAGGSLRLSCAASGNISSAADMGWYRQAPGKERELVATISAGGTTNYADSVKGRFTISRDNAKNTVYLQMNSLKPEDTAVYYCAVDYQRTIPLYWGQGTQVTVSS

SEQ ID NO: 18007 - protein, 118 aa, Artificial Sequence
  Chemically Synthesized
QVQLQESGGGLVQAGGSLRLSCAASGNISDTDDMGWYRQAPGKERELVATITGGGNTNYADSVKGRFTISRDNAKNTVYLQMNSLKPEDTAVYYCAAQPYWDHYHSYWGQGTQVTVSS

SEQ ID NO: 18008 - protein, 126 aa, Artificial Sequence
  Chemically Synthesized
QVQLQESGGGLVQAGGSLRLSCAASGNISDLEAMGWYRQAPGKEREFVAGITPGSTTYYADSVKGRFTISRDNAKNTVYLQMNSLKPEDTAVYYCAVWQDDRDEAGEAQVYDHIYWGQGTQVTVSS

SEQ ID NO: 18009 - protein, 118 aa, Artificial Sequence
  Chemically Synthesized
QVQLQESGGGLVQAGGSLRLSCAASGTISDVVFMGWYRQAPGKERELVASIAYGGTTYYADSVKGRFTISRDNAKNTVYLQMNSLKPEDTAVYYCAVDSGSQVYHGYWGQGTQVTVSS

SEQ ID NO: 18010 - protein, 109 aa, Artificial Sequence
  Chemically Synthesized
QVQLQESGGGLVQAGGSLRLSCAASGTISDTGYMGWYRQAPGKERELVAAIGSVLLPYADSVKGRFTISRDNAKNTVYLQMNSLKPEDTAVYYCAVSYWGQGTQVTVSS

SEQ ID NO: 18011 - protein, 117 aa, Artificial Sequence
  Chemically Synthesized
QVQLQESGGGLVQAGGSLRLSCAASGNIFVSRMGWYRQAPGKERELVAGIGHGATTNYADSVKGRFTISRDNAKNTVYLQMNSLKPEDTAVYYCAAYYHHDDPHHYWGQGTQVTVSS

SEQ ID NO: 18012 - protein, 118 aa, Artificial Sequence
  Chemically Synthesized
QVQLQESGGGLVQAGGSLRLSCAASGSISRGGDMGWYRQAPGKEREFVAAITYGSSTYYADSVKGRFTISRDNAKNTVYLQMNSLKPEDTAVYYCAVLLSDRVRFAYWGQGTQVTVSS

SEQ ID NO: 18013 - protein, 118 aa, Artificial Sequence
  Chemically Synthesized
QVQLQESGGGLVQAGGSLRLSCAASGSIFTYGQMGWYRQAPGKERELVASIGDGSITNYADSVKGRFTISRDNAKNTVYLQMNSLKPEDTAVYYCAVYAYSYKVHGYWGQGTQVTVSS

SEQ ID NO: 18014 - protein, 117 aa, Artificial Sequence
  Chemically Synthesized
QVQLQESGGGLVQAGGSLRLSCAASGSIFPALMGWYRQAPGKEREFVAGISGGTTTYYADSVKGRFTISRDNAKNTVYLQMNSLKPEDTAVYYCAAWGVLSFLLGYWGQGTQVTVSS

SEQ ID NO: 18015 - protein, 118 aa, Artificial Sequence
  Chemically Synthesized
QVQLQESGGGLVQAGGSLRLSCAASGNISHYVYMGWYRQAPGKEREFVATISRGTNTNYADSVKGRFTISRDNAKNTVYLQMNSLKPEDTAVYYCAVINRRRYAHGYWGQGTQVTVSS

SEQ ID NO: 18016 - protein, 118 aa, Artificial Sequence
  Chemically Synthesized
QVQLQESGGGLVQAGGSLRLSCAASGSIFYSTQMGWYRQAPGKERELVAGINVGSITNYADSVKGRFTISRDNAKNTVYLQMNSLKPEDTAVYYCAALTGYDYSHNYWGQGTQVTVSS

SEQ ID NO: 18017 - protein, 122 aa, Artificial Sequence
  Chemically Synthesized
QVQLQESGGGLVQAGGSLRLSCAASGSISTSDYMGWYRQAPGKERELVASIAIGGSTNYADSVKGRFTISRDNAKNTVYLQMNSLKPEDTAVYYCAAIVSNRSPYRPSYVYWGQGTQVTVSS

SEQ ID NO: 18018 - protein, 118 aa, Artificial Sequence
  Chemically Synthesized
QVQLQESGGGLVQAGGSLRLSCAASGNISQPYQMGWYRQAPGKEREFVAGISNGAITYYADSVKGRFTISRDNAKNTVYLQMNSLKPEDTAVYYCAANTDDDPPFFYWGQGTQVTVSS

SEQ ID NO: 18019 - protein, 122 aa, Artificial Sequence
  Chemically Synthesized
QVQLQESGGGLVQAGGSLRLSCAASGTISLQYSMGWYRQAPGKERELVATIDYGGSTYYADSVKGRFTISRDNAKNTVYLQMNSLKPEDTAVYYCAAAVEYYHGGNPVHQYWGQGTQVTVSS

SEQ ID NO: 18020 - protein, 118 aa, Artificial Sequence
  Chemically Synthesized
QVQLQESGGGLVQAGGSLRLSCAASGTIFAKLYMGWYRQAPGKERELVASISVGSSTYYADSVKGRFTISRDNAKNTVYLQMNSLKPEDTAVYYCAAADQRSDPFEYWGQGTQVTVSS

SEQ ID NO: 18021 - protein, 118 aa, Artificial Sequence
  Chemically Synthesized
QVQLQESGGGLVQAGGSLRLSCAASGTISTLLYMGWYRQAPGKEREFVAGITGGSNTYYADSVKGRFTISRDNAKNTVYLQMNSLKPEDTAVYYCAVDGKNDLALGYWGQGTQVTVSS

SEQ ID NO: 18022 - protein, 122 aa, Artificial Sequence
  Chemically Synthesized
QVQLQESGGGLVQAGGSLRLSCAASGTISATYYMGWYRQAPGKERELVAGITPGTSTYYADSVKGRFTISRDNAKNTVYLQMNSLKPEDTAVYYCAVDQLPDRNVWYLLTYWGQGTQVTVSS

SEQ ID NO: 18023 - protein, 118 aa, Artificial Sequence
  Chemically Synthesized
QVQLQESGGGLVQAGGSLRLSCAASGSIFVIRNMGWYRQAPGKERELVASISAGANTYYADSVKGRFTISRDNAKNTVYLQMNSLKPEDTAVYYCAVADDSGHLYPYWGQGTQVTVSS

SEQ ID NO: 18024 - protein, 117 aa, Artificial Sequence
  Chemically Synthesized
QVQLQESGGGLVQAGGSLRLSCAASGTIFDLVFMGWYRQAPGKERELVASIGLGSNTYYADSVKGRFTISRDNAKNTVYLQMNSLKPEDTAVYYCAATYFYAYELYWGQGTQVTVSS

SEQ ID NO: 18025 - protein, 122 aa, Artificial Sequence
  Chemically Synthesized
QVQLQESGGGLVQAGGSLRLSCAASGYISTRYLMGWYRQAPGKEREFVATISGGSTTYYADSVKGRFTISRDNAKNTVYLQMNSLKPEDTAVYYCAVYGTTSQRAYEALWYWGQGTQVTVSS

SEQ ID NO: 18026 - protein, 126 aa, Artificial Sequence
  Chemically Synthesized
QVQLQESGGGLVQAGGSLRLSCAASGSIFYTTSMGWYRQAPGKERELVASITYGSITNYADSVKGRFTISRDNAKNTVYLQMNSLKPEDTAVYYCAVWRVVGYRSTPRTWDDYYYWGQGTQVTVSS

SEQ ID NO: 18027 - protein, 117 aa, Artificial Sequence
  Chemically Synthesized
QVQLQESGGGLVQAGGSLRLSCAASGSILKKLMGWYRQAPGKERELVASINTGSSTNYADSVKGRFTISRDNAKNTVYLQMNSLKPEDTAVYYCAVYRPTITTYDYWGQGTQVTVSS

SEQ ID NO: 18028 - protein, 126 aa, Artificial Sequence
  Chemically Synthesized
QVQLQESGGGLVQAGGSLRLSCAASGNISRTVGMGWYRQAPGKEREFVATISSGASTNYADSVKGRFTISRDNAKNTVYLQMNSLKPEDTAVYYCAVDVYYGSQPAWLLVDAFGYWGQGTQVTVSS

SEQ ID NO: 18029 - protein, 126 aa, Artificial Sequence
  Chemically Synthesized
QVQLQESGGGLVQAGGSLRLSCAASGTISFDSDMGWYRQAPGKERELVATIDDGTSTNYADSVKGRFTISRDNAKNTVYLQMNSLKPEDTAVYYCAAVEAYDDDDVDAYGGDHFYWGQGTQVTVSS

SEQ ID NO: 18030 - protein, 118 aa, Artificial Sequence
  Chemically Synthesized
QVQLQESGGGLVQAGGSLRLSCAASGTISHDLAMGWYRQAPGKERELVAGIGSGASTNYADSVKGRFTISRDNAKNTVYLQMNSLKPEDTAVYYCAVSWHYDGNHSYWGQGTQVTVSS

SEQ ID NO: 18031 - protein, 118 aa, Artificial Sequence
  Chemically Synthesized
QVQLQESGGGLVQAGGSLRLSCAASGTIFDAETMGWYRQAPGKERELVAAINEGTSTYYADSVKGRFTISRDNAKNTVYLQMNSLKPEDTAVYYCAAYGYTKIALGYWGQGTQVTVSS

SEQ ID NO: 18032 - protein, 117 aa, Artificial Sequence
  Chemically Synthesized
QVQLQESGGGLVQAGGSLRLSCAASGLGMGWYRQAPGKEREFVASISRGTTTNYADSVKGRFTISRDNAKNTVYLQMNSLKPEDTAVYYCAVEVDRPHGRSYVFGYWGQGTQVTVSS

SEQ ID NO: 18033 - protein, 126 aa, Artificial Sequence
  Chemically Synthesized
QVQLQESGGGLVQAGGSLRLSCAASGSIFQDLVMGWYRQAPGKEREFVAAISNGGSTYYADSVKGRFTISRDNAKNTVYLQMNSLKPEDTAVYYCAAFGDRGVNVYPASIQYLEYWGQGTQVTVSS

SEQ ID NO: 18034 - protein, 118 aa, Artificial Sequence
  Chemically Synthesized
QVQLQESGGGLVQAGGSLRLSCAASGTISYSHYMGWYRQAPGKEREFVAGITGGGNTNYADSVKGRFTISRDNAKNTVYLQMNSLKPEDTAVYYCAVYRAYVRDHNYWGQGTQVTVSS

SEQ ID NO: 18035 - protein, 122 aa, Artificial Sequence
  Chemically Synthesized
QVQLQESGGGLVQAGGSLRLSCAASGNISPWVYMGWYRQAPGKEREFVATIDVGSNTYYADSVKGRFTISRDNAKNTVYLQMNSLKPEDTAVYYCAASHPDTGSRLWKLYYWGQGTQVTVSS

SEQ ID NO: 18036 - protein, 118 aa, Artificial Sequence
  Chemically Synthesized
QVQLQESGGGLVQAGGSLRLSCAASGTIFDAVYMGWYRQAPGKEREFVAAIDSGATTYYADSVKGRFTISRDNAKNTVYLQMNSLKPEDTAVYYCAAYPFGGPYHGYWGQGTQVTVSS

SEQ ID NO: 18037 - protein, 117 aa, Artificial Sequence
  Chemically Synthesized
QVQLQESGGGLVQAGGSLRLSCAASGNIFYDPAMGWYRQAPGKERELVAGIDVGAITNYADSVKGRFTISRDNAKNTVYLQMNSLKPEDTAVYYCAAVGPDSRTLYWGQGTQVTVSS

SEQ ID NO: 18038 - protein, 121 aa, Artificial Sequence
  Chemically Synthesized
QVQLQESGGGLVQAGGSLRLSCAASGNISSDHYMGWYRQAPGKEREFVAAITYGSTTYYADSVKGRFTISRDNAKNTVYLQMNSLKPEDTAVYYCAVPYFYSDVYDSSMYWGQGTQVTVSS

SEQ ID NO: 18039 - protein, 125 aa, Artificial Sequence
  Chemically Synthesized
QVQLQESGGGLVQAGGSLRLSCAASGSIFASSMGWYRQAPGKERELVASISTGGTTNYADSVKGRFTISRDNAKNTVYLQMNSLKPEDTAVYYCAVAEYPRATQSFVRWPAYVYWGQGTQVTVSS

SEQ ID NO: 18040 - protein, 118 aa, Artificial Sequence
  Chemically Synthesized
QVQLQESGGGLVQAGGSLRLSCAASGTISDGGYMGWYRQAPGKERELVAGIGSGAITYYADSVKGRFTISRDNAKNTVYLQMNSLKPEDTAVYYCAARDRGADALYYWGQGTQVTVSS

SEQ ID NO: 18041 - protein, 118 aa, Artificial Sequence
  Chemically Synthesized
QVQLQESGGGLVQAGGSLRLSCAASGYIFVNVVMGWYRQAPGKEREFVASIAGGSTTYYADSVKGRFTISRDNAKNTVYLQMNSLKPEDTAVYYCAAYGKDIRALDYWGQGTQVTVSS

SEQ ID NO: 18042 - protein, 117 aa, Artificial Sequence
  Chemically Synthesized
QVQLQESGGGLVQAGGSLRLSCAASGSISWYGGMGWYRQAPGKERELVATINSVLIPYADSVKGRFTISRDNAKNTVYLQMNSLKPEDTAVYYCAVLLSTVFVLEYWGQGTQVTVSS

SEQ ID NO: 18043 - protein, 121 aa, Artificial Sequence
  Chemically Synthesized
QVQLQESGGGLVQAGGSLRLSCAASGYISPSWMGWYRQAPGKERELVATIDAGSITNYADSVKGRFTISRDNAKNTVYLQMNSLKPEDTAVYYCAAQQYWSYFVVYYLGYWGQGTQVTVSS

SEQ ID NO: 18044 - protein, 120 aa, Artificial Sequence
  Chemically Synthesized
QVQLQESGGGLVQAGGSLRLSCAASGTIFSVYVMGWYRQAPGKERELVASIGEGSTTNYADSVKGRFTISRDNAKNTVYLQMNSLKPEDTAVYYCAVTVDNEIATLTMYWGQGTQVTVSS

SEQ ID NO: 18045 - protein, 118 aa, Artificial Sequence
  Chemically Synthesized
QVQLQESGGGLVQAGGSLRLSCAASGTIFIFGRMGWYRQAPGKERELVASINYGGITYYADSVKGRFTISRDNAKNTVYLQMNSLKPEDTAVYYCAVYYALVGRHVYWGQGTQVTVSS

SEQ ID NO: 18046 - protein, 122 aa, Artificial Sequence
  Chemically Synthesized
QVQLQESGGGLVQAGGSLRLSCAASGNIFIAGEMGWYRQAPGKERELVASIGYGGNTNYADSVKGRFTISRDNAKNTVYLQMNSLKPEDTAVYYCAARRGPDSGWDVRFDYWGQGTQVTVSS

SEQ ID NO: 18047 - protein, 121 aa, Artificial Sequence
  Chemically Synthesized
QVQLQESGGGLVQAGGSLRLSCAASGNIFSLNMGWYRQAPGKEREFVAGINWGGSTNYADSVKGRFTISRDNAKNTVYLQMNSLKPEDTAVYYCAAIRWRTRRGYVDYDYWGQGTQVTVSS

SEQ ID NO: 18048 - protein, 118 aa, Artificial Sequence
  Chemically Synthesized
QVQLQESGGGLVQAGGSLRLSCAASGNIFRYYLMGWYRQAPGKERELVATIGYGTSTNYADSVKGRFTISRDNAKNTVYLQMNSLKPEDTAVYYCAVFDIGNPDLFYWGQGTQVTVSS

SEQ ID NO: 18049 - protein, 122 aa, Artificial Sequence
  Chemically Synthesized
QVQLQESGGGLVQAGGSLRLSCAASGTISSSLLMGWYRQAPGKERELVASISGGAITYYADSVKGRFTISRDNAKNTVYLQMNSLKPEDTAVYYCAVIPYSTHSARDAHYYWGQGTQVTVSS

SEQ ID NO: 18050 - protein, 121 aa, Artificial Sequence
  Chemically Synthesized
QVQLQESGGGLVQAGGSLRLSCAASGNIFLTLMGWYRQAPGKEREFVASINVGGITNYADSVKGRFTISRDNAKNTVYLQMNSLKPEDTAVYYCAAVQYEWDLVHVYHLYWGQGTQVTVSS

SEQ ID NO: 18051 - protein, 122 aa, Artificial Sequence
  Chemically Synthesized
QVQLQESGGGLVQAGGSLRLSCAASGSIFPRDTMGWYRQAPGKEREFVAGIDYGTTTNYADSVKGRFTISRDNAKNTVYLQMNSLKPEDTAVYYCAAQNGEYPYDAYDHYYWGQGTQVTVSS

SEQ ID NO: 18052 - protein, 118 aa, Artificial Sequence
  Chemically Synthesized
QVQLQESGGGLVQAGGSLRLSCAASGSISDYYLMGWYRQAPGKEREFVAAIADGTSTYYADSVKGRFTISRDNAKNTVYLQMNSLKPEDTAVYYCAAYTGVYILHLYWGQGTQVTVSS

SEQ ID NO: 18053 - protein, 121 aa, Artificial Sequence
  Chemically Synthesized
QVQLQESGGGLVQAGGSLRLSCAASGSIFSRHMGWYRQAPGKERELVATINRGGNTNYADSVKGRFTISRDNAKNTVYLQMNSLKPEDTAVYYCAVWYVDSDYRTYGHGYWGQGTQVTVSS

SEQ ID NO: 18054 - protein, 117 aa, Artificial Sequence
  Chemically Synthesized
QVQLQESGGGLVQAGGSLRLSCAASGSISATSVMGWYRQAPGKEREFVAGIAGVVLPYADSVKGRFTISRDNAKNTVYLQMNSLKPEDTAVYYCAVYWDIDYFHFYWGQGTQVTVSS

SEQ ID NO: 18055 - protein, 117 aa, Artificial Sequence
  Chemically Synthesized
QVQLQESGGGLVQAGGSLRLSCAASGTISNGRIMGWYRQAPGKEREFVAGIGRGTNTYYADSVKGRFTISRDNAKNTVYLQMNSLKPEDTAVYYCAVPQGDYSSFYWGQGTQVTVSS

SEQ ID NO: 18056 - protein, 117 aa, Artificial Sequence
  Chemically Synthesized
QVQLQESGGGLVQAGGSLRLSCAASGTISYSLMGWYRQAPGKEREFVASIGTGASTYYADSVKGRFTISRDNAKNTVYLQMNSLKPEDTAVYYCAAGDDEPADLDYWGQGTQVTVSS

SEQ ID NO: 18057 - protein, 117 aa, Artificial Sequence
  Chemically Synthesized
QVQLQESGGGLVQAGGSLRLSCAASGSIFYRLMGWYRQAPGKEREFVAAINGGSTTNYADSVKGRFTISRDNAKNTVYLQMNSLKPEDTAVYYCAAIDFDAYYFSYWGQGTQVTVSS

SEQ ID NO: 18058 - protein, 121 aa, Artificial Sequence
  Chemically Synthesized
QVQLQESGGGLVQAGGSLRLSCAASGSIFRQTNMGWYRQAPGKEREFVATIDGGNTNYADSVKGRFTISRDNAKNTVYLQMNSLKPEDTAVYYCAVTRTLVFGHVYRHDYWGQGTQVTVSS

SEQ ID NO: 18059 - protein, 111 aa, Artificial Sequence
  Chemically Synthesized
QVQLQESGGGLVQAGGSLRLSCAASGTIFGDRMGWYRQAPGKEREFVAGITGGTSTYYADSVKGRFTISRDNAKNTVYLQMNSLKPEDTAVYYCALVCLYWGQGTQVTVSS

SEQ ID NO: 18060 - protein, 117 aa, Artificial Sequence
  Chemically Synthesized
QVQLQESGGGLVQAGGSLRLSCAASGNISGVTDMGWYRQAPGKERELVAGIGIGSNTNYADSVKGRFTISRDNAKNTVYLQMNSLKPEDTAVYYCAALERQSLTIYWGQGTQVTVSS

SEQ ID NO: 18061 - protein, 117 aa, Artificial Sequence
  Chemically Synthesized
QVQLQESGGGLVQAGGSLRLSCAASGSIFRSRMGWYRQAPGKEREFVATIDVGATTYYADSVKGRFTISRDNAKNTVYLQMNSLKPEDTAVYYCAVNDYSVGYFTYWGQGTQVTVSS

SEQ ID NO: 18062 - protein, 126 aa, Artificial Sequence
  Chemically Synthesized
QVQLQESGGGLVQAGGSLRLSCAASGYISVRDYMGWYRQAPGKEREFVAAITAGGTTYYADSVKGRFTISRDNAKNTVYLQMNSLKPEDTAVYYCAAGRRDQIARYRAVHLDHRYWGQGTQVTVSS

SEQ ID NO: 18063 - protein, 118 aa, Artificial Sequence
  Chemically Synthesized
QVQLQESGGGLVQAGGSLRLSCAASGNISGDENMGWYRQAPGKERELVAAISVGATTYYADSVKGRFTISRDNAKNTVYLQMNSLKPEDTAVYYCAAVNVNYGYFGYWGQGTQVTVSS

SEQ ID NO: 18064 - protein, 123 aa, Artificial Sequence
  Chemically Synthesized
QVQLQESGGGLVQAGGSLRLSCAASGSIFVSTWWDMGWYRQAPGKEREFVAGINSVVVPYADSVKGRFTISRDNAKNTVYLQMNSLKPEDTAVYYCAADYQKRPTDYGAHPYWGQGTQVTVSS

SEQ ID NO: 18065 - protein, 118 aa, Artificial Sequence
  Chemically Synthesized
QVQLQESGGGLVQAGGSLRLSCAASGNISAGYDMGWYRQAPGKEREFVATIDYGATTNYADSVKGRFTISRDNAKNTVYLQMNSLKPEDTAVYYCAAYPRVDPYHGYWGQGTQVTVSS

SEQ ID NO: 18066 - protein, 117 aa, Artificial Sequence
  Chemically Synthesized
QVQLQESGGGLVQAGGSLRLSCAASGTISFNDYMGWYRQAPGKERELVAAIAGGGSTNYADSVKGRFTISRDNAKNTVYLQMNSLKPEDTAVYYCAVFPLEYNYYYWGQGTQVTVSS

SEQ ID NO: 18067 - protein, 117 aa, Artificial Sequence
  Chemically Synthesized
QVQLQESGGGLVQAGGSLRLSCAASGTIFWHDVMGWYRQAPGKERELVASMVVVLVPYADSVKGRFTISRDNAKNTVYLQMNSLKPEDTAVYYCAAWRVQVYEHDYWGQGTQVTVSS

SEQ ID NO: 18068 - protein, 122 aa, Artificial Sequence
  Chemically Synthesized
QVQLQESGGGLVQAGGSLRLSCAASGYISWPAVMGWYRQAPGKEREFVAAIGGGSSTNYADSVKGRFTISRDNAKNTVYLQMNSLKPEDTAVYYCAAYVYAYQSIQNALRYWGQGTQVTVSS

SEQ ID NO: 18069 - protein, 118 aa, Artificial Sequence
  Chemically Synthesized
QVQLQESGGGLVQAGGSLRLSCAASGYIFVGDQMGWYRQAPGKERELVASIAYGGTTYYADSVKGRFTISRDNAKNTVYLQMNSLKPEDTAVYYCAVYRVSYGSYVYWGQGTQVTVSS

SEQ ID NO: 18070 - protein, 122 aa, Artificial Sequence
  Chemically Synthesized
QVQLQESGGGLVQAGGSLRLSCAASGSISARAGMGWYRQAPGKERELVAGIATGGITNYADSVKGRFTISRDNAKNTVYLQMNSLKPEDTAVYYCAAWFLPYRPSVWRYDYWGQGTQVTVSS

SEQ ID NO: 18071 - protein, 122 aa, Artificial Sequence
  Chemically Synthesized
QVQLQESGGGLVQAGGSLRLSCAASGSIFETTWMGWYRQAPGKERELVAAIAFGTNTNYADSVKGRFTISRDNAKNTVYLQMNSLKPEDTAVYYCAATYYISEGYEDSHFYWGQGTQVTVSS

SEQ ID NO: 18072 - protein, 117 aa, Artificial Sequence
  Chemically Synthesized
QVQLQESGGGLVQAGGSLRLSCAASGTIFLPLMGWYRQAPGKERELVATIAFGAITNYADSVKGRFTISRDNAKNTVYLQMNSLKPEDTAVYYCAVTYRQSLQLSYWGQGTQVTVSS

SEQ ID NO: 18073 - protein, 125 aa, Artificial Sequence
  Chemically Synthesized
QVQLQESGGGLVQAGGSLRLSCAASGNILTFIMGWYRQAPGKERELVATIDDGGTTYYADSVKGRFTISRDNAKNTVYLQMNSLKPEDTAVYYCAARPGLDWGYVYQDTDYHYYWGQGTQVTVSS

SEQ ID NO: 18074 - protein, 111 aa, Artificial Sequence
  Chemically Synthesized
QVQLQESGGGLVQAGGSLRLSCAASGYISGKDDMGWYRQAPGKERELVAGITSGASTNYADSVKGRFTISRDNAKNTVYLQMNSLKPEDTAVYYCAVYAYWGQGTQVTVSS

SEQ ID NO: 18075 - protein, 118 aa, Artificial Sequence
  Chemically Synthesized
QVQLQESGGGLVQAGGSLRLSCAASGTIFAKDIMGWYRQAPGKEREFVAGIGDGASTYYADSVKGRFTISRDNAKNTVYLQMNSLKPEDTAVYYCAVRTGYAYQHEYWGQGTQVTVSS

SEQ ID NO: 18076 - protein, 125 aa, Artificial Sequence
  Chemically Synthesized
QVQLQESGGGLVQAGGSLRLSCAASGNISVLQVMGWYRQAPGKERELVAAIGWGGITNYADSVKGRFTISRDNAKNTVYLQMNSLKPEDTAVYYCAVVGYNQYYDRWVDRLSIYWGQGTQVTVSS

SEQ ID NO: 18077 - protein, 117 aa, Artificial Sequence
  Chemically Synthesized
QVQLQESGGGLVQAGGSLRLSCAASGNIFGYDTMGWYRQAPGKEREFVATIASVVVPYADSVKGRFTISRDNAKNTVYLQMNSLKPEDTAVYYCAVYDRWQDQHKYWGQGTQVTVSS

SEQ ID NO: 18078 - protein, 117 aa, Artificial Sequence
  Chemically Synthesized
QVQLQESGGGLVQAGGSLRLSCAASGTIFYRPFMGWYRQAPGKEREFVATIGWGSNTNYADSVKGRFTISRDNAKNTVYLQMNSLKPEDTAVYYCAVDDGGTGAHYWGQGTQVTVSS

SEQ ID NO: 18079 - protein, 116 aa, Artificial Sequence
  Chemically Synthesized
QVQLQESGGGLVQAGGSLRLSCAASGTIFYWRGMGWYRQAPGKERELVALIRVLIPYADSVKGRFTISRDNAKNTVYLQMNSLKPEDTAVYYCAAFAEHFYVHQYWGQGTQVTVSS

SEQ ID NO: 18080 - protein, 117 aa, Artificial Sequence
  Chemically Synthesized
QVQLQESGGGLVQAGGSLRLSCAASGSISWYSMGWYRQAPGKEREFVATIAGGATTNYADSVKGRFTISRDNAKNTVYLQMNSLKPEDTAVYYCAVYVGYDLGHTYWGQGTQVTVSS

SEQ ID NO: 18081 - protein, 117 aa, Artificial Sequence
  Chemically Synthesized
QVQLQESGGGLVQAGGSLRLSCAASGTISVVQSMGWYRQAPGKEREFVASINTGTTTYYADSVKGRFTISRDNAKNTVYLQMNSLKPEDTAVYYCAAYRATSTVFYWGQGTQVTVSS

SEQ ID NO: 18082 - protein, 125 aa, Artificial Sequence
  Chemically Synthesized
QVQLQESGGGLVQAGGSLRLSCAASGNISRSDIMGWYRQAPGKERELVASIASGTITYYADSVKGRFTISRDNAKNTVYLQMNSLKPEDTAVYYCAVTSKPYWYATYHGDTHRYWGQGTQVTVSS

SEQ ID NO: 18083 - protein, 122 aa, Artificial Sequence
  Chemically Synthesized
QVQLQESGGGLVQAGGSLRLSCAASGSISYYVGMGWYRQAPGKEREFVASIALGASTNYADSVKGRFTISRDNAKNTVYLQMNSLKPEDTAVYYCAVPHIDTTYEEGYFFYWGQGTQVTVSS

SEQ ID NO: 18084 - protein, 121 aa, Artificial Sequence
  Chemically Synthesized
QVQLQESGGGLVQAGGSLRLSCAASGTISRRYYMGWYRQAPGKEREFVAAIGKVLIPYADSVKGRFTISRDNAKNTVYLQMNSLKPEDTAVYYCAVIYPPWRGYFPDFLYWGQGTQVTVSS

SEQ ID NO: 18085 - protein, 117 aa, Artificial Sequence
  Chemically Synthesized
QVQLQESGGGLVQAGGSLRLSCAASGNIFPRTMGWYRQAPGKEREFVAGIDTGATTYYADSVKGRFTISRDNAKNTVYLQMNSLKPEDTAVYYCAVNRPYQPRFSYWGQGTQVTVSS

SEQ ID NO: 18086 - protein, 118 aa, Artificial Sequence
  Chemically Synthesized
QVQLQESGGGLVQAGGSLRLSCAASGYIFDQNTMGWYRQAPGKERELVAAISWGTTTNYADSVKGRFTISRDNAKNTVYLQMNSLKPEDTAVYYCAADPYYYNDHNYWGQGTQVTVSS

SEQ ID NO: 18087 - protein, 118 aa, Artificial Sequence
  Chemically Synthesized
QVQLQESGGGLVQAGGSLRLSCAASGYISIAPEMGWYRQAPGKERELVATIDAGTNTYYADSVKGRFTISRDNAKNTVYLQMNSLKPEDTAVYYCAAIVNPYYDYGYWGQGTQVTVSS

SEQ ID NO: 18088 - protein, 117 aa, Artificial Sequence
  Chemically Synthesized
QVQLQESGGGLVQAGGSLRLSCAASGSIFVWYTMGWYRQAPGKERELVAAIGTGGITNYADSVKGRFTISRDNAKNTVYLQMNSLKPEDTAVYYCALTTERSRHRYWGQGTQVTVSS

SEQ ID NO: 18089 - protein, 118 aa, Artificial Sequence
  Chemically Synthesized
QVQLQESGGGLVQAGGSLRLSCAASGYISALWDMGWYRQAPGKEREFVAGINYRWYYLYADSVKGRFTISRDNAKNTVYLQMNSLKPEDTAVYYCAVLYHLDYDLAYWGQGTQVTVSS

SEQ ID NO: 18090 - protein, 118 aa, Artificial Sequence
  Chemically Synthesized
QVQLQESGGGLVQAGGSLRLSCAASGNISTHGYMGWYRQAPGKERELVATITTGGSTNYADSVKGRFTISRDNAKNTVYLQMNSLKPEDTAVYYCAVYFAPDGYHAYWGQGTQVTVSS

SEQ ID NO: 18091 - protein, 126 aa, Artificial Sequence
  Chemically Synthesized
QVQLQESGGGLVQAGGSLRLSCAASGYISPYGAMGWYRQAPGKEREFVAGISSGGNTNYADSVKGRFTISRDNAKNTVYLQMNSLKPEDTAVYYCAARARWEEDVNNRIVDYLWYWGQGTQVTVSS

SEQ ID NO: 18092 - protein, 112 aa, Artificial Sequence
  Chemically Synthesized
QVQLQESGGGLVQAGGSLRLSCAASGYMGWYRQAPGKERELVAGIAIGAITNYADSVKGRFTISRDNAKNTVYLQMNSLKPEDTAVYYCAAGRLSGDTYEYWGQGTQVTVSS

SEQ ID NO: 18093 - protein, 125 aa, Artificial Sequence
  Chemically Synthesized
QVQLQESGGGLVQAGGSLRLSCAASGTIFLLSMGWYRQAPGKERELVAGISIGASTYYADSVKGRFTISRDNAKNTVYLQMNSLKPEDTAVYYCAAYYDAFDYPDDGYTSAHQYWGQGTQVTVSS

SEQ ID NO: 18094 - protein, 118 aa, Artificial Sequence
  Chemically Synthesized
QVQLQESGGGLVQAGGSLRLSCAASGTIFHIAYMGWYRQAPGKEREFVASINWGGTTNYADSVKGRFTISRDNAKNTVYLQMNSLKPEDTAVYYCAAPWWTTDRLSYWGQGTQVTVSS

SEQ ID NO: 18095 - protein, 121 aa, Artificial Sequence
  Chemically Synthesized
QVQLQESGGGLVQAGGSLRLSCAASGNISPYLEMGWYRQAPGKEREFVAAISRGATTNYADSVKGRFTISRDNAKNTVYLQMNSLKPEDTAVYYCAVYRTVDLSLVTSMYWGQGTQVTVSS

SEQ ID NO: 18096 - protein, 118 aa, Artificial Sequence
  Chemically Synthesized
QVQLQESGGGLVQAGGSLRLSCAASGTISYQYHMGWYRQAPGKERELVAAIGYGSTTYYADSVKGRFTISRDNAKNTVYLQMNSLKPEDTAVYYCAVYVVTYHNYGYWGQGTQVTVSS

SEQ ID NO: 18097 - protein, 122 aa, Artificial Sequence
  Chemically Synthesized
QVQLQESGGGLVQAGGSLRLSCAASGSIFPTYYMGWYRQAPGKERELVASITTGTITYYADSVKGRFTISRDNAKNTVYLQMNSLKPEDTAVYYCAARYVLLDRVDYIFGYWGQGTQVTVSS

SEQ ID NO: 18098 - protein, 117 aa, Artificial Sequence
  Chemically Synthesized
QVQLQESGGGLVQAGGSLRLSCAASGNISDAPNMGWYRQAPGKERELVAGIDDGSTTNYADSVKGRFTISRDNAKNTVYLQMNSLKPEDTAVYYCAVDWSIILIMYWGQGTQVTVSS

SEQ ID NO: 18099 - protein, 117 aa, Artificial Sequence
  Chemically Synthesized
QVQLQESGGGLVQAGGSLRLSCAASGSISRRHYMGWYRQAPGKERELVAAIMVVLLPYADSVKGRFTISRDNAKNTVYLQMNSLKPEDTAVYYCAVDYRGWGVLAYWGQGTQVTVSS

SEQ ID NO: 18100 - protein, 126 aa, Artificial Sequence
  Chemically Synthesized
QVQLQESGGGLVQAGGSLRLSCAASGTISGIAYMGWYRQAPGKERELVAAIDYGANTYYADSVKGRFTISRDNAKNTVYLQMNSLKPEDTAVYYCAVAYQYYDVIYRSGIVYLWYWGQGTQVTVSS

SEQ ID NO: 18101 - protein, 118 aa, Artificial Sequence
  Chemically Synthesized
QVQLQESGGGLVQAGGSLRLSCAASGSISWAVYMGWYRQAPGKEREFVAGIGLGGTTYYADSVKGRFTISRDNAKNTVYLQMNSLKPEDTAVYYCAVEQIWSVGHLYWGQGTQVTVSS

SEQ ID NO: 18102 - protein, 120 aa, Artificial Sequence
  Chemically Synthesized
QVQLQESGGGLVQAGGSLRLSCAASGYIFGRSNMGWYRQAPGKERELVAAIAAGSNTYYADSVKGRFTISRDNAKNTVYLQMNSLKPEDTAVYYCAVYSDFLYSYTLVYWGQGTQVTVSS

SEQ ID NO: 18103 - protein, 125 aa, Artificial Sequence
  Chemically Synthesized
QVQLQESGGGLVQAGGSLRLSCAASGSISVAADMGWYRQAPGKERELVASINGGGSTNYADSVKGRFTISRDNAKNTVYLQMNSLKPEDTAVYYCAVDYGYWSRALNGTTTRIYWGQGTQVTVSS

SEQ ID NO: 18104 - protein, 117 aa, Artificial Sequence
  Chemically Synthesized
QVQLQESGGGLVQAGGSLRLSCAASGYISPPYMGWYRQAPGKERELVAAIDDGAITYYADSVKGRFTISRDNAKNTVYLQMNSLKPEDTAVYYCAVSPQAYDDFAYWGQGTQVTVSS

SEQ ID NO: 18105 - protein, 118 aa, Artificial Sequence
  Chemically Synthesized
QVQLQESGGGLVQAGGSLRLSCAASGSISGRRVMGWYRQAPGKEREFVAAIATGTSTNYADSVKGRFTISRDNAKNTVYLQMNSLKPEDTAVYYCAVRRRYPYRHTYWGQGTQVTVSS

SEQ ID NO: 18106 - protein, 118 aa, Artificial Sequence
  Chemically Synthesized
QVQLQESGGGLVQAGGSLRLSCAASGYISVAHSMGWYRQAPGKEREFVAAISDGGNTYYADSVKGRFTISRDNAKNTVYLQMNSLKPEDTAVYYCAASNLIAPSHWYWGQGTQVTVSS

SEQ ID NO: 18107 - protein, 126 aa, Artificial Sequence
  Chemically Synthesized
QVQLQESGGGLVQAGGSLRLSCAASGSIFTSASMGWYRQAPGKEREFVATISQGASTYYADSVKGRFTISRDNAKNTVYLQMNSLKPEDTAVYYCAAVLPDSATYTADYLTTYQYWGQGTQVTVSS

SEQ ID NO: 18108 - protein, 118 aa, Artificial Sequence
  Chemically Synthesized
QVQLQESGGGLVQAGGSLRLSCAASGSISSTKEMGWYRQAPGKERELVAGITYGTTTNYADSVKGRFTISRDNAKNTVYLQMNSLKPEDTAVYYCAVWSTFYDPHYYWGQGTQVTVSS

SEQ ID NO: 18109 - protein, 118 aa, Artificial Sequence
  Chemically Synthesized
QVQLQESGGGLVQAGGSLRLSCAASGNISDYDYMGWYRQAPGKERELVAAINQGAITYYADSVKGRFTISRDNAKNTVYLQMNSLKPEDTAVYYCAAQRNVHSPFNYWGQGTQVTVSS

SEQ ID NO: 18110 - protein, 118 aa, Artificial Sequence
  Chemically Synthesized
QVQLQESGGGLVQAGGSLRLSCAASGSISYSTHMGWYRQAPGKERELVAGIGSGSITNYADSVKGRFTISRDNAKNTVYLQMNSLKPEDTAVYYCAADYVWPGYLFYWGQGTQVTVSS

SEQ ID NO: 18111 - protein, 118 aa, Artificial Sequence
  Chemically Synthesized
QVQLQESGGGLVQAGGSLRLSCAASGNISIYTTMGWYRQAPGKEREFVATIGSGGTTYYADSVKGRFTISRDNAKNTVYLQMNSLKPEDTAVYYCAVITSAVRSASYWGQGTQVTVSS

SEQ ID NO: 18112 - protein, 122 aa, Artificial Sequence
  Chemically Synthesized
QVQLQESGGGLVQAGGSLRLSCAASGSIFFDAVMGWYRQAPGKEREFVASIDIGAYYQYADSVKGRFTISRDNAKNTVYLQMNSLKPEDTAVYYCAVYTLRRYRSRDVYPYWGQGTQVTVSS

SEQ ID NO: 18113 - protein, 117 aa, Artificial Sequence
  Chemically Synthesized
QVQLQESGGGLVQAGGSLRLSCAASGTISVAKYMGWYRQAPGKERELVASIAAGASTYYADSVKGRFTISRDNAKNTVYLQMNSLKPEDTAVYYCAVGILSTLFMYWGQGTQVTVSS

SEQ ID NO: 18114 - protein, 118 aa, Artificial Sequence
  Chemically Synthesized
QVQLQESGGGLVQAGGSLRLSCAASGSISSDLYMGWYRQAPGKEREFVAGIAAGGNTNYADSVKGRFTISRDNAKNTVYLQMNSLKPEDTAVYYCAVLYQYRDVHAYWGQGTQVTVSS

SEQ ID NO: 18115 - protein, 122 aa, Artificial Sequence
  Chemically Synthesized
QVQLQESGGGLVQAGGSLRLSCAASGNIFYDPVMGWYRQAPGKEREFVATINYGGTTYYADSVKGRFTISRDNAKNTVYLQMNSLKPEDTAVYYCAAWWTRYRWYWTLYRYWGQGTQVTVSS

SEQ ID NO: 18116 - protein, 125 aa, Artificial Sequence
  Chemically Synthesized
QVQLQESGGGLVQAGGSLRLSCAASGTISRYFIMGWYRQAPGKERELVAAISPGTTTNYADSVKGRFTISRDNAKNTVYLQMNSLKPEDTAVYYCALTVLKVTTNTLFGTVLMYWGQGTQVTVSS

SEQ ID NO: 18117 - protein, 122 aa, Artificial Sequence
  Chemically Synthesized
QVQLQESGGGLVQAGGSLRLSCAASGNISNYGLMGWYRQAPGKERELVASISAGGSTYYADSVKGRFTISRDNAKNTVYLQMNSLKPEDTAVYYCAVGREGGGAVVEGHQYWGQGTQVTVSS

SEQ ID NO: 18118 - protein, 117 aa, Artificial Sequence
  Chemically Synthesized
QVQLQESGGGLVQAGGSLRLSCAASGSIFRYDAMGWYRQAPGKERELVAAIGNGSSTNYADSVKGRFTISRDNAKNTVYLQMNSLKPEDTAVYYCAVRYLVSEWHYWGQGTQVTVSS

SEQ ID NO: 18119 - protein, 118 aa, Artificial Sequence
  Chemically Synthesized
QVQLQESGGGLVQAGGSLRLSCAASGYISYNVRMGWYRQAPGKERELVAAIAYGGITYYADSVKGRFTISRDNAKNTVYLQMNSLKPEDTAVYYCAVGIYQFQYLGYWGQGTQVTVSS

SEQ ID NO: 18120 - protein, 126 aa, Artificial Sequence
  Chemically Synthesized
QVQLQESGGGLVQAGGSLRLSCAASGTISDNSVMGWYRQAPGKERELVATIDGGGITYYADSVKGRFTISRDNAKNTVYLQMNSLKPEDTAVYYCAASTAYVETGTARVYLVHLYWGQGTQVTVSS

SEQ ID NO: 18121 - protein, 122 aa, Artificial Sequence
  Chemically Synthesized
QVQLQESGGGLVQAGGSLRLSCAASGTIFDRPDMGWYRQAPGKEREFVAAINYGAITYYADSVKGRFTISRDNAKNTVYLQMNSLKPEDTAVYYCAATTNRPYAADNGHYYWGQGTQVTVSS

SEQ ID NO: 18122 - protein, 118 aa, Artificial Sequence
  Chemically Synthesized
QVQLQESGGGLVQAGGSLRLSCAASGTISYEYVMGWYRQAPGKEREFVAAIDRGGTTNYADSVKGRFTISRDNAKNTVYLQMNSLKPEDTAVYYCAVLGGTDVYLPYWGQGTQVTVSS

SEQ ID NO: 18123 - protein, 122 aa, Artificial Sequence
  Chemically Synthesized
QVQLQESGGGLVQAGGSLRLSCAASGTISWSYEMGWYRQAPGKEREFVAAITRGTTTNYADSVKGRFTISRDNAKNTVYLQMNSLKPEDTAVYYCAAITRRTWYRAQAYWYWGQGTQVTVSS

SEQ ID NO: 18124 - protein, 118 aa, Artificial Sequence
  Chemically Synthesized
QVQLQESGGGLVQAGGSLRLSCAASGTISVYTLMGWYRQAPGKERELVAGISSGGNTNYADSVKGRFTISRDNAKNTVYLQMNSLKPEDTAVYYCAVDRTDDGPFYYWGQGTQVTVSS

SEQ ID NO: 18125 - protein, 118 aa, Artificial Sequence
  Chemically Synthesized
QVQLQESGGGLVQAGGSLRLSCAASGSIFPPTVMGWYRQAPGKEREFVAGIGRGSNTNYADSVKGRFTISRDNAKNTVYLQMNSLKPEDTAVYYCAARYWNYRAHSYWGQGTQVTVSS

SEQ ID NO: 18126 - protein, 110 aa, Artificial Sequence
  Chemically Synthesized
QVQLQESGGGLVQAGGSLRLSCAASGNIFYVHGMGWYRQAPGKERELVAGISPGSNTNYADSVKGRFTISRDNAKNTVYLQMNSLKPEDTAVYYCAVIYWGQGTQVTVSS

SEQ ID NO: 18127 - protein, 117 aa, Artificial Sequence
  Chemically Synthesized
QVQLQESGGGLVQAGGSLRLSCAASGNIFYANGMGWYRQAPGKERELVAAISPGGITNYADSVKGRFTISRDNAKNTVYLQMNSLKPEDTAVYYCAATSSLFTTMYWGQGTQVTVSS

SEQ ID NO: 18128 - protein, 118 aa, Artificial Sequence
  Chemically Synthesized
QVQLQESGGGLVQAGGSLRLSCAASGTIFVFASMGWYRQAPGKEREFVAAITWGATTYYADSVKGRFTISRDNAKNTVYLQMNSLKPEDTAVYYCAVAFYYWDYLRYWGQGTQVTVSS

SEQ ID NO: 18129 - protein, 117 aa, Artificial Sequence
  Chemically Synthesized
QVQLQESGGGLVQAGGSLRLSCAASGYIFLIVGMGWYRQAPGKERELVAAINYGVLPYADSVKGRFTISRDNAKNTVYLQMNSLKPEDTAVYYCAAGADWDPYHYYWGQGTQVTVSS

SEQ ID NO: 18130 - protein, 122 aa, Artificial Sequence
  Chemically Synthesized
QVQLQESGGGLVQAGGSLRLSCAASGSIFYSPNMGWYRQAPGKERELVASIAYGGTTNYADSVKGRFTISRDNAKNTVYLQMNSLKPEDTAVYYCAVDHYVSAIHDYDFDYWGQGTQVTVSS

SEQ ID NO: 18131 - protein, 118 aa, Artificial Sequence
  Chemically Synthesized
QVQLQESGGGLVQAGGSLRLSCAASGYISPPDGMGWYRQAPGKEREFVAAITQGSITYYADSVKGRFTISRDNAKNTVYLQMNSLKPEDTAVYYCAVYLAKGRGYAYWGQGTQVTVSS

SEQ ID NO: 18132 - protein, 118 aa, Artificial Sequence
  Chemically Synthesized
QVQLQESGGGLVQAGGSLRLSCAASGYISEVVYMGWYRQAPGKERELVAGISYGTTTNYADSVKGRFTISRDNAKNTVYLQMNSLKPEDTAVYYCAVYLSFVYLFRYWGQGTQVTVSS

SEQ ID NO: 18133 - protein, 126 aa, Artificial Sequence
  Chemically Synthesized
QVQLQESGGGLVQAGGSLRLSCAASGSISGAFYMGWYRQAPGKERELVAAIDTGASTNYADSVKGRFTISRDNAKNTVYLQMNSLKPEDTAVYYCAALGPYKATYSHRYTVDYAYWGQGTQVTVSS

SEQ ID NO: 18134 - protein, 122 aa, Artificial Sequence
  Chemically Synthesized
QVQLQESGGGLVQAGGSLRLSCAASGNISDPRRMGWYRQAPGKERELVAGIAYGATTYYADSVKGRFTISRDNAKNTVYLQMNSLKPEDTAVYYCAVDDQYSYDQYWTHIYWGQGTQVTVSS

SEQ ID NO: 18135 - protein, 118 aa, Artificial Sequence
  Chemically Synthesized
QVQLQESGGGLVQAGGSLRLSCAASGNISRGQVMGWYRQAPGKERELVAGIAYGSSTYYADSVKGRFTISRDNAKNTVYLQMNSLKPEDTAVYYCAVGVHSDPNLYYWGQGTQVTVSS

SEQ ID NO: 18136 - protein, 118 aa, Artificial Sequence
  Chemically Synthesized
QVQLQESGGGLVQAGGSLRLSCAASGTIFGAYDMGWYRQAPGKERELVAAISYGGSTNYADSVKGRFTISRDNAKNTVYLQMNSLKPEDTAVYYCAAIRYQSPLHLYWGQGTQVTVSS

SEQ ID NO: 18137 - protein, 125 aa, Artificial Sequence
  Chemically Synthesized
QVQLQESGGGLVQAGGSLRLSCAASGNISRYRVMGWYRQAPGKEREFVATIGVGTNTNYADSVKGRFTISRDNAKNTVYLQMNSLKPEDTAVYYCAVHAYYEWPAYYIGSTLMYWGQGTQVTVSS

SEQ ID NO: 18138 - protein, 118 aa, Artificial Sequence
  Chemically Synthesized
QVQLQESGGGLVQAGGSLRLSCAASGNIFWDYSMGWYRQAPGKERELVASITFGTITNYADSVKGRFTISRDNAKNTVYLQMNSLKPEDTAVYYCAAWDSYGRVYGYWGQGTQVTVSS

SEQ ID NO: 18139 - protein, 116 aa, Artificial Sequence
  Chemically Synthesized
QVQLQESGGGLVQAGGSLRLSCAASGYISYSTMGWYRQAPGKERELVASITAGGITYYADSVKGRFTISRDNAKNTVYLQMNSLKPEDTAVYYCAANRNSCRTIYWGQGTQVTVSS

SEQ ID NO: 18140 - protein, 117 aa, Artificial Sequence
  Chemically Synthesized
QVQLQESGGGLVQAGGSLRLSCAASGTISDLDMGWYRQAPGKERELVAAISYGATTYYADSVKGRFTISRDNAKNTVYLQMNSLKPEDTAVYYCAVPWSPYPDFAYWGQGTQVTVSS

SEQ ID NO: 18141 - protein, 121 aa, Artificial Sequence
  Chemically Synthesized
QVQLQESGGGLVQAGGSLRLSCAASGNRMGWYRQAPGKEREFVATINRGASTYYADSVKGRFTISRDNAKNTVYLQMNSLKPEDTAVYYCAVTWQETFIPWESPYSGHDYWGQGTQVTVSS

SEQ ID NO: 18142 - protein, 118 aa, Artificial Sequence
  Chemically Synthesized
QVQLQESGGGLVQAGGSLRLSCAASGTISQRVIMGWYRQAPGKEREFVAAIDPGGNTNYADSVKGRFTISRDNAKNTVYLQMNSLKPEDTAVYYCAVYAELGISLEYWGQGTQVTVSS

SEQ ID NO: 18143 - protein, 126 aa, Artificial Sequence
  Chemically Synthesized
QVQLQESGGGLVQAGGSLRLSCAASGTISVIASMGWYRQAPGKEREFVATIDTGGSTYYADSVKGRFTISRDNAKNTVYLQMNSLKPEDTAVYYCAVDRRRSDRAYGVEDSRYTYWGQGTQVTVSS

SEQ ID NO: 18144 - protein, 118 aa, Artificial Sequence
  Chemically Synthesized
QVQLQESGGGLVQAGGSLRLSCAASGYISINDYMGWYRQAPGKEREFVATIGRGGNTYYADSVKGRFTISRDNAKNTVYLQMNSLKPEDTAVYYCAVTGDYPVAYSYWGQGTQVTVSS

SEQ ID NO: 18145 - protein, 122 aa, Artificial Sequence
  Chemically Synthesized
QVQLQESGGGLVQAGGSLRLSCAASGYISDRRDMGWYRQAPGKEREFVAGINLGSITNYADSVKGRFTISRDNAKNTVYLQMNSLKPEDTAVYYCAAEDWAYSYLGLYLLYWGQGTQVTVSS

SEQ ID NO: 18146 - protein, 117 aa, Artificial Sequence
  Chemically Synthesized
QVQLQESGGGLVQAGGSLRLSCAASGYIFVASMGWYRQAPGKERELVAGIDDGTITYYADSVKGRFTISRDNAKNTVYLQMNSLKPEDTAVYYCAAYDVYRTQLDYWGQGTQVTVSS

SEQ ID NO: 18147 - protein, 112 aa, Artificial Sequence
  Chemically Synthesized
QVQLQESGGGLVQAGGSLRLSCAASGNIFGLDVMGWYRQAPGKERELVAGIAYGGNTYYADSVKGRFTISRDNAKNTVYLQMNSLKPEDTAVYYCAARPLYWGQGTQVTVSS

SEQ ID NO: 18148 - protein, 122 aa, Artificial Sequence
  Chemically Synthesized
QVQLQESGGGLVQAGGSLRLSCAASGYISYNYAMGWYRQAPGKEREFVAGIANGATTYYADSVKGRFTISRDNAKNTVYLQMNSLKPEDTAVYYCAADYTGYRYPQYYHSYWGQGTQVTVSS

SEQ ID NO: 18149 - protein, 118 aa, Artificial Sequence
  Chemically Synthesized
QVQLQESGGGLVQAGGSLRLSCAASGSISHGGDMGWYRQAPGKERELVATIARGTSTNYADSVKGRFTISRDNAKNTVYLQMNSLKPEDTAVYYCAANVGVNSFLDYWGQGTQVTVSS

SEQ ID NO: 18150 - protein, 122 aa, Artificial Sequence
  Chemically Synthesized
QVQLQESGGGLVQAGGSLRLSCAASGNISTDGGMGWYRQAPGKERELVASIADGTITYYADSVKGRFTISRDNAKNTVYLQMNSLKPEDTAVYYCAASVRIVIYTVDSHGYWGQGTQVTVSS

SEQ ID NO: 18151 - protein, 117 aa, Artificial Sequence
  Chemically Synthesized
QVQLQESGGGLVQAGGSLRLSCAASGNISADGDMGWYRQAPGKEREFVATIGGGTTNYADSVKGRFTISRDNAKNTVYLQMNSLKPEDTAVYYCAVADAAKTAYVYWGQGTQVTVSS

SEQ ID NO: 18152 - protein, 125 aa, Artificial Sequence
  Chemically Synthesized
QVQLQESGGGLVQAGGSLRLSCAASGSISILLRMGWYRQAPGKEREFVAAITVGGNTYYADSVKGRFTISRDNAKNTVYLQMNSLKPEDTAVYYCAVYYGYRDAYVSTLTTGMYWGQGTQVTVSS

SEQ ID NO: 18153 - protein, 118 aa, Artificial Sequence
  Chemically Synthesized
QVQLQESGGGLVQAGGSLRLSCAASGTIFGADIMGWYRQAPGKEREFVAAIAIGGSTYYADSVKGRFTISRDNAKNTVYLQMNSLKPEDTAVYYCAAWRDGYRAYGYWGQGTQVTVSS

SEQ ID NO: 18154 - protein, 118 aa, Artificial Sequence
  Chemically Synthesized
QVQLQESGGGLVQAGGSLRLSCAASGSIFRQYKMGWYRQAPGKERELVAAIDYGASTNYADSVKGRFTISRDNAKNTVYLQMNSLKPEDTAVYYCAATLPWYWSASYWGQGTQVTVSS

SEQ ID NO: 18155 - protein, 119 aa, Artificial Sequence
  Chemically Synthesized
QVQLQESGGGLVQAGGSLRLSCAASGNISYDEGMGWYRQAPGKERELVAAISTGANTYYADSVKGRFTISRDNAKNTVYLQMNSLKPEDTAVYYCAAYVFREQAIGYYWGQGTQVTVSS

SEQ ID NO: 18156 - protein, 125 aa, Artificial Sequence
  Chemically Synthesized
QVQLQESGGGLVQAGGSLRLSCAASGTILLSLMGWYRQAPGKERELVATIDYGTTTNYADSVKGRFTISRDNAKNTVYLQMNSLKPEDTAVYYCAVYVRPQLAVEWDRDVVFDYWGQGTQVTVSS

SEQ ID NO: 18157 - protein, 118 aa, Artificial Sequence
  Chemically Synthesized
QVQLQESGGGLVQAGGSLRLSCAASGSISFASFMGWYRQAPGKEREFVAAIDPGSNTYYADSVKGRFTISRDNAKNTVYLQMNSLKPEDTAVYYCAVIYFGLGRHYYWGQGTQVTVSS

SEQ ID NO: 18158 - protein, 126 aa, Artificial Sequence
  Chemically Synthesized
QVQLQESGGGLVQAGGSLRLSCAASGTIFGWAEMGWYRQAPGKERELVATITIGGTTNYADSVKGRFTISRDNAKNTVYLQMNSLKPEDTAVYYCAARWDRPHSYFRGHADTHTYWGQGTQVTVSS

SEQ ID NO: 18159 - protein, 118 aa, Artificial Sequence
  Chemically Synthesized
QVQLQESGGGLVQAGGSLRLSCAASGTISKWIYMGWYRQAPGKEREFVAGITSGATTNYADSVKGRFTISRDNAKNTVYLQMNSLKPEDTAVYYCAVVPTYFADFAYWGQGTQVTVSS

SEQ ID NO: 18160 - protein, 121 aa, Artificial Sequence
  Chemically Synthesized
QVQLQESGGGLVQAGGSLRLSCAASGNISGYSYMGWYRQAPGKEREFVASISTVLIPYADSVKGRFTISRDNAKNTVYLQMNSLKPEDTAVYYCAVGKAPDRRWDIAHFYWGQGTQVTVSS

SEQ ID NO: 18161 - protein, 126 aa, Artificial Sequence
  Chemically Synthesized
QVQLQESGGGLVQAGGSLRLSCAASGYISDDNDMGWYRQAPGKEREFVAGITYGGTTYYADSVKGRFTISRDNAKNTVYLQMNSLKPEDTAVYYCAAYRNATSVYDYRKTRQFYYWGQGTQVTVSS

SEQ ID NO: 18162 - protein, 122 aa, Artificial Sequence
  Chemically Synthesized
QVQLQESGGGLVQAGGSLRLSCAASGYISDYWYMGWYRQAPGKEREFVATIARGGITNYADSVKGRFTISRDNAKNTVYLQMNSLKPEDTAVYYCAADYRLDGVGPYELYYWGQGTQVTVSS

SEQ ID NO: 18163 - protein, 118 aa, Artificial Sequence
  Chemically Synthesized
QVQLQESGGGLVQAGGSLRLSCAASGSIFAARSMGWYRQAPGKERELVAGISTGGSTNYADSVKGRFTISRDNAKNTVYLQMNSLKPEDTAVYYCAAIADRGDYYAYWGQGTQVTVSS

SEQ ID NO: 18164 - protein, 121 aa, Artificial Sequence
  Chemically Synthesized
QVQLQESGGGLVQAGGSLRLSCAASGYIFLDRVMGWYRQAPGKERELLKVVVPYADSVKGRFTISRDNAKNTVYLQMNSLKPEDTAVYYCAAPAWQEGVAVLRVSVPYFYWGQGTQVTVSS

SEQ ID NO: 18165 - protein, 122 aa, Artificial Sequence
  Chemically Synthesized
QVQLQESGGGLVQAGGSLRLSCAASGTIFVYPDMGWYRQAPGKEREFVAGIGTGASTNYADSVKGRFTISRDNAKNTVYLQMNSLKPEDTAVYYCAVRGYYSYYDYGHYSYWGQGTQVTVSS

SEQ ID NO: 18166 - protein, 122 aa, Artificial Sequence
  Chemically Synthesized
QVQLQESGGGLVQAGGSLRLSCAASGTIFLWRTMGWYRQAPGKEREFVAAITVGSITNYADSVKGRFTISRDNAKNTVYLQMNSLKPEDTAVYYCAVYTGWPAQDDSYLAYWGQGTQVTVSS

SEQ ID NO: 18167 - protein, 116 aa, Artificial Sequence
  Chemically Synthesized
QVQLQESGGGLVQAGGSLRLSCAASGFLPSSMGWYRQAPGKEREFVATIAHGGSTNYADSVKGRFTISRDNAKNTVYLQMNSLKPEDTAVYYCAVATRSYRHHSYWGQGTQVTVSS

SEQ ID NO: 18168 - protein, 118 aa, Artificial Sequence
  Chemically Synthesized
QVQLQESGGGLVQAGGSLRLSCAASGSIFWSRHMGWYRQAPGKERELVAAITRGSNTYYADSVKGRFTISRDNAKNTVYLQMNSLKPEDTAVYYCAAYSQYIYGYSYWGQGTQVTVSS

SEQ ID NO: 18169 - protein, 126 aa, Artificial Sequence
  Chemically Synthesized
QVQLQESGGGLVQAGGSLRLSCAASGTIFIAYIMGWYRQAPGKERELVASIGDGGTTYYADSVKGRFTISRDNAKNTVYLQMNSLKPEDTAVYYCAASQDIRKAPQGRRRTAYYYWGQGTQVTVSS

SEQ ID NO: 18170 - protein, 122 aa, Artificial Sequence
  Chemically Synthesized
QVQLQESGGGLVQAGGSLRLSCAASGYISDDDDMGWYRQAPGKEREFVATIGQGAITNYADSVKGRFTISRDNAKNTVYLQMNSLKPEDTAVYYCAAPLRYERGGYAYHTYWGQGTQVTVSS

SEQ ID NO: 18171 - protein, 123 aa, Artificial Sequence
  Chemically Synthesized
QVQLQESGGGLVQAGGSLRLSCAASGYISGHNYMGWYRQAPGKEREFVATIDYGTITYYADSVKGRFTISRDNAKNTVYLQMNSLKPEDTAVYYCAASPSGDATNPAYTHQYWGQGTQVTVSS

SEQ ID NO: 18172 - protein, 118 aa, Artificial Sequence
  Chemically Synthesized
QVQLQESGGGLVQAGGSLRLSCAASGSIFYTRDMGWYRQAPGKEREFVAAIATGANTNYADSVKGRFTISRDNAKNTVYLQMNSLKPEDTAVYYCAVPDGYVHYLYYWGQGTQVTVSS

SEQ ID NO: 18173 - protein, 122 aa, Artificial Sequence
  Chemically Synthesized
QVQLQESGGGLVQAGGSLRLSCAASGTIFGTYAMGWYRQAPGKERELVAAITWGATTNYADSVKGRFTISRDNAKNTVYLQMNSLKPEDTAVYYCAVGRGYGLGSLNRVFYWGQGTQVTVSS

SEQ ID NO: 18174 - protein, 122 aa, Artificial Sequence
  Chemically Synthesized
QVQLQESGGGLVQAGGSLRLSCAASGNIFAALIMGWYRQAPGKEREFVASIDDGGITYYADSVKGRFTISRDNAKNTVYLQMNSLKPEDTAVYYCAVWWSYTLYIYELHAYWGQGTQVTVSS

SEQ ID NO: 18175 - protein, 118 aa, Artificial Sequence
  Chemically Synthesized
QVQLQESGGGLVQAGGSLRLSCAASGSIFYTYDMGWYRQAPGKERELVATIGSGTNTNYADSVKGRFTISRDNAKNTVYLQMNSLKPEDTAVYYCAVLVFTPDHLPYWGQGTQVTVSS

SEQ ID NO: 18176 - protein, 117 aa, Artificial Sequence
  Chemically Synthesized
QVQLQESGGGLVQAGGSLRLSCAASGTISQSTMGWYRQAPGKERELVATIAAGSSTYYADSVKGRFTISRDNAKNTVYLQMNSLKPEDTAVYYCAVQTYHGPPLDYWGQGTQVTVSS

SEQ ID NO: 18177 - protein, 122 aa, Artificial Sequence
  Chemically Synthesized
QVQLQESGGGLVQAGGSLRLSCAASGSISYSYGMGWYRQAPGKERELVASIADGSSTYYADSVKGRFTISRDNAKNTVYLQMNSLKPEDTAVYYCAVQARQAYVYERAHSYWGQGTQVTVSS

SEQ ID NO: 18178 - protein, 118 aa, Artificial Sequence
  Chemically Synthesized
QVQLQESGGGLVQAGGSLRLSCAASGTIFPVDVMGWYRQAPGKERELVAGINGGATTYYADSVKGRFTISRDNAKNTVYLQMNSLKPEDTAVYYCAVTTADYRVYTYWGQGTQVTVSS

SEQ ID NO: 18179 - protein, 122 aa, Artificial Sequence
  Chemically Synthesized
QVQLQESGGGLVQAGGSLRLSCAASGSIFDVARMGWYRQAPGKERELVAGIGYGTNTYYADSVKGRFTISRDNAKNTVYLQMNSLKPEDTAVYYCAVVYEYAILTRGYLGYWGQGTQVTVSS

SEQ ID NO: 18180 - protein, 118 aa, Artificial Sequence
  Chemically Synthesized
QVQLQESGGGLVQAGGSLRLSCAASGYISLRNHMGWYRQAPGKERELVASITAGGNTNYADSVKGRFTISRDNAKNTVYLQMNSLKPEDTAVYYCAAGSAGNRIFSYWGQGTQVTVSS

SEQ ID NO: 18181 - protein, 121 aa, Artificial Sequence
  Chemically Synthesized
QVQLQESGGGLVQAGGSLRLSCAASGTISSQYMGWYRQAPGKEREFVATIDYGANTYYADSVKGRFTISRDNAKNTVYLQMNSLKPEDTAVYYCAAELSVPDRAVVRYSYWGQGTQVTVSS

SEQ ID NO: 18182 - protein, 118 aa, Artificial Sequence
  Chemically Synthesized
QVQLQESGGGLVQAGGSLRLSCAASGYISGYATMGWYRQAPGKERELVASITIGTSTNYADSVKGRFTISRDNAKNTVYLQMNSLKPEDTAVYYCAVYYLSSNGHVYWGQGTQVTVSS

SEQ ID NO: 18183 - protein, 118 aa, Artificial Sequence
  Chemically Synthesized
QVQLQESGGGLVQAGGSLRLSCAASGTIFILRHMGWYRQAPGKERELVAAISLGANTYYADSVKGRFTISRDNAKNTVYLQMNSLKPEDTAVYYCAVAWANRVQHYYWGQGTQVTVSS

SEQ ID NO: 18184 - protein, 122 aa, Artificial Sequence
  Chemically Synthesized
QVQLQESGGGLVQAGGSLRLSCAASGYISDDPPMGWYRQAPGKERELVAGINNGSTTYYADSVKGRFTISRDNAKNTVYLQMNSLKPEDTAVYYCAAGYDDRYAYSAWLDYWGQGTQVTVSS

SEQ ID NO: 18185 - protein, 116 aa, Artificial Sequence
  Chemically Synthesized
QVQLQESGGGLVQAGGSLRLSCAASGTISARGYMGWYRQAPGKEREFVAGISDGTTTNYADSVKGRFTISRDNAKNTVYLQMNSLKPEDTAVYYCANVITGLYSYWGQGTQVTVSS

SEQ ID NO: 18186 - protein, 122 aa, Artificial Sequence
  Chemically Synthesized
QVQLQESGGGLVQAGGSLRLSCAASGSISISDYMGWYRQAPGKEREFVAAITRGTNTNYADSVKGRFTISRDNAKNTVYLQMNSLKPEDTAVYYCAAASRTYDNAFTVLDYWGQGTQVTVSS

SEQ ID NO: 18187 - protein, 117 aa, Artificial Sequence
  Chemically Synthesized
QVQLQESGGGLVQAGGSLRLSCAASGYISPSRSMGWYRQAPGKEREFVAGITGGITYYADSVKGRFTISRDNAKNTVYLQMNSLKPEDTAVYYCAAQLGTYDGHYYWGQGTQVTVSS

SEQ ID NO: 18188 - protein, 118 aa, Artificial Sequence
  Chemically Synthesized
QVQLQESGGGLVQAGGSLRLSCAASGSISYDQRMGWYRQAPGKEREFVASITLGSNTNYADSVKGRFTISRDNAKNTVYLQMNSLKPEDTAVYYCAADETYAYVHTYWGQGTQVTVSS

SEQ ID NO: 18189 - protein, 118 aa, Artificial Sequence
  Chemically Synthesized
QVQLQESGGGLVQAGGSLRLSCAASGYISGHRYMGWYRQAPGKERELVATIGRGSSTNYADSVKGRFTISRDNAKNTVYLQMNSLKPEDTAVYYCAATHPHGAPYPYWGQGTQVTVSS

SEQ ID NO: 18190 - protein, 122 aa, Artificial Sequence
  Chemically Synthesized
QVQLQESGGGLVQAGGSLRLSCAASGYISDWDDMGWYRQAPGKERELVASITYGTNTNYADSVKGRFTISRDNAKNTVYLQMNSLKPEDTAVYYCAADQAGYQTYYDVHYYWGQGTQVTVSS

SEQ ID NO: 18191 - protein, 117 aa, Artificial Sequence
  Chemically Synthesized
QVQLQESGGGLVQAGGSLRLSCAASGTIFLEVLMGWYRQAPGKEREFVAGITYGTSTYYADSVKGRFTISRDNAKNTVYLQMNSLKPEDTAVYYCAADSVAPYDYYWGQGTQVTVSS

SEQ ID NO: 18192 - protein, 122 aa, Artificial Sequence
  Chemically Synthesized
QVQLQESGGGLVQAGGSLRLSCAASGTIFSVYSMGWYRQAPGKERELVAAIGPGAITYYADSVKGRFTISRDNAKNTVYLQMNSLKPEDTAVYYCAAWVASYRFDATRLGYWGQGTQVTVSS

SEQ ID NO: 18193 - protein, 118 aa, Artificial Sequence
  Chemically Synthesized
QVQLQESGGGLVQAGGSLRLSCAASGTIFRRYRMGWYRQAPGKEREFVAAIAGGITYYADSVKGRFTISRDNAKNTVYLQMNSLKPEDTAVYYCAAYALHYVYPHYYWGQGTQVTVSS

SEQ ID NO: 18194 - protein, 118 aa, Artificial Sequence
  Chemically Synthesized
QVQLQESGGGLVQAGGSLRLSCAASGNISAEVYMGWYRQAPGKEREFVAGIGQGGSTNYADSVKGRFTISRDNAKNTVYLQMNSLKPEDTAVYYCAAYAYDFDYLYYWGQGTQVTVSS

SEQ ID NO: 18195 - protein, 126 aa, Artificial Sequence
  Chemically Synthesized
QVQLQESGGGLVQAGGSLRLSCAASGSIFYAIFMGWYRQAPGKERELVAAIDDGTNTYYADSVKGRFTISRDNAKNTVYLQMNSLKPEDTAVYYCAARDPIVGSYYQGGDSPYYYWGQGTQVTVSS

SEQ ID NO: 18196 - protein, 122 aa, Artificial Sequence
  Chemically Synthesized
QVQLQESGGGLVQAGGSLRLSCAASGNISPIRYMGWYRQAPGKEREFVASISRGTSTYYADSVKGRFTISRDNAKNTVYLQMNSLKPEDTAVYYCAVDLLNDGYELYYLDYWGQGTQVTVSS

SEQ ID NO: 18197 - protein, 117 aa, Artificial Sequence
  Chemically Synthesized
QVQLQESGGGLVQAGGSLRLSCAASGTISGDPYMGWYRQAPGKEREFVAAIGRGGNTYYADSVKGRFTISRDNAKNTVYLQMNSLKPEDTAVYYCAAPLDFYTTMYWGQGTQVTVSS

SEQ ID NO: 18198 - protein, 111 aa, Artificial Sequence
  Chemically Synthesized
QVQLQESGGGLVQAGGSLRLSCAASGNIFEQNAMGWYRQAPGKERELVAGINTGSSTNYADSVKGRFTISRDNAKNTVYLQMNSLKPEDTAVYYCAAHQYWGQGTQVTVSS

SEQ ID NO: 18199 - protein, 122 aa, Artificial Sequence
  Chemically Synthesized
QVQLQESGGGLVQAGGSLRLSCAASGTIFNYYVMGWYRQAPGKERELVAAINDGGITYYADSVKGRFTISRDNAKNTVYLQMNSLKPEDTAVYYCAVDTYASFYDSWVHAYWGQGTQVTVSS

SEQ ID NO: 18200 - protein, 114 aa, Artificial Sequence
  Chemically Synthesized
QVQLQESGGGLVQAGGSLRLSCAASGNISYATDMGWYRQAPGKEREFVAGISYGSSTYYADSVKGRFTISRDNAKNTVYLQMNSLKPEDTAVYYCAANHRGGYWGQGTQVTVSS

SEQ ID NO: 18201 - protein, 118 aa, Artificial Sequence
  Chemically Synthesized
QVQLQESGGGLVQAGGSLRLSCAASGNISWQDDMGWYRQAPGKEREFVATISQGSTTYYADSVKGRFTISRDNAKNTVYLQMNSLKPEDTAVYYCAADYDPEWGFWYWGQGTQVTVSS

SEQ ID NO: 18202 - protein, 112 aa, Artificial Sequence
  Chemically Synthesized
QVQLQESGGGLVQAGGSLRLSCAASGTISPFYFMGWYRQAPGKERELVAAISAGAITNYADSVKGRFTISRDNAKNTVYLQMNSLKPEDTAVYYCAATLFYWGQGTQVTVSS

SEQ ID NO: 18203 - protein, 121 aa, Artificial Sequence
  Chemically Synthesized
QVQLQESGGGLVQAGGSLRLSCAASGSIFDIYNMGWYRQAPGKERELVALLIWVVIPYADSVKGRFTISRDNAKNTVYLQMNSLKPEDTAVYYCAVEKSSLPQPGDGLYYWGQGTQVTVSS

SEQ ID NO: 18204 - protein, 124 aa, Artificial Sequence
  Chemically Synthesized
QVQLQESGGGLVQAGGSLRLSCAASGSIFANYTMGWYRQAPGKEREFVAGIASVLLPYADSVKGRFTISRDNAKNTVYLQMNSLKPEDTAVYYCAVPSLRLLPVPVVTGRHLYWGQGTQVTVSS

SEQ ID NO: 18205 - protein, 122 aa, Artificial Sequence
  Chemically Synthesized
QVQLQESGGGLVQAGGSLRLSCAASGYIFPQRYMGWYRQAPGKERELVAAITRGGNTYYADSVKGRFTISRDNAKNTVYLQMNSLKPEDTAVYYCAAVWYGDKRWYYQFIYWGQGTQVTVSS

SEQ ID NO: 18206 - protein, 121 aa, Artificial Sequence
  Chemically Synthesized
QVQLQESGGGLVQAGGSLRLSCAASGSISDDARMGWYRQAPGKEREFVASITKGSNTNYADSVKGRFTISRDNAKNTVYLQMNSLKPEDTAVYYCAASTNTTLVTFTLIYWGQGTQVTVSS

SEQ ID NO: 18207 - protein, 120 aa, Artificial Sequence
  Chemically Synthesized
QVQLQESGGGLVQAGGSLRLSCAASGYISDVPRMGWYRQAPGKEREFVAAITGAITNYADSVKGRFTISRDNAKNTVYLQMNSLKPEDTAVYYCAADSGYYYVDYGHYYWGQGTQVTVSS

SEQ ID NO: 18208 - protein, 126 aa, Artificial Sequence
  Chemically Synthesized
QVQLQESGGGLVQAGGSLRLSCAASGSISDLDAMGWYRQAPGKEREFVATIADGANTYYADSVKGRFTISRDNAKNTVYLQMNSLKPEDTAVYYCAADQRYYDLYLGEYTGYYTYWGQGTQVTVSS

SEQ ID NO: 18209 - protein, 118 aa, Artificial Sequence
  Chemically Synthesized
QVQLQESGGGLVQAGGSLRLSCAASGYISYQIDMGWYRQAPGKEREFVAAINGGATTNYADSVKGRFTISRDNAKNTVYLQMNSLKPEDTAVYYCAAYYGDYYRLYYWGQGTQVTVSS

SEQ ID NO: 18210 - protein, 126 aa, Artificial Sequence
  Chemically Synthesized
QVQLQESGGGLVQAGGSLRLSCAASGSIFRGYNMGWYRQAPGKEREFVAAIDDGGITYYADSVKGRFTISRDNAKNTVYLQMNSLKPEDTAVYYCAAAWPYVRYYSLFRVYPYRYWGQGTQVTVSS

SEQ ID NO: 18211 - protein, 122 aa, Artificial Sequence
  Chemically Synthesized
QVQLQESGGGLVQAGGSLRLSCAASGNISSTLYMGWYRQAPGKERELVATITHGTNTYYADSVKGRFTISRDNAKNTVYLQMNSLKPEDTAVYYCAVYIPDPAPYPYHHAYWGQGTQVTVSS

SEQ ID NO: 18212 - protein, 122 aa, Artificial Sequence
  Chemically Synthesized
QVQLQESGGGLVQAGGSLRLSCAASGSISDDDTMGWYRQAPGKEREFVAAINSGGNTNYADSVKGRFTISRDNAKNTVYLQMNSLKPEDTAVYYCAAFRWTAPYYYDHHYYWGQGTQVTVSS

SEQ ID NO: 18213 - protein, 118 aa, Artificial Sequence
  Chemically Synthesized
QVQLQESGGGLVQAGGSLRLSCAASGSISDAVSMGWYRQAPGKERELVAGIGDGSSTYYADSVKGRFTISRDNAKNTVYLQMNSLKPEDTAVYYCAVPTDSGWKHGYWGQGTQVTVSS

SEQ ID NO: 18214 - protein, 123 aa, Artificial Sequence
  Chemically Synthesized
QVQLQESGGGLVQAGGSLRLSCAASGNISGRRYMGWYRQAPGKEREFVASIALGGNTYYADSVKGRFTISRDNAKNTVYLQMNSLKPEDTAVYYCAADRQDRIGQIPTHIAYWGQGTQVTVSS

SEQ ID NO: 18215 - protein, 126 aa, Artificial Sequence
  Chemically Synthesized
QVQLQESGGGLVQAGGSLRLSCAASGNIFDPDDMGWYRQAPGKERELVAAIGYGTSTYYADSVKGRFTISRDNAKNTVYLQMNSLKPEDTAVYYCAVGWAYFEYTDNDLPYGYDYWGQGTQVTVSS

SEQ ID NO: 18216 - protein, 122 aa, Artificial Sequence
  Chemically Synthesized
QVQLQESGGGLVQAGGSLRLSCAASGYISYFRYMGWYRQAPGKERELVAGITEGSNTYYADSVKGRFTISRDNAKNTVYLQMNSLKPEDTAVYYCAVRYAQYPTYDEAHSYWGQGTQVTVSS

SEQ ID NO: 18217 - protein, 118 aa, Artificial Sequence
  Chemically Synthesized
QVQLQESGGGLVQAGGSLRLSCAASGTISAGYYMGWYRQAPGKEREFVATIASGSTTNYADSVKGRFTISRDNAKNTVYLQMNSLKPEDTAVYYCAVPFPSELPHDYWGQGTQVTVSS

SEQ ID NO: 18218 - protein, 118 aa, Artificial Sequence
  Chemically Synthesized
QVQLQESGGGLVQAGGSLRLSCAASGNIFKLYRMGWYRQAPGKERELVAAITAGANTYYADSVKGRFTISRDNAKNTVYLQMNSLKPEDTAVYYCAAYRWYLYAHYYWGQGTQVTVSS

SEQ ID NO: 18219 - protein, 117 aa, Artificial Sequence
  Chemically Synthesized
QVQLQESGGGLVQAGGSLRLSCAASGTISTYQGMGWYRQAPGKEREFVAAISQGSITNYADSVKGRFTISRDNAKNTVYLQMNSLKPEDTAVYYCAVRSDSSGHVYWGQGTQVTVSS

SEQ ID NO: 18220 - protein, 118 aa, Artificial Sequence
  Chemically Synthesized
QVQLQESGGGLVQAGGSLRLSCAASGNIFDLPYMGWYRQAPGKERELVATISIGSTTNYADSVKGRFTISRDNAKNTVYLQMNSLKPEDTAVYYCAVVHRSTGGYKYWGQGTQVTVSS

SEQ ID NO: 18221 - protein, 121 aa, Artificial Sequence
  Chemically Synthesized
QVQLQESGGGLVQAGGSLRLSCAASGSILLPVMGWYRQAPGKERELVATIDSGSNTNYADSVKGRFTISRDNAKNTVYLQMNSLKPEDTAVYYCAVRFYRSNAFWLDYYYWGQGTQVTVSS

SEQ ID NO: 18222 - protein, 122 aa, Artificial Sequence
  Chemically Synthesized
QVQLQESGGGLVQAGGSLRLSCAASGYISDGYDMGWYRQAPGKEREFVAGIAYGSITNYADSVKGRFTISRDNAKNTVYLQMNSLKPEDTAVYYCAAASTDRDYLYLYHSYWGQGTQVTVSS

SEQ ID NO: 18223 - protein, 117 aa, Artificial Sequence
  Chemically Synthesized
QVQLQESGGGLVQAGGSLRLSCAASGSISLGYMGWYRQAPGKEREFVASIAAGTSTNYADSVKGRFTISRDNAKNTVYLQMNSLKPEDTAVYYCAVKSNRADWYDYWGQGTQVTVSS

SEQ ID NO: 18224 - protein, 117 aa, Artificial Sequence
  Chemically Synthesized
QVQLQESGGGLVQAGGSLRLSCAASGNIFQYANMGWYRQAPGKERELVAAISWGTNTNYADSVKGRFTISRDNAKNTVYLQMNSLKPEDTAVYYCAVATFGYRLNYWGQGTQVTVSS

SEQ ID NO: 18225 - protein, 121 aa, Artificial Sequence
  Chemically Synthesized
QVQLQESGGGLVQAGGSLRLSCAASGYISYSDMGWYRQAPGKERELVATIADGASTYYADSVKGRFTISRDNAKNTVYLQMNSLKPEDTAVYYCAAPFITSYGYYLPHDYWGQGTQVTVSS

SEQ ID NO: 18226 - protein, 126 aa, Artificial Sequence
  Chemically Synthesized
QVQLQESGGGLVQAGGSLRLSCAASGTISKTDFMGWYRQAPGKERELVAGISLGTNTYYADSVKGRFTISRDNAKNTVYLQMNSLKPEDTAVYYCAVGWQADSVQDYWQEAGHAYWGQGTQVTVSS

SEQ ID NO: 18227 - protein, 121 aa, Artificial Sequence
  Chemically Synthesized
QVQLQESGGGLVQAGGSLRLSCAASGYISSRNDMGWYRQAPGKERELVAGIGYGTTTNYADSVKGRFTISRDNAKNTVYLQMNSLKPEDTAVYYCAVYSRFGLNPVLPFYWGQGTQVTVSS

SEQ ID NO: 18228 - protein, 114 aa, Artificial Sequence
  Chemically Synthesized
QVQLQESGGGLVQAGGSLRLSCAASGTISTYYLMGWYRQAPGKERELVATIARGTSTYYADSVKGRFTISRDNAKNTVYLQMNSLKPEDTAVYYCAVIYWFIYWGQGTQVTVSS

SEQ ID NO: 18229 - protein, 118 aa, Artificial Sequence
  Chemically Synthesized
QVQLQESGGGLVQAGGSLRLSCAASGNIFPVYVMGWYRQAPGKERELVAAITDGTMYLYADSVKGRFTISRDNAKNTVYLQMNSLKPEDTAVYYCAVNRLVKVSFPYWGQGTQVTVSS

SEQ ID NO: 18230 - protein, 118 aa, Artificial Sequence
  Chemically Synthesized
QVQLQESGGGLVQAGGSLRLSCAASGYIFGWRSMGWYRQAPGKERELVAAISPGGSTYYADSVKGRFTISRDNAKNTVYLQMNSLKPEDTAVYYCAAPKRYASAHLYWGQGTQVTVSS

SEQ ID NO: 18231 - protein, 118 aa, Artificial Sequence
  Chemically Synthesized
QVQLQESGGGLVQAGGSLRLSCAASGNISQYLYMGWYRQAPGKEREFVAAIGAGAITYYADSVKGRFTISRDNAKNTVYLQMNSLKPEDTAVYYCAATDDLTLGLAYWGQGTQVTVSS

SEQ ID NO: 18232 - protein, 122 aa, Artificial Sequence
  Chemically Synthesized
QVQLQESGGGLVQAGGSLRLSCAASGYISAFRPMGWYRQAPGKEREFVAGITVGGTTNYADSVKGRFTISRDNAKNTVYLQMNSLKPEDTAVYYCAVFEGVRYSYDYRYAYWGQGTQVTVSS

SEQ ID NO: 18233 - protein, 118 aa, Artificial Sequence
  Chemically Synthesized
QVQLQESGGGLVQAGGSLRLSCAASGSIFARYEMGWYRQAPGKEREFVASIGIGATTNYADSVKGRFTISRDNAKNTVYLQMNSLKPEDTAVYYCAAQYPLLKTLIYWGQGTQVTVSS

SEQ ID NO: 18234 - protein, 118 aa, Artificial Sequence
  Chemically Synthesized
QVQLQESGGGLVQAGGSLRLSCAASGTISPYEFMGWYRQAPGKERELVATIGAGSTTNYADSVKGRFTISRDNAKNTVYLQMNSLKPEDTAVYYCAALGDVPDNFEYWGQGTQVTVSS

SEQ ID NO: 18235 - protein, 118 aa, Artificial Sequence
  Chemically Synthesized
QVQLQESGGGLVQAGGSLRLSCAASGTIFVRSAMGWYRQAPGKEREFVASISDGSNTYYADSVKGRFTISRDNAKNTVYLQMNSLKPEDTAVYYCAVLIVRYYPHWYWGQGTQVTVSS

SEQ ID NO: 18236 - protein, 117 aa, Artificial Sequence
  Chemically Synthesized
QVQLQESGGGLVQAGGSLRLSCAASGTFLRLLMGWYRQAPGKERELVASISAGANTNYADSVKGRFTISRDNAKNTVYLQMNSLKPEDTAVYYCAAYDTPALYLVYWGQGTQVTVSS

SEQ ID NO: 18237 - protein, 122 aa, Artificial Sequence
  Chemically Synthesized
QVQLQESGGGLVQAGGSLRLSCAASGTISRIPDMGWYRQAPGKEREFVAAIAGGSTTYYADSVKGRFTISRDNAKNTVYLQMNSLKPEDTAVYYCAVYYRDAINGHIDFTYWGQGTQVTVSS

SEQ ID NO: 18238 - protein, 121 aa, Artificial Sequence
  Chemically Synthesized
QVQLQESGGGLVQAGGSLRLSCAASGSIFPIDKMGWYRQAPGKERELVATIAAGAITYYADSVKGRFTISRDNAKNTVYLQMNSLKPEDTAVYYCAASDRVVLKTTMFMYWGQGTQVTVSS

SEQ ID NO: 18239 - protein, 122 aa, Artificial Sequence
  Chemically Synthesized
QVQLQESGGGLVQAGGSLRLSCAASGSISNLVDMGWYRQAPGKERELVASITQGATTYYADSVKGRFTISRDNAKNTVYLQMNSLKPEDTAVYYCAAWYKKYADIRLAYSYWGQGTQVTVSS

SEQ ID NO: 18240 - protein, 122 aa, Artificial Sequence
  Chemically Synthesized
QVQLQESGGGLVQAGGSLRLSCAASGTISYRADMGWYRQAPGKERELVASISYGANTYYADSVKGRFTISRDNAKNTVYLQMNSLKPEDTAVYYCAANADTTIPVGYDLDYWGQGTQVTVSS

SEQ ID NO: 18241 - protein, 117 aa, Artificial Sequence
  Chemically Synthesized
QVQLQESGGGLVQAGGSLRLSCAASGIFLTLVMGWYRQAPGKEREFVAAIGTGGITNYADSVKGRFTISRDNAKNTVYLQMNSLKPEDTAVYYCAAGWSYTYGHDYWGQGTQVTVSS

SEQ ID NO: 18242 - protein, 125 aa, Artificial Sequence
  Chemically Synthesized
QVQLQESGGGLVQAGGSLRLSCAASGTISDVWGMGWYRQAPGKEREFVAAITYGTTTYYADSVKGRFTISRDNAKNTVYLQMNSLKPEDTAVYYCAATTYLHIPGIGFYYDHAYWGQGTQVTVSS

SEQ ID NO: 18243 - protein, 122 aa, Artificial Sequence
  Chemically Synthesized
QVQLQESGGGLVQAGGSLRLSCAASGSISPVTDMGWYRQAPGKEREFVAGIGGGANTNYADSVKGRFTISRDNAKNTVYLQMNSLKPEDTAVYYCAVEHRYVYAGYAVYNYWGQGTQVTVSS

SEQ ID NO: 18244 - protein, 111 aa, Artificial Sequence
  Chemically Synthesized
QVQLQESGGGLVQAGGSLRLSCAASGSISPYTHMGWYRQAPGKERELVAVPYADSVKGRFTISRDNAKNTVYLQMNSLKPEDTAVYYCAALEGLDQYFLYWGQGTQVTVSS

SEQ ID NO: 18245 - protein, 123 aa, Artificial Sequence
  Chemically Synthesized
QVQLQESGGGLVQAGGSLRLSCAASGSIFAVVVMGWYRQAPGKERELVASIDYGATTNYADSVKGRFTISRDNAKNTVYLQMNSLKPEDTAVYYCAAGVSRNVWDVYSVHTYWGQGTQVTVSS

SEQ ID NO: 18246 - protein, 117 aa, Artificial Sequence
  Chemically Synthesized
QVQLQESGGGLVQAGGSLRLSCAASGYISDDNGMGWYRQAPGKERELVAGIADGTITNYADSVKGRFTISRDNAKNTVYLQMNSLKPEDTAVYYCAAAIGSSRFLYWGQGTQVTVSS

SEQ ID NO: 18247 - protein, 122 aa, Artificial Sequence
  Chemically Synthesized
QVQLQESGGGLVQAGGSLRLSCAASGSIFVRRVMGWYRQAPGKEREFVAGIGAGGITNYADSVKGRFTISRDNAKNTVYLQMNSLKPEDTAVYYCAAHLYANTGNRPSHFYWGQGTQVTVSS

SEQ ID NO: 18248 - protein, 117 aa, Artificial Sequence
  Chemically Synthesized
QVQLQESGGGLVQAGGSLRLSCAASGTISARDRMGWYRQAPGKEREFVAAIDAGTITYYADSVKGRFTISRDNAKNTVYLQMNSLKPEDTAVYYCAAGDFDTSTLYWGQGTQVTVSS

SEQ ID NO: 18249 - protein, 118 aa, Artificial Sequence
  Chemically Synthesized
QVQLQESGGGLVQAGGSLRLSCAASGSISSASFMGWYRQAPGKEREFVASIGYGGTTYYADSVKGRFTISRDNAKNTVYLQMNSLKPEDTAVYYCAVVVYADANLAYWGQGTQVTVSS

SEQ ID NO: 18250 - protein, 118 aa, Artificial Sequence
  Chemically Synthesized
QVQLQESGGGLVQAGGSLRLSCAASGNIFFYPHMGWYRQAPGKERELVAGITGGTTTYYADSVKGRFTISRDNAKNTVYLQMNSLKPEDTAVYYCAVQDDPTYTLAYWGQGTQVTVSS

SEQ ID NO: 18251 - protein, 121 aa, Artificial Sequence
  Chemically Synthesized
QVQLQESGGGLVQAGGSLRLSCAASGTISAAVMGWYRQAPGKERELVAGITYGGSTYYADSVKGRFTISRDNAKNTVYLQMNSLKPEDTAVYYCAAIYVRGWVTLDWYRYWGQGTQVTVSS

SEQ ID NO: 18252 - protein, 118 aa, Artificial Sequence
  Chemically Synthesized
QVQLQESGGGLVQAGGSLRLSCAASGTIFDLDLMGWYRQAPGKERELVASIAVGSITYYADSVKGRFTISRDNAKNTVYLQMNSLKPEDTAVYYCAAVDYTGAQHWYWGQGTQVTVSS

SEQ ID NO: 18253 - protein, 118 aa, Artificial Sequence
  Chemically Synthesized
QVQLQESGGGLVQAGGSLRLSCAASGYIFAISSMGWYRQAPGKERELVAAIAVGTTTNYADSVKGRFTISRDNAKNTVYLQMNSLKPEDTAVYYCAADDLDDDDLLYWGQGTQVTVSS

SEQ ID NO: 18254 - protein, 126 aa, Artificial Sequence
  Chemically Synthesized
QVQLQESGGGLVQAGGSLRLSCAASGNIFPDYSMGWYRQAPGKERELVASIGGGSSTNYADSVKGRFTISRDNAKNTVYLQMNSLKPEDTAVYYCAVYTSDTLWFYRIARFILYYWGQGTQVTVSS

SEQ ID NO: 18255 - protein, 122 aa, Artificial Sequence
  Chemically Synthesized
QVQLQESGGGLVQAGGSLRLSCAASGTIFLAYGMGWYRQAPGKERELVAAISYGGITYYADSVKGRFTISRDNAKNTVYLQMNSLKPEDTAVYYCAARKDGAYYPGTDYPYWGQGTQVTVSS

SEQ ID NO: 18256 - protein, 119 aa, Artificial Sequence
  Chemically Synthesized
QVQLQESGGGLVQAGGSLRLSCAASGTIFYNYYMGWYRQAPGKERELVASIGSGGYADSVKGRFTISRDNAKNTVYLQMNSLKPEDTAVYYCAAFIDEWGGVREIHPYWGQGTQVTVSS

SEQ ID NO: 18257 - protein, 125 aa, Artificial Sequence
  Chemically Synthesized
QVQLQESGGGLVQAGGSLRLSCAASGYIFTDNEMGWYRQAPGKEREFVATIGSGANTNYADSVKGRFTISRDNAKNTVYLQMNSLKPEDTAVYYCAVYSVVSGCSWVTVVSNMYWGQGTQVTVSS

SEQ ID NO: 18258 - protein, 118 aa, Artificial Sequence
  Chemically Synthesized
QVQLQESGGGLVQAGGSLRLSCAASGSIFDGYYMGWYRQAPGKERELVAAISKGATTYYADSVKGRFTISRDNAKNTVYLQMNSLKPEDTAVYYCAASDRADVQFAYWGQGTQVTVSS

SEQ ID NO: 18259 - protein, 121 aa, Artificial Sequence
  Chemically Synthesized
QVQLQESGGGLVQAGGSLRLSCAASGSIFDDAPMGWYRQAPGKERELVATINDGTITNYADSVKGRFTISRDNAKNTVYLQMNSLKPEDTAVYYCAVNDYARWTVYSRIYWGQGTQVTVSS

SEQ ID NO: 18260 - protein, 118 aa, Artificial Sequence
  Chemically Synthesized
QVQLQESGGGLVQAGGSLRLSCAASGTISQDIDMGWYRQAPGKERELVATITYGTNTNYADSVKGRFTISRDNAKNTVYLQMNSLKPEDTAVYYCAVYIITVAGFDYWGQGTQVTVSS

SEQ ID NO: 18261 - protein, 122 aa, Artificial Sequence
  Chemically Synthesized
QVQLQESGGGLVQAGGSLRLSCAASGNIFGGQRMGWYRQAPGKEREFVATIDFGTSTYYADSVKGRFTISRDNAKNTVYLQMNSLKPEDTAVYYCAVFDAVSYYGRDTHLYWGQGTQVTVSS

SEQ ID NO: 18262 - protein, 126 aa, Artificial Sequence
  Chemically Synthesized
QVQLQESGGGLVQAGGSLRLSCAASGNISPAVAMGWYRQAPGKEREFVAGITSGTITNYADSVKGRFTISRDNAKNTVYLQMNSLKPEDTAVYYCAVPIVSSVYEWVYDIGHLYYWGQGTQVTVSS

SEQ ID NO: 18263 - protein, 122 aa, Artificial Sequence
  Chemically Synthesized
QVQLQESGGGLVQAGGSLRLSCAASGSISSIYAMGWYRQAPGKERELVASITGGSNTNYADSVKGRFTISRDNAKNTVYLQMNSLKPEDTAVYYCAKVLLTGTTLTLVVMYWGQGTQVTVSS

SEQ ID NO: 18264 - protein, 121 aa, Artificial Sequence
  Chemically Synthesized
QVQLQESGGGLVQAGGSLRLSCAASGNISYYVAMGWYRQAPGKERELVAAIGQGTTTYYADSVKGRFTISRDNAKNTVYLQMNSLKPEDTAVYYCAQDVSYYLTIVEFVYWGQGTQVTVSS

SEQ ID NO: 18265 - protein, 121 aa, Artificial Sequence
  Chemically Synthesized
QVQLQESGGGLVQAGGSLRLSCAASGSISIRPAMGWYRQAPGKEREFVAAIDDGATTNYADSVKGRFTISRDNAKNTVYLQMNSLKPEDTAVYYCAAFVPYLYAYRDYRYWGQGTQVTVSS

SEQ ID NO: 18266 - protein, 118 aa, Artificial Sequence
  Chemically Synthesized
QVQLQESGGGLVQAGGSLRLSCAASGSISFRYAMGWYRQAPGKEREFVASITRGAITNYADSVKGRFTISRDNAKNTVYLQMNSLKPEDTAVYYCAADRYEYAKHGYWGQGTQVTVSS

SEQ ID NO: 18267 - protein, 116 aa, Artificial Sequence
  Chemically Synthesized
QVQLQESGGGLVQAGGSLRLSCAASGNISYTPDMGWYRQAPGKERELVAAISDGGTTYYADSVKGRFTISRDNAKNTVYLQMNSLKPEDTAVYYCAASLQYTHNYWGQGTQVTVSS

SEQ ID NO: 18268 - protein, 126 aa, Artificial Sequence
  Chemically Synthesized
QVQLQESGGGLVQAGGSLRLSCAASGNIFPLYWMGWYRQAPGKEREFVAAIGEGSTTYYADSVKGRFTISRDNAKNTVYLQMNSLKPEDTAVYYCAAEWSRGRRRSWYWDWYHYYWGQGTQVTVSS

SEQ ID NO: 18269 - protein, 116 aa, Artificial Sequence
  Chemically Synthesized
QVQLQESGGGLVQAGGSLRLSCAASGNISPTYMGWYRQAPGKERELVASIAAGGSTNYADSVKGRFTISRDNAKNTVYLQMNSLKPEDTAVYYCAVSTVPISVIYWGQGTQVTVSS

SEQ ID NO: 18270 - protein, 117 aa, Artificial Sequence
  Chemically Synthesized
QVQLQESGGGLVQAGGSLRLSCAASGNISWKRYMGWYRQAPGKEREFVAGINRGATTYYADSVKGRFTISRDNAKNTVYLQMNSLKPEDTAVYYCAVRGRQDFYHYWGQGTQVTVSS

SEQ ID NO: 18271 - protein, 121 aa, Artificial Sequence
  Chemically Synthesized
QVQLQESGGGLVQAGGSLRLSCAASGSISFFGMGWYRQAPGKEREFVASIGGGGITNYADSVKGRFTISRDNAKNTVYLQMNSLKPEDTAVYYCAVYVYHNFSGTRQFFYWGQGTQVTVSS

SEQ ID NO: 18272 - protein, 117 aa, Artificial Sequence
  Chemically Synthesized
QVQLQESGGGLVQAGGSLRLSCAASGLFFVVLMGWYRQAPGKEREFVATINAGGITNYADSVKGRFTISRDNAKNTVYLQMNSLKPEDTAVYYCAAGNRYSYVLLYWGQGTQVTVSS

SEQ ID NO: 18273 - protein, 123 aa, Artificial Sequence
  Chemically Synthesized
QVQLQESGGGLVQAGGSLRLSCAASGYISIPYPMGWYRQAPGKEREFVATIDYGSITYYADSVKGRFTISRDNAKNTVYLQMNSLKPEDTAVYYCAVPYPWPTDDASYYYFYWGQGTQVTVSS

SEQ ID NO: 18274 - protein, 118 aa, Artificial Sequence
  Chemically Synthesized
QVQLQESGGGLVQAGGSLRLSCAASGNISGYTLMGWYRQAPGKEREFVATITIGATTYYADSVKGRFTISRDNAKNTVYLQMNSLKPEDTAVYYCAVEIYNYEYLDYWGQGTQVTVSS

SEQ ID NO: 18275 - protein, 110 aa, Artificial Sequence
  Chemically Synthesized
QVQLQESGGGLVQAGGSLRLSCAASGTIFDGDTMGWYRQAPGKERELVASIGTGGNTNYADSVKGRFTISRDNAKNTVYLQMNSLKPEDTAVYYCAHWYWGQGTQVTVSS

SEQ ID NO: 18276 - protein, 126 aa, Artificial Sequence
  Chemically Synthesized
QVQLQESGGGLVQAGGSLRLSCAASGYIFVWYTMGWYRQAPGKERELVATITYGASTYYADSVKGRFTISRDNAKNTVYLQMNSLKPEDTAVYYCAVYRWPSIGLAFTLRTPYPYWGQGTQVTVSS

SEQ ID NO: 18277 - protein, 122 aa, Artificial Sequence
  Chemically Synthesized
QVQLQESGGGLVQAGGSLRLSCAASGTIFLDYHMGWYRQAPGKEREFVAAISNGSNTYYADSVKGRFTISRDNAKNTVYLQMNSLKPEDTAVYYCAAYLAKPLYADGVYDYWGQGTQVTVSS

SEQ ID NO: 18278 - protein, 125 aa, Artificial Sequence
  Chemically Synthesized
QVQLQESGGGLVQAGGSLRLSCAASGNIFAQDIMGWYRQAPGKERELVAAITLGGSTNYADSVKGRFTISRDNAKNTVYLQMNSLKPEDTAVYYCAAWYPSLGTWVLVITTVMYWGQGTQVTVSS

SEQ ID NO: 18279 - protein, 121 aa, Artificial Sequence
  Chemically Synthesized
QVQLQESGGGLVQAGGSLRLSCAASGNILVTVMGWYRQAPGKERELVASIDYGTSTYYADSVKGRFTISRDNAKNTVYLQMNSLKPEDTAVYYCAVDGDDYYDDSDAHPYWGQGTQVTVSS

SEQ ID NO: 18280 - protein, 125 aa, Artificial Sequence
  Chemically Synthesized
QVQLQESGGGLVQAGGSLRLSCAASGNIFDVAYMGWYRQAPGKERELVAGIDYGGNTYYADSVKGRFTISRDNAKNTVYLQMNSLKPEDTAVYYCAAYQVYWRWIYSNVSTCLYWGQGTQVTVSS

SEQ ID NO: 18281 - protein, 126 aa, Artificial Sequence
  Chemically Synthesized
QVQLQESGGGLVQAGGSLRLSCAASGTIFGTFYMGWYRQAPGKERELVAGIGHGGSTNYADSVKGRFTISRDNAKNTVYLQMNSLKPEDTAVYYCAAYFGADWLSNLYKRYGHRYWGQGTQVTVSS

SEQ ID NO: 18282 - protein, 114 aa, Artificial Sequence
  Chemically Synthesized
QVQLQESGGGLVQAGGSLRLSCAASGSISDVGDMGWYRQAPGKEREFVASITEGGNTYYADSVKGRFTISRDNAKNTVYLQMNSLKPEDTAVYYCAAVAYHAYWGQGTQVTVSS

SEQ ID NO: 18283 - protein, 118 aa, Artificial Sequence
  Chemically Synthesized
QVQLQESGGGLVQAGGSLRLSCAASGNISDAGLMGWYRQAPGKEREFVAGIAFGTNTYYADSVKGRFTISRDNAKNTVYLQMNSLKPEDTAVYYCAVWFYTDNYHWYWGQGTQVTVSS

SEQ ID NO: 18284 - protein, 122 aa, Artificial Sequence
  Chemically Synthesized
QVQLQESGGGLVQAGGSLRLSCAASGYISRWRDMGWYRQAPGKERELVAAITYGGTTYYADSVKGRFTISRDNAKNTVYLQMNSLKPEDTAVYYCAAGVPDYRLYDPYYAYWGQGTQVTVSS

SEQ ID NO: 18285 - protein, 118 aa, Artificial Sequence
  Chemically Synthesized
QVQLQESGGGLVQAGGSLRLSCAASGNISKPDYMGWYRQAPGKEREFVAAIDLGGSTNYADSVKGRFTISRDNAKNTVYLQMNSLKPEDTAVYYCAAYYALGGELRYWGQGTQVTVSS

SEQ ID NO: 18286 - protein, 122 aa, Artificial Sequence
  Chemically Synthesized
QVQLQESGGGLVQAGGSLRLSCAASGSIFYYADMGWYRQAPGKERELVASIAYGSNTNYADSVKGRFTISRDNAKNTVYLQMNSLKPEDTAVYYCAVGQWFVPRDYANYDYWGQGTQVTVSS

SEQ ID NO: 18287 - protein, 116 aa, Artificial Sequence
  Chemically Synthesized
QVQLQESGGGLVQAGGSLRLSCAASGNIFSHGSMGWYRQAPGKEREFVASAVGATTNYADSVKGRFTISRDNAKNTVYLQMNSLKPEDTAVYYCAVLLVTSRVIYWGQGTQVTVSS

SEQ ID NO: 18288 - protein, 118 aa, Artificial Sequence
  Chemically Synthesized
QVQLQESGGGLVQAGGSLRLSCAASGYISDYRCMGWYRQAPGKERELVAGIGDGGTTYYADSVKGRFTISRDNAKNTVYLQMNSLKPEDTAVYYCAADVAWRAYLRYWGQGTQVTVSS

SEQ ID NO: 18289 - protein, 117 aa, Artificial Sequence
  Chemically Synthesized
QVQLQESGGGLVQAGGSLRLSCAASGTISIISMGWYRQAPGKEREFVATIDYGGITNYADSVKGRFTISRDNAKNTVYLQMNSLKPEDTAVYYCAAVNLSDGWHYYWGQGTQVTVSS

SEQ ID NO: 18290 - protein, 126 aa, Artificial Sequence
  Chemically Synthesized
QVQLQESGGGLVQAGGSLRLSCAASGSISGWYYMGWYRQAPGKERELVASIDGGTTTNYADSVKGRFTISRDNAKNTVYLQMNSLKPEDTAVYYCAARTYWLTTIGIGGDRDLDYWGQGTQVTVSS

SEQ ID NO: 18291 - protein, 109 aa, Artificial Sequence
  Chemically Synthesized
QVQLQESGGGLVQAGGSLRLSCAASGTISGAIGMGWYRQAPGKEREFVASIGSVVLPYADSVKGRFTISRDNAKNTVYLQMNSLKPEDTAVYYCAFTYWGQGTQVTVSS

SEQ ID NO: 18292 - protein, 112 aa, Artificial Sequence
  Chemically Synthesized
QVQLQESGGGLVQAGGSLRLSCAASGYISRAGGMGWYRQAPGKERELVAGIAAGSITYYADSVKGRFTISRDNAKNTVYLQMNSLKPEDTAVYYCAVLNMYWGQGTQVTVSS

SEQ ID NO: 18293 - protein, 126 aa, Artificial Sequence
  Chemically Synthesized
QVQLQESGGGLVQAGGSLRLSCAASGSIFWQYYMGWYRQAPGKERELVATISLGGSTNYADSVKGRFTISRDNAKNTVYLQMNSLKPEDTAVYYCAAQDGIDYWDDALYPNGHNYWGQGTQVTVSS

SEQ ID NO: 18294 - protein, 113 aa, Artificial Sequence
  Chemically Synthesized
QVQLQESGGGLVQAGGSLRLSCAASGTISKYSDMGWYRQAPGKERELVATITSGGSTYYADSVKGRFTISRDNAKNTVYLQMNSLKPEDTAVYYCAVWSHEYWGQGTQVTVSS

SEQ ID NO: 18295 - protein, 117 aa, Artificial Sequence
  Chemically Synthesized
QVQLQESGGGLVQAGGSLRLSCAASGNISDVPVMGWYRQAPGKERELVATIDYGTITNYADSVKGRFTISRDNAKNTVYLQMNSLKPEDTAVYYCAAIDYYFFDLYWGQGTQVTVSS

SEQ ID NO: 18296 - protein, 118 aa, Artificial Sequence
  Chemically Synthesized
QVQLQESGGGLVQAGGSLRLSCAASGSIFIRYGMGWYRQAPGKEREFVAGIDSGGNTYYADSVKGRFTISRDNAKNTVYLQMNSLKPEDTAVYYCAVPRGGSYDFDYWGQGTQVTVSS

SEQ ID NO: 18297 - protein, 118 aa, Artificial Sequence
  Chemically Synthesized
QVQLQESGGGLVQAGGSLRLSCAASGSIFRPYFMGWYRQAPGKERELVAAITWGTNTYYADSVKGRFTISRDNAKNTVYLQMNSLKPEDTAVYYCAVYTYYYSVLSYWGQGTQVTVSS

SEQ ID NO: 18298 - protein, 122 aa, Artificial Sequence
  Chemically Synthesized
QVQLQESGGGLVQAGGSLRLSCAASGNISSDRVMGWYRQAPGKERELVATIAYGTSTYYADSVKGRFTISRDNAKNTVYLQMNSLKPEDTAVYYCAVVYPDERDVDSPFPYWGQGTQVTVSS

SEQ ID NO: 18299 - protein, 124 aa, Artificial Sequence
  Chemically Synthesized
QVQLQESGGGLVQAGGSLRLSCAASGYIFDSGMGWYRQAPGKERELVATIDKGANTNYADSVKGRFTISRDNAKNTVYLQMNSLKPEDTAVYYCAVSFRLRFTTLLTLTNRLYWGQGTQVTVSS

SEQ ID NO: 18300 - protein, 118 aa, Artificial Sequence
  Chemically Synthesized
QVQLQESGGGLVQAGGSLRLSCAASGNISDTRGMGWYRQAPGKEREFVATIDSGGNTYYADSVKGRFTISRDNAKNTVYLQMNSLKPEDTAVYYCAANLIFFDTHGYWGQGTQVTVSS

SEQ ID NO: 18301 - protein, 113 aa, Artificial Sequence
  Chemically Synthesized
QVQLQESGGGLVQAGGSLRLSCAASGSISQTYHMGWYRQAPGKERELVAYADSVKGRFTISRDNAKNTVYLQMNSLKPEDTAVYYCAVRYQLLRLNVAWFRYWGQGTQVTVSS

SEQ ID NO: 18302 - protein, 116 aa, Artificial Sequence
  Chemically Synthesized
QVQLQESGGGLVQAGGSLRLSCAASGSISDPRDMGWYRQAPGKEREFVAGITSGGSTYYADSVKGRFTISRDNAKNTVYLQMNSLKPEDTAVYYCAVYRDQEYRYWGQGTQVTVSS

SEQ ID NO: 18303 - protein, 109 aa, Artificial Sequence
  Chemically Synthesized
QVQLQESGGGLVQAGGSLRLSCAASGSIFRAQYMGWYRQAPGKERELVATIGTWWYYQYADSVKGRFTISRDNAKNTVYLQMNSLKPEDTAVYYCAIYWGQGTQVTVSS

SEQ ID NO: 18304 - protein, 117 aa, Artificial Sequence
  Chemically Synthesized
QVQLQESGGGLVQAGGSLRLSCAASGTISLAHFMGWYRQAPGKERELLPLLVTVVIPYADSVKGRFTISRDNAKNTVYLQMNSLKPEDTAVYYCAVYGLDPLTLVYWGQGTQVTVSS

SEQ ID NO: 18305 - protein, 120 aa, Artificial Sequence
  Chemically Synthesized
QVQLQESGGGLVQAGGSLRLSCAASGYISPGLTMGWYRQAPGKERELVATIAGVVIPYADSVKGRFTISRDNAKNTVYLQMNSLKPEDTAVYYCAVTLVTSLSTTVTMYWGQGTQVTVSS

SEQ ID NO: 18306 - protein, 112 aa, Artificial Sequence
  Chemically Synthesized
QVQLQESGGGLVQAGGSLRLSCAASGSISRNDSMGWYRQAPGKEREFVAAIAGGTTTYYADSVKGRFTISRDNAKNTVYLQMNSLKPEDTAVYYCAVSHYYWGQGTQVTVSS

SEQ ID NO: 18307 - protein, 118 aa, Artificial Sequence
  Chemically Synthesized
QVQLQESGGGLVQAGGSLRLSCAASGTIFDSTTMGWYRQAPGKEREFVAAIDRGGTTYYADSVKGRFTISRDNAKNTVYLQMNSLKPEDTAVYYCAARGRTKIAYRYWGQGTQVTVSS

SEQ ID NO: 18308 - protein, 126 aa, Artificial Sequence
  Chemically Synthesized
QVQLQESGGGLVQAGGSLRLSCAASGTIFPPYYMGWYRQAPGKERELVAGINDGTTTNYADSVKGRFTISRDNAKNTVYLQMNSLKPEDTAVYYCAVDYGSPQTPLGDAAGLFSYWGQGTQVTVSS

SEQ ID NO: 18309 - protein, 117 aa, Artificial Sequence
  Chemically Synthesized
QVQLQESGGGLVQAGGSLRLSCAASGSIFSRTDMGWYRQAPGKERELVASIGGGANTNYADSVKGRFTISRDNAKNTVYLQMNSLKPEDTAVYYCAVGTISTLTFYWGQGTQVTVSS

SEQ ID NO: 18310 - protein, 122 aa, Artificial Sequence
  Chemically Synthesized
QVQLQESGGGLVQAGGSLRLSCAASGYISGSYDMGWYRQAPGKERELVAAINRGTSTNYADSVKGRFTISRDNAKNTVYLQMNSLKPEDTAVYYCAALAGRIVRGGNNHGYWGQGTQVTVSS

SEQ ID NO: 18311 - protein, 122 aa, Artificial Sequence
  Chemically Synthesized
QVQLQESGGGLVQAGGSLRLSCAASGTISYYQAMGWYRQAPGKEREFVAGIGDGGITYYADSVKGRFTISRDNAKNTVYLQMNSLKPEDTAVYYCAALDTEARRYGGKLYYWGQGTQVTVSS

SEQ ID NO: 18312 - protein, 118 aa, Artificial Sequence
  Chemically Synthesized
QVQLQESGGGLVQAGGSLRLSCAASGSISSPASMGWYRQAPGKEREFVAAITYGGNTNYADSVKGRFTISRDNAKNTVYLQMNSLKPEDTAVYYCAVLYLGPVRHYYWGQGTQVTVSS

SEQ ID NO: 18313 - protein, 116 aa, Artificial Sequence
  Chemically Synthesized
QVQLQESGGGLVQAGGSLRLSCAASGTMGWYRQAPGKERELVASIGTGATTYYADSVKGRFTISRDNAKNTVYLQMNSLKPEDTAVYYCAALRYIYGYDLYNYYYWGQGTQVTVSS

SEQ ID NO: 18314 - protein, 117 aa, Artificial Sequence
  Chemically Synthesized
QVQLQESGGGLVQAGGSLRLSCAASGTIFGSTMGWYRQAPGKERELVASITYGASTYYADSVKGRFTISRDNAKNTVYLQMNSLKPEDTAVYYCAVDFSTSYWFAYWGQGTQVTVSS

SEQ ID NO: 18315 - protein, 122 aa, Artificial Sequence
  Chemically Synthesized
QVQLQESGGGLVQAGGSLRLSCAASGNIFGFRDMGWYRQAPGKEREFVATIGDGGSTYYADSVKGRFTISRDNAKNTVYLQMNSLKPEDTAVYYCAVQTNPYPYYSRTFGYWGQGTQVTVSS

SEQ ID NO: 18316 - protein, 122 aa, Artificial Sequence
  Chemically Synthesized
QVQLQESGGGLVQAGGSLRLSCAASGYISYETRMGWYRQAPGKEREFVAGINRGTTTYYADSVKGRFTISRDNAKNTVYLQMNSLKPEDTAVYYCAADRKVAVEQPERHRYWGQGTQVTVSS

SEQ ID NO: 18317 - protein, 126 aa, Artificial Sequence
  Chemically Synthesized
QVQLQESGGGLVQAGGSLRLSCAASGTIFGNGAMGWYRQAPGKEREFVAGIAQGASTNYADSVKGRFTISRDNAKNTVYLQMNSLKPEDTAVYYCAVTPRYFQDFALSDKYRHDYWGQGTQVTVSS

SEQ ID NO: 18318 - protein, 122 aa, Artificial Sequence
  Chemically Synthesized
QVQLQESGGGLVQAGGSLRLSCAASGYIFFTSAMGWYRQAPGKERELVASIGYGATTNYADSVKGRFTISRDNAKNTVYLQMNSLKPEDTAVYYCAVDTRDRIARVPLYPYWGQGTQVTVSS

SEQ ID NO: 18319 - protein, 118 aa, Artificial Sequence
  Chemically Synthesized
QVQLQESGGGLVQAGGSLRLSCAASGTISLALYMGWYRQAPGKEREFVAAIAAGTNTYYADSVKGRFTISRDNAKNTVYLQMNSLKPEDTAVYYCAARHLSAYYYDYWGQGTQVTVSS

SEQ ID NO: 18320 - protein, 121 aa, Artificial Sequence
  Chemically Synthesized
QVQLQESGGGLVQAGGSLRLSCAASGNIFRYQSMGWYRQAPGKERELVASIGPGGSTNYADSVKGRFTISRDNAKNTVYLQMNSLKPEDTAVYYCAAYYDRDRAVYRYLYWGQGTQVTVSS

SEQ ID NO: 18321 - protein, 110 aa, Artificial Sequence
  Chemically Synthesized
QVQLQESGGGLVQAGGSLRLSCAASGTISDSPDMGWYRQAPGKEREFVATISYGTSTNYADSVKGRFTISRDNAKNTVYLQMNSLKPEDTAVYYCAYQYWGQGTQVTVSS

SEQ ID NO: 18322 - protein, 118 aa, Artificial Sequence
  Chemically Synthesized
QVQLQESGGGLVQAGGSLRLSCAASGTIFQNSHMGWYRQAPGKEREFVAAISDGSTTNYADSVKGRFTISRDNAKNTVYLQMNSLKPEDTAVYYCAAGAGADIRFYYWGQGTQVTVSS

SEQ ID NO: 18323 - protein, 118 aa, Artificial Sequence
  Chemically Synthesized
QVQLQESGGGLVQAGGSLRLSCAASGNISSQFGMGWYRQAPGKEREFVAGITPGANTNYADSVKGRFTISRDNAKNTVYLQMNSLKPEDTAVYYCAAVTYTRYNHYYWGQGTQVTVSS

SEQ ID NO: 18324 - protein, 122 aa, Artificial Sequence
  Chemically Synthesized
QVQLQESGGGLVQAGGSLRLSCAASGTISRIDYMGWYRQAPGKEREFVATIAEGASTNYADSVKGRFTISRDNAKNTVYLQMNSLKPEDTAVYYCAADVYLQYHWVIWHAYWGQGTQVTVSS

SEQ ID NO: 18325 - protein, 122 aa, Artificial Sequence
  Chemically Synthesized
QVQLQESGGGLVQAGGSLRLSCAASGTISTGIAMGWYRQAPGKEREFVAAISGGSITNYADSVKGRFTISRDNAKNTVYLQMNSLKPEDTAVYYCAVVVYDYTTHQKPHGYWGQGTQVTVSS

SEQ ID NO: 18326 - protein, 118 aa, Artificial Sequence
  Chemically Synthesized
QVQLQESGGGLVQAGGSLRLSCAASGSIFGRVYMGWYRQAPGKEREFVASINYGTSTYYADSVKGRFTISRDNAKNTVYLQMNSLKPEDTAVYYCAVAHYDSTWHAYWGQGTQVTVSS

SEQ ID NO: 18327 - protein, 122 aa, Artificial Sequence
  Chemically Synthesized
QVQLQESGGGLVQAGGSLRLSCAASGTIFQWITMGWYRQAPGKEREFVAAITNGTSTNYADSVKGRFTISRDNAKNTVYLQMNSLKPEDTAVYYCAVTQYISYPGYYHHRYWGQGTQVTVSS

SEQ ID NO: 18328 - protein, 120 aa, Artificial Sequence
  Chemically Synthesized
QVQLQESGGGLVQAGGSLRLSCAASGNISHSWMGWYRQAPGKEREFVASIDWGTSTNYADSVKGRFTISRDNAKNTVYLQMNSLKPEDTAVYYCAVIYDDASYYPTHQYWGQGTQVTVSS

SEQ ID NO: 18329 - protein, 117 aa, Artificial Sequence
  Chemically Synthesized
QVQLQESGGGLVQAGGSLRLSCAASGSISDQYMGWYRQAPGKERELVASITDGTSTYYADSVKGRFTISRDNAKNTVYLQMNSLKPEDTAVYYCAVSWPEPWYYDYWGQGTQVTVSS

SEQ ID NO: 18330 - protein, 118 aa, Artificial Sequence
  Chemically Synthesized
QVQLQESGGGLVQAGGSLRLSCAASGTISDYYMGWYRQAPGKERELVASIGNGGNTYYADSVKGRFTISRDNAKNTVYLQMNSLKPEDTAVYYCAATRRLVALPHDYWGQGTQVTVSS

SEQ ID NO: 18331 - protein, 122 aa, Artificial Sequence
  Chemically Synthesized
QVQLQESGGGLVQAGGSLRLSCAASGTIFYDYTMGWYRQAPGKERELVAGITYGASTYYADSVKGRFTISRDNAKNTVYLQMNSLKPEDTAVYYCAARAPPWEKLRVRHYYWGQGTQVTVSS

SEQ ID NO: 18332 - protein, 118 aa, Artificial Sequence
  Chemically Synthesized
QVQLQESGGGLVQAGGSLRLSCAASGNIFARTTMGWYRQAPGKEREFVAAIAVGGNTNYADSVKGRFTISRDNAKNTVYLQMNSLKPEDTAVYYCAALYRAEAIFYYWGQGTQVTVSS

SEQ ID NO: 18333 - protein, 122 aa, Artificial Sequence
  Chemically Synthesized
QVQLQESGGGLVQAGGSLRLSCAASGNISLVTYMGWYRQAPGKEREFVAAINYGAITNYADSVKGRFTISRDNAKNTVYLQMNSLKPEDTAVYYCAADPDPSYYWIGGHDYWGQGTQVTVSS

SEQ ID NO: 18334 - protein, 118 aa, Artificial Sequence
  Chemically Synthesized
QVQLQESGGGLVQAGGSLRLSCAASGTISATYNMGWYRQAPGKERELVASIAFGATTYYADSVKGRFTISRDNAKNTVYLQMNSLKPEDTAVYYCAALLDALTAHGYWGQGTQVTVSS

SEQ ID NO: 18335 - protein, 115 aa, Artificial Sequence
  Chemically Synthesized
QVQLQESGGGLVQAGGSLRLSCAASGSISTPWMGWYRQAPGKEREFVASIDVGAITNYADSVKGRFTISRDNAKNTVYLQMNSLKPEDTAVYYCAASGDGEFRYWGQGTQVTVSS

SEQ ID NO: 18336 - protein, 118 aa, Artificial Sequence
  Chemically Synthesized
QVQLQESGGGLVQAGGSLRLSCAASGSISFEGDMGWYRQAPGKEREFVASIGGGATTNYADSVKGRFTISRDNAKNTVYLQMNSLKPEDTAVYYCAVDTLITRKHDYWGQGTQVTVSS

SEQ ID NO: 18337 - protein, 126 aa, Artificial Sequence
  Chemically Synthesized
QVQLQESGGGLVQAGGSLRLSCAASGTIFQSYSMGWYRQAPGKEREFVAAIGYGGNTYYADSVKGRFTISRDNAKNTVYLQMNSLKPEDTAVYYCAAPFLWEGVHGIPPDDGHWYWGQGTQVTVSS

SEQ ID NO: 18338 - protein, 121 aa, Artificial Sequence
  Chemically Synthesized
QVQLQESGGGLVQAGGSLRLSCAASGTIFREWMGWYRQAPGKEREFVAAISLGTSTNYADSVKGRFTISRDNAKNTVYLQMNSLKPEDTAVYYCAVDNTALTYANPYYYYWGQGTQVTVSS

SEQ ID NO: 18339 - protein, 125 aa, Artificial Sequence
  Chemically Synthesized
QVQLQESGGGLVQAGGSLRLSCAASGSISSHDVMGWYRQAPGKERELVAGIGEVLLPYADSVKGRFTISRDNAKNTVYLQMNSLKPEDTAVYYCAAPSTHATTDYYGSGELFDYWGQGTQVTVSS

SEQ ID NO: 18340 - protein, 122 aa, Artificial Sequence
  Chemically Synthesized
QVQLQESGGGLVQAGGSLRLSCAASGYIFYAPYMGWYRQAPGKERELVAGINHGTSTNYADSVKGRFTISRDNAKNTVYLQMNSLKPEDTAVYYCAVATLLDGYNITYFYYWGQGTQVTVSS

SEQ ID NO: 18341 - protein, 118 aa, Artificial Sequence
  Chemically Synthesized
QVQLQESGGGLVQAGGSLRLSCAASGYIFRSIYMGWYRQAPGKERELVAAIDVGTSTYYADSVKGRFTISRDNAKNTVYLQMNSLKPEDTAVYYCAAHGGGYYKFGYWGQGTQVTVSS

SEQ ID NO: 18342 - protein, 122 aa, Artificial Sequence
  Chemically Synthesized
QVQLQESGGGLVQAGGSLRLSCAASGNIFDTGAMGWYRQAPGKERELVATIDDGSNTNYADSVKGRFTISRDNAKNTVYLQMNSLKPEDTAVYYCAASQAYDVHFLPFLLYWGQGTQVTVSS

SEQ ID NO: 18343 - protein, 118 aa, Artificial Sequence
  Chemically Synthesized
QVQLQESGGGLVQAGGSLRLSCAASGYISVDVYMGWYRQAPGKERELVATIAAGTITYYADSVKGRFTISRDNAKNTVYLQMNSLKPEDTAVYYCAAYYLFDDAHDYWGQGTQVTVSS

SEQ ID NO: 18344 - protein, 118 aa, Artificial Sequence
  Chemically Synthesized
QVQLQESGGGLVQAGGSLRLSCAASGSISWSGFMGWYRQAPGKEREFVATIAWGASTNYADSVKGRFTISRDNAKNTVYLQMNSLKPEDTAVYYCAVHGWTPHLLVYWGQGTQVTVSS

SEQ ID NO: 18345 - protein, 126 aa, Artificial Sequence
  Chemically Synthesized
QVQLQESGGGLVQAGGSLRLSCAASGNIFSVYDMGWYRQAPGKERELVASIGDGAITYYADSVKGRFTISRDNAKNTVYLQMNSLKPEDTAVYYCAVGTGNPYDPVDLTNSAHRYWGQGTQVTVSS

SEQ ID NO: 18346 - protein, 118 aa, Artificial Sequence
  Chemically Synthesized
QVQLQESGGGLVQAGGSLRLSCAASGTISGRLNMGWYRQAPGKEREFVATIGYGGTTNYADSVKGRFTISRDNAKNTVYLQMNSLKPEDTAVYYCAALARHYHVHWYWGQGTQVTVSS

SEQ ID NO: 18347 - protein, 122 aa, Artificial Sequence
  Chemically Synthesized
QVQLQESGGGLVQAGGSLRLSCAASGYIFADDAMGWYRQAPGKEREFVAAINIGSSTNYADSVKGRFTISRDNAKNTVYLQMNSLKPEDTAVYYCAVRWTAGPYIIDTLVYWGQGTQVTVSS

SEQ ID NO: 18348 - protein, 125 aa, Artificial Sequence
  Chemically Synthesized
QVQLQESGGGLVQAGGSLRLSCAASGTIFTGDIMGWYRQAPGKERELVATIDNGTSTNYADSVKGRFTISRDNAKNTVYLQMNSLKPEDTAVYYCAFTTVTGLCGTICITSTLYWGQGTQVTVSS

SEQ ID NO: 18349 - protein, 122 aa, Artificial Sequence
  Chemically Synthesized
QVQLQESGGGLVQAGGSLRLSCAASGTISYYVSMGWYRQAPGKEREFVASISHGSSTYYADSVKGRFTISRDNAKNTVYLQMNSLKPEDTAVYYCAAYAADQTVGRGRYDYWGQGTQVTVSS

SEQ ID NO: 18350 - protein, 125 aa, Artificial Sequence
  Chemically Synthesized
QVQLQESGGGLVQAGGSLRLSCAASGTISTSRAMGWYRQAPGKERELVATIAGGTSTNYADSVKGRFTISRDNAKNTVYLQMNSLKPEDTAVYYCAVDCTTTTTTLVGSTLRMYWGQGTQVTVSS

SEQ ID NO: 18351 - protein, 118 aa, Artificial Sequence
  Chemically Synthesized
QVQLQESGGGLVQAGGSLRLSCAASGYIFYQYEMGWYRQAPGKERELVAGIAYGATTNYADSVKGRFTISRDNAKNTVYLQMNSLKPEDTAVYYCAVWIYQGGYHWYWGQGTQVTVSS

SEQ ID NO: 18352 - protein, 118 aa, Artificial Sequence
  Chemically Synthesized
QVQLQESGGGLVQAGGSLRLSCAASGTISASIVMGWYRQAPGKEREFVASIDLGSNTNYADSVKGRFTISRDNAKNTVYLQMNSLKPEDTAVYYCAAIELTTGYHYYWGQGTQVTVSS

SEQ ID NO: 18353 - protein, 118 aa, Artificial Sequence
  Chemically Synthesized
QVQLQESGGGLVQAGGSLRLSCAASGTIFPRLSMGWYRQAPGKERELVATIAQGSNTNYADSVKGRFTISRDNAKNTVYLQMNSLKPEDTAVYYCAALLQYRPYYYYWGQGTQVTVSS

SEQ ID NO: 18354 - protein, 117 aa, Artificial Sequence
  Chemically Synthesized
QVQLQESGGGLVQAGGSLRLSCAASGNIFVRLMGWYRQAPGKEREFVASIGSGSITNYADSVKGRFTISRDNAKNTVYLQMNSLKPEDTAVYYCAAGYAYNNGLGYWGQGTQVTVSS

SEQ ID NO: 18355 - protein, 116 aa, Artificial Sequence
  Chemically Synthesized
QVQLQESGGGLVQAGGSLRLSCAASGYISLYRSMGWYRQAPGKERELVAAISKGAITNYADSVKGRFTISRDNAKNTVYLQMNSLKPEDTAVYYCAVHDTPYHQYWGQGTQVTVSS

SEQ ID NO: 18356 - protein, 121 aa, Artificial Sequence
  Chemically Synthesized
QVQLQESGGGLVQAGGSLRLSCAASGTISDGDFMGWYRQAPGKERELVATINTGGSTNYADSVKGRFTISRDNAKNTVYLQMNSLKPEDTAVYYCAVVTYDQQDDATLLYWGQGTQVTVSS

SEQ ID NO: 18357 - protein, 125 aa, Artificial Sequence
  Chemically Synthesized
QVQLQESGGGLVQAGGSLRLSCAASGSISDFTDMGWYRQAPGKERELVASIDGGITNYADSVKGRFTISRDNAKNTVYLQMNSLKPEDTAVYYCAVGIGAFDYAFYGRWWTLGYWGQGTQVTVSS

SEQ ID NO: 18358 - protein, 118 aa, Artificial Sequence
  Chemically Synthesized
QVQLQESGGGLVQAGGSLRLSCAASGTISSWRRMGWYRQAPGKERELVATINQGASTNYADSVKGRFTISRDNAKNTVYLQMNSLKPEDTAVYYCAVLYTDRRTHYYWGQGTQVTVSS

SEQ ID NO: 18359 - protein, 118 aa, Artificial Sequence
  Chemically Synthesized
QVQLQESGGGLVQAGGSLRLSCAASGSISLWFLMGWYRQAPGKERELVAGIGDGANTYYADSVKGRFTISRDNAKNTVYLQMNSLKPEDTAVYYCAVHLLDDWLHGYWGQGTQVTVSS

SEQ ID NO: 18360 - protein, 118 aa, Artificial Sequence
  Chemically Synthesized
QVQLQESGGGLVQAGGSLRLSCAASGYISTASNMGWYRQAPGKEREFVAGISLGSTTYYADSVKGRFTISRDNAKNTVYLQMNSLKPEDTAVYYCAAVVYDSGYHAYWGQGTQVTVSS

SEQ ID NO: 18361 - protein, 116 aa, Artificial Sequence
  Chemically Synthesized
QVQLQESGGGLVQAGGSLRLSCAASGTISGYTGMGWYRQAPGKERELVASIGAGANQYADSVKGRFTISRDNAKNTVYLQMNSLKPEDTAVYYCAADAEYKGHPYWGQGTQVTVSS

SEQ ID NO: 18362 - protein, 122 aa, Artificial Sequence
  Chemically Synthesized
QVQLQESGGGLVQAGGSLRLSCAASGTISPLYYMGWYRQAPGKEREFVASIGGGGNTNYADSVKGRFTISRDNAKNTVYLQMNSLKPEDTAVYYCAAIIVERGSTRPYHGYWGQGTQVTVSS

SEQ ID NO: 18363 - protein, 121 aa, Artificial Sequence
  Chemically Synthesized
QVQLQESGGGLVQAGGSLRLSCAASGTISPFPMGWYRQAPGKERELVAAISTGTSTYYADSVKGRFTISRDNAKNTVYLQMNSLKPEDTAVYYCAAGDRRVYYAYKPYAYWGQGTQVTVSS

SEQ ID NO: 18364 - protein, 114 aa, Artificial Sequence
  Chemically Synthesized
QVQLQESGGGLVQAGGSLRLSCAASGTISYAPGMGWYRQAPGKERELVASINYGTSTYYADSVKGRFTISRDNAKNTVYLQMNSLKPEDTAVYYCAVQLAYGYWGQGTQVTVSS

SEQ ID NO: 18365 - protein, 110 aa, Artificial Sequence
  Chemically Synthesized
QVQLQESGGGLVQAGGSLRLSCAASGSISSGTYMGWYRQAPGKEREFVAGISEGASTNYADSVKGRFTISRDNAKNTVYLQMNSLKPEDTAVYYCASMYWGQGTQVTVSS

SEQ ID NO: 18366 - protein, 122 aa, Artificial Sequence
  Chemically Synthesized
QVQLQESGGGLVQAGGSLRLSCAASGYIFGPIEMGWYRQAPGKERELVAGINKGGITYYADSVKGRFTISRDNAKNTVYLQMNSLKPEDTAVYYCAVRDQYYDNYKNPFYYWGQGTQVTVSS

SEQ ID NO: 18367 - protein, 118 aa, Artificial Sequence
  Chemically Synthesized
QVQLQESGGGLVQAGGSLRLSCAASGSISQYPVMGWYRQAPGKERELVASIDGGGTTNYADSVKGRFTISRDNAKNTVYLQMNSLKPEDTAVYYCAAVIRRSRWFFYWGQGTQVTVSS

SEQ ID NO: 18368 - protein, 118 aa, Artificial Sequence
  Chemically Synthesized
QVQLQESGGGLVQAGGSLRLSCAASGTIFGGDNMGWYRQAPGKERELVAAISAGGITYYADSVKGRFTISRDNAKNTVYLQMNSLKPEDTAVYYCAVYTDYPAVLDYWGQGTQVTVSS

SEQ ID NO: 18369 - protein, 118 aa, Artificial Sequence
  Chemically Synthesized
QVQLQESGGGLVQAGGSLRLSCAASGNISRQYKMGWYRQAPGKERELVAGISGGASTNYADSVKGRFTISRDNAKNTVYLQMNSLKPEDTAVYYCAAVHSRRAYHYYWGQGTQVTVSS

SEQ ID NO: 18370 - protein, 121 aa, Artificial Sequence
  Chemically Synthesized
QVQLQESGGGLVQAGGSLRLSCAASGNFLVVVMGWYRQAPGKEREFVAAIGRGAITNYADSVKGRFTISRDNAKNTVYLQMNSLKPEDTAVYYCAATYYNYIDRPYQLDYWGQGTQVTVSS

SEQ ID NO: 18371 - protein, 117 aa, Artificial Sequence
  Chemically Synthesized
QVQLQESGGGLVQAGGSLRLSCAASGYIFQTHTMGWYRQAPGKEREFVAAIGHGGSTNYADSVKGRFTISRDNAKNTVYLQMNSLKPEDTAVYYCAAEDYDDTSHYWGQGTQVTVSS

SEQ ID NO: 18372 - protein, 113 aa, Artificial Sequence
  Chemically Synthesized
QVQLQESGGGLVQAGGSLRLSCAASGSISDPHDMGWYRQAPGKEREFVASINPGGSTYYADSVKGRFTISRDNAKNTVYLQMNSLKPEDTAVYYCADISLYYWGQGTQVTVSS

SEQ ID NO: 18373 - protein, 121 aa, Artificial Sequence
  Chemically Synthesized
QVQLQESGGGLVQAGGSLRLSCAASGTIFLRGDMGWYRQAPGKERELVAAIILVLVPYADSVKGRFTISRDNAKNTVYLQMNSLKPEDTAVYYCAVVLYGGGPFAHGYAYWGQGTQVTVSS

SEQ ID NO: 18374 - protein, 118 aa, Artificial Sequence
  Chemically Synthesized
QVQLQESGGGLVQAGGSLRLSCAASGTISTYTPMGWYRQAPGKERELVAGIDLGATTNYADSVKGRFTISRDNAKNTVYLQMNSLKPEDTAVYYCAAGTDIRRSLFYWGQGTQVTVSS

SEQ ID NO: 18375 - protein, 126 aa, Artificial Sequence
  Chemically Synthesized
QVQLQESGGGLVQAGGSLRLSCAASGNIFDHIVMGWYRQAPGKERELVATIAWGANTYYADSVKGRFTISRDNAKNTVYLQMNSLKPEDTAVYYCAAGWVYLFSRSPYYQGWLGYWGQGTQVTVSS

SEQ ID NO: 18376 - protein, 113 aa, Artificial Sequence
  Chemically Synthesized
QVQLQESGGGLVQAGGSLRLSCAASGSISPYLYMGWYRQAPGKEREFVATISSGTITNYADSVKGRFTISRDNAKNTVYLQMNSLKPEDTAVYYCAVCTTLYWGQGTQVTVSS

SEQ ID NO: 18377 - protein, 117 aa, Artificial Sequence
  Chemically Synthesized
QVQLQESGGGLVQAGGSLRLSCAASGNISPWFYMGWYRQAPGKERELVAGIATGVLPYADSVKGRFTISRDNAKNTVYLQMNSLKPEDTAVYYCAAIVAATTYLYYWGQGTQVTVSS

SEQ ID NO: 18378 - protein, 118 aa, Artificial Sequence
  Chemically Synthesized
QVQLQESGGGLVQAGGSLRLSCAASGNIFVHDPMGWYRQAPGKERELVASISYGGTTYYADSVKGRFTISRDNAKNTVYLQMNSLKPEDTAVYYCAAYRPSAWAFRYWGQGTQVTVSS

SEQ ID NO: 18379 - protein, 117 aa, Artificial Sequence
  Chemically Synthesized
QVQLQESGGGLVQAGGSLRLSCAASGSISDVPVMGWYRQAPGKEREFVAAIDTVLLPYADSVKGRFTISRDNAKNTVYLQMNSLKPEDTAVYYCAVDVDHAGYHSYWGQGTQVTVSS

SEQ ID NO: 18380 - protein, 126 aa, Artificial Sequence
  Chemically Synthesized
QVQLQESGGGLVQAGGSLRLSCAASGTISYAYSMGWYRQAPGKERELVATIGWGANTNYADSVKGRFTISRDNAKNTVYLQMNSLKPEDTAVYYCAVPAYPYGSDTYADNRGYRYWGQGTQVTVSS

SEQ ID NO: 18381 - protein, 125 aa, Artificial Sequence
  Chemically Synthesized
QVQLQESGGGLVQAGGSLRLSCAASGNISYPLRMGWYRQAPGKERELVASIDSGGTTYYADSVKGRFTISRDNAKNTVYLQMNSLKPEDTAVYYCAADPIGVGYTSGTLTVVLYWGQGTQVTVSS

SEQ ID NO: 18382 - protein, 118 aa, Artificial Sequence
  Chemically Synthesized
QVQLQESGGGLVQAGGSLRLSCAASGYIFTVRYMGWYRQAPGKERELVATINEGASTNYADSVKGRFTISRDNAKNTVYLQMNSLKPEDTAVYYCAAADSYYDDLNYWGQGTQVTVSS

SEQ ID NO: 18383 - protein, 118 aa, Artificial Sequence
  Chemically Synthesized
QVQLQESGGGLVQAGGSLRLSCAASGTIFYHRNMGWYRQAPGKERELVATIDYGATTYYADSVKGRFTISRDNAKNTVYLQMNSLKPEDTAVYYCAVDSDRFQRHGYWGQGTQVTVSS

SEQ ID NO: 18384 - protein, 118 aa, Artificial Sequence
  Chemically Synthesized
QVQLQESGGGLVQAGGSLRLSCAASGNISRYYVMGWYRQAPGKEREFVATIGDGSSTNYADSVKGRFTISRDNAKNTVYLQMNSLKPEDTAVYYCAATYSVPTGYVYWGQGTQVTVSS

SEQ ID NO: 18385 - protein, 111 aa, Artificial Sequence
  Chemically Synthesized
QVQLQESGGGLVQAGGSLRLSCAASGSISNSYAMGWYRQAPGKERELVAAIGIGASTYYADSVKGRFTISRDNAKNTVYLQMNSLKPEDTAVYYCAAVMYWGQGTQVTVSS

SEQ ID NO: 18386 - protein, 116 aa, Artificial Sequence
  Chemically Synthesized
QVQLQESGGGLVQAGGSLRLSCAASGTIFRYVPMGWYRQAPGKERELVAGISSGSTTNYADSVKGRFTISRDNAKNTVYLQMNSLKPEDTAVYYCAVTYYGAYLYWGQGTQVTVSS

SEQ ID NO: 18387 - protein, 118 aa, Artificial Sequence
  Chemically Synthesized
QVQLQESGGGLVQAGGSLRLSCAASGTISQFPVMGWYRQAPGKERELVAAISYGTSTYYADSVKGRFTISRDNAKNTVYLQMNSLKPEDTAVYYCAAEGDDWRYHRYWGQGTQVTVSS

SEQ ID NO: 18388 - protein, 122 aa, Artificial Sequence
  Chemically Synthesized
QVQLQESGGGLVQAGGSLRLSCAASGTIFRDSRMGWYRQAPGKERELVASITYGGNTNYADSVKGRFTISRDNAKNTVYLQMNSLKPEDTAVYYCAVGIPFDVGDRYSHPYWGQGTQVTVSS

SEQ ID NO: 18389 - protein, 118 aa, Artificial Sequence
  Chemically Synthesized
QVQLQESGGGLVQAGGSLRLSCAASGYISELDTMGWYRQAPGKERELVASISYGAITNYADSVKGRFTISRDNAKNTVYLQMNSLKPEDTAVYYCAATDQYRTILDYWGQGTQVTVSS

SEQ ID NO: 18390 - protein, 118 aa, Artificial Sequence
  Chemically Synthesized
QVQLQESGGGLVQAGGSLRLSCAASGTIFRYTRMGWYRQAPGKEREFVAGITYGGSTYYADSVKGRFTISRDNAKNTVYLQMNSLKPEDTAVYYCAVRGYRPYPLAYWGQGTQVTVSS

SEQ ID NO: 18391 - protein, 124 aa, Artificial Sequence
  Chemically Synthesized
QVQLQESGGGLVQAGGSLRLSCAASGTIFRLRYMGWYRQAPGKEREFVAAIGLGSNTNYADSVKGRFTISRDNAKNTVYLQMNSLKPEDTAVYYCAVYGATWPVYRGGARHGYWGQGTQVTVSS

SEQ ID NO: 18392 - protein, 122 aa, Artificial Sequence
  Chemically Synthesized
QVQLQESGGGLVQAGGSLRLSCAASGTISGYWVMGWYRQAPGKERELVATIASGTSTNYADSVKGRFTISRDNAKNTVYLQMNSLKPEDTAVYYCAVYYAPTGLYVIVYYYWGQGTQVTVSS

SEQ ID NO: 18393 - protein, 122 aa, Artificial Sequence
  Chemically Synthesized
QVQLQESGGGLVQAGGSLRLSCAASGSISYNDDMGWYRQAPGKERELVASIDAGTSTNYADSVKGRFTISRDNAKNTVYLQMNSLKPEDTAVYYCAANENPKEADVTRHGYWGQGTQVTVSS

SEQ ID NO: 18394 - protein, 118 aa, Artificial Sequence
  Chemically Synthesized
QVQLQESGGGLVQAGGSLRLSCAASGNIFVPRYMGWYRQAPGKERELVAAISKGSNTYYADSVKGRFTISRDNAKNTVYLQMNSLKPEDTAVYYCAVYRRHLGHLRYWGQGTQVTVSS

SEQ ID NO: 18395 - protein, 118 aa, Artificial Sequence
  Chemically Synthesized
QVQLQESGGGLVQAGGSLRLSCAASGYIFTDYQMGWYRQAPGKERELVAAITRGGTTYYADSVKGRFTISRDNAKNTVYLQMNSLKPEDTAVYYCAVRVTYLWPHWYWGQGTQVTVSS

SEQ ID NO: 18396 - protein, 118 aa, Artificial Sequence
  Chemically Synthesized
QVQLQESGGGLVQAGGSLRLSCAASGNISYVRYMGWYRQAPGKERELVAAITAGATTYYADSVKGRFTISRDNAKNTVYLQMNSLKPEDTAVYYCAAPRNYVRLFRYWGQGTQVTVSS

SEQ ID NO: 18397 - protein, 122 aa, Artificial Sequence
  Chemically Synthesized
QVQLQESGGGLVQAGGSLRLSCAASGTIFRVQIMGWYRQAPGKERELVATIAVGATTYYADSVKGRFTISRDNAKNTVYLQMNSLKPEDTAVYYCAVQIANYGDPLIVYQYWGQGTQVTVSS

SEQ ID NO: 18398 - protein, 117 aa, Artificial Sequence
  Chemically Synthesized
QVQLQESGGGLVQAGGSLRLSCAASGTIFDTDDMGWYRQAPGKERELVATINYGSITYYADSVKGRFTISRDNAKNTVYLQMNSLKPEDTAVYYCAARWDTITYIYWGQGTQVTVSS

SEQ ID NO: 18399 - protein, 126 aa, Artificial Sequence
  Chemically Synthesized
QVQLQESGGGLVQAGGSLRLSCAASGNIFYYYYMGWYRQAPGKERELVAAIAYGGSTYYADSVKGRFTISRDNAKNTVYLQMNSLKPEDTAVYYCAVWYYQARRQIDRGYYWHRYWGQGTQVTVSS

SEQ ID NO: 18400 - protein, 111 aa, Artificial Sequence
  Chemically Synthesized
QVQLQESGGGLVQAGGSLRLSCAASGNISYREIMGWYRQAPGKERELVAGIDGGAYLYADSVKGRFTISRDNAKNTVYLQMNSLKPEDTAVYYCAVSLIYWGQGTQVTVSS

SEQ ID NO: 18401 - protein, 118 aa, Artificial Sequence
  Chemically Synthesized
QVQLQESGGGLVQAGGSLRLSCAASGSIFDYSAMGWYRQAPGKEREFVATITPGANTYYADSVKGRFTISRDNAKNTVYLQMNSLKPEDTAVYYCAVVRRGYLQFGYWGQGTQVTVSS

SEQ ID NO: 18402 - protein, 122 aa, Artificial Sequence
  Chemically Synthesized
QVQLQESGGGLVQAGGSLRLSCAASGTISDHRYMGWYRQAPGKEREFVASITSGTTTYYADSVKGRFTISRDNAKNTVYLQMNSLKPEDTAVYYCAVDDRANDYIYDSLYYWGQGTQVTVSS

SEQ ID NO: 18403 - protein, 122 aa, Artificial Sequence
  Chemically Synthesized
QVQLQESGGGLVQAGGSLRLSCAASGTIFSFSMGWYRQAPGKEREFVASIAKGSSTNYADSVKGRFTISRDNAKNTVYLQMNSLKPEDTAVYYCAQAELYIWGNHAYQFPYWGQGTQVTVSS

SEQ ID NO: 18404 - protein, 126 aa, Artificial Sequence
  Chemically Synthesized
QVQLQESGGGLVQAGGSLRLSCAASGTISDFTYMGWYRQAPGKEREFVATIDAGTITNYADSVKGRFTISRDNAKNTVYLQMNSLKPEDTAVYYCAAQTLGYWYQYSIVHYILYYWGQGTQVTVSS

SEQ ID NO: 18405 - protein, 118 aa, Artificial Sequence
  Chemically Synthesized
QVQLQESGGGLVQAGGSLRLSCAASGTISYYGFMGWYRQAPGKEREFVAAISAGTSTNYADSVKGRFTISRDNAKNTVYLQMNSLKPEDTAVYYCAAYTVTHFALIYWGQGTQVTVSS

SEQ ID NO: 18406 - protein, 122 aa, Artificial Sequence
  Chemically Synthesized
QVQLQESGGGLVQAGGSLRLSCAASGSISSCRMGWYRQAPGKEREFVATISNGSTTYYADSVKGRFTISRDNAKNTVYLQMNSLKPEDTAVYYCAWSRAVESTSNDRRHDYWGQGTQVTVSS

SEQ ID NO: 18407 - protein, 119 aa, Artificial Sequence
  Chemically Synthesized
QVQLQESGGGLVQAGGSLRLSCAASGYIFYGDIMGWYRQAPGKERELVASIGRGGITNYADSVKGRFTISRDNAKNTVYLQMNSLKPEDTAVYYCAVAKRYQRYYYLYWGQGTQVTVSS

SEQ ID NO: 18408 - protein, 126 aa, Artificial Sequence
  Chemically Synthesized
QVQLQESGGGLVQAGGSLRLSCAASGTIFQTTNMGWYRQAPGKEREFVASIAYGAITYYADSVKGRFTISRDNAKNTVYLQMNSLKPEDTAVYYCAAERSVWTYLAYYHSTLHRYWGQGTQVTVSS

SEQ ID NO: 18409 - protein, 125 aa, Artificial Sequence
  Chemically Synthesized
QVQLQESGGGLVQAGGSLRLSCAASGTFLTTWMGWYRQAPGKERELVATINQGGNTYYADSVKGRFTISRDNAKNTVYLQMNSLKPEDTAVYYCAAPYDQEYNDYTDYALPYDYWGQGTQVTVSS

SEQ ID NO: 18410 - protein, 118 aa, Artificial Sequence
  Chemically Synthesized
QVQLQESGGGLVQAGGSLRLSCAASGYISWDRVMGWYRQAPGKERELVATIGSGSTTNYADSVKGRFTISRDNAKNTVYLQMNSLKPEDTAVYYCAVVVRDYGYLAYWGQGTQVTVSS

SEQ ID NO: 18411 - protein, 126 aa, Artificial Sequence
  Chemically Synthesized
QVQLQESGGGLVQAGGSLRLSCAASGNISGYYLMGWYRQAPGKERELVAAITNGGSTYYADSVKGRFTISRDNAKNTVYLQMNSLKPEDTAVYYCAVSRATDVGWLVGTDVGLSYWGQGTQVTVSS

SEQ ID NO: 18412 - protein, 126 aa, Artificial Sequence
  Chemically Synthesized
QVQLQESGGGLVQAGGSLRLSCAASGSISNRHYMGWYRQAPGKERELVAAIGYGTSTYYADSVKGRFTISRDNAKNTVYLQMNSLKPEDTAVYYCAVYTTTVYHREDGYDYVHAYWGQGTQVTVSS

SEQ ID NO: 18413 - protein, 126 aa, Artificial Sequence
  Chemically Synthesized
QVQLQESGGGLVQAGGSLRLSCAASGNISSWYYMGWYRQAPGKEREFVAGITYGTTTNYADSVKGRFTISRDNAKNTVYLQMNSLKPEDTAVYYCAVYFLLHADDYYPYDYVFLYWGQGTQVTVSS

SEQ ID NO: 18414 - protein, 121 aa, Artificial Sequence
  Chemically Synthesized
QVQLQESGGGLVQAGGSLRLSCAASGSISIRLMGWYRQAPGKEREFVAGINDGAITYYADSVKGRFTISRDNAKNTVYLQMNSLKPEDTAVYYCAARGGQRDDYTNRHPYWGQGTQVTVSS

SEQ ID NO: 18415 - protein, 122 aa, Artificial Sequence
  Chemically Synthesized
QVQLQESGGGLVQAGGSLRLSCAASGNISYDYAMGWYRQAPGKERELVAAITDGSNTYYADSVKGRFTISRDNAKNTVYLQMNSLKPEDTAVYYCAAYAHRWYDVAGPYGYWGQGTQVTVSS

SEQ ID NO: 18416 - protein, 125 aa, Artificial Sequence
  Chemically Synthesized
QVQLQESGGGLVQAGGSLRLSCAASGTISDATTMGWYRQAPGKERELLPLLMLVVVPYADSVKGRFTISRDNAKNTVYLQMNSLKPEDTAVYYCAVRGYDDSPDIINPLDLHYYWGQGTQVTVSS

SEQ ID NO: 18417 - protein, 117 aa, Artificial Sequence
  Chemically Synthesized
QVQLQESGGGLVQAGGSLRLSCAASGNFLVGVMGWYRQAPGKERELVAAIAEGTITYYADSVKGRFTISRDNAKNTVYLQMNSLKPEDTAVYYCAAYYVLSLTHPYWGQGTQVTVSS

SEQ ID NO: 18418 - protein, 118 aa, Artificial Sequence
  Chemically Synthesized
QVQLQESGGGLVQAGGSLRLSCAASGNISWHRDMGWYRQAPGKEREFVAGITTGAITYYADSVKGRFTISRDNAKNTVYLQMNSLKPEDTAVYYCAAPIYRARYHRYWGQGTQVTVSS

SEQ ID NO: 18419 - protein, 126 aa, Artificial Sequence
  Chemically Synthesized
QVQLQESGGGLVQAGGSLRLSCAASGSISLYVHMGWYRQAPGKERELVASINYGGITYYADSVKGRFTISRDNAKNTVYLQMNSLKPEDTAVYYCAVRYYYLDDGVAYSVRSHDYWGQGTQVTVSS

SEQ ID NO: 18420 - protein, 118 aa, Artificial Sequence
  Chemically Synthesized
QVQLQESGGGLVQAGGSLRLSCAASGSIFDYIGMGWYRQAPGKEREFVAAINGGANTNYADSVKGRFTISRDNAKNTVYLQMNSLKPEDTAVYYCAVLQGHTFPYPYWGQGTQVTVSS

SEQ ID NO: 18421 - protein, 121 aa, Artificial Sequence
  Chemically Synthesized
QVQLQESGGGLVQAGGSLRLSCAASGNISYNDYMGWYRQAPGKEREFVAGITYVLIPYADSVKGRFTISRDNAKNTVYLQMNSLKPEDTAVYYCAADGDDWYTGDYYHGYWGQGTQVTVSS

SEQ ID NO: 18422 - protein, 121 aa, Artificial Sequence
  Chemically Synthesized
QVQLQESGGGLVQAGGSLRLSCAASGTIFARSVMGWYRQAPGKEREFVATIGYGAITNYADSVKGRFTISRDNAKNTVYLQMNSLKPEDTAVYYCAARSWLYFNVGYHYYWGQGTQVTVSS

SEQ ID NO: 18423 - protein, 118 aa, Artificial Sequence
  Chemically Synthesized
QVQLQESGGGLVQAGGSLRLSCAASGYIFRAGRMGWYRQAPGKEREFVAAIGYGATTNYADSVKGRFTISRDNAKNTVYLQMNSLKPEDTAVYYCAARRYRLHQLYYWGQGTQVTVSS

SEQ ID NO: 18424 - protein, 122 aa, Artificial Sequence
  Chemically Synthesized
QVQLQESGGGLVQAGGSLRLSCAASGNISNHIPMGWYRQAPGKERELVAGISLGSNTYYADSVKGRFTISRDNAKNTVYLQMNSLKPEDTAVYYCAVDDNRYEDGATILYYWGQGTQVTVSS

SEQ ID NO: 18425 - protein, 122 aa, Artificial Sequence
  Chemically Synthesized
QVQLQESGGGLVQAGGSLRLSCAASGTISTYDYMGWYRQAPGKERELVAAINYGTNTNYADSVKGRFTISRDNAKNTVYLQMNSLKPEDTAVYYCAVGSSWRRWLWYGHYYWGQGTQVTVSS

SEQ ID NO: 18426 - protein, 118 aa, Artificial Sequence
  Chemically Synthesized
QVQLQESGGGLVQAGGSLRLSCAASGNIFVDVLMGWYRQAPGKERELVASISSGAITNYADSVKGRFTISRDNAKNTVYLQMNSLKPEDTAVYYCAVAPWYWPYHGYWGQGTQVTVSS

SEQ ID NO: 18427 - protein, 118 aa, Artificial Sequence
  Chemically Synthesized
QVQLQESGGGLVQAGGSLRLSCAASGSIFVYRLMGWYRQAPGKERELVATINRGTITNYADSVKGRFTISRDNAKNTVYLQMNSLKPEDTAVYYCAVGWHQYFSHPYWGQGTQVTVSS

SEQ ID NO: 18428 - protein, 122 aa, Artificial Sequence
  Chemically Synthesized
QVQLQESGGGLVQAGGSLRLSCAASGTIFELRAMGWYRQAPGKERELVATISLGGNTYYADSVKGRFTISRDNAKNTVYLQMNSLKPEDTAVYYCAARKRGIDAFYKRYVYWGQGTQVTVSS

SEQ ID NO: 18429 - protein, 117 aa, Artificial Sequence
  Chemically Synthesized
QVQLQESGGGLVQAGGSLRLSCAASGNIFTYSYMGWYRQAPGKEREFVAAIGMVVIPYADSVKGRFTISRDNAKNTVYLQMNSLKPEDTAVYYCAAQPHGQQGYAYWGQGTQVTVSS

SEQ ID NO: 18430 - protein, 122 aa, Artificial Sequence
  Chemically Synthesized
QVQLQESGGGLVQAGGSLRLSCAASGTISAYADMGWYRQAPGKEREFVASISKGANTNYADSVKGRFTISRDNAKNTVYLQMNSLKPEDTAVYYCAAGYSYSIARFYVLPYWGQGTQVTVSS

SEQ ID NO: 18431 - protein, 118 aa, Artificial Sequence
  Chemically Synthesized
QVQLQESGGGLVQAGGSLRLSCAASGSIFYGAGMGWYRQAPGKEREFVAGISNGGTTNYADSVKGRFTISRDNAKNTVYLQMNSLKPEDTAVYYCAAIYLYLVALRYWGQGTQVTVSS

SEQ ID NO: 18432 - protein, 118 aa, Artificial Sequence
  Chemically Synthesized
QVQLQESGGGLVQAGGSLRLSCAASGNISRIRVMGWYRQAPGKERELVAAITIGGTTNYADSVKGRFTISRDNAKNTVYLQMNSLKPEDTAVYYCAVYSARTYRLRYWGQGTQVTVSS

SEQ ID NO: 18433 - protein, 122 aa, Artificial Sequence
  Chemically Synthesized
QVQLQESGGGLVQAGGSLRLSCAASGTIFYVRSMGWYRQAPGKEREFVASINIGGTTYYADSVKGRFTISRDNAKNTVYLQMNSLKPEDTAVYYCAAKVRYDYTRLNRHRYWGQGTQVTVSS

SEQ ID NO: 18434 - protein, 118 aa, Artificial Sequence
  Chemically Synthesized
QVQLQESGGGLVQAGGSLRLSCAASGYIFRRAWMGWYRQAPGKEREFVAGIGYGTITYYADSVKGRFTISRDNAKNTVYLQMNSLKPEDTAVYYCAVYRHIYNGLTYWGQGTQVTVSS

SEQ ID NO: 18435 - protein, 121 aa, Artificial Sequence
  Chemically Synthesized
QVQLQESGGGLVQAGGSLRLSCAASGNIFLAYGMGWYRQAPGKEREFVAGISRGASTYADSVKGRFTISRDNAKNTVYLQMNSLKPEDTAVYYCAAGTFGWSYGAPGLAYWGQGTQVTVSS

SEQ ID NO: 18436 - protein, 126 aa, Artificial Sequence
  Chemically Synthesized
QVQLQESGGGLVQAGGSLRLSCAASGTIFVYAYMGWYRQAPGKEREFVAGIARGTSTYYADSVKGRFTISRDNAKNTVYLQMNSLKPEDTAVYYCAVLGVAGDNVWYRLPRAHDYWGQGTQVTVSS

SEQ ID NO: 18437 - protein, 125 aa, Artificial Sequence
  Chemically Synthesized
QVQLQESGGGLVQAGGSLRLSCAASGNIFYSIMGWYRQAPGKERELVAAITRGSNTYYADSVKGRFTISRDNAKNTVYLQMNSLKPEDTAVYYCAVLRFGYAGAYPSDRIDFAYWGQGTQVTVSS

SEQ ID NO: 18438 - protein, 126 aa, Artificial Sequence
  Chemically Synthesized
QVQLQESGGGLVQAGGSLRLSCAASGTIFGQVGMGWYRQAPGKERELVAAIATGGITNYADSVKGRFTISRDNAKNTVYLQMNSLKPEDTAVYYCAVAGYSQSHPWRTYRYAYEYWGQGTQVTVSS

SEQ ID NO: 18439 - protein, 118 aa, Artificial Sequence
  Chemically Synthesized
QVQLQESGGGLVQAGGSLRLSCAASGYISYIYVMGWYRQAPGKERELVATITDGGTTYYADSVKGRFTISRDNAKNTVYLQMNSLKPEDTAVYYCAVTRSQRQYLTYWGQGTQVTVSS

SEQ ID NO: 18440 - protein, 118 aa, Artificial Sequence
  Chemically Synthesized
QVQLQESGGGLVQAGGSLRLSCAASGTISHYYVMGWYRQAPGKERELVASIATGAITYYADSVKGRFTISRDNAKNTVYLQMNSLKPEDTAVYYCAVTGNIFPYYRYWGQGTQVTVSS

SEQ ID NO: 18441 - protein, 122 aa, Artificial Sequence
  Chemically Synthesized
QVQLQESGGGLVQAGGSLRLSCAASGSISAGFPMGWYRQAPGKEREFVASIGDGSSTNYADSVKGRFTISRDNAKNTVYLQMNSLKPEDTAVYYCAVGRQYEDDYTDYLAYWGQGTQVTVSS

SEQ ID NO: 18442 - protein, 118 aa, Artificial Sequence
  Chemically Synthesized
QVQLQESGGGLVQAGGSLRLSCAASGTISYGYAMGWYRQAPGKEREFVAGITYGATTYYADSVKGRFTISRDNAKNTVYLQMNSLKPEDTAVYYCAAPYVKQPRYYYWGQGTQVTVSS

SEQ ID NO: 18443 - protein, 122 aa, Artificial Sequence
  Chemically Synthesized
QVQLQESGGGLVQAGGSLRLSCAASGSIFNVVYMGWYRQAPGKEREFVASIDLGANTYYADSVKGRFTISRDNAKNTVYLQMNSLKPEDTAVYYCAAYIVTYYWSAHGHYYWGQGTQVTVSS

SEQ ID NO: 18444 - protein, 121 aa, Artificial Sequence
  Chemically Synthesized
QVQLQESGGGLVQAGGSLRLSCAASGSISPPGYMGWYRQAPGKEREFVATIDPGGSTNYADSVKGRFTISRDNAKNTVYLQMNSLKPEDTAVYYCAAVNYLNSLRTTLFYWGQGTQVTVSS

SEQ ID NO: 18445 - protein, 122 aa, Artificial Sequence
  Chemically Synthesized
QVQLQESGGGLVQAGGSLRLSCAASGTIFRGRPMGWYRQAPGKERELVAAIGYGTTTYYADSVKGRFTISRDNAKNTVYLQMNSLKPEDTAVYYCAATGSYARYRGGYFSYWGQGTQVTVSS

SEQ ID NO: 18446 - protein, 117 aa, Artificial Sequence
  Chemically Synthesized
QVQLQESGGGLVQAGGSLRLSCAASGTIFYWRYMGWYRQAPGKERELVAAISRGGTTYYADSVKGRFTISRDNAKNTVYLQMNSLKPEDTAVYYCAVHAYLYGHAYWGQGTQVTVSS

SEQ ID NO: 18447 - protein, 122 aa, Artificial Sequence
  Chemically Synthesized
QVQLQESGGGLVQAGGSLRLSCAASGYISYLSAMGWYRQAPGKEREFVASIASGANTYYADSVKGRFTISRDNAKNTVYLQMNSLKPEDTAVYYCAVGGGYPYGDYGQYAYWGQGTQVTVSS

SEQ ID NO: 18448 - protein, 118 aa, Artificial Sequence
  Chemically Synthesized
QVQLQESGGGLVQAGGSLRLSCAASGNISKFTDMGWYRQAPGKERELVARYYLRYYYQYADSVKGRFTISRDNAKNTVYLQMNSLKPEDTAVYYCAAYSSDPWFFVYWGQGTQVTVSS

SEQ ID NO: 18449 - protein, 118 aa, Artificial Sequence
  Chemically Synthesized
QVQLQESGGGLVQAGGSLRLSCAASGNIFWFTKMGWYRQAPGKERELVAGIAWGSSTYYADSVKGRFTISRDNAKNTVYLQMNSLKPEDTAVYYCAASTRKRFPYGYWGQGTQVTVSS

SEQ ID NO: 18450 - protein, 118 aa, Artificial Sequence
  Chemically Synthesized
QVQLQESGGGLVQAGGSLRLSCAASGSISYIPAMGWYRQAPGKERELVASITIGSNTNYADSVKGRFTISRDNAKNTVYLQMNSLKPEDTAVYYCAVSIAYRRRLVYWGQGTQVTVSS

SEQ ID NO: 18451 - protein, 126 aa, Artificial Sequence
  Chemically Synthesized
QVQLQESGGGLVQAGGSLRLSCAASGTISYEYVMGWYRQAPGKERELVASINDGGNTNYADSVKGRFTISRDNAKNTVYLQMNSLKPEDTAVYYCAAYDDELTRKRYYTYRDHLYWGQGTQVTVSS

SEQ ID NO: 18452 - protein, 121 aa, Artificial Sequence
  Chemically Synthesized
QVQLQESGGGLVQAGGSLRLSCAASGNISFTFDMGWYRQAPGKEREFVASITHGGTTNYADSVKGRFTISRDNAKNTVYLQMNSLKPEDTAVYYCAVEYARYGGIRYAFYWGQGTQVTVSS

SEQ ID NO: 18453 - protein, 118 aa, Artificial Sequence
  Chemically Synthesized
QVQLQESGGGLVQAGGSLRLSCAASGYISTVRWMGWYRQAPGKEREFVAAIAYGSITNYADSVKGRFTISRDNAKNTVYLQMNSLKPEDTAVYYCAVIHSYYTPHDYWGQGTQVTVSS

SEQ ID NO: 18454 - protein, 119 aa, Artificial Sequence
  Chemically Synthesized
QVQLQESGGGLVQAGGSLRLSCAASGYIFVSPYYYMGWYRQAPGKERELVAGIAGGASTYYADSVKGRFTISRDNAKNTVYLQMNSLKPEDTAVYYCAALSPKIGLAYWGQGTQVTVSS

SEQ ID NO: 18455 - protein, 122 aa, Artificial Sequence
  Chemically Synthesized
QVQLQESGGGLVQAGGSLRLSCAASGSISSWQDMGWYRQAPGKERELVAAIGRGTTTNYADSVKGRFTISRDNAKNTVYLQMNSLKPEDTAVYYCAVASLDDGYPAPGHDYWGQGTQVTVSS

SEQ ID NO: 18456 - protein, 126 aa, Artificial Sequence
  Chemically Synthesized
QVQLQESGGGLVQAGGSLRLSCAASGYIFGLSFMGWYRQAPGKERELVASISFGGITYYADSVKGRFTISRDNAKNTVYLQMNSLKPEDTAVYYCAANLYWDDYPIWVEIFPYAYWGQGTQVTVSS

SEQ ID NO: 18457 - protein, 116 aa, Artificial Sequence
  Chemically Synthesized
QVQLQESGGGLVQAGGSLRLSCAASGFSASIMGWYRQAPGKERELVAAISVGTTTYYADSVKGRFTISRDNAKNTVYLQMNSLKPEDTAVYYCAVLTVVIYALVYWGQGTQVTVSS

SEQ ID NO: 18458 - protein, 117 aa, Artificial Sequence
  Chemically Synthesized
QVQLQESGGGLVQAGGSLRLSCAASGTIFDNSDMGWYRQAPGKERELVAAIAPGSNTNYADSVKGRFTISRDNAKNTVYLQMNSLKPEDTAVYYCAVEDYRYSNMYWGQGTQVTVSS

SEQ ID NO: 18459 - protein, 121 aa, Artificial Sequence
  Chemically Synthesized
QVQLQESGGGLVQAGGSLRLSCAASGYISRYLRMGWYRQAPGKERELVAAIGAGSNTYYADSVKGRFTISRDNAKNTVYLQMNSLKPEDTAVYYCAAKSYLKVPWRHHLYWGQGTQVTVSS

SEQ ID NO: 18460 - protein, 122 aa, Artificial Sequence
  Chemically Synthesized
QVQLQESGGGLVQAGGSLRLSCAASGTIFRPRRMGWYRQAPGKERELVAGIARGTSTYYADSVKGRFTISRDNAKNTVYLQMNSLKPEDTAVYYCAAGSYHLGPGYTYYGYWGQGTQVTVSS

SEQ ID NO: 18461 - protein, 118 aa, Artificial Sequence
  Chemically Synthesized
QVQLQESGGGLVQAGGSLRLSCAASGYISYVYGMGWYRQAPGKEREFVAAIASGANTYYADSVKGRFTISRDNAKNTVYLQMNSLKPEDTAVYYCAVVYLWHNFLKYWGQGTQVTVSS

SEQ ID NO: 18462 - protein, 119 aa, Artificial Sequence
  Chemically Synthesized
QVQLQESGGGLVQAGGSLRLSCAASGSISTWSSDMGWYRQAPGKERELVAGIADGSNTNYADSVKGRFTISRDNAKNTVYLQMNSLKPEDTAVYYCAVTYHLTAYYYYWGQGTQVTVSS

SEQ ID NO: 18463 - protein, 127 aa, Artificial Sequence
  Chemically Synthesized
QVQLQESGGGLVQAGGSLRLSCAASGYISTSLYMGWYRQAPGKEREFVASIGYGGTTYYADSVKGRFTISRDNAKNTVYLQMNSLKPEDTAVYYCAVIEAAGYEVGDDWVISRYGYWGQGTQVTVSS

SEQ ID NO: 18464 - protein, 126 aa, Artificial Sequence
  Chemically Synthesized
QVQLQESGGGLVQAGGSLRLSCAASGSISARNNMGWYRQAPGKEREFVAGIGWGSTTNYADSVKGRFTISRDNAKNTVYLQMNSLKPEDTAVYYCAVPVDVYEIERGYVSDRLYYWGQGTQVTVSS

SEQ ID NO: 18465 - protein, 125 aa, Artificial Sequence
  Chemically Synthesized
QVQLQESGGGLVQAGGSLRLSCAASGSISSWGVMGWYRQAPGKERELVAGIDVGSSTYYADSVKGRFTISRDNAKNTVYLQMNSLKPEDTAVYYCAAYYFDAQYDNPLDAASFYWGQGTQVTVSS

SEQ ID NO: 18466 - protein, 122 aa, Artificial Sequence
  Chemically Synthesized
QVQLQESGGGLVQAGGSLRLSCAASGNISTYNYMGWYRQAPGKERELVATISGGTSTYYADSVKGRFTISRDNAKNTVYLQMNSLKPEDTAVYYCAVRYAGYGTVYALFYYWGQGTQVTVSS

SEQ ID NO: 18467 - protein, 117 aa, Artificial Sequence
  Chemically Synthesized
QVQLQESGGGLVQAGGSLRLSCAASGSIFGWPYMGWYRQAPGKERELVAVLMLVVVPYADSVKGRFTISRDNAKNTVYLQMNSLKPEDTAVYYCAAPVRDYDSHDYWGQGTQVTVSS

SEQ ID NO: 18468 - protein, 126 aa, Artificial Sequence
  Chemically Synthesized
QVQLQESGGGLVQAGGSLRLSCAASGTIFGHRAMGWYRQAPGKEREFVAAISYGGSTNYADSVKGRFTISRDNAKNTVYLQMNSLKPEDTAVYYCAVKVTVLLAAHTDYDVYLYYWGQGTQVTVSS

SEQ ID NO: 18469 - protein, 118 aa, Artificial Sequence
  Chemically Synthesized
QVQLQESGGGLVQAGGSLRLSCAASGTIFPFNGMGWYRQAPGKEREFVASIDVGGNTNYADSVKGRFTISRDNAKNTVYLQMNSLKPEDTAVYYCAAPTFSLDAFRYWGQGTQVTVSS

SEQ ID NO: 18470 - protein, 122 aa, Artificial Sequence
  Chemically Synthesized
QVQLQESGGGLVQAGGSLRLSCAASGNISYRDDMGWYRQAPGKERELVAGIGLGATTNYADSVKGRFTISRDNAKNTVYLQMNSLKPEDTAVYYCAAERDYGHWYGFAHDYWGQGTQVTVSS

SEQ ID NO: 18471 - protein, 118 aa, Artificial Sequence
  Chemically Synthesized
QVQLQESGGGLVQAGGSLRLSCAASGNISVASVMGWYRQAPGKEREFVAAIGYGTSTNYADSVKGRFTISRDNAKNTVYLQMNSLKPEDTAVYYCAVGYRFVVWFRYWGQGTQVTVSS

SEQ ID NO: 18472 - protein, 122 aa, Artificial Sequence
  Chemically Synthesized
QVQLQESGGGLVQAGGSLRLSCAASGYISSATGMGWYRQAPGKERELVAGIGGGGITYYADSVKGRFTISRDNAKNTVYLQMNSLKPEDTAVYYCAANSSGQIADRIAHSYWGQGTQVTVSS

SEQ ID NO: 18473 - protein, 118 aa, Artificial Sequence
  Chemically Synthesized
QVQLQESGGGLVQAGGSLRLSCAASGSIFFITGMGWYRQAPGKERELVAAITFGGTTNYADSVKGRFTISRDNAKNTVYLQMNSLKPEDTAVYYCAAKASRYTRHLYWGQGTQVTVSS

SEQ ID NO: 18474 - protein, 117 aa, Artificial Sequence
  Chemically Synthesized
QVQLQESGGGLVQAGGSLRLSCAASGNIFHFRFMGWYRQAPGKEREFVATIASGSTTNYADSVKGRFTISRDNAKNTVYLQMNSLKPEDTAVYYCAAGFNYSVFMYWGQGTQVTVSS

SEQ ID NO: 18475 - protein, 118 aa, Artificial Sequence
  Chemically Synthesized
QVQLQESGGGLVQAGGSLRLSCAASGNIFHPIRMGWYRQAPGKEREFVATIGDGTITNYADSVKGRFTISRDNAKNTVYLQMNSLKPEDTAVYYCAAYDRGLYLHGYWGQGTQVTVSS

SEQ ID NO: 18476 - protein, 126 aa, Artificial Sequence
  Chemically Synthesized
QVQLQESGGGLVQAGGSLRLSCAASGTIFDGRAMGWYRQAPGKEREFVAGISAGGITYYADSVKGRFTISRDNAKNTVYLQMNSLKPEDTAVYYCAARHRAWGSWVRVWDRAYRYWGQGTQVTVSS

SEQ ID NO: 18477 - protein, 126 aa, Artificial Sequence
  Chemically Synthesized
QVQLQESGGGLVQAGGSLRLSCAASGYIFLARQMGWYRQAPGKEREFVATIGYGANTNYADSVKGRFTISRDNAKNTVYLQMNSLKPEDTAVYYCAALKRHRGYYYRSGDGPHQYWGQGTQVTVSS

SEQ ID NO: 18478 - protein, 126 aa, Artificial Sequence
  Chemically Synthesized
QVQLQESGGGLVQAGGSLRLSCAASGSISTRAGMGWYRQAPGKERELVAAIDAGASTYYADSVKGRFTISRDNAKNTVYLQMNSLKPEDTAVYYCAAYDRDVARRYIAEERGHHYWGQGTQVTVSS

SEQ ID NO: 18479 - protein, 111 aa, Artificial Sequence
  Chemically Synthesized
QVQLQESGGGLVQAGGSLRLSCAASGYISRYAYMGWYRQAPGKERELVAVLVYADSVKGRFTISRDNAKNTVYLQMNSLKPEDTAVYYCAVGDDADGSIYWGQGTQVTVSS

SEQ ID NO: 18480 - protein, 118 aa, Artificial Sequence
  Chemically Synthesized
QVQLQESGGGLVQAGGSLRLSCAASGSISYLDTMGWYRQAPGKEREFVAGINLGASTYYADSVKGRFTISRDNAKNTVYLQMNSLKPEDTAVYYCAAYKSNTADYGYWGQGTQVTVSS

SEQ ID NO: 18481 - protein, 110 aa, Artificial Sequence
  Chemically Synthesized
QVQLQESGGGLVQAGGSLRLSCAASGSISVASFMGWYRQAPGKEREFVAAITSGSITYYADSVKGRFTISRDNAKNTVYLQMNSLKPEDTAVYYCAAVYWGQGTQVTVSS

SEQ ID NO: 18482 - protein, 118 aa, Artificial Sequence
  Chemically Synthesized
QVQLQESGGGLVQAGGSLRLSCAASGYISGWRQMGWYRQAPGKERELVAAIGRGTTTYYADSVKGRFTISRDNAKNTVYLQMNSLKPEDTAVYYCAVTRYFSPYHSYWGQGTQVTVSS

SEQ ID NO: 18483 - protein, 122 aa, Artificial Sequence
  Chemically Synthesized
QVQLQESGGGLVQAGGSLRLSCAASGSIFYGYRMGWYRQAPGKEREFVASINRGSNTYYADSVKGRFTISRDNAKNTVYLQMNSLKPEDTAVYYCAVRWYFRDNTTYGHGYWGQGTQVTVSS

SEQ ID NO: 18484 - protein, 118 aa, Artificial Sequence
  Chemically Synthesized
QVQLQESGGGLVQAGGSLRLSCAASGSIFYPGQMGWYRQAPGKEREFVAAISRGTSTYYADSVKGRFTISRDNAKNTVYLQMNSLKPEDTAVYYCAVVYRRVRQHQYWGQGTQVTVSS

SEQ ID NO: 18485 - protein, 122 aa, Artificial Sequence
  Chemically Synthesized
QVQLQESGGGLVQAGGSLRLSCAASGYISWYWDMGWYRQAPGKEREFVASIAYGTNTYYADSVKGRFTISRDNAKNTVYLQMNSLKPEDTAVYYCAVYGHLRNTGSGTLYYWGQGTQVTVSS

SEQ ID NO: 18486 - protein, 118 aa, Artificial Sequence
  Chemically Synthesized
QVQLQESGGGLVQAGGSLRLSCAASGTISPVVSMGWYRQAPGKERELVAGIAEGSTTNYADSVKGRFTISRDNAKNTVYLQMNSLKPEDTAVYYCAVYYYAYSRFIYWGQGTQVTVSS

SEQ ID NO: 18487 - protein, 121 aa, Artificial Sequence
  Chemically Synthesized
QVQLQESGGGLVQAGGSLRLSCAASGTIFHGLYMGWYRQAPGKERELVAAIGTGANTYYADSVKGRFTISRDNAKNTVYLQMNSLKPEDTAVYYCAAYARRWWSGGPHYYWGQGTQVTVSS

SEQ ID NO: 18488 - protein, 126 aa, Artificial Sequence
  Chemically Synthesized
QVQLQESGGGLVQAGGSLRLSCAASGTISGYITMGWYRQAPGKERELVAAINDGGSTNYADSVKGRFTISRDNAKNTVYLQMNSLKPEDTAVYYCAAAWGILYRYLRRYYYGYSYWGQGTQVTVSS

SEQ ID NO: 18489 - protein, 123 aa, Artificial Sequence
  Chemically Synthesized
QVQLQESGGGLVQAGGSLRLSCAASGNISRMGWYRQAPGKERELVATIDGGTTTYYADSVKGRFTISRDNAKNTVYLQMNSLKPEDTAVYYCAVVDDGWPLSYAVSKHTHPYWGQGTQVTVSS

SEQ ID NO: 18490 - protein, 118 aa, Artificial Sequence
  Chemically Synthesized
QVQLQESGGGLVQAGGSLRLSCAASGYISYTYVMGWYRQAPGKEREFVATITYGANTNYADSVKGRFTISRDNAKNTVYLQMNSLKPEDTAVYYCAVYYQAYAAFAYWGQGTQVTVSS

SEQ ID NO: 18491 - protein, 122 aa, Artificial Sequence
  Chemically Synthesized
QVQLQESGGGLVQAGGSLRLSCAASGSIFRWPDMGWYRQAPGKEREFVAAIDIGSNTYYADSVKGRFTISRDNAKNTVYLQMNSLKPEDTAVYYCAVVQYQTASRYIYHWYWGQGTQVTVSS

SEQ ID NO: 18492 - protein, 125 aa, Artificial Sequence
  Chemically Synthesized
QVQLQESGGGLVQAGGSLRLSCAASGSIFAALIMGWYRQAPGKEREFVPVLLKVVLPYADSVKGRFTISRDNAKNTVYLQMNSLKPEDTAVYYCAAWYYKDGRYESYGEDPYPYWGQGTQVTVSS

SEQ ID NO: 18493 - protein, 120 aa, Artificial Sequence
  Chemically Synthesized
QVQLQESGGGLVQAGGSLRLSCAASGTIFRYGFMGWYRQAPGKEREFVLLLTVVLPYADSVKGRFTISRDNAKNTVYLQMNSLKPEDTAVYYCAVYPFYSYEVNQLHTYWGQGTQVTVSS

SEQ ID NO: 18494 - protein, 120 aa, Artificial Sequence
  Chemically Synthesized
QVQLQESGGGLVQAGGSLRLSCAASGTIFWRPYMGWYRQAPGKERELVATITRGGNTYYADSVKGRFTISRDNAKNTVYLQMNSLKPEDTAVYYCAVYRKYYYVLQHAYWGQGTQVTVSS

SEQ ID NO: 18495 - protein, 120 aa, Artificial Sequence
  Chemically Synthesized
QVQLQESGGGLVQAGGSLRLSCAASGYRPMGWYRQAPGKEREFVASITDGGNTNYADSVKGRFTISRDNAKNTVYLQMNSLKPEDTAVYYCAAYPSYTWPGYSDISFDYWGQGTQVTVSS

SEQ ID NO: 18496 - protein, 122 aa, Artificial Sequence
  Chemically Synthesized
QVQLQESGGGLVQAGGSLRLSCAASGYISQHRRMGWYRQAPGKERELVATISHGSITYYADSVKGRFTISRDNAKNTVYLQMNSLKPEDTAVYYCAVRLGTGYQRGWAYPYWGQGTQVTVSS

SEQ ID NO: 18497 - protein, 126 aa, Artificial Sequence
  Chemically Synthesized
QVQLQESGGGLVQAGGSLRLSCAASGSIFSVGYMGWYRQAPGKERELVATITVGTTTNYADSVKGRFTISRDNAKNTVYLQMNSLKPEDTAVYYCAVREGQFGDTSWYPYDPHYYWGQGTQVTVSS

SEQ ID NO: 18498 - protein, 118 aa, Artificial Sequence
  Chemically Synthesized
QVQLQESGGGLVQAGGSLRLSCAASGTISPYWYMGWYRQAPGKEREFVATIAGGATTNYADSVKGRFTISRDNAKNTVYLQMNSLKPEDTAVYYCAVSPQVGLEHQYWGQGTQVTVSS

SEQ ID NO: 18499 - protein, 126 aa, Artificial Sequence
  Chemically Synthesized
QVQLQESGGGLVQAGGSLRLSCAASGYISVYTFMGWYRQAPGKERELVATIGRGASTYYADSVKGRFTISRDNAKNTVYLQMNSLKPEDTAVYYCAAEPGQRYYLIYVYLSDFLYWGQGTQVTVSS

SEQ ID NO: 18500 - protein, 121 aa, Artificial Sequence
  Chemically Synthesized
QVQLQESGGGLVQAGGSLRLSCAASGSIFGYSGMGWYRQAPGKERELLPLLITVVVPYADSVKGRFTISRDNAKNTVYLQMNSLKPEDTAVYYCAADAYQADLFVDYYFYWGQGTQVTVSS

SEQ ID NO: 18501 - protein, 126 aa, Artificial Sequence
  Chemically Synthesized
QVQLQESGGGLVQAGGSLRLSCAASGNIFSTRVMGWYRQAPGKERELVATINSGTSTNYADSVKGRFTISRDNAKNTVYLQMNSLKPEDTAVYYCAAYTLSYTSTIYASRYHLVYWGQGTQVTVSS

SEQ ID NO: 18502 - protein, 118 aa, Artificial Sequence
  Chemically Synthesized
QVQLQESGGGLVQAGGSLRLSCAASGSISLVFSMGWYRQAPGKEREFVATITLGATTYYADSVKGRFTISRDNAKNTVYLQMNSLKPEDTAVYYCAVLVHQSPWHTYWGQGTQVTVSS

SEQ ID NO: 18503 - protein, 118 aa, Artificial Sequence
  Chemically Synthesized
QVQLQESGGGLVQAGGSLRLSCAASGSISRLLVMGWYRQAPGKEREFVATIAGGSNTYYADSVKGRFTISRDNAKNTVYLQMNSLKPEDTAVYYCAVLAYESYFHYYWGQGTQVTVSS

SEQ ID NO: 18504 - protein, 126 aa, Artificial Sequence
  Chemically Synthesized
QVQLQESGGGLVQAGGSLRLSCAASGTIFGGRGMGWYRQAPGKERELVAAISVGGNTYYADSVKGRFTISRDNAKNTVYLQMNSLKPEDTAVYYCAVDPLWFGAWRNYARQGLGYWGQGTQVTVSS

SEQ ID NO: 18505 - protein, 122 aa, Artificial Sequence
  Chemically Synthesized
QVQLQESGGGLVQAGGSLRLSCAASGNISTSSAMGWYRQAPGKERELVAAIDGGTNTYYADSVKGRFTISRDNAKNTVYLQMNSLKPEDTAVYYCAAHQRVDYRSPYYHGYWGQGTQVTVSS

SEQ ID NO: 18506 - protein, 118 aa, Artificial Sequence
  Chemically Synthesized
QVQLQESGGGLVQAGGSLRLSCAASGTIFPVYGMGWYRQAPGKERELVAAISVGAITYYADSVKGRFTISRDNAKNTVYLQMNSLKPEDTAVYYCAVYYFTDGWYFYWGQGTQVTVSS

SEQ ID NO: 18507 - protein, 122 aa, Artificial Sequence
  Chemically Synthesized
QVQLQESGGGLVQAGGSLRLSCAASGYIFSTIDMGWYRQAPGKEREFVATISSGSITNYADSVKGRFTISRDNAKNTVYLQMNSLKPEDTAVYYCAVLGSDRYARNYRFDYWGQGTQVTVSS

SEQ ID NO: 18508 - protein, 118 aa, Artificial Sequence
  Chemically Synthesized
QVQLQESGGGLVQAGGSLRLSCAASGNIFPVFFMGWYRQAPGKEREFVATISLGSTTNYADSVKGRFTISRDNAKNTVYLQMNSLKPEDTAVYYCAALRLGYRRHDYWGQGTQVTVSS

SEQ ID NO: 18509 - protein, 118 aa, Artificial Sequence
  Chemically Synthesized
QVQLQESGGGLVQAGGSLRLSCAASGSIFSRTQMGWYRQAPGKERELVAAITRGANTYYADSVKGRFTISRDNAKNTVYLQMNSLKPEDTAVYYCAVRRLIQGWHTYWGQGTQVTVSS

SEQ ID NO: 18510 - protein, 122 aa, Artificial Sequence
  Chemically Synthesized
QVQLQESGGGLVQAGGSLRLSCAASGTISYPGYMGWYRQAPGKERELVAAIDFGSSTYYADSVKGRFTISRDNAKNTVYLQMNSLKPEDTAVYYCAVVVGYVRYARTQHSYWGQGTQVTVSS

SEQ ID NO: 18511 - protein, 117 aa, Artificial Sequence
  Chemically Synthesized
QVQLQESGGGLVQAGGSLRLSCAASGTIFHATYMGWYRQAPGKERELVASIDYGSITNYADSVKGRFTISRDNAKNTVYLQMNSLKPEDTAVYYCAVTYRSDYWYYWGQGTQVTVSS

SEQ ID NO: 18512 - protein, 117 aa, Artificial Sequence
  Chemically Synthesized
QVQLQESGGGLVQAGGSLRLSCAASGYIFHPRYMGWYRQAPGKEREFVAAINGTTTYYADSVKGRFTISRDNAKNTVYLQMNSLKPEDTAVYYCAVARKLAGRYSYWGQGTQVTVSS

SEQ ID NO: 18513 - protein, 118 aa, Artificial Sequence
  Chemically Synthesized
QVQLQESGGGLVQAGGSLRLSCAASGSIFGPRYMGWYRQAPGKERELVATIALGANTYYADSVKGRFTISRDNAKNTVYLQMNSLKPEDTAVYYCAAKRGWGYGHPYWGQGTQVTVSS

SEQ ID NO: 18514 - protein, 118 aa, Artificial Sequence
  Chemically Synthesized
QVQLQESGGGLVQAGGSLRLSCAASGNIFPFTAMGWYRQAPGKERELVAAIGGGTTTNYADSVKGRFTISRDNAKNTVYLQMNSLKPEDTAVYYCAVYRHFRHHHLYWGQGTQVTVSS

SEQ ID NO: 18515 - protein, 118 aa, Artificial Sequence
  Chemically Synthesized
QVQLQESGGGLVQAGGSLRLSCAASGSISRRSYMGWYRQAPGKEREFVATIGWGGTTYYADSVKGRFTISRDNAKNTVYLQMNSLKPEDTAVYYCAVNIRGRFPYRYWGQGTQVTVSS

SEQ ID NO: 18516 - protein, 118 aa, Artificial Sequence
  Chemically Synthesized
QVQLQESGGGLVQAGGSLRLSCAASGTIFQIIGMGWYRQAPGKERELVAAIGYGGITYYADSVKGRFTISRDNAKNTVYLQMNSLKPEDTAVYYCAAVYPDRPYHAYWGQGTQVTVSS

SEQ ID NO: 18517 - protein, 117 aa, Artificial Sequence
  Chemically Synthesized
QVQLQESGGGLVQAGGSLRLSCAASGTISVEYGMGWYRQAPGKEREFVAAIASGGSTYYADSVKGRFTISRDNAKNTVYLQMNSLKPEDTAVYYCAVKGVLILTLYWGQGTQVTVSS

SEQ ID NO: 18518 - protein, 120 aa, Artificial Sequence
  Chemically Synthesized
QVQLQESGGGLVQAGGSLRLSCAASGNISGIPYMGWYRQAPGKERELVAAITDGANTNYADSVKGRFTISRDNAKNTVYLQMNSLKPEDTAVYYCAHIWAYYGLYYLYYWGQGTQVTVSS

SEQ ID NO: 18519 - protein, 115 aa, Artificial Sequence
  Chemically Synthesized
QVQLQESGGGLVQAGGSLRLSCAASGTIFDPGTMGWYRQAPGKEREFVAGISSVVVPYADSVKGRFTISRDNAKNTVYLQMNSLKPEDTAVYYCAVLTLTTNMYWGQGTQVTVSS

SEQ ID NO: 18520 - protein, 117 aa, Artificial Sequence
  Chemically Synthesized
QVQLQESGGGLVQAGGSLRLSCAASGSISQDAVMGWYRQAPGKERELVATIDSVLLPYADSVKGRFTISRDNAKNTVYLQMNSLKPEDTAVYYCAVYDAETDPHLYWGQGTQVTVSS

SEQ ID NO: 18521 - protein, 118 aa, Artificial Sequence
  Chemically Synthesized
QVQLQESGGGLVQAGGSLRLSCAASGYIFDYDTMGWYRQAPGKEREFVAAIDQGGSTNYADSVKGRFTISRDNAKNTVYLQMNSLKPEDTAVYYCAAQNDVGADLRYWGQGTQVTVSS

SEQ ID NO: 18522 - protein, 122 aa, Artificial Sequence
  Chemically Synthesized
QVQLQESGGGLVQAGGSLRLSCAASGNISTPYNMGWYRQAPGKEREFVAAITYGTNTNYADSVKGRFTISRDNAKNTVYLQMNSLKPEDTAVYYCAVWGVYQASYITYHWYWGQGTQVTVSS

SEQ ID NO: 18523 - protein, 118 aa, Artificial Sequence
  Chemically Synthesized
QVQLQESGGGLVQAGGSLRLSCAASGTISLWNGMGWYRQAPGKEREFVAGITDGASTNYADSVKGRFTISRDNAKNTVYLQMNSLKPEDTAVYYCAVITTADLPHGYWGQGTQVTVSS

SEQ ID NO: 18524 - protein, 118 aa, Artificial Sequence
  Chemically Synthesized
QVQLQESGGGLVQAGGSLRLSCAASGTIFYRTYMGWYRQAPGKERELVASIGHGANTYYADSVKGRFTISRDNAKNTVYLQMNSLKPEDTAVYYCAVRTRYIIPHRYWGQGTQVTVSS

SEQ ID NO: 18525 - protein, 118 aa, Artificial Sequence
  Chemically Synthesized
QVQLQESGGGLVQAGGSLRLSCAASGTISGRRSMGWYRQAPGKEREFVAAIDVGGNTNYADSVKGRFTISRDNAKNTVYLQMNSLKPEDTAVYYCAVAGWWSRYLRYWGQGTQVTVSS

SEQ ID NO: 18526 - protein, 117 aa, Artificial Sequence
  Chemically Synthesized
QVQLQESGGGLVQAGGSLRLSCAASGTIFGPASMGWYRQAPGKEREFVASIGGATTNYADSVKGRFTISRDNAKNTVYLQMNSLKPEDTAVYYCAVKQERGDPFTYWGQGTQVTVSS

SEQ ID NO: 18527 - protein, 126 aa, Artificial Sequence
  Chemically Synthesized
QVQLQESGGGLVQAGGSLRLSCAASGTISAYRLMGWYRQAPGKEREFVATITYGATTYYADSVKGRFTISRDNAKNTVYLQMNSLKPEDTAVYYCAVTPRYAKSHLGTPYTRHRYWGQGTQVTVSS

SEQ ID NO: 18528 - protein, 118 aa, Artificial Sequence
  Chemically Synthesized
QVQLQESGGGLVQAGGSLRLSCAASGNIFLARAMGWYRQAPGKEREFVASITYGGTTYYADSVKGRFTISRDNAKNTVYLQMNSLKPEDTAVYYCAVRRPLYFFYNYWGQGTQVTVSS

SEQ ID NO: 18529 - protein, 116 aa, Artificial Sequence
  Chemically Synthesized
QVQLQESGGGLVQAGGSLRLSCAASGSIFGPRSMGWYRQAPGKERELVAAIGYGTITYYADSVKGRFTISRDNAKNTVYLQMNSLKPEDTAVYYCAARGRVRHGYWGQGTQVTVSS

SEQ ID NO: 18530 - protein, 118 aa, Artificial Sequence
  Chemically Synthesized
QVQLQESGGGLVQAGGSLRLSCAASGTISDDAMGWYRQAPGKERELVAGISLGTTTNYADSVKGRFTISRDNAKNTVYLQMNSLKPEDTAVYYCAATFVFPHDGHGYWGQGTQVTVSS

SEQ ID NO: 18531 - protein, 119 aa, Artificial Sequence
  Chemically Synthesized
QVQLQESGGGLVQAGGSLRLSCAASGTIFYVAFMGWYRQAPGKEREFVAAITYGGNTYYADSVKGRFTISRDNAKNTVYLQMNSLKPEDTAVYYCAADLYGDYSRYWYWGQGTQVTVSS

SEQ ID NO: 18532 - protein, 118 aa, Artificial Sequence
  Chemically Synthesized
QVQLQESGGGLVQAGGSLRLSCAASGYIFRYTFMGWYRQAPGKERELVAAIGYGANTYYADSVKGRFTISRDNAKNTVYLQMNSLKPEDTAVYYCAVIRKYGPQLGYWGQGTQVTVSS

SEQ ID NO: 18533 - protein, 118 aa, Artificial Sequence
  Chemically Synthesized
QVQLQESGGGLVQAGGSLRLSCAASGTIFGVREMGWYRQAPGKEREFVATITKGGNTYYADSVKGRFTISRDNAKNTVYLQMNSLKPEDTAVYYCAVRLYLSYYHRYWGQGTQVTVSS

SEQ ID NO: 18534 - protein, 126 aa, Artificial Sequence
  Chemically Synthesized
QVQLQESGGGLVQAGGSLRLSCAASGNIFTGDDMGWYRQAPGKERELVAAINYGSITYYADSVKGRFTISRDNAKNTVYLQMNSLKPEDTAVYYCAVDVQYVNYRRSNFKGVHLYWGQGTQVTVSS

SEQ ID NO: 18535 - protein, 118 aa, Artificial Sequence
  Chemically Synthesized
QVQLQESGGGLVQAGGSLRLSCAASGTIFYSRPMGWYRQAPGKEREFVATITYGTSTNYADSVKGRFTISRDNAKNTVYLQMNSLKPEDTAVYYCAAYDIGLSDLDYWGQGTQVTVSS

SEQ ID NO: 18536 - protein, 125 aa, Artificial Sequence
  Chemically Synthesized
QVQLQESGGGLVQAGGSLRLSCAASGSISYTRDMGWYRQAPGKERELVASIGPGTSTNYADSVKGRFTISRDNAKNTVYLQMNSLKPEDTAVYYCAVEYRYVYTVLYDHYKHKYWGQGTQVTVSS

SEQ ID NO: 18537 - protein, 120 aa, Artificial Sequence
  Chemically Synthesized
QVQLQESGGGLVQAGGSLRLSCAASGSISFRGTMGWYRQAPGKERELVAGIGIGGNTYYADSVKGRFTISRDNAKNTVYLQMNSLKPEDTAVYYCAAKGRGWRGKYHYYWGQGTQVTVSS

SEQ ID NO: 18538 - protein, 110 aa, Artificial Sequence
  Chemically Synthesized
QVQLQESGGGLVQAGGSLRLSCAASGTISPFRLMGWYRQAPGKERELVATIAFGTITYYADSVKGRFTISRDNAKNTVYLQMNSLKPEDTAVYYCAHGYWGQGTQVTVSS

SEQ ID NO: 18539 - protein, 118 aa, Artificial Sequence
  Chemically Synthesized
QVQLQESGGGLVQAGGSLRLSCAASGNISGFYLMGWYRQAPGKERELVAGIDYGSKYLYADSVKGRFTISRDNAKNTVYLQMNSLKPEDTAVYYCAVLFLTWDQHYYWGQGTQVTVSS

SEQ ID NO: 18540 - protein, 118 aa, Artificial Sequence
  Chemically Synthesized
QVQLQESGGGLVQAGGSLRLSCAASGNIFFAYTMGWYRQAPGKEREFVASIGVGTNTNYADSVKGRFTISRDNAKNTVYLQMNSLKPEDTAVYYCAAITYDFGRFPYWGQGTQVTVSS

SEQ ID NO: 18541 - protein, 125 aa, Artificial Sequence
  Chemically Synthesized
QVQLQESGGGLVQAGGSLRLSCAASGSIFDLYDMGWYRQAPGKERELVATIARGSITNYADSVKGRFTISRDNAKNTVYLQMNSLKPEDTAVYYCAVYDDTDVKTDGTRLFLIYWGQGTQVTVSS

SEQ ID NO: 18542 - protein, 116 aa, Artificial Sequence
  Chemically Synthesized
QVQLQESGGGLVQAGGSLRLSCAASGYIFYWTRMGWYRQAPGKERELVASINYGANTNYADSVKGRFTISRDNAKNTVYLQMNSLKPEDTAVYYCAYYPYEYHAYWGQGTQVTVSS

SEQ ID NO: 18543 - protein, 122 aa, Artificial Sequence
  Chemically Synthesized
QVQLQESGGGLVQAGGSLRLSCAASGSISADKVMGWYRQAPGKERELVAGISYGAITYYADSVKGRFTISRDNAKNTVYLQMNSLKPEDTAVYYCAVIYVAYQHYKGYFVYWGQGTQVTVSS

SEQ ID NO: 18544 - protein, 119 aa, Artificial Sequence
  Chemically Synthesized
QVQLQESGGGLVQAGGSLRLSCAASGNISNFDGMGWYRQAPGKEREFVAGIAPGGNTYYADSVKGRFTISRDNAKNTVYLQMNSLKPEDTAVYYCAATTVNTLVTSLYWGQGTQVTVSS

SEQ ID NO: 18545 - protein, 118 aa, Artificial Sequence
  Chemically Synthesized
QVQLQESGGGLVQAGGSLRLSCAASGTIFWYKRMGWYRQAPGKERELVATITAGSITYYADSVKGRFTISRDNAKNTVYLQMNSLKPEDTAVYYCAAPRSRTRHHDYWGQGTQVTVSS

SEQ ID NO: 18546 - protein, 122 aa, Artificial Sequence
  Chemically Synthesized
QVQLQESGGGLVQAGGSLRLSCAASGNISTYLIMGWYRQAPGKERELVAGINRGGSTYYADSVKGRFTISRDNAKNTVYLQMNSLKPEDTAVYYCAVIPAYPFYVDYIFLYWGQGTQVTVSS

SEQ ID NO: 18547 - protein, 118 aa, Artificial Sequence
  Chemically Synthesized
QVQLQESGGGLVQAGGSLRLSCAASGYISWYRIMGWYRQAPGKEREFVAAINGGTSTYYADSVKGRFTISRDNAKNTVYLQMNSLKPEDTAVYYCAVHGRQYRYHYYWGQGTQVTVSS

SEQ ID NO: 18548 - protein, 118 aa, Artificial Sequence
  Chemically Synthesized
QVQLQESGGGLVQAGGSLRLSCAASGNIFRAQPMGWYRQAPGKERELVATISYGASTYYADSVKGRFTISRDNAKNTVYLQMNSLKPEDTAVYYCAAQTPRESALVYWGQGTQVTVSS

SEQ ID NO: 18549 - protein, 121 aa, Artificial Sequence
  Chemically Synthesized
QVQLQESGGGLVQAGGSLRLSCAASGTIFWTRDMGWYRQAPGKEREFVAGIGGGITNYADSVKGRFTISRDNAKNTVYLQMNSLKPEDTAVYYCAALVLKHNFYRWGYSYWGQGTQVTVSS

SEQ ID NO: 18550 - protein, 122 aa, Artificial Sequence
  Chemically Synthesized
QVQLQESGGGLVQAGGSLRLSCAASGYISYRAPMGWYRQAPGKEREFVAGITIGTSTNYADSVKGRFTISRDNAKNTVYLQMNSLKPEDTAVYYCAARRRSWSYSRADLTYWGQGTQVTVSS

SEQ ID NO: 18551 - protein, 122 aa, Artificial Sequence
  Chemically Synthesized
QVQLQESGGGLVQAGGSLRLSCAASGYISQYPDMGWYRQAPGKEREFVAGIAFGTNTNYADSVKGRFTISRDNAKNTVYLQMNSLKPEDTAVYYCAARFDAHPRAYDYYPYWGQGTQVTVSS

SEQ ID NO: 18552 - protein, 117 aa, Artificial Sequence
  Chemically Synthesized
QVQLQESGGGLVQAGGSLRLSCAASGTISRGPRMGWYRQAPGKERELVAAIDLGSNTNYADSVKGRFTISRDNAKNTVYLQMNSLKPEDTAVYYCAATTTTTRTLYWGQGTQVTVSS

SEQ ID NO: 18553 - protein, 118 aa, Artificial Sequence
  Chemically Synthesized
QVQLQESGGGLVQAGGSLRLSCAASGTIFDHGGMGWYRQAPGKEREFVATIDRGTNTNYADSVKGRFTISRDNAKNTVYLQMNSLKPEDTAVYYCAADDRGSGGYPYWGQGTQVTVSS

SEQ ID NO: 18554 - protein, 125 aa, Artificial Sequence
  Chemically Synthesized
QVQLQESGGGLVQAGGSLRLSCAASGTISPAGYMGWYRQAPGKERELVATINGGTITYADSVKGRFTISRDNAKNTVYLQMNSLKPEDTAVYYCAAYQSAYTDGYGLQYSDHYYWGQGTQVTVSS

SEQ ID NO: 18555 - protein, 124 aa, Artificial Sequence
  Chemically Synthesized
QVQLQESGGGLVQAGGSLRLSCAASGSISSPGDMGWYRQAPGKERELVATIDDGTSTNYADSVKGRFTISRDNAKNTVYLQMNSLKPEDTAVYYCAAGSDEYGLRWDYGDYPYWGQGTQVTVSS

SEQ ID NO: 18556 - protein, 122 aa, Artificial Sequence
  Chemically Synthesized
QVQLQESGGGLVQAGGSLRLSCAASGNISFVRRMGWYRQAPGKEREFVASITPGAITYYADSVKGRFTISRDNAKNTVYLQMNSLKPEDTAVYYCAAHRYRVFLASRYHYYWGQGTQVTVSS

SEQ ID NO: 18557 - protein, 122 aa, Artificial Sequence
  Chemically Synthesized
QVQLQESGGGLVQAGGSLRLSCAASGYISRIQYMGWYRQAPGKEREFVAAIARGGITYYADSVKGRFTISRDNAKNTVYLQMNSLKPEDTAVYYCAAPRFGTSGWAYRHPYWGQGTQVTVSS

SEQ ID NO: 18558 - protein, 123 aa, Artificial Sequence
  Chemically Synthesized
QVQLQESGGGLVQAGGSLRLSCAASGTIFLWYIMGWYRQAPGKEREFVATIGYGTNTNYADSVKGRFTISRDNAKNTVYLQMNSLKPEDTAVYYCAAQARYDDTYYDWWYDYWGQGTQVTVSS

SEQ ID NO: 18559 - protein, 118 aa, Artificial Sequence
  Chemically Synthesized
QVQLQESGGGLVQAGGSLRLSCAASGYISRYTVMGWYRQAPGKEREFVASITSGSITNYADSVKGRFTISRDNAKNTVYLQMNSLKPEDTAVYYCAAWNRWTIRHRYWGQGTQVTVSS

SEQ ID NO: 18560 - protein, 118 aa, Artificial Sequence
  Chemically Synthesized
QVQLQESGGGLVQAGGSLRLSCAASGYIFRYSRMGWYRQAPGKEREFVATIAYGGTTYYADSVKGRFTISRDNAKNTVYLQMNSLKPEDTAVYYCAADPYRYKRFTYWGQGTQVTVSS

SEQ ID NO: 18561 - protein, 118 aa, Artificial Sequence
  Chemically Synthesized
QVQLQESGGGLVQAGGSLRLSCAASGYISYDYIMGWYRQAPGKERELVAGIAAGGTTYYADSVKGRFTISRDNAKNTVYLQMNSLKPEDTAVYYCAATGSHYLFHPYWGQGTQVTVSS

SEQ ID NO: 18562 - protein, 126 aa, Artificial Sequence
  Chemically Synthesized
QVQLQESGGGLVQAGGSLRLSCAASGYIFWRGVMGWYRQAPGKEREFVASIANGASTYYADSVKGRFTISRDNAKNTVYLQMNSLKPEDTAVYYCAVTRHPYSSRYAPYYQYHRYWGQGTQVTVSS

SEQ ID NO: 18563 - protein, 118 aa, Artificial Sequence
  Chemically Synthesized
QVQLQESGGGLVQAGGSLRLSCAASGTIFGPYKMGWYRQAPGKERELVATIGVGTTTYYADSVKGRFTISRDNAKNTVYLQMNSLKPEDTAVYYCAVEARYVRQHGYWGQGTQVTVSS

SEQ ID NO: 18564 - protein, 118 aa, Artificial Sequence
  Chemically Synthesized
QVQLQESGGGLVQAGGSLRLSCAASGTIFAPAWMGWYRQAPGKERELVASITRGSSTNYADSVKGRFTISRDNAKNTVYLQMNSLKPEDTAVYYCAARRYYGSSHTYWGQGTQVTVSS

SEQ ID NO: 18565 - protein, 118 aa, Artificial Sequence
  Chemically Synthesized
QVQLQESGGGLVQAGGSLRLSCAASGTIFWYRSMGWYRQAPGKERELVAAITYGATTYYADSVKGRFTISRDNAKNTVYLQMNSLKPEDTAVYYCAAEYRRGYSLAYWGQGTQVTVSS

SEQ ID NO: 18566 - protein, 118 aa, Artificial Sequence
  Chemically Synthesized
QVQLQESGGGLVQAGGSLRLSCAASGNIFWTYIMGWYRQAPGKEREFVASIGTGGITYYADSVKGRFTISRDNAKNTVYLQMNSLKPEDTAVYYCAVYYTASDALPYWGQGTQVTVSS

SEQ ID NO: 18567 - protein, 118 aa, Artificial Sequence
  Chemically Synthesized
QVQLQESGGGLVQAGGSLRLSCAASGTISKTYIMGWYRQAPGKERELVAAITYGTNTYYADSVKGRFTISRDNAKNTVYLQMNSLKPEDTAVYYCAATKGGFRRLYYWGQGTQVTVSS

SEQ ID NO: 18568 - protein, 118 aa, Artificial Sequence
  Chemically Synthesized
QVQLQESGGGLVQAGGSLRLSCAASGYIFRWADMGWYRQAPGKEREFVASIARGTNTYYADSVKGRFTISRDNAKNTVYLQMNSLKPEDTAVYYCAAYILSLVDLPYWGQGTQVTVSS

SEQ ID NO: 18569 - protein, 121 aa, Artificial Sequence
  Chemically Synthesized
QVQLQESGGGLVQAGGSLRLSCAASGTIFGSDTMGWYRQAPGKEREFVAAISKGATTYYADSVKGRFTISRDNAKNTVYLQMNSLKPEDTAVYYCAVSYPSLSVTSTVLYWGQGTQVTVSS

SEQ ID NO: 18570 - protein, 118 aa, Artificial Sequence
  Chemically Synthesized
QVQLQESGGGLVQAGGSLRLSCAASGYISHSLLMGWYRQAPGKEREFVASIALGANTNYADSVKGRFTISRDNAKNTVYLQMNSLKPEDTAVYYCAARRYFWAYHSYWGQGTQVTVSS

SEQ ID NO: 18571 - protein, 118 aa, Artificial Sequence
  Chemically Synthesized
QVQLQESGGGLVQAGGSLRLSCAASGTIFSSIIMGWYRQAPGKEREFVASITHGTTTYYADSVKGRFTISRDNAKNTVYLQMNSLKPEDTAVYYCAVQRHRLSSHVYWGQGTQVTVSS

SEQ ID NO: 18572 - protein, 118 aa, Artificial Sequence
  Chemically Synthesized
QVQLQESGGGLVQAGGSLRLSCAASGTISIYITMGWYRQAPGKEREFVATIAGGTNTNYADSVKGRFTISRDNAKNTVYLQMNSLKPEDTAVYYCAAYSSQYVAHIYWGQGTQVTVSS

SEQ ID NO: 18573 - protein, 118 aa, Artificial Sequence
  Chemically Synthesized
QVQLQESGGGLVQAGGSLRLSCAASGYISLDRGMGWYRQAPGKERELVASIGGGASTNYADSVKGRFTISRDNAKNTVYLQMNSLKPEDTAVYYCAALSTVDYVHVYWGQGTQVTVSS

SEQ ID NO: 18574 - protein, 122 aa, Artificial Sequence
  Chemically Synthesized
QVQLQESGGGLVQAGGSLRLSCAASGSISVRNVMGWYRQAPGKERELVATINYGTSTNYADSVKGRFTISRDNAKNTVYLQMNSLKPEDTAVYYCAAYHRPYPHDPVYFQYWGQGTQVTVSS

SEQ ID NO: 18575 - protein, 126 aa, Artificial Sequence
  Chemically Synthesized
QVQLQESGGGLVQAGGSLRLSCAASGYISGYYLMGWYRQAPGKEREFVAAISSGSITNYADSVKGRFTISRDNAKNTVYLQMNSLKPEDTAVYYCAAYDYATYGDRDLVFRYLTYWGQGTQVTVSS

SEQ ID NO: 18576 - protein, 125 aa, Artificial Sequence
  Chemically Synthesized
QVQLQESGGGLVQAGGSLRLSCAASGSISPRGAMGWYRQAPGKEREFVASISRGAITNYADSVKGRFTISRDNAKNTVYLQMNSLKPEDTAVYYCAARYRTGRYYGYYRYVHWYWGQGTQVTVSS

SEQ ID NO: 18577 - protein, 122 aa, Artificial Sequence
  Chemically Synthesized
QVQLQESGGGLVQAGGSLRLSCAASGNIFRYSRMGWYRQAPGKERELVAAIGYGGTTYYADSVKGRFTISRDNAKNTVYLQMNSLKPEDTAVYYCAVSRYSRRGDRYTLGYWGQGTQVTVSS

SEQ ID NO: 18578 - protein, 121 aa, Artificial Sequence
  Chemically Synthesized
QVQLQESGGGLVQAGGSLRLSCAASGTISYGEWMGWYRQAPGKERELVASITPGSNTYYADSVKGRFTISRDNAKNTVYLQMNSLKPEDTAVYYCAAQRYQWPTYDDYRYWGQGTQVTVSS

SEQ ID NO: 18579 - protein, 122 aa, Artificial Sequence
  Chemically Synthesized
QVQLQESGGGLVQAGGSLRLSCAASGSIFIIYYMGWYRQAPGKERELVAAIAPGGNTYYADSVKGRFTISRDNAKNTVYLQMNSLKPEDTAVYYCAVLAANYTEDVYALIYWGQGTQVTVSS

SEQ ID NO: 18580 - protein, 119 aa, Artificial Sequence
  Chemically Synthesized
QVQLQESGGGLVQAGGSLRLSCAASGTISWSKRMGWYRQAPGKEREFVASISWGTNTNYADSVKGRFTISRDNAKNTVYLQMNSLKPEDTAVYYCAAVGLRRYHNHGYWGQGTQVTVSS

SEQ ID NO: 18581 - protein, 118 aa, Artificial Sequence
  Chemically Synthesized
QVQLQESGGGLVQAGGSLRLSCAASGTIFYHYDMGWYRQAPGKERELVAAITVGGITYYADSVKGRFTISRDNAKNTVYLQMNSLKPEDTAVYYCAAGDIYDYSFLYWGQGTQVTVSS

SEQ ID NO: 18582 - protein, 118 aa, Artificial Sequence
  Chemically Synthesized
QVQLQESGGGLVQAGGSLRLSCAASGYIFLVAEMGWYRQAPGKERELVATISFGGSTNYADSVKGRFTISRDNAKNTVYLQMNSLKPEDTAVYYCAVYDISAQRFSYWGQGTQVTVSS

SEQ ID NO: 18583 - protein, 122 aa, Artificial Sequence
  Chemically Synthesized
QVQLQESGGGLVQAGGSLRLSCAASGYISSYRAMGWYRQAPGKEREFVAAITSGSITYYADSVKGRFTISRDNAKNTVYLQMNSLKPEDTAVYYCAAYYRLYHVRRTPFGYWGQGTQVTVSS

SEQ ID NO: 18584 - protein, 122 aa, Artificial Sequence
  Chemically Synthesized
QVQLQESGGGLVQAGGSLRLSCAASGNIFDSTAMGWYRQAPGKEREFVATITDGGTTNYADSVKGRFTISRDNAKNTVYLQMNSLKPEDTAVYYCAAYGTWRAFLFGYYPYWGQGTQVTVSS

SEQ ID NO: 18585 - protein, 122 aa, Artificial Sequence
  Chemically Synthesized
QVQLQESGGGLVQAGGSLRLSCAASGYIFEARYMGWYRQAPGKERELVAGITIGSSTYYADSVKGRFTISRDNAKNTVYLQMNSLKPEDTAVYYCAVTADQTSARLNDYSYWGQGTQVTVSS

SEQ ID NO: 18586 - protein, 118 aa, Artificial Sequence
  Chemically Synthesized
QVQLQESGGGLVQAGGSLRLSCAASGTIFTRIEMGWYRQAPGKEREFVAGIGRGANTNYADSVKGRFTISRDNAKNTVYLQMNSLKPEDTAVYYCAAGWRWVRYYWYWGQGTQVTVSS

SEQ ID NO: 18587 - protein, 118 aa, Artificial Sequence
  Chemically Synthesized
QVQLQESGGGLVQAGGSLRLSCAASGTISTGWFMGWYRQAPGKERELVAGINYGGSTYYADSVKGRFTISRDNAKNTVYLQMNSLKPEDTAVYYCAAQTDQFWLFQYWGQGTQVTVSS

SEQ ID NO: 18588 - protein, 110 aa, Artificial Sequence
  Chemically Synthesized
QVQLQESGGGLVQAGGSLRLSCAASGTIFPHPLMGWYRQAPGKERELVASISRGATTYYADSVKGRFTISRDNAKNTVYLQMNSLKPEDTAVYYCALDYWGQGTQVTVSS

SEQ ID NO: 18589 - protein, 122 aa, Artificial Sequence
  Chemically Synthesized
QVQLQESGGGLVQAGGSLRLSCAASGYISRNLIMGWYRQAPGKEREFVAAIGYGTTTNYADSVKGRFTISRDNAKNTVYLQMNSLKPEDTAVYYCAARGATYFNYHYRHPYWGQGTQVTVSS

SEQ ID NO: 18590 - protein, 122 aa, Artificial Sequence
  Chemically Synthesized
QVQLQESGGGLVQAGGSLRLSCAASGNIFHLQGMGWYRQAPGKERELVAAIGYGSSTYYADSVKGRFTISRDNAKNTVYLQMNSLKPEDTAVYYCAADGNRLWSRLALYQYWGQGTQVTVSS

SEQ ID NO: 18591 - protein, 118 aa, Artificial Sequence
  Chemically Synthesized
QVQLQESGGGLVQAGGSLRLSCAASGNISRRRVMGWYRQAPGKERELVAAIDSGGNTNYADSVKGRFTISRDNAKNTVYLQMNSLKPEDTAVYYCAVYYWRGRVHRYWGQGTQVTVSS

SEQ ID NO: 18592 - protein, 122 aa, Artificial Sequence
  Chemically Synthesized
QVQLQESGGGLVQAGGSLRLSCAASGTISLDENMGWYRQAPGKEREFVAGINQGGSTNYADSVKGRFTISRDNAKNTVYLQMNSLKPEDTAVYYCAVDRYHPRQTYGDHEYWGQGTQVTVSS

SEQ ID NO: 18593 - protein, 118 aa, Artificial Sequence
  Chemically Synthesized
QVQLQESGGGLVQAGGSLRLSCAASGTIFRYRGMGWYRQAPGKEREFVAGITRGGTTNYADSVKGRFTISRDNAKNTVYLQMNSLKPEDTAVYYCAVITYRVGYYAYWGQGTQVTVSS

SEQ ID NO: 18594 - protein, 126 aa, Artificial Sequence
  Chemically Synthesized
QVQLQESGGGLVQAGGSLRLSCAASGTISLRRAMGWYRQAPGKEREFVASISDGSNTYYADSVKGRFTISRDNAKNTVYLQMNSLKPEDTAVYYCAVDYITLWPIPINAWLIHQYWGQGTQVTVSS

SEQ ID NO: 18595 - protein, 122 aa, Artificial Sequence
  Chemically Synthesized
QVQLQESGGGLVQAGGSLRLSCAASGYIFARRTMGWYRQAPGKERELVATINAGASTYYADSVKGRFTISRDNAKNTVYLQMNSLKPEDTAVYYCAVVPTRYGWFPLAHTYWGQGTQVTVSS

SEQ ID NO: 18596 - protein, 118 aa, Artificial Sequence
  Chemically Synthesized
QVQLQESGGGLVQAGGSLRLSCAASGNIFIYNRMGWYRQAPGKEREFVAGISLGGNTYYADSVKGRFTISRDNAKNTVYLQMNSLKPEDTAVYYCAARGRPTRRFYYWGQGTQVTVSS

SEQ ID NO: 18597 - protein, 122 aa, Artificial Sequence
  Chemically Synthesized
QVQLQESGGGLVQAGGSLRLSCAASGNISTTYGMGWYRQAPGKERELVATIAVGANTNYADSVKGRFTISRDNAKNTVYLQMNSLKPEDTAVYYCAADWTDYPRHSDGHRYWGQGTQVTVSS

SEQ ID NO: 18598 - protein, 118 aa, Artificial Sequence
  Chemically Synthesized
QVQLQESGGGLVQAGGSLRLSCAASGYIFATFVMGWYRQAPGKERELVASIAAGTITNYADSVKGRFTISRDNAKNTVYLQMNSLKPEDTAVYYCAAYVIRPYELDYWGQGTQVTVSS

SEQ ID NO: 18599 - protein, 126 aa, Artificial Sequence
  Chemically Synthesized
QVQLQESGGGLVQAGGSLRLSCAASGSIFNQLVMGWYRQAPGKERELVAGINTGTITYYADSVKGRFTISRDNAKNTVYLQMNSLKPEDTAVYYCAAFDQYYLGYLAWIYQRHAYWGQGTQVTVSS

SEQ ID NO: 18600 - protein, 122 aa, Artificial Sequence
  Chemically Synthesized
QVQLQESGGGLVQAGGSLRLSCAASGNISYYDYMGWYRQAPGKERELVATINDGATTNYADSVKGRFTISRDNAKNTVYLQMNSLKPEDTAVYYCAAFARQTTAGRGYLLYWGQGTQVTVSS

SEQ ID NO: 18601 - protein, 126 aa, Artificial Sequence
  Chemically Synthesized
QVQLQESGGGLVQAGGSLRLSCAASGNISTTYAMGWYRQAPGKERELVASITNGGNTYYADSVKGRFTISRDNAKNTVYLQMNSLKPEDTAVYYCAVRDRYFGYPLDIDDSFHTYWGQGTQVTVSS

SEQ ID NO: 18602 - protein, 122 aa, Artificial Sequence
  Chemically Synthesized
QVQLQESGGGLVQAGGSLRLSCAASGYISGLYVMGWYRQAPGKERELVASIAPGSTTYYADSVKGRFTISRDNAKNTVYLQMNSLKPEDTAVYYCAAYSLLYFAAWGFHTYWGQGTQVTVSS

SEQ ID NO: 18603 - protein, 122 aa, Artificial Sequence
  Chemically Synthesized
QVQLQESGGGLVQAGGSLRLSCAASGSISWFYYMGWYRQAPGKEREFVAAINYGTSTNYADSVKGRFTISRDNAKNTVYLQMNSLKPEDTAVYYCAAFRPYNWRNYSIHTYWGQGTQVTVSS

SEQ ID NO: 18604 - protein, 119 aa, Artificial Sequence
  Chemically Synthesized
QVQLQESGGGLVQAGGSLRLSCAASGSIFWDPYMGWYRQAPGKEREFVATINRGGGNTNYADSVKGRFTISRDNAKNTVYLQMNSLKPEDTAVYYCAAGFFAYSRHKYWGQGTQVTVSS

SEQ ID NO: 18605 - protein, 118 aa, Artificial Sequence
  Chemically Synthesized
QVQLQESGGGLVQAGGSLRLSCAASGYISRRAYMGWYRQAPGKERELVAAIGIGTNTYYADSVKGRFTISRDNAKNTVYLQMNSLKPEDTAVYYCAARWYGARDHRYWGQGTQVTVSS

SEQ ID NO: 18606 - protein, 126 aa, Artificial Sequence
  Chemically Synthesized
QVQLQESGGGLVQAGGSLRLSCAASGNIFWRGGMGWYRQAPGKEREFVASISLGASTNYADSVKGRFTISRDNAKNTVYLQMNSLKPEDTAVYYCAARVLNLSSALTVESYQHYYWGQGTQVTVSS

SEQ ID NO: 18607 - protein, 118 aa, Artificial Sequence
  Chemically Synthesized
QVQLQESGGGLVQAGGSLRLSCAASGSIFGTWIMGWYRQAPGKEREFVAGIGRGANTYYADSVKGRFTISRDNAKNTVYLQMNSLKPEDTAVYYCAAYNRYRYGFSYWGQGTQVTVSS

SEQ ID NO: 18608 - protein, 118 aa, Artificial Sequence
  Chemically Synthesized
QVQLQESGGGLVQAGGSLRLSCAASGYISLYRDMGWYRQAPGKERELVASIDYGTNTNYADSVKGRFTISRDNAKNTVYLQMNSLKPEDTAVYYCAVVGWLFGALIYWGQGTQVTVSS

SEQ ID NO: 18609 - protein, 118 aa, Artificial Sequence
  Chemically Synthesized
QVQLQESGGGLVQAGGSLRLSCAASGSIFDQVIMGWYRQAPGKEREFVAGITTGASTYYADSVKGRFTISRDNAKNTVYLQMNSLKPEDTAVYYCAAFLYLLDTHHYWGQGTQVTVSS

SEQ ID NO: 18610 - protein, 122 aa, Artificial Sequence
  Chemically Synthesized
QVQLQESGGGLVQAGGSLRLSCAASGTISYGFTMGWYRQAPGKERELVAGIGGGGTTYYADSVKGRFTISRDNAKNTVYLQMNSLKPEDTAVYYCAVAGQGDDFYTTTHVYWGQGTQVTVSS

SEQ ID NO: 18611 - protein, 122 aa, Artificial Sequence
  Chemically Synthesized
QVQLQESGGGLVQAGGSLRLSCAASGNIFIYPQMGWYRQAPGKEREFVATIGTGASTNYADSVKGRFTISRDNAKNTVYLQMNSLKPEDTAVYYCAVRRKIQLWWASRHGYWGQGTQVTVSS

SEQ ID NO: 18612 - protein, 125 aa, Artificial Sequence
  Chemically Synthesized
QVQLQESGGGLVQAGGSLRLSCAASGYISDSTAMGWYRQAPGKEREFVAAIARGSNTNYADSVKGRFTISRDNAKNTVYLQMNSLKPEDTAVYYCAFGSGLPAYCWLRSWSVLYWGQGTQVTVSS

SEQ ID NO: 18613 - protein, 125 aa, Artificial Sequence
  Chemically Synthesized
QVQLQESGGGLVQAGGSLRLSCAASGSISSYTYMGWYRQAPGKERELVAGIDAGANTYYADSVKGRFTISRDNAKNTVYLQMNSLKPEDTAVYYCAVWSVNEWLSLAFDPRHPYWGQGTQVTVSS

SEQ ID NO: 18614 - protein, 126 aa, Artificial Sequence
  Chemically Synthesized
QVQLQESGGGLVQAGGSLRLSCAASGSISDNSTMGWYRQAPGKEREFVAGIGSGSITNYADSVKGRFTISRDNAKNTVYLQMNSLKPEDTAVYYCAASYLTRYYATRPVSDPHYYWGQGTQVTVSS

SEQ ID NO: 18615 - protein, 118 aa, Artificial Sequence
  Chemically Synthesized
QVQLQESGGGLVQAGGSLRLSCAASGNISDSPHMGWYRQAPGKEREFVAGIDSGGNTYYADSVKGRFTISRDNAKNTVYLQMNSLKPEDTAVYYCAVPRGAVDKHSYWGQGTQVTVSS

SEQ ID NO: 18616 - protein, 118 aa, Artificial Sequence
  Chemically Synthesized
QVQLQESGGGLVQAGGSLRLSCAASGTISIDPYMGWYRQAPGKEREFVASIAYGSNTYYADSVKGRFTISRDNAKNTVYLQMNSLKPEDTAVYYCAVARRYWPVFLYWGQGTQVTVSS

SEQ ID NO: 18617 - protein, 118 aa, Artificial Sequence
  Chemically Synthesized
QVQLQESGGGLVQAGGSLRLSCAASGSIFVRRSMGWYRQAPGKEREFVAGISFGGTTNYADSVKGRFTISRDNAKNTVYLQMNSLKPEDTAVYYCAVRQRFQDYHPYWGQGTQVTVSS

SEQ ID NO: 18618 - protein, 118 aa, Artificial Sequence
  Chemically Synthesized
QVQLQESGGGLVQAGGSLRLSCAASGNIFSSNFMGWYRQAPGKERELVAGISYGTTTNYADSVKGRFTISRDNAKNTVYLQMNSLKPEDTAVYYCAAYYYYIPPHEYWGQGTQVTVSS

SEQ ID NO: 18619 - protein, 118 aa, Artificial Sequence
  Chemically Synthesized
QVQLQESGGGLVQAGGSLRLSCAASGNIFVDHDMGWYRQAPGKEREFVATITQGSNTYYADSVKGRFTISRDNAKNTVYLQMNSLKPEDTAVYYCAVEDRISFDHEYWGQGTQVTVSS

SEQ ID NO: 18620 - protein, 122 aa, Artificial Sequence
  Chemically Synthesized
QVQLQESGGGLVQAGGSLRLSCAASGNISYRAYMGWYRQAPGKERELVAAISDGANTNYADSVKGRFTISRDNAKNTVYLQMNSLKPEDTAVYYCAAIQQYTHYDTTGLGYWGQGTQVTVSS

SEQ ID NO: 18621 - protein, 125 aa, Artificial Sequence
  Chemically Synthesized
QVQLQESGGGLVQAGGSLRLSCAASGYISDQPMGWYRQAPGKEREFVAGIGAGSITNYADSVKGRFTISRDNAKNTVYLQMNSLKPEDTAVYYCAADVRRAYQITYKSYGQFDYWGQGTQVTVSS

SEQ ID NO: 18622 - protein, 125 aa, Artificial Sequence
  Chemically Synthesized
QVQLQESGGGLVQAGGSLRLSCAASGTIFFIPSMGWYRQAPGKEREFVAAIAWGATTNYADSVKGRFTISRDNAKNTVYLQMNSLKPEDTAVYYCAVQGDSQGVSTTLVVLSMYWGQGTQVTVSS

SEQ ID NO: 18623 - protein, 122 aa, Artificial Sequence
  Chemically Synthesized
QVQLQESGGGLVQAGGSLRLSCAASGNISDIELMGWYRQAPGKERELVAGIDDGTNTYYADSVKGRFTISRDNAKNTVYLQMNSLKPEDTAVYYCAVGLQTNYYAYTLFDYWGQGTQVTVSS

SEQ ID NO: 18624 - protein, 118 aa, Artificial Sequence
  Chemically Synthesized
QVQLQESGGGLVQAGGSLRLSCAASGTISRARYMGWYRQAPGKEREFVAAIGYGGNTNYADSVKGRFTISRDNAKNTVYLQMNSLKPEDTAVYYCAAPYRRNRAHFYWGQGTQVTVSS

SEQ ID NO: 18625 - protein, 118 aa, Artificial Sequence
  Chemically Synthesized
QVQLQESGGGLVQAGGSLRLSCAASGNIFTISYMGWYRQAPGKERELVATIALGTTTYYADSVKGRFTISRDNAKNTVYLQMNSLKPEDTAVYYCAAYQWYSGLFGYWGQGTQVTVSS

SEQ ID NO: 18626 - protein, 118 aa, Artificial Sequence
  Chemically Synthesized
QVQLQESGGGLVQAGGSLRLSCAASGYIFRPGYMGWYRQAPGKERELVAAIGAGGNTNYADSVKGRFTISRDNAKNTVYLQMNSLKPEDTAVYYCAAGGVWVWRHYYWGQGTQVTVSS

SEQ ID NO: 18627 - protein, 122 aa, Artificial Sequence
  Chemically Synthesized
QVQLQESGGGLVQAGGSLRLSCAASGNISEADSMGWYRQAPGKERELVASIGEGASTYYADSVKGRFTISRDNAKNTVYLQMNSLKPEDTAVYYCAADSPYRDRFSVVHAYWGQGTQVTVSS

SEQ ID NO: 18628 - protein, 118 aa, Artificial Sequence
  Chemically Synthesized
QVQLQESGGGLVQAGGSLRLSCAASGSISPRYVMGWYRQAPGKERELVAAINRGGNTYYADSVKGRFTISRDNAKNTVYLQMNSLKPEDTAVYYCAVPRYYRKDLYYWGQGTQVTVSS

SEQ ID NO: 18629 - protein, 118 aa, Artificial Sequence
  Chemically Synthesized
QVQLQESGGGLVQAGGSLRLSCAASGSISGRDNMGWYRQAPGKEREFVAAIAPGGITNYADSVKGRFTISRDNAKNTVYLQMNSLKPEDTAVYYCAVTSDYPYLLVYWGQGTQVTVSS

SEQ ID NO: 18630 - protein, 126 aa, Artificial Sequence
  Chemically Synthesized
QVQLQESGGGLVQAGGSLRLSCAASGNIFLLYGMGWYRQAPGKEREFVAGIGYGTTTYYADSVKGRFTISRDNAKNTVYLQMNSLKPEDTAVYYCAAVDLGTYQILAWLDDEYDYWGQGTQVTVSS

SEQ ID NO: 18631 - protein, 122 aa, Artificial Sequence
  Chemically Synthesized
QVQLQESGGGLVQAGGSLRLSCAASGNISGPGIMGWYRQAPGKEREFVAGIALGANTNYADSVKGRFTISRDNAKNTVYLQMNSLKPEDTAVYYCAAYYLLRYEPHYWLRYWGQGTQVTVSS

SEQ ID NO: 18632 - protein, 117 aa, Artificial Sequence
  Chemically Synthesized
QVQLQESGGGLVQAGGSLRLSCAASGTIFYAYTMGWYRQAPGKERELVATITAGATTYYADSVKGRFTISRDNAKNTVYLQMNSLKPEDTAVYYCAARASLLVYGYWGQGTQVTVSS

SEQ ID NO: 18633 - protein, 126 aa, Artificial Sequence
  Chemically Synthesized
QVQLQESGGGLVQAGGSLRLSCAASGTISAADYMGWYRQAPGKERELVAAITYGTTTNYADSVKGRFTISRDNAKNTVYLQMNSLKPEDTAVYYCAVPHTFHDINFYQPYDYHEYWGQGTQVTVSS

SEQ ID NO: 18634 - protein, 121 aa, Artificial Sequence
  Chemically Synthesized
QVQLQESGGGLVQAGGSLRLSCAASGSIFGSIMGWYRQAPGKERELVATIGYGSTTYYADSVKGRFTISRDNAKNTVYLQMNSLKPEDTAVYYCAVDDPGAPSTVYTLDYWGQGTQVTVSS

SEQ ID NO: 18635 - protein, 122 aa, Artificial Sequence
  Chemically Synthesized
QVQLQESGGGLVQAGGSLRLSCAASGNISTWSAMGWYRQAPGKERELVAAIANGSNTNYADSVKGRFTISRDNAKNTVYLQMNSLKPEDTAVYYCAVRDGRGWRRWYYHGYWGQGTQVTVSS

SEQ ID NO: 18636 - protein, 118 aa, Artificial Sequence
  Chemically Synthesized
QVQLQESGGGLVQAGGSLRLSCAASGYISRRYYMGWYRQAPGKERELVAAINAGATTYYADSVKGRFTISRDNAKNTVYLQMNSLKPEDTAVYYCAASSYGAPYHYYWGQGTQVTVSS

SEQ ID NO: 18637 - protein, 117 aa, Artificial Sequence
  Chemically Synthesized
QVQLQESGGGLVQAGGSLRLSCAASGSISTGLMGWYRQAPGKEREFVAGIAAGSTTYYADSVKGRFTISRDNAKNTVYLQMNSLKPEDTAVYYCAARSSATGRHRYWGQGTQVTVSS

SEQ ID NO: 18638 - protein, 117 aa, Artificial Sequence
  Chemically Synthesized
QVQLQESGGGLVQAGGSLRLSCAASGNISVVEDMGWYRQAPGKEREFVAGITDGTTTYYADSVKGRFTISRDNAKNTVYLQMNSLKPEDTAVYYCAAYYDDYPYFYWGQGTQVTVSS

SEQ ID NO: 18639 - protein, 122 aa, Artificial Sequence
  Chemically Synthesized
QVQLQESGGGLVQAGGSLRLSCAASGYISHQYYMGWYRQAPGKEREFVAGITYGASTYYADSVKGRFTISRDNAKNTVYLQMNSLKPEDTAVYYCAVYFPLPSAALDPSFYWGQGTQVTVSS

SEQ ID NO: 18640 - protein, 118 aa, Artificial Sequence
  Chemically Synthesized
QVQLQESGGGLVQAGGSLRLSCAASGTISYRYLMGWYRQAPGKERELVAGIDYGTNTYYADSVKGRFTISRDNAKNTVYLQMNSLKPEDTAVYYCAARTVRRWYYRYWGQGTQVTVSS

SEQ ID NO: 18641 - protein, 117 aa, Artificial Sequence
  Chemically Synthesized
QVQLQESGGGLVQAGGSLRLSCAASGYIFQTSDMGWYRQAPGKEREFVAGIGPGANTNYADSVKGRFTISRDNAKNTVYLQMNSLKPEDTAVYYCAAYDRITPHPYWGQGTQVTVSS

SEQ ID NO: 18642 - protein, 118 aa, Artificial Sequence
  Chemically Synthesized
QVQLQESGGGLVQAGGSLRLSCAASGNIFYRGSMGWYRQAPGKEREFVAGITGGSNTNYADSVKGRFTISRDNAKNTVYLQMNSLKPEDTAVYYCAAYGPIRKYHVYWGQGTQVTVSS

SEQ ID NO: 18643 - protein, 122 aa, Artificial Sequence
  Chemically Synthesized
QVQLQESGGGLVQAGGSLRLSCAASGTIFGLVLMGWYRQAPGKERELVASITWGTTTYYADSVKGRFTISRDNAKNTVYLQMNSLKPEDTAVYYCAAVGYKAWDRDIGYGYWGQGTQVTVSS

SEQ ID NO: 18644 - protein, 123 aa, Artificial Sequence
  Chemically Synthesized
QVQLQESGGGLVQAGGSLRLSCAASGNISYAYYMGWYRQAPGKERELVAAIALGTITNYADSVKGRFTISRDNAKNTVYLQMNSLKPEDTAVYYCAVYYTVLYAVDQDTHYYWGQGTQVTVSS

SEQ ID NO: 18645 - protein, 118 aa, Artificial Sequence
  Chemically Synthesized
QVQLQESGGGLVQAGGSLRLSCAASGTISRRTYMGWYRQAPGKERELVATISRGTSTYYADSVKGRFTISRDNAKNTVYLQMNSLKPEDTAVYYCAARFVFDAAFRYWGQGTQVTVSS

SEQ ID NO: 18646 - protein, 126 aa, Artificial Sequence
  Chemically Synthesized
QVQLQESGGGLVQAGGSLRLSCAASGTIFDGYVMGWYRQAPGKERELVATIDLGSSTYYADSVKGRFTISRDNAKNTVYLQMNSLKPEDTAVYYCAAGDGDPRDTYDYTYLYLYYWGQGTQVTVSS

SEQ ID NO: 18647 - protein, 118 aa, Artificial Sequence
  Chemically Synthesized
QVQLQESGGGLVQAGGSLRLSCAASGNISYRRYMGWYRQAPGKERELVAAINRGGTTYYADSVKGRFTISRDNAKNTVYLQMNSLKPEDTAVYYCAVQPYSRGRYYYWGQGTQVTVSS

SEQ ID NO: 18648 - protein, 118 aa, Artificial Sequence
  Chemically Synthesized
QVQLQESGGGLVQAGGSLRLSCAASGYISLRTRMGWYRQAPGKERELVASISPGSITNYADSVKGRFTISRDNAKNTVYLQMNSLKPEDTAVYYCAAGAWWRWYHRYWGQGTQVTVSS

SEQ ID NO: 18649 - protein, 122 aa, Artificial Sequence
  Chemically Synthesized
QVQLQESGGGLVQAGGSLRLSCAASGTIFGVVGMGWYRQAPGKEREFVASIGKGANTNYADSVKGRFTISRDNAKNTVYLQMNSLKPEDTAVYYCAVLYRRWYQGRGYHAYWGQGTQVTVSS

SEQ ID NO: 18650 - protein, 118 aa, Artificial Sequence
  Chemically Synthesized
QVQLQESGGGLVQAGGSLRLSCAASGTIFVWRYMGWYRQAPGKERELVAAIASGATTYYADSVKGRFTISRDNAKNTVYLQMNSLKPEDTAVYYCAVLPRRYLQHGYWGQGTQVTVSS

SEQ ID NO: 18651 - protein, 122 aa, Artificial Sequence
  Chemically Synthesized
QVQLQESGGGLVQAGGSLRLSCAASGTIFMGWYRQAPGKERELVASISSGAITNYADSVKGRFTISRDNAKNTVYLQMNSLKPEDTAVYYCAAWKDYQSVDHVDTRRALLYWGQGTQVTVSS

SEQ ID NO: 18652 - protein, 118 aa, Artificial Sequence
  Chemically Synthesized
QVQLQESGGGLVQAGGSLRLSCAASGNISDGWNMGWYRQAPGKERELVAAIDDGGTTYYADSVKGRFTISRDNAKNTVYLQMNSLKPEDTAVYYCAVVSYTVAVYAYWGQGTQVTVSS

SEQ ID NO: 18653 - protein, 118 aa, Artificial Sequence
  Chemically Synthesized
QVQLQESGGGLVQAGGSLRLSCAASGSIFRRRTMGWYRQAPGKERELVAAITVGSNTNYADSVKGRFTISRDNAKNTVYLQMNSLKPEDTAVYYCAVRVRYNNYFRYWGQGTQVTVSS

SEQ ID NO: 18654 - protein, 122 aa, Artificial Sequence
  Chemically Synthesized
QVQLQESGGGLVQAGGSLRLSCAASGTIFPLYDMGWYRQAPGKERELVASIALGATTNYADSVKGRFTISRDNAKNTVYLQMNSLKPEDTAVYYCAAKWHVDSAIRTSHDYWGQGTQVTVSS

SEQ ID NO: 18655 - protein, 118 aa, Artificial Sequence
  Chemically Synthesized
QVQLQESGGGLVQAGGSLRLSCAASGYIFLWYYMGWYRQAPGKEREFVAAISAGSSTYYADSVKGRFTISRDNAKNTVYLQMNSLKPEDTAVYYCAVSRGKRRAFSYWGQGTQVTVSS

SEQ ID NO: 18656 - protein, 118 aa, Artificial Sequence
  Chemically Synthesized
QVQLQESGGGLVQAGGSLRLSCAASGYISRRVVMGWYRQAPGKERELVAGIATGSNTYYADSVKGRFTISRDNAKNTVYLQMNSLKPEDTAVYYCAALRGGTYKHTYWGQGTQVTVSS

SEQ ID NO: 18657 - protein, 118 aa, Artificial Sequence
  Chemically Synthesized
QVQLQESGGGLVQAGGSLRLSCAASGTISQHTSMGWYRQAPGKERELVATIGYGATTYYADSVKGRFTISRDNAKNTVYLQMNSLKPEDTAVYYCAVLGNYRLFYRYWGQGTQVTVSS

SEQ ID NO: 18658 - protein, 122 aa, Artificial Sequence
  Chemically Synthesized
QVQLQESGGGLVQAGGSLRLSCAASGYIFTSQIMGWYRQAPGKEREFVAGITVGGITNYADSVKGRFTISRDNAKNTVYLQMNSLKPEDTAVYYCAATYDGGHNVPYGLVYWGQGTQVTVSS

SEQ ID NO: 18659 - protein, 122 aa, Artificial Sequence
  Chemically Synthesized
QVQLQESGGGLVQAGGSLRLSCAASGYISGELTMGWYRQAPGKERELVAAIDSGSSTNYADSVKGRFTISRDNAKNTVYLQMNSLKPEDTAVYYCAVTDYDRTTQDILHDYWGQGTQVTVSS

SEQ ID NO: 18660 - protein, 118 aa, Artificial Sequence
  Chemically Synthesized
QVQLQESGGGLVQAGGSLRLSCAASGTISYRAYMGWYRQAPGKERELVAAISPGGSTYYADSVKGRFTISRDNAKNTVYLQMNSLKPEDTAVYYCAAGYRFQRSLIYWGQGTQVTVSS

SEQ ID NO: 18661 - protein, 118 aa, Artificial Sequence
  Chemically Synthesized
QVQLQESGGGLVQAGGSLRLSCAASGNIFATNVMGWYRQAPGKEREFVASIGYGSSTNYADSVKGRFTISRDNAKNTVYLQMNSLKPEDTAVYYCAVGTDAIGLHPYWGQGTQVTVSS

SEQ ID NO: 18662 - protein, 122 aa, Artificial Sequence
  Chemically Synthesized
QVQLQESGGGLVQAGGSLRLSCAASGNIFYRSYMGWYRQAPGKEREFVAAITSGAITYYADSVKGRFTISRDNAKNTVYLQMNSLKPEDTAVYYCAVVAWHSTYHRRRYTYWGQGTQVTVSS

SEQ ID NO: 18663 - protein, 118 aa, Artificial Sequence
  Chemically Synthesized
QVQLQESGGGLVQAGGSLRLSCAASGYIFGGWYMGWYRQAPGKERELVAAIDRGGITNYADSVKGRFTISRDNAKNTVYLQMNSLKPEDTAVYYCAVRYRYRYHHVYWGQGTQVTVSS

SEQ ID NO: 18664 - protein, 117 aa, Artificial Sequence
  Chemically Synthesized
QVQLQESGGGLVQAGGSLRLSCAASGNISAPYYMGWYRQAPGKEREFVAGITSGGLPYADSVKGRFTISRDNAKNTVYLQMNSLKPEDTAVYYCAATYSRWILFYYWGQGTQVTVSS

SEQ ID NO: 18665 - protein, 122 aa, Artificial Sequence
  Chemically Synthesized
QVQLQESGGGLVQAGGSLRLSCAASGSISRRQAMGWYRQAPGKEREFVAGIAGGTNTYYADSVKGRFTISRDNAKNTVYLQMNSLKPEDTAVYYCAVQGYYRYQYYGRYRYWGQGTQVTVSS

SEQ ID NO: 18666 - protein, 125 aa, Artificial Sequence
  Chemically Synthesized
QVQLQESGGGLVQAGGSLRLSCAASGTIFGYYDMGWYRQAPGKEREFVAAIGSGSITNYADSVKGRFTISRDNAKNTVYLQMNSLKPEDTAVYYCAVSEDDQYVGIGNSSSTFYWGQGTQVTVSS

SEQ ID NO: 18667 - protein, 118 aa, Artificial Sequence
  Chemically Synthesized
QVQLQESGGGLVQAGGSLRLSCAASGSISRGPGMGWYRQAPGKERELVASISRGGSTYYADSVKGRFTISRDNAKNTVYLQMNSLKPEDTAVYYCAVSRRYFIAHRYWGQGTQVTVSS

SEQ ID NO: 18668 - protein, 122 aa, Artificial Sequence
  Chemically Synthesized
QVQLQESGGGLVQAGGSLRLSCAASGTIFQIGTMGWYRQAPGKEREFVAGIDYGTTTYYADSVKGRFTISRDNAKNTVYLQMNSLKPEDTAVYYCAATNHYLYYEYLTLPYWGQGTQVTVSS

SEQ ID NO: 18669 - protein, 118 aa, Artificial Sequence
  Chemically Synthesized
QVQLQESGGGLVQAGGSLRLSCAASGTIFYYRYMGWYRQAPGKEREFVAAINDGGSTYYADSVKGRFTISRDNAKNTVYLQMNSLKPEDTAVYYCAVARRVNYYHTYWGQGTQVTVSS

SEQ ID NO: 18670 - protein, 122 aa, Artificial Sequence
  Chemically Synthesized
QVQLQESGGGLVQAGGSLRLSCAASGNIFPYAKMGWYRQAPGKERELVATITQGSTTNYADSVKGRFTISRDNAKNTVYLQMNSLKPEDTAVYYCAAGYLNYAYHKWSHWYWGQGTQVTVSS

SEQ ID NO: 18671 - protein, 111 aa, Artificial Sequence
  Chemically Synthesized
QVQLQESGGGLVQAGGSLRLSCAASGTIFYTGAMGWYRQAPGKERELVASIGHGGNTNYADSVKGRFTISRDNAKNTVYLQMNSLKPEDTAVYYCAAQIYWGQGTQVTVSS

SEQ ID NO: 18672 - protein, 122 aa, Artificial Sequence
  Chemically Synthesized
QVQLQESGGGLVQAGGSLRLSCAASGSIFTLTGMGWYRQAPGKERELVATIDPGGNTNYADSVKGRFTISRDNAKNTVYLQMNSLKPEDTAVYYCAAYLYYDAEGHPWFQYWGQGTQVTVSS

SEQ ID NO: 18673 - protein, 122 aa, Artificial Sequence
  Chemically Synthesized
QVQLQESGGGLVQAGGSLRLSCAASGTIFFIRRMGWYRQAPGKERELVASIAPGATTNYADSVKGRFTISRDNAKNTVYLQMNSLKPEDTAVYYCAAGPYWYLYTPLQHYYWGQGTQVTVSS

SEQ ID NO: 18674 - protein, 118 aa, Artificial Sequence
  Chemically Synthesized
QVQLQESGGGLVQAGGSLRLSCAASGNISISRTMGWYRQAPGKERELVAGISYGSTTYYADSVKGRFTISRDNAKNTVYLQMNSLKPEDTAVYYCAAYRGYRWKLVYWGQGTQVTVSS

SEQ ID NO: 18675 - protein, 118 aa, Artificial Sequence
  Chemically Synthesized
QVQLQESGGGLVQAGGSLRLSCAASGNIFHQIRMGWYRQAPGKEREFVATIGTGTTTNYADSVKGRFTISRDNAKNTVYLQMNSLKPEDTAVYYCAVALYYDWLYVYWGQGTQVTVSS

SEQ ID NO: 18676 - protein, 118 aa, Artificial Sequence
  Chemically Synthesized
QVQLQESGGGLVQAGGSLRLSCAASGTISRRVYMGWYRQAPGKERELVASIDYGGNTNYADSVKGRFTISRDNAKNTVYLQMNSLKPEDTAVYYCAVAWWRRYRHDYWGQGTQVTVSS

SEQ ID NO: 18677 - protein, 118 aa, Artificial Sequence
  Chemically Synthesized
QVQLQESGGGLVQAGGSLRLSCAASGSISPRKRMGWYRQAPGKEREFVATIGRGGSTNYADSVKGRFTISRDNAKNTVYLQMNSLKPEDTAVYYCAAHRYNAWDHYYWGQGTQVTVSS

SEQ ID NO: 18678 - protein, 122 aa, Artificial Sequence
  Chemically Synthesized
QVQLQESGGGLVQAGGSLRLSCAASGTIFWRLPMGWYRQAPGKERELVASISYGTNTYYADSVKGRFTISRDNAKNTVYLQMNSLKPEDTAVYYCAVRRNVYGFYGGRHLYWGQGTQVTVSS

SEQ ID NO: 18679 - protein, 121 aa, Artificial Sequence
  Chemically Synthesized
QVQLQESGGGLVQAGGSLRLSCAASGNIFPRSYMGWYRQAPGKERELVASITDGASTYYADSVKGRFTISRDNAKNTVYLQMNSLKPEDTAVYYCAVLNYGRWPYKRHRYWGQGTQVTVSS

SEQ ID NO: 18680 - protein, 118 aa, Artificial Sequence
  Chemically Synthesized
QVQLQESGGGLVQAGGSLRLSCAASGYISLRRNMGWYRQAPGKERELVAGIGRGANTYYADSVKGRFTISRDNAKNTVYLQMNSLKPEDTAVYYCAVNPQRQYYHPYWGQGTQVTVSS

SEQ ID NO: 18681 - protein, 118 aa, Artificial Sequence
  Chemically Synthesized
QVQLQESGGGLVQAGGSLRLSCAASGNIFAYYSMGWYRQAPGKEREFVAAIDYGGTTNYADSVKGRFTISRDNAKNTVYLQMNSLKPEDTAVYYCAVTYPPYIYLFYWGQGTQVTVSS

SEQ ID NO: 18682 - protein, 122 aa, Artificial Sequence
  Chemically Synthesized
QVQLQESGGGLVQAGGSLRLSCAASGYISPRRVMGWYRQAPGKERELVAAIDLGANTYYADSVKGRFTISRDNAKNTVYLQMNSLKPEDTAVYYCAAYVWRWKAGAGQFYYWGQGTQVTVSS

SEQ ID NO: 18683 - protein, 118 aa, Artificial Sequence
  Chemically Synthesized
QVQLQESGGGLVQAGGSLRLSCAASGSISRYRSMGWYRQAPGKERELVAGIGGGASTYYADSVKGRFTISRDNAKNTVYLQMNSLKPEDTAVYYCAAVRWYGWGHYYWGQGTQVTVSS

SEQ ID NO: 18684 - protein, 122 aa, Artificial Sequence
  Chemically Synthesized
QVQLQESGGGLVQAGGSLRLSCAASGYIFWYGAMGWYRQAPGKEREFVAAITGGTNTNYADSVKGRFTISRDNAKNTVYLQMNSLKPEDTAVYYCAARRAYRYTYQRGHWYWGQGTQVTVSS

SEQ ID NO: 18685 - protein, 118 aa, Artificial Sequence
  Chemically Synthesized
QVQLQESGGGLVQAGGSLRLSCAASGTISGQKVMGWYRQAPGKEREFVAAISLGASTYYADSVKGRFTISRDNAKNTVYLQMNSLKPEDTAVYYCAALRRAWGRYFYWGQGTQVTVSS

SEQ ID NO: 18686 - protein, 122 aa, Artificial Sequence
  Chemically Synthesized
QVQLQESGGGLVQAGGSLRLSCAASGTISYVDQMGWYRQAPGKERELVASIDAGGTTYYADSVKGRFTISRDNAKNTVYLQMNSLKPEDTAVYYCAVFIALRYDEPFRLSYWGQGTQVTVSS

SEQ ID NO: 18687 - protein, 117 aa, Artificial Sequence
  Chemically Synthesized
QVQLQESGGGLVQAGGSLRLSCAASGNISAYGDMGWYRQAPGKEREFVAAIDPGRVPYADSVKGRFTISRDNAKNTVYLQMNSLKPEDTAVYYCAVDPNDYSGLQYWGQGTQVTVSS

SEQ ID NO: 18688 - protein, 122 aa, Artificial Sequence
  Chemically Synthesized
QVQLQESGGGLVQAGGSLRLSCAASGNISLYQRMGWYRQAPGKERELVATIDAGGNTNYADSVKGRFTISRDNAKNTVYLQMNSLKPEDTAVYYCAAQHNGGQTYDRYHGYWGQGTQVTVSS

SEQ ID NO: 18689 - protein, 118 aa, Artificial Sequence
  Chemically Synthesized
QVQLQESGGGLVQAGGSLRLSCAASGNIFHAATMGWYRQAPGKERELVAGIGVGASTYYADSVKGRFTISRDNAKNTVYLQMNSLKPEDTAVYYCAARGISQRDFPYWGQGTQVTVSS

SEQ ID NO: 18690 - protein, 122 aa, Artificial Sequence
  Chemically Synthesized
QVQLQESGGGLVQAGGSLRLSCAASGSISNKYFMGWYRQAPGKEREFVAAITSGTITNYADSVKGRFTISRDNAKNTVYLQMNSLKPEDTAVYYCAALLSVYWTYRDNHEYWGQGTQVTVSS

SEQ ID NO: 18691 - protein, 119 aa, Artificial Sequence
  Chemically Synthesized
QVQLQESGGGLVQAGGSLRLSCAASGTIFAWWPMGWYRQAPGKERELVATITNGATTNYADSVKGRFTISRDNAKNTVYLQMNSLKPEDTAVYYCAVIRVLLYSYLYYWGQGTQVTVSS

SEQ ID NO: 18692 - protein, 118 aa, Artificial Sequence
  Chemically Synthesized
QVQLQESGGGLVQAGGSLRLSCAASGYISSFRRMGWYRQAPGKEREFVAGIDFGGNTNYADSVKGRFTISRDNAKNTVYLQMNSLKPEDTAVYYCAVGKFWKYKHGYWGQGTQVTVSS

SEQ ID NO: 18693 - protein, 118 aa, Artificial Sequence
  Chemically Synthesized
QVQLQESGGGLVQAGGSLRLSCAASGYISPRWYMGWYRQAPGKEREFVATINPGASTNYADSVKGRFTISRDNAKNTVYLQMNSLKPEDTAVYYCAAIRFRWSYHAYWGQGTQVTVSS

SEQ ID NO: 18694 - protein, 126 aa, Artificial Sequence
  Chemically Synthesized
QVQLQESGGGLVQAGGSLRLSCAASGYISRSLVMGWYRQAPGKEREFVAAINYGGITNYADSVKGRFTISRDNAKNTVYLQMNSLKPEDTAVYYCAVNPSYHRYFSYTGFAIHGYWGQGTQVTVSS

SEQ ID NO: 18695 - protein, 122 aa, Artificial Sequence
  Chemically Synthesized
QVQLQESGGGLVQAGGSLRLSCAASGTISRYSAMGWYRQAPGKERELVAAITRGTNTYYADSVKGRFTISRDNAKNTVYLQMNSLKPEDTAVYYCAALSGRGRNIPTQYYYWGQGTQVTVSS

SEQ ID NO: 18696 - protein, 118 aa, Artificial Sequence
  Chemically Synthesized
QVQLQESGGGLVQAGGSLRLSCAASGNISRSTRMGWYRQAPGKERELVAAITPGGTTYYADSVKGRFTISRDNAKNTVYLQMNSLKPEDTAVYYCAASRYRYPRHYYWGQGTQVTVSS

SEQ ID NO: 18697 - protein, 122 aa, Artificial Sequence
  Chemically Synthesized
QVQLQESGGGLVQAGGSLRLSCAASGSISSDYPMGWYRQAPGKEREFVATIGYGGTTNYADSVKGRFTISRDNAKNTVYLQMNSLKPEDTAVYYCAAPTRQTGDGYVGHQYWGQGTQVTVSS

SEQ ID NO: 18698 - protein, 122 aa, Artificial Sequence
  Chemically Synthesized
QVQLQESGGGLVQAGGSLRLSCAASGSISRYRPMGWYRQAPGKERELVAGITYGASTYYADSVKGRFTISRDNAKNTVYLQMNSLKPEDTAVYYCAARRFANIAASASHTYWGQGTQVTVSS

SEQ ID NO: 18699 - protein, 122 aa, Artificial Sequence
  Chemically Synthesized
QVQLQESGGGLVQAGGSLRLSCAASGTIFRYRFMGWYRQAPGKERELVAAISVGGNTNYADSVKGRFTISRDNAKNTVYLQMNSLKPEDTAVYYCAVRNWWGVGQHLTLWYWGQGTQVTVSS

SEQ ID NO: 18700 - protein, 122 aa, Artificial Sequence
  Chemically Synthesized
QVQLQESGGGLVQAGGSLRLSCAASGYIFYHRVMGWYRQAPGKEREFVVAITLGSTTNYADSVKGRFTISRDNAKNTVYLQMNSLKPEDTAVYYCAAYGWIDDDYDQYHAYWGQGTQVTVSS

SEQ ID NO: 18701 - protein, 118 aa, Artificial Sequence
  Chemically Synthesized
QVQLQESGGGLVQAGGSLRLSCAASGYIFSHSIMGWYRQAPGKERELVAAITVGGTTYYADSVKGRFTISRDNAKNTVYLQMNSLKPEDTAVYYCAVVNEDEGDLLYWGQGTQVTVSS

SEQ ID NO: 18702 - protein, 122 aa, Artificial Sequence
  Chemically Synthesized
QVQLQESGGGLVQAGGSLRLSCAASGTIFRYYYMGWYRQAPGKEREFVASIGNGTTTNYADSVKGRFTISRDNAKNTVYLQMNSLKPEDTAVYYCAAKARRYYERPFYFRYWGQGTQVTVSS

SEQ ID NO: 18703 - protein, 118 aa, Artificial Sequence
  Chemically Synthesized
QVQLQESGGGLVQAGGSLRLSCAASGNIFYYTVMGWYRQAPGKERELVAGIAFGAITYYADSVKGRFTISRDNAKNTVYLQMNSLKPEDTAVYYCAAWWWWAYLHAYWGQGTQVTVSS

SEQ ID NO: 18704 - protein, 126 aa, Artificial Sequence
  Chemically Synthesized
QVQLQESGGGLVQAGGSLRLSCAASGYISKGWRMGWYRQAPGKERELVAAISFGAITYYADSVKGRFTISRDNAKNTVYLQMNSLKPEDTAVYYCAVQSLYIFLPRVYGHSDHVYWGQGTQVTVSS

SEQ ID NO: 18705 - protein, 118 aa, Artificial Sequence
  Chemically Synthesized
QVQLQESGGGLVQAGGSLRLSCAASGTIFSLKYMGWYRQAPGKERELVASINWGASTNYADSVKGRFTISRDNAKNTVYLQMNSLKPEDTAVYYCAAPRFLSYRHYYWGQGTQVTVSS

SEQ ID NO: 18706 - protein, 122 aa, Artificial Sequence
  Chemically Synthesized
QVQLQESGGGLVQAGGSLRLSCAASGYISRYHSMGWYRQAPGKERELVAGITSGGTTNYADSVKGRFTISRDNAKNTVYLQMNSLKPEDTAVYYCAAYAYPYWIPRYFHGYWGQGTQVTVSS

SEQ ID NO: 18707 - protein, 118 aa, Artificial Sequence
  Chemically Synthesized
QVQLQESGGGLVQAGGSLRLSCAASGTISRWAVMGWYRQAPGKERELVAAINIGTTTYYADSVKGRFTISRDNAKNTVYLQMNSLKPEDTAVYYCAAYRRVTYGHIYWGQGTQVTVSS

SEQ ID NO: 18708 - protein, 125 aa, Artificial Sequence
  Chemically Synthesized
QVQLQESGGGLVQAGGSLRLSCAASGNIFTLNSMGWYRQAPGKEREFVAGIDTGAIPYADSVKGRFTISRDNAKNTVYLQMNSLKPEDTAVYYCAADDSGIVVRPQQSWYQLDYWGQGTQVTVSS

SEQ ID NO: 18709 - protein, 126 aa, Artificial Sequence
  Chemically Synthesized
QVQLQESGGGLVQAGGSLRLSCAASGTISGQRVMGWYRQAPGKERELVAAISPGASTYYADSVKGRFTISRDNAKNTVYLQMNSLKPEDTAVYYCAAKRIIRKSHGDRTYITHSYWGQGTQVTVSS

SEQ ID NO: 18710 - protein, 118 aa, Artificial Sequence
  Chemically Synthesized
QVQLQESGGGLVQAGGSLRLSCAASGTISRRLKMGWYRQAPGKERELVATISIGSTTNYADSVKGRFTISRDNAKNTVYLQMNSLKPEDTAVYYCAAGRGWWYNHRYWGQGTQVTVSS

SEQ ID NO: 18711 - protein, 118 aa, Artificial Sequence
  Chemically Synthesized
QVQLQESGGGLVQAGGSLRLSCAASGTISLREGMGWYRQAPGKERELVAGIGYGGNTYYADSVKGRFTISRDNAKNTVYLQMNSLKPEDTAVYYCAVNDKSRDFHLYWGQGTQVTVSS

SEQ ID NO: 18712 - protein, 125 aa, Artificial Sequence
  Chemically Synthesized
QVQLQESGGGLVQAGGSLRLSCAASGTISYNYPMGWYRQAPGKEREFVATITTGTTTYYADSVKGRFTISRDNAKNTVYLQMNSLKPEDTAVYYCAAYIVGSGDVRPTSVTLIYWGQGTQVTVSS

SEQ ID NO: 18713 - protein, 118 aa, Artificial Sequence
  Chemically Synthesized
QVQLQESGGGLVQAGGSLRLSCAASGSIFRIRYMGWYRQAPGKEREFVAAIASGATTNYADSVKGRFTISRDNAKNTVYLQMNSLKPEDTAVYYCAASRSPYSRFHYWGQGTQVTVSS

SEQ ID NO: 18714 - protein, 118 aa, Artificial Sequence
  Chemically Synthesized
QVQLQESGGGLVQAGGSLRLSCAASGNIFVDAAMGWYRQAPGKERELVAAIGPGTSTYYADSVKGRFTISRDNAKNTVYLQMNSLKPEDTAVYYCAVDKAASHWFDYWGQGTQVTVSS

SEQ ID NO: 18715 - protein, 122 aa, Artificial Sequence
  Chemically Synthesized
QVQLQESGGGLVQAGGSLRLSCAASGYISRGPLMGWYRQAPGKERELVAGIASGGNTYYADSVKGRFTISRDNAKNTVYLQMNSLKPEDTAVYYCAARRVRYWYANTKHSYWGQGTQVTVSS

SEQ ID NO: 18716 - protein, 119 aa, Artificial Sequence
  Chemically Synthesized
QVQLQESGGGLVQAGGSLRLSCAASGNIFRVLSMGWYRQAPGKEREFVASISEGTITNYADSVKGRFTISRDNAKNTVYLQMNSLKPEDTAVYYCAALWGFRHYRHDYWGQGTQVTVSS

SEQ ID NO: 18717 - protein, 125 aa, Artificial Sequence
  Chemically Synthesized
QVQLQESGGGLVQAGGSLRLSCAASGYIFNYFYMGWYRQAPGKEREFVAAIAGGTTTYYADSVKGRFTISRDNAKNTVYLQMNSLKPEDTAVYYCAAPKQRKLSVTSKTGDHYYWGQGTQVTVSS

SEQ ID NO: 18718 - protein, 122 aa, Artificial Sequence
  Chemically Synthesized
QVQLQESGGGLVQAGGSLRLSCAASGTIFRSYGMGWYRQAPGKEREFVASINRGATTNYADSVKGRFTISRDNAKNTVYLQMNSLKPEDTAVYYCAVNGKSFFYGSRLHSYWGQGTQVTVSS

SEQ ID NO: 18719 - protein, 118 aa, Artificial Sequence
  Chemically Synthesized
QVQLQESGGGLVQAGGSLRLSCAASGTIFAQAIMGWYRQAPGKEREFVASIGYGANTYYADSVKGRFTISRDNAKNTVYLQMNSLKPEDTAVYYCAAGGDGHYYYGYWGQGTQVTVSS

SEQ ID NO: 18720 - protein, 118 aa, Artificial Sequence
  Chemically Synthesized
QVQLQESGGGLVQAGGSLRLSCAASGSIFLHRFMGWYRQAPGKERELVASISGGASTYYADSVKGRFTISRDNAKNTVYLQMNSLKPEDTAVYYCAALTWFPLPLDYWGQGTQVTVSS

SEQ ID NO: 18721 - protein, 118 aa, Artificial Sequence
  Chemically Synthesized
QVQLQESGGGLVQAGGSLRLSCAASGNISLLYYMGWYRQAPGKEREFVASIDQGANTYYADSVKGRFTISRDNAKNTVYLQMNSLKPEDTAVYYCAAYRDQSASHRYWGQGTQVTVSS

SEQ ID NO: 18722 - protein, 126 aa, Artificial Sequence
  Chemically Synthesized
QVQLQESGGGLVQAGGSLRLSCAASGNISRFRSMGWYRQAPGKERELVAAISVGGNTNYADSVKGRFTISRDNAKNTVYLQMNSLKPEDTAVYYCAAPAWYHSYGKRTPTGRHDYWGQGTQVTVSS

SEQ ID NO: 18723 - protein, 122 aa, Artificial Sequence
  Chemically Synthesized
QVQLQESGGGLVQAGGSLRLSCAASGNIFRLVRMGWYRQAPGKERELVATIGYGTSTYYADSVKGRFTISRDNAKNTVYLQMNSLKPEDTAVYYCAAHRPRYYGHGVGHPYWGQGTQVTVSS

SEQ ID NO: 18724 - protein, 122 aa, Artificial Sequence
  Chemically Synthesized
QVQLQESGGGLVQAGGSLRLSCAASGTIFNIDGMGWYRQAPGKERELVATIGRGGNTYYADSVKGRFTISRDNAKNTVYLQMNSLKPEDTAVYYCAARRRTYWVYRGSHYYWGQGTQVTVSS

SEQ ID NO: 18725 - protein, 118 aa, Artificial Sequence
  Chemically Synthesized
QVQLQESGGGLVQAGGSLRLSCAASGSIFVSCLMGWYRQAPGKERELVATISAGGITYYADSVKGRFTISRDNAKNTVYLQMNSLKPEDTAVYYCAVGPYAIILHSYWGQGTQVTVSS

SEQ ID NO: 18726 - protein, 118 aa, Artificial Sequence
  Chemically Synthesized
QVQLQESGGGLVQAGGSLRLSCAASGNIFRRYRMGWYRQAPGKEREFVATINLGTSTNYADSVKGRFTISRDNAKNTVYLQMNSLKPEDTAVYYCAAQAVTRYRHVYWGQGTQVTVSS

SEQ ID NO: 18727 - protein, 118 aa, Artificial Sequence
  Chemically Synthesized
QVQLQESGGGLVQAGGSLRLSCAASGSIFRPYYMGWYRQAPGKEREFVATITKGTNTYYADSVKGRFTISRDNAKNTVYLQMNSLKPEDTAVYYCAVYVRNARGYVYWGQGTQVTVSS

SEQ ID NO: 18728 - protein, 118 aa, Artificial Sequence
  Chemically Synthesized
QVQLQESGGGLVQAGGSLRLSCAASGTIFRRVFMGWYRQAPGKEREFVAAIGVGGNTNYADSVKGRFTISRDNAKNTVYLQMNSLKPEDTAVYYCAVNYYRQFYFYYWGQGTQVTVSS

SEQ ID NO: 18729 - protein, 118 aa, Artificial Sequence
  Chemically Synthesized
QVQLQESGGGLVQAGGSLRLSCAASGYIFPINPMGWYRQAPGKEREFVAAITIGSTTNYADSVKGRFTISRDNAKNTVYLQMNSLKPEDTAVYYCAVDYRFPFPFRYWGQGTQVTVSS

SEQ ID NO: 18730 - protein, 122 aa, Artificial Sequence
  Chemically Synthesized
QVQLQESGGGLVQAGGSLRLSCAASGYISYFTFMGWYRQAPGKEREFVATIGRGASTNYADSVKGRFTISRDNAKNTVYLQMNSLKPEDTAVYYCAVGGGWYYYRRPAYGYWGQGTQVTVSS

SEQ ID NO: 18731 - protein, 118 aa, Artificial Sequence
  Chemically Synthesized
QVQLQESGGGLVQAGGSLRLSCAASGYISIYIRMGWYRQAPGKERELVATISYGGITNYADSVKGRFTISRDNAKNTVYLQMNSLKPEDTAVYYCAVAKYRRGRHGYWGQGTQVTVSS

SEQ ID NO: 18732 - protein, 114 aa, Artificial Sequence
  Chemically Synthesized
QVQLQESGGGLVQAGGSLRLSCAASGYISWRRYMGWYRQAPGKERELVASIDTGGTTNYADSVKGRFTISRDNAKNTVYLQMNSLKPEDTAVYYCAFREGYYYWGQGTQVTVSS

SEQ ID NO: 18733 - protein, 122 aa, Artificial Sequence
  Chemically Synthesized
QVQLQESGGGLVQAGGSLRLSCAASGYIFQYAFMGWYRQAPGKERELVATIDDGAITYYADSVKGRFTISRDNAKNTVYLQMNSLKPEDTAVYYCAAVIPNTDDAYTWFGYWGQGTQVTVSS

SEQ ID NO: 18734 - protein, 121 aa, Artificial Sequence
  Chemically Synthesized
QVQLQESGGGLVQAGGSLRLSCAASGSISYPRYMGWYRQAPGKEREFVAGIGLGGSTYYADSVKGRFTISRDNAKNTVYLQMNSLKPEDTAVYYCAAIPGWYYPDSDYTYWGQGTQVTVSS

SEQ ID NO: 18735 - protein, 118 aa, Artificial Sequence
  Chemically Synthesized
QVQLQESGGGLVQAGGSLRLSCAASGYISHIRKMGWYRQAPGKERELVASITAGTSTYYADSVKGRFTISRDNAKNTVYLQMNSLKPEDTAVYYCAAKSYVYGLHYYWGQGTQVTVSS

SEQ ID NO: 18736 - protein, 126 aa, Artificial Sequence
  Chemically Synthesized
QVQLQESGGGLVQAGGSLRLSCAASGSISEPDTMGWYRQAPGKERELVAAIDYGTITYYADSVKGRFTISRDNAKNTVYLQMNSLKPEDTAVYYCAARDVDYGVFRYDGYRVYHYWGQGTQVTVSS

SEQ ID NO: 18737 - protein, 118 aa, Artificial Sequence
  Chemically Synthesized
QVQLQESGGGLVQAGGSLRLSCAASGNIFAPIRMGWYRQAPGKERELVAAINYGTITYYADSVKGRFTISRDNAKNTVYLQMNSLKPEDTAVYYCAATRAYRRPYAYWGQGTQVTVSS

SEQ ID NO: 18738 - protein, 118 aa, Artificial Sequence
  Chemically Synthesized
QVQLQESGGGLVQAGGSLRLSCAASGSIFPRYRMGWYRQAPGKERELVASINFGASTNYADSVKGRFTISRDNAKNTVYLQMNSLKPEDTAVYYCAASRAFRGGLAYWGQGTQVTVSS

SEQ ID NO: 18739 - protein, 118 aa, Artificial Sequence
  Chemically Synthesized
QVQLQESGGGLVQAGGSLRLSCAASGNISYDKYMGWYRQAPGKERELVAGIDYGSTTYYADSVKGRFTISRDNAKNTVYLQMNSLKPEDTAVYYCAAGAWNGPILQYWGQGTQVTVSS

SEQ ID NO: 18740 - protein, 118 aa, Artificial Sequence
  Chemically Synthesized
QVQLQESGGGLVQAGGSLRLSCAASGSIFPRWYMGWYRQAPGKERELVAAISWGGTTNYADSVKGRFTISRDNAKNTVYLQMNSLKPEDTAVYYCAAKTYRGTYHRYWGQGTQVTVSS

SEQ ID NO: 18741 - protein, 122 aa, Artificial Sequence
  Chemically Synthesized
QVQLQESGGGLVQAGGSLRLSCAASGNISYGWRMGWYRQAPGKEREFVATITRGGNTYYADSVKGRFTISRDNAKNTVYLQMNSLKPEDTAVYYCAAPGYRAYSNHYVHYYWGQGTQVTVSS

SEQ ID NO: 18742 - protein, 122 aa, Artificial Sequence
  Chemically Synthesized
QVQLQESGGGLVQAGGSLRLSCAASGTIFDRRRMGWYRQAPGKERELVATIASGSTTYYADSVKGRFTISRDNAKNTVYLQMNSLKPEDTAVYYCAAYSYRVNYRGRYFRYWGQGTQVTVSS

SEQ ID NO: 18743 - protein, 126 aa, Artificial Sequence
  Chemically Synthesized
QVQLQESGGGLVQAGGSLRLSCAASGTIFYGDDMGWYRQAPGKERELVATIGDGANTNYADSVKGRFTISRDNAKNTVYLQMNSLKPEDTAVYYCAVYNYRNARRYNYEYSRYSYWGQGTQVTVSS

SEQ ID NO: 18744 - protein, 118 aa, Artificial Sequence
  Chemically Synthesized
QVQLQESGGGLVQAGGSLRLSCAASGYISRYAGMGWYRQAPGKEREFVAGITDGGNTNYADSVKGRFTISRDNAKNTVYLQMNSLKPEDTAVYYCAARYAGVYIFFYWGQGTQVTVSS

SEQ ID NO: 18745 - protein, 122 aa, Artificial Sequence
  Chemically Synthesized
QVQLQESGGGLVQAGGSLRLSCAASGNIFKPDYMGWYRQAPGKERELVAAIARGAITYYADSVKGRFTISRDNAKNTVYLQMNSLKPEDTAVYYCAAFGHSGVGPYYDFNYWGQGTQVTVSS

SEQ ID NO: 18746 - protein, 125 aa, Artificial Sequence
  Chemically Synthesized
QVQLQESGGGLVQAGGSLRLSCAASGTIFPIHNMGWYRQAPGKEREFVGIAYGATTNYADSVKGRFTISRDNAKNTVYLQMNSLKPEDTAVYYCAVDAVSIERRVGRYVPGHAYWGQGTQVTVSS

SEQ ID NO: 18747 - protein, 118 aa, Artificial Sequence
  Chemically Synthesized
QVQLQESGGGLVQAGGSLRLSCAASGTISAVYAMGWYRQAPGKEREFVATIATGSITNYADSVKGRFTISRDNAKNTVYLQMNSLKPEDTAVYYCAARGASHLYLSYWGQGTQVTVSS

SEQ ID NO: 18748 - protein, 118 aa, Artificial Sequence
  Chemically Synthesized
QVQLQESGGGLVQAGGSLRLSCAASGSIFRPRWMGWYRQAPGKEREFVATINRGTSTYYADSVKGRFTISRDNAKNTVYLQMNSLKPEDTAVYYCAVINYAGRAYNYWGQGTQVTVSS

SEQ ID NO: 18749 - protein, 118 aa, Artificial Sequence
  Chemically Synthesized
QVQLQESGGGLVQAGGSLRLSCAASGNISRAQYMGWYRQAPGKERELVAAINRGSTTYYADSVKGRFTISRDNAKNTVYLQMNSLKPEDTAVYYCAARYRGLYRFVYWGQGTQVTVSS

SEQ ID NO: 18750 - protein, 118 aa, Artificial Sequence
  Chemically Synthesized
QVQLQESGGGLVQAGGSLRLSCAASGYIFPYVPMGWYRQAPGKEREFVAAIGIGGNTNYADSVKGRFTISRDNAKNTVYLQMNSLKPEDTAVYYCAAIVGQGDYLDYWGQGTQVTVSS

SEQ ID NO: 18751 - protein, 122 aa, Artificial Sequence
  Chemically Synthesized
QVQLQESGGGLVQAGGSLRLSCAASGNIFYNPYMGWYRQAPGKEREFVAAINYGGTTYYADSVKGRFTISRDNAKNTVYLQMNSLKPEDTAVYYCAVYWYYRTRGTYNHRYWGQGTQVTVSS

SEQ ID NO: 18752 - protein, 118 aa, Artificial Sequence
  Chemically Synthesized
QVQLQESGGGLVQAGGSLRLSCAASGNIFKSTSMGWYRQAPGKERELVAGISRGGITYYADSVKGRFTISRDNAKNTVYLQMNSLKPEDTAVYYCAVVNLYYRHYTYWGQGTQVTVSS

SEQ ID NO: 18753 - protein, 118 aa, Artificial Sequence
  Chemically Synthesized
QVQLQESGGGLVQAGGSLRLSCAASGSISQRVSMGWYRQAPGKEREFVAGIAWGGSTNYADSVKGRFTISRDNAKNTVYLQMNSLKPEDTAVYYCAAAGRARQYYYYWGQGTQVTVSS

SEQ ID NO: 18754 - protein, 122 aa, Artificial Sequence
  Chemically Synthesized
QVQLQESGGGLVQAGGSLRLSCAASGYIFLYGYMGWYRQAPGKERELVAAIAPGSSTYYADSVKGRFTISRDNAKNTVYLQMNSLKPEDTAVYYCAAWSGDNFDLPGDYWYWGQGTQVTVSS

SEQ ID NO: 18755 - protein, 117 aa, Artificial Sequence
  Chemically Synthesized
QVQLQESGGGLVQAGGSLRLSCAASGYIYSASMGWYRQAPGKERELVAGINIGGTTYYADSVKGRFTISRDNAKNTVYLQMNSLKPEDTAVYYCAAYREKYYSHYYWGQGTQVTVSS

SEQ ID NO: 18756 - protein, 118 aa, Artificial Sequence
  Chemically Synthesized
QVQLQESGGGLVQAGGSLRLSCAASGNIFRYTRMGWYRQAPGKERELVAAIAPGAITYYADSVKGRFTISRDNAKNTVYLQMNSLKPEDTAVYYCAAGRWYKDQHRYWGQGTQVTVSS

SEQ ID NO: 18757 - protein, 118 aa, Artificial Sequence
  Chemically Synthesized
QVQLQESGGGLVQAGGSLRLSCAASGYISAIPDMGWYRQAPGKEREFVAGIAQGTSTYYADSVKGRFTISRDNAKNTVYLQMNSLKPEDTAVYYCAVAWPYTAWHSYWGQGTQVTVSS

SEQ ID NO: 18758 - protein, 125 aa, Artificial Sequence
  Chemically Synthesized
QVQLQESGGGLVQAGGSLRLSCAASGSIFTLTGMGWYRQAPGKERELVATIDPGGNTNYADSVKGRFTISRDNAKNTVYLQMNSLKPEDTAVYYCAANGRDLEDLWLYWLSHDYWGQGTQVTVSS

SEQ ID NO: 18759 - protein, 118 aa, Artificial Sequence
  Chemically Synthesized
QVQLQESGGGLVQAGGSLRLSCAASGYIFFARNMGWYRQAPGKEREFVAAIGLGTNTNYADSVKGRFTISRDNAKNTVYLQMNSLKPEDTAVYYCAARRYSVQRHRYWGQGTQVTVSS

SEQ ID NO: 18760 - protein, 126 aa, Artificial Sequence
  Chemically Synthesized
QVQLQESGGGLVQAGGSLRLSCAASGTISRHRRMGWYRQAPGKEREFVAGINKGTTTNYADSVKGRFTISRDNAKNTVYLQMNSLKPEDTAVYYCAVGAWYVPRPWGDLHGNHVYWGQGTQVTVSS

SEQ ID NO: 18761 - protein, 118 aa, Artificial Sequence
  Chemically Synthesized
QVQLQESGGGLVQAGGSLRLSCAASGNIFYRRAMGWYRQAPGKERELVATITRGSSTYYADSVKGRFTISRDNAKNTVYLQMNSLKPEDTAVYYCAAPRRYRPNYDYWGQGTQVTVSS

SEQ ID NO: 18762 - protein, 118 aa, Artificial Sequence
  Chemically Synthesized
QVQLQESGGGLVQAGGSLRLSCAASGYISGRQYMGWYRQAPGKEREFVASISYGGSTNYADSVKGRFTISRDNAKNTVYLQMNSLKPEDTAVYYCAARRYRPRYLYYWGQGTQVTVSS

SEQ ID NO: 18763 - protein, 116 aa, Artificial Sequence
  Chemically Synthesized
QVQLQESGGGLVQAGGSLRLSCAASGYIFGRVAMGWYRQAPGKEREFVAAINRGGTTNYADSVKGRFTISRDNAKNTVYLQMNSLKPEDTAVYYCAVRSQYRHSYWGQGTQVTVSS

SEQ ID NO: 18764 - protein, 122 aa, Artificial Sequence
  Chemically Synthesized
QVQLQESGGGLVQAGGSLRLSCAASGNIFYLRSMGWYRQAPGKEREFVASIARGTNTNYADSVKGRFTISRDNAKNTVYLQMNSLKPEDTAVYYCAVRIRAYPYGGPYHYYWGQGTQVTVSS

SEQ ID NO: 18765 - protein, 117 aa, Artificial Sequence
  Chemically Synthesized
QVQLQESGGGLVQAGGSLRLSCAASGNISALVLMGWYRQAPGKEREFVAAIGPGGSTYYADSVKGRFTISRDNAKNTVYLQMNSLKPEDTAVYYCAVPWPDWYHTYWGQGTQVTVSS

SEQ ID NO: 18766 - protein, 122 aa, Artificial Sequence
  Chemically Synthesized
QVQLQESGGGLVQAGGSLRLSCAASGNIFRQRYMGWYRQAPGKERELVAGISPGAITYYADSVKGRFTISRDNAKNTVYLQMNSLKPEDTAVYYCAAKLRYTRYQPYGLRYWGQGTQVTVSS

SEQ ID NO: 18767 - protein, 122 aa, Artificial Sequence
  Chemically Synthesized
QVQLQESGGGLVQAGGSLRLSCAASGTIFNTSYMGWYRQAPGKEREFVATINRGSTTYYADSVKGRFTISRDNAKNTVYLQMNSLKPEDTAVYYCAAVYRSYYQLGRRFRYWGQGTQVTVSS

SEQ ID NO: 18768 - protein, 126 aa, Artificial Sequence
  Chemically Synthesized
QVQLQESGGGLVQAGGSLRLSCAASGSIFPDGAMGWYRQAPGKERELVAAIDGGASTYYADSVKGRFTISRDNAKNTVYLQMNSLKPEDTAVYYCAAKRIIRKSHGDRTYITHSYWGQGTQVTVSS

SEQ ID NO: 18769 - protein, 118 aa, Artificial Sequence
  Chemically Synthesized
QVQLQESGGGLVQAGGSLRLSCAASGSIFWQHAMGWYRQAPGKERELVAAISYGTNTYYADSVKGRFTISRDNAKNTVYLQMNSLKPEDTAVYYCAARHYRVGYHRYWGQGTQVTVSS

SEQ ID NO: 18770 - protein, 126 aa, Artificial Sequence
  Chemically Synthesized
QVQLQESGGGLVQAGGSLRLSCAASGTISYDHAMGWYRQAPGKEREFVAAIAEGTTTYYADSVKGRFTISRDNAKNTVYLQMNSLKPEDTAVYYCAVYDDFRYSYVLRYYTWYFYWGQGTQVTVSS

SEQ ID NO: 18771 - protein, 118 aa, Artificial Sequence
  Chemically Synthesized
QVQLQESGGGLVQAGGSLRLSCAASGNIFGRQSMGWYRQAPGKEREFVATITYGSITNYADSVKGRFTISRDNAKNTVYLQMNSLKPEDTAVYYCAVYFRGYRYFGYWGQGTQVTVSS

SEQ ID NO: 18772 - protein, 118 aa, Artificial Sequence
  Chemically Synthesized
QVQLQESGGGLVQAGGSLRLSCAASGNISDLGNMGWYRQAPGKERELVAAISYGTSTYYADSVKGRFTISRDNAKNTVYLQMNSLKPEDTAVYYCAVLGGGERHHGYWGQGTQVTVSS

SEQ ID NO: 18773 - protein, 118 aa, Artificial Sequence
  Chemically Synthesized
QVQLQESGGGLVQAGGSLRLSCAASGNISRFSAMGWYRQAPGKERELVAAITYGGNTYYADSVKGRFTISRDNAKNTVYLQMNSLKPEDTAVYYCAARYRRYANHTYWGQGTQVTVSS

SEQ ID NO: 18774 - protein, 117 aa, Artificial Sequence
  Chemically Synthesized
QVQLQESGGGLVQAGGSLRLSCAASGSISYGSMGWYRQAPGKERELVAGIDPGGITNYADSVKGRFTISRDNAKNTVYLQMNSLKPEDTAVYYCAVAADIWNYFTYWGQGTQVTVSS

SEQ ID NO: 18775 - protein, 126 aa, Artificial Sequence
  Chemically Synthesized
QVQLQESGGGLVQAGGSLRLSCAASGYISRYAIMGWYRQAPGKERELVATIDLGSTTNYADSVKGRFTISRDNAKNTVYLQMNSLKPEDTAVYYCAADDRWIRGWYGRFAVGYRYWGQGTQVTVSS

SEQ ID NO: 18776 - protein, 122 aa, Artificial Sequence
  Chemically Synthesized
QVQLQESGGGLVQAGGSLRLSCAASGNISQTDDMGWYRQAPGKERELVAAIADGTSTNYADSVKGRFTISRDNAKNTVYLQMNSLKPEDTAVYYCAAYHDDRGHGYYTYGYWGQGTQVTVSS

SEQ ID NO: 18777 - protein, 116 aa, Artificial Sequence
  Chemically Synthesized
QVQLQESGGGLVQAGGSLRLSCAASGTMGWYRQAPGKERELVATITHGAITYYADSVKGRFTISRDNAKNTVYLQMNSLKPEDTAVYYCAVGTSAAGPADSAAYYWGQGTQVTVSS

SEQ ID NO: 18778 - protein, 122 aa, Artificial Sequence
  Chemically Synthesized
QVQLQESGGGLVQAGGSLRLSCAASGTISGTVWMGWYRQAPGKERELVAGITVGTTTNYADSVKGRFTISRDNAKNTVYLQMNSLKPEDTAVYYCAAYTLLSWAIPYAHYYWGQGTQVTVSS

SEQ ID NO: 18779 - protein, 114 aa, Artificial Sequence
  Chemically Synthesized
QVQLQESGGGLVQAGGSLRLSCAASGYISLSSTMGWYRQAPGKEREFVATISDGGSTYYADSVKGRFTISRDNAKNTVYLQMNSLKPEDTAVYYCAAVYQYLYWGQGTQVTVSS

SEQ ID NO: 18780 - protein, 125 aa, Artificial Sequence
  Chemically Synthesized
QVQLQESGGGLVQAGGSLRLSCAASGYILLVTMGWYRQAPGKEREFVATISFGTSTYYADSVKGRFTISRDNAKNTVYLQMNSLKPEDTAVYYCAAYPPRGYTDRSQLYPDYPYWGQGTQVTVSS

SEQ ID NO: 18781 - protein, 121 aa, Artificial Sequence
  Chemically Synthesized
QVQLQESGGGLVQAGGSLRLSCAASGTISRGGPMGWYRQAPGKERELVAAISSVLVPYADSVKGRFTISRDNAKNTVYLQMNSLKPEDTAVYYCAVEPPLAYVDYGPYWYWGQGTQVTVSS

SEQ ID NO: 18782 - protein, 114 aa, Artificial Sequence
  Chemically Synthesized
QVQLQESGGGLVQAGGSLRLSCAASGTIFFLWGMGWYRQAPGKERELVASINSGTSTYYADSVKGRFTISRDNAKNTVYLQMNSLKPEDTAVYYCAADAYHFYWGQGTQVTVSS

SEQ ID NO: 18783 - protein, 122 aa, Artificial Sequence
  Chemically Synthesized
QVQLQESGGGLVQAGGSLRLSCAASGTIFAIRYMGWYRQAPGKERELVAGIAPGASTYYADSVKGRFTISRDNAKNTVYLQMNSLKPEDTAVYYCAAVKAPLTAELKYHYYWGQGTQVTVSS

SEQ ID NO: 18784 - protein, 122 aa, Artificial Sequence
  Chemically Synthesized
QVQLQESGGGLVQAGGSLRLSCAASGTTYMGWYRQAPGKEREFVAAITYGGNTYYADSVKGRFTISRDNAKNTVYLQMNSLKPEDTAVYYCAAWDILYDYLGDDWVDSHAYWGQGTQVTVSS

SEQ ID NO: 18785 - protein, 118 aa, Artificial Sequence
  Chemically Synthesized
QVQLQESGGGLVQAGGSLRLSCAASGYIFAQPGMGWYRQAPGKEREFVAAISGGGITNYADSVKGRFTISRDNAKNTVYLQMNSLKPEDTAVYYCAVVWGYRVVHPYWGQGTQVTVSS

SEQ ID NO: 18786 - protein, 117 aa, Artificial Sequence
  Chemically Synthesized
QVQLQESGGGLVQAGGSLRLSCAASGNISSVTMGWYRQAPGKERELVASINYGAITYYADSVKGRFTISRDNAKNTVYLQMNSLKPEDTAVYYCAARKKPSAPFQYWGQGTQVTVSS

SEQ ID NO: 18787 - protein, 121 aa, Artificial Sequence
  Chemically Synthesized
QVQLQESGGGLVQAGGSLRLSCAASGTISSPRYMGWYRQAPGKEREFVAGISLGSTTYYADSVKGRFTISRDNAKNTVYLQMNSLKPEDTAVYYCAATPYGDHLGTNPHYWGQGTQVTVSS

SEQ ID NO: 18788 - protein, 117 aa, Artificial Sequence
  Chemically Synthesized
QVQLQESGGGLVQAGGSLRLSCAASGSISARRMGWYRQAPGKERELVATISEGAITNYADSVKGRFTISRDNAKNTVYLQMNSLKPEDTAVYYCAVYSDPYTYHPYWGQGTQVTVSS

SEQ ID NO: 18789 - protein, 118 aa, Artificial Sequence
  Chemically Synthesized
QVQLQESGGGLVQAGGSLRLSCAASGTISAGVGMGWYRQAPGKEREFVAGIDNGGSTNYADSVKGRFTISRDNAKNTVYLQMNSLKPEDTAVYYCAVADGPGDRFDYWGQGTQVTVSS

SEQ ID NO: 18790 - protein, 118 aa, Artificial Sequence
  Chemically Synthesized
QVQLQESGGGLVQAGGSLRLSCAASGTIFNLNTMGWYRQAPGKEREFVAGIGWGATTYYADSVKGRFTISRDNAKNTVYLQMNSLKPEDTAVYYCAAGKYWSRRHVYWGQGTQVTVSS

SEQ ID NO: 18791 - protein, 125 aa, Artificial Sequence
  Chemically Synthesized
QVQLQESGGGLVQAGGSLRLSCAASGYIFSFVMGWYRQAPGKEREFVAGIDSGTNTYYADSVKGRFTISRDNAKNTVYLQMNSLKPEDTAVYYCAADYGSSILLQGGLDEGYTYWGQGTQVTVSS

SEQ ID NO: 18792 - protein, 118 aa, Artificial Sequence
  Chemically Synthesized
QVQLQESGGGLVQAGGSLRLSCAASGSISSVTRMGWYRQAPGKEREFVAAISAGTSTYYADSVKGRFTISRDNAKNTVYLQMNSLKPEDTAVYYCAAYYQDDGVHVYWGQGTQVTVSS

SEQ ID NO: 18793 - protein, 122 aa, Artificial Sequence
  Chemically Synthesized
QVQLQESGGGLVQAGGSLRLSCAASGTISPRATMGWYRQAPGKERELVATINDGGSTYYADSVKGRFTISRDNAKNTVYLQMNSLKPEDTAVYYCAVRVDPGNVYDAPYGYWGQGTQVTVSS

SEQ ID NO: 18794 - protein, 118 aa, Artificial Sequence
  Chemically Synthesized
QVQLQESGGGLVQAGGSLRLSCAASGYISTARRMGWYRQAPGKERELVATISLGAITYYADSVKGRFTISRDNAKNTVYLQMNSLKPEDTAVYYCAAGLLYYGLHPYWGQGTQVTVSS

SEQ ID NO: 18795 - protein, 117 aa, Artificial Sequence
  Chemically Synthesized
QVQLQESGGGLVQAGGSLRLSCAASGYIFYSSMGWYRQAPGKERELVAAITLGTNTNYADSVKGRFTISRDNAKNTVYLQMNSLKPEDTAVYYCAAGTVTTLVLGYWGQGTQVTVSS

SEQ ID NO: 18796 - protein, 118 aa, Artificial Sequence
  Chemically Synthesized
QVQLQESGGGLVQAGGSLRLSCAASGTIFLWAVMGWYRQAPGKEREFVASIAVGAITNYADSVKGRFTISRDNAKNTVYLQMNSLKPEDTAVYYCAVGLAYREDHYYWGQGTQVTVSS

SEQ ID NO: 18797 - protein, 122 aa, Artificial Sequence
  Chemically Synthesized
QVQLQESGGGLVQAGGSLRLSCAASGNISRYYSMGWYRQAPGKERELVAAIGRGGNTNYADSVKGRFTISRDNAKNTVYLQMNSLKPEDTAVYYCAAQRGGQYYVRRQLSYWGQGTQVTVSS

SEQ ID NO: 18798 - protein, 113 aa, Artificial Sequence
  Chemically Synthesized
QVQLQESGGGLVQAGGSLRLSCAASGTISYLTYMGWYRQAPGKERELVAAIGPGGNTNYADSVKGRFTISRDNAKNTVYLQMNSLKPEDTAVYYCASPDHVYWGQGTQVTVSS

SEQ ID NO: 18799 - protein, 118 aa, Artificial Sequence
  Chemically Synthesized
QVQLQESGGGLVQAGGSLRLSCAASGSIFYATYMGWYRQAPGKEREFVASISAGGITNYADSVKGRFTISRDNAKNTVYLQMNSLKPEDTAVYYCAVYYRYRRWYPYWGQGTQVTVSS

SEQ ID NO: 18800 - protein, 118 aa, Artificial Sequence
  Chemically Synthesized
QVQLQESGGGLVQAGGSLRLSCAASGYISTLTYMGWYRQAPGKERELVAAIGYGAITNYADSVKGRFTISRDNAKNTVYLQMNSLKPEDTAVYYCAVPRVVWLTYPYWGQGTQVTVSS

SEQ ID NO: 18801 - protein, 126 aa, Artificial Sequence
  Chemically Synthesized
QVQLQESGGGLVQAGGSLRLSCAASGTISWDRIMGWYRQAPGKEREFVATIDYGGTTNYADSVKGRFTISRDNAKNTVYLQMNSLKPEDTAVYYCAAYGSGVWLWDQDQRFPHGYWGQGTQVTVSS

SEQ ID NO: 18802 - protein, 118 aa, Artificial Sequence
  Chemically Synthesized
QVQLQESGGGLVQAGGSLRLSCAASGSISDWYYMGWYRQAPGKEREFVAAIGGGTSTYYADSVKGRFTISRDNAKNTVYLQMNSLKPEDTAVYYCAVDKPLGYLHQYWGQGTQVTVSS

SEQ ID NO: 18803 - protein, 122 aa, Artificial Sequence
  Chemically Synthesized
QVQLQESGGGLVQAGGSLRLSCAASGYISGVYYMGWYRQAPGKERELVAAIDLGASTYYADSVKGRFTISRDNAKNTVYLQMNSLKPEDTAVYYCAVYAASPTYLYLTYDYWGQGTQVTVSS

SEQ ID NO: 18804 - protein, 125 aa, Artificial Sequence
  Chemically Synthesized
QVQLQESGGGLVQAGGSLRLSCAASGSISFVLYMGWYRQAPGKERELVAAINYGATTNYADSVKGRFTISRDNAKNTVYLQMNSLKPEDTAVYYCAVGRGDYSIDDPQWIYLSYWGQGTQVTVSS

SEQ ID NO: 18805 - protein, 118 aa, Artificial Sequence
  Chemically Synthesized
QVQLQESGGGLVQAGGSLRLSCAASGTISGDQYMGWYRQAPGKERELVASIGLGSSTNYADSVKGRFTISRDNAKNTVYLQMNSLKPEDTAVYYCAVNYYSQTRHFYWGQGTQVTVSS

SEQ ID NO: 18806 - protein, 125 aa, Artificial Sequence
  Chemically Synthesized
QVQLQESGGGLVQAGGSLRLSCAASGTILTFTMGWYRQAPGKERELVATITHGGTTYYADSVKGRFTISRDNAKNTVYLQMNSLKPEDTAVYYCAAIYHIDTATLPYVRYSLVYWGQGTQVTVSS

SEQ ID NO: 18807 - protein, 113 aa, Artificial Sequence
  Chemically Synthesized
QVQLQESGGGLVQAGGSLRLSCAASGTIFPDLGMGWYRQAPGKERELVATINSGGSTNYADSVKGRFTISRDNAKNTVYLQMNSLKPEDTAVYYCAYESHYYWGQGTQVTVSS

SEQ ID NO: 18808 - protein, 117 aa, Artificial Sequence
  Chemically Synthesized
QVQLQESGGGLVQAGGSLRLSCAASGNISSYGHMGWYRQAPGKEREFVAGIGVGGSTYYADSVKGRFTISRDNAKNTVYLQMNSLKPEDTAVYYCAVWRAGVGFDYWGQGTQVTVSS

SEQ ID NO: 18809 - protein, 118 aa, Artificial Sequence
  Chemically Synthesized
QVQLQESGGGLVQAGGSLRLSCAASGYISLYPYMGWYRQAPGKERELVATIGRGTSTYYADSVKGRFTISRDNAKNTVYLQMNSLKPEDTAVYYCAALYYYFPTFRYWGQGTQVTVSS

SEQ ID NO: 18810 - protein, 118 aa, Artificial Sequence
  Chemically Synthesized
QVQLQESGGGLVQAGGSLRLSCAASGSISRIRAMGWYRQAPGKERELVAGIAIGASTNYADSVKGRFTISRDNAKNTVYLQMNSLKPEDTAVYYCAVDHAHYSALPYWGQGTQVTVSS

SEQ ID NO: 18811 - protein, 118 aa, Artificial Sequence
  Chemically Synthesized
QVQLQESGGGLVQAGGSLRLSCAASGYISSVYTMGWYRQAPGKERELVATITSGGNTYYADSVKGRFTISRDNAKNTVYLQMNSLKPEDTAVYYCAAPQAGRGLHYYWGQGTQVTVSS

SEQ ID NO: 18812 - protein, 117 aa, Artificial Sequence
  Chemically Synthesized
QVQLQESGGGLVQAGGSLRLSCAASGTIFYLYTMGWYRQAPGKEREFVAAIARGATTNYADSVKGRFTISRDNAKNTVYLQMNSLKPEDTAVYYCAVGAEVAYHYYWGQGTQVTVSS

SEQ ID NO: 18813 - protein, 118 aa, Artificial Sequence
  Chemically Synthesized
QVQLQESGGGLVQAGGSLRLSCAASGYIFGRRWMGWYRQAPGKEREFVATIARGGTTNYADSVKGRFTISRDNAKNTVYLQMNSLKPEDTAVYYCAVWVLYTRSHGYWGQGTQVTVSS

SEQ ID NO: 18814 - protein, 110 aa, Artificial Sequence
  Chemically Synthesized
QVQLQESGGGLVQAGGSLRLSCAASGSIFTDGYMGWYRQAPGKERELVAAIGYGAITNYADSVKGRFTISRDNAKNTVYLQMNSLKPEDTAVYYCAVIYWGQGTQVTVSS

SEQ ID NO: 18815 - protein, 121 aa, Artificial Sequence
  Chemically Synthesized
QVQLQESGGGLVQAGGSLRLSCAASGNISYQVYMGWYRQAPGKEREFVASIGLGGITYYADSVKGRFTISRDNAKNTVYLQMNSLKPEDTAVYYCAVRYQYDADQYYYPYWGQGTQVTVSS

SEQ ID NO: 18816 - protein, 118 aa, Artificial Sequence
  Chemically Synthesized
QVQLQESGGGLVQAGGSLRLSCAASGTISSYGRMGWYRQAPGKERELVAGISQGTNTYYADSVKGRFTISRDNAKNTVYLQMNSLKPEDTAVYYCAVTNDWDDDYSYWGQGTQVTVSS

SEQ ID NO: 18817 - protein, 122 aa, Artificial Sequence
  Chemically Synthesized
QVQLQESGGGLVQAGGSLRLSCAASGSISWYNVMGWYRQAPGKEREFVAAINGGTNTYYADSVKGRFTISRDNAKNTVYLQMNSLKPEDTAVYYCAVGSPRRWGFVRHHYYWGQGTQVTVSS

SEQ ID NO: 18818 - protein, 118 aa, Artificial Sequence
  Chemically Synthesized
QVQLQESGGGLVQAGGSLRLSCAASGTISRYYVMGWYRQAPGKERELVAAITWGGSTNYADSVKGRFTISRDNAKNTVYLQMNSLKPEDTAVYYCAVIRYRYLYHRYWGQGTQVTVSS

SEQ ID NO: 18819 - protein, 122 aa, Artificial Sequence
  Chemically Synthesized
QVQLQESGGGLVQAGGSLRLSCAASGTISFGYYMGWYRQAPGKERELVATISYGGSTYYADSVKGRFTISRDNAKNTVYLQMNSLKPEDTAVYYCAVQDAAGRSERYDLSYWGQGTQVTVSS

SEQ ID NO: 18820 - protein, 117 aa, Artificial Sequence
  Chemically Synthesized
QVQLQESGGGLVQAGGSLRLSCAASGSILTTCMGWYRQAPGKERELVAAIDVGSTTNYADSVKGRFTISRDNAKNTVYLQMNSLKPEDTAVYYCAVWIRYYLFHGYWGQGTQVTVSS

SEQ ID NO: 18821 - protein, 117 aa, Artificial Sequence
  Chemically Synthesized
QVQLQESGGGLVQAGGSLRLSCAASGSISTSYPMGWYRQAPGKERELVAAIATGGITYYADSVKGRFTISRDNAKNTVYLQMNSLKPEDTAVYYCAAHDVYDYFGYWGQGTQVTVSS

SEQ ID NO: 18822 - protein, 122 aa, Artificial Sequence
  Chemically Synthesized
QVQLQESGGGLVQAGGSLRLSCAASGTISNAGVMGWYRQAPGKEREFVAAIDDGANTNYADSVKGRFTISRDNAKNTVYLQMNSLKPEDTAVYYCAARYQTSSSTVTTTIYWGQGTQVTVSS

SEQ ID NO: 18823 - protein, 118 aa, Artificial Sequence
  Chemically Synthesized
QVQLQESGGGLVQAGGSLRLSCAASGNISYGWDMGWYRQAPGKERELVATIGLGSTNQYADSVKGRFTISRDNAKNTVYLQMNSLKPEDTAVYYCAAYSAVRNDFVYWGQGTQVTVSS

SEQ ID NO: 18824 - protein, 116 aa, Artificial Sequence
  Chemically Synthesized
QVQLQESGGGLVQAGGSLRLSCAASGNISGWPKMGWYRQAPGKERELVATIGRGAIPYADSVKGRFTISRDNAKNTVYLQMNSLKPEDTAVYYCAALQLADFAHYWGQGTQVTVSS

SEQ ID NO: 18825 - protein, 126 aa, Artificial Sequence
  Chemically Synthesized
QVQLQESGGGLVQAGGSLRLSCAASGTIFGDDNMGWYRQAPGKEREFVATISYGGNTNYADSVKGRFTISRDNAKNTVYLQMNSLKPEDTAVYYCAVGLDYDDYGYVVSAYYFRYWGQGTQVTVSS

SEQ ID NO: 18826 - protein, 117 aa, Artificial Sequence
  Chemically Synthesized
QVQLQESGGGLVQAGGSLRLSCAASGNISSDRFMGWYRQAPGKEREFVPLLLVVLIPYADSVKGRFTISRDNAKNTVYLQMNSLKPEDTAVYYCAAVYVPRRGYTYWGQGTQVTVSS

SEQ ID NO: 18827 - protein, 122 aa, Artificial Sequence
  Chemically Synthesized
QVQLQESGGGLVQAGGSLRLSCAASGYIFYFRDMGWYRQAPGKERELVATITVGGSTYYADSVKGRFTISRDNAKNTVYLQMNSLKPEDTAVYYCAAWYKWSHYWGSYHHYWGQGTQVTVSS

SEQ ID NO: 18828 - protein, 116 aa, Artificial Sequence
  Chemically Synthesized
QVQLQESGGGLVQAGGSLRLSCAASGTILRVVMGWYRQAPGKEREFVAAIDSVLIPYADSVKGRFTISRDNAKNTVYLQMNSLKPEDTAVYYCAAVHDYIADFTYWGQGTQVTVSS

SEQ ID NO: 18829 - protein, 122 aa, Artificial Sequence
  Chemically Synthesized
QVQLQESGGGLVQAGGSLRLSCAASGTIFWARDMGWYRQAPGKERELVAGITRGSTTYYADSVKGRFTISRDNAKNTVYLQMNSLKPEDTAVYYCAVYYRGGTYYWLSFAYWGQGTQVTVSS

SEQ ID NO: 18830 - protein, 116 aa, Artificial Sequence
  Chemically Synthesized
QVQLQESGGGLVQAGGSLRLSCAASGSISPFFMGWYRQAPGKERELVATISGGTTNYADSVKGRFTISRDNAKNTVYLQMNSLKPEDTAVYYCAVWYGYPEVLYYWGQGTQVTVSS

SEQ ID NO: 18831 - protein, 121 aa, Artificial Sequence
  Chemically Synthesized
QVQLQESGGGLVQAGGSLRLSCAASGYIFLLYYMGWYRQAPGKERELVAAIADGSTTNYADSVKGRFTISRDNAKNTVYLQMNSLKPEDTAVYYCAARYVGEDEAVYSLYWGQGTQVTVSS

SEQ ID NO: 18832 - protein, 122 aa, Artificial Sequence
  Chemically Synthesized
QVQLQESGGGLVQAGGSLRLSCAASGNISEYLRMGWYRQAPGKERELVASITGGGSTYYADSVKGRFTISRDNAKNTVYLQMNSLKPEDTAVYYCAVVILSQSAQYVGHRYWGQGTQVTVSS

SEQ ID NO: 18833 - protein, 121 aa, Artificial Sequence
  Chemically Synthesized
QVQLQESGGGLVQAGGSLRLSCAASGYISYRYYMGWYRQAPGKERELVAGISGGTTTNYADSVKGRFTISRDNAKNTVYLQMNSLKPEDTAVYYCAASTLVLVGTNTRIYWGQGTQVTVSS

SEQ ID NO: 18834 - protein, 109 aa, Artificial Sequence
  Chemically Synthesized
QVQLQESGGGLVQAGGSLRLSCAASGYFCFLQMGWYRQAPGKEREFVAGINDGGTTNYADSVKGRFTISRDNAKNTVYLQMNSLKPEDTAVYYCAVPYWGQGTQVTVSS

SEQ ID NO: 18835 - protein, 111 aa, Artificial Sequence
  Chemically Synthesized
QVQLQESGGGLVQAGGSLRLSCAASGTISVYDYMGWYRQAPGKEREGANTNYADSVKGRFTISRDNAKNTVYLQMNSLKPEDTAVYYCAVHDQQSYEHLYWGQGTQVTVSS

SEQ ID NO: 18836 - protein, 120 aa, Artificial Sequence
  Chemically Synthesized
QVQLQESGGGLVQAGGSLRLSCAASGTISRYGYMGWYRQAPGKERELLPVLLTVVLPYADSVKGRFTISRDNAKNTVYLQMNSLKPEDTAVYYCAADGASYPYEDRSIYWGQGTQVTVSS

SEQ ID NO: 18837 - protein, 118 aa, Artificial Sequence
  Chemically Synthesized
QVQLQESGGGLVQAGGSLRLSCAASGYIFSYPSMGWYRQAPGKERELVAGIDSGTSTYYADSVKGRFTISRDNAKNTVYLQMNSLKPEDTAVYYCAATEYSGYDHYYWGQGTQVTVSS

SEQ ID NO: 18838 - protein, 117 aa, Artificial Sequence
  Chemically Synthesized
QVQLQESGGGLVQAGGSLRLSCAASGTIFPYVYMGWYRQAPGKEREFVAAILTVVLPYADSVKGRFTISRDNAKNTVYLQMNSLKPEDTAVYYCAVPTHYDDRLQYWGQGTQVTVSS

SEQ ID NO: 18839 - protein, 118 aa, Artificial Sequence
  Chemically Synthesized
QVQLQESGGGLVQAGGSLRLSCAASGSISAYDWMGWYRQAPGKERELVAAIAYGTSTYYADSVKGRFTISRDNAKNTVYLQMNSLKPEDTAVYYCAVARWKYTPLLYWGQGTQVTVSS

SEQ ID NO: 18840 - protein, 118 aa, Artificial Sequence
  Chemically Synthesized
QVQLQESGGGLVQAGGSLRLSCAASGSIFPSPVMGWYRQAPGKEREFVAAISYGSTTNYADSVKGRFTISRDNAKNTVYLQMNSLKPEDTAVYYCAAYVYGWVPFGYWGQGTQVTVSS

SEQ ID NO: 18841 - protein, 117 aa, Artificial Sequence
  Chemically Synthesized
QVQLQESGGGLVQAGGSLRLSCAASGTIFAYWEMGWYRQAPGKERELLPLLVLVVVPYADSVKGRFTISRDNAKNTVYLQMNSLKPEDTAVYYCAVFPTARTSFTYWGQGTQVTVSS

SEQ ID NO: 18842 - protein, 109 aa, Artificial Sequence
  Chemically Synthesized
QVQLQESGGGLVQAGGSLRLSCAASGYISSDTPMGWYRQAPGKEREFVAGITIGCTTYYADSVKGRFTISRDNAKNTVYLQMNSLKPEDTAVYYCAYYWGQGTQVTVSS

SEQ ID NO: 18843 - protein, 121 aa, Artificial Sequence
  Chemically Synthesized
QVQLQESGGGLVQAGGSLRLSCAASGTIFGYARMGWYRQAPGKEREFVAAIGAGSSTYYADSVKGRFTISRDNAKNTVYLQMNSLKPEDTAVYYCAVDHGYKAVEDDHKYWGQGTQVTVSS

SEQ ID NO: 18844 - protein, 126 aa, Artificial Sequence
  Chemically Synthesized
QVQLQESGGGLVQAGGSLRLSCAASGTIFGPAGMGWYRQAPGKEREFVASIDNGANTYYADSVKGRFTISRDNAKNTVYLQMNSLKPEDTAVYYCAVQDVTESYFLRYYPTVYGYWGQGTQVTVSS

SEQ ID NO: 18845 - protein, 117 aa, Artificial Sequence
  Chemically Synthesized
QVQLQESGGGLVQAGGSLRLSCAASGNISSLVMGWYRQAPGKEREFVASINYGTSTNYADSVKGRFTISRDNAKNTVYLQMNSLKPEDTAVYYCAVYYDKDTYHYYWGQGTQVTVSS

SEQ ID NO: 18846 - protein, 122 aa, Artificial Sequence
  Chemically Synthesized
QVQLQESGGGLVQAGGSLRLSCAASGNISSWGQMGWYRQAPGKEREFVAAISAGSSTYYADSVKGRFTISRDNAKNTVYLQMNSLKPEDTAVYYCAVGYIHVSGVSGDYDYWGQGTQVTVSS

SEQ ID NO: 18847 - protein, 117 aa, Artificial Sequence
  Chemically Synthesized
QVQLQESGGGLVQAGGSLRLSCAASGYISSGTMGWYRQAPGKEREFVAAISIGASTNYADSVKGRFTISRDNAKNTVYLQMNSLKPEDTAVYYCAAQYSGDYDYTYWGQGTQVTVSS

SEQ ID NO: 18848 - protein, 126 aa, Artificial Sequence
  Chemically Synthesized
QVQLQESGGGLVQAGGSLRLSCAASGYISWDDDMGWYRQAPGKEREFVAGISNGATTYYADSVKGRFTISRDNAKNTVYLQMNSLKPEDTAVYYCAVTYGTTYQDSGYGDIIHSYWGQGTQVTVSS

SEQ ID NO: 18849 - protein, 118 aa, Artificial Sequence
  Chemically Synthesized
QVQLQESGGGLVQAGGSLRLSCAASGSISDSPIMGWYRQAPGKERELVAAINKGGNTNYADSVKGRFTISRDNAKNTVYLQMNSLKPEDTAVYYCAVDGETGRDLDYWGQGTQVTVSS

SEQ ID NO: 18850 - protein, 118 aa, Artificial Sequence
  Chemically Synthesized
QVQLQESGGGLVQAGGSLRLSCAASGYISGYSVMGWYRQAPGKEREFVATITNGGSTYYADSVKGRFTISRDNAKNTVYLQMNSLKPEDTAVYYCAALTYAQYVHYYWGQGTQVTVSS

SEQ ID NO: 18851 - protein, 122 aa, Artificial Sequence
  Chemically Synthesized
QVQLQESGGGLVQAGGSLRLSCAASGNIFDYFDMGWYRQAPGKEREFVAAIAFGGTTNYADSVKGRFTISRDNAKNTVYLQMNSLKPEDTAVYYCAAKDQSWATEGLRSCYWGQGTQVTVSS

SEQ ID NO: 18852 - protein, 125 aa, Artificial Sequence
  Chemically Synthesized
QVQLQESGGGLVQAGGSLRLSCAASGTIFHSYFMGWYRQAPGKEREFVAAIDGGSNTNYADSVKGRFTISRDNAKNTVYLQMNSLKPEDTAVYYCAVGYDDYRGPVTDDGGQHYWGQGTQVTVSS

SEQ ID NO: 18853 - protein, 117 aa, Artificial Sequence
  Chemically Synthesized
QVQLQESGGGLVQAGGSLRLSCAASGYISTYSVMGWYRQAPGKERELVASITHGGNTNYADSVKGRFTISRDNAKNTVYLQMNSLKPEDTAVYYCAVDKSFVWVMYWGQGTQVTVSS

SEQ ID NO: 18854 - protein, 122 aa, Artificial Sequence
  Chemically Synthesized
QVQLQESGGGLVQAGGSLRLSCAASGSISTHPPMGWYRQAPGKERELVATIGSGAITNYADSVKGRFTISRDNAKNTVYLQMNSLKPEDTAVYYCAAAGTYQLIYGKDHDYWGQGTQVTVSS

SEQ ID NO: 18855 - protein, 118 aa, Artificial Sequence
  Chemically Synthesized
QVQLQESGGGLVQAGGSLRLSCAASGNISNYRSMGWYRQAPGKEREFVATISAGTSTNYADSVKGRFTISRDNAKNTVYLQMNSLKPEDTAVYYCAVYLYRLGFYRYWGQGTQVTVSS

SEQ ID NO: 18856 - protein, 122 aa, Artificial Sequence
  Chemically Synthesized
QVQLQESGGGLVQAGGSLRLSCAASGTISVRYTMGWYRQAPGKEREFVASIGWGSTTYYADSVKGRFTISRDNAKNTVYLQMNSLKPEDTAVYYCAVNWRNRDYYGRYHRYWGQGTQVTVSS

SEQ ID NO: 18857 - protein, 122 aa, Artificial Sequence
  Chemically Synthesized
QVQLQESGGGLVQAGGSLRLSCAASGNISLGGDMGWYRQAPGKEREFVAGISAGAITNYADSVKGRFTISRDNAKNTVYLQMNSLKPEDTAVYYCAVHVWYNGYSLRYHDYWGQGTQVTVSS

SEQ ID NO: 18858 - protein, 120 aa, Artificial Sequence
  Chemically Synthesized
QVQLQESGGGLVQAGGSLRLSCAASGTIFGRQYAMGWYRQAPGKERELVATIAHGTNTNYADSVKGRFTISRDNAKNTVYLQMNSLKPEDTAVYYCAARRDGYRNYYLYWGQGTQVTVSS

SEQ ID NO: 18859 - protein, 122 aa, Artificial Sequence
  Chemically Synthesized
QVQLQESGGGLVQAGGSLRLSCAASGTIFHSNNMGWYRQAPGKERELVASIGGGSITYYADSVKGRFTISRDNAKNTVYLQMNSLKPEDTAVYYCAVIRFVHRYRDDRYRYWGQGTQVTVSS

SEQ ID NO: 18860 - protein, 121 aa, Artificial Sequence
  Chemically Synthesized
QVQLQESGGGLVQAGGSLRLSCAASGYIFRQAHMGWYRQAPGKERELVAAIDRGSLPYADSVKGRFTISRDNAKNTVYLQMNSLKPEDTAVYYCAVTKRYPGPYRYRLSYWGQGTQVTVSS

SEQ ID NO: 18861 - protein, 122 aa, Artificial Sequence
  Chemically Synthesized
QVQLQESGGGLVQAGGSLRLSCAASGTIFTRWYMGWYRQAPGKERELVAAIGRGTSTNYADSVKGRFTISRDNAKNTVYLQMNSLKPEDTAVYYCAAGAIRYAHPQTHLGYWGQGTQVTVSS

SEQ ID NO: 18862 - protein, 122 aa, Artificial Sequence
  Chemically Synthesized
QVQLQESGGGLVQAGGSLRLSCAASGTIFGDFHMGWYRQAPGKEREFVAAIAGGGSTNYADSVKGRFTISRDNAKNTVYLQMNSLKPEDTAVYYCAAYQVDDNYYRYDFTYWGQGTQVTVSS

SEQ ID NO: 18863 - protein, 118 aa, Artificial Sequence
  Chemically Synthesized
QVQLQESGGGLVQAGGSLRLSCAASGYISGSEGMGWYRQAPGKEREFVAGIARGAITNYADSVKGRFTISRDNAKNTVYLQMNSLKPEDTAVYYCAADPWDGIDFKYWGQGTQVTVSS

SEQ ID NO: 18864 - protein, 122 aa, Artificial Sequence
  Chemically Synthesized
QVQLQESGGGLVQAGGSLRLSCAASGNISDVVTMGWYRQAPGKEREFVASIGAGSNTYYADSVKGRFTISRDNAKNTVYLQMNSLKPEDTAVYYCAADKRDYGATGGFHRYWGQGTQVTVSS

SEQ ID NO: 18865 - protein, 117 aa, Artificial Sequence
  Chemically Synthesized
QVQLQESGGGLVQAGGSLRLSCAASGYIFDYYATMGWYRQAPGKERELVAAIVLVLLPYADSVKGRFTISRDNAKNTVYLQMNSLKPEDTAVYYCAVFQDSTLSLYWGQGTQVTVSS

SEQ ID NO: 18866 - protein, 122 aa, Artificial Sequence
  Chemically Synthesized
QVQLQESGGGLVQAGGSLRLSCAASGNISSYSRMGWYRQAPGKERELVAAIGLGGNTNYADSVKGRFTISRDNAKNTVYLQMNSLKPEDTAVYYCAVGYYYGPRLDPYHDYWGQGTQVTVSS

SEQ ID NO: 18867 - protein, 118 aa, Artificial Sequence
  Chemically Synthesized
QVQLQESGGGLVQAGGSLRLSCAASGNISWTDYMGWYRQAPGKEREFVAGISWGGSTNYADSVKGRFTISRDNAKNTVYLQMNSLKPEDTAVYYCAVVEYAADTHVYWGQGTQVTVSS

SEQ ID NO: 18868 - protein, 117 aa, Artificial Sequence
  Chemically Synthesized
QVQLQESGGGLVQAGGSLRLSCAASGNIFGVDTMGWYRQAPGKEREFVAAIASVVIPYADSVKGRFTISRDNAKNTVYLQMNSLKPEDTAVYYCAVQTRRYGDFYYWGQGTQVTVSS

SEQ ID NO: 18869 - protein, 113 aa, Artificial Sequence
  Chemically Synthesized
QVQLQESGGGLVQAGGSLRLSCAASGYIFDYKSMGWYRQAPGKERELVASISHGSSTNYADSVKGRFTISRDNAKNTVYLQMNSLKPEDTAVYYCAAGPPIYWGQGTQVTVSS

SEQ ID NO: 18870 - protein, 121 aa, Artificial Sequence
  Chemically Synthesized
QVQLQESGGGLVQAGGSLRLSCAASGYIFYESMGWYRQAPGKEREFVASINTGAITNYADSVKGRFTISRDNAKNTVYLQMNSLKPEDTAVYYCAALYGYQYLRDIWLQYWGQGTQVTVSS

SEQ ID NO: 18871 - protein, 122 aa, Artificial Sequence
  Chemically Synthesized
QVQLQESGGGLVQAGGSLRLSCAASGTISSTNGMGWYRQAPGKEREFVAAIGSGTTTNYADSVKGRFTISRDNAKNTVYLQMNSLKPEDTAVYYCAALTREGYARRYRLGYWGQGTQVTVSS

SEQ ID NO: 18872 - protein, 118 aa, Artificial Sequence
  Chemically Synthesized
QVQLQESGGGLVQAGGSLRLSCAASGSIFLGRWMGWYRQAPGKERELVAGIDYGATTYYADSVKGRFTISRDNAKNTVYLQMNSLKPEDTAVYYCAAPDRGLYAHWYWGQGTQVTVSS

SEQ ID NO: 18873 - protein, 112 aa, Artificial Sequence
  Chemically Synthesized
QVQLQESGGGLVQAGGSLRLSCAASGTIFTPTDMGWYRQAPGKERELVAAIGYGASTNYADSVKGRFTISRDNAKNTVYLQMNSLKPEDTAVYYCAVPTTYWGQGTQVTVSS

SEQ ID NO: 18874 - protein, 117 aa, Artificial Sequence
  Chemically Synthesized
QVQLQESGGGLVQAGGSLRLSCAASGNISQVGYMGWYRQAPGKERELVATIDDGAITNYADSVKGRFTISRDNAKNTVYLQMNSLKPEDTAVYYCAADIDDTEVLYWGQGTQVTVSS

SEQ ID NO: 18875 - protein, 117 aa, Artificial Sequence
  Chemically Synthesized
QVQLQESGGGLVQAGGSLRLSCAASGSISGDAYMGWYRQAPGKEREFVATITLGTVPYADSVKGRFTISRDNAKNTVYLQMNSLKPEDTAVYYCAVTDYYYSTHLYWGQGTQVTVSS

SEQ ID NO: 18876 - protein, 118 aa, Artificial Sequence
  Chemically Synthesized
QVQLQESGGGLVQAGGSLRLSCAASGYIFSGYFMGWYRQAPGKERELVATIGVGTITYYADSVKGRFTISRDNAKNTVYLQMNSLKPEDTAVYYCAVGLLSPRGYDYWGQGTQVTVSS

SEQ ID NO: 18877 - protein, 127 aa, Artificial Sequence
  Chemically Synthesized
QVQLQESGGGLVQAGGSLRLSCAASGTIFVARYMGWYRQAPGKEREFVASITDGGTTNYADSVKGRFTISRDNAKNTVYLQMNSLKPEDTAVYYCAAHEIGGTAETYLSGDTFQDYWGQGTQVTVSS

SEQ ID NO: 18878 - protein, 116 aa, Artificial Sequence
  Chemically Synthesized
QVQLQESGGGLVQAGGSLRLSCAASGNISWYPAMGWYRQAPGKERELVAVVLPYADSVKGRFTISRDNAKNTVYLQMNSLKPEDTAVYYCAVYDWDGPQRYGYPYWGQGTQVTVSS

SEQ ID NO: 18879 - protein, 120 aa, Artificial Sequence
  Chemically Synthesized
QVQLQESGGGLVQAGGSLRLSCAASGTIFIGPVMGWYRQAPGKERELVAAISGGGSTNYADSVKGRFTISRDNAKNTVYLQMNSLKPEDTAVYYCAAQRAYYGLLKVMYWGQGTQVTVSS

SEQ ID NO: 18880 - protein, 117 aa, Artificial Sequence
  Chemically Synthesized
QVQLQESGGGLVQAGGSLRLSCAASGNIFSDLHMGWYRQAPGKEREFVAAITNGGSTYYADSVKGRFTISRDNAKNTVYLQMNSLKPEDTAVYYCAVNDVDALLWYWGQGTQVTVSS

SEQ ID NO: 18881 - protein, 118 aa, Artificial Sequence
  Chemically Synthesized
QVQLQESGGGLVQAGGSLRLSCAASGTIFGKTYMGWYRQAPGKEREFVASIDDGTSTNYADSVKGRFTISRDNAKNTVYLQMNSLKPEDTAVYYCAAGGGYGYFHIYWGQGTQVTVSS

SEQ ID NO: 18882 - protein, 121 aa, Artificial Sequence
  Chemically Synthesized
QVQLQESGGGLVQAGGSLRLSCAASGTILPLLMGWYRQAPGKERELVAAITVGANTNYADSVKGRFTISRDNAKNTVYLQMNSLKPEDTAVYYCAVVGGDYLVSGDYHYYWGQGTQVTVSS

SEQ ID NO: 18883 - protein, 118 aa, Artificial Sequence
  Chemically Synthesized
QVQLQESGGGLVQAGGSLRLSCAASGTISYSDYMGWYRQAPGKEREFVATINGGTSTNYADSVKGRFTISRDNAKNTVYLQMNSLKPEDTAVYYCAVSLRYFHDYYYWGQGTQVTVSS

SEQ ID NO: 18884 - protein, 118 aa, Artificial Sequence
  Chemically Synthesized
QVQLQESGGGLVQAGGSLRLSCAASGTISSIDGMGWYRQAPGKEREFVAGITDGTNTYYADSVKGRFTISRDNAKNTVYLQMNSLKPEDTAVYYCAAYSNARYPFDYWGQGTQVTVSS

SEQ ID NO: 18885 - protein, 126 aa, Artificial Sequence
  Chemically Synthesized
QVQLQESGGGLVQAGGSLRLSCAASGTIFQTSYMGWYRQAPGKERELVAAIGGGATTYYADSVKGRFTISRDNAKNTVYLQMNSLKPEDTAVYYCAVLPLYDDTLDVYDAGYHYYWGQGTQVTVSS

SEQ ID NO: 18886 - protein, 116 aa, Artificial Sequence
  Chemically Synthesized
QVQLQESGGGLVQAGGSLRLSCAASGNISRLVYMGWYRQAPGKEREFVAGISPGTSTNYADSVKGRFTISRDNAKNTVYLQMNSLKPEDTAVYYCAVLRQHGYVYWGQGTQVTVSS

SEQ ID NO: 18887 - protein, 118 aa, Artificial Sequence
  Chemically Synthesized
QVQLQESGGGLVQAGGSLRLSCAASGTISPSTYMGWYRQAPGKERELVATITYGATTYYADSVKGRFTISRDNAKNTVYLQMNSLKPEDTAVYYCAVLRTTTGYYDYWGQGTQVTVSS

SEQ ID NO: 18888 - protein, 122 aa, Artificial Sequence
  Chemically Synthesized
QVQLQESGGGLVQAGGSLRLSCAASGTIFSYDSMGWYRQAPGKEREFVAGISYGSITYYADSVKGRFTISRDNAKNTVYLQMNSLKPEDTAVYYCAAERQYYRSYGRTHDYWGQGTQVTVSS

SEQ ID NO: 18889 - protein, 117 aa, Artificial Sequence
  Chemically Synthesized
QVQLQESGGGLVQAGGSLRLSCAASGTISSDCMGWYRQAPGKEREFVAAIAPGTTTNYADSVKGRFTISRDNAKNTVYLQMNSLKPEDTAVYYCAVPPWSSYRLAYWGQGTQVTVSS

SEQ ID NO: 18890 - protein, 124 aa, Artificial Sequence
  Chemically Synthesized
QVQLQESGGGLVQAGGSLRLSCAASGSISTASYMGWYRQAPGKEREFVAAIDRGSQYADSVKGRFTISRDNAKNTVYLQMNSLKPEDTAVYYCAAEVPVVDGGYYETWRRYRYWGQGTQVTVSS

SEQ ID NO: 18891 - protein, 122 aa, Artificial Sequence
  Chemically Synthesized
QVQLQESGGGLVQAGGSLRLSCAASGSISISADMGWYRQAPGKEREFVAGIDGGTNTNYADSVKGRFTISRDNAKNTVYLQMNSLKPEDTAVYYCAAERKGGYTRGHPFIYWGQGTQVTVSS

SEQ ID NO: 18892 - protein, 122 aa, Artificial Sequence
  Chemically Synthesized
QVQLQESGGGLVQAGGSLRLSCAASGYIFVSDVMGWYRQAPGKEREFVAGINGGGITNYADSVKGRFTISRDNAKNTVYLQMNSLKPEDTAVYYCAVGDYDDRAYFGTHQYWGQGTQVTVSS

SEQ ID NO: 18893 - protein, 112 aa, Artificial Sequence
  Chemically Synthesized
QVQLQESGGGLVQAGGSLRLSCAASGYISYYVPMGWYRQAPGKERELVATITDGSSTYYADSVKGRFTISRDNAKNTVYLQMNSLKPEDTAVYYCAVYGDYWGQGTQVTVSS

SEQ ID NO: 18894 - protein, 122 aa, Artificial Sequence
  Chemically Synthesized
QVQLQESGGGLVQAGGSLRLSCAASGSISTLDYMGWYRQAPGKERELVATINAGGSTYYADSVKGRFTISRDNAKNTVYLQMNSLKPEDTAVYYCAVYYESHRGYRVRLGYWGQGTQVTVSS

SEQ ID NO: 18895 - protein, 126 aa, Artificial Sequence
  Chemically Synthesized
QVQLQESGGGLVQAGGSLRLSCAASGNIFTYYYMGWYRQAPGKERELVATIAPGTSTNYADSVKGRFTISRDNAKNTVYLQMNSLKPEDTAVYYCAVPLGKWTAGYRSSYGGHPYWGQGTQVTVSS

SEQ ID NO: 18896 - protein, 122 aa, Artificial Sequence
  Chemically Synthesized
QVQLQESGGGLVQAGGSLRLSCAASGYISYGAVMGWYRQAPGKEREFVATINGGATTNYADSVKGRFTISRDNAKNTVYLQMNSLKPEDTAVYYCAASPPPTDTYPDGHVYWGQGTQVTVSS

SEQ ID NO: 18897 - protein, 122 aa, Artificial Sequence
  Chemically Synthesized
QVQLQESGGGLVQAGGSLRLSCAASGTISGPFIMGWYRQAPGKEREFVATITPGASTNYADSVKGRFTISRDNAKNTVYLQMNSLKPEDTAVYYCAVPKKGDYGYNQSHRYWGQGTQVTVSS

SEQ ID NO: 18898 - protein, 121 aa, Artificial Sequence
  Chemically Synthesized
QVQLQESGGGLVQAGGSLRLSCAASGTIFVSWMGWYRQAPGKEREFVAGITDRWYYQYADSVKGRFTISRDNAKNTVYLQMNSLKPEDTAVYYCAVNYDYPDVRGTDHTYWGQGTQVTVSS

SEQ ID NO: 18899 - protein, 121 aa, Artificial Sequence
  Chemically Synthesized
QVQLQESGGGLVQAGGSLRLSCAASGTISYYAYMGWYRQAPGKERELVAAIAYGGNTYYADSVKGRFTISRDNAKNTVYLQMNSLKPEDTAVYYCAADANPSIRDVVSIYWGQGTQVTVSS

SEQ ID NO: 18900 - protein, 121 aa, Artificial Sequence
  Chemically Synthesized
QVQLQESGGGLVQAGGSLRLSCAASGTIFRTVMGWYRQAPGKERELVAAINYGTSTNYADSVKGRFTISRDNAKNTVYLQMNSLKPEDTAVYYCAVDLGDAGGGWGWHDYWGQGTQVTVSS

SEQ ID NO: 18901 - protein, 125 aa, Artificial Sequence
  Chemically Synthesized
QVQLQESGGGLVQAGGSLRLSCAASGNIFGDNTMGWYRQAPGKERELVASINRGTTTYYADSVKGRFTISRDNAKNTVYLQMNSLKPEDTAVYYCAVVLYPLIDGRDKSSLLIYWGQGTQVTVSS

SEQ ID NO: 18902 - protein, 126 aa, Artificial Sequence
  Chemically Synthesized
QVQLQESGGGLVQAGGSLRLSCAASGTIFGDRYMGWYRQAPGKEREFVAGIGYGSITNYADSVKGRFTISRDNAKNTVYLQMNSLKPEDTAVYYCAAIGQARLTDGVRSQPYHIYWGQGTQVTVSS

SEQ ID NO: 18903 - protein, 127 aa, Artificial Sequence
  Chemically Synthesized
QVQLQESGGGLVQAGGSLRLSCAASGSISNNIYMGWYRQAPGKERELVASITSGAITNYADSVKGRFTISRDNAKNTVYLQMNSLKPEDTAVYYCAVSRPDTEDSYTGYDYDLFSYWGQGTQVTVSS

SEQ ID NO: 18904 - protein, 126 aa, Artificial Sequence
  Chemically Synthesized
QVQLQESGGGLVQAGGSLRLSCAASGNIFDYFVMGWYRQAPGKEREFVATINYGGITYYADSVKGRFTISRDNAKNTVYLQMNSLKPEDTAVYYCAVWTNYAVEHPYFFYDAYWYWGQGTQVTVSS

SEQ ID NO: 18905 - protein, 123 aa, Artificial Sequence
  Chemically Synthesized
QVQLQESGGGLVQAGGSLRLSCAASGYISVSQGMGWYRQAPGKERELVAAITQGGNTYYADSVKGRFTISRDNAKNTVYLQMNSLKPEDTAVYYCAVYYKTYYDTDAAHLYYWGQGTQVTVSS

SEQ ID NO: 18906 - protein, 116 aa, Artificial Sequence
  Chemically Synthesized
QVQLQESGGGLVQAGGSLRLSCAASGTIFDRRAMGWYRQAPGKEREFVAAIGSGSTTYYADSVKGRFTISRDNAKNTVYLQMNSLKPEDTAVYYCAVKRRYRHRYWGQGTQVTVSS

SEQ ID NO: 18907 - protein, 122 aa, Artificial Sequence
  Chemically Synthesized
QVQLQESGGGLVQAGGSLRLSCAASGSISDGWNMGWYRQAPGKEREFVAGIATGAITYYADSVKGRFTISRDNAKNTVYLQMNSLKPEDTAVYYCAAYVQDSRVYLEDYIYWGQGTQVTVSS

SEQ ID NO: 18908 - protein, 122 aa, Artificial Sequence
  Chemically Synthesized
QVQLQESGGGLVQAGGSLRLSCAASGSIFDRRDMGWYRQAPGKERELVAAITKGGNTYYADSVKGRFTISRDNAKNTVYLQMNSLKPEDTAVYYCAAYPSYRTSSRGWYRYWGQGTQVTVSS

SEQ ID NO: 18909 - protein, 118 aa, Artificial Sequence
  Chemically Synthesized
QVQLQESGGGLVQAGGSLRLSCAASGNIFWLYAMGWYRQAPGKEREFVAAISYGGTTYYADSVKGRFTISRDNAKNTVYLQMNSLKPEDTAVYYCAVGQRGGQRHTYWGQGTQVTVSS

SEQ ID NO: 18910 - protein, 118 aa, Artificial Sequence
  Chemically Synthesized
QVQLQESGGGLVQAGGSLRLSCAASGTIFYSDEMGWYRQAPGKEREFVASINQGTNTYYADSVKGRFTISRDNAKNTVYLQMNSLKPEDTAVYYCAAPSGALYWYQYWGQGTQVTVSS

SEQ ID NO: 18911 - protein, 126 aa, Artificial Sequence
  Chemically Synthesized
QVQLQESGGGLVQAGGSLRLSCAASGSIFIYYLMGWYRQAPGKERELVATIGDGGSTYYADSVKGRFTISRDNAKNTVYLQMNSLKPEDTAVYYCAAWSPRFVYFSVLLDWRLDYWGQGTQVTVSS

SEQ ID NO: 18912 - protein, 118 aa, Artificial Sequence
  Chemically Synthesized
QVQLQESGGGLVQAGGSLRLSCAASGTIFFYYTMGWYRQAPGKERELVASIAGGSITYYADSVKGRFTISRDNAKNTVYLQMNSLKPEDTAVYYCAALLDAKARLQYWGQGTQVTVSS

SEQ ID NO: 18913 - protein, 122 aa, Artificial Sequence
  Chemically Synthesized
QVQLQESGGGLVQAGGSLRLSCAASGNIFGYSGMGWYRQAPGKEREFVAAISPGSNTNYADSVKGRFTISRDNAKNTVYLQMNSLKPEDTAVYYCAAYDHVVNQFYESTMYWGQGTQVTVSS

SEQ ID NO: 18914 - protein, 120 aa, Artificial Sequence
  Chemically Synthesized
QVQLQESGGGLVQAGGSLRLSCAASGTIFDYDMGWYRQAPGKERELVAAIASGSSTYYADSVKGRFTISRDNAKNTVYLQMNSLKPEDTAVYYCAAAASQYLDDGPWHYWGQGTQVTVSS

SEQ ID NO: 18915 - protein, 117 aa, Artificial Sequence
  Chemically Synthesized
QVQLQESGGGLVQAGGSLRLSCAASGNISTYEMGWYRQAPGKERELVAAIADGGSTYYADSVKGRFTISRDNAKNTVYLQMNSLKPEDTAVYYCAARVGPAYDHAYWGQGTQVTVSS

SEQ ID NO: 18916 - protein, 122 aa, Artificial Sequence
  Chemically Synthesized
QVQLQESGGGLVQAGGSLRLSCAASGYISYGTYMGWYRQAPGKEREFVATISRGGITYYADSVKGRFTISRDNAKNTVYLQMNSLKPEDTAVYYCAVEYIYPQWYYYDLNYWGQGTQVTVSS

SEQ ID NO: 18917 - protein, 118 aa, Artificial Sequence
  Chemically Synthesized
QVQLQESGGGLVQAGGSLRLSCAASGNIFGGYYMGWYRQAPGKERELVATIGYGGNTYYADSVKGRFTISRDNAKNTVYLQMNSLKPEDTAVYYCAAWGEYPTNLRYWGQGTQVTVSS

SEQ ID NO: 18918 - protein, 118 aa, Artificial Sequence
  Chemically Synthesized
QVQLQESGGGLVQAGGSLRLSCAASGNIFSQDYMGWYRQAPGKEREFVATIDTGGNTNYADSVKGRFTISRDNAKNTVYLQMNSLKPEDTAVYYCAADDYGSYAHRYWGQGTQVTVSS

SEQ ID NO: 18919 - protein, 116 aa, Artificial Sequence
  Chemically Synthesized
QVQLQESGGGLVQAGGSLRLSCAASGTIFRYNAMGWYRQAPGKEREFVATIAVGTTTNYADSVKGRFTISRDNAKNTVYLQMNSLKPEDTAVYYCAAVYPYDHGYWGQGTQVTVSS

SEQ ID NO: 18920 - protein, 118 aa, Artificial Sequence
  Chemically Synthesized
QVQLQESGGGLVQAGGSLRLSCAASGTIFALVLMGWYRQAPGKEREFVATINYGSNTNYADSVKGRFTISRDNAKNTVYLQMNSLKPEDTAVYYCAAHGGPVTPHTYWGQGTQVTVSS

SEQ ID NO: 18921 - protein, 117 aa, Artificial Sequence
  Chemically Synthesized
QVQLQESGGGLVQAGGSLRLSCAASGNISLWYLMGWYRQAPGKEREFVAGINDGTITYYADSVKGRFTISRDNAKNTVYLQMNSLKPEDTAVYYCALVRLTTVTIYWGQGTQVTVSS

SEQ ID NO: 18922 - protein, 123 aa, Artificial Sequence
  Chemically Synthesized
QVQLQESGGGLVQAGGSLRLSCAASGSIFLYTYMGWYRQAPGKERELVAGIDDGTTTYYADSVKGRFTISRDNAKNTVYLQMNSLKPEDTAVYYCAVQYDKDGQTYTPPHVYWGQGTQVTVSS

SEQ ID NO: 18923 - protein, 126 aa, Artificial Sequence
  Chemically Synthesized
QVQLQESGGGLVQAGGSLRLSCAASGSIFWITDMGWYRQAPGKERELVASIGAGATTNYADSVKGRFTISRDNAKNTVYLQMNSLKPEDTAVYYCAAQWTQAIVLGWILYGAHPYWGQGTQVTVSS

SEQ ID NO: 18924 - protein, 118 aa, Artificial Sequence
  Chemically Synthesized
QVQLQESGGGLVQAGGSLRLSCAASGTIFAYYGMGWYRQAPGKEREFVAAIGRGAITYYADSVKGRFTISRDNAKNTVYLQMNSLKPEDTAVYYCAVFSGRRARLKYWGQGTQVTVSS

SEQ ID NO: 18925 - protein, 118 aa, Artificial Sequence
  Chemically Synthesized
QVQLQESGGGLVQAGGSLRLSCAASGTIFRYVVMGWYRQAPGKERELVASITYGSSTYYADSVKGRFTISRDNAKNTVYLQMNSLKPEDTAVYYCAVSGDDYIGFHYWGQGTQVTVSS

SEQ ID NO: 18926 - protein, 121 aa, Artificial Sequence
  Chemically Synthesized
QVQLQESGGGLVQAGGSLRLSCAASGYISDAYYMGWYRQAPGKERELVAGIDTGTSTYYADSVKGRFTISRDNAKNTVYLQMNSLKPEDTAVYYCAVTGDYTLGPYGRHYWGQGTQVTVSS

SEQ ID NO: 18927 - protein, 122 aa, Artificial Sequence
  Chemically Synthesized
QVQLQESGGGLVQAGGSLRLSCAASGYIFADPFMGWYRQAPGKERELVATIDQGGTTNYADSVKGRFTISRDNAKNTVYLQMNSLKPEDTAVYYCAAKYSRTRDSYTAHQYWGQGTQVTVSS

SEQ ID NO: 18928 - protein, 122 aa, Artificial Sequence
  Chemically Synthesized
QVQLQESGGGLVQAGGSLRLSCAASGTISGNVGMGWYRQAPGKERELVAGIGGGSSTYYADSVKGRFTISRDNAKNTVYLQMNSLKPEDTAVYYCAAPGDVSNPYTLPHAYWGQGTQVTVSS

SEQ ID NO: 18929 - protein, 113 aa, Artificial Sequence
  Chemically Synthesized
QVQLQESGGGLVQAGGSLRLSCAASGYIFYSPGMGWYRQAPGKERELYQYADSVKGRFTISRDNAKNTVYLQMNSLKPEDTAVYYCAAEAVYWNDESVFFTYWGQGTQVTVSS

SEQ ID NO: 18930 - protein, 118 aa, Artificial Sequence
  Chemically Synthesized
QVQLQESGGGLVQAGGSLRLSCAASGTIFYYAYMGWYRQAPGKEREFVAAISYGTTTNYADSVKGRFTISRDNAKNTVYLQMNSLKPEDTAVYYCAAIHDFSHYHHYWGQGTQVTVSS

SEQ ID NO: 18931 - protein, 118 aa, Artificial Sequence
  Chemically Synthesized
QVQLQESGGGLVQAGGSLRLSCAASGSIFLAGVMGWYRQAPGKERELVASISGGSTTNYADSVKGRFTISRDNAKNTVYLQMNSLKPEDTAVYYCAVDPYYWLGLGYWGQGTQVTVSS

SEQ ID NO: 18932 - protein, 122 aa, Artificial Sequence
  Chemically Synthesized
QVQLQESGGGLVQAGGSLRLSCAASGSIFSGTGMGWYRQAPGKERELVAGINDGGSTYYADSVKGRFTISRDNAKNTVYLQMNSLKPEDTAVYYCAAEYAYTVARVYDHRYWGQGTQVTVSS

SEQ ID NO: 18933 - protein, 118 aa, Artificial Sequence
  Chemically Synthesized
QVQLQESGGGLVQAGGSLRLSCAASGNIFDWTAMGWYRQAPGKEREFVASISWGSSTNYADSVKGRFTISRDNAKNTVYLQMNSLKPEDTAVYYCAAYFFVDRAYYYWGQGTQVTVSS

SEQ ID NO: 18934 - protein, 118 aa, Artificial Sequence
  Chemically Synthesized
QVQLQESGGGLVQAGGSLRLSCAASGSISRRVYMGWYRQAPGKERELVASISYGTITNYADSVKGRFTISRDNAKNTVYLQMNSLKPEDTAVYYCAVVRGYSRGHWYWGQGTQVTVSS

SEQ ID NO: 18935 - protein, 118 aa, Artificial Sequence
  Chemically Synthesized
QVQLQESGGGLVQAGGSLRLSCAASGNISDVPSMGWYRQAPGKERELVATIDGGTITYYADSVKGRFTISRDNAKNTVYLQMNSLKPEDTAVYYCAVQDKHYPWHPYWGQGTQVTVSS

SEQ ID NO: 18936 - protein, 118 aa, Artificial Sequence
  Chemically Synthesized
QVQLQESGGGLVQAGGSLRLSCAASGNIFPTPRMGWYRQAPGKEREFVAAISVGTTTNYADSVKGRFTISRDNAKNTVYLQMNSLKPEDTAVYYCAAYNADRPDHSYWGQGTQVTVSS

SEQ ID NO: 18937 - protein, 122 aa, Artificial Sequence
  Chemically Synthesized
QVQLQESGGGLVQAGGSLRLSCAASGNIFRYDQMGWYRQAPGKERELVAAIGVGTSTNYADSVKGRFTISRDNAKNTVYLQMNSLKPEDTAVYYCAVDGYWAYPEDPRHPYWGQGTQVTVSS

SEQ ID NO: 18938 - protein, 118 aa, Artificial Sequence
  Chemically Synthesized
QVQLQESGGGLVQAGGSLRLSCAASGTIFLTYYMGWYRQAPGKEREFVASINTGGITNYADSVKGRFTISRDNAKNTVYLQMNSLKPEDTAVYYCAVNYARRDDHTYWGQGTQVTVSS

SEQ ID NO: 18939 - protein, 117 aa, Artificial Sequence
  Chemically Synthesized
QVQLQESGGGLVQAGGSLRLSCAASGTIFYTPYMGWYRQAPGKERELVAAIGAGSVPYADSVKGRFTISRDNAKNTVYLQMNSLKPEDTAVYYCAADQSINAHHYYWGQGTQVTVSS

SEQ ID NO: 18940 - protein, 117 aa, Artificial Sequence
  Chemically Synthesized
QVQLQESGGGLVQAGGSLRLSCAASGYILTTLMGWYRQAPGKERELVAGIAFGTSTYYADSVKGRFTISRDNAKNTVYLQMNSLKPEDTAVYYCAAKTWDSFPHYYWGQGTQVTVSS

SEQ ID NO: 18941 - protein, 122 aa, Artificial Sequence
  Chemically Synthesized
QVQLQESGGGLVQAGGSLRLSCAASGTIFDILGMGWYRQAPGKEREFVAAITAGANTYYADSVKGRFTISRDNAKNTVYLQMNSLKPEDTAVYYCAAYTDVRNDSTLYHNYWGQGTQVTVSS

SEQ ID NO: 18942 - protein, 115 aa, Artificial Sequence
  Chemically Synthesized
QVQLQESGGGLVQAGGSLRLSCAASGSIFREGRTMGWYRQAPGKEREFVATITWGGNTYYADSVKGRFTISRDNAKNTVYLQMNSLKPEDTAVYYCAAYPGYPYWGQGTQVTVSS

SEQ ID NO: 18943 - protein, 122 aa, Artificial Sequence
  Chemically Synthesized
QVQLQESGGGLVQAGGSLRLSCAASGNISVLVGMGWYRQAPGKEREFVAAIAGGTITNYADSVKGRFTISRDNAKNTVYLQMNSLKPEDTAVYYCAAHSTPGLPYGRYLGYWGQGTQVTVSS

SEQ ID NO: 18944 - protein, 121 aa, Artificial Sequence
  Chemically Synthesized
QVQLQESGGGLVQAGGSLRLSCAASGYIFLILMGWYRQAPGKEREFVAGIDEGSNTNYADSVKGRFTISRDNAKNTVYLQMNSLKPEDTAVYYCAVKNRYYEFDYRGHLYWGQGTQVTVSS

SEQ ID NO: 18945 - protein, 122 aa, Artificial Sequence
  Chemically Synthesized
QVQLQESGGGLVQAGGSLRLSCAASGYISPDFYMGWYRQAPGKERELVATINIGGTTNYADSVKGRFTISRDNAKNTVYLQMNSLKPEDTAVYYCAVPDTLQWYRGNPFGYWGQGTQVTVSS

SEQ ID NO: 18946 - protein, 118 aa, Artificial Sequence
  Chemically Synthesized
QVQLQESGGGLVQAGGSLRLSCAASGTISSIPKMGWYRQAPGKEREFVATINRGGTTYYADSVKGRFTISRDNAKNTVYLQMNSLKPEDTAVYYCAAGYLSNTTFPYWGQGTQVTVSS

SEQ ID NO: 18947 - protein, 126 aa, Artificial Sequence
  Chemically Synthesized
QVQLQESGGGLVQAGGSLRLSCAASGYISIYAPMGWYRQAPGKERELVAGIDAGGITYYADSVKGRFTISRDNAKNTVYLQMNSLKPEDTAVYYCAAQDLFPEIYPYVTLADLHYWGQGTQVTVSS

SEQ ID NO: 18948 - protein, 124 aa, Artificial Sequence
  Chemically Synthesized
QVQLQESGGGLVQAGGSLRLSCAASGTFFWNLMGWYRQAPGKERELVASISRGTSTNYADSVKGRFTISRDNAKNTVYLQMNSLKPEDTAVYYCAFWLRLSTVTNTLCTTVIYWGQGTQVTVSS

SEQ ID NO: 18949 - protein, 118 aa, Artificial Sequence
  Chemically Synthesized
QVQLQESGGGLVQAGGSLRLSCAASGNISRDVIMGWYRQAPGKERELVASIDQGAITNYADSVKGRFTISRDNAKNTVYLQMNSLKPEDTAVYYCAVDPWTYRDLAYWGQGTQVTVSS

SEQ ID NO: 18950 - protein, 116 aa, Artificial Sequence
  Chemically Synthesized
QVQLQESGGGLVQAGGSLRLSCAASGSIFHYDGMGWYRQAPGKEREFVAAGGSTTNYADSVKGRFTISRDNAKNTVYLQMNSLKPEDTAVYYCAVYPDTAGAHLYWGQGTQVTVSS

SEQ ID NO: 18951 - protein, 117 aa, Artificial Sequence
  Chemically Synthesized
QVQLQESGGGLVQAGGSLRLSCAASGYISYDSMGWYRQAPGKERELVASIGAGGITYYADSVKGRFTISRDNAKNTVYLQMNSLKPEDTAVYYCAVGKSGYLPHDYWGQGTQVTVSS

SEQ ID NO: 18952 - protein, 116 aa, Artificial Sequence
  Chemically Synthesized
QVQLQESGGGLVQAGGSLRLSCAASGSISHSLMGWYRQAPGKERELVAGINLGGTTYYADSVKGRFTISRDNAKNTVYLQMNSLKPEDTAVYYCAAHIGSDSHGYWGQGTQVTVSS

SEQ ID NO: 18953 - protein, 118 aa, Artificial Sequence
  Chemically Synthesized
QVQLQESGGGLVQAGGSLRLSCAASGTIFDGNIMGWYRQAPGKERELVAAIGEGASTNYADSVKGRFTISRDNAKNTVYLQMNSLKPEDTAVYYCAVIDVDLATFRYWGQGTQVTVSS

SEQ ID NO: 18954 - protein, 126 aa, Artificial Sequence
  Chemically Synthesized
QVQLQESGGGLVQAGGSLRLSCAASGSIFAWLYMGWYRQAPGKERELVATIGSGSNTNYADSVKGRFTISRDNAKNTVYLQMNSLKPEDTAVYYCAVRDYYWTTYSWSTAWDHYYWGQGTQVTVSS

SEQ ID NO: 18955 - protein, 118 aa, Artificial Sequence
  Chemically Synthesized
QVQLQESGGGLVQAGGSLRLSCAASGNIFLHDVMGWYRQAPGKERELVASIAAGGITNYADSVKGRFTISRDNAKNTVYLQMNSLKPEDTAVYYCAVADGYYGTHSYWGQGTQVTVSS

SEQ ID NO: 18956 - protein, 118 aa, Artificial Sequence
  Chemically Synthesized
QVQLQESGGGLVQAGGSLRLSCAASGNISYDRYMGWYRQAPGKERELVATINRGANTNYADSVKGRFTISRDNAKNTVYLQMNSLKPEDTAVYYCAVSDIDPPSHQYWGQGTQVTVSS

SEQ ID NO: 18957 - protein, 121 aa, Artificial Sequence
  Chemically Synthesized
QVQLQESGGGLVQAGGSLRLSCAASGSISRDALMGWYRQAPGKERELVAAISGGASTYYADSVKGRFTISRDNAKNTVYLQMNSLKPEDTAVYYCAAHDDSTVSTLTTIYWGQGTQVTVSS

SEQ ID NO: 18958 - protein, 122 aa, Artificial Sequence
  Chemically Synthesized
QVQLQESGGGLVQAGGSLRLSCAASGSISGPTDMGWYRQAPGKERELVASISAGGNTYYADSVKGRFTISRDNAKNTVYLQMNSLKPEDTAVYYCAVKGVYNYTNTIDHQYWGQGTQVTVSS

SEQ ID NO: 18959 - protein, 122 aa, Artificial Sequence
  Chemically Synthesized
QVQLQESGGGLVQAGGSLRLSCAASGNIFWTDGMGWYRQAPGKERELVATIAGGGITYYADSVKGRFTISRDNAKNTVYLQMNSLKPEDTAVYYCAVASAAYLPQLFNFNYWGQGTQVTVSS

SEQ ID NO: 18960 - protein, 117 aa, Artificial Sequence
  Chemically Synthesized
QVQLQESGGGLVQAGGSLRLSCAASGNIFYRTSMGWYRQAPGKEREFVASITSGSITNYADSVKGRFTISRDNAKNTVYLQMNSLKPEDTAVYYCAAGDGERPRLYWGQGTQVTVSS

SEQ ID NO: 18961 - protein, 114 aa, Artificial Sequence
  Chemically Synthesized
QVQLQESGGGLVQAGGSLRLSCAASGSISRYYAMGWYRQAPGKERELVAGWYYLYADSVKGRFTISRDNAKNTVYLQMNSLKPEDTAVYYCAVFYYPVDDHSYWGQGTQVTVSS

SEQ ID NO: 18962 - protein, 126 aa, Artificial Sequence
  Chemically Synthesized
QVQLQESGGGLVQAGGSLRLSCAASGTIFRGYVMGWYRQAPGKEREFVAAINGGTTTYYADSVKGRFTISRDNAKNTVYLQMNSLKPEDTAVYYCAAYYGWLPSTAGYYLYYFDYWGQGTQVTVSS

SEQ ID NO: 18963 - protein, 121 aa, Artificial Sequence
  Chemically Synthesized
QVQLQESGGGLVQAGGSLRLSCAASGYISPVYMGWYRQAPGKERELVASIDDGTITYYADSVKGRFTISRDNAKNTVYLQMNSLKPEDTAVYYCAAGDDVADGGLDAYYYWGQGTQVTVSS

SEQ ID NO: 18964 - protein, 119 aa, Artificial Sequence
  Chemically Synthesized
QVQLQESGGGLVQAGGSLRLSCAASGNISADDAMGWYRQAPGKERELVAAIDSGTSTYADSVKGRFTISRDNAKNTVYLQMNSLKPEDTAVYYCAANGANSIRGDLYYWGQGTQVTVSS

SEQ ID NO: 18965 - protein, 117 aa, Artificial Sequence
  Chemically Synthesized
QVQLQESGGGLVQAGGSLRLSCAASGTISRRNYMGWYRQAPGKEREFVASIASGTITYYADSVKGRFTISRDNAKNTVYLQMNSLKPEDTAVYYCAAYAYNGDYGYWGQGTQVTVSS

SEQ ID NO: 18966 - protein, 120 aa, Artificial Sequence
  Chemically Synthesized
QVQLQESGGGLVQAGGSLRLSCAASGTIFTVSMGWYRQAPGKERELVASIGSGGSTNYADSVKGRFTISRDNAKNTVYLQMNSLKPEDTAVYYCAAGYIRGARRGIPFYWGQGTQVTVSS

SEQ ID NO: 18967 - protein, 121 aa, Artificial Sequence
  Chemically Synthesized
QVQLQESGGGLVQAGGSLRLSCAASGYISFVADMGWYRQAPGKERELVATINHGSNTYYADSVKGRFTISRDNAKNTVYLQMNSLKPEDTAVYYCAAPWDANSLRNVVFYWGQGTQVTVSS

SEQ ID NO: 18968 - protein, 118 aa, Artificial Sequence
  Chemically Synthesized
QVQLQESGGGLVQAGGSLRLSCAASGYILTVLMGWYRQAPGKERELVAGIAYGGNTNYADSVKGRFTISRDNAKNTVYLQMNSLKPEDTAVYYCAVLGIEYGPPFQYWGQGTQVTVSS

SEQ ID NO: 18969 - protein, 118 aa, Artificial Sequence
  Chemically Synthesized
QVQLQESGGGLVQAGGSLRLSCAASGNIFTLITMGWYRQAPGKERELVAAIDDGSSTNYADSVKGRFTISRDNAKNTVYLQMNSLKPEDTAVYYCAVARGTDYDHVYWGQGTQVTVSS

SEQ ID NO: 18970 - protein, 112 aa, Artificial Sequence
  Chemically Synthesized
QVQLQESGGGLVQAGGSLRLSCAASGTISDVESMGWYRQAPGKERELVAAISPGATTYYADSVKGRFTISRDNAKNTVYLQMNSLKPEDTAVYYCAAYPPYWGQGTQVTVSS

SEQ ID NO: 18971 - protein, 118 aa, Artificial Sequence
  Chemically Synthesized
QVQLQESGGGLVQAGGSLRLSCAASGYISTRRPMGWYRQAPGKERELVASITYGASTYYADSVKGRFTISRDNAKNTVYLQMNSLKPEDTAVYYCAAADRAVVFLDYWGQGTQVTVSS

SEQ ID NO: 18972 - protein, 119 aa, Artificial Sequence
  Chemically Synthesized
QVQLQESGGGLVQAGGSLRLSCAASGTISYTYFMGWYRQAPGKERELVAAIGYGGTTYYADSVKGRFTISRDNAKNTVYLQMNSLKPEDTAVYYCAVTLLDYAAGLTYWGQGTQVTVSS

SEQ ID NO: 18973 - protein, 118 aa, Artificial Sequence
  Chemically Synthesized
QVQLQESGGGLVQAGGSLRLSCAASGNISRDRRMGWYRQAPGKEREFVAAINYGAITYYADSVKGRFTISRDNAKNTVYLQMNSLKPEDTAVYYCAVYWADGSRLQYWGQGTQVTVSS

SEQ ID NO: 18974 - protein, 118 aa, Artificial Sequence
  Chemically Synthesized
QVQLQESGGGLVQAGGSLRLSCAASGNIFDAYKMGWYRQAPGKERELVATITTGGSTNYADSVKGRFTISRDNAKNTVYLQMNSLKPEDTAVYYCAVSDNEAGYFAYWGQGTQVTVSS

SEQ ID NO: 18975 - protein, 118 aa, Artificial Sequence
  Chemically Synthesized
QVQLQESGGGLVQAGGSLRLSCAASGTIFHTCYMGWYRQAPGKEREFVATIAGGSITNYADSVKGRFTISRDNAKNTVYLQMNSLKPEDTAVYYCAVRVGSDDWFVYWGQGTQVTVSS

SEQ ID NO: 18976 - protein, 119 aa, Artificial Sequence
  Chemically Synthesized
QVQLQESGGGLVQAGGSLRLSCAASGNIFDGSFMGWYRQAPGKERELVASIAGGTSTNYADSVKGRFTISRDNAKNTVYLQMNSLKPEDTAVYYCAVPDADLGTDYPYWGQGTQVTVSS

SEQ ID NO: 18977 - protein, 117 aa, Artificial Sequence
  Chemically Synthesized
QVQLQESGGGLVQAGGSLRLSCAASGSISDYDTMGWYRQAPGKERELVAGIISVLIPYADSVKGRFTISRDNAKNTVYLQMNSLKPEDTAVYYCAVSYRRADTFVYWGQGTQVTVSS

SEQ ID NO: 18978 - protein, 123 aa, Artificial Sequence
  Chemically Synthesized
QVQLQESGGGLVQAGGSLRLSCAASGTISTVLMGWYRQAPGKEREFVATITYGSSTYYADSVKGRFTISRDNAKNTVYLQMNSLKPEDTAVYYCAAGDSVLTTLLTRTTLLYWGQGTQVTVSS

SEQ ID NO: 18979 - protein, 122 aa, Artificial Sequence
  Chemically Synthesized
QVQLQESGGGLVQAGGSLRLSCAASGTISYSRTMGWYRQAPGKEREFVAAISYGTSTNYADSVKGRFTISRDNAKNTVYLQMNSLKPEDTAVYYCAAIWYGYYTDVTRLLYWGQGTQVTVSS

SEQ ID NO: 18980 - protein, 116 aa, Artificial Sequence
  Chemically Synthesized
QVQLQESGGGLVQAGGSLRLSCAASGTIFGDTDMGWYRQAPGKEREFVASINDGSITNYADSVKGRFTISRDNAKNTVYLQMNSLKPEDTAVYYCAVDSDDTYGYWGQGTQVTVSS

SEQ ID NO: 18981 - protein, 118 aa, Artificial Sequence
  Chemically Synthesized
QVQLQESGGGLVQAGGSLRLSCAASGTIFRLSDMGWYRQAPGKERELVATIGPGTNTYYADSVKGRFTISRDNAKNTVYLQMNSLKPEDTAVYYCAVYVITKPYLGYWGQGTQVTVSS

SEQ ID NO: 18982 - protein, 117 aa, Artificial Sequence
  Chemically Synthesized
QVQLQESGGGLVQAGGSLRLSCAASGTISSTVVMGWYRQAPGKERELVAAIGRGGNTYYADSVKGRFTISRDNAKNTVYLQMNSLKPEDTAVYYCAVRYWYYVLDYWGQGTQVTVSS

SEQ ID NO: 18983 - protein, 119 aa, Artificial Sequence
  Chemically Synthesized
QVQLQESGGGLVQAGGSLRLSCAASGNISVFYRMGWYRQAPGKEREFVAGIDHGAITNYADSVKGRFTISRDNAKNTVYLQMNSLKPEDTAVYYCAVLTRISDIYYGYWGQGTQVTVSS

SEQ ID NO: 18984 - protein, 122 aa, Artificial Sequence
  Chemically Synthesized
QVQLQESGGGLVQAGGSLRLSCAASGNISDPEDMGWYRQAPGKEREFVATISLGTITNYADSVKGRFTISRDNAKNTVYLQMNSLKPEDTAVYYCAVSGYPHDTYASYHEYWGQGTQVTVSS

SEQ ID NO: 18985 - protein, 118 aa, Artificial Sequence
  Chemically Synthesized
QVQLQESGGGLVQAGGSLRLSCAASGNIFDDWYMGWYRQAPGKEREFVAAITTGGNTYYADSVKGRFTISRDNAKNTVYLQMNSLKPEDTAVYYCAALVSGAYTHLYWGQGTQVTVSS

SEQ ID NO: 18986 - protein, 119 aa, Artificial Sequence
  Chemically Synthesized
QVQLQESGGGLVQAGGSLRLSCAASGSISDYRGMGWYRQAPGKEREFVAGINPGATTYYADSVKGRFTISRDNAKNTVYLQMNSLKPEDTAVYYCAVLRHNYTEYYYYWGQGTQVTVSS

SEQ ID NO: 18987 - protein, 126 aa, Artificial Sequence
  Chemically Synthesized
QVQLQESGGGLVQAGGSLRLSCAASGNIFDFNYMGWYRQAPGKERELVATIDSGTNTNYADSVKGRFTISRDNAKNTVYLQMNSLKPEDTAVYYCAAYLDHADRYDDTIYDAHDYWGQGTQVTVSS

SEQ ID NO: 18988 - protein, 119 aa, Artificial Sequence
  Chemically Synthesized
QVQLQESGGGLVQAGGSLRLSCAASGYIFYIARMGWYRQAPGKEREFVASIGAGTYADSVKGRFTISRDNAKNTVYLQMNSLKPEDTAVYYCAVPYQQPYFYTYRLSYWGQGTQVTVSS

SEQ ID NO: 18989 - protein, 117 aa, Artificial Sequence
  Chemically Synthesized
QVQLQESGGGLVQAGGSLRLSCAASGSISWPGDMGWYRQAPGKEREFVALLITVVVPYADSVKGRFTISRDNAKNTVYLQMNSLKPEDTAVYYCAANGDGDTAFYYWGQGTQVTVSS

SEQ ID NO: 18990 - protein, 116 aa, Artificial Sequence
  Chemically Synthesized
QVQLQESGGGLVQAGGSLRLSCAASGNISIVTDMGWYRQAPGKERELVAGINRGTTYADSVKGRFTISRDNAKNTVYLQMNSLKPEDTAVYYCAAESVTRRVHYYWGQGTQVTVSS

SEQ ID NO: 18991 - protein, 121 aa, Artificial Sequence
  Chemically Synthesized
QVQLQESGGGLVQAGGSLRLSCAASGNISLRDYMGWYRQAPGKEREFVAAITSGSTTYYADSVKGRFTISRDNAKNTVYLQMNSLKPEDTAVYYCAVDDQPDRMLTVFIYWGQGTQVTVSS

SEQ ID NO: 18992 - protein, 118 aa, Artificial Sequence
  Chemically Synthesized
QVQLQESGGGLVQAGGSLRLSCAASGSIFPNSYMGWYRQAPGKEREFVAAIAVGTSTNYADSVKGRFTISRDNAKNTVYLQMNSLKPEDTAVYYCAVVFYAKYYHYYWGQGTQVTVSS

SEQ ID NO: 18993 - protein, 117 aa, Artificial Sequence
  Chemically Synthesized
QVQLQESGGGLVQAGGSLRLSCAASGNISDGDYMGWYRQAPGKEREFVAAIGSGGNTNYADSVKGRFTISRDNAKNTVYLQMNSLKPEDTAVYYCAVLTSFGVFLYWGQGTQVTVSS

SEQ ID NO: 18994 - protein, 118 aa, Artificial Sequence
  Chemically Synthesized
QVQLQESGGGLVQAGGSLRLSCAASGSIFWYLWMGWYRQAPGKEREFVATITWGANTNYADSVKGRFTISRDNAKNTVYLQMNSLKPEDTAVYYCAVTHYRYQDLLYWGQGTQVTVSS

SEQ ID NO: 18995 - protein, 118 aa, Artificial Sequence
  Chemically Synthesized
QVQLQESGGGLVQAGGSLRLSCAASGTIFWDRSMGWYRQAPGKERELVASINTGSSTNYADSVKGRFTISRDNAKNTVYLQMNSLKPEDTAVYYCAVFSYRLFGLGYWGQGTQVTVSS

SEQ ID NO: 18996 - protein, 118 aa, Artificial Sequence
  Chemically Synthesized
QVQLQESGGGLVQAGGSLRLSCAASGSIFHSNAMGWYRQAPGKEREFVAAITSGSSTYYADSVKGRFTISRDNAKNTVYLQMNSLKPEDTAVYYCAVATFAGDAFDYWGQGTQVTVSS

SEQ ID NO: 18997 - protein, 117 aa, Artificial Sequence
  Chemically Synthesized
QVQLQESGGGLVQAGGSLRLSCAASGSISARLQMGWYRQAPGKEREFVAGITDGTTTYADSVKGRFTISRDNAKNTVYLQMNSLKPEDTAVYYCAAGDYHSYAHYYWGQGTQVTVSS

SEQ ID NO: 18998 - protein, 111 aa, Artificial Sequence
  Chemically Synthesized
QVQLQESGGGLVQAGGSLRLSCAASGTISYLPYMGWYRQAPGKERELVAAIAHGTTTNYADSVKGRFTISRDNAKNTVYLQMNSLKPEDTAVYYCAVHGYWGQGTQVTVSS

SEQ ID NO: 18999 - protein, 118 aa, Artificial Sequence
  Chemically Synthesized
QVQLQESGGGLVQAGGSLRLSCAASGYISPYNRMGWYRQAPGKERELVAAISVGSNTYYADSVKGRFTISRDNAKNTVYLQMNSLKPEDTAVYYCAVESYDGYLLTYWGQGTQVTVSS

SEQ ID NO: 19000 - protein, 117 aa, Artificial Sequence
  Chemically Synthesized
QVQLQESGGGLVQAGGSLRLSCAASGYISSFSDMGWYRQAPGKEREFVATINSGTNTNYADSVKGRFTISRDNAKNTVYLQMNSLKPEDTAVYYCALTRTVSLNMYWGQGTQVTVSS

SEQ ID NO: 19001 - protein, 118 aa, Artificial Sequence
  Chemically Synthesized
QVQLQESGGGLVQAGGSLRLSCAASGNISYSLFMGWYRQAPGKERELVASIGSGGNTYYADSVKGRFTISRDNAKNTVYLQMNSLKPEDTAVYYCAAGPPGTNNFNYWGQGTQVTVSS

SEQ ID NO: 19002 - protein, 113 aa, Artificial Sequence
  Chemically Synthesized
QVQLQESGGGLVQAGGSLRLSCAASGTISGADIMGWYRQAPGKERELVAAITPGSSTYYADSVKGRFTISRDNAKNTVYLQMNSLKPEDTAVYYCAAVRTIYWGQGTQVTVSS

SEQ ID NO: 19003 - protein, 122 aa, Artificial Sequence
  Chemically Synthesized
QVQLQESGGGLVQAGGSLRLSCAASGTIFSRAYMGWYRQAPGKEREFVASISFGGTTNYADSVKGRFTISRDNAKNTVYLQMNSLKPEDTAVYYCAAVTAYDAQEGGSLYYWGQGTQVTVSS

SEQ ID NO: 19004 - protein, 122 aa, Artificial Sequence
  Chemically Synthesized
QVQLQESGGGLVQAGGSLRLSCAASGTISREGYMGWYRQAPGKEREFVAAIATGSSTYYADSVKGRFTISRDNAKNTVYLQMNSLKPEDTAVYYCAAISEERRDYLRRYHYWGQGTQVTVSS

SEQ ID NO: 19005 - protein, 121 aa, Artificial Sequence
  Chemically Synthesized
QVQLQESGGGLVQAGGSLRLSCAASGNISANRYMGWYRQAPGKEREFVAAITDGGLPYADSVKGRFTISRDNAKNTVYLQMNSLKPEDTAVYYCAVTTGQPSYYRGSHAYWGQGTQVTVSS

SEQ ID NO: 19006 - protein, 122 aa, Artificial Sequence
  Chemically Synthesized
QVQLQESGGGLVQAGGSLRLSCAASGYISYSRGMGWYRQAPGKERELVATISYGGSTYYADSVKGRFTISRDNAKNTVYLQMNSLKPEDTAVYYCAAPWFRLYGGDRRHWYWGQGTQVTVSS

SEQ ID NO: 19007 - protein, 118 aa, Artificial Sequence
  Chemically Synthesized
QVQLQESGGGLVQAGGSLRLSCAASGNISRYYAMGWYRQAPGKEREFVAGIAVGGNTYYADSVKGRFTISRDNAKNTVYLQMNSLKPEDTAVYYCAVVTGDPPYHGYWGQGTQVTVSS

SEQ ID NO: 19008 - protein, 125 aa, Artificial Sequence
  Chemically Synthesized
QVQLQESGGGLVQAGGSLRLSCAASGSISAPFYMGWYRQAPGKERELVAAINTGANTYADSVKGRFTISRDNAKNTVYLQMNSLKPEDTAVYYCAVSRANVLLGVYIAWVYFLYWGQGTQVTVSS

SEQ ID NO: 19009 - protein, 126 aa, Artificial Sequence
  Chemically Synthesized
QVQLQESGGGLVQAGGSLRLSCAASGTIFGPSSMGWYRQAPGKERELVASINQGSSTNYADSVKGRFTISRDNAKNTVYLQMNSLKPEDTAVYYCAVTRLAAIGKYPTWYVAYRYWGQGTQVTVSS

SEQ ID NO: 19010 - protein, 126 aa, Artificial Sequence
  Chemically Synthesized
QVQLQESGGGLVQAGGSLRLSCAASGNISQYAAMGWYRQAPGKEREFVAAIDLGTITYYADSVKGRFTISRDNAKNTVYLQMNSLKPEDTAVYYCAAYEAVSLWGSPVYVYDFGYWGQGTQVTVSS

SEQ ID NO: 19011 - protein, 118 aa, Artificial Sequence
  Chemically Synthesized
QVQLQESGGGLVQAGGSLRLSCAASGTISADDVMGWYRQAPGKEREFVATITAGSTTYYADSVKGRFTISRDNAKNTVYLQMNSLKPEDTAVYYCAVDTVTYTTHGYWGQGTQVTVSS

SEQ ID NO: 19012 - protein, 118 aa, Artificial Sequence
  Chemically Synthesized
QVQLQESGGGLVQAGGSLRLSCAASGTIFVDYEMGWYRQAPGKEREFVASISYGSTTYYADSVKGRFTISRDNAKNTVYLQMNSLKPEDTAVYYCAAQSRSPYYYFYWGQGTQVTVSS

SEQ ID NO: 19013 - protein, 118 aa, Artificial Sequence
  Chemically Synthesized
QVQLQESGGGLVQAGGSLRLSCAASGTIFAWSYMGWYRQAPGKERELVATISIGSTTNYADSVKGRFTISRDNAKNTVYLQMNSLKPEDTAVYYCAVRVGYLVLHSYWGQGTQVTVSS

SEQ ID NO: 19014 - protein, 117 aa, Artificial Sequence
  Chemically Synthesized
QVQLQESGGGLVQAGGSLRLSCAASGSIFSPERMGWYRQAPGKEREFVASITWGGSTNYADSVKGRFTISRDNAKNTVYLQMNSLKPEDTAVYYCAVTYSTRLCLYWGQGTQVTVSS

SEQ ID NO: 19015 - protein, 124 aa, Artificial Sequence
  Chemically Synthesized
QVQLQESGGGLVQAGGSLRLSCAASGTISHFANMGWYRQAPGKERELVATITRGSSTYYADSVKGRFTISRDNAKNTVYLQMNSLKPEDTAVYYCAAGSSGNTTVTSLGTSLYWGQGTQVTVSS

SEQ ID NO: 19016 - protein, 122 aa, Artificial Sequence
  Chemically Synthesized
QVQLQESGGGLVQAGGSLRLSCAASGSISSWSYMGWYRQAPGKERELVATIGTGGSTYYADSVKGRFTISRDNAKNTVYLQMNSLKPEDTAVYYCAAASRDQGPGGGAYPYWGQGTQVTVSS

SEQ ID NO: 19017 - protein, 117 aa, Artificial Sequence
  Chemically Synthesized
QVQLQESGGGLVQAGGSLRLSCAASGSIFGGVMGWYRQAPGKEREFVASISNGASTNYADSVKGRFTISRDNAKNTVYLQMNSLKPEDTAVYYCAVLVISDRFHPYWGQGTQVTVSS

SEQ ID NO: 19018 - protein, 122 aa, Artificial Sequence
  Chemically Synthesized
QVQLQESGGGLVQAGGSLRLSCAASGNILTSLMGWYRQAPGKEREFVAAIDLGGITYYADSVKGRFTISRDNAKNTVYLQMNSLKPEDTAVYYCAVINIYEPQYYLRYFLYWGQGTQVTVSS

SEQ ID NO: 19019 - protein, 122 aa, Artificial Sequence
  Chemically Synthesized
QVQLQESGGGLVQAGGSLRLSCAASGNIFGYGDMGWYRQAPGKEREFVATIGPGTTTKYADSVKGRFTISRDNAKNTVYLQMNSLKPEDTAVYYCAVAGLYSYSSRRVFDYWGQGTQVTVSS

SEQ ID NO: 19020 - protein, 126 aa, Artificial Sequence
  Chemically Synthesized
QVQLQESGGGLVQAGGSLRLSCAASGTISPAGAMGWYRQAPGKEREFVATISQGGITNYADSVKGRFTISRDNAKNTVYLQMNSLKPEDTAVYYCAALAADAERTTRGAAYWHYYWGQGTQVTVSS

SEQ ID NO: 19021 - protein, 118 aa, Artificial Sequence
  Chemically Synthesized
QVQLQESGGGLVQAGGSLRLSCAASGNISGVPDMGWYRQAPGKEREFVAAIGVGTITNYADSVKGRFTISRDNAKNTVYLQMNSLKPEDTAVYYCAVVLFDAGWHAYWGQGTQVTVSS

SEQ ID NO: 19022 - protein, 118 aa, Artificial Sequence
  Chemically Synthesized
QVQLQESGGGLVQAGGSLRLSCAASGTIFYTTHMGWYRQAPGKERELVAAIGPGANTNYADSVKGRFTISRDNAKNTVYLQMNSLKPEDTAVYYCAAYYWLDKYYGYWGQGTQVTVSS

SEQ ID NO: 19023 - protein, 117 aa, Artificial Sequence
  Chemically Synthesized
QVQLQESGGGLVQAGGSLRLSCAASGYIFFTSPMGWYRQAPGKERELVAGIGAGGITNYADSVKGRFTISRDNAKNTVYLQMNSLKPEDTAVYYCAVGQLTRSVMYWGQGTQVTVSS

SEQ ID NO: 19024 - protein, 122 aa, Artificial Sequence
  Chemically Synthesized
QVQLQESGGGLVQAGGSLRLSCAASGTISDQYFMGWYRQAPGKEREFVAAIGNGASTNYADSVKGRFTISRDNAKNTVYLQMNSLKPEDTAVYYCAAVGHRIGGRYGWHFYWGQGTQVTVSS

SEQ ID NO: 19025 - protein, 117 aa, Artificial Sequence
  Chemically Synthesized
QVQLQESGGGLVQAGGSLRLSCAASGNISALLYMGWYRQAPGKERELVATIDGGGNTYYADSVKGRFTISRDNAKNTVYLQMNSLKPEDTAVYYCAAYSSVTTIIYWGQGTQVTVSS

SEQ ID NO: 19026 - protein, 118 aa, Artificial Sequence
  Chemically Synthesized
QVQLQESGGGLVQAGGSLRLSCAASGTIFSPIRMGWYRQAPGKEREFVAGIGAGTNTYYADSVKGRFTISRDNAKNTVYLQMNSLKPEDTAVYYCAAIGSRGRLHWYWGQGTQVTVSS

SEQ ID NO: 19027 - protein, 122 aa, Artificial Sequence
  Chemically Synthesized
QVQLQESGGGLVQAGGSLRLSCAASGTIFYVSMGWYRQAPGKEREFVATIGCYYLYADSVKGRFTISRDNAKNTVYLQMNSLKPEDTAVYYCAADDPKWPYSDDYWTAHGYWGQGTQVTVSS

SEQ ID NO: 19028 - protein, 118 aa, Artificial Sequence
  Chemically Synthesized
QVQLQESGGGLVQAGGSLRLSCAASGTISRRYAMGWYRQAPGKEREFVAAIGTGSSTNYADSVKGRFTISRDNAKNTVYLQMNSLKPEDTAVYYCAVPTNITSGLSYWGQGTQVTVSS

SEQ ID NO: 19029 - protein, 121 aa, Artificial Sequence
  Chemically Synthesized
QVQLQESGGGLVQAGGSLRLSCAASGSISYRDDMGWYRQAPGKEREFVASITVGANTNYADSVKGRFTISRDNAKNTVYLQMNSLKPEDTAVYYCAVYLPGSVDTYYDLYWGQGTQVTVSS

SEQ ID NO: 19030 - protein, 118 aa, Artificial Sequence
  Chemically Synthesized
QVQLQESGGGLVQAGGSLRLSCAASGYIFALRYMGWYRQAPGKEREFVASIGLGGNTNYADSVKGRFTISRDNAKNTVYLQMNSLKPEDTAVYYCAALYYDLRWHWYWGQGTQVTVSS

SEQ ID NO: 19031 - protein, 126 aa, Artificial Sequence
  Chemically Synthesized
QVQLQESGGGLVQAGGSLRLSCAASGYISPIYRMGWYRQAPGKEREFVAGIGPGTSTNYADSVKGRFTISRDNAKNTVYLQMNSLKPEDTAVYYCAAVSYGAYTTPNATGYWLYYWGQGTQVTVSS

SEQ ID NO: 19032 - protein, 122 aa, Artificial Sequence
  Chemically Synthesized
QVQLQESGGGLVQAGGSLRLSCAASGYIFYLDYMGWYRQAPGKEREFVASIGWGGTTYYADSVKGRFTISRDNAKNTVYLQMNSLKPEDTAVYYCAARPYGPLIGLGPFLYWGQGTQVTVSS

SEQ ID NO: 19033 - protein, 126 aa, Artificial Sequence
  Chemically Synthesized
QVQLQESGGGLVQAGGSLRLSCAASGNISTGLKMGWYRQAPGKEREFVATIGVGGNTYYADSVKGRFTISRDNAKNTVYLQMNSLKPEDTAVYYCAADILYYDYFGYASYWGLSYWGQGTQVTVSS

SEQ ID NO: 19034 - protein, 118 aa, Artificial Sequence
  Chemically Synthesized
QVQLQESGGGLVQAGGSLRLSCAASGTISTVNIMGWYRQAPGKEREFVAGINTGTNTNYADSVKGRFTISRDNAKNTVYLQMNSLKPEDTAVYYCAAIYQLKTWHYYWGQGTQVTVSS

SEQ ID NO: 19035 - protein, 122 aa, Artificial Sequence
  Chemically Synthesized
QVQLQESGGGLVQAGGSLRLSCAASGTISMGWYRQAPGKERELVATIDDGTTTNYADSVKGRFTISRDNAKNTVYLQMNSLKPEDTAVYYCAAWVVTHTYAQDVAYRYHSYWGQGTQVTVSS

SEQ ID NO: 19036 - protein, 122 aa, Artificial Sequence
  Chemically Synthesized
QVQLQESGGGLVQAGGSLRLSCAASGTISIYTRMGWYRQAPGKEREFVATIDDGANTNYADSVKGRFTISRDNAKNTVYLQMNSLKPEDTAVYYCAAVTRNRRGPGSYHGYWGQGTQVTVSS

SEQ ID NO: 19037 - protein, 109 aa, Artificial Sequence
  Chemically Synthesized
QVQLQESGGGLVQAGGSLRLSCAASGYISGLDTMGWYRQAPGKERELVATISYGTNTYYADSVKGRFTISRDNAKNTVYLQMNSLKPEDTAVYYCAYYWGQGTQVTVSS

SEQ ID NO: 19038 - protein, 118 aa, Artificial Sequence
  Chemically Synthesized
QVQLQESGGGLVQAGGSLRLSCAASGYIFDWPIMGWYRQAPGKEREFVASIDTGSNTYYADSVKGRFTISRDNAKNTVYLQMNSLKPEDTAVYYCAAVDRQNYTYDYWGQGTQVTVSS

SEQ ID NO: 19039 - protein, 118 aa, Artificial Sequence
  Chemically Synthesized
QVQLQESGGGLVQAGGSLRLSCAASGNISLGRYMGWYRQAPGKEREFVASIGNGTNTNYADSVKGRFTISRDNAKNTVYLQMNSLKPEDTAVYYCAAASPGTYAFRYWGQGTQVTVSS

SEQ ID NO: 19040 - protein, 118 aa, Artificial Sequence
  Chemically Synthesized
QVQLQESGGGLVQAGGSLRLSCAASGYISSVFPMGWYRQAPGKEREFVASIATGANTNYADSVKGRFTISRDNAKNTVYLQMNSLKPEDTAVYYCAVIVLDDGYHYYWGQGTQVTVSS

SEQ ID NO: 19041 - protein, 121 aa, Artificial Sequence
  Chemically Synthesized
QVQLQESGGGLVQAGGSLRLSCAASGSISPGGEMGWYRQAPGKERELVAAINAGSTTNYADSVKGRFTISRDNAKNTVYLQMNSLKPEDTAVYYCAAYDYPGPADSLLMYWGQGTQVTVSS

SEQ ID NO: 19042 - protein, 122 aa, Artificial Sequence
  Chemically Synthesized
QVQLQESGGGLVQAGGSLRLSCAASGTIFYDIGMGWYRQAPGKEREFVAAINHGSTTYYADSVKGRFTISRDNAKNTVYLQMNSLKPEDTAVYYCAANYLPSWFGSTDHYYWGQGTQVTVSS

SEQ ID NO: 19043 - protein, 115 aa, Artificial Sequence
  Chemically Synthesized
QVQLQESGGGLVQAGGSLRLSCAASGTIFAPYWMGWYRQAPGKEREFVATIGRGTITNYADSVKGRFTISRDNAKNTVYLQMNSLKPEDTAVYYCAVCRADHGYWGQGTQVTVSS

SEQ ID NO: 19044 - protein, 122 aa, Artificial Sequence
  Chemically Synthesized
QVQLQESGGGLVQAGGSLRLSCAASGSIFEPYHMGWYRQAPGKEREFVATIARGTTTNYADSVKGRFTISRDNAKNTVYLQMNSLKPEDTAVYYCAVRSYYIDWKWDPYSYWGQGTQVTVSS

SEQ ID NO: 19045 - protein, 118 aa, Artificial Sequence
  Chemically Synthesized
QVQLQESGGGLVQAGGSLRLSCAASGSISKDGFMGWYRQAPGKERELVAAIGFGSTTYYADSVKGRFTISRDNAKNTVYLQMNSLKPEDTAVYYCAAIYIPFFPHYYWGQGTQVTVSS

SEQ ID NO: 19046 - protein, 121 aa, Artificial Sequence
  Chemically Synthesized
QVQLQESGGGLVQAGGSLRLSCAASGSISPFNGMGWYRQAPGKERELVATIGPGGNTNYADSVKGRFTISRDNAKNTVYLQMNSLKPEDTAVYYCAATFRTVRTLSSIIYWGQGTQVTVSS

SEQ ID NO: 19047 - protein, 126 aa, Artificial Sequence
  Chemically Synthesized
QVQLQESGGGLVQAGGSLRLSCAASGTIFVGRTMGWYRQAPGKEREFVATITTGASTYYADSVKGRFTISRDNAKNTVYLQMNSLKPEDTAVYYCAVQYPDDRYPWQYIDAYLYYWGQGTQVTVSS

SEQ ID NO: 19048 - protein, 118 aa, Artificial Sequence
  Chemically Synthesized
QVQLQESGGGLVQAGGSLRLSCAASGYISDYTIMGWYRQAPGKEREFVASISDGTSTYYADSVKGRFTISRDNAKNTVYLQMNSLKPEDTAVYYCAVYYYVDGHFYYWGQGTQVTVSS

SEQ ID NO: 19049 - protein, 110 aa, Artificial Sequence
  Chemically Synthesized
QVQLQESGGGLVQAGGSLRLSCAASGTIFTRVDMGWYRQAPGKERELVASIDWGGTTNYADSVKGRFTISRDNAKNTVYLQMNSLKPEDTAVYYCAAQYWGQGTQVTVSS

SEQ ID NO: 19050 - protein, 126 aa, Artificial Sequence
  Chemically Synthesized
QVQLQESGGGLVQAGGSLRLSCAASGNISRRSAMGWYRQAPGKEREFVATISHGGTTNYADSVKGRFTISRDNAKNTVYLQMNSLKPEDTAVYYCAAVYYDDRKFSPPPYGYYYYWGQGTQVTVSS

SEQ ID NO: 19051 - protein, 123 aa, Artificial Sequence
  Chemically Synthesized
QVQLQESGGGLVQAGGSLRLSCAASGNISRGTPMGWYRQAPGKEREFVAGIAQGGITNYADSVKGRFTISRDNAKNTVYLQMNSLKPEDTAVYYCAVDDQIVRAYQAYYHWYWGQGTQVTVSS

SEQ ID NO: 19052 - protein, 122 aa, Artificial Sequence
  Chemically Synthesized
QVQLQESGGGLVQAGGSLRLSCAASGTISSRSYMGWYRQAPGKERELVAAISDGGNTYYADSVKGRFTISRDNAKNTVYLQMNSLKPEDTAVYYCAVDGSSANNVIPPLWYWGQGTQVTVSS

SEQ ID NO: 19053 - protein, 121 aa, Artificial Sequence
  Chemically Synthesized
QVQLQESGGGLVQAGGSLRLSCAASGSISVDYLMGWYRQAPGKERELVATIATGAITNYADSVKGRFTISRDNAKNTVYLQMNSLKPEDTAVYYCAVYSPYVISDDDDYYWGQGTQVTVSS

SEQ ID NO: 19054 - protein, 122 aa, Artificial Sequence
  Chemically Synthesized
QVQLQESGGGLVQAGGSLRLSCAASGTIFVRTSMGWYRQAPGKERELVAAIADGGNTNYADSVKGRFTISRDNAKNTVYLQMNSLKPEDTAVYYCAVGRGGRSGGIVPYDYWGQGTQVTVSS

SEQ ID NO: 19055 - protein, 118 aa, Artificial Sequence
  Chemically Synthesized
QVQLQESGGGLVQAGGSLRLSCAASGNISAAHYMGWYRQAPGKEREFVASISSGGNTYYADSVKGRFTISRDNAKNTVYLQMNSLKPEDTAVYYCAVWDRETTYHAYWGQGTQVTVSS

SEQ ID NO: 19056 - protein, 118 aa, Artificial Sequence
  Chemically Synthesized
QVQLQESGGGLVQAGGSLRLSCAASGTIFTSRYMGWYRQAPGKEREFVAAITDGGITNYADSVKGRFTISRDNAKNTVYLQMNSLKPEDTAVYYCAVLVRDAYWFYYWGQGTQVTVSS

SEQ ID NO: 19057 - protein, 118 aa, Artificial Sequence
  Chemically Synthesized
QVQLQESGGGLVQAGGSLRLSCAASGTISVLFEMGWYRQAPGKERELVATITRGAITYYADSVKGRFTISRDNAKNTVYLQMNSLKPEDTAVYYCAVVAPYEIYHDYWGQGTQVTVSS

SEQ ID NO: 19058 - protein, 118 aa, Artificial Sequence
  Chemically Synthesized
QVQLQESGGGLVQAGGSLRLSCAASGYISGIREMGWYRQAPGKERELVATIGVGANTYYADSVKGRFTISRDNAKNTVYLQMNSLKPEDTAVYYCAAKLDLAEVHGYWGQGTQVTVSS

SEQ ID NO: 19059 - protein, 116 aa, Artificial Sequence
  Chemically Synthesized
QVQLQESGGGLVQAGGSLRLSCAASGSISRYVGMGWYRQAPGKEREFVASIASGATTYYADSVKGRFTISRDNAKNTVYLQMNSLKPEDTAVYYCAAIQGSYHYYWGQGTQVTVSS

SEQ ID NO: 19060 - protein, 116 aa, Artificial Sequence
  Chemically Synthesized
QVQLQESGGGLVQAGGSLRLSCAASGNISASAVMGWYRQAPGKEREFVAAIGRGSSTYYADSVKGRFTISRDNAKNTVYLQMNSLKPEDTAVYYCAALYTRSHYYWGQGTQVTVSS

SEQ ID NO: 19061 - protein, 124 aa, Artificial Sequence
  Chemically Synthesized
QVQLQESGGGLVQAGGSLRLSCAASGNIFSDYQMGWYRQAPGKERELVATITYGTSTYADSVKGRFTISRDNAKNTVYLQMNSLKPEDTAVYYCAAVYSWTKGHGYSPSRYDYWGQGTQVTVSS

SEQ ID NO: 19062 - protein, 118 aa, Artificial Sequence
  Chemically Synthesized
QVQLQESGGGLVQAGGSLRLSCAASGTISLYTTMGWYRQAPGKEREFVATITGGGSTYYADSVKGRFTISRDNAKNTVYLQMNSLKPEDTAVYYCAVGLLLSDTLYYWGQGTQVTVSS

SEQ ID NO: 19063 - protein, 122 aa, Artificial Sequence
  Chemically Synthesized
QVQLQESGGGLVQAGGSLRLSCAASGSISYYPDMGWYRQAPGKERELVAAISDGASTYYADSVKGRFTISRDNAKNTVYLQMNSLKPEDTAVYYCAAHYYVTTTYYQQHGYWGQGTQVTVSS

SEQ ID NO: 19064 - protein, 126 aa, Artificial Sequence
  Chemically Synthesized
QVQLQESGGGLVQAGGSLRLSCAASGNISDSVYMGWYRQAPGKERELVATIAYGTTTNYADSVKGRFTISRDNAKNTVYLQMNSLKPEDTAVYYCAVDYLKPDFNYVDNQPTSWYWGQGTQVTVSS

SEQ ID NO: 19065 - protein, 121 aa, Artificial Sequence
  Chemically Synthesized
QVQLQESGGGLVQAGGSLRLSCAASGYISTGYVMGWYRQAPGKEREFVASIGAGANTNYADSVKGRFTISRDNAKNTVYLQMNSLKPEDTAVYYCAVVEYRTGDYAWHYYWGQGTQVTVSS

SEQ ID NO: 19066 - protein, 108 aa, Artificial Sequence
  Chemically Synthesized
QVQLQESGGGLVQAGGSLRLSCAASGSISRDARMGWYRQAPGKERELVAYADSVKGRFTISRDNAKNTVYLQMNSLKPEDTAVYYCAVNRYWYVSMYWGQGTQVTVSS

SEQ ID NO: 19067 - protein, 118 aa, Artificial Sequence
  Chemically Synthesized
QVQLQESGGGLVQAGGSLRLSCAASGTIFRAVYMGWYRQAPGKERELVAGIAYGGSTYYADSVKGRFTISRDNAKNTVYLQMNSLKPEDTAVYYCAAGADSTDPHYYWGQGTQVTVSS

SEQ ID NO: 19068 - protein, 118 aa, Artificial Sequence
  Chemically Synthesized
QVQLQESGGGLVQAGGSLRLSCAASGTISGDWGMGWYRQAPGKEREFVASISSGANTNYADSVKGRFTISRDNAKNTVYLQMNSLKPEDTAVYYCAAVTYTNSYHGYWGQGTQVTVSS

SEQ ID NO: 19069 - protein, 112 aa, Artificial Sequence
  Chemically Synthesized
QVQLQESGGGLVQAGGSLRLSCAASGSIFGSGVMGWYRQAPGKEREFVAAISSGASTYYADSVKGRFTISRDNAKNTVYLQMNSLKPEDTAVYYCAADNLYWGQGTQVTVSS

SEQ ID NO: 19070 - protein, 118 aa, Artificial Sequence
  Chemically Synthesized
QVQLQESGGGLVQAGGSLRLSCAASGNISAYQDMGWYRQAPGKEREFVAAIDIGASTNYADSVKGRFTISRDNAKNTVYLQMNSLKPEDTAVYYCAAVYYLRGYHFYWGQGTQVTVSS

SEQ ID NO: 19071 - protein, 118 aa, Artificial Sequence
  Chemically Synthesized
QVQLQESGGGLVQAGGSLRLSCAASGSIFGTLAMGWYRQAPGKEREFVATIALGGNTYYADSVKGRFTISRDNAKNTVYLQMNSLKPEDTAVYYCAVISYVNHQYYYWGQGTQVTVSS

SEQ ID NO: 19072 - protein, 118 aa, Artificial Sequence
  Chemically Synthesized
QVQLQESGGGLVQAGGSLRLSCAASGNISSDYAMGWYRQAPGKERELVAGIGTGGNTNYADSVKGRFTISRDNAKNTVYLQMNSLKPEDTAVYYCAATHSVPPYLYYWGQGTQVTVSS

SEQ ID NO: 19073 - protein, 113 aa, Artificial Sequence
  Chemically Synthesized
QVQLQESGGGLVQAGGSLRLSCAASGYISSTTMGWYRQAPGKEREFVASINRGGTTNYADSVKGRFTISRDNAKNTVYLQMNSLKPEDTAVYYCAATLGDTYWGQGTQVTVSS

SEQ ID NO: 19074 - protein, 121 aa, Artificial Sequence
  Chemically Synthesized
QVQLQESGGGLVQAGGSLRLSCAASGYISSEVYMGWYRQAPGKERELVAGIDFGATTYYADSVKGRFTISRDNAKNTVYLQMNSLKPEDTAVYYCAVRYSTVVILLTNMYWGQGTQVTVSS

SEQ ID NO: 19075 - protein, 122 aa, Artificial Sequence
  Chemically Synthesized
QVQLQESGGGLVQAGGSLRLSCAASGTISLSRYMGWYRQAPGKEREFVASIGRGASTNYADSVKGRFTISRDNAKNTVYLQMNSLKPEDTAVYYCAAVASKPAYASGYYYYWGQGTQVTVSS

SEQ ID NO: 19076 - protein, 118 aa, Artificial Sequence
  Chemically Synthesized
QVQLQESGGGLVQAGGSLRLSCAASGTISGQTYMGWYRQAPGKERELVASINAGTNTNYADSVKGRFTISRDNAKNTVYLQMNSLKPEDTAVYYCAANWSTAYHLYYWGQGTQVTVSS

SEQ ID NO: 19077 - protein, 117 aa, Artificial Sequence
  Chemically Synthesized
QVQLQESGGGLVQAGGSLRLSCAASGYIFQLTYMGWYRQAPGKERELVASMITVVLPYADSVKGRFTISRDNAKNTVYLQMNSLKPEDTAVYYCAVYRHGRVSLRYWGQGTQVTVSS

SEQ ID NO: 19078 - protein, 118 aa, Artificial Sequence
  Chemically Synthesized
QVQLQESGGGLVQAGGSLRLSCAASGSIFDAYRMGWYRQAPGKEREFVAAITYGASTYYADSVKGRFTISRDNAKNTVYLQMNSLKPEDTAVYYCAVVWYDYGYFYYWGQGTQVTVSS

SEQ ID NO: 19079 - protein, 117 aa, Artificial Sequence
  Chemically Synthesized
QVQLQESGGGLVQAGGSLRLSCAASGYISYSDAMGWYRQAPGKEREFVATIAHGTTTYYADSVKGRFTISRDNAKNTVYLQMNSLKPEDTAVYYCAVWDWYYNSLYWGQGTQVTVSS

SEQ ID NO: 19080 - protein, 120 aa, Artificial Sequence
  Chemically Synthesized
QVQLQESGGGLVQAGGSLRLSCAASGTILKLLMGWYRQAPGKERELVAAITYGTNTNYADSVKGRFTISRDNAKNTVYLQMNSLKPEDTAVYYCAVNGDGDSLTTLSIYWGQGTQVTVSS

SEQ ID NO: 19081 - protein, 122 aa, Artificial Sequence
  Chemically Synthesized
QVQLQESGGGLVQAGGSLRLSCAASGTIFRRGRMGWYRQAPGKEREFVAGITNGAITYYADSVKGRFTISRDNAKNTVYLQMNSLKPEDTAVYYCAAVRLGDDRPPLTYFYWGQGTQVTVSS

SEQ ID NO: 19082 - protein, 118 aa, Artificial Sequence
  Chemically Synthesized
QVQLQESGGGLVQAGGSLRLSCAASGTIFGPDDMGWYRQAPGKEREFVATIGVGGITNYADSVKGRFTISRDNAKNTVYLQMNSLKPEDTAVYYCAVTYYGLQAYDYWGQGTQVTVSS

SEQ ID NO: 19083 - protein, 125 aa, Artificial Sequence
  Chemically Synthesized
QVQLQESGGGLVQAGGSLRLSCAASGNISWYRAMGWYRQAPGKEREFVASIASGGSTYYADSVKGRFTISRDNAKNTVYLQMNSLKPEDTAVYYCAVVIWYTRPYDHGRAYHYYWGQGTQVTVSS

SEQ ID NO: 19084 - protein, 118 aa, Artificial Sequence
  Chemically Synthesized
QVQLQESGGGLVQAGGSLRLSCAASGTIFNYRGMGWYRQAPGKEREFVAAISIGGNTYYADSVKGRFTISRDNAKNTVYLQMNSLKPEDTAVYYCAVEFYGGAYLQYWGQGTQVTVSS

SEQ ID NO: 19085 - protein, 122 aa, Artificial Sequence
  Chemically Synthesized
QVQLQESGGGLVQAGGSLRLSCAASGYISENQYMGWYRQAPGKEREFVAAIAAGGTTNYADSVKGRFTISRDNAKNTVYLQMNSLKPEDTAVYYCAALPDDIYVTTNGYGYWGQGTQVTVSS

SEQ ID NO: 19086 - protein, 113 aa, Artificial Sequence
  Chemically Synthesized
QVQLQESGGGLVQAGGSLRLSCAASGSISFRLFMGWYRQAPGKEREFVASISIGGSTNYADSVKGRFTISRDNAKNTVYLQMNSLKPEDTAVYYCAAGQGYYWGQGTQVTVSS

SEQ ID NO: 19087 - protein, 118 aa, Artificial Sequence
  Chemically Synthesized
QVQLQESGGGLVQAGGSLRLSCAASGTISGTIFMGWYRQAPGKEREFVASIAYGGSTNYADSVKGRFTISRDNAKNTVYLQMNSLKPEDTAVYYCAVLWYYGQYHYYWGQGTQVTVSS

SEQ ID NO: 19088 - protein, 121 aa, Artificial Sequence
  Chemically Synthesized
QVQLQESGGGLVQAGGSLRLSCAASGNISVGSVMGWYRQAPGKEREFVATINLGATTNYADSVKGRFTISRDNAKNTVYLQMNSLKPEDTAVYYCAVHGWRNPSTYNPHYWGQGTQVTVSS

SEQ ID NO: 19089 - protein, 122 aa, Artificial Sequence
  Chemically Synthesized
QVQLQESGGGLVQAGGSLRLSCAASGTISALAGMGWYRQAPGKEREFVAAISGGTITNYADSVKGRFTISRDNAKNTVYLQMNSLKPEDTAVYYCAAVYWSDGWPRGVHYYWGQGTQVTVSS

SEQ ID NO: 19090 - protein, 126 aa, Artificial Sequence
  Chemically Synthesized
QVQLQESGGGLVQAGGSLRLSCAASGYISVVDYMGWYRQAPGKERELVASITPGGNTNYADSVKGRFTISRDNAKNTVYLQMNSLKPEDTAVYYCAVDNFDQGTSAWSSLRSALYWGQGTQVTVSS

SEQ ID NO: 19091 - protein, 121 aa, Artificial Sequence
  Chemically Synthesized
QVQLQESGGGLVQAGGSLRLSCAASGTISFYDNMGWYRQAPGKEREFVAAINAGGTTYADSVKGRFTISRDNAKNTVYLQMNSLKPEDTAVYYCAARDYEADVAEYRHPYWGQGTQVTVSS

SEQ ID NO: 19092 - protein, 122 aa, Artificial Sequence
  Chemically Synthesized
QVQLQESGGGLVQAGGSLRLSCAASGNIFDYVLMGWYRQAPGKEREFVASIANGTITNYADSVKGRFTISRDNAKNTVYLQMNSLKPEDTAVYYCAARRAIPGEVAQAYGYWGQGTQVTVSS

SEQ ID NO: 19093 - protein, 122 aa, Artificial Sequence
  Chemically Synthesized
QVQLQESGGGLVQAGGSLRLSCAASGYIFGPSDMGWYRQAPGKEREFVATITVGSSTNYADSVKGRFTISRDNAKNTVYLQMNSLKPEDTAVYYCAALAYVTRSDYVQHDYWGQGTQVTVSS

SEQ ID NO: 19094 - protein, 122 aa, Artificial Sequence
  Chemically Synthesized
QVQLQESGGGLVQAGGSLRLSCAASGNISYYDDMGWYRQAPGKEREFVATIDAGGNTYYADSVKGRFTISRDNAKNTVYLQMNSLKPEDTAVYYCAVTGDYAYVALTTFHYWGQGTQVTVSS

SEQ ID NO: 19095 - protein, 118 aa, Artificial Sequence
  Chemically Synthesized
QVQLQESGGGLVQAGGSLRLSCAASGNISHVYTMGWYRQAPGKERELVAAIARGTSTYYADSVKGRFTISRDNAKNTVYLQMNSLKPEDTAVYYCAAQYTYDYLYLYWGQGTQVTVSS

SEQ ID NO: 19096 - protein, 118 aa, Artificial Sequence
  Chemically Synthesized
QVQLQESGGGLVQAGGSLRLSCAASGTIFGALSMGWYRQAPGKERELVAGIAAGGSTNYADSVKGRFTISRDNAKNTVYLQMNSLKPEDTAVYYCAAIEFTYRWHYYWGQGTQVTVSS

SEQ ID NO: 19097 - protein, 118 aa, Artificial Sequence
  Chemically Synthesized
QVQLQESGGGLVQAGGSLRLSCAASGNISQRPRMGWYRQAPGKEREFVAGIDEGSSTYYADSVKGRFTISRDNAKNTVYLQMNSLKPEDTAVYYCAVIYYTYTYHPYWGQGTQVTVSS

SEQ ID NO: 19098 - protein, 118 aa, Artificial Sequence
  Chemically Synthesized
QVQLQESGGGLVQAGGSLRLSCAASGTISGGLRMGWYRQAPGKEREFVAAIGPGGTTNYADSVKGRFTISRDNAKNTVYLQMNSLKPEDTAVYYCAAIASAEGWHSYWGQGTQVTVSS

SEQ ID NO: 19099 - protein, 118 aa, Artificial Sequence
  Chemically Synthesized
QVQLQESGGGLVQAGGSLRLSCAASGTISYSYSMGWYRQAPGKEREFVAAIAWGGTTNYADSVKGRFTISRDNAKNTVYLQMNSLKPEDTAVYYCAVYPRVINRHRYWGQGTQVTVSS

SEQ ID NO: 19100 - protein, 118 aa, Artificial Sequence
  Chemically Synthesized
QVQLQESGGGLVQAGGSLRLSCAASGNIFTGAIMGWYRQAPGKEREFVAGIASGAITNYADSVKGRFTISRDNAKNTVYLQMNSLKPEDTAVYYCAAVARGRQYYAYWGQGTQVTVSS

SEQ ID NO: 19101 - protein, 118 aa, Artificial Sequence
  Chemically Synthesized
QVQLQESGGGLVQAGGSLRLSCAASGYISYRTYMGWYRQAPGKEREFVAAISNGSSTNYADSVKGRFTISRDNAKNTVYLQMNSLKPEDTAVYYCAAVGYESQYYYYWGQGTQVTVSS

SEQ ID NO: 19102 - protein, 122 aa, Artificial Sequence
  Chemically Synthesized
QVQLQESGGGLVQAGGSLRLSCAASGSIFRDYVMGWYRQAPGKEREFVAGITRGGTTNYADSVKGRFTISRDNAKNTVYLQMNSLKPEDTAVYYCAAVYRYGNWYSRLHYYWGQGTQVTVSS

SEQ ID NO: 19103 - protein, 118 aa, Artificial Sequence
  Chemically Synthesized
QVQLQESGGGLVQAGGSLRLSCAASGSISTLAYMGWYRQAPGKERELVATIGDGATTNYADSVKGRFTISRDNAKNTVYLQMNSLKPEDTAVYYCAVVYEAWQALGYWGQGTQVTVSS

SEQ ID NO: 19104 - protein, 117 aa, Artificial Sequence
  Chemically Synthesized
QVQLQESGGGLVQAGGSLRLSCAASGTISDSFMGWYRQAPGKEREFVAGIGYGASTYYADSVKGRFTISRDNAKNTVYLQMNSLKPEDTAVYYCAVVTIYSVWHDYWGQGTQVTVSS

SEQ ID NO: 19105 - protein, 117 aa, Artificial Sequence
  Chemically Synthesized
QVQLQESGGGLVQAGGSLRLSCAASGNISRGHLMGWYRQAPGKERELVAAIDDGGNTYYADSVKGRFTISRDNAKNTVYLQMNSLKPEDTAVYYCAVYSVLTLCLYWGQGTQVTVSS

SEQ ID NO: 19106 - protein, 117 aa, Artificial Sequence
  Chemically Synthesized
QVQLQESGGGLVQAGGSLRLSCAASGSISTSLMGWYRQAPGKERELVAGIATGGITNYADSVKGRFTISRDNAKNTVYLQMNSLKPEDTAVYYCAAQSLYTWTHEYWGQGTQVTVSS

SEQ ID NO: 19107 - protein, 116 aa, Artificial Sequence
  Chemically Synthesized
QVQLQESGGGLVQAGGSLRLSCAASGSISGGTYMGWYRQAPGKERELVAGIGLGTNTNYADSVKGRFTISRDNAKNTVYLQMNSLKPEDTAVYYCAVDLLHAYWYWGQGTQVTVSS

SEQ ID NO: 19108 - protein, 126 aa, Artificial Sequence
  Chemically Synthesized
QVQLQESGGGLVQAGGSLRLSCAASGTIFVPDVMGWYRQAPGKERELVAAIDTGSITNYADSVKGRFTISRDNAKNTVYLQMNSLKPEDTAVYYCAAYETLIGSGAGDRGRLYKYWGQGTQVTVSS

SEQ ID NO: 19109 - protein, 125 aa, Artificial Sequence
  Chemically Synthesized
QVQLQESGGGLVQAGGSLRLSCAASGSISSNSMGWYRQAPGKEREFVAGIGDGASTYYADSVKGRFTISRDNAKNTVYLQMNSLKPEDTAVYYCAVSRRLGDATYGDTGEVYYYWGQGTQVTVSS

SEQ ID NO: 19110 - protein, 118 aa, Artificial Sequence
  Chemically Synthesized
QVQLQESGGGLVQAGGSLRLSCAASGTISYIYNMGWYRQAPGKERELVAGIAPGGTTNYADSVKGRFTISRDNAKNTVYLQMNSLKPEDTAVYYCAAYQAYEIDLRYWGQGTQVTVSS

SEQ ID NO: 19111 - protein, 118 aa, Artificial Sequence
  Chemically Synthesized
QVQLQESGGGLVQAGGSLRLSCAASGYIFQDEPMGWYRQAPGKERELVASITIGGSTNYADSVKGRFTISRDNAKNTVYLQMNSLKPEDTAVYYCAAGAYSNSNHQYWGQGTQVTVSS

SEQ ID NO: 19112 - protein, 118 aa, Artificial Sequence
  Chemically Synthesized
QVQLQESGGGLVQAGGSLRLSCAASGNISGLASMGWYRQAPGKEREFVATIDRGTNTNYADSVKGRFTISRDNAKNTVYLQMNSLKPEDTAVYYCAANDEDGDAYEYWGQGTQVTVSS

SEQ ID NO: 19113 - protein, 118 aa, Artificial Sequence
  Chemically Synthesized
QVQLQESGGGLVQAGGSLRLSCAASGTISGWYYMGWYRQAPGKEREFVAAIGNGTITYYADSVKGRFTISRDNAKNTVYLQMNSLKPEDTAVYYCAANLIYQRGYDYWGQGTQVTVSS

SEQ ID NO: 19114 - protein, 122 aa, Artificial Sequence
  Chemically Synthesized
QVQLQESGGGLVQAGGSLRLSCAASGNISRQQYMGWYRQAPGKERELVASIARGTTTNYADSVKGRFTISRDNAKNTVYLQMNSLKPEDTAVYYCAAIPVQDPYDGDLHAYWGQGTQVTVSS

SEQ ID NO: 19115 - protein, 118 aa, Artificial Sequence
  Chemically Synthesized
QVQLQESGGGLVQAGGSLRLSCAASGSISGREYMGWYRQAPGKEREFVAGIDGGGTTNYADSVKGRFTISRDNAKNTVYLQMNSLKPEDTAVYYCAVQTYYYKIFTYWGQGTQVTVSS

SEQ ID NO: 19116 - protein, 118 aa, Artificial Sequence
  Chemically Synthesized
QVQLQESGGGLVQAGGSLRLSCAASGNISYRVRMGWYRQAPGKEREFVATIGKGTSTYYADSVKGRFTISRDNAKNTVYLQMNSLKPEDTAVYYCAVDARDFYYLTYWGQGTQVTVSS

SEQ ID NO: 19117 - protein, 118 aa, Artificial Sequence
  Chemically Synthesized
QVQLQESGGGLVQAGGSLRLSCAASGNIFVYYFMGWYRQAPGKEREFVASINTGATTNYADSVKGRFTISRDNAKNTVYLQMNSLKPEDTAVYYCAVTTYARDRYPYWGQGTQVTVSS

SEQ ID NO: 19118 - protein, 118 aa, Artificial Sequence
  Chemically Synthesized
QVQLQESGGGLVQAGGSLRLSCAASGTISGPYLMGWYRQAPGKERELVAGIARGTTTYYADSVKGRFTISRDNAKNTVYLQMNSLKPEDTAVYYCAAYQHDFSKLYYWGQGTQVTVSS

SEQ ID NO: 19119 - protein, 120 aa, Artificial Sequence
  Chemically Synthesized
QVQLQESGGGLVQAGGSLRLSCAASGYISPYYMGWYRQAPGKERELVAGIAPGGSTNYADSVKGRFTISRDNAKNTVYLQMNSLKPEDTAVYYCAAVHYYGVYVPDSLYWGQGTQVTVSS

SEQ ID NO: 19120 - protein, 111 aa, Artificial Sequence
  Chemically Synthesized
QVQLQESGGGLVQAGGSLRLSCAASGNISDGNIMGWYRQAPGKERELVASIGDGSSTYYADSVKGRFTISRDNAKNTVYLQMNSLKPEDTAVYYCAVHAYWGQGTQVTVSS

SEQ ID NO: 19121 - protein, 126 aa, Artificial Sequence
  Chemically Synthesized
QVQLQESGGGLVQAGGSLRLSCAASGNISSSNDMGWYRQAPGKERELVAAIDYGTSTNYADSVKGRFTISRDNAKNTVYLQMNSLKPEDTAVYYCAAAADYEFGYDPGYDDYHAYWGQGTQVTVSS

SEQ ID NO: 19122 - protein, 126 aa, Artificial Sequence
  Chemically Synthesized
QVQLQESGGGLVQAGGSLRLSCAASGTISDYPFMGWYRQAPGKERELVASIDDGAITNYADSVKGRFTISRDNAKNTVYLQMNSLKPEDTAVYYCAVILPRWEWGYVGYRSIFQYWGQGTQVTVSS

SEQ ID NO: 19123 - protein, 126 aa, Artificial Sequence
  Chemically Synthesized
QVQLQESGGGLVQAGGSLRLSCAASGNIFAWSYMGWYRQAPGKEREFVAAIAVGASTNYADSVKGRFTISRDNAKNTVYLQMNSLKPEDTAVYYCAVVISSWYGDRAERYRLLYYWGQGTQVTVSS

SEQ ID NO: 19124 - protein, 118 aa, Artificial Sequence
  Chemically Synthesized
QVQLQESGGGLVQAGGSLRLSCAASGNISGDDDMGWYRQAPGKERELVATISAGAITYYADSVKGRFTISRDNAKNTVYLQMNSLKPEDTAVYYCAADFLLDSGYPYWGQGTQVTVSS

SEQ ID NO: 19125 - protein, 117 aa, Artificial Sequence
  Chemically Synthesized
QVQLQESGGGLVQAGGSLRLSCAASGIFLVGLMGWYRQAPGKEREFVAGITSGASTYYADSVKGRFTISRDNAKNTVYLQMNSLKPEDTAVYYCAVDYDYYSAFRYWGQGTQVTVSS

SEQ ID NO: 19126 - protein, 126 aa, Artificial Sequence
  Chemically Synthesized
QVQLQESGGGLVQAGGSLRLSCAASGNISYSLSMGWYRQAPGKERELVATIGYGGNTNYADSVKGRFTISRDNAKNTVYLQMNSLKPEDTAVYYCAVGDDTVDSSDLALVYAYSYWGQGTQVTVSS

SEQ ID NO: 19127 - protein, 118 aa, Artificial Sequence
  Chemically Synthesized
QVQLQESGGGLVQAGGSLRLSCAASGYISAYSLMGWYRQAPGKERELVASISHGGITNYADSVKGRFTISRDNAKNTVYLQMNSLKPEDTAVYYCAAIHPVGSLFLYWGQGTQVTVSS

SEQ ID NO: 19128 - protein, 117 aa, Artificial Sequence
  Chemically Synthesized
QVQLQESGGGLVQAGGSLRLSCAASGTIFGSGMGWYRQAPGKERELVAAIDDGTITNYADSVKGRFTISRDNAKNTVYLQMNSLKPEDTAVYYCAAGVRLPARHGYWGQGTQVTVSS

SEQ ID NO: 19129 - protein, 117 aa, Artificial Sequence
  Chemically Synthesized
QVQLQESGGGLVQAGGSLRLSCAASGNISGTRGMGWYRQAPGKERELVASITFGGNTNYADSVKGRFTISRDNAKNTVYLQMNSLKPEDTAVYYCAVSYTITRHAYWGQGTQVTVSS

SEQ ID NO: 19130 - protein, 117 aa, Artificial Sequence
  Chemically Synthesized
QVQLQESGGGLVQAGGSLRLSCAASGYISGQAMGWYRQAPGKEREFVAAITYGGTTYYADSVKGRFTISRDNAKNTVYLQMNSLKPEDTAVYYCAAGDYQRDNLVYWGQGTQVTVSS

SEQ ID NO: 19131 - protein, 125 aa, Artificial Sequence
  Chemically Synthesized
QVQLQESGGGLVQAGGSLRLSCAASGTISDVVAMGWYRQAPGKEREFVAGIAYGSSTNYADSVKGRFTISRDNAKNTVYLQMNSLKPEDTAVYYCAVNQLDYQQEGYFDSTVYYWGQGTQVTVSS

SEQ ID NO: 19132 - protein, 120 aa, Artificial Sequence
  Chemically Synthesized
QVQLQESGGGLVQAGGSLRLSCAASGNISNWGGMGWYRQAPGKERELVASIDGGSITYYADSVKGRFTISRDNAKNTVYLQMNSLKPEDTAVYYCAAYLYPFYADYHGYWGQGTQVTVSS

SEQ ID NO: 19133 - protein, 110 aa, Artificial Sequence
  Chemically Synthesized
QVQLQESGGGLVQAGGSLRLSCAASGYIFQPYGMGWYRQAPGKERELVAGITYGTTTNYADSVKGRFTISRDNAKNTVYLQMNSLKPEDTAVYYCAAEYWGQGTQVTVSS

SEQ ID NO: 19134 - protein, 122 aa, Artificial Sequence
  Chemically Synthesized
QVQLQESGGGLVQAGGSLRLSCAASGYISAYPYMGWYRQAPGKEREFVAGINWGGSTYYADSVKGRFTISRDNAKNTVYLQMNSLKPEDTAVYYCAANGFRYRTGYAYHLYWGQGTQVTVSS

SEQ ID NO: 19135 - protein, 118 aa, Artificial Sequence
  Chemically Synthesized
QVQLQESGGGLVQAGGSLRLSCAASGNISPGYVMGWYRQAPGKEREFVAAINKGAITNYADSVKGRFTISRDNAKNTVYLQMNSLKPEDTAVYYCAVNYYVWDGYDYWGQGTQVTVSS

SEQ ID NO: 19136 - protein, 118 aa, Artificial Sequence
  Chemically Synthesized
QVQLQESGGGLVQAGGSLRLSCAASGSISNSYGMGWYRQAPGKEREFVATIGAGSITNYADSVKGRFTISRDNAKNTVYLQMNSLKPEDTAVYYCAVRYGDDWSHAYWGQGTQVTVSS

SEQ ID NO: 19137 - protein, 118 aa, Artificial Sequence
  Chemically Synthesized
QVQLQESGGGLVQAGGSLRLSCAASGTIFYNYNMGWYRQAPGKERELVASISPGGSTYYADSVKGRFTISRDNAKNTVYLQMNSLKPEDTAVYYCAVVYQYSVWLDYWGQGTQVTVSS

SEQ ID NO: 19138 - protein, 122 aa, Artificial Sequence
  Chemically Synthesized
QVQLQESGGGLVQAGGSLRLSCAASGYISNYLTMGWYRQAPGKEREFVASIARGGTTYYADSVKGRFTISRDNAKNTVYLQMNSLKPEDTAVYYCAAYYYGRTQNRRGYAYWGQGTQVTVSS

SEQ ID NO: 19139 - protein, 118 aa, Artificial Sequence
  Chemically Synthesized
QVQLQESGGGLVQAGGSLRLSCAASGNIFYRDTMGWYRQAPGKERELVAAISDGGTTYYADSVKGRFTISRDNAKNTVYLQMNSLKPEDTAVYYCAVYGYGGTTHEYWGQGTQVTVSS

SEQ ID NO: 19140 - protein, 118 aa, Artificial Sequence
  Chemically Synthesized
QVQLQESGGGLVQAGGSLRLSCAASGYIFWPLYMGWYRQAPGKEREFVAAISSGATTNYADSVKGRFTISRDNAKNTVYLQMNSLKPEDTAVYYCAAYIATTTDHRYWGQGTQVTVSS

SEQ ID NO: 19141 - protein, 118 aa, Artificial Sequence
  Chemically Synthesized
QVQLQESGGGLVQAGGSLRLSCAASGTIFGYRVMGWYRQAPGKEREFVATIDDGSNTYYADSVKGRFTISRDNAKNTVYLQMNSLKPEDTAVYYCAVATDRDYVHRYWGQGTQVTVSS

SEQ ID NO: 19142 - protein, 111 aa, Artificial Sequence
  Chemically Synthesized
QVQLQESGGGLVQAGGSLRLSCAASGTIFPYLSMGWYRQAPGKERELVASIADGGNTYYADSVKGRFTISRDNAKNTVYLQMNSLKPEDTAVYYCAATFYWGQGTQVTVSS

SEQ ID NO: 19143 - protein, 118 aa, Artificial Sequence
  Chemically Synthesized
QVQLQESGGGLVQAGGSLRLSCAASGYISPNVGMGWYRQAPGKEREFVATIAYGASTNYADSVKGRFTISRDNAKNTVYLQMNSLKPEDTAVYYCAVKPQGDVYHVYWGQGTQVTVSS

SEQ ID NO: 19144 - protein, 118 aa, Artificial Sequence
  Chemically Synthesized
QVQLQESGGGLVQAGGSLRLSCAASGSIFSSTAMGWYRQAPGKEREFVAGIDLGASTYYADSVKGRFTISRDNAKNTVYLQMNSLKPEDTAVYYCAAGYSPYLVYPYWGQGTQVTVSS

SEQ ID NO: 19145 - protein, 122 aa, Artificial Sequence
  Chemically Synthesized
QVQLQESGGGLVQAGGSLRLSCAASGSISGGDFMGWYRQAPGKERELVASIDDGTTTYYADSVKGRFTISRDNAKNTVYLQMNSLKPEDTAVYYCAAYVPHDKYLTYAHSYWGQGTQVTVSS

SEQ ID NO: 19146 - protein, 118 aa, Artificial Sequence
  Chemically Synthesized
QVQLQESGGGLVQAGGSLRLSCAASGNISLSDYMGWYRQAPGKERELVASIAYGGNTYYADSVKGRFTISRDNAKNTVYLQMNSLKPEDTAVYYCAAVDLPWKGFTYWGQGTQVTVSS

SEQ ID NO: 19147 - protein, 115 aa, Artificial Sequence
  Chemically Synthesized
QVQLQESGGGLVQAGGSLRLSCAASGNIFDGFSMGWYRQAPGKERELVASIGWGGTTNYADSVKGRFTISRDNAKNTVYLQMNSLKPEDTAVYYCAAYYDGHTYWGQGTQVTVSS

SEQ ID NO: 19148 - protein, 121 aa, Artificial Sequence
  Chemically Synthesized
QVQLQESGGGLVQAGGSLRLSCAASGSISVTLMGWYRQAPGKERELVASIDYGSITNYADSVKGRFTISRDNAKNTVYLQMNSLKPEDTAVYYCAAYSQSETGPGPNYAYWGQGTQVTVSS

SEQ ID NO: 19149 - protein, 118 aa, Artificial Sequence
  Chemically Synthesized
QVQLQESGGGLVQAGGSLRLSCAASGSISTSIAMGWYRQAPGKEREFVASIAGGANTNYADSVKGRFTISRDNAKNTVYLQMNSLKPEDTAVYYCAAITDARKRHPYWGQGTQVTVSS

SEQ ID NO: 19150 - protein, 109 aa, Artificial Sequence
  Chemically Synthesized
QVQLQESGGGLVQAGGSLRLSCAASGSISRYYPMGWYRQAPGKEREFVATIATGASTNYADSVKGRFTISRDNAKNTVYLQMNSLKPEDTAVYYCAVYWGQGTQVTVSS

SEQ ID NO: 19151 - protein, 118 aa, Artificial Sequence
  Chemically Synthesized
QVQLQESGGGLVQAGGSLRLSCAASGNIFPPLGMGWYRQAPGKEREFVASIAGGGNTYYADSVKGRFTISRDNAKNTVYLQMNSLKPEDTAVYYCAVYGYIGYGHNYWGQGTQVTVSS

SEQ ID NO: 19152 - protein, 119 aa, Artificial Sequence
  Chemically Synthesized
QVQLQESGGGLVQAGGSLRLSCAASGYISRQFYMGWYRQAPGKERELVAGIGSIGASTNYADSVKGRFTISRDNAKNTVYLQMNSLKPEDTAVYYCAAGNDPTDLYSYWGQGTQVTVSS

SEQ ID NO: 19153 - protein, 118 aa, Artificial Sequence
  Chemically Synthesized
QVQLQESGGGLVQAGGSLRLSCAASGYIFATGTMGWYRQAPGKERELVAGIGNGTNTNYADSVKGRFTISRDNAKNTVYLQMNSLKPEDTAVYYCAVDDDYYSDHAYWGQGTQVTVSS

SEQ ID NO: 19154 - protein, 118 aa, Artificial Sequence
  Chemically Synthesized
QVQLQESGGGLVQAGGSLRLSCAASGTIFVEAPMGWYRQAPGKERELVAAIAGGTSTNYADSVKGRFTISRDNAKNTVYLQMNSLKPEDTAVYYCAAYDWTIVAHHYWGQGTQVTVSS

SEQ ID NO: 19155 - protein, 118 aa, Artificial Sequence
  Chemically Synthesized
QVQLQESGGGLVQAGGSLRLSCAASGYIFGDGIMGWYRQAPGKERELVATIDHGGNTNYADSVKGRFTISRDNAKNTVYLQMNSLKPEDTAVYYCAAYVYPRVGFGYWGQGTQVTVSS

SEQ ID NO: 19156 - protein, 118 aa, Artificial Sequence
  Chemically Synthesized
QVQLQESGGGLVQAGGSLRLSCAASGSIFSPPAMGWYRQAPGKEREFVASIARGSSTNYADSVKGRFTISRDNAKNTVYLQMNSLKPEDTAVYYCAAQPYNNGGYDYWGQGTQVTVSS

SEQ ID NO: 19157 - protein, 126 aa, Artificial Sequence
  Chemically Synthesized
QVQLQESGGGLVQAGGSLRLSCAASGNIFKWYAMGWYRQAPGKERELVAGINTGSSTNYADSVKGRFTISRDNAKNTVYLQMNSLKPEDTAVYYCAVYVYSYQYNATPYGDLLAYWGQGTQVTVSS

SEQ ID NO: 19158 - protein, 117 aa, Artificial Sequence
  Chemically Synthesized
QVQLQESGGGLVQAGGSLRLSCAASGNISDCSMGWYRQAPGKERELVAGIDVGAITYYADSVKGRFTISRDNAKNTVYLQMNSLKPEDTAVYYCAVTYYDDRVHNYWGQGTQVTVSS

SEQ ID NO: 19159 - protein, 126 aa, Artificial Sequence
  Chemically Synthesized
QVQLQESGGGLVQAGGSLRLSCAASGNISGAQYMGWYRQAPGKEREFVAGISSGATTYYADSVKGRFTISRDNAKNTVYLQMNSLKPEDTAVYYCAVFYLSYVTAVGDYQYWFYYWGQGTQVTVSS

SEQ ID NO: 19160 - protein, 118 aa, Artificial Sequence
  Chemically Synthesized
QVQLQESGGGLVQAGGSLRLSCAASGTISDAYVMGWYRQAPGKERELVATIDSGASTYYADSVKGRFTISRDNAKNTVYLQMNSLKPEDTAVYYCAVGPSHFWYYYYWGQGTQVTVSS

SEQ ID NO: 19161 - protein, 122 aa, Artificial Sequence
  Chemically Synthesized
QVQLQESGGGLVQAGGSLRLSCAASGTIFYFNYMGWYRQAPGKERELVAAIGTGGTTYYADSVKGRFTISRDNAKNTVYLQMNSLKPEDTAVYYCAVYGRYDGDVPAYHAYWGQGTQVTVSS

SEQ ID NO: 19162 - protein, 127 aa, Artificial Sequence
  Chemically Synthesized
QVQLQESGGGLVQAGGSLRLSCAASGTIFWHYTMGWYRQAPGKERELVATIGRGGSITNYADSVKGRFTISRDNAKNTVYLQMNSLKPEDTAVYYCAVPHRTSYDWIDVYDDSYFYWGQGTQVTVSS

SEQ ID NO: 19163 - protein, 118 aa, Artificial Sequence
  Chemically Synthesized
QVQLQESGGGLVQAGGSLRLSCAASGYIFDYYGMGWYRQAPGKERELVAGITDGSTTNYADSVKGRFTISRDNAKNTVYLQMNSLKPEDTAVYYCAAFWFYTNPYPYWGQGTQVTVSS

SEQ ID NO: 19164 - protein, 126 aa, Artificial Sequence
  Chemically Synthesized
QVQLQESGGGLVQAGGSLRLSCAASGSIFKDVAMGWYRQAPGKERELVAGIGGGGNTNYADSVKGRFTISRDNAKNTVYLQMNSLKPEDTAVYYCAVRPADGLRDYIDNDVKFPYWGQGTQVTVSS

SEQ ID NO: 19165 - protein, 118 aa, Artificial Sequence
  Chemically Synthesized
QVQLQESGGGLVQAGGSLRLSCAASGSIFSEGYMGWYRQAPGKERELVASIAVGSSTNYADSVKGRFTISRDNAKNTVYLQMNSLKPEDTAVYYCAVRYDSSDALDYWGQGTQVTVSS

SEQ ID NO: 19166 - protein, 123 aa, Artificial Sequence
  Chemically Synthesized
QVQLQESGGGLVQAGGSLRLSCAASGTISSYAQYMGWYRQAPGKEREFVAGITYGSSTNYADSVKGRFTISRDNAKNTVYLQMNSLKPEDTAVYYCAVYIGVDYLLIVYHYYWGQGTQVTVSS

SEQ ID NO: 19167 - protein, 118 aa, Artificial Sequence
  Chemically Synthesized
QVQLQESGGGLVQAGGSLRLSCAASGNISRPTYMGWYRQAPGKEREFVATIDYGAITNYADSVKGRFTISRDNAKNTVYLQMNSLKPEDTAVYYCAVQWYDAAKFTYWGQGTQVTVSS

SEQ ID NO: 19168 - protein, 121 aa, Artificial Sequence
  Chemically Synthesized
QVQLQESGGGLVQAGGSLRLSCAASGNIFVDPYMGWYRQAPGKERELVAAIDAGSSTYYADSVKGRFTISRDNAKNTVYLQMNSLKPEDTAVYYCAANIQVSWDGGGSIYWGQGTQVTVSS

SEQ ID NO: 19169 - protein, 126 aa, Artificial Sequence
  Chemically Synthesized
QVQLQESGGGLVQAGGSLRLSCAASGTISRDYYMGWYRQAPGKERELVAAITNGSITYYADSVKGRFTISRDNAKNTVYLQMNSLKPEDTAVYYCAVLGAHDTTPYWDWDVGLPYWGQGTQVTVSS

SEQ ID NO: 19170 - protein, 118 aa, Artificial Sequence
  Chemically Synthesized
QVQLQESGGGLVQAGGSLRLSCAASGNISYSTTMGWYRQAPGKEREFVASIGYGSSTYYADSVKGRFTISRDNAKNTVYLQMNSLKPEDTAVYYCAVYSYWYDDHTYWGQGTQVTVSS

SEQ ID NO: 19171 - protein, 122 aa, Artificial Sequence
  Chemically Synthesized
QVQLQESGGGLVQAGGSLRLSCAASGTISLWYVMGWYRQAPGKEREFVATINDGGITYYADSVKGRFTISRDNAKNTVYLQMNSLKPEDTAVYYCAVSVHEYVRNYLGHTYWGQGTQVTVSS

SEQ ID NO: 19172 - protein, 113 aa, Artificial Sequence
  Chemically Synthesized
QVQLQESGGGLVQAGGSLRLSCAASGTISQYYFMGWYRQAPGKERELVAAIGYGTTYYADSVKGRFTISRDNAKNTVYLQMNSLKPEDTAVYYCAGYSGLWYWGQGTQVTVSS

SEQ ID NO: 19173 - protein, 117 aa, Artificial Sequence
  Chemically Synthesized
QVQLQESGGGLVQAGGSLRLSCAASGNISSDRLMGWYRQAPGKERELVAAIGGGGNTYADSVKGRFTISRDNAKNTVYLQMNSLKPEDTAVYYCAADITAVWLFAYWGQGTQVTVSS

SEQ ID NO: 19174 - protein, 122 aa, Artificial Sequence
  Chemically Synthesized
QVQLQESGGGLVQAGGSLRLSCAASGYISGGGGMGWYRQAPGKEREFVAGITLGTSTNYADSVKGRFTISRDNAKNTVYLQMNSLKPEDTAVYYCAARVVGIYWPYSDLGYWGQGTQVTVSS

SEQ ID NO: 19175 - protein, 121 aa, Artificial Sequence
  Chemically Synthesized
QVQLQESGGGLVQAGGSLRLSCAASGSIFRGSMGWYRQAPGKEREFVATINTGGNTNYADSVKGRFTISRDNAKNTVYLQMNSLKPEDTAVYYCAVGEGYYDAAYIEYYYWGQGTQVTVSS

SEQ ID NO: 19176 - protein, 122 aa, Artificial Sequence
  Chemically Synthesized
QVQLQESGGGLVQAGGSLRLSCAASGNISKYWGMGWYRQAPGKEREFVAGINGGGITYYADSVKGRFTISRDNAKNTVYLQMNSLKPEDTAVYYCAVYNDVVSGHADFFRYWGQGTQVTVSS

SEQ ID NO: 19177 - protein, 126 aa, Artificial Sequence
  Chemically Synthesized
QVQLQESGGGLVQAGGSLRLSCAASGSISARSTMGWYRQAPGKEREFVASIAYGGTTNYADSVKGRFTISRDNAKNTVYLQMNSLKPEDTAVYYCAAPDGSDNDRDDDGDNVYRYWGQGTQVTVSS

SEQ ID NO: 19178 - protein, 118 aa, Artificial Sequence
  Chemically Synthesized
QVQLQESGGGLVQAGGSLRLSCAASGTIFARDYMGWYRQAPGKEREFVASITWGTSTYYADSVKGRFTISRDNAKNTVYLQMNSLKPEDTAVYYCAVDRADVVILYYWGQGTQVTVSS

SEQ ID NO: 19179 - protein, 122 aa, Artificial Sequence
  Chemically Synthesized
QVQLQESGGGLVQAGGSLRLSCAASGSISLAYFMGWYRQAPGKERELVATIGRGTSTNYADSVKGRFTISRDNAKNTVYLQMNSLKPEDTAVYYCAVKVSTYYFYSGYFSYWGQGTQVTVSS

SEQ ID NO: 19180 - protein, 118 aa, Artificial Sequence
  Chemically Synthesized
QVQLQESGGGLVQAGGSLRLSCAASGYIFPRRVMGWYRQAPGKERELVAAINYGGTTYYADSVKGRFTISRDNAKNTVYLQMNSLKPEDTAVYYCAVGGRGGYGYNYWGQGTQVTVSS

SEQ ID NO: 19181 - protein, 126 aa, Artificial Sequence
  Chemically Synthesized
QVQLQESGGGLVQAGGSLRLSCAASGYISDNYVMGWYRQAPGKEREFVASIGGGSITNYADSVKGRFTISRDNAKNTVYLQMNSLKPEDTAVYYCAVGYHGSNYGGIRYPYAFAYWGQGTQVTVSS

SEQ ID NO: 19182 - protein, 124 aa, Artificial Sequence
  Chemically Synthesized
QVQLQESGGGLVQAGGSLRLSCAASGNISGYVDMGWYRQAPGKERELVASISHGSITYADSVKGRFTISRDNAKNTVYLQMNSLKPEDTAVYYCAVYGWNVLRQEYWKTDHLYWGQGTQVTVSS

SEQ ID NO: 19183 - protein, 126 aa, Artificial Sequence
  Chemically Synthesized
QVQLQESGGGLVQAGGSLRLSCAASGNIFYRTHMGWYRQAPGKEREFVASISDGSTTYYADSVKGRFTISRDNAKNTVYLQMNSLKPEDTAVYYCAAYPTILPLYSYDPLISFGYWGQGTQVTVSS

SEQ ID NO: 19184 - protein, 125 aa, Artificial Sequence
  Chemically Synthesized
QVQLQESGGGLVQAGGSLRLSCAASGSISDVLEMGWYRQAPGKERELVASIDLGGTTNYADSVKGRFTISRDNAKNTVYLQMNSLKPEDTAVYYCAAGDYYTYRRVDSTTLTLYWGQGTQVTVSS

SEQ ID NO: 19185 - protein, 126 aa, Artificial Sequence
  Chemically Synthesized
QVQLQESGGGLVQAGGSLRLSCAASGYISLPYYMGWYRQAPGKERELVAAIGEGSTTNYADSVKGRFTISRDNAKNTVYLQMNSLKPEDTAVYYCAVARDFIDYRQDHPTGTYVYWGQGTQVTVSS

SEQ ID NO: 19186 - protein, 119 aa, Artificial Sequence
  Chemically Synthesized
QVQLQESGGGLVQAGGSLRLSCAASGTIFRYTGMGWYRQAPGKEREFVAAITRGATTYYADSVKGRFTISRDNAKNTVYLQMNSLKPEDTAVYYCAVRYTYRADRFRYWGQGTQVTVSS

SEQ ID NO: 19187 - protein, 122 aa, Artificial Sequence
  Chemically Synthesized
QVQLQESGGGLVQAGGSLRLSCAASGTISPDDYMGWYRQAPGKEREFVASIGDGATTYYADSVKGRFTISRDNAKNTVYLQMNSLKPEDTAVYYCAVADPYEPWSRNNLPYWGQGTQVTVSS

SEQ ID NO: 19188 - protein, 118 aa, Artificial Sequence
  Chemically Synthesized
QVQLQESGGGLVQAGGSLRLSCAASGTIFYRYYMGWYRQAPGKEREFVATIGQGTTTNYADSVKGRFTISRDNAKNTVYLQMNSLKPEDTAVYYCAVTPYEILDYYYWGQGTQVTVSS

SEQ ID NO: 19189 - protein, 118 aa, Artificial Sequence
  Chemically Synthesized
QVQLQESGGGLVQAGGSLRLSCAASGTIFGLPWMGWYRQAPGKERELVATIDTGGTTNYADSVKGRFTISRDNAKNTVYLQMNSLKPEDTAVYYCAVSTSGWLGSYYWGQGTQVTVSS

SEQ ID NO: 19190 - protein, 118 aa, Artificial Sequence
  Chemically Synthesized
QVQLQESGGGLVQAGGSLRLSCAASGTISTYSYMGWYRQAPGKERELVATIDIGANTNYADSVKGRFTISRDNAKNTVYLQMNSLKPEDTAVYYCAVRSSSDYSLPYWGQGTQVTVSS

SEQ ID NO: 19191 - protein, 118 aa, Artificial Sequence
  Chemically Synthesized
QVQLQESGGGLVQAGGSLRLSCAASGTISTSGRMGWYRQAPGKEREFVATIDGGGTTYYADSVKGRFTISRDNAKNTVYLQMNSLKPEDTAVYYCAVYVRRFGVLDYWGQGTQVTVSS

SEQ ID NO: 19192 - protein, 118 aa, Artificial Sequence
  Chemically Synthesized
QVQLQESGGGLVQAGGSLRLSCAASGNIFWAGFMGWYRQAPGKERELVAGISNGGSTNYADSVKGRFTISRDNAKNTVYLQMNSLKPEDTAVYYCAAYYVVSTYYSYWGQGTQVTVSS

SEQ ID NO: 19193 - protein, 118 aa, Artificial Sequence
  Chemically Synthesized
QVQLQESGGGLVQAGGSLRLSCAASGNIFEDQWMGWYRQAPGKERELVAGIADGGNTYYADSVKGRFTISRDNAKNTVYLQMNSLKPEDTAVYYCAVYRITSVRHSYWGQGTQVTVSS

SEQ ID NO: 19194 - protein, 118 aa, Artificial Sequence
  Chemically Synthesized
QVQLQESGGGLVQAGGSLRLSCAASGNIFPYTTMGWYRQAPGKEREFVATITRGGITNYADSVKGRFTISRDNAKNTVYLQMNSLKPEDTAVYYCAVRSYFGYLFYYWGQGTQVTVSS

SEQ ID NO: 19195 - protein, 117 aa, Artificial Sequence
  Chemically Synthesized
QVQLQESGGGLVQAGGSLRLSCAASGSISQQGDMGWYRQAPGKEREFVATIGYGGITYYADSVKGRFTISRDNAKNTVYLQMNSLKPEDTAVYYCAVPRYYSVGIYWGQGTQVTVSS

SEQ ID NO: 19196 - protein, 122 aa, Artificial Sequence
  Chemically Synthesized
QVQLQESGGGLVQAGGSLRLSCAASGYISYVADMGWYRQAPGKEREFVASIDPGGITYYADSVKGRFTISRDNAKNTVYLQMNSLKPEDTAVYYCAVDTFDGWDRGSYLDYWGQGTQVTVSS

SEQ ID NO: 19197 - protein, 118 aa, Artificial Sequence
  Chemically Synthesized
QVQLQESGGGLVQAGGSLRLSCAASGYISYATHMGWYRQAPGKERELVAGIAYGAITYYADSVKGRFTISRDNAKNTVYLQMNSLKPEDTAVYYCAVKLWYHNYFHYWGQGTQVTVSS

SEQ ID NO: 19198 - protein, 117 aa, Artificial Sequence
  Chemically Synthesized
QVQLQESGGGLVQAGGSLRLSCAASGNISIPWYMGWYRQAPGKERELVAAINSVLLPYADSVKGRFTISRDNAKNTVYLQMNSLKPEDTAVYYCAATWYNGSSLRYWGQGTQVTVSS

SEQ ID NO: 19199 - protein, 122 aa, Artificial Sequence
  Chemically Synthesized
QVQLQESGGGLVQAGGSLRLSCAASGTISRDWLMGWYRQAPGKEREFVASIGKGTSTNYADSVKGRFTISRDNAKNTVYLQMNSLKPEDTAVYYCAARPSYWSYFFVIHYYWGQGTQVTVSS

SEQ ID NO: 19200 - protein, 122 aa, Artificial Sequence
  Chemically Synthesized
QVQLQESGGGLVQAGGSLRLSCAASGTISPGEDMGWYRQAPGKERELVAAIDDGATTNYADSVKGRFTISRDNAKNTVYLQMNSLKPEDTAVYYCAVHRDTDYTTYTQHPYWGQGTQVTVSS

SEQ ID NO: 19201 - protein, 118 aa, Artificial Sequence
  Chemically Synthesized
QVQLQESGGGLVQAGGSLRLSCAASGNISRWLEMGWYRQAPGKERELVAAISFGSNTYYADSVKGRFTISRDNAKNTVYLQMNSLKPEDTAVYYCAVPLPGAPTFYYWGQGTQVTVSS

SEQ ID NO: 19202 - protein, 118 aa, Artificial Sequence
  Chemically Synthesized
QVQLQESGGGLVQAGGSLRLSCAASGYIFGDHYMGWYRQAPGKERELVASITYGGITYYADSVKGRFTISRDNAKNTVYLQMNSLKPEDTAVYYCAVYYRDRLYLDYWGQGTQVTVSS

SEQ ID NO: 19203 - protein, 121 aa, Artificial Sequence
  Chemically Synthesized
QVQLQESGGGLVQAGGSLRLSCAASGSIFGYQDMGWYRQAPGKEREFVAAINTGASTYYADSVKGRFTISRDNAKNTVYLQMNSLKPEDTAVYYCAVDSTTTTLTFTTMYWGQGTQVTVSS

SEQ ID NO: 19204 - protein, 118 aa, Artificial Sequence
  Chemically Synthesized
QVQLQESGGGLVQAGGSLRLSCAASGNISTSNSMGWYRQAPGKEREFVAAINGGSITYYADSVKGRFTISRDNAKNTVYLQMNSLKPEDTAVYYCAVYIRSTHGLRYWGQGTQVTVSS

SEQ ID NO: 19205 - protein, 122 aa, Artificial Sequence
  Chemically Synthesized
QVQLQESGGGLVQAGGSLRLSCAASGYISSDYDMGWYRQAPGKERELVASIDLGGSTYYADSVKGRFTISRDNAKNTVYLQMNSLKPEDTAVYYCAVYYYFPVGRPTDHYYWGQGTQVTVSS

SEQ ID NO: 19206 - protein, 122 aa, Artificial Sequence
  Chemically Synthesized
QVQLQESGGGLVQAGGSLRLSCAASGSISPRWYMGWYRQAPGKEREFVAAINIGTITNYADSVKGRFTISRDNAKNTVYLQMNSLKPEDTAVYYCAVRATQYDGLYNDLWYWGQGTQVTVSS

SEQ ID NO: 19207 - protein, 117 aa, Artificial Sequence
  Chemically Synthesized
QVQLQESGGGLVQAGGSLRLSCAASGSISQGQRMGWYRQAPGKERELASISYGGSTYYADSVKGRFTISRDNAKNTVYLQMNSLKPEDTAVYYCAARVLYDDAYGYWGQGTQVTVSS

SEQ ID NO: 19208 - protein, 113 aa, Artificial Sequence
  Chemically Synthesized
QVQLQESGGGLVQAGGSLRLSCAASGNISPSSKMGWYRQAPGKERELVASIDVGGNTYYADSVKGRFTISRDNAKNTVYLQMNSLKPEDTAVYYCASSDLVYWGQGTQVTVSS

SEQ ID NO: 19209 - protein, 118 aa, Artificial Sequence
  Chemically Synthesized
QVQLQESGGGLVQAGGSLRLSCAASGTIFGPLSMGWYRQAPGKERELVAAISRGANTYYADSVKGRFTISRDNAKNTVYLQMNSLKPEDTAVYYCAVEGYYVSPLGYWGQGTQVTVSS

SEQ ID NO: 19210 - protein, 118 aa, Artificial Sequence
  Chemically Synthesized
QVQLQESGGGLVQAGGSLRLSCAASGSIFYTTTMGWYRQAPGKEREFVASINPGSTTNYADSVKGRFTISRDNAKNTVYLQMNSLKPEDTAVYYCAAGWYPYGLYYYWGQGTQVTVSS

SEQ ID NO: 19211 - protein, 122 aa, Artificial Sequence
  Chemically Synthesized
QVQLQESGGGLVQAGGSLRLSCAASGTISDYASMGWYRQAPGKEREFVATINTGGTTYYADSVKGRFTISRDNAKNTVYLQMNSLKPEDTAVYYCAVPTYSLWYRSDRYWYWGQGTQVTVSS

SEQ ID NO: 19212 - protein, 126 aa, Artificial Sequence
  Chemically Synthesized
QVQLQESGGGLVQAGGSLRLSCAASGNISAAHSMGWYRQAPGKEREFVASITAGGSTNYADSVKGRFTISRDNAKNTVYLQMNSLKPEDTAVYYCAVDIYQPLYGYLIEGYPFDYWGQGTQVTVSS

SEQ ID NO: 19213 - protein, 118 aa, Artificial Sequence
  Chemically Synthesized
QVQLQESGGGLVQAGGSLRLSCAASGYIFPYYCMGWYRQAPGKERELVAGISDGGTTYYADSVKGRFTISRDNAKNTVYLQMNSLKPEDTAVYYCAVDLLLYPVYPYWGQGTQVTVSS

SEQ ID NO: 19214 - protein, 118 aa, Artificial Sequence
  Chemically Synthesized
QVQLQESGGGLVQAGGSLRLSCAASGTIFKRHAMGWYRQAPGKEREFVATIGYGGNTYYADSVKGRFTISRDNAKNTVYLQMNSLKPEDTAVYYCAVYGRYQRYYSYWGQGTQVTVSS

SEQ ID NO: 19215 - protein, 123 aa, Artificial Sequence
  Chemically Synthesized
QVQLQESGGGLVQAGGSLRLSCAASGPRDFMGWYRQAPGKEREFVAGIGKGSSTNYADSVKGRFTISRDNAKNTVYLQMNSLKPEDTAVYYCAVYTYDRAGVTVYTSGDHRYWGQGTQVTVSS

SEQ ID NO: 19216 - protein, 122 aa, Artificial Sequence
  Chemically Synthesized
QVQLQESGGGLVQAGGSLRLSCAASGTISSEHAMGWYRQAPGKERELVAGITYGSITNYADSVKGRFTISRDNAKNTVYLQMNSLKPEDTAVYYCAVYYYYRATIYHALGYWGQGTQVTVSS

SEQ ID NO: 19217 - protein, 122 aa, Artificial Sequence
  Chemically Synthesized
QVQLQESGGGLVQAGGSLRLSCAASGSISNLYHMGWYRQAPGKEREFVASINVGAITYYADSVKGRFTISRDNAKNTVYLQMNSLKPEDTAVYYCAAYVPYYYILGYLHLYWGQGTQVTVSS

SEQ ID NO: 19218 - protein, 124 aa, Artificial Sequence
  Chemically Synthesized
QVQLQESGGGLVQAGGSLRLSCAASGIGDRDMGWYRQAPGKERELVATITDGATTNYADSVKGRFTISRDNAKNTVYLQMNSLKPEDTAVYYCAAAYLYRDEYSGPDRADFDYWGQGTQVTVSS

SEQ ID NO: 19219 - protein, 118 aa, Artificial Sequence
  Chemically Synthesized
QVQLQESGGGLVQAGGSLRLSCAASGSIFYPELMGWYRQAPGKERELVATIGYGGSTNYADSVKGRFTISRDNAKNTVYLQMNSLKPEDTAVYYCAVLQVQERGHDYWGQGTQVTVSS

SEQ ID NO: 19220 - protein, 126 aa, Artificial Sequence
  Chemically Synthesized
QVQLQESGGGLVQAGGSLRLSCAASGYISWYNVMGWYRQAPGKEREFVAGITGGSTTYYADSVKGRFTISRDNAKNTVYLQMNSLKPEDTAVYYCAAWGLPTRALGYGDYGRLTYWGQGTQVTVSS

SEQ ID NO: 19221 - protein, 122 aa, Artificial Sequence
  Chemically Synthesized
QVQLQESGGGLVQAGGSLRLSCAASGTISLNPTMGWYRQAPGKEREFVAGITYGATTNYADSVKGRFTISRDNAKNTVYLQMNSLKPEDTAVYYCAVGSYYEYDDQVLFAYWGQGTQVTVSS

SEQ ID NO: 19222 - protein, 118 aa, Artificial Sequence
  Chemically Synthesized
QVQLQESGGGLVQAGGSLRLSCAASGYISDGSVMGWYRQAPGKEREFVASISGGGSTNYADSVKGRFTISRDNAKNTVYLQMNSLKPEDTAVYYCAAGHARWYDHSYWGQGTQVTVSS

SEQ ID NO: 19223 - protein, 122 aa, Artificial Sequence
  Chemically Synthesized
QVQLQESGGGLVQAGGSLRLSCAASGTIFPYTYMGWYRQAPGKEREFVAAIGYGGTTNYADSVKGRFTISRDNAKNTVYLQMNSLKPEDTAVYYCAAGDADTDDDWRTHYYWGQGTQVTVSS

SEQ ID NO: 19224 - protein, 118 aa, Artificial Sequence
  Chemically Synthesized
QVQLQESGGGLVQAGGSLRLSCAASGNISLQPEMGWYRQAPGKERELVAGIDAGTSTYYADSVKGRFTISRDNAKNTVYLQMNSLKPEDTAVYYCAANDYGDFIHDYWGQGTQVTVSS

SEQ ID NO: 19225 - protein, 118 aa, Artificial Sequence
  Chemically Synthesized
QVQLQESGGGLVQAGGSLRLSCAASGNIFGFTDMGWYRQAPGKERELVATIGDGTSTNYADSVKGRFTISRDNAKNTVYLQMNSLKPEDTAVYYCAVSTAYNTVFSYWGQGTQVTVSS

SEQ ID NO: 19226 - protein, 126 aa, Artificial Sequence
  Chemically Synthesized
QVQLQESGGGLVQAGGSLRLSCAASGYISEGTDMGWYRQAPGKEREFVAGIGRGTSTNYADSVKGRFTISRDNAKNTVYLQMNSLKPEDTAVYYCAAYAPDATFDYVDYASWHPYWGQGTQVTVSS

SEQ ID NO: 19227 - protein, 118 aa, Artificial Sequence
  Chemically Synthesized
QVQLQESGGGLVQAGGSLRLSCAASGNISTYALMGWYRQAPGKERELVASIGDGSTTNYADSVKGRFTISRDNAKNTVYLQMNSLKPEDTAVYYCAVDYGRSNGHYYWGQGTQVTVSS

SEQ ID NO: 19228 - protein, 118 aa, Artificial Sequence
  Chemically Synthesized
QVQLQESGGGLVQAGGSLRLSCAASGSISRSLYMGWYRQAPGKEREFVASIDRGASTYYADSVKGRFTISRDNAKNTVYLQMNSLKPEDTAVYYCAVDTTYGDILGYWGQGTQVTVSS

SEQ ID NO: 19229 - protein, 121 aa, Artificial Sequence
  Chemically Synthesized
QVQLQESGGGLVQAGGSLRLSCAASGTISDNYMGWYRQAPGKERELVASINDGGITNYADSVKGRFTISRDNAKNTVYLQMNSLKPEDTAVYYCAVDYRVYAFLSDYFSYWGQGTQVTVSS

SEQ ID NO: 19230 - protein, 118 aa, Artificial Sequence
  Chemically Synthesized
QVQLQESGGGLVQAGGSLRLSCAASGTIFEYREMGWYRQAPGKERELVAAIDDGTSTYYADSVKGRFTISRDNAKNTVYLQMNSLKPEDTAVYYCAVQDIYGDRLYYWGQGTQVTVSS

SEQ ID NO: 19231 - protein, 122 aa, Artificial Sequence
  Chemically Synthesized
QVQLQESGGGLVQAGGSLRLSCAASGYIFGIRFMGWYRQAPGKEREFVASITYGTNTNYADSVKGRFTISRDNAKNTVYLQMNSLKPEDTAVYYCAAWSVRQGTVLDSFPYWGQGTQVTVSS

SEQ ID NO: 19232 - protein, 118 aa, Artificial Sequence
  Chemically Synthesized
QVQLQESGGGLVQAGGSLRLSCAASGSIFDLYAMGWYRQAPGKERELVAAIAIGASTYYADSVKGRFTISRDNAKNTVYLQMNSLKPEDTAVYYCAVYDYRIGELPYWGQGTQVTVSS

SEQ ID NO: 19233 - protein, 127 aa, Artificial Sequence
  Chemically Synthesized
QVQLQESGGGLVQAGGSLRLSCAASGTIFYQYIMGWYRQAPGKEREFVASITDGAITNYADSVKGRFTISRDNAKNTVYLQMNSLKPEDTAVYYCAVGHDERIQYYDTYQLADLSYWGQGTQVTVSS

SEQ ID NO: 19234 - protein, 122 aa, Artificial Sequence
  Chemically Synthesized
QVQLQESGGGLVQAGGSLRLSCAASGNISYYYYMGWYRQAPGKEREFVASITDGANTNYADSVKGRFTISRDNAKNTVYLQMNSLKPEDTAVYYCAVHDRYETSIFQDYDYWGQGTQVTVSS

SEQ ID NO: 19235 - protein, 122 aa, Artificial Sequence
  Chemically Synthesized
QVQLQESGGGLVQAGGSLRLSCAASGNISAVADMGWYRQAPGKERELVATINNGTTTYYADSVKGRFTISRDNAKNTVYLQMNSLKPEDTAVYYCAVHRYVRNYGLNPFGYWGQGTQVTVSS

SEQ ID NO: 19236 - protein, 123 aa, Artificial Sequence
  Chemically Synthesized
QVQLQESGGGLVQAGGSLRLSCAASGSIFDSYDMGWYRQAPGKERELVATISDGGNTNYADSVKGRFTISRDNAKNTVYLQMNSLKPEDTAVYYCAARLLQIGPGSTDRLTYWGQGTQVTVSS

SEQ ID NO: 19237 - protein, 122 aa, Artificial Sequence
  Chemically Synthesized
QVQLQESGGGLVQAGGSLRLSCAASGTISVGLYMGWYRQAPGKERELVAAIGTGTSTNYADSVKGRFTISRDNAKNTVYLQMNSLKPEDTAVYYCAATALGAYGLSLRHQYWGQGTQVTVSS

SEQ ID NO: 19238 - protein, 121 aa, Artificial Sequence
  Chemically Synthesized
QVQLQESGGGLVQAGGSLRLSCAASGTISRYRSMGWYRQAPGKERELVATIAVGSTYYADSVKGRFTISRDNAKNTVYLQMNSLKPEDTAVYYCAVGYPWLSRYYAYFAYWGQGTQVTVSS

SEQ ID NO: 19239 - protein, 122 aa, Artificial Sequence
  Chemically Synthesized
QVQLQESGGGLVQAGGSLRLSCAASGSISWYNYMGWYRQAPGKERELVAGISDGATTNYADSVKGRFTISRDNAKNTVYLQMNSLKPEDTAVYYCAAPYTPSLHDSLDHYYWGQGTQVTVSS

SEQ ID NO: 19240 - protein, 118 aa, Artificial Sequence
  Chemically Synthesized
QVQLQESGGGLVQAGGSLRLSCAASGNISTAGLMGWYRQAPGKERELVAGIAIGASTNYADSVKGRFTISRDNAKNTVYLQMNSLKPEDTAVYYCAVYNALYWDLYYWGQGTQVTVSS

SEQ ID NO: 19241 - protein, 118 aa, Artificial Sequence
  Chemically Synthesized
QVQLQESGGGLVQAGGSLRLSCAASGYIFYGPTMGWYRQAPGKEREFVASIGTGSSTYYADSVKGRFTISRDNAKNTVYLQMNSLKPEDTAVYYCAAGNIAWYWFFYWGQGTQVTVSS

SEQ ID NO: 19242 - protein, 116 aa, Artificial Sequence
  Chemically Synthesized
QVQLQESGGGLVQAGGSLRLSCAASGNIFDPTLMGWYRQAPGKEREFVAAISTGGSTNYADSVKGRFTISRDNAKNTVYLQMNSLKPEDTAVYYCAVNGRDDHYYWGQGTQVTVSS

SEQ ID NO: 19243 - protein, 126 aa, Artificial Sequence
  Chemically Synthesized
QVQLQESGGGLVQAGGSLRLSCAASGTIFYDGYMGWYRQAPGKERELVAAIGVGGNTYYADSVKGRFTISRDNAKNTVYLQMNSLKPEDTAVYYCAVVGEAGPPLDDKAFASHAYWGQGTQVTVSS

SEQ ID NO: 19244 - protein, 121 aa, Artificial Sequence
  Chemically Synthesized
QVQLQESGGGLVQAGGSLRLSCAASGTIFSTVMGWYRQAPGKERELVASIASGSITNYADSVKGRFTISRDNAKNTVYLQMNSLKPEDTAVYYCAVGYYGWSDQFEAYSYWGQGTQVTVSS

SEQ ID NO: 19245 - protein, 117 aa, Artificial Sequence
  Chemically Synthesized
QVQLQESGGGLVQAGGSLRLSCAASGSIFLLTMGWYRQAPGKEREFVASITQGSTTNYADSVKGRFTISRDNAKNTVYLQMNSLKPEDTAVYYCAVRPYDVWIHYYWGQGTQVTVSS

SEQ ID NO: 19246 - protein, 126 aa, Artificial Sequence
  Chemically Synthesized
QVQLQESGGGLVQAGGSLRLSCAASGYIFTSTDMGWYRQAPGKERELVASINAGASTNYADSVKGRFTISRDNAKNTVYLQMNSLKPEDTAVYYCAAYPTDWYSDRPDRTLVHHYWGQGTQVTVSS

SEQ ID NO: 19247 - protein, 122 aa, Artificial Sequence
  Chemically Synthesized
QVQLQESGGGLVQAGGSLRLSCAASGYISYPVLMGWYRQAPGKEREFVAAISSGTSTNYADSVKGRFTISRDNAKNTVYLQMNSLKPEDTAVYYCAVKYPQGDYPWIWLVYWGQGTQVTVSS

SEQ ID NO: 19248 - protein, 122 aa, Artificial Sequence
  Chemically Synthesized
QVQLQESGGGLVQAGGSLRLSCAASGTIFTVVDMGWYRQAPGKERELVATIDYGANTYYADSVKGRFTISRDNAKNTVYLQMNSLKPEDTAVYYCAVGVWGPYVWYPLLGYWGQGTQVTVSS

SEQ ID NO: 19249 - protein, 124 aa, Artificial Sequence
  Chemically Synthesized
QVQLQESGGGLVQAGGSLRLSCAASGNIFPSLMGWYRQAPGKEREFVAAIDGGTNTYYADSVKGRFTISRDNAKNTVYLQMNSLKPEDTAVYYCAAPYDISVNSKTTTLTTFYWGQGTQVTVSS

SEQ ID NO: 19250 - protein, 118 aa, Artificial Sequence
  Chemically Synthesized
QVQLQESGGGLVQAGGSLRLSCAASGYIFYPEYMGWYRQAPGKERELVAGIDLGASTYYADSVKGRFTISRDNAKNTVYLQMNSLKPEDTAVYYCAAYFYRYRSYTYWGQGTQVTVSS

SEQ ID NO: 19251 - protein, 117 aa, Artificial Sequence
  Chemically Synthesized
QVQLQESGGGLVQAGGSLRLSCAASGSIFTCRMGWYRQAPGKEREFVAAINGGGITNYADSVKGRFTISRDNAKNTVYLQMNSLKPEDTAVYYCAVVDDGYGDLPYWGQGTQVTVSS

SEQ ID NO: 19252 - protein, 118 aa, Artificial Sequence
  Chemically Synthesized
QVQLQESGGGLVQAGGSLRLSCAASGNISRHGPMGWYRQAPGKERELVAGINYGSNYLYADSVKGRFTISRDNAKNTVYLQMNSLKPEDTAVYYCAADDYEWDVHRYWGQGTQVTVSS

SEQ ID NO: 19253 - protein, 118 aa, Artificial Sequence
  Chemically Synthesized
QVQLQESGGGLVQAGGSLRLSCAASGSIFLQYSMGWYRQAPGKERELVASIGAGGTTNYADSVKGRFTISRDNAKNTVYLQMNSLKPEDTAVYYCAVYLDEYYGHLYWGQGTQVTVSS

SEQ ID NO: 19254 - protein, 118 aa, Artificial Sequence
  Chemically Synthesized
QVQLQESGGGLVQAGGSLRLSCAASGTISATFVMGWYRQAPGKEREFVAAIGRGAITNYADSVKGRFTISRDNAKNTVYLQMNSLKPEDTAVYYCAAWVSRFYDYVYWGQGTQVTVSS

SEQ ID NO: 19255 - protein, 117 aa, Artificial Sequence
  Chemically Synthesized
QVQLQESGGGLVQAGGSLRLSCAASGSISYWNIMGWYRQAPGKERELVPVLVVVLVPYADSVKGRFTISRDNAKNTVYLQMNSLKPEDTAVYYCAVYHYYPTDHPYWGQGTQVTVSS

SEQ ID NO: 19256 - protein, 117 aa, Artificial Sequence
  Chemically Synthesized
QVQLQESGGGLVQAGGSLRLSCAASGNIFEWDYMGWYRQAPGKERELVAGIDSGSSTNYADSVKGRFTISRDNAKNTVYLQMNSLKPEDTAVYYCAVSYHGPSRFYWGQGTQVTVSS

SEQ ID NO: 19257 - protein, 118 aa, Artificial Sequence
  Chemically Synthesized
QVQLQESGGGLVQAGGSLRLSCAASGNISYLSTMGWYRQAPGKERELVASIDQGGNTYYADSVKGRFTISRDNAKNTVYLQMNSLKPEDTAVYYCAVLYTADDLHFYWGQGTQVTVSS

SEQ ID NO: 19258 - protein, 118 aa, Artificial Sequence
  Chemically Synthesized
QVQLQESGGGLVQAGGSLRLSCAASGTIFDRYIMGWYRQAPGKEREFVASITAGGSTNYADSVKGRFTISRDNAKNTVYLQMNSLKPEDTAVYYCAVFTGLGSDHDYWGQGTQVTVSS

SEQ ID NO: 19259 - protein, 125 aa, Artificial Sequence
  Chemically Synthesized
QVQLQESGGGLVQAGGSLRLSCAASGTISYGDYMGWYRQAPGKERELVASITLGSNTNYADSVKGRFTISRDNAKNTVYLQMNSLKPEDTAVYYCAAAGIGAYYDREKTTVRMYWGQGTQVTVSS

SEQ ID NO: 19260 - protein, 118 aa, Artificial Sequence
  Chemically Synthesized
QVQLQESGGGLVQAGGSLRLSCAASGTIFGDYDMGWYRQAPGKERELVAAIAYGGSTNYADSVKGRFTISRDNAKNTVYLQMNSLKPEDTAVYYCAAIAPDDWAFGYWGQGTQVTVSS

SEQ ID NO: 19261 - protein, 118 aa, Artificial Sequence
  Chemically Synthesized
QVQLQESGGGLVQAGGSLRLSCAASGYISAVYWMGWYRQAPGKEREFVAAIAFGTNTNYADSVKGRFTISRDNAKNTVYLQMNSLKPEDTAVYYCAVNAGPGYVFPYWGQGTQVTVSS

SEQ ID NO: 19262 - protein, 117 aa, Artificial Sequence
  Chemically Synthesized
QVQLQESGGGLVQAGGSLRLSCAASGSISSPEMGWYRQAPGKERELVAGIDDGTNTNYADSVKGRFTISRDNAKNTVYLQMNSLKPEDTAVYYCAVWQDGHFGHRYWGQGTQVTVSS

SEQ ID NO: 19263 - protein, 126 aa, Artificial Sequence
  Chemically Synthesized
QVQLQESGGGLVQAGGSLRLSCAASGNISRNADMGWYRQAPGKEREFVAGINEGGTTYYADSVKGRFTISRDNAKNTVYLQMNSLKPEDTAVYYCAVDWAYPDASATAYDVYHRYWGQGTQVTVSS

SEQ ID NO: 19264 - protein, 121 aa, Artificial Sequence
  Chemically Synthesized
QVQLQESGGGLVQAGGSLRLSCAASGNISDSDYMGWYRQAPGKEREFVVAIGYGAIPYADSVKGRFTISRDNAKNTVYLQMNSLKPEDTAVYYCAVGIDTYPTDYRRHGYWGQGTQVTVSS

SEQ ID NO: 19265 - protein, 117 aa, Artificial Sequence
  Chemically Synthesized
QVQLQESGGGLVQAGGSLRLSCAASGNISHYDYMGWYRQAPGKEREFVASIGDGTITNYADSVKGRFTISRDNAKNTVYLQMNSLKPEDTAVYYCAVPYWPRTHVYWGQGTQVTVSS

SEQ ID NO: 19266 - protein, 118 aa, Artificial Sequence
  Chemically Synthesized
QVQLQESGGGLVQAGGSLRLSCAASGNISQAYVMGWYRQAPGKERELVATISYGTNTNYADSVKGRFTISRDNAKNTVYLQMNSLKPEDTAVYYCAVYPSPTDYFLYWGQGTQVTVSS

SEQ ID NO: 19267 - protein, 118 aa, Artificial Sequence
  Chemically Synthesized
QVQLQESGGGLVQAGGSLRLSCAASGYIFNYAIMGWYRQAPGKERELVATIDYGATTNYADSVKGRFTISRDNAKNTVYLQMNSLKPEDTAVYYCAVRRGYRVAYSYWGQGTQVTVSS

SEQ ID NO: 19268 - protein, 127 aa, Artificial Sequence
  Chemically Synthesized
QVQLQESGGGLVQAGGSLRLSCAASGTIFARRGMGWYRQAPGKEREFVAAISDGGSTNYADSVKGRFTISRDNAKNTVYLQMNSLKPEDTAVYYCAVLDGASTIPTTDVGHAGYYYWGQGTQVTVSS

SEQ ID NO: 19269 - protein, 118 aa, Artificial Sequence
  Chemically Synthesized
QVQLQESGGGLVQAGGSLRLSCAASGNISTLYYMGWYRQAPGKERELVASIGYGTITNYADSVKGRFTISRDNAKNTVYLQMNSLKPEDTAVYYCAVYDHAYYTFRYWGQGTQVTVSS

SEQ ID NO: 19270 - protein, 117 aa, Artificial Sequence
  Chemically Synthesized
QVQLQESGGGLVQAGGSLRLSCAASGTISLVYMGWYRQAPGKERELVAAIDAGGSTYYADSVKGRFTISRDNAKNTVYLQMNSLKPEDTAVYYCAAFYWNYDRYPYWGQGTQVTVSS

SEQ ID NO: 19271 - protein, 118 aa, Artificial Sequence
  Chemically Synthesized
QVQLQESGGGLVQAGGSLRLSCAASGNIFYAGSMGWYRQAPGKEREFVAAINPGATTNYADSVKGRFTISRDNAKNTVYLQMNSLKPEDTAVYYCAAGVQYTGWLGYWGQGTQVTVSS

SEQ ID NO: 19272 - protein, 126 aa, Artificial Sequence
  Chemically Synthesized
QVQLQESGGGLVQAGGSLRLSCAASGYISYGLLMGWYRQAPGKEREFVASIARGATTNYADSVKGRFTISRDNAKNTVYLQMNSLKPEDTAVYYCAALRNHRTIWDWYGPYSHVYWGQGTQVTVSS

SEQ ID NO: 19273 - protein, 118 aa, Artificial Sequence
  Chemically Synthesized
QVQLQESGGGLVQAGGSLRLSCAASGNISRTQVMGWYRQAPGKEREFVAAITSGGITYYADSVKGRFTISRDNAKNTVYLQMNSLKPEDTAVYYCAVRYRRHLPFYYWGQGTQVTVSS

SEQ ID NO: 19274 - protein, 118 aa, Artificial Sequence
  Chemically Synthesized
QVQLQESGGGLVQAGGSLRLSCAASGSIFRYAYMGWYRQAPGKEREFVATIAYGTTTNYADSVKGRFTISRDNAKNTVYLQMNSLKPEDTAVYYCAVYGYYSADHDYWGQGTQVTVSS

SEQ ID NO: 19275 - protein, 122 aa, Artificial Sequence
  Chemically Synthesized
QVQLQESGGGLVQAGGSLRLSCAASGSISDVVYMGWYRQAPGKEREFVAGITVGASTNYADSVKGRFTISRDNAKNTVYLQMNSLKPEDTAVYYCAVDLDDKLAWSVWLVYWGQGTQVTVSS

SEQ ID NO: 19276 - protein, 117 aa, Artificial Sequence
  Chemically Synthesized
QVQLQESGGGLVQAGGSLRLSCAASGYISSAFRMGWYRQAPGKEREFVAAINSGASTYYADSVKGRFTISRDNAKNTVYLQMNSLKPEDTAVYYCAAGSTLTTLIYWGQGTQVTVSS

SEQ ID NO: 19277 - protein, 126 aa, Artificial Sequence
  Chemically Synthesized
QVQLQESGGGLVQAGGSLRLSCAASGTISGDIDMGWYRQAPGKERELVAAISDGASTYYADSVKGRFTISRDNAKNTVYLQMNSLKPEDTAVYYCAVVDRNYLGRAPTDVYYLPYWGQGTQVTVSS

SEQ ID NO: 19278 - protein, 122 aa, Artificial Sequence
  Chemically Synthesized
QVQLQESGGGLVQAGGSLRLSCAASGNIFQYLAMGWYRQAPGKERELVAAISYGAITNYADSVKGRFTISRDNAKNTVYLQMNSLKPEDTAVYYCAVQLYLDGKLWGPHDYWGQGTQVTVSS

SEQ ID NO: 19279 - protein, 118 aa, Artificial Sequence
  Chemically Synthesized
QVQLQESGGGLVQAGGSLRLSCAASGNISYHQDMGWYRQAPGKEREFVASINTGATTNYADSVKGRFTISRDNAKNTVYLQMNSLKPEDTAVYYCAADENFVEDHPYWGQGTQVTVSS

SEQ ID NO: 19280 - protein, 124 aa, Artificial Sequence
  Chemically Synthesized
QVQLQESGGGLVQAGGSLRLSCAASGYFLFTMGWYRQAPGKERELVAAISNGTTTNYADSVKGRFTISRDNAKNTVYLQMNSLKPEDTAVYYCAVDQSYQTGDVQLFLDAFYYWGQGTQVTVSS

SEQ ID NO: 19281 - protein, 117 aa, Artificial Sequence
  Chemically Synthesized
QVQLQESGGGLVQAGGSLRLSCAASGSIFGAPHMGWYRQAPGKEREFVASINDGGITYYADSVKGRFTISRDNAKNTVYLQMNSLKPEDTAVYYCAAYSTRTFLIYWGQGTQVTVSS

SEQ ID NO: 19282 - protein, 118 aa, Artificial Sequence
  Chemically Synthesized
QVQLQESGGGLVQAGGSLRLSCAASGNIFSVQGMGWYRQAPGKEREFVAGINYGATTYYADSVKGRFTISRDNAKNTVYLQMNSLKPEDTAVYYCAAIAHQYDWHRYWGQGTQVTVSS

SEQ ID NO: 19283 - protein, 122 aa, Artificial Sequence
  Chemically Synthesized
QVQLQESGGGLVQAGGSLRLSCAASGSISTADTMGWYRQAPGKEREFVASIDLGSSTNYADSVKGRFTISRDNAKNTVYLQMNSLKPEDTAVYYCAATTWGYQLWYFPLGYWGQGTQVTVSS

SEQ ID NO: 19284 - protein, 118 aa, Artificial Sequence
  Chemically Synthesized
QVQLQESGGGLVQAGGSLRLSCAASGTIFALYVMGWYRQAPGKERELVASIGDGSNTYYADSVKGRFTISRDNAKNTVYLQMNSLKPEDTAVYYCAVESRRDIFHDYWGQGTQVTVSS

SEQ ID NO: 19285 - protein, 115 aa, Artificial Sequence
  Chemically Synthesized
QVQLQESGGGLVQAGGSLRLSCAASGTISDSASMGWYRQAPGKEREFVASIAEGSITNYADSVKGRFTISRDNAKNTVYLQMNSLKPEDTAVYYCAARVLSTLYWGQGTQVTVSS

SEQ ID NO: 19286 - protein, 118 aa, Artificial Sequence
  Chemically Synthesized
QVQLQESGGGLVQAGGSLRLSCAASGYISYIYHMGWYRQAPGKEREFVATITVGTITNYADSVKGRFTISRDNAKNTVYLQMNSLKPEDTAVYYCAAYALHLGRFTYWGQGTQVTVSS

SEQ ID NO: 19287 - protein, 118 aa, Artificial Sequence
  Chemically Synthesized
QVQLQESGGGLVQAGGSLRLSCAASGTIFFLVGMGWYRQAPGKERELVATIAEGTTTNYADSVKGRFTISRDNAKNTVYLQMNSLKPEDTAVYYCAASVPYRGYFYYWGQGTQVTVSS

SEQ ID NO: 19288 - protein, 122 aa, Artificial Sequence
  Chemically Synthesized
QVQLQESGGGLVQAGGSLRLSCAASGNISYGGYMGWYRQAPGKEREFVAAISSGAITNYADSVKGRFTISRDNAKNTVYLQMNSLKPEDTAVYYCAADRDGSRASIDVHDYWGQGTQVTVSS

SEQ ID NO: 19289 - protein, 118 aa, Artificial Sequence
  Chemically Synthesized
QVQLQESGGGLVQAGGSLRLSCAASGNISGVLVMGWYRQAPGKEREFVAAIGVGAITYYADSVKGRFTISRDNAKNTVYLQMNSLKPEDTAVYYCAVYYPVYYDFLYWGQGTQVTVSS

SEQ ID NO: 19290 - protein, 126 aa, Artificial Sequence
  Chemically Synthesized
QVQLQESGGGLVQAGGSLRLSCAASGYISETDNMGWYRQAPGKEREFVASIDYGGNTYYADSVKGRFTISRDNAKNTVYLQMNSLKPEDTAVYYCAANYDPDGPQSRAYPIYYYYWGQGTQVTVSS

SEQ ID NO: 19291 - protein, 125 aa, Artificial Sequence
  Chemically Synthesized
QVQLQESGGGLVQAGGSLRLSCAASGSISGGPFMGWYRQAPGKEREFVAGIGPGASTYYADSVKGRFTISRDNAKNTVYLQMNSLKPEDTAVYYCAADYYSVRTNRTTGLITMYWGQGTQVTVSS

SEQ ID NO: 19292 - protein, 125 aa, Artificial Sequence
  Chemically Synthesized
QVQLQESGGGLVQAGGSLRLSCAASGTIFHYDTMGWYRQAPGKERELVASISYGTSTNYADSVKGRFTISRDNAKNTVYLQMNSLKPEDTAVYYCAARTTGQYTGNTTVKTTMYWGQGTQVTVSS

SEQ ID NO: 19293 - protein, 122 aa, Artificial Sequence
  Chemically Synthesized
QVQLQESGGGLVQAGGSLRLSCAASGYIFYRDSMGWYRQAPGKEREFVASIAYGANTYYADSVKGRFTISRDNAKNTVYLQMNSLKPEDTAVYYCAVKYARLYTDYYDLAYWGQGTQVTVSS

SEQ ID NO: 19294 - protein, 117 aa, Artificial Sequence
  Chemically Synthesized
QVQLQESGGGLVQAGGSLRLSCAASGTISLDVYMGWYRQAPGKERELVAAINHGASTYYADSVKGRFTISRDNAKNTVYLQMNSLKPEDTAVYYCAVSVSRESLGYWGQGTQVTVSS

SEQ ID NO: 19295 - protein, 117 aa, Artificial Sequence
  Chemically Synthesized
QVQLQESGGGLVQAGGSLRLSCAASGTIFPAATMGWYRQAPGKEREFVAAINSGGSTYADSVKGRFTISRDNAKNTVYLQMNSLKPEDTAVYYCAVYPYGWRSYYYWGQGTQVTVSS

SEQ ID NO: 19296 - protein, 118 aa, Artificial Sequence
  Chemically Synthesized
QVQLQESGGGLVQAGGSLRLSCAASGYISNYYTMGWYRQAPGKEREFVASIGGGGITNYADSVKGRFTISRDNAKNTVYLQMNSLKPEDTAVYYCAAADVYRRNFAYWGQGTQVTVSS

SEQ ID NO: 19297 - protein, 117 aa, Artificial Sequence
  Chemically Synthesized
QVQLQESGGGLVQAGGSLRLSCAASGSIFPLYEMGWYRQAPGKEREFVASIDKGAITNYADSVKGRFTISRDNAKNTVYLQMNSLKPEDTAVYYCAADQSVLTTIYWGQGTQVTVSS

SEQ ID NO: 19298 - protein, 118 aa, Artificial Sequence
  Chemically Synthesized
QVQLQESGGGLVQAGGSLRLSCAASGNIFPDDVMGWYRQAPGKEREFVATIGRGTTTNYADSVKGRFTISRDNAKNTVYLQMNSLKPEDTAVYYCATLLTRTTLVIYWGQGTQVTVSS

SEQ ID NO: 19299 - protein, 121 aa, Artificial Sequence
  Chemically Synthesized
QVQLQESGGGLVQAGGSLRLSCAASGTIFDAPMGWYRQAPGKEREFVAAIDDGGTTNYADSVKGRFTISRDNAKNTVYLQMNSLKPEDTAVYYCAAITTLSYRTRLDHDYWGQGTQVTVSS

SEQ ID NO: 19300 - protein, 122 aa, Artificial Sequence
  Chemically Synthesized
QVQLQESGGGLVQAGGSLRLSCAASGYIFAILSMGWYRQAPGKERELVASIGSGASTYYADSVKGRFTISRDNAKNTVYLQMNSLKPEDTAVYYCAAFGQDTTDPLYDHYYWGQGTQVTVSS

SEQ ID NO: 19301 - protein, 118 aa, Artificial Sequence
  Chemically Synthesized
QVQLQESGGGLVQAGGSLRLSCAASGSISYDLPMGWYRQAPGKEREFVAAIAYGGITYYADSVKGRFTISRDNAKNTVYLQMNSLKPEDTAVYYCAVARPYEVWLPYWGQGTQVTVSS

SEQ ID NO: 19302 - protein, 118 aa, Artificial Sequence
  Chemically Synthesized
QVQLQESGGGLVQAGGSLRLSCAASGTIFISDYMGWYRQAPGKEREFVASIGSGASTNYADSVKGRFTISRDNAKNTVYLQMNSLKPEDTAVYYCAVDGPERGVLGYWGQGTQVTVSS

SEQ ID NO: 19303 - protein, 125 aa, Artificial Sequence
  Chemically Synthesized
QVQLQESGGGLVQAGGSLRLSCAASGNISYTSSMGWYRQAPGKERELVAAITTGASTNYADSVKGRFTISRDNAKNTVYLQMNSLKPEDTAVYYCAATYPPGNGYYVDYDQHRYWGQGTQVTVSS

SEQ ID NO: 19304 - protein, 122 aa, Artificial Sequence
  Chemically Synthesized
QVQLQESGGGLVQAGGSLRLSCAASGTIFVQLYMGWYRQAPGKEREFVASIAHGGITYYADSVKGRFTISRDNAKNTVYLQMNSLKPEDTAVYYCAALYRVDDYYGSDHYYWGQGTQVTVSS

SEQ ID NO: 19305 - protein, 118 aa, Artificial Sequence
  Chemically Synthesized
QVQLQESGGGLVQAGGSLRLSCAASGNISRPRHMGWYRQAPGKEREFVAAIGVGTITNYADSVKGRFTISRDNAKNTVYLQMNSLKPEDTAVYYCAAEFHEVQYLRYWGQGTQVTVSS

SEQ ID NO: 19306 - protein, 122 aa, Artificial Sequence
  Chemically Synthesized
QVQLQESGGGLVQAGGSLRLSCAASGYIFLDDYMGWYRQAPGKEREFVATINRGGITNYADSVKGRFTISRDNAKNTVYLQMNSLKPEDTAVYYCAVGLGVYFGWIYVHSYWGQGTQVTVSS

SEQ ID NO: 19307 - protein, 126 aa, Artificial Sequence
  Chemically Synthesized
QVQLQESGGGLVQAGGSLRLSCAASGTISSRGFMGWYRQAPGKERELVAGIGVGANTNYADSVKGRFTISRDNAKNTVYLQMNSLKPEDTAVYYCAVSNDVLSRYYNDTHSSHSYWGQGTQVTVSS

SEQ ID NO: 19308 - protein, 122 aa, Artificial Sequence
  Chemically Synthesized
QVQLQESGGGLVQAGGSLRLSCAASGSIFAGRSMGWYRQAPGKEREFVAAIGYGSSTYYADSVKGRFTISRDNAKNTVYLQMNSLKPEDTAVYYCAAVDDYTPGLAYRLVYWGQGTQVTVSS

SEQ ID NO: 19309 - protein, 118 aa, Artificial Sequence
  Chemically Synthesized
QVQLQESGGGLVQAGGSLRLSCAASGNISRPYNMGWYRQAPGKEREFVAAIGSGGTTYYADSVKGRFTISRDNAKNTVYLQMNSLKPEDTAVYYCAADYSVGGSLGYWGQGTQVTVSS

SEQ ID NO: 19310 - protein, 118 aa, Artificial Sequence
  Chemically Synthesized
QVQLQESGGGLVQAGGSLRLSCAASGSIFFYALMGWYRQAPGKERELVATIGFGSITNYADSVKGRFTISRDNAKNTVYLQMNSLKPEDTAVYYCAVGNYFKAQHRYWGQGTQVTVSS

SEQ ID NO: 19311 - protein, 117 aa, Artificial Sequence
  Chemically Synthesized
QVQLQESGGGLVQAGGSLRLSCAASGTIFGRYNMGWYRQAPGKEREFVAGIDDGGITYYADSVKGRFTISRDNAKNTVYLQMNSLKPEDTAVYYCAADEGRQYLPYWGQGTQVTVSS

SEQ ID NO: 19312 - protein, 126 aa, Artificial Sequence
  Chemically Synthesized
QVQLQESGGGLVQAGGSLRLSCAASGNISYYVAMGWYRQAPGKERELVAGIDVGTSTNYADSVKGRFTISRDNAKNTVYLQMNSLKPEDTAVYYCAVFVKGDDSDRRYFRIDFDYWGQGTQVTVSS

SEQ ID NO: 19313 - protein, 114 aa, Artificial Sequence
  Chemically Synthesized
QVQLQESGGGLVQAGGSLRLSCAASGTIFIAYIMGWYRQAPGKEREFVATIDRGGTTNYADSVKGRFTISRDNAKNTVYLQMNSLKPEDTAVYYCAVYTYLSYWGQGTQVTVSS

SEQ ID NO: 19314 - protein, 126 aa, Artificial Sequence
  Chemically Synthesized
QVQLQESGGGLVQAGGSLRLSCAASGTIFLYLYMGWYRQAPGKERELVAGIADGTTTYYADSVKGRFTISRDNAKNTVYLQMNSLKPEDTAVYYCAASNNGDTYSRTRRKGRLVYWGQGTQVTVSS

SEQ ID NO: 19315 - protein, 121 aa, Artificial Sequence
  Chemically Synthesized
QVQLQESGGGLVQAGGSLRLSCAASGSISYFHFMGWYRQAPGKEREFVAAINSGGSTNYADSVKGRFTISRDNAKNTVYLQMNSLKPEDTAVYYCAVTGLIDPFSKTNIYWGQGTQVTVSS

SEQ ID NO: 19316 - protein, 118 aa, Artificial Sequence
  Chemically Synthesized
QVQLQESGGGLVQAGGSLRLSCAASGNISASYYMGWYRQAPGKERELVAGIGFGASTYYADSVKGRFTISRDNAKNTVYLQMNSLKPEDTAVYYCAVQYYEYRDLTYWGQGTQVTVSS

SEQ ID NO: 19317 - protein, 126 aa, Artificial Sequence
  Chemically Synthesized
QVQLQESGGGLVQAGGSLRLSCAASGSIFRHDYMGWYRQAPGKERELVAGIDDGTNTYYADSVKGRFTISRDNAKNTVYLQMNSLKPEDTAVYYCAAYSYLAADTGVRDHEVHDYWGQGTQVTVSS

SEQ ID NO: 19318 - protein, 118 aa, Artificial Sequence
  Chemically Synthesized
QVQLQESGGGLVQAGGSLRLSCAASGTISSDAVMGWYRQAPGKERELVAGISFGASTNYADSVKGRFTISRDNAKNTVYLQMNSLKPEDTAVYYCAVWGSRDPWHSYWGQGTQVTVSS

SEQ ID NO: 19319 - protein, 122 aa, Artificial Sequence
  Chemically Synthesized
QVQLQESGGGLVQAGGSLRLSCAASGTISQVYYMGWYRQAPGKERELVAAINNGSTTYYADSVKGRFTISRDNAKNTVYLQMNSLKPEDTAVYYCAAIAYDHIDYFITFVYWGQGTQVTVSS

SEQ ID NO: 19320 - protein, 118 aa, Artificial Sequence
  Chemically Synthesized
QVQLQESGGGLVQAGGSLRLSCAASGTISYHYTMGWYRQAPGKEREFVAAIDGGGNTYYADSVKGRFTISRDNAKNTVYLQMNSLKPEDTAVYYCAADYLDFVSHYYWGQGTQVTVSS

SEQ ID NO: 19321 - protein, 116 aa, Artificial Sequence
  Chemically Synthesized
QVQLQESGGGLVQAGGSLRLSCAASGSISDYAMGWYRQAPGKERELVASIAVGGITNYADSVKGRFTISRDNAKNTVYLQMNSLKPEDTAVYYCAAYEASTFVFYWGQGTQVTVSS

SEQ ID NO: 19322 - protein, 118 aa, Artificial Sequence
  Chemically Synthesized
QVQLQESGGGLVQAGGSLRLSCAASGSIFTYDLMGWYRQAPGKEREFVAGIGYGATTYYADSVKGRFTISRDNAKNTVYLQMNSLKPEDTAVYYCAAYDYVRSDLDYWGQGTQVTVSS

SEQ ID NO: 19323 - protein, 118 aa, Artificial Sequence
  Chemically Synthesized
QVQLQESGGGLVQAGGSLRLSCAASGNIFVGLVMGWYRQAPGKERELVATIAYGATTYYADSVKGRFTISRDNAKNTVYLQMNSLKPEDTAVYYCAVEFTKDINHDYWGQGTQVTVSS

SEQ ID NO: 19324 - protein, 118 aa, Artificial Sequence
  Chemically Synthesized
QVQLQESGGGLVQAGGSLRLSCAASGNISGWDDMGWYRQAPGKEREFVAAISYGGSTNYADSVKGRFTISRDNAKNTVYLQMNSLKPEDTAVYYCAAYDYTDWVYDYWGQGTQVTVSS

SEQ ID NO: 19325 - protein, 118 aa, Artificial Sequence
  Chemically Synthesized
QVQLQESGGGLVQAGGSLRLSCAASGNISYVHHMGWYRQAPGKEREFVATIGPGTSTNYADSVKGRFTISRDNAKNTVYLQMNSLKPEDTAVYYCAVYYTGASDHVYWGQGTQVTVSS

SEQ ID NO: 19326 - protein, 118 aa, Artificial Sequence
  Chemically Synthesized
QVQLQESGGGLVQAGGSLRLSCAASGSIFWTIYMGWYRQAPGKERELVATISYGSNTNYADSVKGRFTISRDNAKNTVYLQMNSLKPEDTAVYYCAVWRRGRYRHGYWGQGTQVTVSS

SEQ ID NO: 19327 - protein, 117 aa, Artificial Sequence
  Chemically Synthesized
QVQLQESGGGLVQAGGSLRLSCAASGTISTREYMGWYRQAPGKERELVAGIAYGSSTNYADSVKGRFTISRDNAKNTVYLQMNSLKPEDTAVYYCAVLGSWLRDHYWGQGTQVTVSS

SEQ ID NO: 19328 - protein, 118 aa, Artificial Sequence
  Chemically Synthesized
QVQLQESGGGLVQAGGSLRLSCAASGNISYIVYMGWYRQAPGKERELVAGIGFGGITNYADSVKGRFTISRDNAKNTVYLQMNSLKPEDTAVYYCAVVGRGIPALVYWGQGTQVTVSS

SEQ ID NO: 19329 - protein, 118 aa, Artificial Sequence
  Chemically Synthesized
QVQLQESGGGLVQAGGSLRLSCAASGTISRRRDMGWYRQAPGKERELVAAIDRGTTTYYADSVKGRFTISRDNAKNTVYLQMNSLKPEDTAVYYCAVYSTRRYAHYYWGQGTQVTVSS

SEQ ID NO: 19330 - protein, 118 aa, Artificial Sequence
  Chemically Synthesized
QVQLQESGGGLVQAGGSLRLSCAASGSISFQYRMGWYRQAPGKERELVATINEGAITYYADSVKGRFTISRDNAKNTVYLQMNSLKPEDTAVYYCAAANTYLVGYRYWGQGTQVTVSS

SEQ ID NO: 19331 - protein, 121 aa, Artificial Sequence
  Chemically Synthesized
QVQLQESGGGLVQAGGSLRLSCAASGNIFPSYYMGWYRQAPGKEREFVATIVVVVLPYADSVKGRFTISRDNAKNTVYLQMNSLKPEDTAVYYCAARYTHSLDAFWWHRYWGQGTQVTVSS

SEQ ID NO: 19332 - protein, 117 aa, Artificial Sequence
  Chemically Synthesized
QVQLQESGGGLVQAGGSLRLSCAASGNISVSENMGWYRQAPGKEREFVASISTGGNTNYADSVKGRFTISRDNAKNTVYLQMNSLKPEDTAVYYCAANVGSSVTFYWGQGTQVTVSS

SEQ ID NO: 19333 - protein, 118 aa, Artificial Sequence
  Chemically Synthesized
QVQLQESGGGLVQAGGSLRLSCAASGTIFAYDSMGWYRQAPGKERELVASISPGSSTYYADSVKGRFTISRDNAKNTVYLQMNSLKPEDTAVYYCAVLYNDFRGHVYWGQGTQVTVSS

SEQ ID NO: 19334 - protein, 117 aa, Artificial Sequence
  Chemically Synthesized
QVQLQESGGGLVQAGGSLRLSCAASGNISPGYAMGWYRQAPGKERELVATIESVLIPYADSVKGRFTISRDNAKNTVYLQMNSLKPEDTAVYYCAVGANTGLEFGYWGQGTQVTVSS

SEQ ID NO: 19335 - protein, 117 aa, Artificial Sequence
  Chemically Synthesized
QVQLQESGGGLVQAGGSLRLSCAASGNISGATFMGWYRQAPGKEREFVAAIGSVVLPYADSVKGRFTISRDNAKNTVYLQMNSLKPEDTAVYYCAVFGRRLYQFFYWGQGTQVTVSS

SEQ ID NO: 19336 - protein, 116 aa, Artificial Sequence
  Chemically Synthesized
QVQLQESGGGLVQAGGSLRLSCAASGTISSTSAMGWYRQAPGKERELVPLLLLVVVPYADSVKGRFTISRDNAKNTVYLQMNSLKPEDTAVYYCAVQEIVSTTLYWGQGTQVTVSS

SEQ ID NO: 19337 - protein, 126 aa, Artificial Sequence
  Chemically Synthesized
QVQLQESGGGLVQAGGSLRLSCAASGNIFQYYPMGWYRQAPGKEREFVAGIDWGSTTYYADSVKGRFTISRDNAKNTVYLQMNSLKPEDTAVYYCAAAYQLYATPVSDDYQFHIYWGQGTQVTVSS

SEQ ID NO: 19338 - protein, 122 aa, Artificial Sequence
  Chemically Synthesized
QVQLQESGGGLVQAGGSLRLSCAASGSISRPELMGWYRQAPGKEREFVAAISNGGTTYYADSVKGRFTISRDNAKNTVYLQMNSLKPEDTAVYYCAAEVSAHWGGHFPHRYWGQGTQVTVSS

SEQ ID NO: 19339 - protein, 118 aa, Artificial Sequence
  Chemically Synthesized
QVQLQESGGGLVQAGGSLRLSCAASGYISFVVGMGWYRQAPGKEREFVAGIGHGSNTYYADSVKGRFTISRDNAKNTVYLQMNSLKPEDTAVYYCAAVRRLPVWYRYWGQGTQVTVSS

SEQ ID NO: 19340 - protein, 118 aa, Artificial Sequence
  Chemically Synthesized
QVQLQESGGGLVQAGGSLRLSCAASGNIFLKYNMGWYRQAPGKEREFVATITYGTSTNYADSVKGRFTISRDNAKNTVYLQMNSLKPEDTAVYYCAVLVPQYYDLDYWGQGTQVTVSS

SEQ ID NO: 19341 - protein, 126 aa, Artificial Sequence
  Chemically Synthesized
QVQLQESGGGLVQAGGSLRLSCAASGTIFYGVTMGWYRQAPGKERELVAAIDGGATTYYADSVKGRFTISRDNAKNTVYLQMNSLKPEDTAVYYCAARYLEIDAYSDRPYTPLDYWGQGTQVTVSS

SEQ ID NO: 19342 - protein, 122 aa, Artificial Sequence
  Chemically Synthesized
QVQLQESGGGLVQAGGSLRLSCAASGSIFPLLYMGWYRQAPGKERELVASITYGTSTNYADSVKGRFTISRDNAKNTVYLQMNSLKPEDTAVYYCAAYDAERSAYLGPLEYWGQGTQVTVSS

SEQ ID NO: 19343 - protein, 122 aa, Artificial Sequence
  Chemically Synthesized
QVQLQESGGGLVQAGGSLRLSCAASGTIFHYGRMGWYRQAPGKEREFVATISYGGTTYYADSVKGRFTISRDNAKNTVYLQMNSLKPEDTAVYYCAAYYDTVTQWFDYYIYWGQGTQVTVSS

SEQ ID NO: 19344 - protein, 122 aa, Artificial Sequence
  Chemically Synthesized
QVQLQESGGGLVQAGGSLRLSCAASGYISYTVFMGWYRQAPGKEREFVAGIARGTTTYYADSVKGRFTISRDNAKNTVYLQMNSLKPEDTAVYYCAVALGLDPFYPFGYQYWGQGTQVTVSS

SEQ ID NO: 19345 - protein, 122 aa, Artificial Sequence
  Chemically Synthesized
QVQLQESGGGLVQAGGSLRLSCAASGNIFASYWMGWYRQAPGKERELVATIDFGTTTNYADSVKGRFTISRDNAKNTVYLQMNSLKPEDTAVYYCAAGYASPFGWLVSHGYWGQGTQVTVSS

SEQ ID NO: 19346 - protein, 118 aa, Artificial Sequence
  Chemically Synthesized
QVQLQESGGGLVQAGGSLRLSCAASGYISVQYIMGWYRQAPGKERELVASIGSGTTTNYADSVKGRFTISRDNAKNTVYLQMNSLKPEDTAVYYCAAKVIQPPTHVYWGQGTQVTVSS

SEQ ID NO: 19347 - protein, 121 aa, Artificial Sequence
  Chemically Synthesized
QVQLQESGGGLVQAGGSLRLSCAASGTIFGRGYMGWYRQAPGKERELVAAITSGGNTNYADSVKGRFTISRDNAKNTVYLQMNSLKPEDTAVYYCAVQENISTLTFTSIYWGQGTQVTVSS

SEQ ID NO: 19348 - protein, 118 aa, Artificial Sequence
  Chemically Synthesized
QVQLQESGGGLVQAGGSLRLSCAASGTIFDDDIMGWYRQAPGKERELVATIDDGSSTNYADSVKGRFTISRDNAKNTVYLQMNSLKPEDTAVYYCAAYDVDYDYYAYWGQGTQVTVSS

SEQ ID NO: 19349 - protein, 116 aa, Artificial Sequence
  Chemically Synthesized
QVQLQESGGGLVQAGGSLRLSCAASGNIFDYTVMGWYRQAPGKERELVATINSGAITYYADSVKGRFTISRDNAKNTVYLQMNSLKPEDTAVYYCAAGVKYDYEYWGQGTQVTVSS

SEQ ID NO: 19350 - protein, 118 aa, Artificial Sequence
  Chemically Synthesized
QVQLQESGGGLVQAGGSLRLSCAASGTIFYYYIMGWYRQAPGKEREFVAGIGIGSNTYYADSVKGRFTISRDNAKNTVYLQMNSLKPEDTAVYYCAVVDWFSLDHDYWGQGTQVTVSS

SEQ ID NO: 19351 - protein, 121 aa, Artificial Sequence
  Chemically Synthesized
QVQLQESGGGLVQAGGSLRLSCAASGNISDQSSMGWYRQAPGKEREFVASISRGANTNYADSVKGRFTISRDNAKNTVYLQMNSLKPEDTAVYYCAVYTTVFTGTLTVLYWGQGTQVTVSS

SEQ ID NO: 19352 - protein, 118 aa, Artificial Sequence
  Chemically Synthesized
QVQLQESGGGLVQAGGSLRLSCAASGSISVTWDMGWYRQAPGKERELVAGISRGGSTNYADSVKGRFTISRDNAKNTVYLQMNSLKPEDTAVYYCAAIYSDVDAHAYWGQGTQVTVSS

SEQ ID NO: 19353 - protein, 118 aa, Artificial Sequence
  Chemically Synthesized
QVQLQESGGGLVQAGGSLRLSCAASGNISTDGPMGWYRQAPGKERELVATISNGTNTYYADSVKGRFTISRDNAKNTVYLQMNSLKPEDTAVYYCAVRYERITGYDYWGQGTQVTVSS

SEQ ID NO: 19354 - protein, 126 aa, Artificial Sequence
  Chemically Synthesized
QVQLQESGGGLVQAGGSLRLSCAASGYIFAYGWMGWYRQAPGKERELVAAINAGTSTNYADSVKGRFTISRDNAKNTVYLQMNSLKPEDTAVYYCAAWHYASYYTPYLARGVHSYWGQGTQVTVSS

SEQ ID NO: 19355 - protein, 126 aa, Artificial Sequence
  Chemically Synthesized
QVQLQESGGGLVQAGGSLRLSCAASGTISSWSLMGWYRQAPGKEREFVAAIDGGANTNYADSVKGRFTISRDNAKNTVYLQMNSLKPEDTAVYYCAAPLADVDWEYVWSDRALQYWGQGTQVTVSS

SEQ ID NO: 19356 - protein, 122 aa, Artificial Sequence
  Chemically Synthesized
QVQLQESGGGLVQAGGSLRLSCAASGTISSPWEMGWYRQAPGKEREFVATISHGAITYYADSVKGRFTISRDNAKNTVYLQMNSLKPEDTAVYYCAAEFFRGDRAAFSYRYWGQGTQVTVSS

SEQ ID NO: 19357 - protein, 118 aa, Artificial Sequence
  Chemically Synthesized
QVQLQESGGGLVQAGGSLRLSCAASGYISGFSWMGWYRQAPGKERELVATIGLGSSTNYADSVKGRFTISRDNAKNTVYLQMNSLKPEDTAVYYCAAWTKGDFPYWYWGQGTQVTVSS

SEQ ID NO: 19358 - protein, 118 aa, Artificial Sequence
  Chemically Synthesized
QVQLQESGGGLVQAGGSLRLSCAASGYISYDYAMGWYRQAPGKERELVASIDKGANTYYADSVKGRFTISRDNAKNTVYLQMNSLKPEDTAVYYCAATSDLYNYYIYWGQGTQVTVSS

SEQ ID NO: 19359 - protein, 118 aa, Artificial Sequence
  Chemically Synthesized
QVQLQESGGGLVQAGGSLRLSCAASGSISVAYAMGWYRQAPGKEREFVAGITYGGNTNYADSVKGRFTISRDNAKNTVYLQMNSLKPEDTAVYYCAVYILDSSSLFYWGQGTQVTVSS

SEQ ID NO: 19360 - protein, 118 aa, Artificial Sequence
  Chemically Synthesized
QVQLQESGGGLVQAGGSLRLSCAASGTISPYYYMGWYRQAPGKEREFVAGIGNGATTYYADSVKGRFTISRDNAKNTVYLQMNSLKPEDTAVYYCAASFSGDGVHAYWGQGTQVTVSS

SEQ ID NO: 19361 - protein, 122 aa, Artificial Sequence
  Chemically Synthesized
QVQLQESGGGLVQAGGSLRLSCAASGYISSDYVMGWYRQAPGKEREFVATINYGSTTNYADSVKGRFTISRDNAKNTVYLQMNSLKPEDTAVYYCAANARLVVWWYYGYAYWGQGTQVTVSS

SEQ ID NO: 19362 - protein, 118 aa, Artificial Sequence
  Chemically Synthesized
QVQLQESGGGLVQAGGSLRLSCAASGYIFYYAAMGWYRQAPGKEREFVAGIDYGATTYYADSVKGRFTISRDNAKNTVYLQMNSLKPEDTAVYYCAAYPGYTRDHFYWGQGTQVTVSS

SEQ ID NO: 19363 - protein, 121 aa, Artificial Sequence
  Chemically Synthesized
QVQLQESGGGLVQAGGSLRLSCAASGTISARVMGWYRQAPGKERELVASIGYGAITNYADSVKGRFTISRDNAKNTVYLQMNSLKPEDTAVYYCAARDWPVRDPSNGLDYWGQGTQVTVSS

SEQ ID NO: 19364 - protein, 117 aa, Artificial Sequence
  Chemically Synthesized
QVQLQESGGGLVQAGGSLRLSCAASGSISGRYAMGWYRQAPGKEREFVAGIDPVVLPYADSVKGRFTISRDNAKNTVYLQMNSLKPEDTAVYYCAATYFAHYPFGYWGQGTQVTVSS

SEQ ID NO: 19365 - protein, 122 aa, Artificial Sequence
  Chemically Synthesized
QVQLQESGGGLVQAGGSLRLSCAASGSIFSPRFMGWYRQAPGKERELVAAIDYGASTYYADSVKGRFTISRDNAKNTVYLQMNSLKPEDTAVYYCAVLWGLSYYRRYSHGYWGQGTQVTVSS

SEQ ID NO: 19366 - protein, 119 aa, Artificial Sequence
  Chemically Synthesized
QVQLQESGGGLVQAGGSLRLSCAASGTMVTLMGWYRQAPGKEREFVAAINEGGSTNYADSVKGRFTISRDNAKNTVYLQMNSLKPEDTAVYYCAARSVLVTSTKTTIYWGQGTQVTVSS

SEQ ID NO: 19367 - protein, 118 aa, Artificial Sequence
  Chemically Synthesized
QVQLQESGGGLVQAGGSLRLSCAASGTIFESDNMGWYRQAPGKERELVAGIAGGANTNYADSVKGRFTISRDNAKNTVYLQMNSLKPEDTAVYYCAVIEHVDSPLEYWGQGTQVTVSS

SEQ ID NO: 19368 - protein, 122 aa, Artificial Sequence
  Chemically Synthesized
QVQLQESGGGLVQAGGSLRLSCAASGYISNTVRMGWYRQAPGKERELVASIDRGGTTNYADSVKGRFTISRDNAKNTVYLQMNSLKPEDTAVYYCAAISGSRYYYYQAHRYWGQGTQVTVSS

SEQ ID NO: 19369 - protein, 118 aa, Artificial Sequence
  Chemically Synthesized
QVQLQESGGGLVQAGGSLRLSCAASGTIFWYQYMGWYRQAPGKERELVASIDTGTITNYADSVKGRFTISRDNAKNTVYLQMNSLKPEDTAVYYCAARWREHYTYPYWGQGTQVTVSS

SEQ ID NO: 19370 - protein, 121 aa, Artificial Sequence
  Chemically Synthesized
QVQLQESGGGLVQAGGSLRLSCAASGTISHGSGMGWYRQAPGKEREFVATISAGAITNYADSVKGRFTISRDNAKNTVYLQMNSLKPEDTAVYYCAADVYGGYRDCLIIYWGQGTQVTVSS

SEQ ID NO: 19371 - protein, 122 aa, Artificial Sequence
  Chemically Synthesized
QVQLQESGGGLVQAGGSLRLSCAASGNIFFPYSMGWYRQAPGKERELVASIGYGAITYYADSVKGRFTISRDNAKNTVYLQMNSLKPEDTAVYYCAVYYYRSNGFKKWHRYWGQGTQVTVSS

SEQ ID NO: 19372 - protein, 125 aa, Artificial Sequence
  Chemically Synthesized
QVQLQESGGGLVQAGGSLRLSCAASGNISNTVQMGWYRQAPGKEREFVAAINSVVLPYADSVKGRFTISRDNAKNTVYLQMNSLKPEDTAVYYCAAPYDGLHQIYSFATDGLSYWGQGTQVTVSS

SEQ ID NO: 19373 - protein, 126 aa, Artificial Sequence
  Chemically Synthesized
QVQLQESGGGLVQAGGSLRLSCAASGSISSGSIMGWYRQAPGKERELVASISDGATTYYADSVKGRFTISRDNAKNTVYLQMNSLKPEDTAVYYCAAVPSDYAYIAWSTDTGHYYWGQGTQVTVSS

SEQ ID NO: 19374 - protein, 125 aa, Artificial Sequence
  Chemically Synthesized
QVQLQESGGGLVQAGGSLRLSCAASGSISWRDRMGWYRQAPGKEREFVASINQGSITNYADSVKGRFTISRDNAKNTVYLQMNSLKPEDTAVYYCAVYYGDYVGDSYEYVGYVYWGQGTQVTVSS

SEQ ID NO: 19375 - protein, 122 aa, Artificial Sequence
  Chemically Synthesized
QVQLQESGGGLVQAGGSLRLSCAASGNISSRYVMGWYRQAPGKERELVATITYGGITYYADSVKGRFTISRDNAKNTVYLQMNSLKPEDTAVYYCAVYDVDFYVFFVDYAYWGQGTQVTVSS

SEQ ID NO: 19376 - protein, 112 aa, Artificial Sequence
  Chemically Synthesized
QVQLQESGGGLVQAGGSLRLSCAASGYISLTYGMGWYRQAPGKERELVAGITVGATTYYADSVKGRFTISRDNAKNTVYLQMNSLKPEDTAVYYCAATFLYWGQGTQVTVSS

SEQ ID NO: 19377 - protein, 122 aa, Artificial Sequence
  Chemically Synthesized
QVQLQESGGGLVQAGGSLRLSCAASGNISDYYSMGWYRQAPGKERELVASIGLGASTNYADSVKGRFTISRDNAKNTVYLQMNSLKPEDTAVYYCAVQYEWAPRNNTAFYYWGQGTQVTVSS

SEQ ID NO: 19378 - protein, 118 aa, Artificial Sequence
  Chemically Synthesized
QVQLQESGGGLVQAGGSLRLSCAASGYISLYGKMGWYRQAPGKEREFVAGIADGANTNYADSVKGRFTISRDNAKNTVYLQMNSLKPEDTAVYYCAAEVNYDSYLDYWGQGTQVTVSS

SEQ ID NO: 19379 - protein, 118 aa, Artificial Sequence
  Chemically Synthesized
QVQLQESGGGLVQAGGSLRLSCAASGSIFSRNLMGWYRQAPGKERELVAAINAGTITNYADSVKGRFTISRDNAKNTVYLQMNSLKPEDTAVYYCAALYGYSRWFDYWGQGTQVTVSS

SEQ ID NO: 19380 - protein, 122 aa, Artificial Sequence
  Chemically Synthesized
QVQLQESGGGLVQAGGSLRLSCAASGSISDRYIMGWYRQAPGKERELVATIAYGAITYYADSVKGRFTISRDNAKNTVYLQMNSLKPEDTAVYYCAVYRAELFNAYDGYYYWGQGTQVTVSS

SEQ ID NO: 19381 - protein, 123 aa, Artificial Sequence
  Chemically Synthesized
QVQLQESGGGLVQAGGSLRLSCAASGTISPATVMGWYRQAPGKEREFVASIDFGGNTNYADSVKGRFTISRDNAKNTVYLQMNSLKPEDTAVYYCAASDYAGWYDDFLGHWYWGQGTQVTVSS

SEQ ID NO: 19382 - protein, 122 aa, Artificial Sequence
  Chemically Synthesized
QVQLQESGGGLVQAGGSLRLSCAASGYISWFGYMGWYRQAPGKERELVAAINEGANTNYADSVKGRFTISRDNAKNTVYLQMNSLKPEDTAVYYCAAGVTSFYIDTSDLLYWGQGTQVTVSS

SEQ ID NO: 19383 - protein, 122 aa, Artificial Sequence
  Chemically Synthesized
QVQLQESGGGLVQAGGSLRLSCAASGTIFNQDYMGWYRQAPGKEREFVAAISVGTNTYYADSVKGRFTISRDNAKNTVYLQMNSLKPEDTAVYYCAVVQNSYLYRGYWFLYWGQGTQVTVSS

SEQ ID NO: 19384 - protein, 116 aa, Artificial Sequence
  Chemically Synthesized
QVQLQESGGGLVQAGGSLRLSCAASGTISGVDDMGWYRQAPGKEREFVAGIDLGANTYYADSVKGRFTISRDNAKNTVYLQMNSLKPEDTAVYYCAAGLRSGLSYWGQGTQVTVSS

SEQ ID NO: 19385 - protein, 118 aa, Artificial Sequence
  Chemically Synthesized
QVQLQESGGGLVQAGGSLRLSCAASGYIFLAYDMGWYRQAPGKERELVAGITYGTITYYADSVKGRFTISRDNAKNTVYLQMNSLKPEDTAVYYCAVLIRGWRTLAYWGQGTQVTVSS

SEQ ID NO: 19386 - protein, 120 aa, Artificial Sequence
  Chemically Synthesized
QVQLQESGGGLVQAGGSLRLSCAASGYIFARVGMGWYRQAPGKEREFVATITDGGITYYADSVKGRFTISRDNAKNTVYLQMNSLKPEDTAVYYCAVGYYDGWHYYHAYWGQGTQVTVSS

SEQ ID NO: 19387 - protein, 118 aa, Artificial Sequence
  Chemically Synthesized
QVQLQESGGGLVQAGGSLRLSCAASGSIFYHYQMGWYRQAPGKEREFVAGIGSGANTNYADSVKGRFTISRDNAKNTVYLQMNSLKPEDTAVYYCAAGLSLYFYLSYWGQGTQVTVSS

SEQ ID NO: 19388 - protein, 120 aa, Artificial Sequence
  Chemically Synthesized
QVQLQESGGGLVQAGGSLRLSCAASGNISFRQDMGWYRQAPGKERELVLIVGANTNYADSVKGRFTISRDNAKNTVYLQMNSLKPEDTAVYYCAARYYSSGYAWIPFWYWGQGTQVTVSS

SEQ ID NO: 19389 - protein, 118 aa, Artificial Sequence
  Chemically Synthesized
QVQLQESGGGLVQAGGSLRLSCAASGNIFDSAEMGWYRQAPGKERELVAGIARGGSTYYADSVKGRFTISRDNAKNTVYLQMNSLKPEDTAVYYCAANSRTLDAFSYWGQGTQVTVSS

SEQ ID NO: 19390 - protein, 118 aa, Artificial Sequence
  Chemically Synthesized
QVQLQESGGGLVQAGGSLRLSCAASGTISGRYYMGWYRQAPGKEREFVATIGSGATTYYADSVKGRFTISRDNAKNTVYLQMNSLKPEDTAVYYCAAREEDKARFPYWGQGTQVTVSS

SEQ ID NO: 19391 - protein, 126 aa, Artificial Sequence
  Chemically Synthesized
QVQLQESGGGLVQAGGSLRLSCAASGTISLYVHMGWYRQAPGKEREFVATISHGGNTNYADSVKGRFTISRDNAKNTVYLQMNSLKPEDTAVYYCAALIRPDDRDGDRYDPQHAYWGQGTQVTVSS

SEQ ID NO: 19392 - protein, 122 aa, Artificial Sequence
  Chemically Synthesized
QVQLQESGGGLVQAGGSLRLSCAASGYISDTYYMGWYRQAPGKEREFVATIDHGGNTNYADSVKGRFTISRDNAKNTVYLQMNSLKPEDTAVYYCAAYVKPLSGYDYDHPYWGQGTQVTVSS

SEQ ID NO: 19393 - protein, 117 aa, Artificial Sequence
  Chemically Synthesized
QVQLQESGGGLVQAGGSLRLSCAASGNISRGGGMGWYRQAPGKEREFVATIATGVVPYADSVKGRFTISRDNAKNTVYLQMNSLKPEDTAVYYCAAESTTLVGHVYWGQGTQVTVSS

SEQ ID NO: 19394 - protein, 121 aa, Artificial Sequence
  Chemically Synthesized
QVQLQESGGGLVQAGGSLRLSCAASGTISWQGMGWYRQAPGKERELVAAITNGATTYYADSVKGRFTISRDNAKNTVYLQMNSLKPEDTAVYYCAVYASVRDHINDGYDYWGQGTQVTVSS

SEQ ID NO: 19395 - protein, 118 aa, Artificial Sequence
  Chemically Synthesized
QVQLQESGGGLVQAGGSLRLSCAASGSIFYLTKMGWYRQAPGKEREFVAAIDNGTNTYYADSVKGRFTISRDNAKNTVYLQMNSLKPEDTAVYYCAASYADSPFYSYWGQGTQVTVSS

SEQ ID NO: 19396 - protein, 118 aa, Artificial Sequence
  Chemically Synthesized
QVQLQESGGGLVQAGGSLRLSCAASGNISGAYGMGWYRQAPGKERELVAAITSGGSTYYADSVKGRFTISRDNAKNTVYLQMNSLKPEDTAVYYCAVYDFVGGYHNYWGQGTQVTVSS

SEQ ID NO: 19397 - protein, 121 aa, Artificial Sequence
  Chemically Synthesized
QVQLQESGGGLVQAGGSLRLSCAASGTISTGVYMGWYRQAPGKEREFVATISSVVLPYADSVKGRFTISRDNAKNTVYLQMNSLKPEDTAVYYCAAYLYGADDQDILLRYWGQGTQVTVSS

SEQ ID NO: 19398 - protein, 118 aa, Artificial Sequence
  Chemically Synthesized
QVQLQESGGGLVQAGGSLRLSCAASGYISRARYMGWYRQAPGKERELVAAIAFGGNTYYADSVKGRFTISRDNAKNTVYLQMNSLKPEDTAVYYCAAIRYLARNLLYWGQGTQVTVSS

SEQ ID NO: 19399 - protein, 122 aa, Artificial Sequence
  Chemically Synthesized
QVQLQESGGGLVQAGGSLRLSCAASGNISYAYTMGWYRQAPGKEREFVAAITVGSSTNYADSVKGRFTISRDNAKNTVYLQMNSLKPEDTAVYYCAVPYYPGFIDPTRLVYWGQGTQVTVSS

SEQ ID NO: 19400 - protein, 111 aa, Artificial Sequence
  Chemically Synthesized
QVQLQESGGGLVQAGGSLRLSCAASGTIFYSRMGWYRQAPGKEREFVAGIDYGGSTYYADSVKGRFTISRDNAKNTVYLQMNSLKPEDTAVYYCAASLYYWGQGTQVTVSS

SEQ ID NO: 19401 - protein, 122 aa, Artificial Sequence
  Chemically Synthesized
QVQLQESGGGLVQAGGSLRLSCAASGSISRTDSMGWYRQAPGKEREFVATITTGSNTNYADSVKGRFTISRDNAKNTVYLQMNSLKPEDTAVYYCAVAYYYSTYRYATYDYWGQGTQVTVSS

SEQ ID NO: 19402 - protein, 117 aa, Artificial Sequence
  Chemically Synthesized
QVQLQESGGGLVQAGGSLRLSCAASGSISSTWMGWYRQAPGKERELVAGIDSGTNTYYADSVKGRFTISRDNAKNTVYLQMNSLKPEDTAVYYCAAQYDDDDPFSYWGQGTQVTVSS

SEQ ID NO: 19403 - protein, 118 aa, Artificial Sequence
  Chemically Synthesized
QVQLQESGGGLVQAGGSLRLSCAASGNISRWQVMGWYRQAPGKERELVAAIDYGGSTYYADSVKGRFTISRDNAKNTVYLQMNSLKPEDTAVYYCAASLDDAPALPYWGQGTQVTVSS

SEQ ID NO: 19404 - protein, 122 aa, Artificial Sequence
  Chemically Synthesized
QVQLQESGGGLVQAGGSLRLSCAASGTIFGDPVMGWYRQAPGKERELVASIGGGGNTNYADSVKGRFTISRDNAKNTVYLQMNSLKPEDTAVYYCAVDYTDYVSYDYYFGYWGQGTQVTVSS

SEQ ID NO: 19405 - protein, 118 aa, Artificial Sequence
  Chemically Synthesized
QVQLQESGGGLVQAGGSLRLSCAASGTISGYLDMGWYRQAPGKERELVAGINLGATTNYADSVKGRFTISRDNAKNTVYLQMNSLKPEDTAVYYCAAGVPAGQWSFYWGQGTQVTVSS

SEQ ID NO: 19406 - protein, 118 aa, Artificial Sequence
  Chemically Synthesized
QVQLQESGGGLVQAGGSLRLSCAASGSISYYFFMGWYRQAPGKERELVATIDWGTSTYYADSVKGRFTISRDNAKNTVYLQMNSLKPEDTAVYYCAVLTDTYLYLPYWGQGTQVTVSS

SEQ ID NO: 19407 - protein, 121 aa, Artificial Sequence
  Chemically Synthesized
QVQLQESGGGLVQAGGSLRLSCAASGTISVSGHMGWYRQAPGKERELVAAIGSVLIPYADSVKGRFTISRDNAKNTVYLQMNSLKPEDTAVYYCAAGRGVPVNSILVMVYWGQGTQVTVSS

SEQ ID NO: 19408 - protein, 118 aa, Artificial Sequence
  Chemically Synthesized
QVQLQESGGGLVQAGGSLRLSCAASGNIFYLYYMGWYRQAPGKEREFVAAIGYGTTTYYADSVKGRFTISRDNAKNTVYLQMNSLKPEDTAVYYCAATYRTRYGHRYWGQGTQVTVSS

SEQ ID NO: 19409 - protein, 118 aa, Artificial Sequence
  Chemically Synthesized
QVQLQESGGGLVQAGGSLRLSCAASGSISRTGYMGWYRQAPGKERELVAGIARGTTTYYADSVKGRFTISRDNAKNTVYLQMNSLKPEDTAVYYCAAVQQYLQDHDYWGQGTQVTVSS

SEQ ID NO: 19410 - protein, 116 aa, Artificial Sequence
  Chemically Synthesized
QVQLQESGGGLVQAGGSLRLSCAASGSISDTSAMGWYRQAPGKEREFVASITGGGTTYYADSVKGRFTISRDNAKNTVYLQMNSLKPEDTAVYYCAATPRDGHNYWGQGTQVTVSS

SEQ ID NO: 19411 - protein, 109 aa, Artificial Sequence
  Chemically Synthesized
QVQLQESGGGLVQAGGSLRLSCAASGYISSYYGMGWYRQAPGKERELVAAINTGASTYYADSVKGRFTISRDNAKNTVYLQMNSLKPEDTAVYYCAVYWGQGTQVTVSS

SEQ ID NO: 19412 - protein, 116 aa, Artificial Sequence
  Chemically Synthesized
QVQLQESGGGLVQAGGSLRLSCAASGTIFPGYLMGWYRQAPGKERELVASISGGSITYYADSVKGRFTISRDNAKNTVYLQMNSLKPEDTAVYYCAARYAREHYYWGQGTQVTVSS

SEQ ID NO: 19413 - protein, 122 aa, Artificial Sequence
  Chemically Synthesized
QVQLQESGGGLVQAGGSLRLSCAASGSIFRPGIMGWYRQAPGKEREFVATIANGSSTNYADSVKGRFTISRDNAKNTVYLQMNSLKPEDTAVYYCAVYVRDGAFGTYQHSYWGQGTQVTVSS

SEQ ID NO: 19414 - protein, 122 aa, Artificial Sequence
  Chemically Synthesized
QVQLQESGGGLVQAGGSLRLSCAASGTISSVQYMGWYRQAPGKERELVAAIAPGTTTNYADSVKGRFTISRDNAKNTVYLQMNSLKPEDTAVYYCAADSYDYDRWDTALQYWGQGTQVTVSS

SEQ ID NO: 19415 - protein, 122 aa, Artificial Sequence
  Chemically Synthesized
QVQLQESGGGLVQAGGSLRLSCAASGTISAVIIMGWYRQAPGKERELVATISYGSTTYYADSVKGRFTISRDNAKNTVYLQMNSLKPEDTAVYYCAVGQYDDFGREVWYVYWGQGTQVTVSS

SEQ ID NO: 19416 - protein, 118 aa, Artificial Sequence
  Chemically Synthesized
QVQLQESGGGLVQAGGSLRLSCAASGNISSNPPMGWYRQAPGKERELVATISHGGNTYYADSVKGRFTISRDNAKNTVYLQMNSLKPEDTAVYYCAVGNAYLADHTYWGQGTQVTVSS

SEQ ID NO: 19417 - protein, 118 aa, Artificial Sequence
  Chemically Synthesized
QVQLQESGGGLVQAGGSLRLSCAASGNISPVRGMGWYRQAPGKERELVATINPGGNTNYADSVKGRFTISRDNAKNTVYLQMNSLKPEDTAVYYCAARYTKAYDHPYWGQGTQVTVSS

SEQ ID NO: 19418 - protein, 121 aa, Artificial Sequence
  Chemically Synthesized
QVQLQESGGGLVQAGGSLRLSCAASGSIFIDPYMGWYRQAPGKERELASIGYGAITYYADSVKGRFTISRDNAKNTVYLQMNSLKPEDTAVYYCAAQTYTRSYLSRYHGYWGQGTQVTVSS

SEQ ID NO: 19419 - protein, 122 aa, Artificial Sequence
  Chemically Synthesized
QVQLQESGGGLVQAGGSLRLSCAASGTIFRYVVMGWYRQAPGKERELVASISDGGNTYYADSVKGRFTISRDNAKNTVYLQMNSLKPEDTAVYYCAVDDRVGYSSYGSYPYWGQGTQVTVSS

SEQ ID NO: 19420 - protein, 118 aa, Artificial Sequence
  Chemically Synthesized
QVQLQESGGGLVQAGGSLRLSCAASGSISGLTNMGWYRQAPGKERELVAAIGQGYYYQYADSVKGRFTISRDNAKNTVYLQMNSLKPEDTAVYYCAADKYTDFIHWYWGQGTQVTVSS

SEQ ID NO: 19421 - protein, 117 aa, Artificial Sequence
  Chemically Synthesized
QVQLQESGGGLVQAGGSLRLSCAASGTISPDDVMGWYRQAPGKERELVATISVGSTTYYADSVKGRFTISRDNAKNTVYLQMNSLKPEDTAVYYCAASVPSRTSLYWGQGTQVTVSS

SEQ ID NO: 19422 - protein, 122 aa, Artificial Sequence
  Chemically Synthesized
QVQLQESGGGLVQAGGSLRLSCAASGTIFLYLYMGWYRQAPGKEREFVATISPGGSTNYADSVKGRFTISRDNAKNTVYLQMNSLKPEDTAVYYCAAGTTQDYKRYYQYLYWGQGTQVTVSS

SEQ ID NO: 19423 - protein, 122 aa, Artificial Sequence
  Chemically Synthesized
QVQLQESGGGLVQAGGSLRLSCAASGNISRSLDMGWYRQAPGKERELVAGIGIGTITYYADSVKGRFTISRDNAKNTVYLQMNSLKPEDTAVYYCAVRDPSGSVTHIDYAYWGQGTQVTVSS

SEQ ID NO: 19424 - protein, 118 aa, Artificial Sequence
  Chemically Synthesized
QVQLQESGGGLVQAGGSLRLSCAASGTISANAHMGWYRQAPGKERELVATIGTGGNTYYADSVKGRFTISRDNAKNTVYLQMNSLKPEDTAVYYCAVWHGGSSLYGYWGQGTQVTVSS

SEQ ID NO: 19425 - protein, 118 aa, Artificial Sequence
  Chemically Synthesized
QVQLQESGGGLVQAGGSLRLSCAASGSISYVHYMGWYRQAPGKEREFVAAITLGGNTYYADSVKGRFTISRDNAKNTVYLQMNSLKPEDTAVYYCAVYTQSLFPHYYWGQGTQVTVSS

SEQ ID NO: 19426 - protein, 121 aa, Artificial Sequence
  Chemically Synthesized
QVQLQESGGGLVQAGGSLRLSCAASGLFLSVVMGWYRQAPGKEREFVASITDGSTTNYADSVKGRFTISRDNAKNTVYLQMNSLKPEDTAVYYCAVRRKDDGNYLGNFYYWGQGTQVTVSS

SEQ ID NO: 19427 - protein, 125 aa, Artificial Sequence
  Chemically Synthesized
QVQLQESGGGLVQAGGSLRLSCAASGNISVYSMGWYRQAPGKERELVATIDDGANTNYADSVKGRFTISRDNAKNTVYLQMNSLKPEDTAVYYCAAYQDTRPRAAGDWGPYFSYWGQGTQVTVSS

SEQ ID NO: 19428 - protein, 126 aa, Artificial Sequence
  Chemically Synthesized
QVQLQESGGGLVQAGGSLRLSCAASGSISGTYHMGWYRQAPGKERELVAAIGYGSITYYADSVKGRFTISRDNAKNTVYLQMNSLKPEDTAVYYCAVHPLREDRLDYTFGTRFGYWGQGTQVTVSS

SEQ ID NO: 19429 - protein, 127 aa, Artificial Sequence
  Chemically Synthesized
QVQLQESGGGLVQAGGSLRLSCAASGYIFYGTGMGWYRQAPGKEREFVAAIGLDGTNTNYADSVKGRFTISRDNAKNTVYLQMNSLKPEDTAVYYCAVPSGYEFTYDGLPAGTHRYWGQGTQVTVSS

SEQ ID NO: 19430 - protein, 118 aa, Artificial Sequence
  Chemically Synthesized
QVQLQESGGGLVQAGGSLRLSCAASGTIFRGIYMGWYRQAPGKERELVAGITQGGSTYYADSVKGRFTISRDNAKNTVYLQMNSLKPEDTAVYYCAAFDVPSRTFLYWGQGTQVTVSS

SEQ ID NO: 19431 - protein, 126 aa, Artificial Sequence
  Chemically Synthesized
QVQLQESGGGLVQAGGSLRLSCAASGYIFLYVAMGWYRQAPGKEREFVAAISIGSSTNYADSVKGRFTISRDNAKNTVYLQMNSLKPEDTAVYYCAAYTYYYDTDWLPYTDVHRYWGQGTQVTVSS

SEQ ID NO: 19432 - protein, 126 aa, Artificial Sequence
  Chemically Synthesized
QVQLQESGGGLVQAGGSLRLSCAASGYIFDAYYMGWYRQAPGKERELVASIALGATTYYADSVKGRFTISRDNAKNTVYLQMNSLKPEDTAVYYCAVLATEHYDDSLSWLKSLVYWGQGTQVTVSS

SEQ ID NO: 19433 - protein, 118 aa, Artificial Sequence
  Chemically Synthesized
QVQLQESGGGLVQAGGSLRLSCAASGTIFPYTDMGWYRQAPGKEREFVAGISYGSNTNYADSVKGRFTISRDNAKNTVYLQMNSLKPEDTAVYYCAAVPACYLRSFYWGQGTQVTVSS

SEQ ID NO: 19434 - protein, 121 aa, Artificial Sequence
  Chemically Synthesized
QVQLQESGGGLVQAGGSLRLSCAASGSISALYYMGWYRQAPGKERELVATIGGGSTNYADSVKGRFTISRDNAKNTVYLQMNSLKPEDTAVYYCAAEGQHDVLWSRLYGYWGQGTQVTVSS

SEQ ID NO: 19435 - protein, 117 aa, Artificial Sequence
  Chemically Synthesized
QVQLQESGGGLVQAGGSLRLSCAASGNISGDRYMGWYRQAPGKERELVAAINSGANTYYADSVKGRFTISRDNAKNTVYLQMNSLKPEDTAVYYCAVLYDSVSTMYWGQGTQVTVSS

SEQ ID NO: 19436 - protein, 117 aa, Artificial Sequence
  Chemically Synthesized
QVQLQESGGGLVQAGGSLRLSCAASGYISGSEWMGWYRQAPGKERELVAGIAYGANTYADSVKGRFTISRDNAKNTVYLQMNSLKPEDTAVYYCAVYGSGFDFYDYWGQGTQVTVSS

SEQ ID NO: 19437 - protein, 118 aa, Artificial Sequence
  Chemically Synthesized
QVQLQESGGGLVQAGGSLRLSCAASGSIFTPNIMGWYRQAPGKEREFVAGITPGGITNYADSVKGRFTISRDNAKNTVYLQMNSLKPEDTAVYYCAVTESGTDTLYYWGQGTQVTVSS

SEQ ID NO: 19438 - protein, 121 aa, Artificial Sequence
  Chemically Synthesized
QVQLQESGGGLVQAGGSLRLSCAASGNISDSVMGWYRQAPGKERELVAAIGYGSNTYYADSVKGRFTISRDNAKNTVYLQMNSLKPEDTAVYYCAAGQSSYAAYDLEHWYWGQGTQVTVSS

SEQ ID NO: 19439 - protein, 118 aa, Artificial Sequence
  Chemically Synthesized
QVQLQESGGGLVQAGGSLRLSCAASGTISGPRVMGWYRQAPGKEREFVAAINQGAITYYADSVKGRFTISRDNAKNTVYLQMNSLKPEDTAVYYCAVRDYYISTHVYWGQGTQVTVSS

SEQ ID NO: 19440 - protein, 116 aa, Artificial Sequence
  Chemically Synthesized
QVQLQESGGGLVQAGGSLRLSCAASGNISADSYMGWYRQAPGKERELVAGIAIGGTTNYADSVKGRFTISRDNAKNTVYLQMNSLKPEDTAVYYCAVLYYYYHDYWGQGTQVTVSS

SEQ ID NO: 19441 - protein, 122 aa, Artificial Sequence
  Chemically Synthesized
QVQLQESGGGLVQAGGSLRLSCAASGSISVLGDMGWYRQAPGKERELVAGIAGGASTNYADSVKGRFTISRDNAKNTVYLQMNSLKPEDTAVYYCAVRVQYPYLVTVHYDYWGQGTQVTVSS

SEQ ID NO: 19442 - protein, 122 aa, Artificial Sequence
  Chemically Synthesized
QVQLQESGGGLVQAGGSLRLSCAASGTISWEGYMGWYRQAPGKERELVASINLGSNTNYADSVKGRFTISRDNAKNTVYLQMNSLKPEDTAVYYCAADYIDYADGGYLHYYWGQGTQVTVSS

SEQ ID NO: 19443 - protein, 118 aa, Artificial Sequence
  Chemically Synthesized
QVQLQESGGGLVQAGGSLRLSCAASGYISRDALMGWYRQAPGKERELVATITDGTTTYYADSVKGRFTISRDNAKNTVYLQMNSLKPEDTAVYYCAVTDQYGEQLYYWGQGTQVTVSS

SEQ ID NO: 19444 - protein, 118 aa, Artificial Sequence
  Chemically Synthesized
QVQLQESGGGLVQAGGSLRLSCAASGSISHSFTMGWYRQAPGKERELVATISRGGSTYYADSVKGRFTISRDNAKNTVYLQMNSLKPEDTAVYYCAVDVRDGEEFPYWGQGTQVTVSS

SEQ ID NO: 19445 - protein, 126 aa, Artificial Sequence
  Chemically Synthesized
QVQLQESGGGLVQAGGSLRLSCAASGYIFGAPVMGWYRQAPGKEREFVAAITYGSNTNYADSVKGRFTISRDNAKNTVYLQMNSLKPEDTAVYYCAAPSRYTNGNENYLRYYFAYWGQGTQVTVSS

SEQ ID NO: 19446 - protein, 126 aa, Artificial Sequence
  Chemically Synthesized
QVQLQESGGGLVQAGGSLRLSCAASGSISTVDTMGWYRQAPGKEREFVAGIAYGTSTNYADSVKGRFTISRDNAKNTVYLQMNSLKPEDTAVYYCAVGALQATYDNYTWVVTLRYWGQGTQVTVSS

SEQ ID NO: 19447 - protein, 121 aa, Artificial Sequence
  Chemically Synthesized
QVQLQESGGGLVQAGGSLRLSCAASGSILLCSMGWYRQAPGKERELVASIGVGSSTNYADSVKGRFTISRDNAKNTVYLQMNSLKPEDTAVYYCAATGNWDSRFLNYLPYWGQGTQVTVSS

SEQ ID NO: 19448 - protein, 118 aa, Artificial Sequence
  Chemically Synthesized
QVQLQESGGGLVQAGGSLRLSCAASGSISYDIIMGWYRQAPGKEREFVASINIGANTNYADSVKGRFTISRDNAKNTVYLQMNSLKPEDTAVYYCAVWDSVHTDYPYWGQGTQVTVSS

SEQ ID NO: 19449 - protein, 116 aa, Artificial Sequence
  Chemically Synthesized
QVQLQESGGGLVQAGGSLRLSCAASGYIFYAGMGWYRQAPGKEREFVASISYGASTNYADSVKGRFTISRDNAKNTVYLQMNSLKPEDTAVYYCAVSLMVLSLLYWGQGTQVTVSS

SEQ ID NO: 19450 - protein, 121 aa, Artificial Sequence
  Chemically Synthesized
QVQLQESGGGLVQAGGSLRLSCAASGSISQYLMGWYRQAPGKEREFVAAIDSGTSTYYADSVKGRFTISRDNAKNTVYLQMNSLKPEDTAVYYCAVDYKPYVLAPDGHEYWGQGTQVTVSS

SEQ ID NO: 19451 - protein, 122 aa, Artificial Sequence
  Chemically Synthesized
QVQLQESGGGLVQAGGSLRLSCAASGTIFGYGDMGWYRQAPGKERELVAAIGAGTSTNYADSVKGRFTISRDNAKNTVYLQMNSLKPEDTAVYYCAVGYGLYVARRYVHYYWGQGTQVTVSS

SEQ ID NO: 19452 - protein, 122 aa, Artificial Sequence
  Chemically Synthesized
QVQLQESGGGLVQAGGSLRLSCAASGTIFPYDFMGWYRQAPGKERELVAGIASGATTNYADSVKGRFTISRDNAKNTVYLQMNSLKPEDTAVYYCAVHPDDLYFYRGGYVYWGQGTQVTVSS

SEQ ID NO: 19453 - protein, 118 aa, Artificial Sequence
  Chemically Synthesized
QVQLQESGGGLVQAGGSLRLSCAASGYISGAKYMGWYRQAPGKEREFVAGIARGGSTYYADSVKGRFTISRDNAKNTVYLQMNSLKPEDTAVYYCAVRGYRQRSYWYWGQGTQVTVSS

SEQ ID NO: 19454 - protein, 119 aa, Artificial Sequence
  Chemically Synthesized
QVQLQESGGGLVQAGGSLRLSCAASGTIFSGQYMGWYRQAPGKERELVAAIGYGSITYYADSVKGRFTISRDNAKNTVYLQMNSLKPEDTAVYYCAADWGAYPVDHGYWGQGTQVTVSS

SEQ ID NO: 19455 - protein, 120 aa, Artificial Sequence
  Chemically Synthesized
QVQLQESGGGLVQAGGSLRLSCAASGTISSVVNMGWYRQAPGKERELVAAIGAGVPYADSVKGRFTISRDNAKNTVYLQMNSLKPEDTAVYYCAVGGQYSSQGRTDFWYWGQGTQVTVSS

SEQ ID NO: 19456 - protein, 126 aa, Artificial Sequence
  Chemically Synthesized
QVQLQESGGGLVQAGGSLRLSCAASGNIFGTFYMGWYRQAPGKERELVASINTGSITYYADSVKGRFTISRDNAKNTVYLQMNSLKPEDTAVYYCAATQQLYLDSRRTVSSIHPYWGQGTQVTVSS

SEQ ID NO: 19457 - protein, 122 aa, Artificial Sequence
  Chemically Synthesized
QVQLQESGGGLVQAGGSLRLSCAASGTIFSLTYMGWYRQAPGKEREFVAAITVGASTYYADSVKGRFTISRDNAKNTVYLQMNSLKPEDTAVYYCAVPNGAAVLDDNGYNYWGQGTQVTVSS

SEQ ID NO: 19458 - protein, 122 aa, Artificial Sequence
  Chemically Synthesized
QVQLQESGGGLVQAGGSLRLSCAASGTIFPRIYMGWYRQAPGKERELVASINFGTTTNYADSVKGRFTISRDNAKNTVYLQMNSLKPEDTAVYYCAAPGDSADAWYIPYDYWGQGTQVTVSS

SEQ ID NO: 19459 - protein, 118 aa, Artificial Sequence
  Chemically Synthesized
QVQLQESGGGLVQAGGSLRLSCAASGTIFVLPTMGWYRQAPGKERELVAAISYGGNTYYADSVKGRFTISRDNAKNTVYLQMNSLKPEDTAVYYCARRGRQRYLYQYWGQGTQVTVSS

SEQ ID NO: 19460 - protein, 122 aa, Artificial Sequence
  Chemically Synthesized
QVQLQESGGGLVQAGGSLRLSCAASGYISGDWYMGWYRQAPGKERELVAAIGTGGSTYYADSVKGRFTISRDNAKNTVYLQMNSLKPEDTAVYYCAAYDPYQYANWYIHAYWGQGTQVTVSS

SEQ ID NO: 19461 - protein, 125 aa, Artificial Sequence
  Chemically Synthesized
QVQLQESGGGLVQAGGSLRLSCAASGTISYLSAMGWYRQAPGKERELVAAIDYGGTTYYADSVKGRFTISRDNAKNTVYLQMNSLKPEDTAVYYCAAGEDPGDNRYDTSLFTLYWGQGTQVTVSS

SEQ ID NO: 19462 - protein, 118 aa, Artificial Sequence
  Chemically Synthesized
QVQLQESGGGLVQAGGSLRLSCAASGTIFYYDYMGWYRQAPGKERELVATITSGSTTYYADSVKGRFTISRDNAKNTVYLQMNSLKPEDTAVYYCAVYQFARLFHGYWGQGTQVTVSS

SEQ ID NO: 19463 - protein, 118 aa, Artificial Sequence
  Chemically Synthesized
QVQLQESGGGLVQAGGSLRLSCAASGSIFWEKEMGWYRQAPGKERELVASIAVGATTNYADSVKGRFTISRDNAKNTVYLQMNSLKPEDTAVYYCAANVYAQGFLGYWGQGTQVTVSS

SEQ ID NO: 19464 - protein, 122 aa, Artificial Sequence
  Chemically Synthesized
QVQLQESGGGLVQAGGSLRLSCAASGYISHPAAMGWYRQAPGKEREFVAAITDGGITYYADSVKGRFTISRDNAKNTVYLQMNSLKPEDTAVYYCAVYDYVGTWADVPYGYWGQGTQVTVSS

SEQ ID NO: 19465 - protein, 111 aa, Artificial Sequence
  Chemically Synthesized
QVQLQESGGGLVQAGGSLRLSCAASGYIFGGYAMGWYRQAPGKERELVAAITTGATTNYADSVKGRFTISRDNAKNTVYLQMNSLKPEDTAVYYCAWLDYWGQGTQVTVSS

SEQ ID NO: 19466 - protein, 118 aa, Artificial Sequence
  Chemically Synthesized
QVQLQESGGGLVQAGGSLRLSCAASGTISAYSSMGWYRQAPGKERELVASISSGGSTYYADSVKGRFTISRDNAKNTVYLQMNSLKPEDTAVYYCAVGRLDRWWFPYWGQGTQVTVSS

SEQ ID NO: 19467 - protein, 118 aa, Artificial Sequence
  Chemically Synthesized
QVQLQESGGGLVQAGGSLRLSCAASGYISRESDMGWYRQAPGKEREFVATISFGTNTNYADSVKGRFTISRDNAKNTVYLQMNSLKPEDTAVYYCAAYSSDSYYLSYWGQGTQVTVSS

SEQ ID NO: 19468 - protein, 118 aa, Artificial Sequence
  Chemically Synthesized
QVQLQESGGGLVQAGGSLRLSCAASGYISDPFVMGWYRQAPGKERELVATIAQGGSTNYADSVKGRFTISRDNAKNTVYLQMNSLKPEDTAVYYCAVPYKSYGYHYYWGQGTQVTVSS

SEQ ID NO: 19469 - protein, 118 aa, Artificial Sequence
  Chemically Synthesized
QVQLQESGGGLVQAGGSLRLSCAASGSISWADRMGWYRQAPGKEREFVASITHGSTTNYADSVKGRFTISRDNAKNTVYLQMNSLKPEDTAVYYCAAHDELERDLYYWGQGTQVTVSS

SEQ ID NO: 19470 - protein, 127 aa, Artificial Sequence
  Chemically Synthesized
QVQLQESGGGLVQAGGSLRLSCAASGTISVRTGVMGWYRQAPGKERELVATIDRGGSTYYADSVKGRFTISRDNAKNTVYLQMNSLKPEDTAVYYCAVRPTDHEVAYGDIDRYYYYWGQGTQVTVSS

SEQ ID NO: 19471 - protein, 118 aa, Artificial Sequence
  Chemically Synthesized
QVQLQESGGGLVQAGGSLRLSCAASGYIFLTSTMGWYRQAPGKEREFVATIAAGGSTYYADSVKGRFTISRDNAKNTVYLQMNSLKPEDTAVYYCAVTGLITARFLYWGQGTQVTVSS

SEQ ID NO: 19472 - protein, 118 aa, Artificial Sequence
  Chemically Synthesized
QVQLQESGGGLVQAGGSLRLSCAASGSISGRPLMGWYRQAPGKERELVATIGTGTNTNYADSVKGRFTISRDNAKNTVYLQMNSLKPEDTAVYYCAVEFRDYYDFYYWGQGTQVTVSS

SEQ ID NO: 19473 - protein, 118 aa, Artificial Sequence
  Chemically Synthesized
QVQLQESGGGLVQAGGSLRLSCAASGTISDTPAMGWYRQAPGKERELVATINIGGNTYYADSVKGRFTISRDNAKNTVYLQMNSLKPEDTAVYYCAVTYVYGGVHQYWGQGTQVTVSS

SEQ ID NO: 19474 - protein, 122 aa, Artificial Sequence
  Chemically Synthesized
QVQLQESGGGLVQAGGSLRLSCAASGSISGYVTMGWYRQAPGKEREFVAAIGPGGSTYYADSVKGRFTISRDNAKNTVYLQMNSLKPEDTAVYYCAAERGTVHQGAGYHRYWGQGTQVTVSS

SEQ ID NO: 19475 - protein, 118 aa, Artificial Sequence
  Chemically Synthesized
QVQLQESGGGLVQAGGSLRLSCAASGSISLIGYMGWYRQAPGKERELVATIAYGTITYYADSVKGRFTISRDNAKNTVYLQMNSLKPEDTAVYYCAAYWSIIWGHAYWGQGTQVTVSS

SEQ ID NO: 19476 - protein, 121 aa, Artificial Sequence
  Chemically Synthesized
QVQLQESGGGLVQAGGSLRLSCAASGTIFNLNMGWYRQAPGKERELVAGIDYGSTTNYADSVKGRFTISRDNAKNTVYLQMNSLKPEDTAVYYCAVVDVDSPLDTEVYRYWGQGTQVTVSS

SEQ ID NO: 19477 - protein, 118 aa, Artificial Sequence
  Chemically Synthesized
QVQLQESGGGLVQAGGSLRLSCAASGSISIVGYMGWYRQAPGKEREFVAGITVGGNTYYADSVKGRFTISRDNAKNTVYLQMNSLKPEDTAVYYCAAYYYHAYLFTYWGQGTQVTVSS

SEQ ID NO: 19478 - protein, 126 aa, Artificial Sequence
  Chemically Synthesized
QVQLQESGGGLVQAGGSLRLSCAASGNISYGPYMGWYRQAPGKEREFVAAIAVGSTTYYADSVKGRFTISRDNAKNTVYLQMNSLKPEDTAVYYCAANHYPVYAPQYADDQSHGYWGQGTQVTVSS

SEQ ID NO: 19479 - protein, 118 aa, Artificial Sequence
  Chemically Synthesized
QVQLQESGGGLVQAGGSLRLSCAASGSIFYLLNMGWYRQAPGKERELVATITGGGTTYYADSVKGRFTISRDNAKNTVYLQMNSLKPEDTAVYYCAVLSIRYLYYVYWGQGTQVTVSS

SEQ ID NO: 19480 - protein, 118 aa, Artificial Sequence
  Chemically Synthesized
QVQLQESGGGLVQAGGSLRLSCAASGTISGLSKMGWYRQAPGKEREFVASISEGGSTNYADSVKGRFTISRDNAKNTVYLQMNSLKPEDTAVYYCAAPVYDADPYPYWGQGTQVTVSS

SEQ ID NO: 19481 - protein, 122 aa, Artificial Sequence
  Chemically Synthesized
QVQLQESGGGLVQAGGSLRLSCAASGNISLGWAMGWYRQAPGKERELVAAIADGSTTNYADSVKGRFTISRDNAKNTVYLQMNSLKPEDTAVYYCAARDVIQWSLYSWLVYWGQGTQVTVSS

SEQ ID NO: 19482 - protein, 118 aa, Artificial Sequence
  Chemically Synthesized
QVQLQESGGGLVQAGGSLRLSCAASGNISGADSMGWYRQAPGKERELVATIAEGGITNYADSVKGRFTISRDNAKNTVYLQMNSLKPEDTAVYYCAVADTSGVYLTYWGQGTQVTVSS

SEQ ID NO: 19483 - protein, 126 aa, Artificial Sequence
  Chemically Synthesized
QVQLQESGGGLVQAGGSLRLSCAASGNISYIYAMGWYRQAPGKERELVATISEGATTYYADSVKGRFTISRDNAKNTVYLQMNSLKPEDTAVYYCAAPATPGNYIPPSFQRRHEYWGQGTQVTVSS

SEQ ID NO: 19484 - protein, 118 aa, Artificial Sequence
  Chemically Synthesized
QVQLQESGGGLVQAGGSLRLSCAASGYIFYVPVMGWYRQAPGKEREFVAAINYGTITNYADSVKGRFTISRDNAKNTVYLQMNSLKPEDTAVYYCAAYFPYRTSHSYWGQGTQVTVSS

SEQ ID NO: 19485 - protein, 123 aa, Artificial Sequence
  Chemically Synthesized
QVQLQESGGGLVQAGGSLRLSCAASGNISSTTMGWYRQAPGKERELVASIGTGATTNYADSVKGRFTISRDNAKNTVYLQMNSLKPEDTAVYYCAARYDGNKLETNYPDHAYWGQGTQVTVSS

SEQ ID NO: 19486 - protein, 118 aa, Artificial Sequence
  Chemically Synthesized
QVQLQESGGGLVQAGGSLRLSCAASGYISAGVLMGWYRQAPGKERELVASIDYGGTTYYADSVKGRFTISRDNAKNTVYLQMNSLKPEDTAVYYCAADALSDDSLFYWGQGTQVTVSS

SEQ ID NO: 19487 - protein, 122 aa, Artificial Sequence
  Chemically Synthesized
QVQLQESGGGLVQAGGSLRLSCAASGTISWYRYMGWYRQAPGKERELVAGIGFGGTTYYADSVKGRFTISRDNAKNTVYLQMNSLKPEDTAVYYCAAHRQYRYYVYNYHRYWGQGTQVTVSS

SEQ ID NO: 19488 - protein, 118 aa, Artificial Sequence
  Chemically Synthesized
QVQLQESGGGLVQAGGSLRLSCAASGNISGSHAMGWYRQAPGKERELVAAIGYGTNTYYADSVKGRFTISRDNAKNTVYLQMNSLKPEDTAVYYCAVTIGDHTRHPYWGQGTQVTVSS

SEQ ID NO: 19489 - protein, 124 aa, Artificial Sequence
  Chemically Synthesized
QVQLQESGGGLVQAGGSLRLSCAASGIFLRVLMGWYRQAPGKERELVATIDGGTTNYADSVKGRFTISRDNAKNTVYLQMNSLKPEDTAVYYCAVANPYDGTVIYDSGYRFTYWGQGTQVTVSS

SEQ ID NO: 19490 - protein, 118 aa, Artificial Sequence
  Chemically Synthesized
QVQLQESGGGLVQAGGSLRLSCAASGTIFVFYWMGWYRQAPGKERELVAGITPGSNTYYADSVKGRFTISRDNAKNTVYLQMNSLKPEDTAVYYCAVRYFGRSWHPYWGQGTQVTVSS

SEQ ID NO: 19491 - protein, 122 aa, Artificial Sequence
  Chemically Synthesized
QVQLQESGGGLVQAGGSLRLSCAASGNISLSPYMGWYRQAPGKERELVAAIGYGATTNYADSVKGRFTISRDNAKNTVYLQMNSLKPEDTAVYYCAVDPGQDAIGYADFQYWGQGTQVTVSS

SEQ ID NO: 19492 - protein, 113 aa, Artificial Sequence
  Chemically Synthesized
QVQLQESGGGLVQAGGSLRLSCAASGTISTHEYMGWYRQAPGKERELVAAISRGAITYYADSVKGRFTISRDNAKNTVYLQMNSLKPEDTAVYYCAYYGHDYWGQGTQVTVSS

SEQ ID NO: 19493 - protein, 122 aa, Artificial Sequence
  Chemically Synthesized
QVQLQESGGGLVQAGGSLRLSCAASGYIFHWPRMGWYRQAPGKERELVATIGYGSITYYADSVKGRFTISRDNAKNTVYLQMNSLKPEDTAVYYCAVDDYAYYIDLHYLRYWGQGTQVTVSS

SEQ ID NO: 19494 - protein, 119 aa, Artificial Sequence
  Chemically Synthesized
QVQLQESGGGLVQAGGSLRLSCAASGYIFFYRKMGWYRQAPGKERELVATIAFGGSTNYADSVKGRFTISRDNAKNTVYLQMNSLKPEDTAVYYCAVGFDIQYRSYGYWGQGTQVTVSS

SEQ ID NO: 19495 - protein, 122 aa, Artificial Sequence
  Chemically Synthesized
QVQLQESGGGLVQAGGSLRLSCAASGTIFAGNVMGWYRQAPGKEREFVASITAGGITYYADSVKGRFTISRDNAKNTVYLQMNSLKPEDTAVYYCAVYSTDEYYDHYPHRYWGQGTQVTVSS

SEQ ID NO: 19496 - protein, 118 aa, Artificial Sequence
  Chemically Synthesized
QVQLQESGGGLVQAGGSLRLSCAASGNISRGLVMGWYRQAPGKERELVASIGYGGSTYYADSVKGRFTISRDNAKNTVYLQMNSLKPEDTAVYYCAAGYYSYVIYGYWGQGTQVTVSS

SEQ ID NO: 19497 - protein, 122 aa, Artificial Sequence
  Chemically Synthesized
QVQLQESGGGLVQAGGSLRLSCAASGNIFNYYIMGWYRQAPGKEREFVAGIALGTTTYYADSVKGRFTISRDNAKNTVYLQMNSLKPEDTAVYYCAVLTYRTSGVQHRHEYWGQGTQVTVSS

SEQ ID NO: 19498 - protein, 122 aa, Artificial Sequence
  Chemically Synthesized
QVQLQESGGGLVQAGGSLRLSCAASGNISGDTAMGWYRQAPGKEREFVAAITYGGNTNYADSVKGRFTISRDNAKNTVYLQMNSLKPEDTAVYYCAAYIIVYRAADLRFIYWGQGTQVTVSS

SEQ ID NO: 19499 - protein, 126 aa, Artificial Sequence
  Chemically Synthesized
QVQLQESGGGLVQAGGSLRLSCAASGTISERKIMGWYRQAPGKEREFVAAIDPGATTYYADSVKGRFTISRDNAKNTVYLQMNSLKPEDTAVYYCAAGRGGVEPYDGDGIYAFQYWGQGTQVTVSS

SEQ ID NO: 19500 - protein, 126 aa, Artificial Sequence
  Chemically Synthesized
QVQLQESGGGLVQAGGSLRLSCAASGTISTPARMGWYRQAPGKEREFVATISHGASTYYADSVKGRFTISRDNAKNTVYLQMNSLKPEDTAVYYCAVGPFYQYPVNYSFAGRHVYWGQGTQVTVSS

SEQ ID NO: 19501 - protein, 118 aa, Artificial Sequence
  Chemically Synthesized
QVQLQESGGGLVQAGGSLRLSCAASGYISWVYYMGWYRQAPGKEREFVAAIGDGASTYYADSVKGRFTISRDNAKNTVYLQMNSLKPEDTAVYYCAARDGYGIDFSYWGQGTQVTVSS

SEQ ID NO: 19502 - protein, 122 aa, Artificial Sequence
  Chemically Synthesized
QVQLQESGGGLVQAGGSLRLSCAASGSIFQYDDMGWYRQAPGKEREFVATIAYGGITYYADSVKGRFTISRDNAKNTVYLQMNSLKPEDTAVYYCAVGDGTDLGYVYGHEYWGQGTQVTVSS

SEQ ID NO: 19503 - protein, 118 aa, Artificial Sequence
  Chemically Synthesized
QVQLQESGGGLVQAGGSLRLSCAASGTIFRRDIMGWYRQAPGKEREFVAAITYGASTYYADSVKGRFTISRDNAKNTVYLQMNSLKPEDTAVYYCAANRYYYRVHPYWGQGTQVTVSS

SEQ ID NO: 19504 - protein, 122 aa, Artificial Sequence
  Chemically Synthesized
QVQLQESGGGLVQAGGSLRLSCAASGSIFGDYIMGWYRQAPGKEREFVATITTGGSTYYADSVKGRFTISRDNAKNTVYLQMNSLKPEDTAVYYCAAWDYSPLAVDGEYYYWGQGTQVTVSS

SEQ ID NO: 19505 - protein, 118 aa, Artificial Sequence
  Chemically Synthesized
QVQLQESGGGLVQAGGSLRLSCAASGYISPYYSMGWYRQAPGKERELVATITFGANTNYADSVKGRFTISRDNAKNTVYLQMNSLKPEDTAVYYCAAYYSVGVAFIYWGQGTQVTVSS

SEQ ID NO: 19506 - protein, 122 aa, Artificial Sequence
  Chemically Synthesized
QVQLQESGGGLVQAGGSLRLSCAASGYISYNRLMGWYRQAPGKERELVASIAYGGTTYYADSVKGRFTISRDNAKNTVYLQMNSLKPEDTAVYYCAAAIYTFTYYLGPYYYWGQGTQVTVSS

SEQ ID NO: 19507 - protein, 122 aa, Artificial Sequence
  Chemically Synthesized
QVQLQESGGGLVQAGGSLRLSCAASGYIFQTGTMGWYRQAPGKEREFVATIASGGITNYADSVKGRFTISRDNAKNTVYLQMNSLKPEDTAVYYCAADGDREFAGSERLWYWGQGTQVTVSS

SEQ ID NO: 19508 - protein, 122 aa, Artificial Sequence
  Chemically Synthesized
QVQLQESGGGLVQAGGSLRLSCAASGYIFIAFPMGWYRQAPGKERELVASIAYGGITYYADSVKGRFTISRDNAKNTVYLQMNSLKPEDTAVYYCAVQLEFGYVARYGLRYWGQGTQVTVSS

SEQ ID NO: 19509 - protein, 118 aa, Artificial Sequence
  Chemically Synthesized
QVQLQESGGGLVQAGGSLRLSCAASGYISDGADMGWYRQAPGKERELVAGITYGSTTNYADSVKGRFTISRDNAKNTVYLQMNSLKPEDTAVYYCAVALYRLDSHWYWGQGTQVTVSS

SEQ ID NO: 19510 - protein, 126 aa, Artificial Sequence
  Chemically Synthesized
QVQLQESGGGLVQAGGSLRLSCAASGTIFGYTGMGWYRQAPGKERELVAAIDTGGITYYADSVKGRFTISRDNAKNTVYLQMNSLKPEDTAVYYCAVTWSGFSRSFARASVLYGYWGQGTQVTVSS

SEQ ID NO: 19511 - protein, 122 aa, Artificial Sequence
  Chemically Synthesized
QVQLQESGGGLVQAGGSLRLSCAASGTISPVYYMGWYRQAPGKERELVASINSGTNTNYADSVKGRFTISRDNAKNTVYLQMNSLKPEDTAVYYCAAYDRYVVSRQDNHGYWGQGTQVTVSS

SEQ ID NO: 19512 - protein, 118 aa, Artificial Sequence
  Chemically Synthesized
QVQLQESGGGLVQAGGSLRLSCAASGNISTTTYMGWYRQAPGKERELVATINLGSTTYYADSVKGRFTISRDNAKNTVYLQMNSLKPEDTAVYYCAVGPAYQYDHRYWGQGTQVTVSS

SEQ ID NO: 19513 - protein, 126 aa, Artificial Sequence
  Chemically Synthesized
QVQLQESGGGLVQAGGSLRLSCAASGNISYELAMGWYRQAPGKERELVASIGSGGSTYYADSVKGRFTISRDNAKNTVYLQMNSLKPEDTAVYYCAVYYVTNPGSGDYLIDEHGYWGQGTQVTVSS

SEQ ID NO: 19514 - protein, 123 aa, Artificial Sequence
  Chemically Synthesized
QVQLQESGGGLVQAGGSLRLSCAASGNIFGYWDMGWYRQAPGKERELVATISNEGSITYYADSVKGRFTISRDNAKNTVYLQMNSLKPEDTAVYYCAAYTRAQYLPHREYEYWGQGTQVTVSS

SEQ ID NO: 19515 - protein, 122 aa, Artificial Sequence
  Chemically Synthesized
QVQLQESGGGLVQAGGSLRLSCAASGYISSTPGMGWYRQAPGKERELVASIDIGGTTNYADSVKGRFTISRDNAKNTVYLQMNSLKPEDTAVYYCAVAVDEDDTRRLFYAYWGQGTQVTVSS

SEQ ID NO: 19516 - protein, 122 aa, Artificial Sequence
  Chemically Synthesized
QVQLQESGGGLVQAGGSLRLSCAASGTIFYDYIMGWYRQAPGKERELVATISSGGITYYADSVKGRFTISRDNAKNTVYLQMNSLKPEDTAVYYCAASQYSKGGGYTPLDYWGQGTQVTVSS

SEQ ID NO: 19517 - protein, 118 aa, Artificial Sequence
  Chemically Synthesized
QVQLQESGGGLVQAGGSLRLSCAASGYISAGVWMGWYRQAPGKEREFVASITIGGITNYADSVKGRFTISRDNAKNTVYLQMNSLKPEDTAVYYCAVQIRRRYHYFYWGQGTQVTVSS

SEQ ID NO: 19518 - protein, 122 aa, Artificial Sequence
  Chemically Synthesized
QVQLQESGGGLVQAGGSLRLSCAASGNISDGVTMGWYRQAPGKEREFVAGITYGASTNYADSVKGRFTISRDNAKNTVYLQMNSLKPEDTAVYYCAAGYRRDTDNDFGLYYWGQGTQVTVSS

SEQ ID NO: 19519 - protein, 118 aa, Artificial Sequence
  Chemically Synthesized
QVQLQESGGGLVQAGGSLRLSCAASGSISHRPYMGWYRQAPGKERELVAGIARGGITYYADSVKGRFTISRDNAKNTVYLQMNSLKPEDTAVYYCAVDDYLPRRYYYWGQGTQVTVSS

SEQ ID NO: 19520 - protein, 125 aa, Artificial Sequence
  Chemically Synthesized
QVQLQESGGGLVQAGGSLRLSCAASGSIFAADFMGWYRQAPGKEREFVASIGEGTTTNYADSVKGRFTISRDNAKNTVYLQMNSLKPEDTAVYYCAVVEWPLAYPRDGRVRDLYWGQGTQVTVSS

SEQ ID NO: 19521 - protein, 118 aa, Artificial Sequence
  Chemically Synthesized
QVQLQESGGGLVQAGGSLRLSCAASGSISYFYRMGWYRQAPGKERELVATITDGAITNYADSVKGRFTISRDNAKNTVYLQMNSLKPEDTAVYYCAARGPNDTSHKYWGQGTQVTVSS

SEQ ID NO: 19522 - protein, 122 aa, Artificial Sequence
  Chemically Synthesized
QVQLQESGGGLVQAGGSLRLSCAASGSIFATDLMGWYRQAPGKERELVASIGQGGTTYYADSVKGRFTISRDNAKNTVYLQMNSLKPEDTAVYYCAVAGTVDYQRWSHHRYWGQGTQVTVSS

SEQ ID NO: 19523 - protein, 125 aa, Artificial Sequence
  Chemically Synthesized
QVQLQESGGGLVQAGGSLRLSCAASGSILVVVMGWYRQAPGKEREFVASISAGGNTYYADSVKGRFTISRDNAKNTVYLQMNSLKPEDTAVYYCAVYRSFTGTSYDVYDRVFFYWGQGTQVTVSS

SEQ ID NO: 19524 - protein, 122 aa, Artificial Sequence
  Chemically Synthesized
QVQLQESGGGLVQAGGSLRLSCAASGYISDYDEMGWYRQAPGKEREFVATITDGTTTYYADSVKGRFTISRDNAKNTVYLQMNSLKPEDTAVYYCAATTGGYVDTGGNLDYWGQGTQVTVSS

SEQ ID NO: 19525 - protein, 118 aa, Artificial Sequence
  Chemically Synthesized
QVQLQESGGGLVQAGGSLRLSCAASGYIFFGGYMGWYRQAPGKERELVATISSGANTYYADSVKGRFTISRDNAKNTVYLQMNSLKPEDTAVYYCAVDYYAYASLQYWGQGTQVTVSS

SEQ ID NO: 19526 - protein, 126 aa, Artificial Sequence
  Chemically Synthesized
QVQLQESGGGLVQAGGSLRLSCAASGTISASKFMGWYRQAPGKEREFVAGIDSGSTTNYADSVKGRFTISRDNAKNTVYLQMNSLKPEDTAVYYCAVRDLVYRLKFLGGRPYHVYWGQGTQVTVSS

SEQ ID NO: 19527 - protein, 122 aa, Artificial Sequence
  Chemically Synthesized
QVQLQESGGGLVQAGGSLRLSCAASGYISQQFDMGWYRQAPGKEREFVAGIAGGTITYYADSVKGRFTISRDNAKNTVYLQMNSLKPEDTAVYYCAVRGDGGGESYARHYYWGQGTQVTVSS

SEQ ID NO: 19528 - protein, 122 aa, Artificial Sequence
  Chemically Synthesized
QVQLQESGGGLVQAGGSLRLSCAASGNISLAVYMGWYRQAPGKEREFVAGIDYGSNTNYADSVKGRFTISRDNAKNTVYLQMNSLKPEDTAVYYCAVWNGDYYGGVGQYYYWGQGTQVTVSS

SEQ ID NO: 19529 - protein, 121 aa, Artificial Sequence
  Chemically Synthesized
QVQLQESGGGLVQAGGSLRLSCAASGYISLPGNMGWYRQAPGKERELVASIGYGSIPYADSVKGRFTISRDNAKNTVYLQMNSLKPEDTAVYYCAADFFLVGSYGVYHYYWGQGTQVTVSS

SEQ ID NO: 19530 - protein, 125 aa, Artificial Sequence
  Chemically Synthesized
QVQLQESGGGLVQAGGSLRLSCAASGSIFVWASMGWYRQAPGKERELVASIAPGSSTYYADSVKGRFTISRDNAKNTVYLQMNSLKPEDTAVYYCAAVHVGYLSLLTVTVTTMYWGQGTQVTVSS

SEQ ID NO: 19531 - protein, 117 aa, Artificial Sequence
  Chemically Synthesized
QVQLQESGGGLVQAGGSLRLSCAASGSIFYNSSMGWYRQAPGKERELVATIDLGTTTNYADSVKGRFTISRDNAKNTVYLQMNSLKPEDTAVYYCAADRDVLAHDYWGQGTQVTVSS

SEQ ID NO: 19532 - protein, 122 aa, Artificial Sequence
  Chemically Synthesized
QVQLQESGGGLVQAGGSLRLSCAASGTIFAGRKMGWYRQAPGKERELVAAITPGGTTYYADSVKGRFTISRDNAKNTVYLQMNSLKPEDTAVYYCAATLYYDAADLDTHYYWGQGTQVTVSS

SEQ ID NO: 19533 - protein, 118 aa, Artificial Sequence
  Chemically Synthesized
QVQLQESGGGLVQAGGSLRLSCAASGTIFGDGNMGWYRQAPGKEREFVASINDGSTTYYADSVKGRFTISRDNAKNTVYLQMNSLKPEDTAVYYCAAKYANFYGYDYWGQGTQVTVSS

SEQ ID NO: 19534 - protein, 118 aa, Artificial Sequence
  Chemically Synthesized
QVQLQESGGGLVQAGGSLRLSCAASGNIFYADNMGWYRQAPGKERELVASINDGTNTYYADSVKGRFTISRDNAKNTVYLQMNSLKPEDTAVYYCAAVQWRRYAHGYWGQGTQVTVSS

SEQ ID NO: 19535 - protein, 118 aa, Artificial Sequence
  Chemically Synthesized
QVQLQESGGGLVQAGGSLRLSCAASGYIFGSRRMGWYRQAPGKERELVASISTGATTNYADSVKGRFTISRDNAKNTVYLQMNSLKPEDTAVYYCAVDNDRDPRLGYWGQGTQVTVSS

SEQ ID NO: 19536 - protein, 118 aa, Artificial Sequence
  Chemically Synthesized
QVQLQESGGGLVQAGGSLRLSCAASGSISDDDHMGWYRQAPGKEREFVATITYGTSTNYADSVKGRFTISRDNAKNTVYLQMNSLKPEDTAVYYCAAWPQPAHHLYYWGQGTQVTVSS

SEQ ID NO: 19537 - protein, 126 aa, Artificial Sequence
  Chemically Synthesized
QVQLQESGGGLVQAGGSLRLSCAASGSISTYGSMGWYRQAPGKEREFVASIDSGATTYYADSVKGRFTISRDNAKNTVYLQMNSLKPEDTAVYYCAVDPKYADGSTREYEFSHRYWGQGTQVTVSS

SEQ ID NO: 19538 - protein, 118 aa, Artificial Sequence
  Chemically Synthesized
QVQLQESGGGLVQAGGSLRLSCAASGNIFIFHLMGWYRQAPGKEREFVATITDGSTTYYADSVKGRFTISRDNAKNTVYLQMNSLKPEDTAVYYCAAGDQRNSRHYYWGQGTQVTVSS

SEQ ID NO: 19539 - protein, 126 aa, Artificial Sequence
  Chemically Synthesized
QVQLQESGGGLVQAGGSLRLSCAASGSIFPTWDMGWYRQAPGKERELVAGITPGSITYYADSVKGRFTISRDNAKNTVYLQMNSLKPEDTAVYYCAAQGGITLKGDQDQYWYLGYWGQGTQVTVSS

SEQ ID NO: 19540 - protein, 118 aa, Artificial Sequence
  Chemically Synthesized
QVQLQESGGGLVQAGGSLRLSCAASGTIFKSRRMGWYRQAPGKERELVASINVGSNYQYADSVKGRFTISRDNAKNTVYLQMNSLKPEDTAVYYCAVGYHDRPQYDYWGQGTQVTVSS

SEQ ID NO: 19541 - protein, 122 aa, Artificial Sequence
  Chemically Synthesized
QVQLQESGGGLVQAGGSLRLSCAASGSIFIDYDMGWYRQAPGKEREFVASINDGTSTNYADSVKGRFTISRDNAKNTVYLQMNSLKPEDTAVYYCAVRGVDKYAVSNRYAYWGQGTQVTVSS

SEQ ID NO: 19542 - protein, 110 aa, Artificial Sequence
  Chemically Synthesized
QVQLQESGGGLVQAGGSLRLSCAASGSIFDQVDMGWYRQAPGKEREFVAGIGYGGSTNYADSVKGRFTISRDNAKNTVYLQMNSLKPEDTAVYYCALYYWGQGTQVTVSS

SEQ ID NO: 19543 - protein, 118 aa, Artificial Sequence
  Chemically Synthesized
QVQLQESGGGLVQAGGSLRLSCAASGNIFTLYEMGWYRQAPGKEREFVAAIGVGTNTYYADSVKGRFTISRDNAKNTVYLQMNSLKPEDTAVYYCAALYIGAYQYPYWGQGTQVTVSS

SEQ ID NO: 19544 - protein, 126 aa, Artificial Sequence
  Chemically Synthesized
QVQLQESGGGLVQAGGSLRLSCAASGNIFGYSKMGWYRQAPGKEREFVATIAVGSSTYYADSVKGRFTISRDNAKNTVYLQMNSLKPEDTAVYYCAVFPGVNTYPDSDDLLLHYYWGQGTQVTVSS

SEQ ID NO: 19545 - protein, 118 aa, Artificial Sequence
  Chemically Synthesized
QVQLQESGGGLVQAGGSLRLSCAASGTIFPFGDMGWYRQAPGKEREFVATIARGTNTYYADSVKGRFTISRDNAKNTVYLQMNSLKPEDTAVYYCAALLYVGSQFQYWGQGTQVTVSS

SEQ ID NO: 19546 - protein, 117 aa, Artificial Sequence
  Chemically Synthesized
QVQLQESGGGLVQAGGSLRLSCAASGTIFSSYYMGWYRQAPGKERELVAAINTGGSTYYADSVKGRFTISRDNAKNTVYLQMNSLKPEDTAVYYCAAYAYSQNHYYWGQGTQVTVSS

SEQ ID NO: 19547 - protein, 122 aa, Artificial Sequence
  Chemically Synthesized
QVQLQESGGGLVQAGGSLRLSCAASGYISQYVNMGWYRQAPGKERELVAGIGVGSTTNYADSVKGRFTISRDNAKNTVYLQMNSLKPEDTAVYYCAADGGWFTDWYPRYGYWGQGTQVTVSS

SEQ ID NO: 19548 - protein, 126 aa, Artificial Sequence
  Chemically Synthesized
QVQLQESGGGLVQAGGSLRLSCAASGSISYPSCMGWYRQAPGKERELVASIAEGSTTYYADSVKGRFTISRDNAKNTVYLQMNSLKPEDTAVYYCAVFWAYSGLVDDSPTRHHIYWGQGTQVTVSS

SEQ ID NO: 19549 - protein, 122 aa, Artificial Sequence
  Chemically Synthesized
QVQLQESGGGLVQAGGSLRLSCAASGTISSSGEMGWYRQAPGKEREFVATIAHGSSTYYADSVKGRFTISRDNAKNTVYLQMNSLKPEDTAVYYCAAVYFWFDTYSGYHTYWGQGTQVTVSS

SEQ ID NO: 19550 - protein, 126 aa, Artificial Sequence
  Chemically Synthesized
QVQLQESGGGLVQAGGSLRLSCAASGNISIGDYMGWYRQAPGKERELVATITLGANTNYADSVKGRFTISRDNAKNTVYLQMNSLKPEDTAVYYCAARGSGQTWVYYDSARYYDYWGQGTQVTVSS

SEQ ID NO: 19551 - protein, 117 aa, Artificial Sequence
  Chemically Synthesized
QVQLQESGGGLVQAGGSLRLSCAASGTISYDYGMGWYRQAPGKEREFVAAITSVVLPYADSVKGRFTISRDNAKNTVYLQMNSLKPEDTAVYYCAAWKTEDGDHIYWGQGTQVTVSS

SEQ ID NO: 19552 - protein, 119 aa, Artificial Sequence
  Chemically Synthesized
QVQLQESGGGLVQAGGSLRLSCAASGYIFGYPWMGWYRQAPGKEREFVAAINFGGTTYYADSVKGRFTISRDNAKNTVYLQMNSLKPEDTAVYYCAALNVAHDVDHAYWGQGTQVTVSS

SEQ ID NO: 19553 - protein, 118 aa, Artificial Sequence
  Chemically Synthesized
QVQLQESGGGLVQAGGSLRLSCAASGTISRPEFMGWYRQAPGKERELVATISYGGITNYADSVKGRFTISRDNAKNTVYLQMNSLKPEDTAVYYCAVTDAIIAKHPYWGQGTQVTVSS

SEQ ID NO: 19554 - protein, 121 aa, Artificial Sequence
  Chemically Synthesized
QVQLQESGGGLVQAGGSLRLSCAASGSISEDYAMGWYRQAPGKEREFVATIDPGAIPYADSVKGRFTISRDNAKNTVYLQMNSLKPEDTAVYYCAAVGDAGNHYLGGFYYWGQGTQVTVSS

SEQ ID NO: 19555 - protein, 117 aa, Artificial Sequence
  Chemically Synthesized
QVQLQESGGGLVQAGGSLRLSCAASGTISYYPRMGWYRQAPGKEREFVAALMKVLLPYADSVKGRFTISRDNAKNTVYLQMNSLKPEDTAVYYCAAKGITYYYLLYWGQGTQVTVSS

SEQ ID NO: 19556 - protein, 118 aa, Artificial Sequence
  Chemically Synthesized
QVQLQESGGGLVQAGGSLRLSCAASGTISTGPLMGWYRQAPGKEREFVAGIAVGASTNYADSVKGRFTISRDNAKNTVYLQMNSLKPEDTAVYYCAVFPHAYSRYGYWGQGTQVTVSS

SEQ ID NO: 19557 - protein, 117 aa, Artificial Sequence
  Chemically Synthesized
QVQLQESGGGLVQAGGSLRLSCAASGTISVDIVMGWYRQAPGKEREFVASIDDGSTTNYADSVKGRFTISRDNAKNTVYLQMNSLKPEDTAVYYCAVSTVTCMTIYWGQGTQVTVSS

SEQ ID NO: 19558 - protein, 118 aa, Artificial Sequence
  Chemically Synthesized
QVQLQESGGGLVQAGGSLRLSCAASGTISVNYVMGWYRQAPGKEREFVAGITYGAITYYADSVKGRFTISRDNAKNTVYLQMNSLKPEDTAVYYCAVRHETELAYDYWGQGTQVTVSS

SEQ ID NO: 19559 - protein, 122 aa, Artificial Sequence
  Chemically Synthesized
QVQLQESGGGLVQAGGSLRLSCAASGTISSIRRMGWYRQAPGKEREFVASIATGTSTYYADSVKGRFTISRDNAKNTVYLQMNSLKPEDTAVYYCAVRYQHGPRGGYRHPYWGQGTQVTVSS

SEQ ID NO: 19560 - protein, 114 aa, Artificial Sequence
  Chemically Synthesized
QVQLQESGGGLVQAGGSLRLSCAASGTIFYSYYMGWYRQAPGKERELVAAIGAGTTTNYADSVKGRFTISRDNAKNTVYLQMNSLKPEDTAVYYCAVYTWLQYWGQGTQVTVSS

SEQ ID NO: 19561 - protein, 122 aa, Artificial Sequence
  Chemically Synthesized
QVQLQESGGGLVQAGGSLRLSCAASGYIFGGSVMGWYRQAPGKERELVASIGVGTSTYYADSVKGRFTISRDNAKNTVYLQMNSLKPEDTAVYYCAVYRKRWPYVRNTLGYWGQGTQVTVSS

SEQ ID NO: 19562 - protein, 110 aa, Artificial Sequence
  Chemically Synthesized
QVQLQESGGGLVQAGGSLRLSCAASGNISAYYTMGWYRQAPGKEREFVASINAGGTTNYADSVKGRFTISRDNAKNTVYLQMNSLKPEDTAVYYCAHYYWGQGTQVTVSS

SEQ ID NO: 19563 - protein, 122 aa, Artificial Sequence
  Chemically Synthesized
QVQLQESGGGLVQAGGSLRLSCAASGTISYLLQMGWYRQAPGKEREFVAGIANGGITYYADSVKGRFTISRDNAKNTVYLQMNSLKPEDTAVYYCAAVLYLERDDAGDHVYWGQGTQVTVSS

SEQ ID NO: 19564 - protein, 121 aa, Artificial Sequence
  Chemically Synthesized
QVQLQESGGGLVQAGGSLRLSCAASGNISDRPMGWYRQAPGKEREFVAAISTGATTNYADSVKGRFTISRDNAKNTVYLQMNSLKPEDTAVYYCAANVQVQNYYNTILYYWGQGTQVTVSS

SEQ ID NO: 19565 - protein, 122 aa, Artificial Sequence
  Chemically Synthesized
QVQLQESGGGLVQAGGSLRLSCAASGYISNYAFMGWYRQAPGKERELVASIDYGGITNYADSVKGRFTISRDNAKNTVYLQMNSLKPEDTAVYYCAALTYYQRDNRYYHVYWGQGTQVTVSS

SEQ ID NO: 19566 - protein, 122 aa, Artificial Sequence
  Chemically Synthesized
QVQLQESGGGLVQAGGSLRLSCAASGTIFSPRYMGWYRQAPGKERELVAGITGGGNTNYADSVKGRFTISRDNAKNTVYLQMNSLKPEDTAVYYCAAGTASQLWFGSGYPYWGQGTQVTVSS

SEQ ID NO: 19567 - protein, 118 aa, Artificial Sequence
  Chemically Synthesized
QVQLQESGGGLVQAGGSLRLSCAASGYISDRIHMGWYRQAPGKERELVATIGPGGTTYYADSVKGRFTISRDNAKNTVYLQMNSLKPEDTAVYYCAVDDDTNLAHVYWGQGTQVTVSS

SEQ ID NO: 19568 - protein, 117 aa, Artificial Sequence
  Chemically Synthesized
QVQLQESGGGLVQAGGSLRLSCAASGSISDNLFMGWYRQAPGKEREFVASMIWVVIPYADSVKGRFTISRDNAKNTVYLQMNSLKPEDTAVYYCAVDLDVGAWLYYWGQGTQVTVSS

SEQ ID NO: 19569 - protein, 118 aa, Artificial Sequence
  Chemically Synthesized
QVQLQESGGGLVQAGGSLRLSCAASGNISLTYIMGWYRQAPGKERELVAAIGYGGSTNYADSVKGRFTISRDNAKNTVYLQMNSLKPEDTAVYYCAVPPRARQWHYYWGQGTQVTVSS

SEQ ID NO: 19570 - protein, 122 aa, Artificial Sequence
  Chemically Synthesized
QVQLQESGGGLVQAGGSLRLSCAASGNIFPNYLMGWYRQAPGKERELVAAISDGASTYYADSVKGRFTISRDNAKNTVYLQMNSLKPEDTAVYYCAVEGFRTSGADVPYPYWGQGTQVTVSS

SEQ ID NO: 19571 - protein, 122 aa, Artificial Sequence
  Chemically Synthesized
QVQLQESGGGLVQAGGSLRLSCAASGNISRYGTMGWYRQAPGKERELVASINFGSITNYADSVKGRFTISRDNAKNTVYLQMNSLKPEDTAVYYCAAGYDVGQYVPERHHYWGQGTQVTVSS

SEQ ID NO: 19572 - protein, 118 aa, Artificial Sequence
  Chemically Synthesized
QVQLQESGGGLVQAGGSLRLSCAASGYISARYEMGWYRQAPGKEREFVAAISAGSNTNYADSVKGRFTISRDNAKNTVYLQMNSLKPEDTAVYYCAVYRRYPGGHYYWGQGTQVTVSS

SEQ ID NO: 19573 - protein, 118 aa, Artificial Sequence
  Chemically Synthesized
QVQLQESGGGLVQAGGSLRLSCAASGYISAPSAMGWYRQAPGKEREFVAAISSGATTYYADSVKGRFTISRDNAKNTVYLQMNSLKPEDTAVYYCAVVYRDVGYHYYWGQGTQVTVSS

SEQ ID NO: 19574 - protein, 121 aa, Artificial Sequence
  Chemically Synthesized
QVQLQESGGGLVQAGGSLRLSCAASGYISGDYYMGWYRQAPGKERELVAGIGTGASTYYADSVKGRFTISRDNAKNTVYLQMNSLKPEDTAVYYCAAYPHAYIESWLTLYWGQGTQVTVSS

SEQ ID NO: 19575 - protein, 122 aa, Artificial Sequence
  Chemically Synthesized
QVQLQESGGGLVQAGGSLRLSCAASGTIFAPRFMGWYRQAPGKERELVAAITYGGNTNYADSVKGRFTISRDNAKNTVYLQMNSLKPEDTAVYYCAAPAEYADGYDTYYTYWGQGTQVTVSS

SEQ ID NO: 19576 - protein, 121 aa, Artificial Sequence
  Chemically Synthesized
QVQLQESGGGLVQAGGSLRLSCAASGTIFDDYYMGWYRQAPGKEREFVAVLILVLLPYADSVKGRFTISRDNAKNTVYLQMNSLKPEDTAVYYCAVYATDGGQWVYVHDYWGQGTQVTVSS

SEQ ID NO: 19577 - protein, 122 aa, Artificial Sequence
  Chemically Synthesized
QVQLQESGGGLVQAGGSLRLSCAASGSISRPVPMGWYRQAPGKEREFVAGISVGSSTNYADSVKGRFTISRDNAKNTVYLQMNSLKPEDTAVYYCAAIYRTRGPARGYHHYWGQGTQVTVSS

SEQ ID NO: 19578 - protein, 118 aa, Artificial Sequence
  Chemically Synthesized
QVQLQESGGGLVQAGGSLRLSCAASGTISNDYYMGWYRQAPGKEREFVATIAPGSTTNYADSVKGRFTISRDNAKNTVYLQMNSLKPEDTAVYYCAATDLALFLFWYWGQGTQVTVSS

SEQ ID NO: 19579 - protein, 122 aa, Artificial Sequence
  Chemically Synthesized
QVQLQESGGGLVQAGGSLRLSCAASGSISDSRGMGWYRQAPGKEREFVASIGVGSNTNYADSVKGRFTISRDNAKNTVYLQMNSLKPEDTAVYYCAADFSTGYGRYDWHNYWGQGTQVTVSS

SEQ ID NO: 19580 - protein, 117 aa, Artificial Sequence
  Chemically Synthesized
QVQLQESGGGLVQAGGSLRLSCAASGTISREGGMGWYRQAPGKERELVASIGAGAITNYADSVKGRFTISRDNAKNTVYLQMNSLKPEDTAVYYCAALHHTDLSIYWGQGTQVTVSS

SEQ ID NO: 19581 - protein, 118 aa, Artificial Sequence
  Chemically Synthesized
QVQLQESGGGLVQAGGSLRLSCAASGNISDWYAMGWYRQAPGKERELVAAISHGTITNYADSVKGRFTISRDNAKNTVYLQMNSLKPEDTAVYYCAVIYHRLQWFYYWGQGTQVTVSS

SEQ ID NO: 19582 - protein, 118 aa, Artificial Sequence
  Chemically Synthesized
QVQLQESGGGLVQAGGSLRLSCAASGNISSYTRMGWYRQAPGKEREFVAGITLGSTTYYADSVKGRFTISRDNAKNTVYLQMNSLKPEDTAVYYCAVPDSHYYALDYWGQGTQVTVSS

SEQ ID NO: 19583 - protein, 113 aa, Artificial Sequence
  Chemically Synthesized
QVQLQESGGGLVQAGGSLRLSCAASGNIFDDGEMGWYRQAPGKERELVATIYLYADSVKGRFTISRDNAKNTVYLQMNSLKPEDTAVYYCAVYSTDYVYYPYWGQGTQVTVSS

SEQ ID NO: 19584 - protein, 111 aa, Artificial Sequence
  Chemically Synthesized
QVQLQESGGGLVQAGGSLRLSCAASGNIFLRNYMGWYRQAPGKERELVASIAYGANTYYADSVKGRFTISRDNAKNTVYLQMNSLKPEDTAVYYCAATSYWGQGTQVTVSS

SEQ ID NO: 19585 - protein, 118 aa, Artificial Sequence
  Chemically Synthesized
QVQLQESGGGLVQAGGSLRLSCAASGSIFSSATMGWYRQAPGKEREFVAGIADGTSTNYADSVKGRFTISRDNAKNTVYLQMNSLKPEDTAVYYCAVVNGVGPYYYYWGQGTQVTVSS

SEQ ID NO: 19586 - protein, 122 aa, Artificial Sequence
  Chemically Synthesized
QVQLQESGGGLVQAGGSLRLSCAASGYISLYWTMGWYRQAPGKEREFVAAIGRGSITNYADSVKGRFTISRDNAKNTVYLQMNSLKPEDTAVYYCAVNRGRWVLHYDYHGYWGQGTQVTVSS

SEQ ID NO: 19587 - protein, 118 aa, Artificial Sequence
  Chemically Synthesized
QVQLQESGGGLVQAGGSLRLSCAASGYISYTDDMGWYRQAPGKEREFVAAIDLGGNTNYADSVKGRFTISRDNAKNTVYLQMNSLKPEDTAVYYCAVDADVQDGLYYWGQGTQVTVSS

SEQ ID NO: 19588 - protein, 122 aa, Artificial Sequence
  Chemically Synthesized
QVQLQESGGGLVQAGGSLRLSCAASGTISPFESMGWYRQAPGKEREFVATIARGSSTYYADSVKGRFTISRDNAKNTVYLQMNSLKPEDTAVYYCAALAYPNQSGRNRHFYWGQGTQVTVSS

SEQ ID NO: 19589 - protein, 116 aa, Artificial Sequence
  Chemically Synthesized
QVQLQESGGGLVQAGGSLRLSCAASGSISYYIYMGWYRQAPGKEREFVATITYGILPYADSVKGRFTISRDNAKNTVYLQMNSLKPEDTAVYYCAFLLTWVVLIYWGQGTQVTVSS

SEQ ID NO: 19590 - protein, 125 aa, Artificial Sequence
  Chemically Synthesized
QVQLQESGGGLVQAGGSLRLSCAASGYIFDYVGMGWYRQAPGKERELVAAIGGGSNTNYADSVKGRFTISRDNAKNTVYLQMNSLKPEDTAVYYCAVGRGPDNYIYRYSGLTMYWGQGTQVTVSS

SEQ ID NO: 19591 - protein, 112 aa, Artificial Sequence
  Chemically Synthesized
QVQLQESGGGLVQAGGSLRLSCAASGTIFDGAMGWYRQAPGKERELVASISYGASTNYADSVKGRFTISRDNAKNTVYLQMNSLKPEDTAVYYCAASRHTYWGQGTQVTVSS

SEQ ID NO: 19592 - protein, 119 aa, Artificial Sequence
  Chemically Synthesized
QVQLQESGGGLVQAGGSLRLSCAASGTISGLDYMGWYRQAPGKERELVAGIAVGSTTNYADSVKGRFTISRDNAKNTVYLQMNSLKPEDTAVYYCAVRGTTTPPPYRYWGQGTQVTVSS

SEQ ID NO: 19593 - protein, 121 aa, Artificial Sequence
  Chemically Synthesized
QVQLQESGGGLVQAGGSLRLSCAASGNISYGTEMGWYRQAPGKERELVATIGEGAITNYADSVKGRFTISRDNAKNTVYLQMNSLKPEDTAVYYCAVDTTWLLIGTTRLYWGQGTQVTVSS

SEQ ID NO: 19594 - protein, 118 aa, Artificial Sequence
  Chemically Synthesized
QVQLQESGGGLVQAGGSLRLSCAASGNIFYRDYMGWYRQAPGKEREFVAAISDGASTNYADSVKGRFTISRDNAKNTVYLQMNSLKPEDTAVYYCAAADYIVHELHYWGQGTQVTVSS

SEQ ID NO: 19595 - protein, 118 aa, Artificial Sequence
  Chemically Synthesized
QVQLQESGGGLVQAGGSLRLSCAASGYIFRGDDMGWYRQAPGKERELVASIGLGGNTYYADSVKGRFTISRDNAKNTVYLQMNSLKPEDTAVYYCAAYLNINGPHPYWGQGTQVTVSS

SEQ ID NO: 19596 - protein, 115 aa, Artificial Sequence
  Chemically Synthesized
QVQLQESGGGLVQAGGSLRLSCAASGTISTYANMGWYRQAPGKEREFVAGIGYGGSTNYADSVKGRFTISRDNAKNTVYLQMNSLKPEDTAVYYCAVLSRLTMYWGQGTQVTVSS

SEQ ID NO: 19597 - protein, 121 aa, Artificial Sequence
  Chemically Synthesized
QVQLQESGGGLVQAGGSLRLSCAASGTISSQFGMGWYRQAPGKERELLPVLMLVVVPYADSVKGRFTISRDNAKNTVYLQMNSLKPEDTAVYYCAAYVPGYHYKYYSLYYWGQGTQVTVSS

SEQ ID NO: 19598 - protein, 122 aa, Artificial Sequence
  Chemically Synthesized
QVQLQESGGGLVQAGGSLRLSCAASGSISGRQGMGWYRQAPGKEREFVAGIDIGGSTNYADSVKGRFTISRDNAKNTVYLQMNSLKPEDTAVYYCAVISRSDDSRDGYYVYWGQGTQVTVSS

SEQ ID NO: 19599 - protein, 121 aa, Artificial Sequence
  Chemically Synthesized
QVQLQESGGGLVQAGGSLRLSCAASGSISDPSEMGWYRQAPGKERELVATIAYGATTYYADSVKGRFTISRDNAKNTVYLQMNSLKPEDTAVYYCAVQYFDDKDAILYGYWGQGTQVTVSS

SEQ ID NO: 19600 - protein, 118 aa, Artificial Sequence
  Chemically Synthesized
QVQLQESGGGLVQAGGSLRLSCAASGNIFARPDMGWYRQAPGKEREFVASIDRGGTTYYADSVKGRFTISRDNAKNTVYLQMNSLKPEDTAVYYCAAEFYYSGILRYWGQGTQVTVSS

SEQ ID NO: 19601 - protein, 118 aa, Artificial Sequence
  Chemically Synthesized
QVQLQESGGGLVQAGGSLRLSCAASGYISPPGAMGWYRQAPGKEREFVASIAYGGITYYADSVKGRFTISRDNAKNTVYLQMNSLKPEDTAVYYCAALFRDSVYHYYWGQGTQVTVSS

SEQ ID NO: 19602 - protein, 118 aa, Artificial Sequence
  Chemically Synthesized
QVQLQESGGGLVQAGGSLRLSCAASGYISLTGVMGWYRQAPGKEREFVATITEGSTTYYADSVKGRFTISRDNAKNTVYLQMNSLKPEDTAVYYCAAYFRYGSDYVYWGQGTQVTVSS

SEQ ID NO: 19603 - protein, 117 aa, Artificial Sequence
  Chemically Synthesized
QVQLQESGGGLVQAGGSLRLSCAASGTISSSTMGWYRQAPGKEREFVAAIADGASTYYADSVKGRFTISRDNAKNTVYLQMNSLKPEDTAVYYCAVPASHADVHGYWGQGTQVTVSS

SEQ ID NO: 19604 - protein, 117 aa, Artificial Sequence
  Chemically Synthesized
QVQLQESGGGLVQAGGSLRLSCAASGTISESIGMGWYRQAPGKERELVAGIAAGTNTYYADSVKGRFTISRDNAKNTVYLQMNSLKPEDTAVYYCAVSSWNTLVIYWGQGTQVTVSS

SEQ ID NO: 19605 - protein, 117 aa, Artificial Sequence
  Chemically Synthesized
QVQLQESGGGLVQAGGSLRLSCAASGSIFTTTMGWYRQAPGKEREFVAAIDDGASTNYADSVKGRFTISRDNAKNTVYLQMNSLKPEDTAVYYCAAPAARRRAHRYWGQGTQVTVSS

SEQ ID NO: 19606 - protein, 118 aa, Artificial Sequence
  Chemically Synthesized
QVQLQESGGGLVQAGGSLRLSCAASGNISSYAVMGWYRQAPGKEREFVAGINRGSTTNYADSVKGRFTISRDNAKNTVYLQMNSLKPEDTAVYYCAAIRATPVWHYYWGQGTQVTVSS

SEQ ID NO: 19607 - protein, 118 aa, Artificial Sequence
  Chemically Synthesized
QVQLQESGGGLVQAGGSLRLSCAASGSISYGVDMGWYRQAPGKEREFVAGIGDGTTTNYADSVKGRFTISRDNAKNTVYLQMNSLKPEDTAVYYCAVLNWSANVHTYWGQGTQVTVSS

SEQ ID NO: 19608 - protein, 118 aa, Artificial Sequence
  Chemically Synthesized
QVQLQESGGGLVQAGGSLRLSCAASGYISTYVTMGWYRQAPGKERELVATINTGGTTYYADSVKGRFTISRDNAKNTVYLQMNSLKPEDTAVYYCAARPDPFNYLRYWGQGTQVTVSS

SEQ ID NO: 19609 - protein, 118 aa, Artificial Sequence
  Chemically Synthesized
QVQLQESGGGLVQAGGSLRLSCAASGSIFTRRRMGWYRQAPGKEREFVATIGHGATTYYADSVKGRFTISRDNAKNTVYLQMNSLKPEDTAVYYCAVATFVIVPFDYWGQGTQVTVSS

SEQ ID NO: 19610 - protein, 113 aa, Artificial Sequence
  Chemically Synthesized
QVQLQESGGGLVQAGGSLRLSCAASGYISNISRMGWYRQAPGKERELVAGINYGANTNYADSVKGRFTISRDNAKNTVYLQMNSLKPEDTAVYYCATRSCIYWGQGTQVTVSS

SEQ ID NO: 19611 - protein, 117 aa, Artificial Sequence
  Chemically Synthesized
QVQLQESGGGLVQAGGSLRLSCAASGTISTFPAMGWYRQAPGKEREFVAGISQGSTTYYADSVKGRFTISRDNAKNTVYLQMNSLKPEDTAVYYCAVTRVGLFRLYWGQGTQVTVSS

SEQ ID NO: 19612 - protein, 117 aa, Artificial Sequence
  Chemically Synthesized
QVQLQESGGGLVQAGGSLRLSCAASGSIFYYPQMGWYRQAPGKEREFVAGISAGTSTYYADSVKGRFTISRDNAKNTVYLQMNSLKPEDTAVYYCAAGGRRCLTMYWGQGTQVTVSS

SEQ ID NO: 19613 - protein, 118 aa, Artificial Sequence
  Chemically Synthesized
QVQLQESGGGLVQAGGSLRLSCAASGNISHYIYMGWYRQAPGKERELVAAIGPGGITNYADSVKGRFTISRDNAKNTVYLQMNSLKPEDTAVYYCAAIYLLDYWHDYWGQGTQVTVSS

SEQ ID NO: 19614 - protein, 122 aa, Artificial Sequence
  Chemically Synthesized
QVQLQESGGGLVQAGGSLRLSCAASGTISYRHRMGWYRQAPGKERELVASINQGATTYYADSVKGRFTISRDNAKNTVYLQMNSLKPEDTAVYYCAADLSPWWYHPGSFYYWGQGTQVTVSS

SEQ ID NO: 19615 - protein, 121 aa, Artificial Sequence
  Chemically Synthesized
QVQLQESGGGLVQAGGSLRLSCAASGSIFKPIYMGWYRQAPGKEREFVATIGNGATTYYADSVKGRFTISRDNAKNTVYLQMNSLKPEDTAVYYCAVQRSLLASLLTSMYWGQGTQVTVSS

SEQ ID NO: 19616 - protein, 122 aa, Artificial Sequence
  Chemically Synthesized
QVQLQESGGGLVQAGGSLRLSCAASGNISPYSNMGWYRQAPGKEREFVASIGYGGNTNYADSVKGRFTISRDNAKNTVYLQMNSLKPEDTAVYYCAVLVIIDTRRGGFFYYWGQGTQVTVSS

SEQ ID NO: 19617 - protein, 114 aa, Artificial Sequence
  Chemically Synthesized
QVQLQESGGGLVQAGGSLRLSCAASGNIFAIYMGWYRQAPGKEREFVAGIDDGASTNYADSVKGRFTISRDNAKNTVYLQMNSLKPEDTAVYYCAVFYLAYYYWGQGTQVTVSS

SEQ ID NO: 19618 - protein, 119 aa, Artificial Sequence
  Chemically Synthesized
QVQLQESGGGLVQAGGSLRLSCAASGTISRPYIAMGWYRQAPGKEREFVAGIARGAITNYADSVKGRFTISRDNAKNTVYLQMNSLKPEDTAVYYCAAIYVDVYYHSYWGQGTQVTVSS

SEQ ID NO: 19619 - protein, 120 aa, Artificial Sequence
  Chemically Synthesized
QVQLQESGGGLVQAGGSLRLSCAASGNISSYSHMGWYRQAPGKERELVATIADGATPYADSVKGRFTISRDNAKNTVYLQMNSLKPEDTAVYYCAVIPEVSLSRTTGIYWGQGTQVTVSS

SEQ ID NO: 19620 - protein, 116 aa, Artificial Sequence
  Chemically Synthesized
QVQLQESGGGLVQAGGSLRLSCAASGYISTIQTMGWYRQAPGKERELVATLGVVIPYADSVKGRFTISRDNAKNTVYLQMNSLKPEDTAVYYCAVGDVRYAYFRYWGQGTQVTVSS

SEQ ID NO: 19621 - protein, 125 aa, Artificial Sequence
  Chemically Synthesized
QVQLQESGGGLVQAGGSLRLSCAASGNIFAHYSMGWYRQAPGKERELVATIAYGTNTYYADSVKGRFTISRDNAKNTVYLQMNSLKPEDTAVYYCAVDIYSTRTCCTTTFGVLYWGQGTQVTVSS

SEQ ID NO: 19622 - protein, 122 aa, Artificial Sequence
  Chemically Synthesized
QVQLQESGGGLVQAGGSLRLSCAASGNISDYIVMGWYRQAPGKERELVATISSGTTTYYADSVKGRFTISRDNAKNTVYLQMNSLKPEDTAVYYCAVGWYLPTYWYDYHTYWGQGTQVTVSS

SEQ ID NO: 19623 - protein, 118 aa, Artificial Sequence
  Chemically Synthesized
QVQLQESGGGLVQAGGSLRLSCAASGNISYRSRMGWYRQAPGKEREFVAGIDPGTNTNYADSVKGRFTISRDNAKNTVYLQMNSLKPEDTAVYYCAAIYYRDKWHEYWGQGTQVTVSS

SEQ ID NO: 19624 - protein, 118 aa, Artificial Sequence
  Chemically Synthesized
QVQLQESGGGLVQAGGSLRLSCAASGTISGAYVMGWYRQAPGKERELVAAIAAGGNTYYADSVKGRFTISRDNAKNTVYLQMNSLKPEDTAVYYCAVQAYERPKLNYWGQGTQVTVSS

SEQ ID NO: 19625 - protein, 118 aa, Artificial Sequence
  Chemically Synthesized
QVQLQESGGGLVQAGGSLRLSCAASGSIFDRASMGWYRQAPGKEREFVATINNGANTNYADSVKGRFTISRDNAKNTVYLQMNSLKPEDTAVYYCAVDASYDLTYWYWGQGTQVTVSS

SEQ ID NO: 19626 - protein, 118 aa, Artificial Sequence
  Chemically Synthesized
QVQLQESGGGLVQAGGSLRLSCAASGYISVPWYMGWYRQAPGKERELVAAIAFGGTTNYADSVKGRFTISRDNAKNTVYLQMNSLKPEDTAVYYCAAVHHSTRYYYYWGQGTQVTVSS

SEQ ID NO: 19627 - protein, 125 aa, Artificial Sequence
  Chemically Synthesized
QVQLQESGGGLVQAGGSLRLSCAASGNISTYAWMGWYRQAPGKEREFVAAIGSVVLPYADSVKGRFTISRDNAKNTVYLQMNSLKPEDTAVYYCAVYYYAYGSYQYWDFIPHAYWGQGTQVTVSS

SEQ ID NO: 19628 - protein, 126 aa, Artificial Sequence
  Chemically Synthesized
QVQLQESGGGLVQAGGSLRLSCAASGNISVSYKMGWYRQAPGKEREFVAAIDTGTNTNYADSVKGRFTISRDNAKNTVYLQMNSLKPEDTAVYYCAAVQVYVPQGILDRRYRHYYWGQGTQVTVSS

SEQ ID NO: 19629 - protein, 118 aa, Artificial Sequence
  Chemically Synthesized
QVQLQESGGGLVQAGGSLRLSCAASGTISYYAQMGWYRQAPGKEREFVAGIGQGSNTYYADSVKGRFTISRDNAKNTVYLQMNSLKPEDTAVYYCALVSLKYPYHYYWGQGTQVTVSS

SEQ ID NO: 19630 - protein, 126 aa, Artificial Sequence
  Chemically Synthesized
QVQLQESGGGLVQAGGSLRLSCAASGTIFRPLYMGWYRQAPGKEREFVATITDGSTTNYADSVKGRFTISRDNAKNTVYLQMNSLKPEDTAVYYCAAVTRYTSPPYSDKERYHYYWGQGTQVTVSS

SEQ ID NO: 19631 - protein, 122 aa, Artificial Sequence
  Chemically Synthesized
QVQLQESGGGLVQAGGSLRLSCAASGNISPQHDMGWYRQAPGKERELVASITRGTSTYYADSVKGRFTISRDNAKNTVYLQMNSLKPEDTAVYYCAAIEFLYGLYPHSHGYWGQGTQVTVSS

SEQ ID NO: 19632 - protein, 121 aa, Artificial Sequence
  Chemically Synthesized
QVQLQESGGGLVQAGGSLRLSCAASGYIFVLFYMGWYRQAPGKERELVASISYGTITNYADSVKGRFTISRDNAKNTVYLQMNSLKPEDTAVYYCAAIESYTDSTEEYWYWGQGTQVTVSS

SEQ ID NO: 19633 - protein, 122 aa, Artificial Sequence
  Chemically Synthesized
QVQLQESGGGLVQAGGSLRLSCAASGNISNYYRMGWYRQAPGKERELVATIDTGGITYYADSVKGRFTISRDNAKNTVYLQMNSLKPEDTAVYYCAAYISSYWDWYYVYSYWGQGTQVTVSS

SEQ ID NO: 19634 - protein, 126 aa, Artificial Sequence
  Chemically Synthesized
QVQLQESGGGLVQAGGSLRLSCAASGTISTYSYMGWYRQAPGKERELVAAINSGTNTYYADSVKGRFTISRDNAKNTVYLQMNSLKPEDTAVYYCAVYYIVTRAWDYASGEGHPYWGQGTQVTVSS

SEQ ID NO: 19635 - protein, 118 aa, Artificial Sequence
  Chemically Synthesized
QVQLQESGGGLVQAGGSLRLSCAASGNISFVRYMGWYRQAPGKERELVATINHGTTTYYADSVKGRFTISRDNAKNTVYLQMNSLKPEDTAVYYCAARRYESYYYQYWGQGTQVTVSS

SEQ ID NO: 19636 - protein, 125 aa, Artificial Sequence
  Chemically Synthesized
QVQLQESGGGLVQAGGSLRLSCAASGYISFETDMGWYRQAPGKEREFVATINLGGNTYYADSVKGRFTISRDNAKNTVYLQMNSLKPEDTAVYYCAAYEEGYIDYYLYSTRGIYWGQGTQVTVSS

SEQ ID NO: 19637 - protein, 118 aa, Artificial Sequence
  Chemically Synthesized
QVQLQESGGGLVQAGGSLRLSCAASGNISERLTMGWYRQAPGKEREFVATINAGGNTYYADSVKGRFTISRDNAKNTVYLQMNSLKPEDTAVYYCAAIGGNRDPHGYWGQGTQVTVSS

SEQ ID NO: 19638 - protein, 126 aa, Artificial Sequence
  Chemically Synthesized
QVQLQESGGGLVQAGGSLRLSCAASGTISRRAVMGWYRQAPGKEREFVAAIAYGTITNYADSVKGRFTISRDNAKNTVYLQMNSLKPEDTAVYYCAVGDRLAYYTWAGNRHYLYYWGQGTQVTVSS

SEQ ID NO: 19639 - protein, 118 aa, Artificial Sequence
  Chemically Synthesized
QVQLQESGGGLVQAGGSLRLSCAASGNISGHYSMGWYRQAPGKEREFVASINFGGSTYYADSVKGRFTISRDNAKNTVYLQMNSLKPEDTAVYYCAVLTTTDGYHYYWGQGTQVTVSS

SEQ ID NO: 19640 - protein, 126 aa, Artificial Sequence
  Chemically Synthesized
QVQLQESGGGLVQAGGSLRLSCAASGTISYYGLMGWYRQAPGKERELVASIAIGGNTNYADSVKGRFTISRDNAKNTVYLQMNSLKPEDTAVYYCAANDVWPVGDQVTDNTDHEYWGQGTQVTVSS

SEQ ID NO: 19641 - protein, 122 aa, Artificial Sequence
  Chemically Synthesized
QVQLQESGGGLVQAGGSLRLSCAASGNISNPERMGWYRQAPGKEREFVAGISTGGTTYYADSVKGRFTISRDNAKNTVYLQMNSLKPEDTAVYYCAVLTRPWDVTVARHYYWGQGTQVTVSS

SEQ ID NO: 19642 - protein, 118 aa, Artificial Sequence
  Chemically Synthesized
QVQLQESGGGLVQAGGSLRLSCAASGNISRYRIMGWYRQAPGKEREFVAAINVGGSTNYADSVKGRFTISRDNAKNTVYLQMNSLKPEDTAVYYCAADKRRYLRFYYWGQGTQVTVSS

SEQ ID NO: 19643 - protein, 118 aa, Artificial Sequence
  Chemically Synthesized
QVQLQESGGGLVQAGGSLRLSCAASGTISADSSMGWYRQAPGKERELVASIAYGGSTNYADSVKGRFTISRDNAKNTVYLQMNSLKPEDTAVYYCAVPTYAYPYHGYWGQGTQVTVSS

SEQ ID NO: 19644 - protein, 126 aa, Artificial Sequence
  Chemically Synthesized
QVQLQESGGGLVQAGGSLRLSCAASGYISGLRAMGWYRQAPGKEREFVASINSGGSTNYADSVKGRFTISRDNAKNTVYLQMNSLKPEDTAVYYCAAVGAHEDDTQLNGYDYFYYWGQGTQVTVSS

SEQ ID NO: 19645 - protein, 115 aa, Artificial Sequence
  Chemically Synthesized
QVQLQESGGGLVQAGGSLRLSCAASGTIFITDGMGWYRQAPGKERELVATVWVVVPYADSVKGRFTISRDNAKNTVYLQMNSLKPEDTAVYYCAVDEPAIYLNYWGQGTQVTVSS

SEQ ID NO: 19646 - protein, 122 aa, Artificial Sequence
  Chemically Synthesized
QVQLQESGGGLVQAGGSLRLSCAASGNISAVGTMGWYRQAPGKEREFVAAINVGGNTYYADSVKGRFTISRDNAKNTVYLQMNSLKPEDTAVYYCAVTRYSYPYGLGYYDYWGQGTQVTVSS

SEQ ID NO: 19647 - protein, 117 aa, Artificial Sequence
  Chemically Synthesized
QVQLQESGGGLVQAGGSLRLSCAASGSISGIYAMGWYRQAPGKEREFVATINWGSTTYYADSVKGRFTISRDNAKNTVYLQMNSLKPEDTAVYYCAADGSLTLVFYWGQGTQVTVSS

SEQ ID NO: 19648 - protein, 118 aa, Artificial Sequence
  Chemically Synthesized
QVQLQESGGGLVQAGGSLRLSCAASGNISISGVMGWYRQAPGKEREFVAAIGDGANTNYADSVKGRFTISRDNAKNTVYLQMNSLKPEDTAVYYCAVVVYDYRYFYYWGQGTQVTVSS

SEQ ID NO: 19649 - protein, 116 aa, Artificial Sequence
  Chemically Synthesized
QVQLQESGGGLVQAGGSLRLSCAASGSIMGWYRQAPGKERELVASITLGSSTYYADSVKGRFTISRDNAKNTVYLQMNSLKPEDTAVYYCAAPGSYDDVYTWLWYWGQGTQVTVSS

SEQ ID NO: 19650 - protein, 117 aa, Artificial Sequence
  Chemically Synthesized
QVQLQESGGGLVQAGGSLRLSCAASGTIFDEIMGWYRQAPGKERELVAGISPGASTNYADSVKGRFTISRDNAKNTVYLQMNSLKPEDTAVYYCAVERKHAGRYRYWGQGTQVTVSS

SEQ ID NO: 19651 - protein, 126 aa, Artificial Sequence
  Chemically Synthesized
QVQLQESGGGLVQAGGSLRLSCAASGYIFLLSSMGWYRQAPGKERELVASISYGGNTNYADSVKGRFTISRDNAKNTVYLQMNSLKPEDTAVYYCAVVNYPQADPYVSVARSLAYWGQGTQVTVSS

SEQ ID NO: 19652 - protein, 118 aa, Artificial Sequence
  Chemically Synthesized
QVQLQESGGGLVQAGGSLRLSCAASGTISPRYSMGWYRQAPGKEREFVAGISDGGNTNYADSVKGRFTISRDNAKNTVYLQMNSLKPEDTAVYYCAVVYAYKLGHYYWGQGTQVTVSS

SEQ ID NO: 19653 - protein, 121 aa, Artificial Sequence
  Chemically Synthesized
QVQLQESGGGLVQAGGSLRLSCAASGYILLLTMGWYRQAPGKEREFVAAIASGTSTYYADSVKGRFTISRDNAKNTVYLQMNSLKPEDTAVYYCAVYKYYFPTTQYPYDYWGQGTQVTVSS

SEQ ID NO: 19654 - protein, 118 aa, Artificial Sequence
  Chemically Synthesized
QVQLQESGGGLVQAGGSLRLSCAASGSISDASAMGWYRQAPGKEREFVAGINYGGSTYYADSVKGRFTISRDNAKNTVYLQMNSLKPEDTAVYYCAALYDYARRFYYWGQGTQVTVSS

SEQ ID NO: 19655 - protein, 126 aa, Artificial Sequence
  Chemically Synthesized
QVQLQESGGGLVQAGGSLRLSCAASGNISTGYAMGWYRQAPGKERELVAAIGRGTITYYADSVKGRFTISRDNAKNTVYLQMNSLKPEDTAVYYCAVSLDGPYYDLDYYRGYHLYWGQGTQVTVSS

SEQ ID NO: 19656 - protein, 118 aa, Artificial Sequence
  Chemically Synthesized
QVQLQESGGGLVQAGGSLRLSCAASGSISVFYRMGWYRQAPGKEREFVASIGDGATTNYADSVKGRFTISRDNAKNTVYLQMNSLKPEDTAVYYCAALLYDHRYHYYWGQGTQVTVSS

SEQ ID NO: 19657 - protein, 118 aa, Artificial Sequence
  Chemically Synthesized
QVQLQESGGGLVQAGGSLRLSCAASGYIFSHLYMGWYRQAPGKERELVASIDDGSITYYADSVKGRFTISRDNAKNTVYLQMNSLKPEDTAVYYCAAPYYGYRYLTYWGQGTQVTVSS

SEQ ID NO: 19658 - protein, 118 aa, Artificial Sequence
  Chemically Synthesized
QVQLQESGGGLVQAGGSLRLSCAASGNISDYISMGWYRQAPGKEREFVASIARGSSTNYADSVKGRFTISRDNAKNTVYLQMNSLKPEDTAVYYCAALTYAGAFYAYWGQGTQVTVSS

SEQ ID NO: 19659 - protein, 117 aa, Artificial Sequence
  Chemically Synthesized
QVQLQESGGGLVQAGGSLRLSCAASGNISAYDNMGWYRQAPGKEREFVATIDGGATTNYADSVKGRFTISRDNAKNTVYLQMNSLKPEDTAVYYCAVPSSTTVTLYWGQGTQVTVSS

SEQ ID NO: 19660 - protein, 122 aa, Artificial Sequence
  Chemically Synthesized
QVQLQESGGGLVQAGGSLRLSCAASGTISKRGPMGWYRQAPGKEREFVAAIGYGSTTYYADSVKGRFTISRDNAKNTVYLQMNSLKPEDTAVYYCAAQLTAKRGGEDFHPYWGQGTQVTVSS

SEQ ID NO: 19661 - protein, 121 aa, Artificial Sequence
  Chemically Synthesized
QVQLQESGGGLVQAGGSLRLSCAASGSIFAPLTMGWYRQAPGKERELVATITPGASTYYADSVKGRFTISRDNAKNTVYLQMNSLKPEDTAVYYCAVDYSYYGGHDVLIYWGQGTQVTVSS

SEQ ID NO: 19662 - protein, 125 aa, Artificial Sequence
  Chemically Synthesized
QVQLQESGGGLVQAGGSLRLSCAASGYIFPYVVMGWYRQAPGKEREFVATISPGTTTYYADSVKGRFTISRDNAKNTVYLQMNSLKPEDTAVYYCAADRTDDKSYPVYPWLYNYWGQGTQVTVSS

SEQ ID NO: 19663 - protein, 126 aa, Artificial Sequence
  Chemically Synthesized
QVQLQESGGGLVQAGGSLRLSCAASGNISVQYAMGWYRQAPGKEREFVATITQGSNTYYADSVKGRFTISRDNAKNTVYLQMNSLKPEDTAVYYCAAHSYTTGVQTVRDGVGHAYWGQGTQVTVSS

SEQ ID NO: 19664 - protein, 126 aa, Artificial Sequence
  Chemically Synthesized
QVQLQESGGGLVQAGGSLRLSCAASGSIFDYDGMGWYRQAPGKEREFVAGIGLGSTTNYADSVKGRFTISRDNAKNTVYLQMNSLKPEDTAVYYCAVAYSDTHYVADLTTDHLRYWGQGTQVTVSS

SEQ ID NO: 19665 - protein, 118 aa, Artificial Sequence
  Chemically Synthesized
QVQLQESGGGLVQAGGSLRLSCAASGYISKGVLMGWYRQAPGKEREFVATIASGSNTNYADSVKGRFTISRDNAKNTVYLQMNSLKPEDTAVYYCAAIRTDQYPYVYWGQGTQVTVSS

SEQ ID NO: 19666 - protein, 122 aa, Artificial Sequence
  Chemically Synthesized
QVQLQESGGGLVQAGGSLRLSCAASGYIFYGWDMGWYRQAPGKERELVATINAGTNTYYADSVKGRFTISRDNAKNTVYLQMNSLKPEDTAVYYCAAVHWARWAVGDVLDYWGQGTQVTVSS

SEQ ID NO: 19667 - protein, 117 aa, Artificial Sequence
  Chemically Synthesized
QVQLQESGGGLVQAGGSLRLSCAASGSISYGLTMGWYRQAPGKERELVASIAYGANTYYADSVKGRFTISRDNAKNTVYLQMNSLKPEDTAVYYCAADTSVLTTIYWGQGTQVTVSS

SEQ ID NO: 19668 - protein, 118 aa, Artificial Sequence
  Chemically Synthesized
QVQLQESGGGLVQAGGSLRLSCAASGNIFAAYYMGWYRQAPGKEREFVAGIGNGGTNQYADSVKGRFTISRDNAKNTVYLQMNSLKPEDTAVYYCAVDVYGTGDLYYWGQGTQVTVSS

SEQ ID NO: 19669 - protein, 125 aa, Artificial Sequence
  Chemically Synthesized
QVQLQESGGGLVQAGGSLRLSCAASGSISPRGYMGWYRQAPGKERELVAGITYGTSTYYADSVKGRFTISRDNAKNTVYLQMNSLKPEDTAVYYCAAYGVDSSTTLVTKTTTLYWGQGTQVTVSS

SEQ ID NO: 19670 - protein, 122 aa, Artificial Sequence
  Chemically Synthesized
QVQLQESGGGLVQAGGSLRLSCAASGSISYSSGMGWYRQAPGKERELVASITYGAITYYADSVKGRFTISRDNAKNTVYLQMNSLKPEDTAVYYCAAYWDSYTDEADDLSYWGQGTQVTVSS

SEQ ID NO: 19671 - protein, 118 aa, Artificial Sequence
  Chemically Synthesized
QVQLQESGGGLVQAGGSLRLSCAASGSIFARHAMGWYRQAPGKERELVAAIAQGSITNYADSVKGRFTISRDNAKNTVYLQMNSLKPEDTAVYYCAATALDVTGHYYWGQGTQVTVSS

SEQ ID NO: 19672 - protein, 126 aa, Artificial Sequence
  Chemically Synthesized
QVQLQESGGGLVQAGGSLRLSCAASGSISYLYYMGWYRQAPGKEREFVAGIDAGGTTYYADSVKGRFTISRDNAKNTVYLQMNSLKPEDTAVYYCAVATPTSYYNASLIDIDLTYWGQGTQVTVSS

SEQ ID NO: 19673 - protein, 118 aa, Artificial Sequence
  Chemically Synthesized
QVQLQESGGGLVQAGGSLRLSCAASGNIFYDNVMGWYRQAPGKERELVAAIDDGSNTYYADSVKGRFTISRDNAKNTVYLQMNSLKPEDTAVYYCAATYYDYDLHLYWGQGTQVTVSS

SEQ ID NO: 19674 - protein, 116 aa, Artificial Sequence
  Chemically Synthesized
QVQLQESGGGLVQAGGSLRLSCAASGTIFWFTNMGWYRQAPGKERELVASISYGTSTNYADSVKGRFTISRDNAKNTVYLQMNSLKPEDTAVYYCAVYFIRPHKYWGQGTQVTVSS

SEQ ID NO: 19675 - protein, 122 aa, Artificial Sequence
  Chemically Synthesized
QVQLQESGGGLVQAGGSLRLSCAASGNIFFIWDMGWYRQAPGKEREFVATINRGTSTNYADSVKGRFTISRDNAKNTVYLQMNSLKPEDTAVYYCAARPYFYRGESRTYAYWGQGTQVTVSS

SEQ ID NO: 19676 - protein, 122 aa, Artificial Sequence
  Chemically Synthesized
QVQLQESGGGLVQAGGSLRLSCAASGSISPGADMGWYRQAPGKERELVAAIGVGTSTNYADSVKGRFTISRDNAKNTVYLQMNSLKPEDTAVYYCAAVVAYFGYRSDGHYYWGQGTQVTVSS

SEQ ID NO: 19677 - protein, 116 aa, Artificial Sequence
  Chemically Synthesized
QVQLQESGGGLVQAGGSLRLSCAASGSIFLRYAMGWYRQAPGKERELVAAITTGTTYYADSVKGRFTISRDNAKNTVYLQMNSLKPEDTAVYYCAALIYWYDHLYWGQGTQVTVSS

SEQ ID NO: 19678 - protein, 117 aa, Artificial Sequence
  Chemically Synthesized
QVQLQESGGGLVQAGGSLRLSCAASGTIFGRPYMGWYRQAPGKERELVAAIANGGTTYYADSVKGRFTISRDNAKNTVYLQMNSLKPEDTAVYYCAVTYYYVYYSYWGQGTQVTVSS

SEQ ID NO: 19679 - protein, 118 aa, Artificial Sequence
  Chemically Synthesized
QVQLQESGGGLVQAGGSLRLSCAASGTISLSYVMGWYRQAPGKERELVATIDWGTITYYADSVKGRFTISRDNAKNTVYLQMNSLKPEDTAVYYCAVVLAAGGVYDYWGQGTQVTVSS

SEQ ID NO: 19680 - protein, 126 aa, Artificial Sequence
  Chemically Synthesized
QVQLQESGGGLVQAGGSLRLSCAASGNIFLVYYMGWYRQAPGKERELVASITIGAITYYADSVKGRFTISRDNAKNTVYLQMNSLKPEDTAVYYCAAPGYSYKGDVTRLYRSYAYWGQGTQVTVSS

SEQ ID NO: 19681 - protein, 118 aa, Artificial Sequence
  Chemically Synthesized
QVQLQESGGGLVQAGGSLRLSCAASGTIFYWRRMGWYRQAPGKERELVASIGYGATTNYADSVKGRFTISRDNAKNTVYLQMNSLKPEDTAVYYCAANRKLYERLVYWGQGTQVTVSS

SEQ ID NO: 19682 - protein, 117 aa, Artificial Sequence
  Chemically Synthesized
QVQLQESGGGLVQAGGSLRLSCAASGNISWTTMGWYRQAPGKERELVAAIVLVLVPYADSVKGRFTISRDNAKNTVYLQMNSLKPEDTAVYYCAVDYQNYRGLESYWGQGTQVTVSS

SEQ ID NO: 19683 - protein, 118 aa, Artificial Sequence
  Chemically Synthesized
QVQLQESGGGLVQAGGSLRLSCAASGTIFGAFVMGWYRQAPGKERELVAAINYGSTTNYADSVKGRFTISRDNAKNTVYLQMNSLKPEDTAVYYCAAAGRRFRYHSYWGQGTQVTVSS

SEQ ID NO: 19684 - protein, 118 aa, Artificial Sequence
  Chemically Synthesized
QVQLQESGGGLVQAGGSLRLSCAASGNIFTGSYMGWYRQAPGKERELVAAINAGGITYYADSVKGRFTISRDNAKNTVYLQMNSLKPEDTAVYYCAAGLTTTTYFTYWGQGTQVTVSS

SEQ ID NO: 19685 - protein, 118 aa, Artificial Sequence
  Chemically Synthesized
QVQLQESGGGLVQAGGSLRLSCAASGNISQYNNMGWYRQAPGKERELVASINYGGNTNYADSVKGRFTISRDNAKNTVYLQMNSLKPEDTAVYYCAVARGKSYGYVYWGQGTQVTVSS

SEQ ID NO: 19686 - protein, 113 aa, Artificial Sequence
  Chemically Synthesized
QVQLQESGGGLVQAGGSLRLSCAASGYISVYNYMGWYRQAPGKERELVAAITDGSTTNYADSVKGRFTISRDNAKNTVYLQMNSLKPEDTAVYYCAVLRSSYWGQGTQVTVSS

SEQ ID NO: 19687 - protein, 122 aa, Artificial Sequence
  Chemically Synthesized
QVQLQESGGGLVQAGGSLRLSCAASGYIFRLSSMGWYRQAPGKEREFVASIGYGSSTYYADSVKGRFTISRDNAKNTVYLQMNSLKPEDTAVYYCAALLAGFTWDKLLHSYWGQGTQVTVSS

SEQ ID NO: 19688 - protein, 119 aa, Artificial Sequence
  Chemically Synthesized
QVQLQESGGGLVQAGGSLRLSCAASGQYPGMGWYRQAPGKEREFVAAITAGGTTYYADSVKGRFTISRDNAKNTVYLQMNSLKPEDTAVYYCAAYESWVAYYDLIHPYWGQGTQVTVSS

SEQ ID NO: 19689 - protein, 122 aa, Artificial Sequence
  Chemically Synthesized
QVQLQESGGGLVQAGGSLRLSCAASGYISGPSRMGWYRQAPGKERELVATITDGSITNYADSVKGRFTISRDNAKNTVYLQMNSLKPEDTAVYYCAVGDNPDWAADKAHRYWGQGTQVTVSS

SEQ ID NO: 19690 - protein, 115 aa, Artificial Sequence
  Chemically Synthesized
QVQLQESGGGLVQAGGSLRLSCAASGNIFDSTMGWYRQAPGKEREFVATIGAGGSTYYADSVKGRFTISRDNAKNTVYLQMNSLKPEDTAVYYCAANANKRQAYWGQGTQVTVSS

SEQ ID NO: 19691 - protein, 121 aa, Artificial Sequence
  Chemically Synthesized
QVQLQESGGGLVQAGGSLRLSCAASGLFLTSVMGWYRQAPGKEREFVAGIGYGATTNYADSVKGRFTISRDNAKNTVYLQMNSLKPEDTAVYYCAVGYAYDQYAHDHHRYWGQGTQVTVSS

SEQ ID NO: 19692 - protein, 118 aa, Artificial Sequence
  Chemically Synthesized
QVQLQESGGGLVQAGGSLRLSCAASGYISGRGPMGWYRQAPGKEREFVASIAYGGSTNYADSVKGRFTISRDNAKNTVYLQMNSLKPEDTAVYYCAAVVRYLIRHRYWGQGTQVTVSS

SEQ ID NO: 19693 - protein, 122 aa, Artificial Sequence
  Chemically Synthesized
QVQLQESGGGLVQAGGSLRLSCAASGTISFTAAMGWYRQAPGKEREFVAAIGYGTSTNYADSVKGRFTISRDNAKNTVYLQMNSLKPEDTAVYYCAVRDGYAAPYDDTYFYWGQGTQVTVSS

SEQ ID NO: 19694 - protein, 118 aa, Artificial Sequence
  Chemically Synthesized
QVQLQESGGGLVQAGGSLRLSCAASGNIFPYNGMGWYRQAPGKERELVATISQGTTTNYADSVKGRFTISRDNAKNTVYLQMNSLKPEDTAVYYCAVRDDDDVALDYWGQGTQVTVSS

SEQ ID NO: 19695 - protein, 122 aa, Artificial Sequence
  Chemically Synthesized
QVQLQESGGGLVQAGGSLRLSCAASGSISPLVIMGWYRQAPGKERELVATITAGTSTYYADSVKGRFTISRDNAKNTVYLQMNSLKPEDTAVYYCAALDANPYDPSYFLWYWGQGTQVTVSS

SEQ ID NO: 19696 - protein, 126 aa, Artificial Sequence
  Chemically Synthesized
QVQLQESGGGLVQAGGSLRLSCAASGYISGRHSMGWYRQAPGKEREFVATIGNGASTNYADSVKGRFTISRDNAKNTVYLQMNSLKPEDTAVYYCAAYGGLYRLNYGSYYQGHRYWGQGTQVTVSS

SEQ ID NO: 19697 - protein, 118 aa, Artificial Sequence
  Chemically Synthesized
QVQLQESGGGLVQAGGSLRLSCAASGSISHPYWMGWYRQAPGKERELVAAITQGANTYYADSVKGRFTISRDNAKNTVYLQMNSLKPEDTAVYYCAAGRRHSSRYTYWGQGTQVTVSS

SEQ ID NO: 19698 - protein, 122 aa, Artificial Sequence
  Chemically Synthesized
QVQLQESGGGLVQAGGSLRLSCAASGSIFTDLFMGWYRQAPGKERELVATIDDGASTYYADSVKGRFTISRDNAKNTVYLQMNSLKPEDTAVYYCAVTAYTDVITDIYFAYWGQGTQVTVSS

SEQ ID NO: 19699 - protein, 118 aa, Artificial Sequence
  Chemically Synthesized
QVQLQESGGGLVQAGGSLRLSCAASGNISRWRSMGWYRQAPGKEREFVAAITYGSNTYYADSVKGRFTISRDNAKNTVYLQMNSLKPEDTAVYYCAAWYTRRASHWYWGQGTQVTVSS

SEQ ID NO: 19700 - protein, 116 aa, Artificial Sequence
  Chemically Synthesized
QVQLQESGGGLVQAGGSLRLSCAASGNISSYQDMGWYRQAPGKEREFVATIAWGGSTNYADSVKGRFTISRDNAKNTVYLQMNSLKPEDTAVYYCAASDRYDSSYWGQGTQVTVSS

SEQ ID NO: 19701 - protein, 118 aa, Artificial Sequence
  Chemically Synthesized
QVQLQESGGGLVQAGGSLRLSCAASGNISYLYFMGWYRQAPGKERELVAAINLGGNTYYADSVKGRFTISRDNAKNTVYLQMNSLKPEDTAVYYCAVGLSYARDHFYWGQGTQVTVSS

SEQ ID NO: 19702 - protein, 126 aa, Artificial Sequence
  Chemically Synthesized
QVQLQESGGGLVQAGGSLRLSCAASGNISLQDNMGWYRQAPGKEREFVATISFGTNTYYADSVKGRFTISRDNAKNTVYLQMNSLKPEDTAVYYCAVSEYDNRSRRRTLEYLLQYWGQGTQVTVSS

SEQ ID NO: 19703 - protein, 118 aa, Artificial Sequence
  Chemically Synthesized
QVQLQESGGGLVQAGGSLRLSCAASGNIFFTGSMGWYRQAPGKEREFVAGITHGSTTNYADSVKGRFTISRDNAKNTVYLQMNSLKPEDTAVYYCAARRRLPYSHVYWGQGTQVTVSS

SEQ ID NO: 19704 - protein, 126 aa, Artificial Sequence
  Chemically Synthesized
QVQLQESGGGLVQAGGSLRLSCAASGTIFDRYIMGWYRQAPGKEREFVASIDYGGSTYYADSVKGRFTISRDNAKNTVYLQMNSLKPEDTAVYYCAVNVLALAPFYATTTSTLAYWGQGTQVTVSS

SEQ ID NO: 19705 - protein, 118 aa, Artificial Sequence
  Chemically Synthesized
QVQLQESGGGLVQAGGSLRLSCAASGYISYVEFMGWYRQAPGKEREFVAAISPGGNTNYADSVKGRFTISRDNAKNTVYLQMNSLKPEDTAVYYCAVYYASYQPLTYWGQGTQVTVSS

SEQ ID NO: 19706 - protein, 118 aa, Artificial Sequence
  Chemically Synthesized
QVQLQESGGGLVQAGGSLRLSCAASGTIFYSYDMGWYRQAPGKERELVASIDLGGNTYYADSVKGRFTISRDNAKNTVYLQMNSLKPEDTAVYYCAVTNVDYAPYVYWGQGTQVTVSS

SEQ ID NO: 19707 - protein, 118 aa, Artificial Sequence
  Chemically Synthesized
QVQLQESGGGLVQAGGSLRLSCAASGYISRSYVMGWYRQAPGKERELVAAIDYGSSTNYADSVKGRFTISRDNAKNTVYLQMNSLKPEDTAVYYCAVNYRWRRWFHYWGQGTQVTVSS

SEQ ID NO: 19708 - protein, 122 aa, Artificial Sequence
  Chemically Synthesized
QVQLQESGGGLVQAGGSLRLSCAASGNISVDYAMGWYRQAPGKEREFVATISYGGITNYADSVKGRFTISRDNAKNTVYLQMNSLKPEDTAVYYCAVNSATESLDGTYHNYWGQGTQVTVSS

SEQ ID NO: 19709 - protein, 122 aa, Artificial Sequence
  Chemically Synthesized
QVQLQESGGGLVQAGGSLRLSCAASGTISFGGYMGWYRQAPGKEREFVAGISLGGSTYYADSVKGRFTISRDNAKNTVYLQMNSLKPEDTAVYYCAAEAAINDPNNNWHGYWGQGTQVTVSS

SEQ ID NO: 19710 - protein, 122 aa, Artificial Sequence
  Chemically Synthesized
QVQLQESGGGLVQAGGSLRLSCAASGYISWITYMGWYRQAPGKERELVASIGKGGITYYADSVKGRFTISRDNAKNTVYLQMNSLKPEDTAVYYCAAKSRLDYPYWPNFRYWGQGTQVTVSS

SEQ ID NO: 19711 - protein, 122 aa, Artificial Sequence
  Chemically Synthesized
QVQLQESGGGLVQAGGSLRLSCAASGSIFDYTGMGWYRQAPGKEREFVAGIALGGSTYYADSVKGRFTISRDNAKNTVYLQMNSLKPEDTAVYYCAVRYLYGYESDANYYYWGQGTQVTVSS

SEQ ID NO: 19712 - protein, 118 aa, Artificial Sequence
  Chemically Synthesized
QVQLQESGGGLVQAGGSLRLSCAASGTISTTLFMGWYRQAPGKEREFVASIGDGTNTYYADSVKGRFTISRDNAKNTVYLQMNSLKPEDTAVYYCAATDRAYDLYDYWGQGTQVTVSS

SEQ ID NO: 19713 - protein, 118 aa, Artificial Sequence
  Chemically Synthesized
QVQLQESGGGLVQAGGSLRLSCAASGTISGYQAMGWYRQAPGKEREFVAAISTGSTTYYADSVKGRFTISRDNAKNTVYLQMNSLKPEDTAVYYCAVPVFSSNRFPYWGQGTQVTVSS

SEQ ID NO: 19714 - protein, 118 aa, Artificial Sequence
  Chemically Synthesized
QVQLQESGGGLVQAGGSLRLSCAASGSISFRNTMGWYRQAPGKEREFVATIGTGASTYYADSVKGRFTISRDNAKNTVYLQMNSLKPEDTAVYYCAARRVSLFRLYYWGQGTQVTVSS

SEQ ID NO: 19715 - protein, 122 aa, Artificial Sequence
  Chemically Synthesized
QVQLQESGGGLVQAGGSLRLSCAASGTISADAYMGWYRQAPGKERELVASINSGTITYYADSVKGRFTISRDNAKNTVYLQMNSLKPEDTAVYYCAVKSILGAYYSYSHTYWGQGTQVTVSS

SEQ ID NO: 19716 - protein, 118 aa, Artificial Sequence
  Chemically Synthesized
QVQLQESGGGLVQAGGSLRLSCAASGNIFTIAYMGWYRQAPGKERELVAAISGGGNTYYADSVKGRFTISRDNAKNTVYLQMNSLKPEDTAVYYCAAAALDGVAYGYWGQGTQVTVSS

SEQ ID NO: 19717 - protein, 121 aa, Artificial Sequence
  Chemically Synthesized
QVQLQESGGGLVQAGGSLRLSCAASGNFFIVTMGWYRQAPGKEREFVAAITAGSNTYYADSVKGRFTISRDNAKNTVYLQMNSLKPEDTAVYYCAAEVSWTYGYYWLYPYWGQGTQVTVSS

SEQ ID NO: 19718 - protein, 118 aa, Artificial Sequence
  Chemically Synthesized
QVQLQESGGGLVQAGGSLRLSCAASGTIFALYKMGWYRQAPGKERELVATINTGTTTNYADSVKGRFTISRDNAKNTVYLQMNSLKPEDTAVYYCAVWSRYWYYHAYWGQGTQVTVSS

SEQ ID NO: 19719 - protein, 121 aa, Artificial Sequence
  Chemically Synthesized
QVQLQESGGGLVQAGGSLRLSCAASGYISRHVYMGWYRQAPGKERELVASIDTGANTYYADSVKGRFTISRDNAKNTVYLQMNSLKPEDTAVYYCAVPYRGNTRYRYFVYWGQGTQVTVSS

SEQ ID NO: 19720 - protein, 125 aa, Artificial Sequence
  Chemically Synthesized
QVQLQESGGGLVQAGGSLRLSCAASGSIFQTSWMGWYRQAPGKEREFVAGIATGATTNYADSVKGRFTISRDNAKNTVYLQMNSLKPEDTAVYYCAAGSSSTRLTVMVVTTTFYWGQGTQVTVSS

SEQ ID NO: 19721 - protein, 122 aa, Artificial Sequence
  Chemically Synthesized
QVQLQESGGGLVQAGGSLRLSCAASGSISKLYIMGWYRQAPGKERELVATIDYGSSTYYADSVKGRFTISRDNAKNTVYLQMNSLKPEDTAVYYCAVAYRWPFGYLRRYGYWGQGTQVTVSS

SEQ ID NO: 19722 - protein, 118 aa, Artificial Sequence
  Chemically Synthesized
QVQLQESGGGLVQAGGSLRLSCAASGTISIPLYMGWYRQAPGKEREFVAAIGIGTTTYYADSVKGRFTISRDNAKNTVYLQMNSLKPEDTAVYYCAVPGWPHFTFLYWGQGTQVTVSS

SEQ ID NO: 19723 - protein, 117 aa, Artificial Sequence
  Chemically Synthesized
QVQLQESGGGLVQAGGSLRLSCAASGNISYTAMGWYRQAPGKERELVATISDGSTTNYADSVKGRFTISRDNAKNTVYLQMNSLKPEDTAVYYCAASSLELSLFPYWGQGTQVTVSS

SEQ ID NO: 19724 - protein, 118 aa, Artificial Sequence
  Chemically Synthesized
QVQLQESGGGLVQAGGSLRLSCAASGNISSPYIMGWYRQAPGKERELVATISAGGTTYYADSVKGRFTISRDNAKNTVYLQMNSLKPEDTAVYYCAVTGRGYRGHTYWGQGTQVTVSS

SEQ ID NO: 19725 - protein, 118 aa, Artificial Sequence
  Chemically Synthesized
QVQLQESGGGLVQAGGSLRLSCAASGTISVDFYMGWYRQAPGKEREFVASITAGGNTYYADSVKGRFTISRDNAKNTVYLQMNSLKPEDTAVYYCAVIPDHYATLRYWGQGTQVTVSS

SEQ ID NO: 19726 - protein, 121 aa, Artificial Sequence
  Chemically Synthesized
QVQLQESGGGLVQAGGSLRLSCAASGNISTGPYMGWYRQAPGKEREFVAGIATGSTTNYADSVKGRFTISRDNAKNTVYLQMNSLKPEDTAVYYCAASRTRSCVVTSTIYWGQGTQVTVSS

SEQ ID NO: 19727 - protein, 126 aa, Artificial Sequence
  Chemically Synthesized
QVQLQESGGGLVQAGGSLRLSCAASGSIFDIQPMGWYRQAPGKERELVAAIGYGTITYYADSVKGRFTISRDNAKNTVYLQMNSLKPEDTAVYYCAVYYYGDLLYVRYEQSAYAYWGQGTQVTVSS

SEQ ID NO: 19728 - protein, 111 aa, Artificial Sequence
  Chemically Synthesized
QVQLQESGGGLVQAGGSLRLSCAASGNIFLGYRMGWYRQAPGKERELVASIASGAITNYADSVKGRFTISRDNAKNTVYLQMNSLKPEDTAVYYCAVLAYWGQGTQVTVSS

SEQ ID NO: 19729 - protein, 122 aa, Artificial Sequence
  Chemically Synthesized
QVQLQESGGGLVQAGGSLRLSCAASGNISYRYFMGWYRQAPGKERELVAGIGSGGSTYYADSVKGRFTISRDNAKNTVYLQMNSLKPEDTAVYYCAVYYYAIAYYYPGHGYWGQGTQVTVSS

SEQ ID NO: 19730 - protein, 125 aa, Artificial Sequence
  Chemically Synthesized
QVQLQESGGGLVQAGGSLRLSCAASGTISADLYMGWYRQAPGKERELVAGILSVLLPYADSVKGRFTISRDNAKNTVYLQMNSLKPEDTAVYYCAAPTGQLVVLVYWSQGDYYYWGQGTQVTVSS

SEQ ID NO: 19731 - protein, 122 aa, Artificial Sequence
  Chemically Synthesized
QVQLQESGGGLVQAGGSLRLSCAASGSIFRRYGMGWYRQAPGKEREFVAAITTGASTYYADSVKGRFTISRDNAKNTVYLQMNSLKPEDTAVYYCAAYWRGYPAVDPPHLYWGQGTQVTVSS

SEQ ID NO: 19732 - protein, 118 aa, Artificial Sequence
  Chemically Synthesized
QVQLQESGGGLVQAGGSLRLSCAASGTIFFSRRMGWYRQAPGKERELVAAIDRGGITNYADSVKGRFTISRDNAKNTVYLQMNSLKPEDTAVYYCAATYRYNYGFPYWGQGTQVTVSS

SEQ ID NO: 19733 - protein, 126 aa, Artificial Sequence
  Chemically Synthesized
QVQLQESGGGLVQAGGSLRLSCAASGNISGSYIMGWYRQAPGKERELVATINWGAITYYADSVKGRFTISRDNAKNTVYLQMNSLKPEDTAVYYCAAQLGGLLYIWWYYPYRHDYWGQGTQVTVSS

SEQ ID NO: 19734 - protein, 118 aa, Artificial Sequence
  Chemically Synthesized
QVQLQESGGGLVQAGGSLRLSCAASGSISTALLMGWYRQAPGKERELVASIGGGTITNYADSVKGRFTISRDNAKNTVYLQMNSLKPEDTAVYYCAADHSDYYAHDYWGQGTQVTVSS

SEQ ID NO: 19735 - protein, 126 aa, Artificial Sequence
  Chemically Synthesized
QVQLQESGGGLVQAGGSLRLSCAASGYIFYYGNMGWYRQAPGKEREFVAAIDRGSNTYYADSVKGRFTISRDNAKNTVYLQMNSLKPEDTAVYYCAAYQGDSEGDRDLHIWWYDYWGQGTQVTVSS

SEQ ID NO: 19736 - protein, 126 aa, Artificial Sequence
  Chemically Synthesized
QVQLQESGGGLVQAGGSLRLSCAASGTISRAVYMGWYRQAPGKERELVASISAGASTNYADSVKGRFTISRDNAKNTVYLQMNSLKPEDTAVYYCAAYIIDQVGESWPYYWEYLYWGQGTQVTVSS

SEQ ID NO: 19737 - protein, 122 aa, Artificial Sequence
  Chemically Synthesized
QVQLQESGGGLVQAGGSLRLSCAASGTIFPRWWMGWYRQAPGKEREFVAGIGSGATTYYADSVKGRFTISRDNAKNTVYLQMNSLKPEDTAVYYCAAYRRYYLWRNWRHYYWGQGTQVTVSS

SEQ ID NO: 19738 - protein, 117 aa, Artificial Sequence
  Chemically Synthesized
QVQLQESGGGLVQAGGSLRLSCAASGYISSSWMGWYRQAPGKERELVATISYGGNTYYADSVKGRFTISRDNAKNTVYLQMNSLKPEDTAVYYCAAADTAGNHHTYWGQGTQVTVSS

SEQ ID NO: 19739 - protein, 122 aa, Artificial Sequence
  Chemically Synthesized
QVQLQESGGGLVQAGGSLRLSCAASGYISDRADMGWYRQAPGKERELVASIAYGTNTYYADSVKGRFTISRDNAKNTVYLQMNSLKPEDTAVYYCAVTVYVGTDDILGYKYWGQGTQVTVSS

SEQ ID NO: 19740 - protein, 121 aa, Artificial Sequence
  Chemically Synthesized
QVQLQESGGGLVQAGGSLRLSCAASGTISSTQVMGWYRQAPGKERELVASITWGTSTYADSVKGRFTISRDNAKNTVYLQMNSLKPEDTAVYYCAAKQDYTQYRYQYLIYWGQGTQVTVSS

SEQ ID NO: 19741 - protein, 122 aa, Artificial Sequence
  Chemically Synthesized
QVQLQESGGGLVQAGGSLRLSCAASGNIFGTIRMGWYRQAPGKERELVAGIAKGGTTYYADSVKGRFTISRDNAKNTVYLQMNSLKPEDTAVYYCAARLRSAWGWSGLHTYWGQGTQVTVSS

SEQ ID NO: 19742 - protein, 118 aa, Artificial Sequence
  Chemically Synthesized
QVQLQESGGGLVQAGGSLRLSCAASGNISYVYYMGWYRQAPGKERELVAAIDTGTTTYYADSVKGRFTISRDNAKNTVYLQMNSLKPEDTAVYYCAAVRRRRGQHPYWGQGTQVTVSS

SEQ ID NO: 19743 - protein, 122 aa, Artificial Sequence
  Chemically Synthesized
QVQLQESGGGLVQAGGSLRLSCAASGSISGYLYMGWYRQAPGKERELVAAIGAGGSTNYADSVKGRFTISRDNAKNTVYLQMNSLKPEDTAVYYCAVGDGTLRQKLKWLRYWGQGTQVTVSS

SEQ ID NO: 19744 - protein, 126 aa, Artificial Sequence
  Chemically Synthesized
QVQLQESGGGLVQAGGSLRLSCAASGTISYLYYMGWYRQAPGKERELVAGIAVGGTTYYADSVKGRFTISRDNAKNTVYLQMNSLKPEDTAVYYCAVQHTGAYWSYPYYNVAFIYWGQGTQVTVSS

SEQ ID NO: 19745 - protein, 126 aa, Artificial Sequence
  Chemically Synthesized
QVQLQESGGGLVQAGGSLRLSCAASGNIFRRPWMGWYRQAPGKEREFVAAISGGTITYYADSVKGRFTISRDNAKNTVYLQMNSLKPEDTAVYYCAASRIGFWSYQYLYWARHGYWGQGTQVTVSS

SEQ ID NO: 19746 - protein, 118 aa, Artificial Sequence
  Chemically Synthesized
QVQLQESGGGLVQAGGSLRLSCAASGTIFAAYNMGWYRQAPGKEREFVASIDSGASTNYADSVKGRFTISRDNAKNTVYLQMNSLKPEDTAVYYCAVYDSAFGDYWYWGQGTQVTVSS

SEQ ID NO: 19747 - protein, 117 aa, Artificial Sequence
  Chemically Synthesized
QVQLQESGGGLVQAGGSLRLSCAASGNIFPEGNMGWYRQAPGKERELVAGIDNGTTTNYADSVKGRFTISRDNAKNTVYLQMNSLKPEDTAVYYCAGDKHEPTLAYWGQGTQVTVSS

SEQ ID NO: 19748 - protein, 118 aa, Artificial Sequence
  Chemically Synthesized
QVQLQESGGGLVQAGGSLRLSCAASGNISAVGLMGWYRQAPGKERELVAGIGDGAITNYADSVKGRFTISRDNAKNTVYLQMNSLKPEDTAVYYCAVLYAIYGGHAYWGQGTQVTVSS

SEQ ID NO: 19749 - protein, 118 aa, Artificial Sequence
  Chemically Synthesized
QVQLQESGGGLVQAGGSLRLSCAASGSISRHRRMGWYRQAPGKEREFVAAITYGGNTNYADSVKGRFTISRDNAKNTVYLQMNSLKPEDTAVYYCAVRWYAWQWLSYWGQGTQVTVSS

SEQ ID NO: 19750 - protein, 126 aa, Artificial Sequence
  Chemically Synthesized
QVQLQESGGGLVQAGGSLRLSCAASGSISRQRYMGWYRQAPGKERELVASITHGSSTYYADSVKGRFTISRDNAKNTVYLQMNSLKPEDTAVYYCAVLQNYRYPDAPHYKYYHRYWGQGTQVTVSS

SEQ ID NO: 19751 - protein, 118 aa, Artificial Sequence
  Chemically Synthesized
QVQLQESGGGLVQAGGSLRLSCAASGYIFYRVYMGWYRQAPGKEREFVAAIGYGSITYYADSVKGRFTISRDNAKNTVYLQMNSLKPEDTAVYYCAAYTGPRRAYPYWGQGTQVTVSS

SEQ ID NO: 19752 - protein, 122 aa, Artificial Sequence
  Chemically Synthesized
QVQLQESGGGLVQAGGSLRLSCAASGSIFRRYPMGWYRQAPGKEREFVAAIGRGASTYYADSVKGRFTISRDNAKNTVYLQMNSLKPEDTAVYYCAADYWYYYGRWYGHEYWGQGTQVTVSS

SEQ ID NO: 19753 - protein, 118 aa, Artificial Sequence
  Chemically Synthesized
QVQLQESGGGLVQAGGSLRLSCAASGNIFTFRYMGWYRQAPGKEREFVAAINSGTTTYYADSVKGRFTISRDNAKNTVYLQMNSLKPEDTAVYYCAVNGYWRPAHTYWGQGTQVTVSS

SEQ ID NO: 19754 - protein, 122 aa, Artificial Sequence
  Chemically Synthesized
QVQLQESGGGLVQAGGSLRLSCAASGNIFRLIVMGWYRQAPGKERELVAAISWGSTTYYADSVKGRFTISRDNAKNTVYLQMNSLKPEDTAVYYCAVSAYGGDGYFISLGYWGQGTQVTVSS

SEQ ID NO: 19755 - protein, 121 aa, Artificial Sequence
  Chemically Synthesized
QVQLQESGGGLVQAGGSLRLSCAASGTISASVMGWYRQAPGKEREFVATIDEGAITYYADSVKGRFTISRDNAKNTVYLQMNSLKPEDTAVYYCAVTVVPLQGGNYYHYYWGQGTQVTVSS

SEQ ID NO: 19756 - protein, 118 aa, Artificial Sequence
  Chemically Synthesized
QVQLQESGGGLVQAGGSLRLSCAASGNIFSAHQMGWYRQAPGKEREFVAAIGFGSNTYYADSVKGRFTISRDNAKNTVYLQMNSLKPEDTAVYYCAVSDLAGAFFDYWGQGTQVTVSS

SEQ ID NO: 19757 - protein, 126 aa, Artificial Sequence
  Chemically Synthesized
QVQLQESGGGLVQAGGSLRLSCAASGTISIHRYMGWYRQAPGKERELVASITYGATTYYADSVKGRFTISRDNAKNTVYLQMNSLKPEDTAVYYCAVYDSSYNDDYSDSYVGHPYWGQGTQVTVSS

SEQ ID NO: 19758 - protein, 118 aa, Artificial Sequence
  Chemically Synthesized
QVQLQESGGGLVQAGGSLRLSCAASGTIFNLHYMGWYRQAPGKERELVAAIGWGGITNYADSVKGRFTISRDNAKNTVYLQMNSLKPEDTAVYYCAVDFGYSGSHGYWGQGTQVTVSS

SEQ ID NO: 19759 - protein, 118 aa, Artificial Sequence
  Chemically Synthesized
QVQLQESGGGLVQAGGSLRLSCAASGNISRAYAMGWYRQAPGKERELVATIARGGITNYADSVKGRFTISRDNAKNTVYLQMNSLKPEDTAVYYCAAVNYWRYYHRYWGQGTQVTVSS

SEQ ID NO: 19760 - protein, 118 aa, Artificial Sequence
  Chemically Synthesized
QVQLQESGGGLVQAGGSLRLSCAASGYIFYPYYMGWYRQAPGKEREFVAGIGYGGITYYADSVKGRFTISRDNAKNTVYLQMNSLKPEDTAVYYCAVRGARPRRHQYWGQGTQVTVSS

SEQ ID NO: 19761 - protein, 117 aa, Artificial Sequence
  Chemically Synthesized
QVQLQESGGGLVQAGGSLRLSCAASGYISRYYIMGWYRQAPGKERELVAAITYGAITNYADSVKGRFTISRDNAKNTVYLQMNSLKPEDTAVYYCAVLAVFPAFLYWGQGTQVTVSS

SEQ ID NO: 19762 - protein, 117 aa, Artificial Sequence
  Chemically Synthesized
QVQLQESGGGLVQAGGSLRLSCAASGSISYVTDMGWYRQAPGKEREFVASIGYGTTTNYADSVKGRFTISRDNAKNTVYLQMNSLKPEDTAVYYCAALYHLTIYWYWGQGTQVTVSS

SEQ ID NO: 19763 - protein, 122 aa, Artificial Sequence
  Chemically Synthesized
QVQLQESGGGLVQAGGSLRLSCAASGNISRRYGMGWYRQAPGKERELVAAISWGGNTNYADSVKGRFTISRDNAKNTVYLQMNSLKPEDTAVYYCAAVDRYWSHYTQRHTYWGQGTQVTVSS

SEQ ID NO: 19764 - protein, 117 aa, Artificial Sequence
  Chemically Synthesized
QVQLQESGGGLVQAGGSLRLSCAASGNIFLRCMGWYRQAPGKERELVAGIASGGITNYADSVKGRFTISRDNAKNTVYLQMNSLKPEDTAVYYCAAADAPRGRHDYWGQGTQVTVSS

SEQ ID NO: 19765 - protein, 122 aa, Artificial Sequence
  Chemically Synthesized
QVQLQESGGGLVQAGGSLRLSCAASGSIFAYVGMGWYRQAPGKERELVASISPGGTTNYADSVKGRFTISRDNAKNTVYLQMNSLKPEDTAVYYCAVSEIANDYTGPRYDYWGQGTQVTVSS

SEQ ID NO: 19766 - protein, 126 aa, Artificial Sequence
  Chemically Synthesized
QVQLQESGGGLVQAGGSLRLSCAASGTISNAIGMGWYRQAPGKEREFVASIGAGGTTNYADSVKGRFTISRDNAKNTVYLQMNSLKPEDTAVYYCAVTRWNTYSYGSNRTRYHRYWGQGTQVTVSS

SEQ ID NO: 19767 - protein, 118 aa, Artificial Sequence
  Chemically Synthesized
QVQLQESGGGLVQAGGSLRLSCAASGTISRYYIMGWYRQAPGKERELVAAISAGGSTYYADSVKGRFTISRDNAKNTVYLQMNSLKPEDTAVYYCAAATGWVRKYWYWGQGTQVTVSS

SEQ ID NO: 19768 - protein, 126 aa, Artificial Sequence
  Chemically Synthesized
QVQLQESGGGLVQAGGSLRLSCAASGTISYYPTMGWYRQAPGKEREFVASIDAGGSTNYADSVKGRFTISRDNAKNTVYLQMNSLKPEDTAVYYCAVPTRKSDSITYYKRGPYPYWGQGTQVTVSS

SEQ ID NO: 19769 - protein, 118 aa, Artificial Sequence
  Chemically Synthesized
QVQLQESGGGLVQAGGSLRLSCAASGTIFNGSSMGWYRQAPGKEREFVASISSGSSTNYADSVKGRFTISRDNAKNTVYLQMNSLKPEDTAVYYCAAESQSDSKHWYWGQGTQVTVSS

SEQ ID NO: 19770 - protein, 118 aa, Artificial Sequence
  Chemically Synthesized
QVQLQESGGGLVQAGGSLRLSCAASGTIFRPHRMGWYRQAPGKEREFVAGITAGGSTYYADSVKGRFTISRDNAKNTVYLQMNSLKPEDTAVYYCAALRAYYPTHLYWGQGTQVTVSS

SEQ ID NO: 19771 - protein, 118 aa, Artificial Sequence
  Chemically Synthesized
QVQLQESGGGLVQAGGSLRLSCAASGNIFILWYMGWYRQAPGKEREFVAAIDYGTNTYYADSVKGRFTISRDNAKNTVYLQMNSLKPEDTAVYYCAVNRGLYRRHYYWGQGTQVTVSS

SEQ ID NO: 19772 - protein, 122 aa, Artificial Sequence
  Chemically Synthesized
QVQLQESGGGLVQAGGSLRLSCAASGNISAARAMGWYRQAPGKERELVAGINQGSTTYYADSVKGRFTISRDNAKNTVYLQMNSLKPEDTAVYYCAAYPTRRYPYYRYYRYWGQGTQVTVSS

SEQ ID NO: 19773 - protein, 117 aa, Artificial Sequence
  Chemically Synthesized
QVQLQESGGGLVQAGGSLRLSCAASGYIFYAVTMGWYRQAPGKEREFVASIAYGAITYYADSVKGRFTISRDNAKNTVYLQMNSLKPEDTAVYYCAWSTGRGGLYYWGQGTQVTVSS

SEQ ID NO: 19774 - protein, 119 aa, Artificial Sequence
  Chemically Synthesized
QVQLQESGGGLVQAGGSLRLSCAASGNISGGYTMGWYRQAPGKERELVAAISVGGSTYYADSVKGRFTISRDNAKNTVYLQMNSLKPEDTAVYYCAVDSRFDQYQFYYWGQGTQVTVSS

SEQ ID NO: 19775 - protein, 118 aa, Artificial Sequence
  Chemically Synthesized
QVQLQESGGGLVQAGGSLRLSCAASGSISVSDFMGWYRQAPGKERELVAGITYGGNTYYADSVKGRFTISRDNAKNTVYLQMNSLKPEDTAVYYCAVFEPYHNYFAYWGQGTQVTVSS

SEQ ID NO: 19776 - protein, 122 aa, Artificial Sequence
  Chemically Synthesized
QVQLQESGGGLVQAGGSLRLSCAASGTIFRRNYMGWYRQAPGKEREFVAAISYGSNTNYADSVKGRFTISRDNAKNTVYLQMNSLKPEDTAVYYCAVTRAYGWQKYAPYWYWGQGTQVTVSS

SEQ ID NO: 19777 - protein, 118 aa, Artificial Sequence
  Chemically Synthesized
QVQLQESGGGLVQAGGSLRLSCAASGYIFLERNMGWYRQAPGKEREFVAGIDVGSTTYYADSVKGRFTISRDNAKNTVYLQMNSLKPEDTAVYYCAVWLYAYTRFDYWGQGTQVTVSS

SEQ ID NO: 19778 - protein, 109 aa, Artificial Sequence
  Chemically Synthesized
QVQLQESGGGLVQAGGSLRLSCAASGTISPYRYMGWYRQAPGKERELVASIDHGGSTNYADSVKGRFTISRDNAKNTVYLQMNSLKPEDTAVYYCAVYWGQGTQVTVSS

SEQ ID NO: 19779 - protein, 122 aa, Artificial Sequence
  Chemically Synthesized
QVQLQESGGGLVQAGGSLRLSCAASGTIFLTVGMGWYRQAPGKERELVAAIAYGAITYYADSVKGRFTISRDNAKNTVYLQMNSLKPEDTAVYYCAVQDVWLVPSREPYLYWGQGTQVTVSS

SEQ ID NO: 19780 - protein, 118 aa, Artificial Sequence
  Chemically Synthesized
QVQLQESGGGLVQAGGSLRLSCAASGSIFSFWWMGWYRQAPGKERELVAAITYGSTTYYADSVKGRFTISRDNAKNTVYLQMNSLKPEDTAVYYCAVLASVVADHRYWGQGTQVTVSS

SEQ ID NO: 19781 - protein, 118 aa, Artificial Sequence
  Chemically Synthesized
QVQLQESGGGLVQAGGSLRLSCAASGYISGSYVMGWYRQAPGKERELVAAIAIGGTTYYADSVKGRFTISRDNAKNTVYLQMNSLKPEDTAVYYCAVNVTNTRPFSYWGQGTQVTVSS

SEQ ID NO: 19782 - protein, 126 aa, Artificial Sequence
  Chemically Synthesized
QVQLQESGGGLVQAGGSLRLSCAASGYISRRYPMGWYRQAPGKERELVASIAYGATTNYADSVKGRFTISRDNAKNTVYLQMNSLKPEDTAVYYCAVYWGRWRYQLTSLAYGYQYWGQGTQVTVSS

SEQ ID NO: 19783 - protein, 122 aa, Artificial Sequence
  Chemically Synthesized
QVQLQESGGGLVQAGGSLRLSCAASGTIFRAGYMGWYRQAPGKERELVAAIARGSTTYYADSVKGRFTISRDNAKNTVYLQMNSLKPEDTAVYYCAVFNFYRYQGNRLHEYWGQGTQVTVSS

SEQ ID NO: 19784 - protein, 118 aa, Artificial Sequence
  Chemically Synthesized
QVQLQESGGGLVQAGGSLRLSCAASGTIFFRRYMGWYRQAPGKERELVATIGGGTITNYADSVKGRFTISRDNAKNTVYLQMNSLKPEDTAVYYCAVRYRLRPSHPYWGQGTQVTVSS

SEQ ID NO: 19785 - protein, 126 aa, Artificial Sequence
  Chemically Synthesized
QVQLQESGGGLVQAGGSLRLSCAASGTIFATYIMGWYRQAPGKEREFVAGIGYGTTTYYADSVKGRFTISRDNAKNTVYLQMNSLKPEDTAVYYCAVTWDVIYRDAITPVYDHSYWGQGTQVTVSS

SEQ ID NO: 19786 - protein, 118 aa, Artificial Sequence
  Chemically Synthesized
QVQLQESGGGLVQAGGSLRLSCAASGYISVYNRMGWYRQAPGKERELVASISKGTTTYYADSVKGRFTISRDNAKNTVYLQMNSLKPEDTAVYYCAAPHRYYNLHRYWGQGTQVTVSS

SEQ ID NO: 19787 - protein, 117 aa, Artificial Sequence
  Chemically Synthesized
QVQLQESGGGLVQAGGSLRLSCAASGNIFRSSMGWYRQAPGKERELVATISSGASTYYADSVKGRFTISRDNAKNTVYLQMNSLKPEDTAVYYCAAYRYGSTALTYWGQGTQVTVSS

SEQ ID NO: 19788 - protein, 118 aa, Artificial Sequence
  Chemically Synthesized
QVQLQESGGGLVQAGGSLRLSCAASGNIFRVLAMGWYRQAPGKEREFVAGITYGGNTNYADSVKGRFTISRDNAKNTVYLQMNSLKPEDTAVYYCAVYRPRYRAHRYWGQGTQVTVSS

SEQ ID NO: 19789 - protein, 115 aa, Artificial Sequence
  Chemically Synthesized
QVQLQESGGGLVQAGGSLRLSCAASGNIFRSNLMGWYRQAPGKERELVAAIDDGTQYADSVKGRFTISRDNAKNTVYLQMNSLKPEDTAVYYCAAQQYHYWLYYWGQGTQVTVSS

SEQ ID NO: 19790 - protein, 126 aa, Artificial Sequence
  Chemically Synthesized
QVQLQESGGGLVQAGGSLRLSCAASGSISDNKNMGWYRQAPGKERELVAGIDDGSNTYYADSVKGRFTISRDNAKNTVYLQMNSLKPEDTAVYYCAADEDDDYRALPSYGDVHDYWGQGTQVTVSS

SEQ ID NO: 19791 - protein, 118 aa, Artificial Sequence
  Chemically Synthesized
QVQLQESGGGLVQAGGSLRLSCAASGNIFDRRRMGWYRQAPGKEREFVAGIAQGANTYYADSVKGRFTISRDNAKNTVYLQMNSLKPEDTAVYYCAAPYIGKYYHGYWGQGTQVTVSS

SEQ ID NO: 19792 - protein, 118 aa, Artificial Sequence
  Chemically Synthesized
QVQLQESGGGLVQAGGSLRLSCAASGSIFYAIKMGWYRQAPGKEREFVASINRGATTNYADSVKGRFTISRDNAKNTVYLQMNSLKPEDTAVYYCAVRRYYLTYHYYWGQGTQVTVSS

SEQ ID NO: 19793 - protein, 118 aa, Artificial Sequence
  Chemically Synthesized
QVQLQESGGGLVQAGGSLRLSCAASGTIFYWRSMGWYRQAPGKEREFVATITGGATTYYADSVKGRFTISRDNAKNTVYLQMNSLKPEDTAVYYCAVYRYLAVAHAYWGQGTQVTVSS

SEQ ID NO: 19794 - protein, 121 aa, Artificial Sequence
  Chemically Synthesized
QVQLQESGGGLVQAGGSLRLSCAASGTIFPIYTMGWYRQAPGKEREFVAAIGPGAITNYADSVKGRFTISRDNAKNTVYLQMNSLKPEDTAVYYCALTSLKVTLVKSCFYWGQGTQVTVSS

SEQ ID NO: 19795 - protein, 118 aa, Artificial Sequence
  Chemically Synthesized
QVQLQESGGGLVQAGGSLRLSCAASGYISYVSNMGWYRQAPGKEREFVASITYGGSTYYADSVKGRFTISRDNAKNTVYLQMNSLKPEDTAVYYCAARKVLWRGFRYWGQGTQVTVSS

SEQ ID NO: 19796 - protein, 122 aa, Artificial Sequence
  Chemically Synthesized
QVQLQESGGGLVQAGGSLRLSCAASGYIFRGSGMGWYRQAPGKEREFVASIGRGASTNYADSVKGRFTISRDNAKNTVYLQMNSLKPEDTAVYYCAVVRPFRGRGTYVYSYWGQGTQVTVSS

SEQ ID NO: 19797 - protein, 118 aa, Artificial Sequence
  Chemically Synthesized
QVQLQESGGGLVQAGGSLRLSCAASGSIFPRYAMGWYRQAPGKEREFVAAISLGGSTNYADSVKGRFTISRDNAKNTVYLQMNSLKPEDTAVYYCAARAYQRWRHTYWGQGTQVTVSS

SEQ ID NO: 19798 - protein, 122 aa, Artificial Sequence
  Chemically Synthesized
QVQLQESGGGLVQAGGSLRLSCAASGYIFLWFYMGWYRQAPGKERELVAGISAGATTNYADSVKGRFTISRDNAKNTVYLQMNSLKPEDTAVYYCAVRLLDYIYLPYLYQYWGQGTQVTVSS

SEQ ID NO: 19799 - protein, 116 aa, Artificial Sequence
  Chemically Synthesized
QVQLQESGGGLVQAGGSLRLSCAASGYISFTYTMGWYRQAPGKEREFVASIAFGTITYYADSVKGRFTISRDNAKNTVYLQMNSLKPEDTAVYYCAASRLFYFAYWGQGTQVTVSS

SEQ ID NO: 19800 - protein, 118 aa, Artificial Sequence
  Chemically Synthesized
QVQLQESGGGLVQAGGSLRLSCAASGYISQRSRMGWYRQAPGKEREFVATIATGATTYYADSVKGRFTISRDNAKNTVYLQMNSLKPEDTAVYYCAVYRYGRFYFRYWGQGTQVTVSS

SEQ ID NO: 19801 - protein, 126 aa, Artificial Sequence
  Chemically Synthesized
QVQLQESGGGLVQAGGSLRLSCAASGYISYWRNMGWYRQAPGKERELVATIDNGTNTNYADSVKGRFTISRDNAKNTVYLQMNSLKPEDTAVYYCAAYATKISYDFWPFLSFLRYWGQGTQVTVSS

SEQ ID NO: 19802 - protein, 121 aa, Artificial Sequence
  Chemically Synthesized
QVQLQESGGGLVQAGGSLRLSCAASGNISSNRRMGWYRQAPGKERELVATIGRGNTNYADSVKGRFTISRDNAKNTVYLQMNSLKPEDTAVYYCAAWGEYRDDGGYDFLYWGQGTQVTVSS

SEQ ID NO: 19803 - protein, 126 aa, Artificial Sequence
  Chemically Synthesized
QVQLQESGGGLVQAGGSLRLSCAASGSISRVARMGWYRQAPGKEREFVASIATGGTTYYADSVKGRFTISRDNAKNTVYLQMNSLKPEDTAVYYCAAYYRDGRGGYYTIRARYRYWGQGTQVTVSS

SEQ ID NO: 19804 - protein, 122 aa, Artificial Sequence
  Chemically Synthesized
QVQLQESGGGLVQAGGSLRLSCAASGTIFRDVAMGWYRQAPGKEREFVASIANGTITYYADSVKGRFTISRDNAKNTVYLQMNSLKPEDTAVYYCAVVLWTVRRWSRYLPYWGQGTQVTVSS

SEQ ID NO: 19805 - protein, 118 aa, Artificial Sequence
  Chemically Synthesized
QVQLQESGGGLVQAGGSLRLSCAASGNIFRPPNMGWYRQAPGKEREFVAGIGSGGITNYADSVKGRFTISRDNAKNTVYLQMNSLKPEDTAVYYCAARWAYQQRLPYWGQGTQVTVSS

SEQ ID NO: 19806 - protein, 122 aa, Artificial Sequence
  Chemically Synthesized
QVQLQESGGGLVQAGGSLRLSCAASGTIFVPTYMGWYRQAPGKEREFVASINVGGITYYADSVKGRFTISRDNAKNTVYLQMNSLKPEDTAVYYCAAQYDDSNSAVAYYWYWGQGTQVTVSS

SEQ ID NO: 19807 - protein, 126 aa, Artificial Sequence
  Chemically Synthesized
QVQLQESGGGLVQAGGSLRLSCAASGSISYWWAMGWYRQAPGKERELVAGISRGGTTYYADSVKGRFTISRDNAKNTVYLQMNSLKPEDTAVYYCAAVRRDSLSHYRPKPTYFRYWGQGTQVTVSS

SEQ ID NO: 19808 - protein, 126 aa, Artificial Sequence
  Chemically Synthesized
QVQLQESGGGLVQAGGSLRLSCAASGNISPSDYMGWYRQAPGKEREFVAGITGGATTNYADSVKGRFTISRDNAKNTVYLQMNSLKPEDTAVYYCAAGDVWSGVYRPQDRYAYGYWGQGTQVTVSS

SEQ ID NO: 19809 - protein, 122 aa, Artificial Sequence
  Chemically Synthesized
QVQLQESGGGLVQAGGSLRLSCAASGSISWDSIMGWYRQAPGKEREFVAAITVGGSTYYADSVKGRFTISRDNAKNTVYLQMNSLKPEDTAVYYCAVGGNYDTYLTDLHYYWGQGTQVTVSS

SEQ ID NO: 19810 - protein, 126 aa, Artificial Sequence
  Chemically Synthesized
QVQLQESGGGLVQAGGSLRLSCAASGTISGSRNMGWYRQAPGKERELVASISYGAITNYADSVKGRFTISRDNAKNTVYLQMNSLKPEDTAVYYCAVGYPLDLGYHLRLDDGHTYWGQGTQVTVSS

SEQ ID NO: 19811 - protein, 122 aa, Artificial Sequence
  Chemically Synthesized
QVQLQESGGGLVQAGGSLRLSCAASGSISWHTVMGWYRQAPGKERELVAAITYGGTTNYADSVKGRFTISRDNAKNTVYLQMNSLKPEDTAVYYCAARAHFYHPKFWRHGYWGQGTQVTVSS

SEQ ID NO: 19812 - protein, 122 aa, Artificial Sequence
  Chemically Synthesized
QVQLQESGGGLVQAGGSLRLSCAASGTIFVTLFMGWYRQAPGKERELVAAIDWGGTTNYADSVKGRFTISRDNAKNTVYLQMNSLKPEDTAVYYCAANPYVYPVLYPAHWYWGQGTQVTVSS

SEQ ID NO: 19813 - protein, 126 aa, Artificial Sequence
  Chemically Synthesized
QVQLQESGGGLVQAGGSLRLSCAASGTISYDDDMGWYRQAPGKEREFVAAINLGTSTNYADSVKGRFTISRDNAKNTVYLQMNSLKPEDTAVYYCAVFARSLRYGFHRTAVYFAYWGQGTQVTVSS

SEQ ID NO: 19814 - protein, 126 aa, Artificial Sequence
  Chemically Synthesized
QVQLQESGGGLVQAGGSLRLSCAASGTISQRHRMGWYRQAPGKEREFVAGIGAGANTNYADSVKGRFTISRDNAKNTVYLQMNSLKPEDTAVYYCAVQHAGVYRVPRTWSLYHYYWGQGTQVTVSS

SEQ ID NO: 19815 - protein, 118 aa, Artificial Sequence
  Chemically Synthesized
QVQLQESGGGLVQAGGSLRLSCAASGYIFTSPAMGWYRQAPGKERELVASIGGGANTNYADSVKGRFTISRDNAKNTVYLQMNSLKPEDTAVYYCAARFRYRSRYQYWGQGTQVTVSS

SEQ ID NO: 19816 - protein, 121 aa, Artificial Sequence
  Chemically Synthesized
QVQLQESGGGLVQAGGSLRLSCAASGTILCTLMGWYRQAPGKEREFVAAITGGAITYYADSVKGRFTISRDNAKNTVYLQMNSLKPEDTAVYYCAVSVYYNGHNYADHVYWGQGTQVTVSS

SEQ ID NO: 19817 - protein, 118 aa, Artificial Sequence
  Chemically Synthesized
QVQLQESGGGLVQAGGSLRLSCAASGTIFSKRIMGWYRQAPGKERELVAAINRGGITYYADSVKGRFTISRDNAKNTVYLQMNSLKPEDTAVYYCAVGIYPGLHHAYWGQGTQVTVSS

SEQ ID NO: 19818 - protein, 126 aa, Artificial Sequence
  Chemically Synthesized
QVQLQESGGGLVQAGGSLRLSCAASGNISLYVYMGWYRQAPGKERELVAAIGLGANTYYADSVKGRFTISRDNAKNTVYLQMNSLKPEDTAVYYCAVYRWRDRGGIVGNVISLGYWGQGTQVTVSS

SEQ ID NO: 19819 - protein, 118 aa, Artificial Sequence
  Chemically Synthesized
QVQLQESGGGLVQAGGSLRLSCAASGSIFYDILMGWYRQAPGKEREFVAAIAYGASTYYADSVKGRFTISRDNAKNTVYLQMNSLKPEDTAVYYCAAVADREEYHGYWGQGTQVTVSS

SEQ ID NO: 19820 - protein, 118 aa, Artificial Sequence
  Chemically Synthesized
QVQLQESGGGLVQAGGSLRLSCAASGTIFPVLPMGWYRQAPGKEREFVATISYGSTTYYADSVKGRFTISRDNAKNTVYLQMNSLKPEDTAVYYCAVRPDTVRRHSYWGQGTQVTVSS

SEQ ID NO: 19821 - protein, 118 aa, Artificial Sequence
  Chemically Synthesized
QVQLQESGGGLVQAGGSLRLSCAASGSISGRQEMGWYRQAPGKEREFVAAIDDGSNTYYADSVKGRFTISRDNAKNTVYLQMNSLKPEDTAVYYCAAYDWADLSFVYWGQGTQVTVSS

SEQ ID NO: 19822 - protein, 118 aa, Artificial Sequence
  Chemically Synthesized
QVQLQESGGGLVQAGGSLRLSCAASGYISRRYLMGWYRQAPGKERELVAGISYGGNTYYADSVKGRFTISRDNAKNTVYLQMNSLKPEDTAVYYCAAYPYRRYYHRYWGQGTQVTVSS

SEQ ID NO: 19823 - protein, 118 aa, Artificial Sequence
  Chemically Synthesized
QVQLQESGGGLVQAGGSLRLSCAASGTISTIRQMGWYRQAPGKEREFVAGISGGANTYYADSVKGRFTISRDNAKNTVYLQMNSLKPEDTAVYYCAALRWWPYVHRYWGQGTQVTVSS

SEQ ID NO: 19824 - protein, 122 aa, Artificial Sequence
  Chemically Synthesized
QVQLQESGGGLVQAGGSLRLSCAASGNISATRPMGWYRQAPGKEREFVAAISDGANTNYADSVKGRFTISRDNAKNTVYLQMNSLKPEDTAVYYCAATRRWYRGYWYVHRYWGQGTQVTVSS

SEQ ID NO: 19825 - protein, 122 aa, Artificial Sequence
  Chemically Synthesized
QVQLQESGGGLVQAGGSLRLSCAASGSISGYRTMGWYRQAPGKERELVATITEGGNTYYADSVKGRFTISRDNAKNTVYLQMNSLKPEDTAVYYCAAYRFWLYYYWYRHAYWGQGTQVTVSS

SEQ ID NO: 19826 - protein, 126 aa, Artificial Sequence
  Chemically Synthesized
QVQLQESGGGLVQAGGSLRLSCAASGTISAYVEMGWYRQAPGKERELVAGIGPGGTTYYADSVKGRFTISRDNAKNTVYLQMNSLKPEDTAVYYCAAGHVDQLRGGWPRTADHNYWGQGTQVTVSS

SEQ ID NO: 19827 - protein, 118 aa, Artificial Sequence
  Chemically Synthesized
QVQLQESGGGLVQAGGSLRLSCAASGYIFPRQIMGWYRQAPGKEREFVAGITRGANTYYADSVKGRFTISRDNAKNTVYLQMNSLKPEDTAVYYCAVYHKRYASHSYWGQGTQVTVSS

SEQ ID NO: 19828 - protein, 126 aa, Artificial Sequence
  Chemically Synthesized
QVQLQESGGGLVQAGGSLRLSCAASGTIFALTYMGWYRQAPGKEREFVAAISLGTTTYYADSVKGRFTISRDNAKNTVYLQMNSLKPEDTAVYYCAVNVQSGDGYFYWRGYTHVYWGQGTQVTVSS

SEQ ID NO: 19829 - protein, 121 aa, Artificial Sequence
  Chemically Synthesized
QVQLQESGGGLVQAGGSLRLSCAASGNISPGPTMGWYRQAPGKERELVATINYGTSTNYADSVKGRFTISRDNAKNTVYLQMNSLKPEDTAVYYCAVVHSNTCLTTTFFYWGQGTQVTVSS

SEQ ID NO: 19830 - protein, 126 aa, Artificial Sequence
  Chemically Synthesized
QVQLQESGGGLVQAGGSLRLSCAASGYISFIDYMGWYRQAPGKEREFVAGIGNGSNTNYADSVKGRFTISRDNAKNTVYLQMNSLKPEDTAVYYCAVTDDRYARVTRRAKTRFTYWGQGTQVTVSS

SEQ ID NO: 19831 - protein, 126 aa, Artificial Sequence
  Chemically Synthesized
QVQLQESGGGLVQAGGSLRLSCAASGNISGYYVMGWYRQAPGKEREFVATIAYGGSTYYADSVKGRFTISRDNAKNTVYLQMNSLKPEDTAVYYCAVQVGNPWVRGGWYHHYLDYWGQGTQVTVSS

SEQ ID NO: 19832 - protein, 122 aa, Artificial Sequence
  Chemically Synthesized
QVQLQESGGGLVQAGGSLRLSCAASGTIFGVRRMGWYRQAPGKERELVAGIAAGGSTNYADSVKGRFTISRDNAKNTVYLQMNSLKPEDTAVYYCAAWGVRTIYGRYYHAYWGQGTQVTVSS

SEQ ID NO: 19833 - protein, 124 aa, Artificial Sequence
  Chemically Synthesized
QVQLQESGGGLVQAGGSLRLSCAASGIFFTSLMGWYRQAPGKERELVAGINGGTTYYADSVKGRFTISRDNAKNTVYLQMNSLKPEDTAVYYCAVQRNWTQPDTSGTLTRLYYWGQGTQVTVSS

SEQ ID NO: 19834 - protein, 122 aa, Artificial Sequence
  Chemically Synthesized
QVQLQESGGGLVQAGGSLRLSCAASGYIFKRRSMGWYRQAPGKEREFVAGIDRGTSTYYADSVKGRFTISRDNAKNTVYLQMNSLKPEDTAVYYCAALRVTRYYGATYHDYWGQGTQVTVSS

SEQ ID NO: 19835 - protein, 127 aa, Artificial Sequence
  Chemically Synthesized
QVQLQESGGGLVQAGGSLRLSCAASGTISGDLYMGWYRQAPGKERELVATITVGSSTNYADSVKGRFTISRDNAKNTVYLQMNSLKPEDTAVYYCAAKRRYVPYTVYTFRRHYHSYWGQGTQVTVSS

SEQ ID NO: 19836 - protein, 126 aa, Artificial Sequence
  Chemically Synthesized
QVQLQESGGGLVQAGGSLRLSCAASGTIFVDEFMGWYRQAPGKEREFVASINDGGSTYYADSVKGRFTISRDNAKNTVYLQMNSLKPEDTAVYYCAVFEPSPDGDPFGDRAWFWYWGQGTQVTVSS

SEQ ID NO: 19837 - protein, 118 aa, Artificial Sequence
  Chemically Synthesized
QVQLQESGGGLVQAGGSLRLSCAASGTISATDFMGWYRQAPGKERELVAAINHGGSTYYADSVKGRFTISRDNAKNTVYLQMNSLKPEDTAVYYCAAARDDYPWHDYWGQGTQVTVSS

SEQ ID NO: 19838 - protein, 117 aa, Artificial Sequence
  Chemically Synthesized
QVQLQESGGGLVQAGGSLRLSCAASGTISDGDYMGWYRQAPGKEREFVASISAGGTTYYADSVKGRFTISRDNAKNTVYLQMNSLKPEDTAVYYCAAQSTTLTTIYWGQGTQVTVSS

SEQ ID NO: 19839 - protein, 110 aa, Artificial Sequence
  Chemically Synthesized
QVQLQESGGGLVQAGGSLRLSCAASGTISYGGEMGWYRQAPGKERELVATILVVVIPYADSVKGRFTISRDNAKNTVYLQMNSLKPEDTAVYYCAVITYWGQGTQVTVSS

SEQ ID NO: 19840 - protein, 118 aa, Artificial Sequence
  Chemically Synthesized
QVQLQESGGGLVQAGGSLRLSCAASGTIFRHRAMGWYRQAPGKEREFVATISAGGNTNYADSVKGRFTISRDNAKNTVYLQMNSLKPEDTAVYYCAVYDEADAPHYYWGQGTQVTVSS

SEQ ID NO: 19841 - protein, 117 aa, Artificial Sequence
  Chemically Synthesized
QVQLQESGGGLVQAGGSLRLSCAASGTIFLVFMGWYRQAPGKERELVAGINFGSSTYYADSVKGRFTISRDNAKNTVYLQMNSLKPEDTAVYYCAVPRYIAHILAYWGQGTQVTVSS

SEQ ID NO: 19842 - protein, 119 aa, Artificial Sequence
  Chemically Synthesized
QVQLQESGGGLVQAGGSLRLSCAASGTIFYIYDMGWYRQAPGKEREFVATIAFGTITYYADSVKGRFTISRDNAKNTVYLQMNSLKPEDTAVYYCAVYGDGDIYWFTYWGQGTQVTVSS

SEQ ID NO: 19843 - protein, 111 aa, Artificial Sequence
  Chemically Synthesized
QVQLQESGGGLVQAGGSLRLSCAASGYISLRGWMGWYRQAPGKEREFVAAITGGAITNYADSVKGRFTISRDNAKNTVYLQMNSLKPEDTAVYYCAALMYWGQGTQVTVSS

SEQ ID NO: 19844 - protein, 118 aa, Artificial Sequence
  Chemically Synthesized
QVQLQESGGGLVQAGGSLRLSCAASGYISYYTSMGWYRQAPGKEREFVAAIGVGGNTYYADSVKGRFTISRDNAKNTVYLQMNSLKPEDTAVYYCAVATRRYYPYSYWGQGTQVTVSS

SEQ ID NO: 19845 - protein, 121 aa, Artificial Sequence
  Chemically Synthesized
QVQLQESGGGLVQAGGSLRLSCAASGNIFLYPIMGWYRQAPGKEREFVAGIDYGTTTYYADSVKGRFTISRDNAKNTVYLQMNSLKPEDTAVYYCAASSTLLSTLRSTIYWGQGTQVTVSS

SEQ ID NO: 19846 - protein, 122 aa, Artificial Sequence
  Chemically Synthesized
QVQLQESGGGLVQAGGSLRLSCAASGSISDLDVMGWYRQAPGKEREFVASITAGSITYYADSVKGRFTISRDNAKNTVYLQMNSLKPEDTAVYYCAVLASVRYYDQSGFNYWGQGTQVTVSS

SEQ ID NO: 19847 - protein, 122 aa, Artificial Sequence
  Chemically Synthesized
QVQLQESGGGLVQAGGSLRLSCAASGNISGDYNMGWYRQAPGKERELVATIGTGSITYYADSVKGRFTISRDNAKNTVYLQMNSLKPEDTAVYYCAVETDVQYERIDYYDYWGQGTQVTVSS

SEQ ID NO: 19848 - protein, 121 aa, Artificial Sequence
  Chemically Synthesized
QVQLQESGGGLVQAGGSLRLSCAASGNISYDSMGWYRQAPGKERELVAGIAAGSNTNYADSVKGRFTISRDNAKNTVYLQMNSLKPEDTAVYYCAVVWVGQDYPDGRHYYWGQGTQVTVSS

SEQ ID NO: 19849 - protein, 118 aa, Artificial Sequence
  Chemically Synthesized
QVQLQESGGGLVQAGGSLRLSCAASGYIFDSYYMGWYRQAPGKEREFVATIDWGANTYYADSVKGRFTISRDNAKNTVYLQMNSLKPEDTAVYYCAVIISNRNWHNYWGQGTQVTVSS

SEQ ID NO: 19850 - protein, 118 aa, Artificial Sequence
  Chemically Synthesized
QVQLQESGGGLVQAGGSLRLSCAASGTISNDLAMGWYRQAPGKERELVAAIAYGGNTNYADSVKGRFTISRDNAKNTVYLQMNSLKPEDTAVYYCAVRAYDGDAHSYWGQGTQVTVSS

SEQ ID NO: 19851 - protein, 118 aa, Artificial Sequence
  Chemically Synthesized
QVQLQESGGGLVQAGGSLRLSCAASGTIFGSVQMGWYRQAPGKERELVATINSGANTNYADSVKGRFTISRDNAKNTVYLQMNSLKPEDTAVYYCAVGDWDLDDHSYWGQGTQVTVSS

SEQ ID NO: 19852 - protein, 118 aa, Artificial Sequence
  Chemically Synthesized
QVQLQESGGGLVQAGGSLRLSCAASGYIFYSPDMGWYRQAPGKERELVATIAYGGITNYADSVKGRFTISRDNAKNTVYLQMNSLKPEDTAVYYCAADVRGYISFGYWGQGTQVTVSS

SEQ ID NO: 19853 - protein, 122 aa, Artificial Sequence
  Chemically Synthesized
QVQLQESGGGLVQAGGSLRLSCAASGNISPYIGMGWYRQAPGKERELVAAIAYGGNTYYADSVKGRFTISRDNAKNTVYLQMNSLKPEDTAVYYCAAYDYEDIYVGRALRYWGQGTQVTVSS

SEQ ID NO: 19854 - protein, 126 aa, Artificial Sequence
  Chemically Synthesized
QVQLQESGGGLVQAGGSLRLSCAASGTISPVADMGWYRQAPGKEREFVASINNGSITNYADSVKGRFTISRDNAKNTVYLQMNSLKPEDTAVYYCAVVSYAHPRIYKGQYITYEYWGQGTQVTVSS

SEQ ID NO: 19855 - protein, 127 aa, Artificial Sequence
  Chemically Synthesized
QVQLQESGGGLVQAGGSLRLSCAASGNISAYASMGWYRQAPGKERELVATIGHGATTYYADSVKGRFTISRDNAKNTVYLQMNSLKPEDTAVYYCAAGYNNYKEVRGSPAWFYLAYWGQGTQVTVSS

SEQ ID NO: 19856 - protein, 117 aa, Artificial Sequence
  Chemically Synthesized
QVQLQESGGGLVQAGGSLRLSCAASGNISYVYYMGWYRQAPGKEREFVATITLGGSTNYADSVKGRFTISRDNAKNTVYLQMNSLKPEDTAVYYCAVWWSTDRFIYWGQGTQVTVSS

SEQ ID NO: 19857 - protein, 122 aa, Artificial Sequence
  Chemically Synthesized
QVQLQESGGGLVQAGGSLRLSCAASGYIFGAYGMGWYRQAPGKEREFVAGIASGAITYYADSVKGRFTISRDNAKNTVYLQMNSLKPEDTAVYYCAAYAQAWSLAYYWFGYWGQGTQVTVSS

SEQ ID NO: 19858 - protein, 126 aa, Artificial Sequence
  Chemically Synthesized
QVQLQESGGGLVQAGGSLRLSCAASGTISSAKYMGWYRQAPGKEREFVASIDAGANTNYADSVKGRFTISRDNAKNTVYLQMNSLKPEDTAVYYCAVRDLHYRSYYYRGSLGFRYWGQGTQVTVSS

SEQ ID NO: 19859 - protein, 108 aa, Artificial Sequence
  Chemically Synthesized
QVQLQESGGGLVQAGGSLRLSCAASGFGTLMGWYRQAPGKERELVAGINYGSSTYYADSVKGRFTISRDNAKNTVYLQMNSLKPEDTAVYYCAYFAYWGQGTQVTVSS

SEQ ID NO: 19860 - protein, 118 aa, Artificial Sequence
  Chemically Synthesized
QVQLQESGGGLVQAGGSLRLSCAASGNIFNGDWMGWYRQAPGKERELVATINWGASTNYADSVKGRFTISRDNAKNTVYLQMNSLKPEDTAVYYCAVFDDGYSGFGYWGQGTQVTVSS

SEQ ID NO: 19861 - protein, 121 aa, Artificial Sequence
  Chemically Synthesized
QVQLQESGGGLVQAGGSLRLSCAASGYIFPYLYMGWYRQAPGKERELVAGISTNYADSVKGRFTISRDNAKNTVYLQMNSLKPEDTAVYYCAVAQRGKPADQAIDISSIYWGQGTQVTVSS

SEQ ID NO: 19862 - protein, 119 aa, Artificial Sequence
  Chemically Synthesized
QVQLQESGGGLVQAGGSLRLSCAASGTISGPGDMGWYRQAPGKEREFVAAIGRGGNTNYADSVKGRFTISRDNAKNTVYLQMNSLKPEDTAVYYCAAYYGYDAVSHTYWGQGTQVTVSS

SEQ ID NO: 19863 - protein, 126 aa, Artificial Sequence
  Chemically Synthesized
QVQLQESGGGLVQAGGSLRLSCAASGNISTTSVMGWYRQAPGKERELVAGIGFGGTTYYADSVKGRFTISRDNAKNTVYLQMNSLKPEDTAVYYCAADYLGAQYGYDFDRPDYYYWGQGTQVTVSS

SEQ ID NO: 19864 - protein, 118 aa, Artificial Sequence
  Chemically Synthesized
QVQLQESGGGLVQAGGSLRLSCAASGSIFGYYLMGWYRQAPGKEREFVAGIGQGGITNYADSVKGRFTISRDNAKNTVYLQMNSLKPEDTAVYYCAVDNSDDNKHYYWGQGTQVTVSS

SEQ ID NO: 19865 - protein, 121 aa, Artificial Sequence
  Chemically Synthesized
QVQLQESGGGLVQAGGSLRLSCAASGTIFGDNAMGWYRQAPGKERELVAAIDLGGITNYADSVKGRFTISRDNAKNTVYLQMNSLKPEDTAVYYCAATVQGGYVDSTCLYWGQGTQVTVSS

SEQ ID NO: 19866 - protein, 126 aa, Artificial Sequence
  Chemically Synthesized
QVQLQESGGGLVQAGGSLRLSCAASGSISRQDPMGWYRQAPGKERELVAAIDWGASTNYADSVKGRFTISRDNAKNTVYLQMNSLKPEDTAVYYCAVWINLLGYSSYPAPRYYGYWGQGTQVTVSS

SEQ ID NO: 19867 - protein, 118 aa, Artificial Sequence
  Chemically Synthesized
QVQLQESGGGLVQAGGSLRLSCAASGTISIAYYMGWYRQAPGKERELVAGIGYGGSTNYADSVKGRFTISRDNAKNTVYLQMNSLKPEDTAVYYCAALKNYRRSYYYWGQGTQVTVSS

SEQ ID NO: 19868 - protein, 118 aa, Artificial Sequence
  Chemically Synthesized
QVQLQESGGGLVQAGGSLRLSCAASGNISDAGIMGWYRQAPGKEREFVATISTGGTTYYADSVKGRFTISRDNAKNTVYLQMNSLKPEDTAVYYCAVGGDTNADYDYWGQGTQVTVSS

SEQ ID NO: 19869 - protein, 126 aa, Artificial Sequence
  Chemically Synthesized
QVQLQESGGGLVQAGGSLRLSCAASGYIFYFYDMGWYRQAPGKEREFVAGIDVGSNTNYADSVKGRFTISRDNAKNTVYLQMNSLKPEDTAVYYCAVWLTTLEVTGDYWQYVYLYWGQGTQVTVSS

SEQ ID NO: 19870 - protein, 122 aa, Artificial Sequence
  Chemically Synthesized
QVQLQESGGGLVQAGGSLRLSCAASGSISYYTDMGWYRQAPGKEREFVATINYGTNTYYADSVKGRFTISRDNAKNTVYLQMNSLKPEDTAVYYCAAYYQWDQEGVRYYAYWGQGTQVTVSS

SEQ ID NO: 19871 - protein, 118 aa, Artificial Sequence
  Chemically Synthesized
QVQLQESGGGLVQAGGSLRLSCAASGNIFEDSLMGWYRQAPGKEREFVAAISYGANTYYADSVKGRFTISRDNAKNTVYLQMNSLKPEDTAVYYCAVYPRTYGPLYYWGQGTQVTVSS

SEQ ID NO: 19872 - protein, 117 aa, Artificial Sequence
  Chemically Synthesized
QVQLQESGGGLVQAGGSLRLSCAASGTIFDATRMGWYRQAPGKEREFVAAITGGTSTNYADSVKGRFTISRDNAKNTVYLQMNSLKPEDTAVYYCAAVHRSTLLIYWGQGTQVTVSS

SEQ ID NO: 19873 - protein, 122 aa, Artificial Sequence
  Chemically Synthesized
QVQLQESGGGLVQAGGSLRLSCAASGTISLNYGMGWYRQAPGKERELVAGIGSGTTTYYADSVKGRFTISRDNAKNTVYLQMNSLKPEDTAVYYCAVDRYYVDQDEDSHSYWGQGTQVTVSS

SEQ ID NO: 19874 - protein, 111 aa, Artificial Sequence
  Chemically Synthesized
QVQLQESGGGLVQAGGSLRLSCAASGYISIAYMGWYRQAPGKEREFVAAIAYGTTTNYADSVKGRFTISRDNAKNTVYLQMNSLKPEDTAVYYCAVRSSYWGQGTQVTVSS

SEQ ID NO: 19875 - protein, 118 aa, Artificial Sequence
  Chemically Synthesized
QVQLQESGGGLVQAGGSLRLSCAASGTISGSLDMGWYRQAPGKERELVATIAYGGSTNYADSVKGRFTISRDNAKNTVYLQMNSLKPEDTAVYYCAATHGRTYALPYWGQGTQVTVSS

SEQ ID NO: 19876 - protein, 126 aa, Artificial Sequence
  Chemically Synthesized
QVQLQESGGGLVQAGGSLRLSCAASGTISAAWDMGWYRQAPGKERELVAGIDVGTTTNYADSVKGRFTISRDNAKNTVYLQMNSLKPEDTAVYYCAVRHWHHYVERYTDDADYYYWGQGTQVTVSS

SEQ ID NO: 19877 - protein, 122 aa, Artificial Sequence
  Chemically Synthesized
QVQLQESGGGLVQAGGSLRLSCAASGYIFHALYMGWYRQAPGKERELVAGIDGGTTTNYADSVKGRFTISRDNAKNTVYLQMNSLKPEDTAVYYCAVQDRSFPDSLSTHYYWGQGTQVTVSS

SEQ ID NO: 19878 - protein, 122 aa, Artificial Sequence
  Chemically Synthesized
QVQLQESGGGLVQAGGSLRLSCAASGNIFRDPAMGWYRQAPGKERELVAAIGYGGITNYADSVKGRFTISRDNAKNTVYLQMNSLKPEDTAVYYCAADYWSDLWRPFYFDYWGQGTQVTVSS

SEQ ID NO: 19879 - protein, 118 aa, Artificial Sequence
  Chemically Synthesized
QVQLQESGGGLVQAGGSLRLSCAASGYISAGRYMGWYRQAPGKEREFVAGITGGSTTNYADSVKGRFTISRDNAKNTVYLQMNSLKPEDTAVYYCAAGDGVDVGLGYWGQGTQVTVSS

SEQ ID NO: 19880 - protein, 118 aa, Artificial Sequence
  Chemically Synthesized
QVQLQESGGGLVQAGGSLRLSCAASGSIFSTWTMGWYRQAPGKEREFVASIGYGGSTNYADSVKGRFTISRDNAKNTVYLQMNSLKPEDTAVYYCAVYDSYWYDHPYWGQGTQVTVSS

SEQ ID NO: 19881 - protein, 126 aa, Artificial Sequence
  Chemically Synthesized
QVQLQESGGGLVQAGGSLRLSCAASGYISDAVGMGWYRQAPGKEREFVATITTGSNTYYADSVKGRFTISRDNAKNTVYLQMNSLKPEDTAVYYCAVRTFYNDSAPAYLKWSYDYWGQGTQVTVSS

SEQ ID NO: 19882 - protein, 121 aa, Artificial Sequence
  Chemically Synthesized
QVQLQESGGGLVQAGGSLRLSCAASGYISSDRMGWYRQAPGKERELVATINLGGNTYYADSVKGRFTISRDNAKNTVYLQMNSLKPEDTAVYYCAAYYRSAEYKLGGLPYWGQGTQVTVSS

SEQ ID NO: 19883 - protein, 122 aa, Artificial Sequence
  Chemically Synthesized
QVQLQESGGGLVQAGGSLRLSCAASGSIFGASYMGWYRQAPGKEREFVAAIGIGAITYYADSVKGRFTISRDNAKNTVYLQMNSLKPEDTAVYYCAVRYLFGWKSLDYLGYWGQGTQVTVSS

SEQ ID NO: 19884 - protein, 112 aa, Artificial Sequence
  Chemically Synthesized
QVQLQESGGGLVQAGGSLRLSCAASGYISWTVPMGWYRQAPGKEREFVAGIGDGTTTNYADSVKGRFTISRDNAKNTVYLQMNSLKPEDTAVYYCAVDHGYWGQGTQVTVSS

SEQ ID NO: 19885 - protein, 118 aa, Artificial Sequence
  Chemically Synthesized
QVQLQESGGGLVQAGGSLRLSCAASGTISAPDGMGWYRQAPGKERELVATISVGATTNYADSVKGRFTISRDNAKNTVYLQMNSLKPEDTAVYYCAVPRSAYYVLRYWGQGTQVTVSS

SEQ ID NO: 19886 - protein, 126 aa, Artificial Sequence
  Chemically Synthesized
QVQLQESGGGLVQAGGSLRLSCAASGYISYRDYMGWYRQAPGKEREFVAAIDGGGITNYADSVKGRFTISRDNAKNTVYLQMNSLKPEDTAVYYCAATAWSYYAYYPRTYVSHQYWGQGTQVTVSS

SEQ ID NO: 19887 - protein, 121 aa, Artificial Sequence
  Chemically Synthesized
QVQLQESGGGLVQAGGSLRLSCAASGSISNAQNMGWYRQAPGKEREFVAAIGGGANTNYADSVKGRFTISRDNAKNTVYLQMNSLKPEDTAVYYCAVVGDLEYSSLTFMYWGQGTQVTVSS

SEQ ID NO: 19888 - protein, 118 aa, Artificial Sequence
  Chemically Synthesized
QVQLQESGGGLVQAGGSLRLSCAASGSISYRLRMGWYRQAPGKERELVATITSGTNTYYADSVKGRFTISRDNAKNTVYLQMNSLKPEDTAVYYCAVYAQYNPDHLYWGQGTQVTVSS

SEQ ID NO: 19889 - protein, 118 aa, Artificial Sequence
  Chemically Synthesized
QVQLQESGGGLVQAGGSLRLSCAASGSISPDSTMGWYRQAPGKERELVATITYGSSTNYADSVKGRFTISRDNAKNTVYLQMNSLKPEDTAVYYCAVGDTDSITYDYWGQGTQVTVSS

SEQ ID NO: 19890 - protein, 123 aa, Artificial Sequence
  Chemically Synthesized
QVQLQESGGGLVQAGGSLRLSCAASGTIFTYWFMGWYRQAPGKEREFVAITVVLPYADSVKGRFTISRDNAKNTVYLQMNSLKPEDTAVYYCAADFPTGWPTKIYISNFYRYWGQGTQVTVSS

SEQ ID NO: 19891 - protein, 122 aa, Artificial Sequence
  Chemically Synthesized
QVQLQESGGGLVQAGGSLRLSCAASGSISLRAYMGWYRQAPGKEREFVAAIGPGGTTNYADSVKGRFTISRDNAKNTVYLQMNSLKPEDTAVYYCAVQVWGRAVPPDYHQYWGQGTQVTVSS

SEQ ID NO: 19892 - protein, 126 aa, Artificial Sequence
  Chemically Synthesized
QVQLQESGGGLVQAGGSLRLSCAASGSISPRDYMGWYRQAPGKEREFVAAIGDGTNTNYADSVKGRFTISRDNAKNTVYLQMNSLKPEDTAVYYCAVAVQQSGASVRFLPVLHYYWGQGTQVTVSS

SEQ ID NO: 19893 - protein, 125 aa, Artificial Sequence
  Chemically Synthesized
QVQLQESGGGLVQAGGSLRLSCAASGYISLSDVMGWYRQAPGKERELVATITLGTSTNYADSVKGRFTISRDNAKNTVYLQMNSLKPEDTAVYYCAAYYAIFRGYRDLGSTTLYWGQGTQVTVSS

SEQ ID NO: 19894 - protein, 118 aa, Artificial Sequence
  Chemically Synthesized
QVQLQESGGGLVQAGGSLRLSCAASGTIDMGWYRQAPGKEREFVAAIATGATTYYADSVKGRFTISRDNAKNTVYLQMNSLKPEDTAVYYCAVDQDTDYAATSQFGYWGQGTQVTVSS

SEQ ID NO: 19895 - protein, 122 aa, Artificial Sequence
  Chemically Synthesized
QVQLQESGGGLVQAGGSLRLSCAASGNIFDGYNMGWYRQAPGKERELVAGIDYGATTYYADSVKGRFTISRDNAKNTVYLQMNSLKPEDTAVYYCAAGGYDDYHYQDYHFYWGQGTQVTVSS

SEQ ID NO: 19896 - protein, 121 aa, Artificial Sequence
  Chemically Synthesized
QVQLQESGGGLVQAGGSLRLSCAASGSISDTQYMGWYRQAPGKERELLPLLITVVIPYADSVKGRFTISRDNAKNTVYLQMNSLKPEDTAVYYCAALDYITYTDDSYLGYWGQGTQVTVSS

SEQ ID NO: 19897 - protein, 126 aa, Artificial Sequence
  Chemically Synthesized
QVQLQESGGGLVQAGGSLRLSCAASGSISDYDNMGWYRQAPGKEREFVAAIGYGGSTNYADSVKGRFTISRDNAKNTVYLQMNSLKPEDTAVYYCAVQGYDHSSPDYGDVVYHFYWGQGTQVTVSS

SEQ ID NO: 19898 - protein, 118 aa, Artificial Sequence
  Chemically Synthesized
QVQLQESGGGLVQAGGSLRLSCAASGSIFPRTYMGWYRQAPGKERELVAGISHGTITYYADSVKGRFTISRDNAKNTVYLQMNSLKPEDTAVYYCAANLPNDTQLSYWGQGTQVTVSS

SEQ ID NO: 19899 - protein, 122 aa, Artificial Sequence
  Chemically Synthesized
QVQLQESGGGLVQAGGSLRLSCAASGTISRSLTMGWYRQAPGKEREFVATIGIGGITYYADSVKGRFTISRDNAKNTVYLQMNSLKPEDTAVYYCAARVDTDHYHVYVHSYWGQGTQVTVSS

SEQ ID NO: 19900 - protein, 117 aa, Artificial Sequence
  Chemically Synthesized
QVQLQESGGGLVQAGGSLRLSCAASGYISYVHDMGWYRQAPGKEREFVAGIMLVLIPYADSVKGRFTISRDNAKNTVYLQMNSLKPEDTAVYYCAADEYADGRFEYWGQGTQVTVSS

SEQ ID NO: 19901 - protein, 126 aa, Artificial Sequence
  Chemically Synthesized
QVQLQESGGGLVQAGGSLRLSCAASGYISDYGDMGWYRQAPGKERELVAGIGGGAITYYADSVKGRFTISRDNAKNTVYLQMNSLKPEDTAVYYCAVQGYVVDPFGLDILYVYAYWGQGTQVTVSS

SEQ ID NO: 19902 - protein, 125 aa, Artificial Sequence
  Chemically Synthesized
QVQLQESGGGLVQAGGSLRLSCAASGTIFQLRGMGWYRQAPGKEREFVAAITSGASTNYADSVKGRFTISRDNAKNTVYLQMNSLKPEDTAVYYCAALEYLAVGEYPYLRIAHYWGQGTQVTVSS

SEQ ID NO: 19903 - protein, 118 aa, Artificial Sequence
  Chemically Synthesized
QVQLQESGGGLVQAGGSLRLSCAASGNIFRRDGMGWYRQAPGKEREFVATIDYGASTNYADSVKGRFTISRDNAKNTVYLQMNSLKPEDTAVYYCAAGRPDPSYHPYWGQGTQVTVSS

SEQ ID NO: 19904 - protein, 118 aa, Artificial Sequence
  Chemically Synthesized
QVQLQESGGGLVQAGGSLRLSCAASGTISPTYHMGWYRQAPGKEREFVATITQGSTTNYADSVKGRFTISRDNAKNTVYLQMNSLKPEDTAVYYCAVLYYYDNLLAYWGQGTQVTVSS

SEQ ID NO: 19905 - protein, 118 aa, Artificial Sequence
  Chemically Synthesized
QVQLQESGGGLVQAGGSLRLSCAASGTISTDVYMGWYRQAPGKEREFVAGISSGGSTYYADSVKGRFTISRDNAKNTVYLQMNSLKPEDTAVYYCAAVARTVPYHDYWGQGTQVTVSS

SEQ ID NO: 19906 - protein, 123 aa, Artificial Sequence
  Chemically Synthesized
QVQLQESGGGLVQAGGSLRLSCAASGNISYLRYMGWYRQAPGKEREFVAAINTGGITNYADSVKGRFTISRDNAKNTVYLQMNSLKPEDTAVYYCAAYTLYENNWHTGGHHYWGQGTQVTVSS

SEQ ID NO: 19907 - protein, 127 aa, Artificial Sequence
  Chemically Synthesized
QVQLQESGGGLVQAGGSLRLSCAASGSIFDAPLMGWYRQAPGKERELVASITYGGNTNYADSVKGRFTISRDNAKNTVYLQMNSLKPEDTAVYYCAAGGYYLRFDGTGYRPYYLHYWGQGTQVTVSS

SEQ ID NO: 19908 - protein, 122 aa, Artificial Sequence
  Chemically Synthesized
QVQLQESGGGLVQAGGSLRLSCAASGYIFYDGVMGWYRQAPGKEREFVAGITGGGNTYYADSVKGRFTISRDNAKNTVYLQMNSLKPEDTAVYYCAVDGTKYYFRYGSHRYWGQGTQVTVSS

SEQ ID NO: 19909 - protein, 118 aa, Artificial Sequence
  Chemically Synthesized
QVQLQESGGGLVQAGGSLRLSCAASGNISPGVDMGWYRQAPGKEREFVATIGFGGNTYYADSVKGRFTISRDNAKNTVYLQMNSLKPEDTAVYYCAVVYRLYSQFPYWGQGTQVTVSS

SEQ ID NO: 19910 - protein, 118 aa, Artificial Sequence
  Chemically Synthesized
QVQLQESGGGLVQAGGSLRLSCAASGTISVDDPMGWYRQAPGKEREFVAAIAAGANTYYADSVKGRFTISRDNAKNTVYLQMNSLKPEDTAVYYCAVNDDSDTEHDYWGQGTQVTVSS

SEQ ID NO: 19911 - protein, 122 aa, Artificial Sequence
  Chemically Synthesized
QVQLQESGGGLVQAGGSLRLSCAASGNISGQPEMGWYRQAPGKERELVAAIDRGASTNYADSVKGRFTISRDNAKNTVYLQMNSLKPEDTAVYYCAVGVWDFYDVPSYYHYWGQGTQVTVSS

SEQ ID NO: 19912 - protein, 119 aa, Artificial Sequence
  Chemically Synthesized
QVQLQESGGGLVQAGGSLRLSCAASGYIFAWYDVMGWYRQAPGKERELVATINDGGSTNYADSVKGRFTISRDNAKNTVYLQMNSLKPEDTAVYYCAVIESVDDLYYYWGQGTQVTVSS

SEQ ID NO: 19913 - protein, 122 aa, Artificial Sequence
  Chemically Synthesized
QVQLQESGGGLVQAGGSLRLSCAASGSIFYDGRMGWYRQAPGKEREFVATIADGTITNYADSVKGRFTISRDNAKNTVYLQMNSLKPEDTAVYYCAVDRRGYAPDDFQHPYWGQGTQVTVSS

SEQ ID NO: 19914 - protein, 126 aa, Artificial Sequence
  Chemically Synthesized
QVQLQESGGGLVQAGGSLRLSCAASGNISYDDNMGWYRQAPGKERELVASISYGGSTNYADSVKGRFTISRDNAKNTVYLQMNSLKPEDTAVYYCAVQYYRWYGTRQTDVIPHAYWGQGTQVTVSS

SEQ ID NO: 19915 - protein, 125 aa, Artificial Sequence
  Chemically Synthesized
QVQLQESGGGLVQAGGSLRLSCAASGNISPYGQMGWYRQAPGKEREFVAAISYGTTTNYADSVKGRFTISRDNAKNTVYLQMNSLKPEDTAVYYCAALWYDWPVDIYITRRHYYWGQGTQVTVSS

SEQ ID NO: 19916 - protein, 118 aa, Artificial Sequence
  Chemically Synthesized
QVQLQESGGGLVQAGGSLRLSCAASGSISALRDMGWYRQAPGKERELVAGITRGTITYYADSVKGRFTISRDNAKNTVYLQMNSLKPEDTAVYYCAAYDDDYLQHTYWGQGTQVTVSS

SEQ ID NO: 19917 - protein, 122 aa, Artificial Sequence
  Chemically Synthesized
QVQLQESGGGLVQAGGSLRLSCAASGNISWLQYMGWYRQAPGKERELVASINAGSITNYADSVKGRFTISRDNAKNTVYLQMNSLKPEDTAVYYCAATYWDPELPYNDFTYWGQGTQVTVSS

SEQ ID NO: 19918 - protein, 122 aa, Artificial Sequence
  Chemically Synthesized
QVQLQESGGGLVQAGGSLRLSCAASGNISSRYYMGWYRQAPGKERELVASIAQGANTNYADSVKGRFTISRDNAKNTVYLQMNSLKPEDTAVYYCAVQVGYRVFQGDPYQYWGQGTQVTVSS

SEQ ID NO: 19919 - protein, 126 aa, Artificial Sequence
  Chemically Synthesized
QVQLQESGGGLVQAGGSLRLSCAASGSISGHYYMGWYRQAPGKERELVASISWGGITNYADSVKGRFTISRDNAKNTVYLQMNSLKPEDTAVYYCAAQGYYSTYPPGTADYYHSYWGQGTQVTVSS

SEQ ID NO: 19920 - protein, 117 aa, Artificial Sequence
  Chemically Synthesized
QVQLQESGGGLVQAGGSLRLSCAASGTIFNPGYMGWYRQAPGKEREFVASISDGSSTNYADSVKGRFTISRDNAKNTVYLQMNSLKPEDTAVYYCAASTGTTTLFYWGQGTQVTVSS

SEQ ID NO: 19921 - protein, 114 aa, Artificial Sequence
  Chemically Synthesized
QVQLQESGGGLVQAGGSLRLSCAASGSIFHRYIMGWYRQAPGKEREFVASIDRGSSTNYADSVKGRFTISRDNAKNTVYLQMNSLKPEDTAVYYCAAWADYDYWGQGTQVTVSS

SEQ ID NO: 19922 - protein, 121 aa, Artificial Sequence
  Chemically Synthesized
QVQLQESGGGLVQAGGSLRLSCAASGSISAGGPMGWYRQAPGKEREFVAGIGSVLVPYADSVKGRFTISRDNAKNTVYLQMNSLKPEDTAVYYCAAYVGYSDSTGNYYRYWGQGTQVTVSS

SEQ ID NO: 19923 - protein, 121 aa, Artificial Sequence
  Chemically Synthesized
QVQLQESGGGLVQAGGSLRLSCAASGNILSVFMGWYRQAPGKERELVAGISLGGITYYADSVKGRFTISRDNAKNTVYLQMNSLKPEDTAVYYCAVDTQLARQGYDQHTYWGQGTQVTVSS

SEQ ID NO: 19924 - protein, 118 aa, Artificial Sequence
  Chemically Synthesized
QVQLQESGGGLVQAGGSLRLSCAASGTIFALSAMGWYRQAPGKEREFVAAITPGAITNYADSVKGRFTISRDNAKNTVYLQMNSLKPEDTAVYYCAAYDFRDRPHEYWGQGTQVTVSS

SEQ ID NO: 19925 - protein, 116 aa, Artificial Sequence
  Chemically Synthesized
QVQLQESGGGLVQAGGSLRLSCAASGYISVSFYMGWYRQAPGKERELVAGISGGGNTNYADSVKGRFTISRDNAKNTVYLQMNSLKPEDTAVYYCAADYPYYFLYWGQGTQVTVSS

SEQ ID NO: 19926 - protein, 108 aa, Artificial Sequence
  Chemically Synthesized
QVQLQESGGGLVQAGGSLRLSCAASGTIFATTDMGWYRQAPGKERELYLYADSVKGRFTISRDNAKNTVYLQMNSLKPEDTAVYYCAVVVTTTTFFYWGQGTQVTVSS

SEQ ID NO: 19927 - protein, 114 aa, Artificial Sequence
  Chemically Synthesized
QVQLQESGGGLVQAGGSLRLSCAASGYISDYDRMGWYRQAPGKEREFVAAINLGATTYYADSVKGRFTISRDNAKNTVYLQMNSLKPEDTAVYYCAAEYSYLYWGQGTQVTVSS

SEQ ID NO: 19928 - protein, 122 aa, Artificial Sequence
  Chemically Synthesized
QVQLQESGGGLVQAGGSLRLSCAASGTIFWGLFMGWYRQAPGKERELVASIAYGATTNYADSVKGRFTISRDNAKNTVYLQMNSLKPEDTAVYYCAAPPRIVYVDLAPHAYWGQGTQVTVSS

SEQ ID NO: 19929 - protein, 117 aa, Artificial Sequence
  Chemically Synthesized
QVQLQESGGGLVQAGGSLRLSCAASGTISSSYNMGWYRQAPGKEREFVASIALVLLPYADSVKGRFTISRDNAKNTVYLQMNSLKPEDTAVYYCAAAGYYGREYPYWGQGTQVTVSS

SEQ ID NO: 19930 - protein, 118 aa, Artificial Sequence
  Chemically Synthesized
QVQLQESGGGLVQAGGSLRLSCAASGTIFRAYTMGWYRQAPGKERELVATIADGANTYYADSVKGRFTISRDNAKNTVYLQMNSLKPEDTAVYYCAVRYVYRYFHSYWGQGTQVTVSS

SEQ ID NO: 19931 - protein, 118 aa, Artificial Sequence
  Chemically Synthesized
QVQLQESGGGLVQAGGSLRLSCAASGSISQQRAMGWYRQAPGKEREFVATINDGAITYYADSVKGRFTISRDNAKNTVYLQMNSLKPEDTAVYYCAVPYTGPYDLLYWGQGTQVTVSS

SEQ ID NO: 19932 - protein, 118 aa, Artificial Sequence
  Chemically Synthesized
QVQLQESGGGLVQAGGSLRLSCAASGSISYPDSMGWYRQAPGKERELVATIDWGATTYYADSVKGRFTISRDNAKNTVYLQMNSLKPEDTAVYYCAVADVVYGYHSYWGQGTQVTVSS

SEQ ID NO: 19933 - protein, 118 aa, Artificial Sequence
  Chemically Synthesized
QVQLQESGGGLVQAGGSLRLSCAASGTISRDYGMGWYRQAPGKERELVATIGYGGNTYYADSVKGRFTISRDNAKNTVYLQMNSLKPEDTAVYYCAAYYGGNTPYAYWGQGTQVTVSS

SEQ ID NO: 19934 - protein, 118 aa, Artificial Sequence
  Chemically Synthesized
QVQLQESGGGLVQAGGSLRLSCAASGNISAGNYMGWYRQAPGKERELVASIAYGATTYYADSVKGRFTISRDNAKNTVYLQMNSLKPEDTAVYYCAAYRYLDDQFSYWGQGTQVTVSS

SEQ ID NO: 19935 - protein, 110 aa, Artificial Sequence
  Chemically Synthesized
QVQLQESGGGLVQAGGSLRLSCAASGSISSLYWMGWYRQAPGKERELVAGINLGSITYYADSVKGRFTISRDNAKNTVYLQMNSLKPEDTAVYYCAAIYWGQGTQVTVSS

SEQ ID NO: 19936 - protein, 122 aa, Artificial Sequence
  Chemically Synthesized
QVQLQESGGGLVQAGGSLRLSCAASGSIFRFDSMGWYRQAPGKEREFVASINDGANTYYADSVKGRFTISRDNAKNTVYLQMNSLKPEDTAVYYCAADSPRTTPTVTTYEYWGQGTQVTVSS

SEQ ID NO: 19937 - protein, 126 aa, Artificial Sequence
  Chemically Synthesized
QVQLQESGGGLVQAGGSLRLSCAASGSIFDYRPMGWYRQAPGKERELVATIAGGTTTNYADSVKGRFTISRDNAKNTVYLQMNSLKPEDTAVYYCAAYADYYVRDYYAWTVYHGYWGQGTQVTVSS

SEQ ID NO: 19938 - protein, 117 aa, Artificial Sequence
  Chemically Synthesized
QVQLQESGGGLVQAGGSLRLSCAASGSISHRHYMGWYRQAPGKEREFVASINAGTTTYYADSVKGRFTISRDNAKNTVYLQMNSLKPEDTAVYYCAVPGNSTTVIYWGQGTQVTVSS

SEQ ID NO: 19939 - protein, 125 aa, Artificial Sequence
  Chemically Synthesized
QVQLQESGGGLVQAGGSLRLSCAASGYISGRTYMGWYRQAPGKEREFVAAISEGTSTNYADSVKGRFTISRDNAKNTVYLQMNSLKPEDTAVYYCAVRGYATTLTKVRLVLVMYWGQGTQVTVSS

SEQ ID NO: 19940 - protein, 118 aa, Artificial Sequence
  Chemically Synthesized
QVQLQESGGGLVQAGGSLRLSCAASGSIFWYPAMGWYRQAPGKEREFVAAISWGATTNYADSVKGRFTISRDNAKNTVYLQMNSLKPEDTAVYYCAVWTSRTRWYSYWGQGTQVTVSS

SEQ ID NO: 19941 - protein, 121 aa, Artificial Sequence
  Chemically Synthesized
QVQLQESGGGLVQAGGSLRLSCAASGYIFDTSMGWYRQAPGKERELVASITNGATTYYADSVKGRFTISRDNAKNTVYLQMNSLKPEDTAVYYCAVDVYSYLYEPTDHGYWGQGTQVTVSS

SEQ ID NO: 19942 - protein, 112 aa, Artificial Sequence
  Chemically Synthesized
QVQLQESGGGLVQAGGSLRLSCAASGNMGWYRQAPGKERELVAAISHGSTTNYADSVKGRFTISRDNAKNTVYLQMNSLKPEDTAVYYCAADDADGTGHRYWGQGTQVTVSS

SEQ ID NO: 19943 - protein, 120 aa, Artificial Sequence
  Chemically Synthesized
QVQLQESGGGLVQAGGSLRLSCAASGYISEHFRMGWYRQAPGKEREFVASIRWYYLYADSVKGRFTISRDNAKNTVYLQMNSLKPEDTAVYYCAATERYDYWYTGPYYYWGQGTQVTVSS

SEQ ID NO: 19944 - protein, 118 aa, Artificial Sequence
  Chemically Synthesized
QVQLQESGGGLVQAGGSLRLSCAASGTISAVRVMGWYRQAPGKEREFVASIARGATTNYADSVKGRFTISRDNAKNTVYLQMNSLKPEDTAVYYCAALSYSDWYFGYWGQGTQVTVSS

SEQ ID NO: 19945 - protein, 122 aa, Artificial Sequence
  Chemically Synthesized
QVQLQESGGGLVQAGGSLRLSCAASGTISHTADMGWYRQAPGKEREFVATINFGGSTNYADSVKGRFTISRDNAKNTVYLQMNSLKPEDTAVYYCAVYPIRWWRYPERYVYWGQGTQVTVSS

SEQ ID NO: 19946 - protein, 110 aa, Artificial Sequence
  Chemically Synthesized
QVQLQESGGGLVQAGGSLRLSCAASGTIFALQTMGWYRQAPGKEREFVASIGYGAITYYADSVKGRFTISRDNAKNTVYLQMNSLKPEDTAVYYCAAMYWGQGTQVTVSS

SEQ ID NO: 19947 - protein, 116 aa, Artificial Sequence
  Chemically Synthesized
QVQLQESGGGLVQAGGSLRLSCAASGSISIATAMGWYRQAPGKEREFVATIANGATTNYADSVKGRFTISRDNAKNTVYLQMNSLKPEDTAVYYCADYRLPIFWYWGQGTQVTVSS

SEQ ID NO: 19948 - protein, 118 aa, Artificial Sequence
  Chemically Synthesized
QVQLQESGGGLVQAGGSLRLSCAASGTIFGFVYMGWYRQAPGKERELVAAIATGGSTYYADSVKGRFTISRDNAKNTVYLQMNSLKPEDTAVYYCAATPNVPFQHPYWGQGTQVTVSS

SEQ ID NO: 19949 - protein, 116 aa, Artificial Sequence
  Chemically Synthesized
QVQLQESGGGLVQAGGSLRLSCAASGNISVTVMGWYRQAPGKERELVAAINYGASTYYADSVKGRFTISRDNAKNTVYLQMNSLKPEDTAVYYCAAGGQYSVVIYWGQGTQVTVSS

SEQ ID NO: 19950 - protein, 126 aa, Artificial Sequence
  Chemically Synthesized
QVQLQESGGGLVQAGGSLRLSCAASGNIFDWQNMGWYRQAPGKEREFVASINPGASTYYADSVKGRFTISRDNAKNTVYLQMNSLKPEDTAVYYCAVGDVNYDYWWQYRDKIHWYWGQGTQVTVSS

SEQ ID NO: 19951 - protein, 117 aa, Artificial Sequence
  Chemically Synthesized
QVQLQESGGGLVQAGGSLRLSCAASGTILVLNMGWYRQAPGKERELVAGITLGGSTNYADSVKGRFTISRDNAKNTVYLQMNSLKPEDTAVYYCAVYFGIAEWHDYWGQGTQVTVSS

SEQ ID NO: 19952 - protein, 118 aa, Artificial Sequence
  Chemically Synthesized
QVQLQESGGGLVQAGGSLRLSCAASGYIFLGSAMGWYRQAPGKEREFVATINYGGSTYYADSVKGRFTISRDNAKNTVYLQMNSLKPEDTAVYYCAVRRAKYLGHRYWGQGTQVTVSS

SEQ ID NO: 19953 - protein, 112 aa, Artificial Sequence
  Chemically Synthesized
QVQLQESGGGLVQAGGSLRLSCAASGYISDQSTMGWYRQAPGKERELVAGIGDGTTTYYADSVKGRFTISRDNAKNTVYLQMNSLKPEDTAVYYCAARTLYWGQGTQVTVSS

SEQ ID NO: 19954 - protein, 119 aa, Artificial Sequence
  Chemically Synthesized
QVQLQESGGGLVQAGGSLRLSCAASGTISKYGWMGWYRQAPGKERELVASWYYYLYADSVKGRFTISRDNAKNTVYLQMNSLKPEDTAVYYCASGKTTGTRDYLNHRYWGQGTQVTVSS

SEQ ID NO: 19955 - protein, 124 aa, Artificial Sequence
  Chemically Synthesized
QVQLQESGGGLVQAGGSLRLSCAASGSISAYRYMGWYRQAPGKEREFVAGIGGVLLPYADSVKGRFTISRDNAKNTVYLQMNSLKPEDTAVYYCAATAADIGTGYSLVLSSLYWGQGTQVTVSS

SEQ ID NO: 19956 - protein, 116 aa, Artificial Sequence
  Chemically Synthesized
QVQLQESGGGLVQAGGSLRLSCAASGYIFRYVYMGWYRQAPGKERELVATIAQGSNTYYADSVKGRFTISRDNAKNTVYLQMNSLKPEDTAVYYCAVVSLRVVIYWGQGTQVTVSS

SEQ ID NO: 19957 - protein, 108 aa, Artificial Sequence
  Chemically Synthesized
QVQLQESGGGLVQAGGSLRLSCAASGTIFDRVAMGWYRQAPGKERELPYADSVKGRFTISRDNAKNTVYLQMNSLKPEDTAVYYCAASTYGAGSYVYWGQGTQVTVSS

SEQ ID NO: 19958 - protein, 121 aa, Artificial Sequence
  Chemically Synthesized
QVQLQESGGGLVQAGGSLRLSCAASGTISPTHYMGWYRQAPGKERELVATIADGGTTNYADSVKGRFTISRDNAKNTVYLQMNSLKPEDTAVYYCAALRSFAYPSLDFAYWGQGTQVTVSS

SEQ ID NO: 19959 - protein, 126 aa, Artificial Sequence
  Chemically Synthesized
QVQLQESGGGLVQAGGSLRLSCAASGNISWSGDMGWYRQAPGKEREFVAGIADGGITYYADSVKGRFTISRDNAKNTVYLQMNSLKPEDTAVYYCAVGLDRPRQNDDIAGYDLDYWGQGTQVTVSS

SEQ ID NO: 19960 - protein, 118 aa, Artificial Sequence
  Chemically Synthesized
QVQLQESGGGLVQAGGSLRLSCAASGTISDVGGMGWYRQAPGKERELVASIGRGTITNYADSVKGRFTISRDNAKNTVYLQMNSLKPEDTAVYYCAVDADTWNPLAYWGQGTQVTVSS

SEQ ID NO: 19961 - protein, 116 aa, Artificial Sequence
  Chemically Synthesized
QVQLQESGGGLVQAGGSLRLSCAASGNISVYDDMGWYRQAPGKEREFVAAINGGSTNYADSVKGRFTISRDNAKNTVYLQMNSLKPEDTAVYYCAAQYYYPSVMYWGQGTQVTVSS

SEQ ID NO: 19962 - protein, 126 aa, Artificial Sequence
  Chemically Synthesized
QVQLQESGGGLVQAGGSLRLSCAASGTISARWVMGWYRQAPGKERELVATIGYGSITNYADSVKGRFTISRDNAKNTVYLQMNSLKPEDTAVYYCAVSQYITWDGVDWDDLVHLYWGQGTQVTVSS

SEQ ID NO: 19963 - protein, 120 aa, Artificial Sequence
  Chemically Synthesized
QVQLQESGGGLVQAGGSLRLSCAASGNISGDQGMGWYRQAPGKERELVATIDTVLLPYADSVKGRFTISRDNAKNTVYLQMNSLKPEDTAVYYCAVSTTTTFRVVTRMYWGQGTQVTVSS

SEQ ID NO: 19964 - protein, 119 aa, Artificial Sequence
  Chemically Synthesized
QVQLQESGGGLVQAGGSLRLSCAASGTIFDIPYMGWYRQAPGKEREFVAGITSGATTNYADSVKGRFTISRDNAKNTVYLQMNSLKPEDTAVYYCAVADYFDYVVYDYWGQGTQVTVSS

SEQ ID NO: 19965 - protein, 122 aa, Artificial Sequence
  Chemically Synthesized
QVQLQESGGGLVQAGGSLRLSCAASGNISRRSDMGWYRQAPGKEREFVAGIADGGTTYYADSVKGRFTISRDNAKNTVYLQMNSLKPEDTAVYYCAADDEVVYDSDYAHYYWGQGTQVTVSS

SEQ ID NO: 19966 - protein, 125 aa, Artificial Sequence
  Chemically Synthesized
QVQLQESGGGLVQAGGSLRLSCAASGTISSGDIMGWYRQAPGKEREFVAAIDVGTTTNYADSVKGRFTISRDNAKNTVYLQMNSLKPEDTAVYYCAAQVGYGGYDDKSWYSLFYWGQGTQVTVSS

SEQ ID NO: 19967 - protein, 115 aa, Artificial Sequence
  Chemically Synthesized
QVQLQESGGGLVQAGGSLRLSCAASGSISPTGDMGWYRQAPGKEREFVAAIDTGTSTNYADSVKGRFTISRDNAKNTVYLQMNSLKPEDTAVYYCAVRDLGELYWGQGTQVTVSS

SEQ ID NO: 19968 - protein, 118 aa, Artificial Sequence
  Chemically Synthesized
QVQLQESGGGLVQAGGSLRLSCAASGSIFIEDHMGWYRQAPGKEREFVAAISIGATTYYADSVKGRFTISRDNAKNTVYLQMNSLKPEDTAVYYCAVEEYDDDQFYYWGQGTQVTVSS

SEQ ID NO: 19969 - protein, 120 aa, Artificial Sequence
  Chemically Synthesized
QVQLQESGGGLVQAGGSLRLSCAASGNIFPYDAMGWYRQAPGKERELVAAIGGGSSTYYADSVKGRFTISRDNAKNTVYLQMNSLKPEDTAVYYCAAEGSSPDDWYLNYWGQGTQVTVSS

SEQ ID NO: 19970 - protein, 122 aa, Artificial Sequence
  Chemically Synthesized
QVQLQESGGGLVQAGGSLRLSCAASGYISTLGDMGWYRQAPGKERELVAGIGAGGTTNYADSVKGRFTISRDNAKNTVYLQMNSLKPEDTAVYYCAVPDQWVYYHWRTYIYWGQGTQVTVSS

SEQ ID NO: 19971 - protein, 117 aa, Artificial Sequence
  Chemically Synthesized
QVQLQESGGGLVQAGGSLRLSCAASGYIWLRLMGWYRQAPGKEREFVASITDGTNTYYADSVKGRFTISRDNAKNTVYLQMNSLKPEDTAVYYCAVTLYITRSHQYWGQGTQVTVSS

SEQ ID NO: 19972 - protein, 117 aa, Artificial Sequence
  Chemically Synthesized
QVQLQESGGGLVQAGGSLRLSCAASGLFLVLTMGWYRQAPGKEREFVASIGIGGITNYADSVKGRFTISRDNAKNTVYLQMNSLKPEDTAVYYCAVKYASRWEFRYWGQGTQVTVSS

SEQ ID NO: 19973 - protein, 118 aa, Artificial Sequence
  Chemically Synthesized
QVQLQESGGGLVQAGGSLRLSCAASGTISAGYTMGWYRQAPGKERELVAAINGGTNTNYADSVKGRFTISRDNAKNTVYLQMNSLKPEDTAVYYCAVWFESSSLLFYWGQGTQVTVSS

SEQ ID NO: 19974 - protein, 120 aa, Artificial Sequence
  Chemically Synthesized
QVQLQESGGGLVQAGGSLRLSCAASGTIFGLLFMGWYRQAPGKERELVAGISGGTSTYYADSVKGRFTISRDNAKNTVYLQMNSLKPEDTAVYYCAAYRQVDDYVVYDYWGQGTQVTVSS

SEQ ID NO: 19975 - protein, 121 aa, Artificial Sequence
  Chemically Synthesized
QVQLQESGGGLVQAGGSLRLSCAASGYISAAYMGWYRQAPGKEREFVAAISAGGNTNYADSVKGRFTISRDNAKNTVYLQMNSLKPEDTAVYYCAVVAYYLFGYYYYLQYWGQGTQVTVSS

SEQ ID NO: 19976 - protein, 121 aa, Artificial Sequence
  Chemically Synthesized
QVQLQESGGGLVQAGGSLRLSCAASGNISDYGDMGWYRQAPGKEREFVAGITRGGTTYYADSVKGRFTISRDNAKNTVYLQMNSLKPEDTAVYYCAADGWLDAEWTGFDYWGQGTQVTVSS

SEQ ID NO: 19977 - protein, 118 aa, Artificial Sequence
  Chemically Synthesized
QVQLQESGGGLVQAGGSLRLSCAASGNIFPPDDMGWYRQAPGKERELVAGIDYGGSTYYADSVKGRFTISRDNAKNTVYLQMNSLKPEDTAVYYCAADTWGDGPHRYWGQGTQVTVSS

SEQ ID NO: 19978 - protein, 116 aa, Artificial Sequence
  Chemically Synthesized
QVQLQESGGGLVQAGGSLRLSCAASGYIFADSMGWYRQAPGKEREFVAINSGSNTNYADSVKGRFTISRDNAKNTVYLQMNSLKPEDTAVYYCAANKYYGPLHGYWGQGTQVTVSS

SEQ ID NO: 19979 - protein, 118 aa, Artificial Sequence
  Chemically Synthesized
QVQLQESGGGLVQAGGSLRLSCAASGSIFLVPDMGWYRQAPGKEREFVAAIGAGSNTYYADSVKGRFTISRDNAKNTVYLQMNSLKPEDTAVYYCAVDEYDDDDFYYWGQGTQVTVSS

SEQ ID NO: 19980 - protein, 118 aa, Artificial Sequence
  Chemically Synthesized
QVQLQESGGGLVQAGGSLRLSCAASGTISYPYDMGWYRQAPGKEREFVAGIDAGATTYYADSVKGRFTISRDNAKNTVYLQMNSLKPEDTAVYYCAADDADVWWLDYWGQGTQVTVSS

SEQ ID NO: 19981 - protein, 112 aa, Artificial Sequence
  Chemically Synthesized
QVQLQESGGGLVQAGGSLRLSCAASGNISVSYGMGWYRQAPGKERELVATIAYGGTTYYADSVKGRFTISRDNAKNTVYLQMNSLKPEDTAVYYCADSLDYWGQGTQVTVSS

SEQ ID NO: 19982 - protein, 118 aa, Artificial Sequence
  Chemically Synthesized
QVQLQESGGGLVQAGGSLRLSCAASGNIFYSDFMGWYRQAPGKEREFVATIDYGGTTNYADSVKGRFTISRDNAKNTVYLQMNSLKPEDTAVYYCAANYDGHWQLPYWGQGTQVTVSS

SEQ ID NO: 19983 - protein, 117 aa, Artificial Sequence
  Chemically Synthesized
QVQLQESGGGLVQAGGSLRLSCAASGSIFSLTMGWYRQAPGKERELVAAINGGANTYYADSVKGRFTISRDNAKNTVYLQMNSLKPEDTAVYYCAVNVSIDALHYYWGQGTQVTVSS

SEQ ID NO: 19984 - protein, 116 aa, Artificial Sequence
  Chemically Synthesized
QVQLQESGGGLVQAGGSLRLSCAASGTISDLDFMGWYRQAPGKEREFVAAIATGSNTNYADSVKGRFTISRDNAKNTVYLQMNSLKPEDTAVYYCAATDPYWYLYWGQGTQVTVSS

SEQ ID NO: 19985 - protein, 126 aa, Artificial Sequence
  Chemically Synthesized
QVQLQESGGGLVQAGGSLRLSCAASGNIFGSTGMGWYRQAPGKERELVASISDGSSTYYADSVKGRFTISRDNAKNTVYLQMNSLKPEDTAVYYCAVIDLDEWFWWTYQGTDHPYWGQGTQVTVSS

SEQ ID NO: 19986 - protein, 118 aa, Artificial Sequence
  Chemically Synthesized
QVQLQESGGGLVQAGGSLRLSCAASGTISVVADMGWYRQAPGKEREFVAAIDLGTSTNYADSVKGRFTISRDNAKNTVYLQMNSLKPEDTAVYYCAADDYESDTFYYWGQGTQVTVSS

SEQ ID NO: 19987 - protein, 122 aa, Artificial Sequence
  Chemically Synthesized
QVQLQESGGGLVQAGGSLRLSCAASGTIFDYVAMGWYRQAPGKERELVAAITIGGTTNYADSVKGRFTISRDNAKNTVYLQMNSLKPEDTAVYYCAVWTDYASTQTHRHGYWGQGTQVTVSS

SEQ ID NO: 19988 - protein, 122 aa, Artificial Sequence
  Chemically Synthesized
QVQLQESGGGLVQAGGSLRLSCAASGNISGLGQMGWYRQAPGKEREFVAGIDGGGSTYYADSVKGRFTISRDNAKNTVYLQMNSLKPEDTAVYYCAVYDLHAPYVLSYHPYWGQGTQVTVSS

SEQ ID NO: 19989 - protein, 118 aa, Artificial Sequence
  Chemically Synthesized
QVQLQESGGGLVQAGGSLRLSCAASGTIFFQYTMGWYRQAPGKERELVAAIDYGASTYYADSVKGRFTISRDNAKNTVYLQMNSLKPEDTAVYYCAVYRRYEGDYVYWGQGTQVTVSS

SEQ ID NO: 19990 - protein, 121 aa, Artificial Sequence
  Chemically Synthesized
QVQLQESGGGLVQAGGSLRLSCAASGTIFTDLLMGWYRQAPGKERELVAAITDGTNTYYADSVKGRFTISRDNAKNTVYLQMNSLKPEDTAVYYCAVVDFWHGVREPLAYWGQGTQVTVSS

SEQ ID NO: 19991 - protein, 118 aa, Artificial Sequence
  Chemically Synthesized
QVQLQESGGGLVQAGGSLRLSCAASGNIFYNDWMGWYRQAPGKERELVAAINDGSSTYYADSVKGRFTISRDNAKNTVYLQMNSLKPEDTAVYYCAADTYDDDPFEYWGQGTQVTVSS

SEQ ID NO: 19992 - protein, 118 aa, Artificial Sequence
  Chemically Synthesized
QVQLQESGGGLVQAGGSLRLSCAASGNIFLQADMGWYRQAPGKEREFVAGIANGSSTYYADSVKGRFTISRDNAKNTVYLQMNSLKPEDTAVYYCAAHSTTWDVLGYWGQGTQVTVSS

SEQ ID NO: 19993 - protein, 125 aa, Artificial Sequence
  Chemically Synthesized
QVQLQESGGGLVQAGGSLRLSCAASGYISYKYYMGWYRQAPGKEREFVASITGATTNYADSVKGRFTISRDNAKNTVYLQMNSLKPEDTAVYYCAAVVYWYWADDPDAWDAFRYWGQGTQVTVSS

SEQ ID NO: 19994 - protein, 118 aa, Artificial Sequence
  Chemically Synthesized
QVQLQESGGGLVQAGGSLRLSCAASGSISYKRRMGWYRQAPGKEREFVATITVGANTYYADSVKGRFTISRDNAKNTVYLQMNSLKPEDTAVYYCAARYDGPWVHRYWGQGTQVTVSS

SEQ ID NO: 19995 - protein, 118 aa, Artificial Sequence
  Chemically Synthesized
QVQLQESGGGLVQAGGSLRLSCAASGYISHYIKMGWYRQAPGKEREFVASIDKGSNTNYADSVKGRFTISRDNAKNTVYLQMNSLKPEDTAVYYCAAGPYYQWDHYYWGQGTQVTVSS

SEQ ID NO: 19996 - protein, 118 aa, Artificial Sequence
  Chemically Synthesized
QVQLQESGGGLVQAGGSLRLSCAASGTISESWDMGWYRQAPGKEREFVATISAGTTTYYADSVKGRFTISRDNAKNTVYLQMNSLKPEDTAVYYCAATDYDYYGHYYWGQGTQVTVSS

SEQ ID NO: 19997 - protein, 122 aa, Artificial Sequence
  Chemically Synthesized
QVQLQESGGGLVQAGGSLRLSCAASGYIFRDVFMGWYRQAPGKERELVAGIAGGSSTNYADSVKGRFTISRDNAKNTVYLQMNSLKPEDTAVYYCAVNGDWYYVNRIIYDYWGQGTQVTVSS

SEQ ID NO: 19998 - protein, 117 aa, Artificial Sequence
  Chemically Synthesized
QVQLQESGGGLVQAGGSLRLSCAASGNIFDSSMGWYRQAPGKEREFVATIAPGSSTNYADSVKGRFTISRDNAKNTVYLQMNSLKPEDTAVYYCAAWRAQGGDHPYWGQGTQVTVSS

SEQ ID NO: 19999 - protein, 118 aa, Artificial Sequence
  Chemically Synthesized
QVQLQESGGGLVQAGGSLRLSCAASGNIFPSGYMGWYRQAPGKEREFVASIATGGSTYYADSVKGRFTISRDNAKNTVYLQMNSLKPEDTAVYYCAVTQQSAYDHVYWGQGTQVTVSS

SEQ ID NO: 20000 - protein, 118 aa, Artificial Sequence
  Chemically Synthesized
QVQLQESGGGLVQAGGSLRLSCAASGNIFYDQYMGWYRQAPGKEREFVASIDDGANTYYADSVKGRFTISRDNAKNTVYLQMNSLKPEDTAVYYCAVTYGYYYDHSYWGQGTQVTVSS

SEQ ID NO: 20001 - protein, 118 aa, Artificial Sequence
  Chemically Synthesized
QVQLQESGGGLVQAGGSLRLSCAASGYISADDYMGWYRQAPGKEREFVATIADGTNTYYADSVKGRFTISRDNAKNTVYLQMNSLKPEDTAVYYCAASHEPIWDFFYWGQGTQVTVSS

SEQ ID NO: 20002 - protein, 121 aa, Artificial Sequence
  Chemically Synthesized
QVQLQESGGGLVQAGGSLRLSCAASGTIFWLYDMGWYRQAPGKERELVATITYGTSTNYADSVKGRFTISRDNAKNTVYLQMNSLKPEDTAVYYCAVDDFYDDSSTCSMYWGQGTQVTVSS

SEQ ID NO: 20003 - protein, 118 aa, Artificial Sequence
  Chemically Synthesized
QVQLQESGGGLVQAGGSLRLSCAASGTISEQIFMGWYRQAPGKEREFVASIGDGGNTYYADSVKGRFTISRDNAKNTVYLQMNSLKPEDTAVYYCAVSQSTNYDFWYWGQGTQVTVSS

SEQ ID NO: 20004 - protein, 118 aa, Artificial Sequence
  Chemically Synthesized
QVQLQESGGGLVQAGGSLRLSCAASGYISRLFYMGWYRQAPGKEREFVASIDGGTSTNYADSVKGRFTISRDNAKNTVYLQMNSLKPEDTAVYYCAVTLQYYYDHIYWGQGTQVTVSS

SEQ ID NO: 20005 - protein, 118 aa, Artificial Sequence
  Chemically Synthesized
QVQLQESGGGLVQAGGSLRLSCAASGNISHHAYMGWYRQAPGKEREFVASINYGAITYYADSVKGRFTISRDNAKNTVYLQMNSLKPEDTAVYYCAVTWASTYDHAYWGQGTQVTVSS

SEQ ID NO: 20006 - protein, 126 aa, Artificial Sequence
  Chemically Synthesized
QVQLQESGGGLVQAGGSLRLSCAASGSISRDRSMGWYRQAPGKERELVAAIDSGGNTNYADSVKGRFTISRDNAKNTVYLQMNSLKPEDTAVYYCAADDDIQADTDDLDVWRFGYWGQGTQVTVSS

SEQ ID NO: 20007 - protein, 121 aa, Artificial Sequence
  Chemically Synthesized
QVQLQESGGGLVQAGGSLRLSCAASGTISRNWDMGWYRQAPGKEREFVAGIGTGSITYYADSVKGRFTISRDNAKNTVYLQMNSLKPEDTAVYYCAVHNDTQQFDASSFYWGQGTQVTVSS

SEQ ID NO: 20008 - protein, 116 aa, Artificial Sequence
  Chemically Synthesized
QVQLQESGGGLVQAGGSLRLSCAASGNISTLDYMGWYRQAPGKERELGISQGSTTYYADSVKGRFTISRDNAKNTVYLQMNSLKPEDTAVYYCAVGGTDAYAYTYWGQGTQVTVSS

SEQ ID NO: 20009 - protein, 125 aa, Artificial Sequence
  Chemically Synthesized
QVQLQESGGGLVQAGGSLRLSCAASGNIFWLDVMGWYRQAPGKERELVAGIAIGGVPYADSVKGRFTISRDNAKNTVYLQMNSLKPEDTAVYYCAVDGVSAHDDSGQYDWVHGYWGQGTQVTVSS

SEQ ID NO: 20010 - protein, 115 aa, Artificial Sequence
  Chemically Synthesized
QVQLQESGGGLVQAGGSLRLSCAASGYISPLGYMGWYRQAPGKERELVATIGLGSITNYADSVKGRFTISRDNAKNTVYLQMNSLKPEDTAVYYCAVGYQYHPYWGQGTQVTVSS

SEQ ID NO: 20011 - protein, 114 aa, Artificial Sequence
  Chemically Synthesized
QVQLQESGGGLVQAGGSLRLSCAASGTIFRLGRMGWYRQAPGKEREFVASIDYGTTTNYADSVKGRFTISRDNAKNTVYLQMNSLKPEDTAVYYCAVYPDHDYWGQGTQVTVSS

SEQ ID NO: 20012 - protein, 117 aa, Artificial Sequence
  Chemically Synthesized
QVQLQESGGGLVQAGGSLRLSCAASGSIFYVLMGWYRQAPGKERELVASIAYGGITYYADSVKGRFTISRDNAKNTVYLQMNSLKPEDTAVYYCAVYVDYAVPHYYWGQGTQVTVSS

SEQ ID NO: 20013 - protein, 114 aa, Artificial Sequence
  Chemically Synthesized
QVQLQESGGGLVQAGGSLRLSCAASGNIFTLDYMGWYRQAPGKERELVATISYGASTYYADSVKGRFTISRDNAKNTVYLQMNSLKPEDTAVYYCAVYYWFIYWGQGTQVTVSS

SEQ ID NO: 20014 - protein, 122 aa, Artificial Sequence
  Chemically Synthesized
QVQLQESGGGLVQAGGSLRLSCAASGSISFPVVMGWYRQAPGKERELVAGIAYGTITYYADSVKGRFTISRDNAKNTVYLQMNSLKPEDTAVYYCAVAYYKPYAYAADYYYWGQGTQVTVSS

SEQ ID NO: 20015 - protein, 122 aa, Artificial Sequence
  Chemically Synthesized
QVQLQESGGGLVQAGGSLRLSCAASGSIFYRVPMGWYRQAPGKERELVASITYGATTYYADSVKGRFTISRDNAKNTVYLQMNSLKPEDTAVYYCAAYGHFIATRTDVLVYWGQGTQVTVSS

SEQ ID NO: 20016 - protein, 114 aa, Artificial Sequence
  Chemically Synthesized
QVQLQESGGGLVQAGGSLRLSCAASGTISVVFSMGWYRQAPGKEREFVASISSVVIPYADSVKGRFTISRDNAKNTVYLQMNSLKPEDTAVYYCAVTVTVFVYWGQGTQVTVSS

SEQ ID NO: 20017 - protein, 118 aa, Artificial Sequence
  Chemically Synthesized
QVQLQESGGGLVQAGGSLRLSCAASGTIFTYRIMGWYRQAPGKERELVAGIGDGGITYYADSVKGRFTISRDNAKNTVYLQMNSLKPEDTAVYYCAVIGELTHYHVYWGQGTQVTVSS

SEQ ID NO: 20018 - protein, 119 aa, Artificial Sequence
  Chemically Synthesized
QVQLQESGGGLVQAGGSLRLSCAASGIFLVINMGWYRQAPGKEREFVATIGVGGNTYADSVKGRFTISRDNAKNTVYLQMNSLKPEDTAVYYCAAAQLYSFVTTTVIYWGQGTQVTVSS

SEQ ID NO: 20019 - protein, 116 aa, Artificial Sequence
  Chemically Synthesized
QVQLQESGGGLVQAGGSLRLSCAASGNIFDAMGWYRQAPGKERELVAAIGDGGITYYADSVKGRFTISRDNAKNTVYLQMNSLKPEDTAVYYCAAAVPSSSYHSYWGQGTQVTVSS

SEQ ID NO: 20020 - protein, 126 aa, Artificial Sequence
  Chemically Synthesized
QVQLQESGGGLVQAGGSLRLSCAASGNISLDSRMGWYRQAPGKERELVATISRGTSTYYADSVKGRFTISRDNAKNTVYLQMNSLKPEDTAVYYCAADYRVYYAYDTTSPGDYLYWGQGTQVTVSS

SEQ ID NO: 20021 - protein, 118 aa, Artificial Sequence
  Chemically Synthesized
QVQLQESGGGLVQAGGSLRLSCAASGTISNRTRMGWYRQAPGKEREFVAAITNGGSTNYADSVKGRFTISRDNAKNTVYLQMNSLKPEDTAVYYCAALDGFVIQHRYWGQGTQVTVSS

SEQ ID NO: 20022 - protein, 117 aa, Artificial Sequence
  Chemically Synthesized
QVQLQESGGGLVQAGGSLRLSCAASGTISAFYPMGWYRQAPGKERELVATIGSVVIPYADSVKGRFTISRDNAKNTVYLQMNSLKPEDTAVYYCAVDEGRNFYLGYWGQGTQVTVSS

SEQ ID NO: 20023 - protein, 121 aa, Artificial Sequence
  Chemically Synthesized
QVQLQESGGGLVQAGGSLRLSCAASGTIFEFGYMGWYRQAPGKEREFVAAIDDGANTNYADSVKGRFTISRDNAKNTVYLQMNSLKPEDTAVYYCAVQLYWYYYTDNYWYWGQGTQVTVSS

SEQ ID NO: 20024 - protein, 110 aa, Artificial Sequence
  Chemically Synthesized
QVQLQESGGGLVQAGGSLRLSCAASGNISFPGRMGWYRQAPGKEREFVASIGYGTITNYADSVKGRFTISRDNAKNTVYLQMNSLKPEDTAVYYCAVMYWGQGTQVTVSS

SEQ ID NO: 20025 - protein, 118 aa, Artificial Sequence
  Chemically Synthesized
QVQLQESGGGLVQAGGSLRLSCAASGNISYDPIMGWYRQAPGKEREFVAAIARGTTTNYADSVKGRFTISRDNAKNTVYLQMNSLKPEDTAVYYCAVRRWHRGRYTYWGQGTQVTVSS

SEQ ID NO: 20026 - protein, 118 aa, Artificial Sequence
  Chemically Synthesized
QVQLQESGGGLVQAGGSLRLSCAASGTISFWYYMGWYRQAPGKERELVATIDGGTSTNYADSVKGRFTISRDNAKNTVYLQMNSLKPEDTAVYYCAVSAAYYWDFLYWGQGTQVTVSS

SEQ ID NO: 20027 - protein, 126 aa, Artificial Sequence
  Chemically Synthesized
QVQLQESGGGLVQAGGSLRLSCAASGNIFDRTYMGWYRQAPGKERELVAGIAYGANTYYADSVKGRFTISRDNAKNTVYLQMNSLKPEDTAVYYCAARDGPRGDAYLPQSWAHWYWGQGTQVTVSS

SEQ ID NO: 20028 - protein, 118 aa, Artificial Sequence
  Chemically Synthesized
QVQLQESGGGLVQAGGSLRLSCAASGTIFRPRYMGWYRQAPGKEREFVASIAYGGTTYYADSVKGRFTISRDNAKNTVYLQMNSLKPEDTAVYYCAVGRYRGYAHIYWGQGTQVTVSS

SEQ ID NO: 20029 - protein, 122 aa, Artificial Sequence
  Chemically Synthesized
QVQLQESGGGLVQAGGSLRLSCAASGNIFYRRGMGWYRQAPGKEREFVASITYGSITYYADSVKGRFTISRDNAKNTVYLQMNSLKPEDTAVYYCAVWLRGHSQPYSRLTYWGQGTQVTVSS

SEQ ID NO: 20030 - protein, 126 aa, Artificial Sequence
  Chemically Synthesized
QVQLQESGGGLVQAGGSLRLSCAASGSISDTTVMGWYRQAPGKEREFVASINYGATTYYADSVKGRFTISRDNAKNTVYLQMNSLKPEDTAVYYCAADVRYAPALYSGYGGGLAYWGQGTQVTVSS

SEQ ID NO: 20031 - protein, 117 aa, Artificial Sequence
  Chemically Synthesized
QVQLQESGGGLVQAGGSLRLSCAASGTISVPFPMGWYRQAPGKEREFVASISSGTSTNYADSVKGRFTISRDNAKNTVYLQMNSLKPEDTAVYYCAVRTTTRTRIYWGQGTQVTVSS

SEQ ID NO: 20032 - protein, 110 aa, Artificial Sequence
  Chemically Synthesized
QVQLQESGGGLVQAGGSLRLSCAASGTISINYSMGWYRQAPGKERELVASINSVVIPYADSVKGRFTISRDNAKNTVYLQMNSLKPEDTAVYYCATRIYWGQGTQVTVSS

SEQ ID NO: 20033 - protein, 118 aa, Artificial Sequence
  Chemically Synthesized
QVQLQESGGGLVQAGGSLRLSCAASGYISLRFYMGWYRQAPGKEREFVATIDDGSSTYYADSVKGRFTISRDNAKNTVYLQMNSLKPEDTAVYYCAVTAQTYYDHVYWGQGTQVTVSS

SEQ ID NO: 20034 - protein, 118 aa, Artificial Sequence
  Chemically Synthesized
QVQLQESGGGLVQAGGSLRLSCAASGTISQGDYMGWYRQAPGKEREFVASIAIGTITYYADSVKGRFTISRDNAKNTVYLQMNSLKPEDTAVYYCAVSVQFSYDFYYWGQGTQVTVSS

SEQ ID NO: 20035 - protein, 118 aa, Artificial Sequence
  Chemically Synthesized
QVQLQESGGGLVQAGGSLRLSCAASGYIFVRSTMGWYRQAPGKERELVATIDRGGTTNYADSVKGRFTISRDNAKNTVYLQMNSLKPEDTAVYYCAVRGTVYSVLDYWGQGTQVTVSS

SEQ ID NO: 20036 - protein, 122 aa, Artificial Sequence
  Chemically Synthesized
QVQLQESGGGLVQAGGSLRLSCAASGYISAYYVMGWYRQAPGKERELVASIGGGSNTNYADSVKGRFTISRDNAKNTVYLQMNSLKPEDTAVYYCAVVDVPYLDDYDQHGYWGQGTQVTVSS

SEQ ID NO: 20037 - protein, 126 aa, Artificial Sequence
  Chemically Synthesized
QVQLQESGGGLVQAGGSLRLSCAASGYISQIRDMGWYRQAPGKERELVASIGGGGNTNYADSVKGRFTISRDNAKNTVYLQMNSLKPEDTAVYYCAVRTPYRRYYDDQYYAYFTYWGQGTQVTVSS

SEQ ID NO: 20038 - protein, 121 aa, Artificial Sequence
  Chemically Synthesized
QVQLQESGGGLVQAGGSLRLSCAASGYIFDRASMGWYRQAPGKERELVATIDPGTSTYYADSVKGRFTISRDNAKNTVYLQMNSLKPEDTAVYYCAARSYSYPTLRSLMYWGQGTQVTVSS

SEQ ID NO: 20039 - protein, 122 aa, Artificial Sequence
  Chemically Synthesized
QVQLQESGGGLVQAGGSLRLSCAASGNIFDADPMGWYRQAPGKERELVASIGYGANTYYADSVKGRFTISRDNAKNTVYLQMNSLKPEDTAVYYCAAKYLYTGYVAGEHYYWGQGTQVTVSS

SEQ ID NO: 20040 - protein, 118 aa, Artificial Sequence
  Chemically Synthesized
QVQLQESGGGLVQAGGSLRLSCAASGNIFYQYRMGWYRQAPGKERELVAGINYGTTTYYADSVKGRFTISRDNAKNTVYLQMNSLKPEDTAVYYCAAKSQSSSAHTYWGQGTQVTVSS

SEQ ID NO: 20041 - protein, 122 aa, Artificial Sequence
  Chemically Synthesized
QVQLQESGGGLVQAGGSLRLSCAASGSISADWNMGWYRQAPGKERELVATIGYGATTNYADSVKGRFTISRDNAKNTVYLQMNSLKPEDTAVYYCAAGGHPHKQHDDVLWYWGQGTQVTVSS

SEQ ID NO: 20042 - protein, 123 aa, Artificial Sequence
  Chemically Synthesized
QVQLQESGGGLVQAGGSLRLSCAASGYIFRPYYMGWYRQAPGKEREFVASITLGSTYADSVKGRFTISRDNAKNTVYLQMNSLKPEDTAVYYCAAGAIGSRYNLDWSLTSIYWGQGTQVTVSS

SEQ ID NO: 20043 - protein, 126 aa, Artificial Sequence
  Chemically Synthesized
QVQLQESGGGLVQAGGSLRLSCAASGTIFVGTLMGWYRQAPGKEREFVAAIDYGAITNYADSVKGRFTISRDNAKNTVYLQMNSLKPEDTAVYYCAATGSSSYIKAGIYSGLYYYWGQGTQVTVSS

SEQ ID NO: 20044 - protein, 118 aa, Artificial Sequence
  Chemically Synthesized
QVQLQESGGGLVQAGGSLRLSCAASGTIFGDVIMGWYRQAPGKEREFVAGISHGAITYYADSVKGRFTISRDNAKNTVYLQMNSLKPEDTAVYYCAVYYQYEGTLYYWGQGTQVTVSS

SEQ ID NO: 20045 - protein, 121 aa, Artificial Sequence
  Chemically Synthesized
QVQLQESGGGLVQAGGSLRLSCAASGTISGYYYMGWYRQAPGKERELVAAISFGGSTYYADSVKGRFTISRDNAKNTVYLQMNSLKPEDTAVYYCAVADADEDKYQTHGYWGQGTQVTVSS

SEQ ID NO: 20046 - protein, 126 aa, Artificial Sequence
  Chemically Synthesized
QVQLQESGGGLVQAGGSLRLSCAASGTIFGRYYMGWYRQAPGKERELVAGISGGGSTYYADSVKGRFTISRDNAKNTVYLQMNSLKPEDTAVYYCAAASGWSQYPYYVDYIYHAYWGQGTQVTVSS

SEQ ID NO: 20047 - protein, 121 aa, Artificial Sequence
  Chemically Synthesized
QVQLQESGGGLVQAGGSLRLSCAASGYILGTSMGWYRQAPGKERELVASIGDGGNTYYADSVKGRFTISRDNAKNTVYLQMNSLKPEDTAVYYCAVGYGEVAFTDSDHVYWGQGTQVTVSS

SEQ ID NO: 20048 - protein, 118 aa, Artificial Sequence
  Chemically Synthesized
QVQLQESGGGLVQAGGSLRLSCAASGSIFYLDGMGWYRQAPGKERELVASIGYGANTNYADSVKGRFTISRDNAKNTVYLQMNSLKPEDTAVYYCAVVDRYEVSHQYWGQGTQVTVSS

SEQ ID NO: 20049 - protein, 115 aa, Artificial Sequence
  Chemically Synthesized
QVQLQESGGGLVQAGGSLRLSCAASGYISLTQYMGWYRQAPGKEREFVATIASGGTTNYADSVKGRFTISRDNAKNTVYLQMNSLKPEDTAVYYCAVFTTTRFYWGQGTQVTVSS

SEQ ID NO: 20050 - protein, 117 aa, Artificial Sequence
  Chemically Synthesized
QVQLQESGGGLVQAGGSLRLSCAASGNISRPWFMGWYRQAPGKEREFVAAISNGGITYYADSVKGRFTISRDNAKNTVYLQMNSLKPEDTAVYYCAASYNDAALHYWGQGTQVTVSS

SEQ ID NO: 20051 - protein, 119 aa, Artificial Sequence
  Chemically Synthesized
QVQLQESGGGLVQAGGSLRLSCAASGNIFAKDSMGWYRQAPGKERELVASITAGSTTNYADSVKGRFTISRDNAKNTVYLQMNSLKPEDTAVYYCASTSDYLYNYLLYWGQGTQVTVSS

SEQ ID NO: 20052 - protein, 118 aa, Artificial Sequence
  Chemically Synthesized
QVQLQESGGGLVQAGGSLRLSCAASGSIFQNFIMGWYRQAPGKEREFVASISNGGITNYADSVKGRFTISRDNAKNTVYLQMNSLKPEDTAVYYCAVSGTDQRDHVYWGQGTQVTVSS

SEQ ID NO: 20053 - protein, 118 aa, Artificial Sequence
  Chemically Synthesized
QVQLQESGGGLVQAGGSLRLSCAASGSISDYHYMGWYRQAPGKEREFVAAISVGGITYYADSVKGRFTISRDNAKNTVYLQMNSLKPEDTAVYYCAVAYYGIAWHVYWGQGTQVTVSS

SEQ ID NO: 20054 - protein, 118 aa, Artificial Sequence
  Chemically Synthesized
QVQLQESGGGLVQAGGSLRLSCAASGTIFLLTLMGWYRQAPGKEREFVAGIDQGGSTYYADSVKGRFTISRDNAKNTVYLQMNSLKPEDTAVYYCAVFPDGGRWHGYWGQGTQVTVSS

SEQ ID NO: 20055 - protein, 118 aa, Artificial Sequence
  Chemically Synthesized
QVQLQESGGGLVQAGGSLRLSCAASGNIFDPYWMGWYRQAPGKERELVAGIAYGGITYYADSVKGRFTISRDNAKNTVYLQMNSLKPEDTAVYYCAYYRGYGHYYRYWGQGTQVTVSS

SEQ ID NO: 20056 - protein, 127 aa, Artificial Sequence
  Chemically Synthesized
QVQLQESGGGLVQAGGSLRLSCAASGSISSRLYMGWYRQAPGKEREFVATIGMVLVPYADSVKGRFTISRDNAKNTVYLQMNSLKPEDTAVYYCAARYHYTWAGDYVGAFRVTHGYWGQGTQVTVSS

SEQ ID NO: 20057 - protein, 115 aa, Artificial Sequence
  Chemically Synthesized
QVQLQESGGGLVQAGGSLRLSCAASGNMTTMGWYRQAPGKERELVAGIGNGTSTYYADSVKGRFTISRDNAKNTVYLQMNSLKPEDTAVYYCAAQRGDPGVLYYWGQGTQVTVSS

SEQ ID NO: 20058 - protein, 118 aa, Artificial Sequence
  Chemically Synthesized
QVQLQESGGGLVQAGGSLRLSCAASGNIFHFPAMGWYRQAPGKERELVASITPGASTYYADSVKGRFTISRDNAKNTVYLQMNSLKPEDTAVYYCAVGYIYRTGYPYWGQGTQVTVSS

SEQ ID NO: 20059 - protein, 118 aa, Artificial Sequence
  Chemically Synthesized
QVQLQESGGGLVQAGGSLRLSCAASGNISIPAGMGWYRQAPGKEREFVATITSGGTTNYADSVKGRFTISRDNAKNTVYLQMNSLKPEDTAVYYCAVGYVSGDGYLYWGQGTQVTVSS

SEQ ID NO: 20060 - protein, 116 aa, Artificial Sequence
  Chemically Synthesized
QVQLQESGGGLVQAGGSLRLSCAASGSISFVTMGWYRQAPGKEREFVATISDGGSTNYADSVKGRFTISRDNAKNTVYLQMNSLKPEDTAVYYCAVSTTVVLIMYWGQGTQVTVSS

SEQ ID NO: 20061 - protein, 112 aa, Artificial Sequence
  Chemically Synthesized
QVQLQESGGGLVQAGGSLRLSCAASGNIFGTDYMGWYRQAPGKEREFVAALPYADSVKGRFTISRDNAKNTVYLQMNSLKPEDTAVYYCAANAAQYVTYYYWGQGTQVTVSS

SEQ ID NO: 20062 - protein, 122 aa, Artificial Sequence
  Chemically Synthesized
QVQLQESGGGLVQAGGSLRLSCAASGNISLREDMGWYRQAPGKEREFVATIAFGTNTNYADSVKGRFTISRDNAKNTVYLQMNSLKPEDTAVYYCAAVPGYLYADYDILVYWGQGTQVTVSS

SEQ ID NO: 20063 - protein, 118 aa, Artificial Sequence
  Chemically Synthesized
QVQLQESGGGLVQAGGSLRLSCAASGSISNPYRMGWYRQAPGKERELVASIGYGTNTNYADSVKGRFTISRDNAKNTVYLQMNSLKPEDTAVYYCAARGGRPERHPYWGQGTQVTVSS

SEQ ID NO: 20064 - protein, 118 aa, Artificial Sequence
  Chemically Synthesized
QVQLQESGGGLVQAGGSLRLSCAASGSISLYGLMGWYRQAPGKEREFVAAIGNGTSTNYADSVKGRFTISRDNAKNTVYLQMNSLKPEDTAVYYCAVTFGVRRFYSYWGQGTQVTVSS

SEQ ID NO: 20065 - protein, 118 aa, Artificial Sequence
  Chemically Synthesized
QVQLQESGGGLVQAGGSLRLSCAASGSIFRAYVMGWYRQAPGKERELVAGIAYGGSTYYADSVKGRFTISRDNAKNTVYLQMNSLKPEDTAVYYCAVLYIQGARHRYWGQGTQVTVSS

SEQ ID NO: 20066 - protein, 122 aa, Artificial Sequence
  Chemically Synthesized
QVQLQESGGGLVQAGGSLRLSCAASGYISHGQQMGWYRQAPGKEREFVAAITTGGSTYYADSVKGRFTISRDNAKNTVYLQMNSLKPEDTAVYYCAAAIARVTRFDYGLTYWGQGTQVTVSS

SEQ ID NO: 20067 - protein, 124 aa, Artificial Sequence
  Chemically Synthesized
QVQLQESGGGLVQAGGSLRLSCAASGTIFGFMGWYRQAPGKEREFVAAIASGGNTNYADSVKGRFTISRDNAKNTVYLQMNSLKPEDTAVYYCAARWVGYQVDLGGPNDGLGYWGQGTQVTVSS

SEQ ID NO: 20068 - protein, 113 aa, Artificial Sequence
  Chemically Synthesized
QVQLQESGGGLVQAGGSLRLSCAASGNIFPGYFMGWYRQAPGKERELVASIALYADSVKGRFTISRDNAKNTVYLQMNSLKPEDTAVYYCAANGDPTTGLYYWGQGTQVTVSS

SEQ ID NO: 20069 - protein, 125 aa, Artificial Sequence
  Chemically Synthesized
QVQLQESGGGLVQAGGSLRLSCAASGNIFWEWHMGWYRQAPGKEREFVAGIGNGSITYYADSVKGRFTISRDNAKNTVYLQMNSLKPEDTAVYYCAVSDRLEWNYPRPDLKHRYWGQGTQVTVSS

SEQ ID NO: 20070 - protein, 125 aa, Artificial Sequence
  Chemically Synthesized
QVQLQESGGGLVQAGGSLRLSCAASGYISLTGPMGWYRQAPGKERELVAGIDVGGITNYADSVKGRFTISRDNAKNTVYLQMNSLKPEDTAVYYCAAIRFFRKAYVAPYDDFSYWGQGTQVTVSS

SEQ ID NO: 20071 - protein, 117 aa, Artificial Sequence
  Chemically Synthesized
QVQLQESGGGLVQAGGSLRLSCAASGYISDQYYMGWYRQAPGKEREFVAAIAGGITYYADSVKGRFTISRDNAKNTVYLQMNSLKPEDTAVYYCAVGQNGWASYAYWGQGTQVTVSS

SEQ ID NO: 20072 - protein, 110 aa, Artificial Sequence
  Chemically Synthesized
QVQLQESGGGLVQAGGSLRLSCAASGYIFPGPIMGWYRQAPGKEREFVAAYADSVKGRFTISRDNAKNTVYLQMNSLKPEDTAVYYCAVDPSYPADHVYWGQGTQVTVSS

SEQ ID NO: 20073 - protein, 126 aa, Artificial Sequence
  Chemically Synthesized
QVQLQESGGGLVQAGGSLRLSCAASGTISAPSDMGWYRQAPGKERELVASIGGGGSTNYADSVKGRFTISRDNAKNTVYLQMNSLKPEDTAVYYCAAGQGHAPDYYPLHRDDYQYWGQGTQVTVSS

SEQ ID NO: 20074 - protein, 118 aa, Artificial Sequence
  Chemically Synthesized
QVQLQESGGGLVQAGGSLRLSCAASGSIFQAYAMGWYRQAPGKERELVATIDFGGTTYYADSVKGRFTISRDNAKNTVYLQMNSLKPEDTAVYYCAASDSQEYEHPYWGQGTQVTVSS

SEQ ID NO: 20075 - protein, 120 aa, Artificial Sequence
  Chemically Synthesized
QVQLQESGGGLVQAGGSLRLSCAASGTIFWPYTMGWYRQAPGKEREFVASIDQGTITYADSVKGRFTISRDNAKNTVYLQMNSLKPEDTAVYYCAVYYATYAQGSSTIYWGQGTQVTVSS

SEQ ID NO: 20076 - protein, 126 aa, Artificial Sequence
  Chemically Synthesized
QVQLQESGGGLVQAGGSLRLSCAASGYISFSGGMGWYRQAPGKERELVATISYGSNTNYADSVKGRFTISRDNAKNTVYLQMNSLKPEDTAVYYCAVLYRIPGGRYSRRTNVHPYWGQGTQVTVSS

SEQ ID NO: 20077 - protein, 118 aa, Artificial Sequence
  Chemically Synthesized
QVQLQESGGGLVQAGGSLRLSCAASGTISRGFVMGWYRQAPGKEREFVASISQGAITNYADSVKGRFTISRDNAKNTVYLQMNSLKPEDTAVYYCAVYYDTGPFFFYWGQGTQVTVSS

SEQ ID NO: 20078 - protein, 118 aa, Artificial Sequence
  Chemically Synthesized
QVQLQESGGGLVQAGGSLRLSCAASGNISANTYMGWYRQAPGKEREFVAAITSGGTTNYADSVKGRFTISRDNAKNTVYLQMNSLKPEDTAVYYCAVPYYFETDYYYWGQGTQVTVSS

SEQ ID NO: 20079 - protein, 117 aa, Artificial Sequence
  Chemically Synthesized
QVQLQESGGGLVQAGGSLRLSCAASGSIFDSRMGWYRQAPGKEREFVAGIDIGSTTNYADSVKGRFTISRDNAKNTVYLQMNSLKPEDTAVYYCAVAGPDYYYHRYWGQGTQVTVSS

SEQ ID NO: 20080 - protein, 115 aa, Artificial Sequence
  Chemically Synthesized
QVQLQESGGGLVQAGGSLRLSCAASGSIFSSYRMGWYRQAPGKERELVATISQGTSTYYADSVKGRFTISRDNAKNTVYLQMNSLKPEDTAVYYCANGYWVYPYWGQGTQVTVSS

SEQ ID NO: 20081 - protein, 122 aa, Artificial Sequence
  Chemically Synthesized
QVQLQESGGGLVQAGGSLRLSCAASGYISDDYVMGWYRQAPGKERELVATINYGGITYYADSVKGRFTISRDNAKNTVYLQMNSLKPEDTAVYYCAAPLRSSDTYALGYTYWGQGTQVTVSS

SEQ ID NO: 20082 - protein, 118 aa, Artificial Sequence
  Chemically Synthesized
QVQLQESGGGLVQAGGSLRLSCAASGYISVSDVMGWYRQAPGKERELVASISYGTITNYADSVKGRFTISRDNAKNTVYLQMNSLKPEDTAVYYCAVYYYSSYYLFYWGQGTQVTVSS

SEQ ID NO: 20083 - protein, 118 aa, Artificial Sequence
  Chemically Synthesized
QVQLQESGGGLVQAGGSLRLSCAASGYIFSGGGMGWYRQAPGKERELVAGIDDGGTTNYADSVKGRFTISRDNAKNTVYLQMNSLKPEDTAVYYCAVQYSDPVALPYWGQGTQVTVSS

SEQ ID NO: 20084 - protein, 117 aa, Artificial Sequence
  Chemically Synthesized
QVQLQESGGGLVQAGGSLRLSCAASGTIFAYLRMGWYRQAPGKERELVATITSGTITNYADSVKGRFTISRDNAKNTVYLQMNSLKPEDTAVYYCAVLGLSVLPSYWGQGTQVTVSS

SEQ ID NO: 20085 - protein, 118 aa, Artificial Sequence
  Chemically Synthesized
QVQLQESGGGLVQAGGSLRLSCAASGNIFDNYYMGWYRQAPGKEREFVAGIDLGASTYYADSVKGRFTISRDNAKNTVYLQMNSLKPEDTAVYYCAANIDDDGVLRYWGQGTQVTVSS

SEQ ID NO: 20086 - protein, 118 aa, Artificial Sequence
  Chemically Synthesized
QVQLQESGGGLVQAGGSLRLSCAASGSIFAGQLMGWYRQAPGKERELVAAITHGSNTNYADSVKGRFTISRDNAKNTVYLQMNSLKPEDTAVYYCAARQLPQGGYAYWGQGTQVTVSS

SEQ ID NO: 20087 - protein, 122 aa, Artificial Sequence
  Chemically Synthesized
QVQLQESGGGLVQAGGSLRLSCAASGTISYNYYMGWYRQAPGKEREFVATISIGGNTNYADSVKGRFTISRDNAKNTVYLQMNSLKPEDTAVYYCAAYINLFDEDRAVYTYWGQGTQVTVSS

SEQ ID NO: 20088 - protein, 121 aa, Artificial Sequence
  Chemically Synthesized
QVQLQESGGGLVQAGGSLRLSCAASGIFLLLTMGWYRQAPGKERELVATISPGGNTYYADSVKGRFTISRDNAKNTVYLQMNSLKPEDTAVYYCAVDRAVDLDIDALHHYWGQGTQVTVSS

SEQ ID NO: 20089 - protein, 118 aa, Artificial Sequence
  Chemically Synthesized
QVQLQESGGGLVQAGGSLRLSCAASGSIFVFPIMGWYRQAPGKEREFVAGIDDGANTYYADSVKGRFTISRDNAKNTVYLQMNSLKPEDTAVYYCAAYTYDYWVLVYWGQGTQVTVSS

SEQ ID NO: 20090 - protein, 122 aa, Artificial Sequence
  Chemically Synthesized
QVQLQESGGGLVQAGGSLRLSCAASGTISWWGDMGWYRQAPGKEREFVATINGGGSTYYADSVKGRFTISRDNAKNTVYLQMNSLKPEDTAVYYCAVNNFRGFPTYANLSYWGQGTQVTVSS

SEQ ID NO: 20091 - protein, 128 aa, Artificial Sequence
  Chemically Synthesized
QVQLQESGGGLVQAGGSLRLSCAASGTIFYWRDMGWYRQAPGKEREFVATIGDGTITNYADSVKGRFTISRDNAKNTVYLQMNSLKPEDTAVYYCAALYGGIYDYTLVLDRYYAHRYWGQGTQVTVSS

SEQ ID NO: 20092 - protein, 118 aa, Artificial Sequence
  Chemically Synthesized
QVQLQESGGGLVQAGGSLRLSCAASGSISRPKGMGWYRQAPGKEREFVASITDGGTTNYADSVKGRFTISRDNAKNTVYLQMNSLKPEDTAVYYCAVDWQVQSGHGYWGQGTQVTVSS

SEQ ID NO: 20093 - protein, 126 aa, Artificial Sequence
  Chemically Synthesized
QVQLQESGGGLVQAGGSLRLSCAASGNISGYDTMGWYRQAPGKERELVAGINDGTTTNYADSVKGRFTISRDNAKNTVYLQMNSLKPEDTAVYYCAVTYRSRGSIVAWYTDYHDYWGQGTQVTVSS

SEQ ID NO: 20094 - protein, 126 aa, Artificial Sequence
  Chemically Synthesized
QVQLQESGGGLVQAGGSLRLSCAASGYISYYTFMGWYRQAPGKERELVAGIAYGTTTNYADSVKGRFTISRDNAKNTVYLQMNSLKPEDTAVYYCAASQNTWYHYDHRAHVTHPYWGQGTQVTVSS

SEQ ID NO: 20095 - protein, 117 aa, Artificial Sequence
  Chemically Synthesized
QVQLQESGGGLVQAGGSLRLSCAASGNISYGVVMGWYRQAPGKEREFVAAITSVVIPYADSVKGRFTISRDNAKNTVYLQMNSLKPEDTAVYYCAVGYYLHPSYVYWGQGTQVTVSS

SEQ ID NO: 20096 - protein, 118 aa, Artificial Sequence
  Chemically Synthesized
QVQLQESGGGLVQAGGSLRLSCAASGSISAIKGMGWYRQAPGKEREFVATIDTGGTTNYADSVKGRFTISRDNAKNTVYLQMNSLKPEDTAVYYCAAGHDIAIVLYYWGQGTQVTVSS

SEQ ID NO: 20097 - protein, 126 aa, Artificial Sequence
  Chemically Synthesized
QVQLQESGGGLVQAGGSLRLSCAASGTIFASGIMGWYRQAPGKEREFVATISYGSSTYYADSVKGRFTISRDNAKNTVYLQMNSLKPEDTAVYYCAADYHDWYQGNDEFGTYYYYWGQGTQVTVSS

SEQ ID NO: 20098 - protein, 121 aa, Artificial Sequence
  Chemically Synthesized
QVQLQESGGGLVQAGGSLRLSCAASGSISHWDDMGWYRQAPGKEREFVATITDGSNTYYADSVKGRFTISRDNAKNTVYLQMNSLKPEDTAVYYCAVAYWYRARAGYSFYWGQGTQVTVSS

SEQ ID NO: 20099 - protein, 126 aa, Artificial Sequence
  Chemically Synthesized
QVQLQESGGGLVQAGGSLRLSCAASGTISYKYDMGWYRQAPGKEREFVAAIDRGANTNYADSVKGRFTISRDNAKNTVYLQMNSLKPEDTAVYYCAVPKPTIGGHLPYPYIDFAYWGQGTQVTVSS

SEQ ID NO: 20100 - protein, 126 aa, Artificial Sequence
  Chemically Synthesized
QVQLQESGGGLVQAGGSLRLSCAASGSISWYQGMGWYRQAPGKEREFVATIGNGSITYYADSVKGRFTISRDNAKNTVYLQMNSLKPEDTAVYYCAAGVGPWGNDDLYLSVVHLYWGQGTQVTVSS

SEQ ID NO: 20101 - protein, 116 aa, Artificial Sequence
  Chemically Synthesized
QVQLQESGGGLVQAGGSLRLSCAASGTIFLTYYMGWYRQAPGKEREFVASIGYGASTYYADSVKGRFTISRDNAKNTVYLQMNSLKPEDTAVYYCAVLVVTTVLYWGQGTQVTVSS

SEQ ID NO: 20102 - protein, 118 aa, Artificial Sequence
  Chemically Synthesized
QVQLQESGGGLVQAGGSLRLSCAASGSISTRVVMGWYRQAPGKEREFVAAIGDGATTYYADSVKGRFTISRDNAKNTVYLQMNSLKPEDTAVYYCAAYYWRYSWFPYWGQGTQVTVSS

SEQ ID NO: 20103 - protein, 118 aa, Artificial Sequence
  Chemically Synthesized
QVQLQESGGGLVQAGGSLRLSCAASGTIFSLQWMGWYRQAPGKEREFVAAIGDGSNTNYADSVKGRFTISRDNAKNTVYLQMNSLKPEDTAVYYCAAGGDAYASLYYWGQGTQVTVSS

SEQ ID NO: 20104 - protein, 118 aa, Artificial Sequence
  Chemically Synthesized
QVQLQESGGGLVQAGGSLRLSCAASGYISYRNDMGWYRQAPGKERELVASIGSGGTTNYADSVKGRFTISRDNAKNTVYLQMNSLKPEDTAVYYCAAYGSPFLYLVYWGQGTQVTVSS

SEQ ID NO: 20105 - protein, 118 aa, Artificial Sequence
  Chemically Synthesized
QVQLQESGGGLVQAGGSLRLSCAASGNISVAGAMGWYRQAPGKERELVAAISGGSITYYADSVKGRFTISRDNAKNTVYLQMNSLKPEDTAVYYCAAYYYAPYHFEYWGQGTQVTVSS

SEQ ID NO: 20106 - protein, 114 aa, Artificial Sequence
  Chemically Synthesized
QVQLQESGGGLVQAGGSLRLSCAASGTISYVSGMGWYRQAPGKERELVATNYYLYADSVKGRFTISRDNAKNTVYLQMNSLKPEDTAVYYCAANVDTAYYHYYWGQGTQVTVSS

SEQ ID NO: 20107 - protein, 121 aa, Artificial Sequence
  Chemically Synthesized
QVQLQESGGGLVQAGGSLRLSCAASGSIFGDSDMGWYRQAPGKERELLPLLIVVVLPYADSVKGRFTISRDNAKNTVYLQMNSLKPEDTAVYYCAAGVYVYTATDYDHGYWGQGTQVTVSS

SEQ ID NO: 20108 - protein, 117 aa, Artificial Sequence
  Chemically Synthesized
QVQLQESGGGLVQAGGSLRLSCAASGYIFTDAMGWYRQAPGKERELVAGIGGGTNTYYADSVKGRFTISRDNAKNTVYLQMNSLKPEDTAVYYCAVYTRAAGTSWYWGQGTQVTVSS

SEQ ID NO: 20109 - protein, 118 aa, Artificial Sequence
  Chemically Synthesized
QVQLQESGGGLVQAGGSLRLSCAASGSIFGYSEMGWYRQAPGKERELVAAIDYGGSTYYADSVKGRFTISRDNAKNTVYLQMNSLKPEDTAVYYCAAVGYGRAPFDYWGQGTQVTVSS

SEQ ID NO: 20110 - protein, 122 aa, Artificial Sequence
  Chemically Synthesized
QVQLQESGGGLVQAGGSLRLSCAASGYIFGAQNMGWYRQAPGKERELVATIGLGSTTNYADSVKGRFTISRDNAKNTVYLQMNSLKPEDTAVYYCAVYITVADGYPKVLYYWGQGTQVTVSS

SEQ ID NO: 20111 - protein, 121 aa, Artificial Sequence
  Chemically Synthesized
QVQLQESGGGLVQAGGSLRLSCAASGNISHDLRMGWYRQAPGKEREFVATIGEGGNTYYADSVKGRFTISRDNAKNTVYLQMNSLKPEDTAVYYCALVTLVTIRSTRRMYWGQGTQVTVSS

SEQ ID NO: 20112 - protein, 118 aa, Artificial Sequence
  Chemically Synthesized
QVQLQESGGGLVQAGGSLRLSCAASGTISVAYFMGWYRQAPGKEREFVATIDTGTITNYADSVKGRFTISRDNAKNTVYLQMNSLKPEDTAVYYCAASPYTDLSHVYWGQGTQVTVSS

SEQ ID NO: 20113 - protein, 118 aa, Artificial Sequence
  Chemically Synthesized
QVQLQESGGGLVQAGGSLRLSCAASGSIFSLPSMGWYRQAPGKEREFVAAISRGATTNYADSVKGRFTISRDNAKNTVYLQMNSLKPEDTAVYYCAVYWGRQYGHRYWGQGTQVTVSS

SEQ ID NO: 20114 - protein, 122 aa, Artificial Sequence
  Chemically Synthesized
QVQLQESGGGLVQAGGSLRLSCAASGNISDGYVMGWYRQAPGKERELVAAIGWGSTTYYADSVKGRFTISRDNAKNTVYLQMNSLKPEDTAVYYCAARRYPTQYGGVRHKYWGQGTQVTVSS

SEQ ID NO: 20115 - protein, 118 aa, Artificial Sequence
  Chemically Synthesized
QVQLQESGGGLVQAGGSLRLSCAASGNIFSGLYMGWYRQAPGKEREFVASISYGATTYYADSVKGRFTISRDNAKNTVYLQMNSLKPEDTAVYYCAVIYHGNQLYYYWGQGTQVTVSS

SEQ ID NO: 20116 - protein, 115 aa, Artificial Sequence
  Chemically Synthesized
QVQLQESGGGLVQAGGSLRLSCAASGTISRFVPMGWYRQAPGKEREFVAAISGGTNTNYADSVKGRFTISRDNAKNTVYLQMNSLKPEDTAVYYCAVYYTLQAYWGQGTQVTVSS

SEQ ID NO: 20117 - protein, 112 aa, Artificial Sequence
  Chemically Synthesized
QVQLQESGGGLVQAGGSLRLSCAASGTISYVDRMGWYRQAPGKERELVASITAGATTNYADSVKGRFTISRDNAKNTVYLQMNSLKPEDTAVYYCAVPLIYWGQGTQVTVSS

SEQ ID NO: 20118 - protein, 122 aa, Artificial Sequence
  Chemically Synthesized
QVQLQESGGGLVQAGGSLRLSCAASGTISPYYAMGWYRQAPGKERELVAAISYGGNTNYADSVKGRFTISRDNAKNTVYLQMNSLKPEDTAVYYCAVAAHSPPHKYDYHGYWGQGTQVTVSS

SEQ ID NO: 20119 - protein, 122 aa, Artificial Sequence
  Chemically Synthesized
QVQLQESGGGLVQAGGSLRLSCAASGNISPYGYMGWYRQAPGKEREFVAAIADGTSTYYADSVKGRFTISRDNAKNTVYLQMNSLKPEDTAVYYCAAYDYSYESAYDVFRYWGQGTQVTVSS

SEQ ID NO: 20120 - protein, 113 aa, Artificial Sequence
  Chemically Synthesized
QVQLQESGGGLVQAGGSLRLSCAASGNIFDVQVMGWYRQAPGKERELVAGIGYGGTTYYADSVKGRFTISRDNAKNTVYLQMNSLKPEDTAVYYCAAVYLPYWGQGTQVTVSS

SEQ ID NO: 20121 - protein, 126 aa, Artificial Sequence
  Chemically Synthesized
QVQLQESGGGLVQAGGSLRLSCAASGSISDRLDMGWYRQAPGKEREFVAAIGDGSNTYYADSVKGRFTISRDNAKNTVYLQMNSLKPEDTAVYYCAAPQSTPYGTADKRDYRYYYWGQGTQVTVSS

SEQ ID NO: 20122 - protein, 121 aa, Artificial Sequence
  Chemically Synthesized
QVQLQESGGGLVQAGGSLRLSCAASGYISKIYYMGWYRQAPGKEREFVASIVTVVVPYADSVKGRFTISRDNAKNTVYLQMNSLKPEDTAVYYCAVVDEQSGRSGVYYYYWGQGTQVTVSS

SEQ ID NO: 20123 - protein, 122 aa, Artificial Sequence
  Chemically Synthesized
QVQLQESGGGLVQAGGSLRLSCAASGNISFAGDMGWYRQAPGKERELVAAIDAGASTYYADSVKGRFTISRDNAKNTVYLQMNSLKPEDTAVYYCAALYYVLYYPRWRLSYWGQGTQVTVSS

SEQ ID NO: 20124 - protein, 118 aa, Artificial Sequence
  Chemically Synthesized
QVQLQESGGGLVQAGGSLRLSCAASGYISSTNYMGWYRQAPGKEREFVAGIGYGTSTYYADSVKGRFTISRDNAKNTVYLQMNSLKPEDTAVYYCAVFAVWTDLYDYWGQGTQVTVSS

SEQ ID NO: 20125 - protein, 118 aa, Artificial Sequence
  Chemically Synthesized
QVQLQESGGGLVQAGGSLRLSCAASGYIFLQYYMGWYRQAPGKEREFVAGISYGSITYYADSVKGRFTISRDNAKNTVYLQMNSLKPEDTAVYYCAVLQRYRQYHSYWGQGTQVTVSS

SEQ ID NO: 20126 - protein, 122 aa, Artificial Sequence
  Chemically Synthesized
QVQLQESGGGLVQAGGSLRLSCAASGNIFDPDVMGWYRQAPGKEREFVASINDGTSTYYADSVKGRFTISRDNAKNTVYLQMNSLKPEDTAVYYCAVPYDSLLVTVLSTIYWGQGTQVTVSS

SEQ ID NO: 20127 - protein, 118 aa, Artificial Sequence
  Chemically Synthesized
QVQLQESGGGLVQAGGSLRLSCAASGYISRDDYMGWYRQAPGKEREFVAGINGGTSTNYADSVKGRFTISRDNAKNTVYLQMNSLKPEDTAVYYCAVSWEICWSVSYWGQGTQVTVSS

SEQ ID NO: 20128 - protein, 118 aa, Artificial Sequence
  Chemically Synthesized
QVQLQESGGGLVQAGGSLRLSCAASGNISPTFYMGWYRQAPGKEREFVAAITRGGNTYYADSVKGRFTISRDNAKNTVYLQMNSLKPEDTAVYYCAANDSSYYGLGYWGQGTQVTVSS

SEQ ID NO: 20129 - protein, 117 aa, Artificial Sequence
  Chemically Synthesized
QVQLQESGGGLVQAGGSLRLSCAASGTISAYSAMGWYRQAPGKEREFVAAINSVLIPYADSVKGRFTISRDNAKNTVYLQMNSLKPEDTAVYYCAVAGDYEDRYYYWGQGTQVTVSS

SEQ ID NO: 20130 - protein, 119 aa, Artificial Sequence
  Chemically Synthesized
QVQLQESGGGLVQAGGSLRLSCAASGNISVTQLYMGWYRQAPGKEREFVAGITSGASTYYADSVKGRFTISRDNAKNTVYLQMNSLKPEDTAVYYCAAHDFTHSELDYWGQGTQVTVSS

SEQ ID NO: 20131 - protein, 125 aa, Artificial Sequence
  Chemically Synthesized
QVQLQESGGGLVQAGGSLRLSCAASGNISGYRLMGWYRQAPGKERELVASIHGGTTNYADSVKGRFTISRDNAKNTVYLQMNSLKPEDTAVYYCAVSDYNKKGIWVTERTFYQYWGQGTQVTVSS

SEQ ID NO: 20132 - protein, 126 aa, Artificial Sequence
  Chemically Synthesized
QVQLQESGGGLVQAGGSLRLSCAASGNIFSYASMGWYRQAPGKEREFVASIGDGTITNYADSVKGRFTISRDNAKNTVYLQMNSLKPEDTAVYYCAVRHAIRAGFAALYREEHIYWGQGTQVTVSS

SEQ ID NO: 20133 - protein, 117 aa, Artificial Sequence
  Chemically Synthesized
QVQLQESGGGLVQAGGSLRLSCAASGSISRNSYMGWYRQAPGKEREFVAAINYGGTTNYADSVKGRFTISRDNAKNTVYLQMNSLKPEDTAVYYCAVSAKSLVTMYWGQGTQVTVSS

SEQ ID NO: 20134 - protein, 118 aa, Artificial Sequence
  Chemically Synthesized
QVQLQESGGGLVQAGGSLRLSCAASGNISRDYYMGWYRQAPGKERELVAGIDVGTITYYADSVKGRFTISRDNAKNTVYLQMNSLKPEDTAVYYCAVLHRYTQLYDYWGQGTQVTVSS

SEQ ID NO: 20135 - protein, 118 aa, Artificial Sequence
  Chemically Synthesized
QVQLQESGGGLVQAGGSLRLSCAASGSISYVYSMGWYRQAPGKERELVASISRGGTTYYADSVKGRFTISRDNAKNTVYLQMNSLKPEDTAVYYCAVWRTRWHWFQYWGQGTQVTVSS

SEQ ID NO: 20136 - protein, 125 aa, Artificial Sequence
  Chemically Synthesized
QVQLQESGGGLVQAGGSLRLSCAASGTISDRGYMGWYRQAPGKEREFVAAIDWVVIPYADSVKGRFTISRDNAKNTVYLQMNSLKPEDTAVYYCAARGDPYHVRGQPVVNLHEYWGQGTQVTVSS

SEQ ID NO: 20137 - protein, 126 aa, Artificial Sequence
  Chemically Synthesized
QVQLQESGGGLVQAGGSLRLSCAASGTIFRLISMGWYRQAPGKERELVAGISDGATTYYADSVKGRFTISRDNAKNTVYLQMNSLKPEDTAVYYCAARADYWPYYVLDYFSDYAYWGQGTQVTVSS

SEQ ID NO: 20138 - protein, 117 aa, Artificial Sequence
  Chemically Synthesized
QVQLQESGGGLVQAGGSLRLSCAASGSIFVWLMGWYRQAPGKEREFVASIDYGGSTYYADSVKGRFTISRDNAKNTVYLQMNSLKPEDTAVYYCAAVGHRPYDLLYWGQGTQVTVSS

SEQ ID NO: 20139 - protein, 118 aa, Artificial Sequence
  Chemically Synthesized
QVQLQESGGGLVQAGGSLRLSCAASGSISPVTLMGWYRQAPGKEREFVAGIGYGGNTYYADSVKGRFTISRDNAKNTVYLQMNSLKPEDTAVYYCAAFDYVQVDLDYWGQGTQVTVSS

SEQ ID NO: 20140 - protein, 115 aa, Artificial Sequence
  Chemically Synthesized
QVQLQESGGGLVQAGGSLRLSCAASGSIFVTYRMGWYRQAPGKERELVATINPGGSTYYADSVKGRFTISRDNAKNTVYLQMNSLKPEDTAVYYCAAHYTDSLYWGQGTQVTVSS

SEQ ID NO: 20141 - protein, 118 aa, Artificial Sequence
  Chemically Synthesized
QVQLQESGGGLVQAGGSLRLSCAASGNISVTSAMGWYRQAPGKERELVASITRGGSTNYADSVKGRFTISRDNAKNTVYLQMNSLKPEDTAVYYCAVYSIDYDPHVYWGQGTQVTVSS

SEQ ID NO: 20142 - protein, 126 aa, Artificial Sequence
  Chemically Synthesized
QVQLQESGGGLVQAGGSLRLSCAASGTISASTDMGWYRQAPGKERELVAGIAVGATTNYADSVKGRFTISRDNAKNTVYLQMNSLKPEDTAVYYCAVGEYLRYELRDSTWDLHDYWGQGTQVTVSS

SEQ ID NO: 20143 - protein, 118 aa, Artificial Sequence
  Chemically Synthesized
QVQLQESGGGLVQAGGSLRLSCAASGYISYATSMGWYRQAPGKEREFVAGITAGSNTYYADSVKGRFTISRDNAKNTVYLQMNSLKPEDTAVYYCAADTYRAGYHRYWGQGTQVTVSS

SEQ ID NO: 20144 - protein, 122 aa, Artificial Sequence
  Chemically Synthesized
QVQLQESGGGLVQAGGSLRLSCAASGSIFDGIVMGWYRQAPGKEREFVASITYGAITYYADSVKGRFTISRDNAKNTVYLQMNSLKPEDTAVYYCAVGDYVWDDAIRVLGYWGQGTQVTVSS

SEQ ID NO: 20145 - protein, 118 aa, Artificial Sequence
  Chemically Synthesized
QVQLQESGGGLVQAGGSLRLSCAASGYISTYRVMGWYRQAPGKEREFVAGITGGSNTNYADSVKGRFTISRDNAKNTVYLQMNSLKPEDTAVYYCAVVRGIRLYHFYWGQGTQVTVSS

SEQ ID NO: 20146 - protein, 122 aa, Artificial Sequence
  Chemically Synthesized
QVQLQESGGGLVQAGGSLRLSCAASGTIFVPDVMGWYRQAPGKEREFVAGIGYGANTNYADSVKGRFTISRDNAKNTVYLQMNSLKPEDTAVYYCAALVTPDNTPDIVHVYWGQGTQVTVSS

SEQ ID NO: 20147 - protein, 122 aa, Artificial Sequence
  Chemically Synthesized
QVQLQESGGGLVQAGGSLRLSCAASGNIFTGYIMGWYRQAPGKERELVAAITPGANTYYADSVKGRFTISRDNAKNTVYLQMNSLKPEDTAVYYCAAYTPEPDDENNYHLYWGQGTQVTVSS

SEQ ID NO: 20148 - protein, 122 aa, Artificial Sequence
  Chemically Synthesized
QVQLQESGGGLVQAGGSLRLSCAASGNISGRWYMGWYRQAPGKEREFVASITHGGTTYYADSVKGRFTISRDNAKNTVYLQMNSLKPEDTAVYYCAVYDSTADKDVGDHAYWGQGTQVTVSS

SEQ ID NO: 20149 - protein, 118 aa, Artificial Sequence
  Chemically Synthesized
QVQLQESGGGLVQAGGSLRLSCAASGTISLDWLMGWYRQAPGKERELVAGITPGTSTYYADSVKGRFTISRDNAKNTVYLQMNSLKPEDTAVYYCAAHSYPNAGHNYWGQGTQVTVSS

SEQ ID NO: 20150 - protein, 117 aa, Artificial Sequence
  Chemically Synthesized
QVQLQESGGGLVQAGGSLRLSCAASGNISTYYGMGWYRQAPGKEREFVAAIAYGGNTNYADSVKGRFTISRDNAKNTVYLQMNSLKPEDTAVYYCAAQDHYDATFYWGQGTQVTVSS

SEQ ID NO: 20151 - protein, 120 aa, Artificial Sequence
  Chemically Synthesized
QVQLQESGGGLVQAGGSLRLSCAASGYISRASGMGWYRQAPGKEREFVAGIAHGGNTYYADSVKGRFTISRDNAKNTVYLQMNSLKPEDTAVYYCAVVSYQYFYAGYRYWGQGTQVTVSS

SEQ ID NO: 20152 - protein, 118 aa, Artificial Sequence
  Chemically Synthesized
QVQLQESGGGLVQAGGSLRLSCAASGSIFAYYSMGWYRQAPGKEREFVAAIGRGATTNYADSVKGRFTISRDNAKNTVYLQMNSLKPEDTAVYYCAVNTDYYVWHGYWGQGTQVTVSS

SEQ ID NO: 20153 - protein, 125 aa, Artificial Sequence
  Chemically Synthesized
QVQLQESGGGLVQAGGSLRLSCAASGYISNDLTMGWYRQAPGKEREFVAGISRGGNTNYADSVKGRFTISRDNAKNTVYLQMNSLKPEDTAVYYCAALTRDYYSGDTYYEGFLYWGQGTQVTVSS

SEQ ID NO: 20154 - protein, 119 aa, Artificial Sequence
  Chemically Synthesized
QVQLQESGGGLVQAGGSLRLSCAASGNISGYGYMGWYRQAPGKEREFVAGINGGSITYYADSVKGRFTISRDNAKNTVYLQMNSLKPEDTAVYYCAADDYDNVTSHYYWGQGTQVTVSS

SEQ ID NO: 20155 - protein, 121 aa, Artificial Sequence
  Chemically Synthesized
QVQLQESGGGLVQAGGSLRLSCAASGLFLFTLMGWYRQAPGKEREFVAGIGTGTTTNYADSVKGRFTISRDNAKNTVYLQMNSLKPEDTAVYYCAVDSSELGTGYNGHDYWGQGTQVTVSS

SEQ ID NO: 20156 - protein, 126 aa, Artificial Sequence
  Chemically Synthesized
QVQLQESGGGLVQAGGSLRLSCAASGYISVAPAMGWYRQAPGKERELVATIAYGSTTYYADSVKGRFTISRDNAKNTVYLQMNSLKPEDTAVYYCAVALTGRARRWSTSGVNFLYWGQGTQVTVSS

SEQ ID NO: 20157 - protein, 119 aa, Artificial Sequence
  Chemically Synthesized
QVQLQESGGGLVQAGGSLRLSCAASGNISAYPNMGWYRQAPGKEREFVASISSGGSTNYADSVKGRFTISRDNAKNTVYLQMNSLKPEDTAVYYCAVSNSEYNKQYDYWGQGTQVTVSS

SEQ ID NO: 20158 - protein, 126 aa, Artificial Sequence
  Chemically Synthesized
QVQLQESGGGLVQAGGSLRLSCAASGYIFPRAAMGWYRQAPGKERELVASISLGTSTYYADSVKGRFTISRDNAKNTVYLQMNSLKPEDTAVYYCAAYYAYSDGQRENYWSYLLYWGQGTQVTVSS

SEQ ID NO: 20159 - protein, 121 aa, Artificial Sequence
  Chemically Synthesized
QVQLQESGGGLVQAGGSLRLSCAASGNISSGYQMGWYRQAPGKEREFVASIAEGATTNYADSVKGRFTISRDNAKNTVYLQMNSLKPEDTAVYYCAVRDGGYDTSTGSIYWGQGTQVTVSS

SEQ ID NO: 20160 - protein, 118 aa, Artificial Sequence
  Chemically Synthesized
QVQLQESGGGLVQAGGSLRLSCAASGYIFIYGRMGWYRQAPGKERELVAAIDTGASTNYADSVKGRFTISRDNAKNTVYLQMNSLKPEDTAVYYCAARTADAHNFQYWGQGTQVTVSS

SEQ ID NO: 20161 - protein, 122 aa, Artificial Sequence
  Chemically Synthesized
QVQLQESGGGLVQAGGSLRLSCAASGTISFVSYMGWYRQAPGKEREFVAGITEGASTYYADSVKGRFTISRDNAKNTVYLQMNSLKPEDTAVYYCAVYVFQTYQLNDPYTYWGQGTQVTVSS

SEQ ID NO: 20162 - protein, 123 aa, Artificial Sequence
  Chemically Synthesized
QVQLQESGGGLVQAGGSLRLSCAASGTISLRYNMGWYRQAPGKERELVATISNGANTYYADSVKGRFTISRDNAKNTVYLQMNSLKPEDTAVYYCAADGLEPRYGVGAVHDYWGQGTQVTVSS

SEQ ID NO: 20163 - protein, 120 aa, Artificial Sequence
  Chemically Synthesized
QVQLQESGGGLVQAGGSLRLSCAASGSIFVTNYMGWYRQAPGKEREFVASISVGTSTNYADSVKGRFTISRDNAKNTVYLQMNSLKPEDTAVYYCAVRQADSLSESGIYWGQGTQVTVSS

SEQ ID NO: 20164 - protein, 118 aa, Artificial Sequence
  Chemically Synthesized
QVQLQESGGGLVQAGGSLRLSCAASGTISYPRAMGWYRQAPGKERELVATITKGGTTYYADSVKGRFTISRDNAKNTVYLQMNSLKPEDTAVYYCAVDFRFFPRFAYWGQGTQVTVSS

SEQ ID NO: 20165 - protein, 126 aa, Artificial Sequence
  Chemically Synthesized
QVQLQESGGGLVQAGGSLRLSCAASGTISDGVTMGWYRQAPGKERELVAAITDGDYYLYADSVKGRFTISRDNAKNTVYLQMNSLKPEDTAVYYCAAYTQGDGLIDYGDADWLFYWGQGTQVTVSS

SEQ ID NO: 20166 - protein, 118 aa, Artificial Sequence
  Chemically Synthesized
QVQLQESGGGLVQAGGSLRLSCAASGSIFGTYYMGWYRQAPGKERELVAGITYGSITNYADSVKGRFTISRDNAKNTVYLQMNSLKPEDTAVYYCAVYVYGYVGHTYWGQGTQVTVSS

SEQ ID NO: 20167 - protein, 118 aa, Artificial Sequence
  Chemically Synthesized
QVQLQESGGGLVQAGGSLRLSCAASGSISAYDTMGWYRQAPGKEREFVAGIDFGGNTNYADSVKGRFTISRDNAKNTVYLQMNSLKPEDTAVYYCAVRTEISDYLLYWGQGTQVTVSS

SEQ ID NO: 20168 - protein, 121 aa, Artificial Sequence
  Chemically Synthesized
QVQLQESGGGLVQAGGSLRLSCAASGTISTVLMGWYRQAPGKEREFVATINVGTTTYYADSVKGRFTISRDNAKNTVYLQMNSLKPEDTAVYYCAAGYQAYTYYYASYDYWGQGTQVTVSS

SEQ ID NO: 20169 - protein, 118 aa, Artificial Sequence
  Chemically Synthesized
QVQLQESGGGLVQAGGSLRLSCAASGSIFPVWYMGWYRQAPGKEREFVASIAFGSITNYADSVKGRFTISRDNAKNTVYLQMNSLKPEDTAVYYCAADSWDYDYYRYWGQGTQVTVSS

SEQ ID NO: 20170 - protein, 126 aa, Artificial Sequence
  Chemically Synthesized
QVQLQESGGGLVQAGGSLRLSCAASGTISDYHRMGWYRQAPGKERELVATIGVGGTTNYADSVKGRFTISRDNAKNTVYLQMNSLKPEDTAVYYCAVYFARYPYHWNNDNLPHDYWGQGTQVTVSS

SEQ ID NO: 20171 - protein, 126 aa, Artificial Sequence
  Chemically Synthesized
QVQLQESGGGLVQAGGSLRLSCAASGNIFLFIDMGWYRQAPGKERELVAAITVGGNTYYADSVKGRFTISRDNAKNTVYLQMNSLKPEDTAVYYCAALREKEQTGRYYPPDAHLYWGQGTQVTVSS

SEQ ID NO: 20172 - protein, 121 aa, Artificial Sequence
  Chemically Synthesized
QVQLQESGGGLVQAGGSLRLSCAASGYIFYRGYMGWYRQAPGKEREFVAAIGSVVIPYADSVKGRFTISRDNAKNTVYLQMNSLKPEDTAVYYCAADLYDSVYVLKAHGYWGQGTQVTVSS

SEQ ID NO: 20173 - protein, 123 aa, Artificial Sequence
  Chemically Synthesized
QVQLQESGGGLVQAGGSLRLSCAASGTIFYPQVMGWYRQAPGKEREFVASIAYGSTTYYADSVKGRFTISRDNAKNTVYLQMNSLKPEDTAVYYCAAQYWWDWDGYYGTYLYWGQGTQVTVSS

SEQ ID NO: 20174 - protein, 118 aa, Artificial Sequence
  Chemically Synthesized
QVQLQESGGGLVQAGGSLRLSCAASGSISGTWYMGWYRQAPGKEREPVATIGAGASTNYADSVKGRFTISRDNAKNTVYLQMNSLKPEDTAVYYCAAVSLSAYSHQYWGQGTQVTVSS

SEQ ID NO: 20175 - protein, 118 aa, Artificial Sequence
  Chemically Synthesized
QVQLQESGGGLVQAGGSLRLSCAASGNISLYVYMGWYRQAPGKEREFVAGISDGASTYYADSVKGRFTISRDNAKNTVYLQMNSLKPEDTAVYYCAAFYLYDRDHDYWGQGTQVTVSS

SEQ ID NO: 20176 - protein, 121 aa, Artificial Sequence
  Chemically Synthesized
QVQLQESGGGLVQAGGSLRLSCAASGTIFFSTMGWYRQAPGKERELVATINDGSNTYYADSVKGRFTISRDNAKNTVYLQMNSLKPEDTAVYYCAADYDDSGTARVDYYYWGQGTQVTVSS

SEQ ID NO: 20177 - protein, 127 aa, Artificial Sequence
  Chemically Synthesized
QVQLQESGGGLVQAGGSLRLSCAASGNISRAGDMGWYRQAPGKERELVATISYGTNTNYADSVKGRFTISRDNAKNTVYLQMNSLKPEDTAVYYCAVYYDVTVYDDYTLGLIDFGYWGQGTQVTVSS

SEQ ID NO: 20178 - protein, 118 aa, Artificial Sequence
  Chemically Synthesized
QVQLQESGGGLVQAGGSLRLSCAASGTIFDYDDMGWYRQAPGKERELVAAISYGSNTNYADSVKGRFTISRDNAKNTVYLQMNSLKPEDTAVYYCAVQPVPSVGHSYWGQGTQVTVSS

SEQ ID NO: 20179 - protein, 125 aa, Artificial Sequence
  Chemically Synthesized
QVQLQESGGGLVQAGGSLRLSCAASGSISPLYMGWYRQAPGKEREFVAAIDDGTNTNYADSVKGRFTISRDNAKNTVYLQMNSLKPEDTAVYYCAAWRSYPFQVRHRPVSGYRYWGQGTQVTVSS

SEQ ID NO: 20180 - protein, 118 aa, Artificial Sequence
  Chemically Synthesized
QVQLQESGGGLVQAGGSLRLSCAASGNISGDYNMGWYRQAPGKEREFVAGIAGGASTYYADSVKGRFTISRDNAKNTVYLQMNSLKPEDTAVYYCAAHDASSARYDYWGQGTQVTVSS

SEQ ID NO: 20181 - protein, 122 aa, Artificial Sequence
  Chemically Synthesized
QVQLQESGGGLVQAGGSLRLSCAASGYISYPYYMGWYRQAPGKERELVAGIGIGANTNYADSVKGRFTISRDNAKNTVYLQMNSLKPEDTAVYYCAAYDHRDQPKDDEYAYWGQGTQVTVSS

SEQ ID NO: 20182 - protein, 121 aa, Artificial Sequence
  Chemically Synthesized
QVQLQESGGGLVQAGGSLRLSCAASGTISDPGDMGWYRQAPGKEREFVATIDYGTITYYADSVKGRFTISRDNAKNTVYLQMNSLKPEDTAVYYCAAVYYIYSFWSTTLYWGQGTQVTVSS

SEQ ID NO: 20183 - protein, 124 aa, Artificial Sequence
  Chemically Synthesized
QVQLQESGGGLVQAGGSLRLSCAASGYIFTTMGWYRQAPGKEREFVATIDIGGTTNYADSVKGRFTISRDNAKNTVYLQMNSLKPEDTAVYYCAVWLQYGEYSIAYSVLLHDYWGQGTQVTVSS

SEQ ID NO: 20184 - protein, 122 aa, Artificial Sequence
  Chemically Synthesized
QVQLQESGGGLVQAGGSLRLSCAASGSISRALYMGWYRQAPGKEREFVASINLGSTTYYADSVKGRFTISRDNAKNTVYLQMNSLKPEDTAVYYCAAYTRDGLFQDGGLYYWGQGTQVTVSS

SEQ ID NO: 20185 - protein, 118 aa, Artificial Sequence
  Chemically Synthesized
QVQLQESGGGLVQAGGSLRLSCAASGYIFYVYAMGWYRQAPGKEREFVASIGTGANTYYADSVKGRFTISRDNAKNTVYLQMNSLKPEDTAVYYCAAASYYPLWHIYWGQGTQVTVSS

SEQ ID NO: 20186 - protein, 122 aa, Artificial Sequence
  Chemically Synthesized
QVQLQESGGGLVQAGGSLRLSCAASGSIFRYGFMGWYRQAPGKERELVAGISLGSNTNYADSVKGRFTISRDNAKNTVYLQMNSLKPEDTAVYYCAVTQHDAIEDIVPYQYWGQGTQVTVSS

SEQ ID NO: 20187 - protein, 122 aa, Artificial Sequence
  Chemically Synthesized
QVQLQESGGGLVQAGGSLRLSCAASGSISFWVFMGWYRQAPGKEREFVAGIDYGTNTNYADSVKGRFTISRDNAKNTVYLQMNSLKPEDTAVYYCAVRGYLSNYYLVTHLYWGQGTQVTVSS

SEQ ID NO: 20188 - protein, 120 aa, Artificial Sequence
  Chemically Synthesized
QVQLQESGGGLVQAGGSLRLSCAASGSISLRWKMGWYRQAPGKEREFVAAIDTGASTNYADSVKGRFTISRDNAKNTVYLQMNSLKPEDTAVYYCAAPLSWQDYYDYAYWGQGTQVTVSS

SEQ ID NO: 20189 - protein, 124 aa, Artificial Sequence
  Chemically Synthesized
QVQLQESGGGLVQAGGSLRLSCAASGYIFRYDPMGWYRQAPGKERELVASIVWVVVPYADSVKGRFTISRDNAKNTVYLQMNSLKPEDTAVYYCAAYYWENTLSTVTLVTVIYWGQGTQVTVSS

SEQ ID NO: 20190 - protein, 121 aa, Artificial Sequence
  Chemically Synthesized
QVQLQESGGGLVQAGGSLRLSCAASGNIFGYYRMGWYRQAPGKERELVATIGVGATTNYADSVKGRFTISRDNAKNTVYLQMNSLKPEDTAVYYCAASTNSDDYTTTTLYWGQGTQVTVSS

SEQ ID NO: 20191 - protein, 117 aa, Artificial Sequence
  Chemically Synthesized
QVQLQESGGGLVQAGGSLRLSCAASGSISDYYVMGWYRQAPGKERELVAGIDYGGSTYYADSVKGRFTISRDNAKNTVYLQMNSLKPEDTAVYYCAVYGFHYDLDYWGQGTQVTVSS

SEQ ID NO: 20192 - protein, 114 aa, Artificial Sequence
  Chemically Synthesized
QVQLQESGGGLVQAGGSLRLSCAASGNIFPAFVMGWYRQAPGKEREFVAGIGPGTNTNYADSVKGRFTISRDNAKNTVYLQMNSLKPEDTAVYYCAVYYDLGYWGQGTQVTVSS

SEQ ID NO: 20193 - protein, 117 aa, Artificial Sequence
  Chemically Synthesized
QVQLQESGGGLVQAGGSLRLSCAASGTISVFSWMGWYRQAPGKEREFVAGISTGTITYYADSVKGRFTISRDNAKNTVYLQMNSLKPEDTAVYYCAADSVTTLSMYWGQGTQVTVSS

SEQ ID NO: 20194 - protein, 118 aa, Artificial Sequence
  Chemically Synthesized
QVQLQESGGGLVQAGGSLRLSCAASGTIFSRRYMGWYRQAPGKEREFVAAIDPGATTNYADSVKGRFTISRDNAKNTVYLQMNSLKPEDTAVYYCAVAYRIRYRHRYWGQGTQVTVSS

SEQ ID NO: 20195 - protein, 122 aa, Artificial Sequence
  Chemically Synthesized
QVQLQESGGGLVQAGGSLRLSCAASGTIFSRTSMGWYRQAPGKERELVAAINTGGTTYYADSVKGRFTISRDNAKNTVYLQMNSLKPEDTAVYYCAAIYTGWYRPSRIHRYWGQGTQVTVSS

SEQ ID NO: 20196 - protein, 118 aa, Artificial Sequence
  Chemically Synthesized
QVQLQESGGGLVQAGGSLRLSCAASGNIFEQRYMGWYRQAPGKEREFVATIASGTSTYYADSVKGRFTISRDNAKNTVYLQMNSLKPEDTAVYYCAVGWRGDSLFTYWGQGTQVTVSS

SEQ ID NO: 20197 - protein, 116 aa, Artificial Sequence
  Chemically Synthesized
QVQLQESGGGLVQAGGSLRLSCAASGYIFVYSMGWYRQAPGKERELVATITDGTTTNYADSVKGRFTISRDNAKNTVYLQMNSLKPEDTAVYYCAVRYFRYPHYYWGQGTQVTVSS

SEQ ID NO: 20198 - protein, 118 aa, Artificial Sequence
  Chemically Synthesized
QVQLQESGGGLVQAGGSLRLSCAASGNISPLDTMGWYRQAPGKERELVAGISDGGITNYADSVKGRFTISRDNAKNTVYLQMNSLKPEDTAVYYCAVDRRDLYPHLYWGQGTQVTVSS

SEQ ID NO: 20199 - protein, 121 aa, Artificial Sequence
  Chemically Synthesized
QVQLQESGGGLVQAGGSLRLSCAASGLFLTTLMGWYRQAPGKERELVASIDDGGTTNYADSVKGRFTISRDNAKNTVYLQMNSLKPEDTAVYYCAAGYKEDTPLGTYHDYWGQGTQVTVSS

SEQ ID NO: 20200 - protein, 117 aa, Artificial Sequence
  Chemically Synthesized
QVQLQESGGGLVQAGGSLRLSCAASGNIFSRKYMGWYRQAPGKERELVGTNTNYADSVKGRFTISRDNAKNTVYLQMNSLKPEDTAVYYCAVPDYQLRTPWYYHEYWGQGTQVTVSS

SEQ ID NO: 20201 - protein, 117 aa, Artificial Sequence
  Chemically Synthesized
QVQLQESGGGLVQAGGSLRLSCAASGTISQESMGWYRQAPGKERELVASIGYGASTNYADSVKGRFTISRDNAKNTVYLQMNSLKPEDTAVYYCAAVPYYAITHYYWGQGTQVTVSS

SEQ ID NO: 20202 - protein, 122 aa, Artificial Sequence
  Chemically Synthesized
QVQLQESGGGLVQAGGSLRLSCAASGYIFAYVGMGWYRQAPGKEREFVAAISYGANTNYADSVKGRFTISRDNAKNTVYLQMNSLKPEDTAVYYCAVWHSWTGRYDASYQYWGQGTQVTVSS

SEQ ID NO: 20203 - protein, 126 aa, Artificial Sequence
  Chemically Synthesized
QVQLQESGGGLVQAGGSLRLSCAASGTIFDALRMGWYRQAPGKEREFVAAIGIGGTTYYADSVKGRFTISRDNAKNTVYLQMNSLKPEDTAVYYCAVDVGGQFDDDIYASAQYYYWGQGTQVTVSS

SEQ ID NO: 20204 - protein, 118 aa, Artificial Sequence
  Chemically Synthesized
QVQLQESGGGLVQAGGSLRLSCAASGTISRRYSMGWYRQAPGKEREFVAGIAAGSSTYYADSVKGRFTISRDNAKNTVYLQMNSLKPEDTAVYYCAVLWGGPYLHYYWGQGTQVTVSS

SEQ ID NO: 20205 - protein, 118 aa, Artificial Sequence
  Chemically Synthesized
QVQLQESGGGLVQAGGSLRLSCAASGSISYYYLMGWYRQAPGKEREFVAGIDYGTNTYYADSVKGRFTISRDNAKNTVYLQMNSLKPEDTAVYYCAAYGYWDVTLDYWGQGTQVTVSS

SEQ ID NO: 20206 - protein, 118 aa, Artificial Sequence
  Chemically Synthesized
QVQLQESGGGLVQAGGSLRLSCAASGYISAYYSMGWYRQAPGKEREFVAGISWGTTTYYADSVKGRFTISRDNAKNTVYLQMNSLKPEDTAVYYCAVLYSYDVYHDYWGQGTQVTVSS

SEQ ID NO: 20207 - protein, 118 aa, Artificial Sequence
  Chemically Synthesized
QVQLQESGGGLVQAGGSLRLSCAASGSISYDLYMGWYRQAPGKEREFVAGIAPGGTTYYADSVKGRFTISRDNAKNTVYLQMNSLKPEDTAVYYCAVGYDDIYLHQYWGQGTQVTVSS

SEQ ID NO: 20208 - protein, 118 aa, Artificial Sequence
  Chemically Synthesized
QVQLQESGGGLVQAGGSLRLSCAASGTISGYVAMGWYRQAPGKEREFVASIALGSNTYYADSVKGRFTISRDNAKNTVYLQMNSLKPEDTAVYYCAVNYILTPSLGYWGQGTQVTVSS

SEQ ID NO: 20209 - protein, 121 aa, Artificial Sequence
  Chemically Synthesized
QVQLQESGGGLVQAGGSLRLSCAASGYISPRRVMGWYRQAPGKEREFVATIGRGGSTNYADSVKGRFTISRDNAKNTVYLQMNSLKPEDTAVYYCAVVIYVRKDVYYLDYWGQGTQVTVSS

SEQ ID NO: 20210 - protein, 117 aa, Artificial Sequence
  Chemically Synthesized
QVQLQESGGGLVQAGGSLRLSCAASGTFFTSLMGWYRQAPGKERELVATISQGASTNYADSVKGRFTISRDNAKNTVYLQMNSLKPEDTAVYYCAARTPYGRSHYYWGQGTQVTVSS

SEQ ID NO: 20211 - protein, 117 aa, Artificial Sequence
  Chemically Synthesized
QVQLQESGGGLVQAGGSLRLSCAASGSISTDYMGWYRQAPGKERELVATIDGGANTYYADSVKGRFTISRDNAKNTVYLQMNSLKPEDTAVYYCAVGNYGYIYHSYWGQGTQVTVSS

SEQ ID NO: 20212 - protein, 118 aa, Artificial Sequence
  Chemically Synthesized
QVQLQESGGGLVQAGGSLRLSCAASGNISPSFNMGWYRQAPGKEREFVAGIDWGANTYYADSVKGRFTISRDNAKNTVYLQMNSLKPEDTAVYYCAQHSNRGADYDYWGQGTQVTVSS

SEQ ID NO: 20213 - protein, 118 aa, Artificial Sequence
  Chemically Synthesized
QVQLQESGGGLVQAGGSLRLSCAASGTIFVPWDMGWYRQAPGKEREFVATIGPGAITNYADSVKGRFTISRDNAKNTVYLQMNSLKPEDTAVYYCAVQYYYWQTHRYWGQGTQVTVSS

SEQ ID NO: 20214 - protein, 122 aa, Artificial Sequence
  Chemically Synthesized
QVQLQESGGGLVQAGGSLRLSCAASGSISQYLYMGWYRQAPGKERELVASIAAGTTTYYADSVKGRFTISRDNAKNTVYLQMNSLKPEDTAVYYCAAQYSIIRKFYYYHRYWGQGTQVTVSS

SEQ ID NO: 20215 - protein, 117 aa, Artificial Sequence
  Chemically Synthesized
QVQLQESGGGLVQAGGSLRLSCAASGNIFVPTAMGWYRQAPGKERELVATIDTGGNTYYADSVKGRFTISRDNAKNTVYLQMNSLKPEDTAVYYCAVVYDAGDHLYWGQGTQVTVSS

SEQ ID NO: 20216 - protein, 121 aa, Artificial Sequence
  Chemically Synthesized
QVQLQESGGGLVQAGGSLRLSCAASGSISPPTMGWYRQAPGKERELVASITYGSTTNYADSVKGRFTISRDNAKNTVYLQMNSLKPEDTAVYYCAVLYDDEYGDGYGHFYWGQGTQVTVSS

SEQ ID NO: 20217 - protein, 117 aa, Artificial Sequence
  Chemically Synthesized
QVQLQESGGGLVQAGGSLRLSCAASGSISGFVLMGWYRQAPGKEREFVASIAYGGSTNYADSVKGRFTISRDNAKNTVYLQMNSLKPEDTAVYYCAATSLTLNGMYWGQGTQVTVSS

SEQ ID NO: 20218 - protein, 122 aa, Artificial Sequence
  Chemically Synthesized
QVQLQESGGGLVQAGGSLRLSCAASGSIFVTSDMGWYRQAPGKEREFVAAITDGTNTYYADSVKGRFTISRDNAKNTVYLQMNSLKPEDTAVYYCAVDFTFYDYDERYYHYWGQGTQVTVSS

SEQ ID NO: 20219 - protein, 118 aa, Artificial Sequence
  Chemically Synthesized
QVQLQESGGGLVQAGGSLRLSCAASGTISYRSPMGWYRQAPGKERELVAGITWGGNTNYADSVKGRFTISRDNAKNTVYLQMNSLKPEDTAVYYCAVRPDQYTPLAYWGQGTQVTVSS

SEQ ID NO: 20220 - protein, 126 aa, Artificial Sequence
  Chemically Synthesized
QVQLQESGGGLVQAGGSLRLSCAASGTISRKQVMGWYRQAPGKERELVATISRGANTYYADSVKGRFTISRDNAKNTVYLQMNSLKPEDTAVYYCAARYLIRTSGGYLYRNRLGYWGQGTQVTVSS

SEQ ID NO: 20221 - protein, 119 aa, Artificial Sequence
  Chemically Synthesized
QVQLQESGGGLVQAGGSLRLSCAASGNISADIVMGWYRQAPGKEREFVAGIAVFGANTYYADSVKGRFTISRDNAKNTVYLQMNSLKPEDTAVYYCAAAEWPSGYFDYWGQGTQVTVSS

SEQ ID NO: 20222 - protein, 125 aa, Artificial Sequence
  Chemically Synthesized
QVQLQESGGGLVQAGGSLRLSCAASGNISHRVPMGWYRQAPGKEREFVAAIDYGGTTNYADSVKGRFTISRDNAKNTVYLQMNSLKPEDTAVYYCAANGPWFQGLTAGDVYFPYWGQGTQVTVSS

SEQ ID NO: 20223 - protein, 122 aa, Artificial Sequence
  Chemically Synthesized
QVQLQESGGGLVQAGGSLRLSCAASGTIFLVRTMGWYRQAPGKERELVAGIGYGGITYYADSVKGRFTISRDNAKNTVYLQMNSLKPEDTAVYYCAVRGQSYFPLGYWYHYWGQGTQVTVSS

SEQ ID NO: 20224 - protein, 122 aa, Artificial Sequence
  Chemically Synthesized
QVQLQESGGGLVQAGGSLRLSCAASGNIFRSGLMGWYRQAPGKEREFVAGITVGTITYYADSVKGRFTISRDNAKNTVYLQMNSLKPEDTAVYYCAAYWYYTTQAYTPYDYWGQGTQVTVSS

SEQ ID NO: 20225 - protein, 118 aa, Artificial Sequence
  Chemically Synthesized
QVQLQESGGGLVQAGGSLRLSCAASGYISWIGNMGWYRQAPGKEREFVAGIADGTNTYYADSVKGRFTISRDNAKNTVYLQMNSLKPEDTAVYYCAVISSRGVDHDYWGQGTQVTVSS

SEQ ID NO: 20226 - protein, 117 aa, Artificial Sequence
  Chemically Synthesized
QVQLQESGGGLVQAGGSLRLSCAASGYISTCLMGWYRQAPGKEREFVASIGDGTSTYYADSVKGRFTISRDNAKNTVYLQMNSLKPEDTAVYYCAAPDGVSYRHLYWGQGTQVTVSS

SEQ ID NO: 20227 - protein, 118 aa, Artificial Sequence
  Chemically Synthesized
QVQLQESGGGLVQAGGSLRLSCAASGSISLHGVMGWYRQAPGKERELVATIGKGGSTNYADSVKGRFTISRDNAKNTVYLQMNSLKPEDTAVYYCAAYGHDGGSFLYWGQGTQVTVSS

SEQ ID NO: 20228 - protein, 118 aa, Artificial Sequence
  Chemically Synthesized
QVQLQESGGGLVQAGGSLRLSCAASGNIFAGQQMGWYRQAPGKEREFVATIGNGSTTYYADSVKGRFTISRDNAKNTVYLQMNSLKPEDTAVYYCAARYPRSPYLRYWGQGTQVTVSS

SEQ ID NO: 20229 - protein, 118 aa, Artificial Sequence
  Chemically Synthesized
QVQLQESGGGLVQAGGSLRLSCAASGTISAWDYMGWYRQAPGKEREFVAGISFGTSTYYADSVKGRFTISRDNAKNTVYLQMNSLKPEDTAVYYCAVFKRWTTVLDYWGQGTQVTVSS

SEQ ID NO: 20230 - protein, 118 aa, Artificial Sequence
  Chemically Synthesized
QVQLQESGGGLVQAGGSLRLSCAASGYIFSRGTMGWYRQAPGKERELVAGIGVGSNTYYADSVKGRFTISRDNAKNTVYLQMNSLKPEDTAVYYCAVLWRDGYAFYYWGQGTQVTVSS

SEQ ID NO: 20231 - protein, 122 aa, Artificial Sequence
  Chemically Synthesized
QVQLQESGGGLVQAGGSLRLSCAASGTISQYSRMGWYRQAPGKERELVASIAYGSTTYYADSVKGRFTISRDNAKNTVYLQMNSLKPEDTAVYYCAVYHIHLPRDTYLFSYWGQGTQVTVSS

SEQ ID NO: 20232 - protein, 118 aa, Artificial Sequence
  Chemically Synthesized
QVQLQESGGGLVQAGGSLRLSCAASGTISSGTAMGWYRQAPGKEREFVATIATGATTNYADSVKGRFTISRDNAKNTVYLQMNSLKPEDTAVYYCAARNTRRDALGYWGQGTQVTVSS

SEQ ID NO: 20233 - protein, 118 aa, Artificial Sequence
  Chemically Synthesized
QVQLQESGGGLVQAGGSLRLSCAASGYIFPRRPMGWYRQAPGKEREFVAAINWGATTYYADSVKGRFTISRDNAKNTVYLQMNSLKPEDTAVYYCAVDVWVPSYHRYWGQGTQVTVSS

SEQ ID NO: 20234 - protein, 118 aa, Artificial Sequence
  Chemically Synthesized
QVQLQESGGGLVQAGGSLRLSCAASGYIFWARTMGWYRQAPGKEREFVASINWGGTTYYADSVKGRFTISRDNAKNTVYLQMNSLKPEDTAVYYCAVYRAYGLYHSYWGQGTQVTVSS

SEQ ID NO: 20235 - protein, 117 aa, Artificial Sequence
  Chemically Synthesized
QVQLQESGGGLVQAGGSLRLSCAASGSIFASCMGWYRQAPGKERELVASISAGSTTYYADSVKGRFTISRDNAKNTVYLQMNSLKPEDTAVYYCAASPQRTVAHYYWGQGTQVTVSS

SEQ ID NO: 20236 - protein, 118 aa, Artificial Sequence
  Chemically Synthesized
QVQLQESGGGLVQAGGSLRLSCAASGYIFTSYDMGWYRQAPGKERELVAAIDSGGITYYADSVKGRFTISRDNAKNTVYLQMNSLKPEDTAVYYCAALDGAPNDFGYWGQGTQVTVSS

SEQ ID NO: 20237 - protein, 118 aa, Artificial Sequence
  Chemically Synthesized
QVQLQESGGGLVQAGGSLRLSCAASGSIFPTYVMGWYRQAPGKERELVAGIANGTSTYYADSVKGRFTISRDNAKNTVYLQMNSLKPEDTAVYYCAAIGNNAYYYNYWGQGTQVTVSS

SEQ ID NO: 20238 - protein, 119 aa, Artificial Sequence
  Chemically Synthesized
QVQLQESGGGLVQAGGSLRLSCAASGTIFWPEYMGWYRQAPGKERELVASISNGGITNYADSVKGRFTISRDNAKNTVYLQMNSLKPEDTAVYYCAARFAWYLTDHVYWGQGTQVTVSS

SEQ ID NO: 20239 - protein, 122 aa, Artificial Sequence
  Chemically Synthesized
QVQLQESGGGLVQAGGSLRLSCAASGYISDDWNMGWYRQAPGKEREFVAGINDGATTYYADSVKGRFTISRDNAKNTVYLQMNSLKPEDTAVYYCAALAYRRGVYGYVLRYWGQGTQVTVSS

SEQ ID NO: 20240 - protein, 121 aa, Artificial Sequence
  Chemically Synthesized
QVQLQESGGGLVQAGGSLRLSCAASGNISVYQVMGWYRQAPGKERELVAAIGYGTNTNYADSVKGRFTISRDNAKNTVYLQMNSLKPEDTAVYYCAVSTYDYYSPGTTLYWGQGTQVTVSS

SEQ ID NO: 20241 - protein, 122 aa, Artificial Sequence
  Chemically Synthesized
QVQLQESGGGLVQAGGSLRLSCAASGTISSLEGMGWYRQAPGKEREFVAGITIGANTYYADSVKGRFTISRDNAKNTVYLQMNSLKPEDTAVYYCAVYVYSRLADLYPLRYWGQGTQVTVSS

SEQ ID NO: 20242 - protein, 118 aa, Artificial Sequence
  Chemically Synthesized
QVQLQESGGGLVQAGGSLRLSCAASGTISVSYNMGWYRQAPGKERELVAGIDYGGITNYADSVKGRFTISRDNAKNTVYLQMNSLKPEDTAVYYCAADERAFRDYEYWGQGTQVTVSS

SEQ ID NO: 20243 - protein, 118 aa, Artificial Sequence
  Chemically Synthesized
QVQLQESGGGLVQAGGSLRLSCAASGSISPAYLMGWYRQAPGKEREFVAGIGTGATTYYADSVKGRFTISRDNAKNTVYLQMNSLKPEDTAVYYCAAQSYYYYALDYWGQGTQVTVSS

SEQ ID NO: 20244 - protein, 126 aa, Artificial Sequence
  Chemically Synthesized
QVQLQESGGGLVQAGGSLRLSCAASGNISNVYFMGWYRQAPGKERELVATITSGGTTNYADSVKGRFTISRDNAKNTVYLQMNSLKPEDTAVYYCAVIDIRGYPVVDQRYDPHIYWGQGTQVTVSS

SEQ ID NO: 20245 - protein, 118 aa, Artificial Sequence
  Chemically Synthesized
QVQLQESGGGLVQAGGSLRLSCAASGTISYYANMGWYRQAPGKEREFVAAIASGAITYYADSVKGRFTISRDNAKNTVYLQMNSLKPEDTAVYYCAVYKYYSWGLSYWGQGTQVTVSS

SEQ ID NO: 20246 - protein, 122 aa, Artificial Sequence
  Chemically Synthesized
QVQLQESGGGLVQAGGSLRLSCAASGSISGAYFMGWYRQAPGKERELVAAIDVGANTYYADSVKGRFTISRDNAKNTVYLQMNSLKPEDTAVYYCAAEWTYYYITLPYYTYWGQGTQVTVSS

SEQ ID NO: 20247 - protein, 126 aa, Artificial Sequence
  Chemically Synthesized
QVQLQESGGGLVQAGGSLRLSCAASGNISRNARMGWYRQAPGKEREFVAGIGGGGITYYADSVKGRFTISRDNAKNTVYLQMNSLKPEDTAVYYCAAYVQIYREGYLYQGSLHRYWGQGTQVTVSS

SEQ ID NO: 20248 - protein, 118 aa, Artificial Sequence
  Chemically Synthesized
QVQLQESGGGLVQAGGSLRLSCAASGSISTDSRMGWYRQAPGKERELVATIAAGGITNYADSVKGRFTISRDNAKNTVYLQMNSLKPEDTAVYYCAVGATRESEHDYWGQGTQVTVSS

SEQ ID NO: 20249 - protein, 117 aa, Artificial Sequence
  Chemically Synthesized
QVQLQESGGGLVQAGGSLRLSCAASGSIFRRPWMGWYRQAPGKEREFVASINRGANTYYADSVKGRFTISRDNAKNTVYLQMNSLKPEDTAVYYCAADATDTPSLYWGQGTQVTVSS

SEQ ID NO: 20250 - protein, 118 aa, Artificial Sequence
  Chemically Synthesized
QVQLQESGGGLVQAGGSLRLSCAASGNIFTWPGMGWYRQAPGKEREFVASINAGGSTYYADSVKGRFTISRDNAKNTVYLQMNSLKPEDTAVYYCAVDDYSNRNHRYWGQGTQVTVSS

SEQ ID NO: 20251 - protein, 118 aa, Artificial Sequence
  Chemically Synthesized
QVQLQESGGGLVQAGGSLRLSCAASGYISVLVWMGWYRQAPGKERELVAGIAWGASTNYADSVKGRFTISRDNAKNTVYLQMNSLKPEDTAVYYCAVYAQYQGWHDYWGQGTQVTVSS

SEQ ID NO: 20252 - protein, 117 aa, Artificial Sequence
  Chemically Synthesized
QVQLQESGGGLVQAGGSLRLSCAASGNISRRIAMGWYRQAPGKEREFVAAITDGSSTNYADSVKGRFTISRDNAKNTVYLQMNSLKPEDTAVYYCAVVQHRRRYIYWGQGTQVTVSS

SEQ ID NO: 20253 - protein, 118 aa, Artificial Sequence
  Chemically Synthesized
QVQLQESGGGLVQAGGSLRLSCAASGNIFYIYVMGWYRQAPGKEREFVASISRGGITNYADSVKGRFTISRDNAKNTVYLQMNSLKPEDTAVYYCAVYPSRSAHHLYWGQGTQVTVSS

SEQ ID NO: 20254 - protein, 118 aa, Artificial Sequence
  Chemically Synthesized
QVQLQESGGGLVQAGGSLRLSCAASGTISRRYIMGWYRQAPGKERELVATITHGSTTYYADSVKGRFTISRDNAKNTVYLQMNSLKPEDTAVYYCAANWTSPGLHDYWGQGTQVTVSS

SEQ ID NO: 20255 - protein, 119 aa, Artificial Sequence
  Chemically Synthesized
QVQLQESGGGLVQAGGSLRLSCAASGTISVDIIMGWYRQAPGKERELVATINDGGITYYADSVKGRFTISRDNAKNTVYLQMNSLKPEDTAVYYCATDWERRSSYHEYWGQGTQVTVSS

SEQ ID NO: 20256 - protein, 118 aa, Artificial Sequence
  Chemically Synthesized
QVQLQESGGGLVQAGGSLRLSCAASGSISPGLDMGWYRQAPGKEREFVAGITIGANTNYADSVKGRFTISRDNAKNTVYLQMNSLKPEDTAVYYCAASQYYRELYQYWGQGTQVTVSS

SEQ ID NO: 20257 - protein, 118 aa, Artificial Sequence
  Chemically Synthesized
QVQLQESGGGLVQAGGSLRLSCAASGNIFAFYRMGWYRQAPGKERELVATIDYGATTNYADSVKGRFTISRDNAKNTVYLQMNSLKPEDTAVYYCAVQWNYTPFLYYWGQGTQVTVSS

SEQ ID NO: 20258 - protein, 121 aa, Artificial Sequence
  Chemically Synthesized
QVQLQESGGGLVQAGGSLRLSCAASGYISDYHYMGWYRQAPGKEREFVAGIDYGANTNYADSVKGRFTISRDNAKNTVYLQMNSLKPEDTAVYYCAAAYRAYPLRHYLDYWGQGTQVTVSS

SEQ ID NO: 20259 - protein, 118 aa, Artificial Sequence
  Chemically Synthesized
QVQLQESGGGLVQAGGSLRLSCAASGYIFYYWNMGWYRQAPGKEREFVATIAYGSNTNYADSVKGRFTISRDNAKNTVYLQMNSLKPEDTAVYYCAAGPSRFAKHRYWGQGTQVTVSS

SEQ ID NO: 20260 - protein, 118 aa, Artificial Sequence
  Chemically Synthesized
QVQLQESGGGLVQAGGSLRLSCAASGTIFGYSSMGWYRQAPGKEREFVAGISQGGTTYYADSVKGRFTISRDNAKNTVYLQMNSLKPEDTAVYYCAAYVYSYFTYRYWGQGTQVTVSS

SEQ ID NO: 20261 - protein, 118 aa, Artificial Sequence
  Chemically Synthesized
QVQLQESGGGLVQAGGSLRLSCAASGNISYADVMGWYRQAPGKERELVATISYGTNTYYADSVKGRFTISRDNAKNTVYLQMNSLKPEDTAVYYCAAVGTDGAPYQYWGQGTQVTVSS

SEQ ID NO: 20262 - protein, 118 aa, Artificial Sequence
  Chemically Synthesized
QVQLQESGGGLVQAGGSLRLSCAASGTIFGARGMGWYRQAPGKEREFVAAINYGTSTNYADSVKGRFTISRDNAKNTVYLQMNSLKPEDTAVYYCAVRSWYNYRLRYWGQGTQVTVSS

SEQ ID NO: 20263 - protein, 121 aa, Artificial Sequence
  Chemically Synthesized
QVQLQESGGGLVQAGGSLRLSCAASGTIFRWYMGWYRQAPGKERELVAGISSGSNTNYADSVKGRFTISRDNAKNTVYLQMNSLKPEDTAVYYCAANAIVFSDQIDALDYWGQGTQVTVSS

SEQ ID NO: 20264 - protein, 117 aa, Artificial Sequence
  Chemically Synthesized
QVQLQESGGGLVQAGGSLRLSCAASGNISARQMGWYRQAPGKEREFVATIGSGGTTYYADSVKGRFTISRDNAKNTVYLQMNSLKPEDTAVYYCAAVSGTWEYHLYWGQGTQVTVSS

SEQ ID NO: 20265 - protein, 126 aa, Artificial Sequence
  Chemically Synthesized
QVQLQESGGGLVQAGGSLRLSCAASGSISTYDYMGWYRQAPGKEREFVAGINYGGITYYADSVKGRFTISRDNAKNTVYLQMNSLKPEDTAVYYCAVNYTAADRRASGHGDYYGYWGQGTQVTVSS

SEQ ID NO: 20266 - protein, 116 aa, Artificial Sequence
  Chemically Synthesized
QVQLQESGGGLVQAGGSLRLSCAASGNISWSNDMGWYRQAPGKERELVAAISVVVIPYADSVKGRFTISRDNAKNTVYLQMNSLKPEDTAVYYCAAYWSVLTLLYWGQGTQVTVSS

SEQ ID NO: 20267 - protein, 118 aa, Artificial Sequence
  Chemically Synthesized
QVQLQESGGGLVQAGGSLRLSCAASGTISWRVSMGWYRQAPGKEREFVAGIAYGTNTYYADSVKGRFTISRDNAKNTVYLQMNSLKPEDTAVYYCAVLYFADKTHDYWGQGTQVTVSS

SEQ ID NO: 20268 - protein, 122 aa, Artificial Sequence
  Chemically Synthesized
QVQLQESGGGLVQAGGSLRLSCAASGTIFPLRSMGWYRQAPGKEREFVAGIAFGTSTNYADSVKGRFTISRDNAKNTVYLQMNSLKPEDTAVYYCAAARWYSYGRYFWYDYWGQGTQVTVSS

SEQ ID NO: 20269 - protein, 114 aa, Artificial Sequence
  Chemically Synthesized
QVQLQESGGGLVQAGGSLRLSCAASGNISEVATMGWYRQAPGKERELVASIAPGSTTYYADSVKGRFTISRDNAKNTVYLQMNSLKPEDTAVYYCAVIDGHPYWGQGTQVTVSS

SEQ ID NO: 20270 - protein, 118 aa, Artificial Sequence
  Chemically Synthesized
QVQLQESGGGLVQAGGSLRLSCAASGNIFGYALMGWYRQAPGKERELVATIDNGTNTNYADSVKGRFTISRDNAKNTVYLQMNSLKPEDTAVYYCAVSEGGGDGHYYWGQGTQVTVSS

SEQ ID NO: 20271 - protein, 122 aa, Artificial Sequence
  Chemically Synthesized
QVQLQESGGGLVQAGGSLRLSCAASGYIFAGNYMGWYRQAPGKEREFVAAISGGATTNYADSVKGRFTISRDNAKNTVYLQMNSLKPEDTAVYYCAVYYAARRATYGRYAYWGQGTQVTVSS

SEQ ID NO: 20272 - protein, 110 aa, Artificial Sequence
  Chemically Synthesized
QVQLQESGGGLVQAGGSLRLSCAASGNISYLRDMGWYRQAPGKEREFVATIAYGSITNYADSVKGRFTISRDNAKNTVYLQMNSLKPEDTAVYYCAALYWGQGTQVTVSS

SEQ ID NO: 20273 - protein, 118 aa, Artificial Sequence
  Chemically Synthesized
QVQLQESGGGLVQAGGSLRLSCAASGSISWLGYMGWYRQAPGKERELVAAISLGSNTNYADSVKGRFTISRDNAKNTVYLQMNSLKPEDTAVYYCAVGWRIFAWHWYWGQGTQVTVSS

SEQ ID NO: 20274 - protein, 118 aa, Artificial Sequence
  Chemically Synthesized
QVQLQESGGGLVQAGGSLRLSCAASGTIFYGPVMGWYRQAPGKEREFVAGITYGGNTYYADSVKGRFTISRDNAKNTVYLQMNSLKPEDTAVYYCAVYWRYFRPFQYWGQGTQVTVSS

SEQ ID NO: 20275 - protein, 118 aa, Artificial Sequence
  Chemically Synthesized
QVQLQESGGGLVQAGGSLRLSCAASGTISPVWHMGWYRQAPGKEREFVAGIAYGSTTYYADSVKGRFTISRDNAKNTVYLQMNSLKPEDTAVYYCAAHSRYVITHDYWGQGTQVTVSS

SEQ ID NO: 20276 - protein, 122 aa, Artificial Sequence
  Chemically Synthesized
QVQLQESGGGLVQAGGSLRLSCAASGYISTIDAMGWYRQAPGKEREFVAAITVGTTTYYADSVKGRFTISRDNAKNTVYLQMNSLKPEDTAVYYCAAYVVLTDIYESPYYYWGQGTQVTVSS

SEQ ID NO: 20277 - protein, 124 aa, Artificial Sequence
  Chemically Synthesized
QVQLQESGGGLVQAGGSLRLSCAASGNIFDRRYMGWYRQAPGKEREFVATINDGTNTNYADSVKGRFTISRDNAKNTVYLQMNSLKPEDTAVYYCAVRGYWFADYDSYTYSLYWGQGTQVTVSS

SEQ ID NO: 20278 - protein, 122 aa, Artificial Sequence
  Chemically Synthesized
QVQLQESGGGLVQAGGSLRLSCAASGYISSDSYMGWYRQAPGKEREFVATINFGGSTNYADSVKGRFTISRDNAKNTVYLQMNSLKPEDTAVYYCAVPSYADYYYLLSLPYWGQGTQVTVSS

SEQ ID NO: 20279 - protein, 122 aa, Artificial Sequence
  Chemically Synthesized
QVQLQESGGGLVQAGGSLRLSCAASGNISYRINMGWYRQAPGKERELVASIARGTNTNYADSVKGRFTISRDNAKNTVYLQMNSLKPEDTAVYYCAVKGDDVEKPYGDHPYWGQGTQVTVSS

SEQ ID NO: 20280 - protein, 118 aa, Artificial Sequence
  Chemically Synthesized
QVQLQESGGGLVQAGGSLRLSCAASGYIFRDYSMGWYRQAPGKERELVASIGPGSTTYYADSVKGRFTISRDNAKNTVYLQMNSLKPEDTAVYYCAVQPGTQSRHTYWGQGTQVTVSS

SEQ ID NO: 20281 - protein, 122 aa, Artificial Sequence
  Chemically Synthesized
QVQLQESGGGLVQAGGSLRLSCAASGTIFSYDGMGWYRQAPGKERELVATITGGTTTNYADSVKGRFTISRDNAKNTVYLQMNSLKPEDTAVYYCAAWKEASSYDHRQHYYWGQGTQVTVSS

SEQ ID NO: 20282 - protein, 121 aa, Artificial Sequence
  Chemically Synthesized
QVQLQESGGGLVQAGGSLRLSCAASGNIFSYSSMGWYRQAPGKEREFVPLLISVLIPYADSVKGRFTISRDNAKNTVYLQMNSLKPEDTAVYYCAVYYYGGRQRYANYAYWGQGTQVTVSS

SEQ ID NO: 20283 - protein, 122 aa, Artificial Sequence
  Chemically Synthesized
QVQLQESGGGLVQAGGSLRLSCAASGNISLTDGMGWYRQAPGKERELVATINAGANTYYADSVKGRFTISRDNAKNTVYLQMNSLKPEDTAVYYCAVYFSYLYASLLWLDYWGQGTQVTVSS

SEQ ID NO: 20284 - protein, 126 aa, Artificial Sequence
  Chemically Synthesized
QVQLQESGGGLVQAGGSLRLSCAASGSISSYYRMGWYRQAPGKERELVAGITVGATTNYADSVKGRFTISRDNAKNTVYLQMNSLKPEDTAVYYCAVGGGYYYLVGYDRLLIYWYWGQGTQVTVSS

SEQ ID NO: 20285 - protein, 118 aa, Artificial Sequence
  Chemically Synthesized
QVQLQESGGGLVQAGGSLRLSCAASGTIFDVTSMGWYRQAPGKERELVAAISYGTNTYYADSVKGRFTISRDNAKNTVYLQMNSLKPEDTAVYYCAVWATYDFDLAYWGQGTQVTVSS

SEQ ID NO: 20286 - protein, 118 aa, Artificial Sequence
  Chemically Synthesized
QVQLQESGGGLVQAGGSLRLSCAASGNIFAAAHMGWYRQAPGKERELVAGIARGGNTYYADSVKGRFTISRDNAKNTVYLQMNSLKPEDTAVYYCAVYYLGDTVYPYWGQGTQVTVSS

SEQ ID NO: 20287 - protein, 118 aa, Artificial Sequence
  Chemically Synthesized
QVQLQESGGGLVQAGGSLRLSCAASGYIFSTLFMGWYRQAPGKEREFVATITDGSNTYYADSVKGRFTISRDNAKNTVYLQMNSLKPEDTAVYYCAAANYSDYTLYYWGQGTQVTVSS

SEQ ID NO: 20288 - protein, 126 aa, Artificial Sequence
  Chemically Synthesized
QVQLQESGGGLVQAGGSLRLSCAASGNISYTSSMGWYRQAPGKEREFVAGITRGSTTYYADSVKGRFTISRDNAKNTVYLQMNSLKPEDTAVYYCAVGPTLTRTVGNHGYHILWYWGQGTQVTVSS

SEQ ID NO: 20289 - protein, 118 aa, Artificial Sequence
  Chemically Synthesized
QVQLQESGGGLVQAGGSLRLSCAASGSISGYTIMGWYRQAPGKEREFVAAISNGGNTYYADSVKGRFTISRDNAKNTVYLQMNSLKPEDTAVYYCAVQYVGTGRYLYWGQGTQVTVSS

SEQ ID NO: 20290 - protein, 122 aa, Artificial Sequence
  Chemically Synthesized
QVQLQESGGGLVQAGGSLRLSCAASGSIFDSYYMGWYRQAPGKEREFVAGIAFGTSTYYADSVKGRFTISRDNAKNTVYLQMNSLKPEDTAVYYCAALWSQGYYQSYDHDYWGQGTQVTVSS

SEQ ID NO: 20291 - protein, 121 aa, Artificial Sequence
  Chemically Synthesized
QVQLQESGGGLVQAGGSLRLSCAASGTIFGYDTMGWYRQAPGKERELVATITYGTNTNYADSVKGRFTISRDNAKNTVYLQMNSLKPEDTAVYYCAVTRQSTVASTTTMYWGQGTQVTVSS

SEQ ID NO: 20292 - protein, 118 aa, Artificial Sequence
  Chemically Synthesized
QVQLQESGGGLVQAGGSLRLSCAASGYISGEYFMGWYRQAPGKEREFVAGINDGATYLYADSVKGRFTISRDNAKNTVYLQMNSLKPEDTAVYYCAVRVPRGSAHYYWGQGTQVTVSS

SEQ ID NO: 20293 - protein, 118 aa, Artificial Sequence
  Chemically Synthesized
QVQLQESGGGLVQAGGSLRLSCAASGYISGDDYMGWYRQAPGKEREFVAGIGLGTSTYYADSVKGRFTISRDNAKNTVYLQMNSLKPEDTAVYYCAVFRRSAPGFDYWGQGTQVTVSS

SEQ ID NO: 20294 - protein, 118 aa, Artificial Sequence
  Chemically Synthesized
QVQLQESGGGLVQAGGSLRLSCAASGSISRSSLMGWYRQAPGKERELVAGITDGGTTNYADSVKGRFTISRDNAKNTVYLQMNSLKPEDTAVYYCAVHAWPRGWLDYWGQGTQVTVSS

SEQ ID NO: 20295 - protein, 118 aa, Artificial Sequence
  Chemically Synthesized
QVQLQESGGGLVQAGGSLRLSCAASGNISRREYMGWYRQAPGKERELVATIGYGGNTYYADSVKGRFTISRDNAKNTVYLQMNSLKPEDTAVYYCAANNYLSNYFGYWGQGTQVTVSS

SEQ ID NO: 20296 - protein, 122 aa, Artificial Sequence
  Chemically Synthesized
QVQLQESGGGLVQAGGSLRLSCAASGSISYIVVMGWYRQAPGKEREFVAAIARGASTNYADSVKGRFTISRDNAKNTVYLQMNSLKPEDTAVYYCAAVLYPVPYAGRLLRYWGQGTQVTVSS

SEQ ID NO: 20297 - protein, 121 aa, Artificial Sequence
  Chemically Synthesized
QVQLQESGGGLVQAGGSLRLSCAASGYIFDYYRMGWYRQAPGKEREFVATITTGASTYYADSVKGRFTISRDNAKNTVYLQMNSLKPEDTAVYYCAADSFADYAYRYTMYWGQGTQVTVSS

SEQ ID NO: 20298 - protein, 122 aa, Artificial Sequence
  Chemically Synthesized
QVQLQESGGGLVQAGGSLRLSCAASGNIFDSAYMGWYRQAPGKERELVATIDYGTTTYYADSVKGRFTISRDNAKNTVYLQMNSLKPEDTAVYYCAVAEYPPWYYDLYLFYWGQGTQVTVSS

SEQ ID NO: 20299 - protein, 112 aa, Artificial Sequence
  Chemically Synthesized
QVQLQESGGGLVQAGGSLRLSCAASGSISDDTYMGWYRQAPGKEREFVASITYGSSTYYADSVKGRFTISRDNAKNTVYLQMNSLKPEDTAVYYCAVWLYYWGQGTQVTVSS

SEQ ID NO: 20300 - protein, 123 aa, Artificial Sequence
  Chemically Synthesized
QVQLQESGGGLVQAGGSLRLSCAASGYISLSYYMGWYRQAPGKEREFVASISSVLLPYADSVKGRFTISRDNAKNTVYLQMNSLKPEDTAVYYCAVSYYGRRQSTPYYDHLYWGQGTQVTVSS

SEQ ID NO: 20301 - protein, 110 aa, Artificial Sequence
  Chemically Synthesized
QVQLQESGGGLVQAGGSLRLSCAASGNISWDYMGWYRQAPGKERELVATNYADSVKGRFTISRDNAKNTVYLQMNSLKPEDTAVYYCAAIPYFSYPHQYWGQGTQVTVSS

SEQ ID NO: 20302 - protein, 118 aa, Artificial Sequence
  Chemically Synthesized
QVQLQESGGGLVQAGGSLRLSCAASGSISEADSMGWYRQAPGKEREFVAGIAYGSSTYYADSVKGRFTISRDNAKNTVYLQMNSLKPEDTAVYYCAVVSWPDDTYSYWGQGTQVTVSS

SEQ ID NO: 20303 - protein, 126 aa, Artificial Sequence
  Chemically Synthesized
QVQLQESGGGLVQAGGSLRLSCAASGTISGRVSMGWYRQAPGKERELVAGITSGGITYYADSVKGRFTISRDNAKNTVYLQMNSLKPEDTAVYYCAVTIWRGSRGRYYLGYQYTYWGQGTQVTVSS

SEQ ID NO: 20304 - protein, 116 aa, Artificial Sequence
  Chemically Synthesized
QVQLQESGGGLVQAGGSLRLSCAASGTILLITMGWYRQAPGKERELVAGIGYGGNTNYADSVKGRFTISRDNAKNTVYLQMNSLKPEDTAVYYCAVVTTTVTGFYWGQGTQVTVSS

SEQ ID NO: 20305 - protein, 121 aa, Artificial Sequence
  Chemically Synthesized
QVQLQESGGGLVQAGGSLRLSCAASGNISTADYMGWYRQAPGKERELVASIDSVVIPYADSVKGRFTISRDNAKNTVYLQMNSLKPEDTAVYYCAATQSLYSDSYDPLLYWGQGTQVTVSS

SEQ ID NO: 20306 - protein, 121 aa, Artificial Sequence
  Chemically Synthesized
QVQLQESGGGLVQAGGSLRLSCAASGTIFYASSMGWYRQAPGKEREFVAGITGGTITNYADSVKGRFTISRDNAKNTVYLQMNSLKPEDTAVYYCAAVNFTAIDTFALGYWGQGTQVTVSS

SEQ ID NO: 20307 - protein, 118 aa, Artificial Sequence
  Chemically Synthesized
QVQLQESGGGLVQAGGSLRLSCAASGTIFDYWKMGWYRQAPGKERELVATISLGGTTYYADSVKGRFTISRDNAKNTVYLQMNSLKPEDTAVYYCAVVAYSGAVHTYWGQGTQVTVSS

SEQ ID NO: 20308 - protein, 122 aa, Artificial Sequence
  Chemically Synthesized
QVQLQESGGGLVQAGGSLRLSCAASGNIFHDGVMGWYRQAPGKEREFVATITDGGSTNYADSVKGRFTISRDNAKNTVYLQMNSLKPEDTAVYYCAAGKTYYYAQWNDLYYWGQGTQVTVSS

SEQ ID NO: 20309 - protein, 117 aa, Artificial Sequence
  Chemically Synthesized
QVQLQESGGGLVQAGGSLRLSCAASGYIFRDDYMGWYRQAPGKERELVAAIALGGNTYYADSVKGRFTISRDNAKNTVYLQMNSLKPEDTAVYYCAASAQKTSSLYWGQGTQVTVSS

SEQ ID NO: 20310 - protein, 118 aa, Artificial Sequence
  Chemically Synthesized
QVQLQESGGGLVQAGGSLRLSCAASGTISFYFDMGWYRQAPGKEREFVAAIGYGSTTYYADSVKGRFTISRDNAKNTVYLQMNSLKPEDTAVYYCAAATDGGSFLVYWGQGTQVTVSS

SEQ ID NO: 20311 - protein, 126 aa, Artificial Sequence
  Chemically Synthesized
QVQLQESGGGLVQAGGSLRLSCAASGYIFEVGDMGWYRQAPGKEREFVASIDYGANTYYADSVKGRFTISRDNAKNTVYLQMNSLKPEDTAVYYCAAYIVDYNLFDYDEVYAHLYWGQGTQVTVSS

SEQ ID NO: 20312 - protein, 122 aa, Artificial Sequence
  Chemically Synthesized
QVQLQESGGGLVQAGGSLRLSCAASGSISRRDLMGWYRQAPGKERELVAGIGRGSTTYYADSVKGRFTISRDNAKNTVYLQMNSLKPEDTAVYYCAASDERQDEGRDGHKYWGQGTQVTVSS

SEQ ID NO: 20313 - protein, 118 aa, Artificial Sequence
  Chemically Synthesized
QVQLQESGGGLVQAGGSLRLSCAASGTISSRHGMGWYRQAPGKERELVATISEGTTTNYADSVKGRFTISRDNAKNTVYLQMNSLKPEDTAVYYCAAYQTPSEDFPYWGQGTQVTVSS

SEQ ID NO: 20314 - protein, 121 aa, Artificial Sequence
  Chemically Synthesized
QVQLQESGGGLVQAGGSLRLSCAASGYIFYQGDMGWYRQAPGKERELVATIAYGTNTNYADSVKGRFTISRDNAKNTVYLQMNSLKPEDTAVYYCAAEDDISGAIYSNMYWGQGTQVTVSS

SEQ ID NO: 20315 - protein, 113 aa, Artificial Sequence
  Chemically Synthesized
QVQLQESGGGLVQAGGSLRLSCAASGSISSYYTMGWYRQAPGKEREFVASISGGTTNYADSVKGRFTISRDNAKNTVYLQMNSLKPEDTAVYYCAAWLTVMYWGQGTQVTVSS

SEQ ID NO: 20316 - protein, 118 aa, Artificial Sequence
  Chemically Synthesized
QVQLQESGGGLVQAGGSLRLSCAASGYIFVRRTMGWYRQAPGKERELVASISKGATTNYADSVKGRFTISRDNAKNTVYLQMNSLKPEDTAVYYCAAPGQSNFRYDYWGQGTQVTVSS

SEQ ID NO: 20317 - protein, 124 aa, Artificial Sequence
  Chemically Synthesized
QVQLQESGGGLVQAGGSLRLSCAASGSIFVPLMGWYRQAPGKEREFVAAITTGASTYYADSVKGRFTISRDNAKNTVYLQMNSLKPEDTAVYYCAAISYDAVYTRLSRTTSLYWGQGTQVTVSS

SEQ ID NO: 20318 - protein, 122 aa, Artificial Sequence
  Chemically Synthesized
QVQLQESGGGLVQAGGSLRLSCAASGTISFIIGMGWYRQAPGKEREFVATIAQGSITNYADSVKGRFTISRDNAKNTVYLQMNSLKPEDTAVYYCAAVTTAIRRPDYNHYYWGQGTQVTVSS

SEQ ID NO: 20319 - protein, 122 aa, Artificial Sequence
  Chemically Synthesized
QVQLQESGGGLVQAGGSLRLSCAASGSISVFIPMGWYRQAPGKERELVASITFGSSTYYADSVKGRFTISRDNAKNTVYLQMNSLKPEDTAVYYCAVWAHDYDDDDWLHRYWGQGTQVTVSS

SEQ ID NO: 20320 - protein, 125 aa, Artificial Sequence
  Chemically Synthesized
QVQLQESGGGLVQAGGSLRLSCAASGTISDYSVMGWYRQAPGKERELVAAIGVGTSTYYADSVKGRFTISRDNAKNTVYLQMNSLKPEDTAVYYCAAVRVYRVITPRRGYTFPYWGQGTQVTVSS

SEQ ID NO: 20321 - protein, 118 aa, Artificial Sequence
  Chemically Synthesized
QVQLQESGGGLVQAGGSLRLSCAASGYISDYSAMGWYRQAPGKERELVAAIDAGASTNYADSVKGRFTISRDNAKNTVYLQMNSLKPEDTAVYYCAVPNTYYGYLGYWGQGTQVTVSS

SEQ ID NO: 20322 - protein, 122 aa, Artificial Sequence
  Chemically Synthesized
QVQLQESGGGLVQAGGSLRLSCAASGSIFYIYGMGWYRQAPGKERELVATITTGANTYYADSVKGRFTISRDNAKNTVYLQMNSLKPEDTAVYYCAVIGPYRVDWVSPYVYWGQGTQVTVSS

SEQ ID NO: 20323 - protein, 125 aa, Artificial Sequence
  Chemically Synthesized
QVQLQESGGGLVQAGGSLRLSCAASGYIFTQSMGWYRQAPGKERELVAAIDNGAITNYADSVKGRFTISRDNAKNTVYLQMNSLKPEDTAVYYCAVTGRTCSAFWYYSGTCLCYWGQGTQVTVSS

SEQ ID NO: 20324 - protein, 113 aa, Artificial Sequence
  Chemically Synthesized
QVQLQESGGGLVQAGGSLRLSCAASGSISRRAGMGWYRQAPGKEREFVTVLVPYADSVKGRFTISRDNAKNTVYLQMNSLKPEDTAVYYCAAAARQDHGLPYWGQGTQVTVSS

SEQ ID NO: 20325 - protein, 119 aa, Artificial Sequence
  Chemically Synthesized
QVQLQESGGGLVQAGGSLRLSCAASGYISRRRGMGWYRQAPGKERELVASIGDGTSTYYADSVKGRFTISRDNAKNTVYLQMNSLKPEDTAVYYCAYILRSEGYAFRYWGQGTQVTVSS

SEQ ID NO: 20326 - protein, 121 aa, Artificial Sequence
  Chemically Synthesized
QVQLQESGGGLVQAGGSLRLSCAASGTISVRFYMGWYRQAPGKERELVAAITPGSKPYADSVKGRFTISRDNAKNTVYLQMNSLKPEDTAVYYCAAYQPSDGDNYGRHIYWGQGTQVTVSS

SEQ ID NO: 20327 - protein, 126 aa, Artificial Sequence
  Chemically Synthesized
QVQLQESGGGLVQAGGSLRLSCAASGYIFGRDYMGWYRQAPGKERELVAAITGGGTTYYADSVKGRFTISRDNAKNTVYLQMNSLKPEDTAVYYCAVYVYGFTSLRSPRGEAYIYWGQGTQVTVSS

SEQ ID NO: 20328 - protein, 122 aa, Artificial Sequence
  Chemically Synthesized
QVQLQESGGGLVQAGGSLRLSCAASGNISGENTMGWYRQAPGKERELVAGITSGANTYYADSVKGRFTISRDNAKNTVYLQMNSLKPEDTAVYYCAADHQWRIDTSDAHYYWGQGTQVTVSS

SEQ ID NO: 20329 - protein, 118 aa, Artificial Sequence
  Chemically Synthesized
QVQLQESGGGLVQAGGSLRLSCAASGTIFGWWIMGWYRQAPGKEREFVASIGYGTITNYADSVKGRFTISRDNAKNTVYLQMNSLKPEDTAVYYCAVTPYSYYRFSYWGQGTQVTVSS

SEQ ID NO: 20330 - protein, 118 aa, Artificial Sequence
  Chemically Synthesized
QVQLQESGGGLVQAGGSLRLSCAASGTISADPDMGWYRQAPGKEREFVATITGGSTTNYADSVKGRFTISRDNAKNTVYLQMNSLKPEDTAVYYCAAYYPPYSDHTYWGQGTQVTVSS

SEQ ID NO: 20331 - protein, 122 aa, Artificial Sequence
  Chemically Synthesized
QVQLQESGGGLVQAGGSLRLSCAASGNISPYAPMGWYRQAPGKERELVAGISSGGSTYYADSVKGRFTISRDNAKNTVYLQMNSLKPEDTAVYYCAVRDTDDYWKNLSYYYWGQGTQVTVSS

SEQ ID NO: 20332 - protein, 118 aa, Artificial Sequence
  Chemically Synthesized
QVQLQESGGGLVQAGGSLRLSCAASGNISDGNRMGWYRQAPGKERELVATIGPGTSTYYADSVKGRFTISRDNAKNTVYLQMNSLKPEDTAVYYCAVLSYYDPPHSYWGQGTQVTVSS

SEQ ID NO: 20333 - protein, 110 aa, Artificial Sequence
  Chemically Synthesized
QVQLQESGGGLVQAGGSLRLSCAASGSISDYRYMGWYRQAPGKEREFVASISVGTTTNYADSVKGRFTISRDNAKNTVYLQMNSLKPEDTAVYYCAYHYWGQGTQVTVSS

SEQ ID NO: 20334 - protein, 122 aa, Artificial Sequence
  Chemically Synthesized
QVQLQESGGGLVQAGGSLRLSCAASGTIFADTFMGWYRQAPGKERELVASIGLGAITYYADSVKGRFTISRDNAKNTVYLQMNSLKPEDTAVYYCAVYWDIQYGTGDDLTYWGQGTQVTVSS

SEQ ID NO: 20335 - protein, 118 aa, Artificial Sequence
  Chemically Synthesized
QVQLQESGGGLVQAGGSLRLSCAASGTISRTWYMGWYRQAPGKEREFVAAIDYGAITYYADSVKGRFTISRDNAKNTVYLQMNSLKPEDTAVYYCAVLSADGWRLYYWGQGTQVTVSS

SEQ ID NO: 20336 - protein, 118 aa, Artificial Sequence
  Chemically Synthesized
QVQLQESGGGLVQAGGSLRLSCAASGTIFLARRMGWYRQAPGKERELVASITGGSSTNYADSVKGRFTISRDNAKNTVYLQMNSLKPEDTAVYYCAAEWAYWFVLYYWGQGTQVTVSS

SEQ ID NO: 20337 - protein, 121 aa, Artificial Sequence
  Chemically Synthesized
QVQLQESGGGLVQAGGSLRLSCAASGSILTVVMGWYRQAPGKERELVASIDQGASTYYADSVKGRFTISRDNAKNTVYLQMNSLKPEDTAVYYCAAYPTINGRDFNGHRYWGQGTQVTVSS

SEQ ID NO: 20338 - protein, 121 aa, Artificial Sequence
  Chemically Synthesized
QVQLQESGGGLVQAGGSLRLSCAASGLFLTLLMGWYRQAPGKERELVATIAPGTTTNYADSVKGRFTISRDNAKNTVYLQMNSLKPEDTAVYYCAVQFNPPGDEQYGHSYWGQGTQVTVSS

SEQ ID NO: 20339 - protein, 122 aa, Artificial Sequence
  Chemically Synthesized
QVQLQESGGGLVQAGGSLRLSCAASGSISTFVDMGWYRQAPGKERELVASITRGTTTNYADSVKGRFTISRDNAKNTVYLQMNSLKPEDTAVYYCAVVESARTSGPTTHRYWGQGTQVTVSS

SEQ ID NO: 20340 - protein, 117 aa, Artificial Sequence
  Chemically Synthesized
QVQLQESGGGLVQAGGSLRLSCAASGTISSTLMGWYRQAPGKERELVASIASGANTYYADSVKGRFTISRDNAKNTVYLQMNSLKPEDTAVYYCAVGTDPGPIFTYWGQGTQVTVSS

SEQ ID NO: 20341 - protein, 118 aa, Artificial Sequence
  Chemically Synthesized
QVQLQESGGGLVQAGGSLRLSCAASGTISPSSPMGWYRQAPGKERELVAGIGGGSNTYYADSVKGRFTISRDNAKNTVYLQMNSLKPEDTAVYYCAAGYYKTLKLGYWGQGTQVTVSS

SEQ ID NO: 20342 - protein, 118 aa, Artificial Sequence
  Chemically Synthesized
QVQLQESGGGLVQAGGSLRLSCAASGTIFGRHGMGWYRQAPGKERELVAAIGQGSNTNYADSVKGRFTISRDNAKNTVYLQMNSLKPEDTAVYYCAATTGRYPPHNYWGQGTQVTVSS

SEQ ID NO: 20343 - protein, 111 aa, Artificial Sequence
  Chemically Synthesized
QVQLQESGGGLVQAGGSLRLSCAASGTIFGARYMGWYRQAPGKEREFVAGIAVGIVPYADSVKGRFTISRDNAKNTVYLQMNSLKPEDTAVYYCAADHSYWGQGTQVTVSS

SEQ ID NO: 20344 - protein, 125 aa, Artificial Sequence
  Chemically Synthesized
QVQLQESGGGLVQAGGSLRLSCAASGTIFQSYNMGWYRQAPGKERELVATIDVGSNTNYADSVKGRFTISRDNAKNTVYLQMNSLKPEDTAVYYCAAYDVVQRLYRRHTRYFIYWGQGTQVTVSS

SEQ ID NO: 20345 - protein, 122 aa, Artificial Sequence
  Chemically Synthesized
QVQLQESGGGLVQAGGSLRLSCAASGTIFQHHRMGWYRQAPGKEREFVATIDYGSNTNYADSVKGRFTISRDNAKNTVYLQMNSLKPEDTAVYYCAVNTPRDRRTQWRLAYWGQGTQVTVSS

SEQ ID NO: 20346 - protein, 122 aa, Artificial Sequence
  Chemically Synthesized
QVQLQESGGGLVQAGGSLRLSCAASGNISHRLYMGWYRQAPGKEREFVAGIGGGGSTYYADSVKGRFTISRDNAKNTVYLQMNSLKPEDTAVYYCAVGDAYGYTPYETFYYWGQGTQVTVSS

SEQ ID NO: 20347 - protein, 118 aa, Artificial Sequence
  Chemically Synthesized
QVQLQESGGGLVQAGGSLRLSCAASGYISGYYNMGWYRQAPGKERELVATIDFGASTNYADSVKGRFTISRDNAKNTVYLQMNSLKPEDTAVYYCAVTLDISPYHPYWGQGTQVTVSS

SEQ ID NO: 20348 - protein, 122 aa, Artificial Sequence
  Chemically Synthesized
QVQLQESGGGLVQAGGSLRLSCAASGYISYLAVMGWYRQAPGKERELVAGITDGTSTNYADSVKGRFTISRDNAKNTVYLQMNSLKPEDTAVYYCAAYYDTPVRFPYLLIYWGQGTQVTVSS

SEQ ID NO: 20349 - protein, 121 aa, Artificial Sequence
  Chemically Synthesized
QVQLQESGGGLVQAGGSLRLSCAASGSISYAIMGWYRQAPGKERELVAGIDNGTITNYADSVKGRFTISRDNAKNTVYLQMNSLKPEDTAVYYCAADLEDLLIIDNILVYWGQGTQVTVSS

SEQ ID NO: 20350 - protein, 118 aa, Artificial Sequence
  Chemically Synthesized
QVQLQESGGGLVQAGGSLRLSCAASGYISYAAYMGWYRQAPGKERELVAGIGDGASTYYADSVKGRFTISRDNAKNTVYLQMNSLKPEDTAVYYCAVVLREGKQFYYWGQGTQVTVSS

SEQ ID NO: 20351 - protein, 126 aa, Artificial Sequence
  Chemically Synthesized
QVQLQESGGGLVQAGGSLRLSCAASGSIFAPSAMGWYRQAPGKERELVASIGTGASTYYADSVKGRFTISRDNAKNTVYLQMNSLKPEDTAVYYCAVVAEQADYDHPRYGWDLYYWGQGTQVTVSS

SEQ ID NO: 20352 - protein, 118 aa, Artificial Sequence
  Chemically Synthesized
QVQLQESGGGLVQAGGSLRLSCAASGSISYQWTMGWYRQAPGKEREFVAGITRGSITYYADSVKGRFTISRDNAKNTVYLQMNSLKPEDTAVYYCAAYNDTSEVYAYWGQGTQVTVSS

SEQ ID NO: 20353 - protein, 122 aa, Artificial Sequence
  Chemically Synthesized
QVQLQESGGGLVQAGGSLRLSCAASGNISYVPYMGWYRQAPGKERELVAAITLGTNTYYADSVKGRFTISRDNAKNTVYLQMNSLKPEDTAVYYCAAVYYPVDYFAGQHIYWGQGTQVTVSS

SEQ ID NO: 20354 - protein, 117 aa, Artificial Sequence
  Chemically Synthesized
QVQLQESGGGLVQAGGSLRLSCAASGTIFDSAIMGWYRQAPGKEREFVAGINGGGTTNYADSVKGRFTISRDNAKNTVYLQMNSLKPEDTAVYYCAAWQLDDTAMYWGQGTQVTVSS

SEQ ID NO: 20355 - protein, 118 aa, Artificial Sequence
  Chemically Synthesized
QVQLQESGGGLVQAGGSLRLSCAASGSISRRYYMGWYRQAPGKEREFVATINRGANTYYADSVKGRFTISRDNAKNTVYLQMNSLKPEDTAVYYCAVVAYVRRSHGYWGQGTQVTVSS

SEQ ID NO: 20356 - protein, 122 aa, Artificial Sequence
  Chemically Synthesized
QVQLQESGGGLVQAGGSLRLSCAASGNIFDYDGMGWYRQAPGKEREFVASITEGASTNYADSVKGRFTISRDNAKNTVYLQMNSLKPEDTAVYYCAVARTRWYWFTTPYYYWGQGTQVTVSS

SEQ ID NO: 20357 - protein, 118 aa, Artificial Sequence
  Chemically Synthesized
QVQLQESGGGLVQAGGSLRLSCAASGNISNSTPMGWYRQAPGKERELVASIDSGSSTYYADSVKGRFTISRDNAKNTVYLQMNSLKPEDTAVYYCAAVPATGGPHNYWGQGTQVTVSS

SEQ ID NO: 20358 - protein, 122 aa, Artificial Sequence
  Chemically Synthesized
QVQLQESGGGLVQAGGSLRLSCAASGSISDLLAMGWYRQAPGKERELVAAIAYGSNTYYADSVKGRFTISRDNAKNTVYLQMNSLKPEDTAVYYCAAYKVGYERYYLFFLYWGQGTQVTVSS

SEQ ID NO: 20359 - protein, 123 aa, Artificial Sequence
  Chemically Synthesized
QVQLQESGGGLVQAGGSLRLSCAASGSISWPIYMGWYRQAPGKEREFPVLITVVLPYADSVKGRFTISRDNAKNTVYLQMNSLKPEDTAVYYCAVFSTVWFCGLTLSSTLIYWGQGTQVTVSS

SEQ ID NO: 20360 - protein, 111 aa, Artificial Sequence
  Chemically Synthesized
QVQLQESGGGLVQAGGSLRLSCAASGYISYSREMGWYRQAPGKEREFVASIDTGTSTNYADSVKGRFTISRDNAKNTVYLQMNSLKPEDTAVYYCAATFYWGQGTQVTVSS

SEQ ID NO: 20361 - protein, 117 aa, Artificial Sequence
  Chemically Synthesized
QVQLQESGGGLVQAGGSLRLSCAASGSIFYRNDMGWYRQAPGKERELVAGIGYGTTTYYADSVKGRFTISRDNAKNTVYLQMNSLKPEDTAVYYCAVQDGDQPSMYWGQGTQVTVSS

SEQ ID NO: 20362 - protein, 118 aa, Artificial Sequence
  Chemically Synthesized
QVQLQESGGGLVQAGGSLRLSCAASGYIFTYHDMGWYRQAPGKERELVATIGYGTSTYYADSVKGRFTISRDNAKNTVYLQMNSLKPEDTAVYYCAVGRLAVWSYAYWGQGTQVTVSS

SEQ ID NO: 20363 - protein, 122 aa, Artificial Sequence
  Chemically Synthesized
QVQLQESGGGLVQAGGSLRLSCAASGTIFPYASMGWYRQAPGKERELVAGITYGASTYYADSVKGRFTISRDNAKNTVYLQMNSLKPEDTAVYYCAVQFFYYKGFYNYLYYWGQGTQVTVSS

SEQ ID NO: 20364 - protein, 118 aa, Artificial Sequence
  Chemically Synthesized
QVQLQESGGGLVQAGGSLRLSCAASGYIFRKAVMGWYRQAPGKEREFVAGIDPGGSTNYADSVKGRFTISRDNAKNTVYLQMNSLKPEDTAVYYCAAYLFYSGHLAYWGQGTQVTVSS

SEQ ID NO: 20365 - protein, 126 aa, Artificial Sequence
  Chemically Synthesized
QVQLQESGGGLVQAGGSLRLSCAASGSIFATRWMGWYRQAPGKERELVAGINLGTTTYYADSVKGRFTISRDNAKNTVYLQMNSLKPEDTAVYYCAVDYRWWRPYYGYKYLYHYYWGQGTQVTVSS

SEQ ID NO: 20366 - protein, 125 aa, Artificial Sequence
  Chemically Synthesized
QVQLQESGGGLVQAGGSLRLSCAASGTISRLLLMGWYRQAPGKEREFVAGIDDGRVPYADSVKGRFTISRDNAKNTVYLQMNSLKPEDTAVYYCAVYDWYDHDDVQYEHEPLLYWGQGTQVTVSS

SEQ ID NO: 20367 - protein, 118 aa, Artificial Sequence
  Chemically Synthesized
QVQLQESGGGLVQAGGSLRLSCAASGNISSGVIMGWYRQAPGKERELVAGIGVGATTNYADSVKGRFTISRDNAKNTVYLQMNSLKPEDTAVYYCAAKTIFAQGYYYWGQGTQVTVSS

SEQ ID NO: 20368 - protein, 120 aa, Artificial Sequence
  Chemically Synthesized
QVQLQESGGGLVQAGGSLRLSCAASGTISYSFFMGWYRQAPGKEREFVAAITSVVVPYADSVKGRFTISRDNAKNTVYLQMNSLKPEDTAVYYCAAVDTDGRVSSLVLYWGQGTQVTVSS

SEQ ID NO: 20369 - protein, 122 aa, Artificial Sequence
  Chemically Synthesized
QVQLQESGGGLVQAGGSLRLSCAASGTISRFGIMGWYRQAPGKERELVAAIGYGGTTYYADSVKGRFTISRDNAKNTVYLQMNSLKPEDTAVYYCAARPARFVRDGVAYRYWGQGTQVTVSS

SEQ ID NO: 20370 - protein, 122 aa, Artificial Sequence
  Chemically Synthesized
QVQLQESGGGLVQAGGSLRLSCAASGSIFSDRYMGWYRQAPGKEREFVAGIAYRCYYLYADSVKGRFTISRDNAKNTVYLQMNSLKPEDTAVYYCAVYPGWYSDWGKEHSYWGQGTQVTVSS

SEQ ID NO: 20371 - protein, 118 aa, Artificial Sequence
  Chemically Synthesized
QVQLQESGGGLVQAGGSLRLSCAASGTISGAGFMGWYRQAPGKERELVATINRGGNTNYADSVKGRFTISRDNAKNTVYLQMNSLKPEDTAVYYCAVRFRWQWRHYYWGQGTQVTVSS

SEQ ID NO: 20372 - protein, 118 aa, Artificial Sequence
  Chemically Synthesized
QVQLQESGGGLVQAGGSLRLSCAASGSIFPRIVMGWYRQAPGKEREFVAGITKGANTYYADSVKGRFTISRDNAKNTVYLQMNSLKPEDTAVYYCAVLYGVYWWHYYWGQGTQVTVSS

SEQ ID NO: 20373 - protein, 118 aa, Artificial Sequence
  Chemically Synthesized
QVQLQESGGGLVQAGGSLRLSCAASGNIFLTRYMGWYRQAPGKEREFVATIDSGGNTYYADSVKGRFTISRDNAKNTVYLQMNSLKPEDTAVYYCAVLGNSFGPLYYWGQGTQVTVSS

SEQ ID NO: 20374 - protein, 117 aa, Artificial Sequence
  Chemically Synthesized
QVQLQESGGGLVQAGGSLRLSCAASGSIFDADEMGWYRQAPGKEREFVATISDGSNTNYADSVKGRFTISRDNAKNTVYLQMNSLKPEDTAVYYCAVSVWLTLRIYWGQGTQVTVSS

SEQ ID NO: 20375 - protein, 121 aa, Artificial Sequence
  Chemically Synthesized
QVQLQESGGGLVQAGGSLRLSCAASGSISALGPMGWYRQAPGKERELVATITNGTNTYYADSVKGRFTISRDNAKNTVYLQMNSLKPEDTAVYYCAVYDVKGSKLTTTMYWGQGTQVTVSS

SEQ ID NO: 20376 - protein, 122 aa, Artificial Sequence
  Chemically Synthesized
QVQLQESGGGLVQAGGSLRLSCAASGTIFLAYKMGWYRQAPGKERELVASIAQGASTYYADSVKGRFTISRDNAKNTVYLQMNSLKPEDTAVYYCAVQRYRYYVNYKRYRYWGQGTQVTVSS

SEQ ID NO: 20377 - protein, 118 aa, Artificial Sequence
  Chemically Synthesized
QVQLQESGGGLVQAGGSLRLSCAASGYIFYYWYMGWYRQAPGKERELVATIAAGATTYYADSVKGRFTISRDNAKNTVYLQMNSLKPEDTAVYYCAALQYARPAYWYWGQGTQVTVSS

SEQ ID NO: 20378 - protein, 126 aa, Artificial Sequence
  Chemically Synthesized
QVQLQESGGGLVQAGGSLRLSCAASGTIFRSYRMGWYRQAPGKERELVAAISYGGNTYYADSVKGRFTISRDNAKNTVYLQMNSLKPEDTAVYYCAVIDKGDHYLPDLYSNYLWYWGQGTQVTVSS

SEQ ID NO: 20379 - protein, 118 aa, Artificial Sequence
  Chemically Synthesized
QVQLQESGGGLVQAGGSLRLSCAASGNIFLYRFMGWYRQAPGKEREFVASIGYGSNTNYADSVKGRFTISRDNAKNTVYLQMNSLKPEDTAVYYCAAKGYRWLAHTYWGQGTQVTVSS

SEQ ID NO: 20380 - protein, 118 aa, Artificial Sequence
  Chemically Synthesized
QVQLQESGGGLVQAGGSLRLSCAASGSISQYGVMGWYRQAPGKERELVASITIGSTTYYADSVKGRFTISRDNAKNTVYLQMNSLKPEDTAVYYCAAARVRSYLYTYWGQGTQVTVSS

SEQ ID NO: 20381 - protein, 118 aa, Artificial Sequence
  Chemically Synthesized
QVQLQESGGGLVQAGGSLRLSCAASGYISVPISMGWYRQAPGKEREFVAAIGRGASTYYADSVKGRFTISRDNAKNTVYLQMNSLKPEDTAVYYCAVNVRRARYFRYWGQGTQVTVSS

SEQ ID NO: 20382 - protein, 126 aa, Artificial Sequence
  Chemically Synthesized
QVQLQESGGGLVQAGGSLRLSCAASGNIFGPFTMGWYRQAPGKERELVAGITQGGTTYYADSVKGRFTISRDNAKNTVYLQMNSLKPEDTAVYYCAAELSIPYWANSLTARSHIYWGQGTQVTVSS

SEQ ID NO: 20383 - protein, 121 aa, Artificial Sequence
  Chemically Synthesized
QVQLQESGGGLVQAGGSLRLSCAASGYISDTDYMGWYRQAPGKERELVAAIARGTITYYADSVKGRFTISRDNAKNTVYLQMNSLKPEDTAVYYCAAVWSDRDNGDYHTYWGQGTQVTVSS

SEQ ID NO: 20384 - protein, 122 aa, Artificial Sequence
  Chemically Synthesized
QVQLQESGGGLVQAGGSLRLSCAASGSISIRIYMGWYRQAPGKERELVAGIGYGANTNYADSVKGRFTISRDNAKNTVYLQMNSLKPEDTAVYYCAAYVASTDEYFTGHDYWGQGTQVTVSS

SEQ ID NO: 20385 - protein, 117 aa, Artificial Sequence
  Chemically Synthesized
QVQLQESGGGLVQAGGSLRLSCAASGSISGNYMGWYRQAPGKEREFVASIGPGASTNYADSVKGRFTISRDNAKNTVYLQMNSLKPEDTAVYYCAVDDVLLWYLPYWGQGTQVTVSS

SEQ ID NO: 20386 - protein, 122 aa, Artificial Sequence
  Chemically Synthesized
QVQLQESGGGLVQAGGSLRLSCAASGYISKPHYMGWYRQAPGKEREFVAGINHGGNTNYADSVKGRFTISRDNAKNTVYLQMNSLKPEDTAVYYCAAWPRPWYYLAFPHRYWGQGTQVTVSS

SEQ ID NO: 20387 - protein, 118 aa, Artificial Sequence
  Chemically Synthesized
QVQLQESGGGLVQAGGSLRLSCAASGTISSYPLMGWYRQAPGKEREFVAAISRGSITYYADSVKGRFTISRDNAKNTVYLQMNSLKPEDTAVYYCAATAWHGYRHYYWGQGTQVTVSS

SEQ ID NO: 20388 - protein, 118 aa, Artificial Sequence
  Chemically Synthesized
QVQLQESGGGLVQAGGSLRLSCAASGYIFFIIIMGWYRQAPGKEREFVATIAQGGNTNYADSVKGRFTISRDNAKNTVYLQMNSLKPEDTAVYYCAVNAPLAQWFRYWGQGTQVTVSS

SEQ ID NO: 20389 - protein, 118 aa, Artificial Sequence
  Chemically Synthesized
QVQLQESGGGLVQAGGSLRLSCAASGTIFYPRAMGWYRQAPGKERELVATISYGAITNYADSVKGRFTISRDNAKNTVYLQMNSLKPEDTAVYYCAVASTRWLRHRYWGQGTQVTVSS

SEQ ID NO: 20390 - protein, 117 aa, Artificial Sequence
  Chemically Synthesized
QVQLQESGGGLVQAGGSLRLSCAASGYIFGYRTMGWYRQAPGKERELVATITYGTTTYYADSVKGRFTISRDNAKNTVYLQMNSLKPEDTAVYYCAVYYTADHYDYWGQGTQVTVSS

SEQ ID NO: 20391 - protein, 115 aa, Artificial Sequence
  Chemically Synthesized
QVQLQESGGGLVQAGGSLRLSCAASGSIFLPRGMGWYRQAPGKEREFVASINGGAITYYADSVKGRFTISRDNAKNTVYLQMNSLKPEDTAVYYCAVRADVHGYWGQGTQVTVSS

SEQ ID NO: 20392 - protein, 122 aa, Artificial Sequence
  Chemically Synthesized
QVQLQESGGGLVQAGGSLRLSCAASGTIFPGVLMGWYRQAPGKEREFVAAIGKGASTYYADSVKGRFTISRDNAKNTVYLQMNSLKPEDTAVYYCAVYRFIYRTDRRGHVYWGQGTQVTVSS

SEQ ID NO: 20393 - protein, 126 aa, Artificial Sequence
  Chemically Synthesized
QVQLQESGGGLVQAGGSLRLSCAASGNISVSFYMGWYRQAPGKEREFVATIAYGGITNYADSVKGRFTISRDNAKNTVYLQMNSLKPEDTAVYYCAVNGQSDRDQGYNLFDRYRYWGQGTQVTVSS

SEQ ID NO: 20394 - protein, 118 aa, Artificial Sequence
  Chemically Synthesized
QVQLQESGGGLVQAGGSLRLSCAASGTIFQYDYMGWYRQAPGKEREFVAGIGGGSNTYYADSVKGRFTISRDNAKNTVYLQMNSLKPEDTAVYYCAVFTYTDLNLYYWGQGTQVTVSS

SEQ ID NO: 20395 - protein, 117 aa, Artificial Sequence
  Chemically Synthesized
QVQLQESGGGLVQAGGSLRLSCAASGNISDIDYMGWYRQAPGKEREFVAAIDTGGTTYYADSVKGRFTISRDNAKNTVYLQMNSLKPEDTAVYYCAADFYGDYHNYWGQGTQVTVSS

SEQ ID NO: 20396 - protein, 122 aa, Artificial Sequence
  Chemically Synthesized
QVQLQESGGGLVQAGGSLRLSCAASGYIFALQNMGWYRQAPGKERELVAAIGAGSTTNYADSVKGRFTISRDNAKNTVYLQMNSLKPEDTAVYYCAVQTGFQYRDQGEFQYWGQGTQVTVSS

SEQ ID NO: 20397 - protein, 118 aa, Artificial Sequence
  Chemically Synthesized
QVQLQESGGGLVQAGGSLRLSCAASGYISRSRDMGWYRQAPGKERELVAAITRGGITNYADSVKGRFTISRDNAKNTVYLQMNSLKPEDTAVYYCAVQSYRPRAFAYWGQGTQVTVSS

SEQ ID NO: 20398 - protein, 122 aa, Artificial Sequence
  Chemically Synthesized
QVQLQESGGGLVQAGGSLRLSCAASGTISYAGRMGWYRQAPGKERELVASIGRGGSTNYADSVKGRFTISRDNAKNTVYLQMNSLKPEDTAVYYCAARYGHAGYYRDFHIYWGQGTQVTVSS

SEQ ID NO: 20399 - protein, 118 aa, Artificial Sequence
  Chemically Synthesized
QVQLQESGGGLVQAGGSLRLSCAASGNIFDPVSMGWYRQAPGKEREFVAAISAGTNTNYADSVKGRFTISRDNAKNTVYLQMNSLKPEDTAVYYCAVIDPNPTPLQYWGQGTQVTVSS

SEQ ID NO: 20400 - protein, 117 aa, Artificial Sequence
  Chemically Synthesized
QVQLQESGGGLVQAGGSLRLSCAASGNISYARYMGWYRQAPGKEREFVAGITVGGITYYADSVKGRFTISRDNAKNTVYLQMNSLKPEDTAVYYCATKPTRWTHRYWGQGTQVTVSS

SEQ ID NO: 20401 - protein, 118 aa, Artificial Sequence
  Chemically Synthesized
QVQLQESGGGLVQAGGSLRLSCAASGTISAASKMGWYRQAPGKEREFVAGIAPGANTNYADSVKGRFTISRDNAKNTVYLQMNSLKPEDTAVYYCAAYGYRWYPFRYWGQGTQVTVSS

SEQ ID NO: 20402 - protein, 119 aa, Artificial Sequence
  Chemically Synthesized
QVQLQESGGGLVQAGGSLRLSCAASGTIFNDRGMGWYRQAPGKERELVAAINGGTTTYYADSVKGRFTISRDNAKNTVYLQMNSLKPEDTAVYYCAAFYDTRGGYYTYWGQGTQVTVSS

SEQ ID NO: 20403 - protein, 122 aa, Artificial Sequence
  Chemically Synthesized
QVQLQESGGGLVQAGGSLRLSCAASGNISDTSKMGWYRQAPGKEREFVATIGAGASTNYADSVKGRFTISRDNAKNTVYLQMNSLKPEDTAVYYCAVGGWDRRSYQIALRYWGQGTQVTVSS

SEQ ID NO: 20404 - protein, 118 aa, Artificial Sequence
  Chemically Synthesized
QVQLQESGGGLVQAGGSLRLSCAASGNISYSRAMGWYRQAPGKERELVAAISLGSNTYYADSVKGRFTISRDNAKNTVYLQMNSLKPEDTAVYYCAAVWTDAAYYPYWGQGTQVTVSS

SEQ ID NO: 20405 - protein, 116 aa, Artificial Sequence
  Chemically Synthesized
QVQLQESGGGLVQAGGSLRLSCAASGSIFYSRYMGWYRQAPGKEREFVATISLGGIPYADSVKGRFTISRDNAKNTVYLQMNSLKPEDTAVYYCAVGGYAYSVLYWGQGTQVTVSS

SEQ ID NO: 20406 - protein, 122 aa, Artificial Sequence
  Chemically Synthesized
QVQLQESGGGLVQAGGSLRLSCAASGTIFDTYLMGWYRQAPGKEREFVATIDRGTITYYADSVKGRFTISRDNAKNTVYLQMNSLKPEDTAVYYCAVRTTVGQSGRRVYAYWGQGTQVTVSS

SEQ ID NO: 20407 - protein, 122 aa, Artificial Sequence
  Chemically Synthesized
QVQLQESGGGLVQAGGSLRLSCAASGYIFRGYAMGWYRQAPGKERELVAAITRGGSTNYADSVKGRFTISRDNAKNTVYLQMNSLKPEDTAVYYCAVYRWYAWFQGFRHGYWGQGTQVTVSS

SEQ ID NO: 20408 - protein, 117 aa, Artificial Sequence
  Chemically Synthesized
QVQLQESGGGLVQAGGSLRLSCAASGSIFRRRAMGWYRQAPGKEREFVASIGAGSSTNYADSVKGRFTISRDNAKNTVYLQMNSLKPEDTAVYYCAALQQRFFHTYWGQGTQVTVSS

SEQ ID NO: 20409 - protein, 126 aa, Artificial Sequence
  Chemically Synthesized
QVQLQESGGGLVQAGGSLRLSCAASGTIFYYSYMGWYRQAPGKERELVATITRGATTYYADSVKGRFTISRDNAKNTVYLQMNSLKPEDTAVYYCAAQTYRGVPRPPRWPAYYQYWGQGTQVTVSS

SEQ ID NO: 20410 - protein, 118 aa, Artificial Sequence
  Chemically Synthesized
QVQLQESGGGLVQAGGSLRLSCAASGSISWSTHMGWYRQAPGKEREFVASISDGTSTYYADSVKGRFTISRDNAKNTVYLQMNSLKPEDTAVYYCAAWYSFGDYFGYWGQGTQVTVSS

SEQ ID NO: 20411 - protein, 122 aa, Artificial Sequence
  Chemically Synthesized
QVQLQESGGGLVQAGGSLRLSCAASGYIFRYAYMGWYRQAPGKEREFVAAITRGGNTNYADSVKGRFTISRDNAKNTVYLQMNSLKPEDTAVYYCAVGRYRRNKPGVAHDYWGQGTQVTVSS

SEQ ID NO: 20412 - protein, 118 aa, Artificial Sequence
  Chemically Synthesized
QVQLQESGGGLVQAGGSLRLSCAASGYISRYYRMGWYRQAPGKEREFVAAIASGGNTYYADSVKGRFTISRDNAKNTVYLQMNSLKPEDTAVYYCAVGPWYSFRFQYWGQGTQVTVSS

SEQ ID NO: 20413 - protein, 122 aa, Artificial Sequence
  Chemically Synthesized
QVQLQESGGGLVQAGGSLRLSCAASGTIFSPTYMGWYRQAPGKERELVAGINTGGTTYYADSVKGRFTISRDNAKNTVYLQMNSLKPEDTAVYYCAAQRDRYWYIVRAHSYWGQGTQVTVSS

SEQ ID NO: 20414 - protein, 114 aa, Artificial Sequence
  Chemically Synthesized
QVQLQESGGGLVQAGGSLRLSCAASGNISNAFAMGWYRQAPGKEREFVAGIADGASTNYADSVKGRFTISRDNAKNTVYLQMNSLKPEDTAVYYCAYQSVHQYWGQGTQVTVSS

SEQ ID NO: 20415 - protein, 118 aa, Artificial Sequence
  Chemically Synthesized
QVQLQESGGGLVQAGGSLRLSCAASGYIFAPYYMGWYRQAPGKERELVASITRGASTNYADSVKGRFTISRDNAKNTVYLQMNSLKPEDTAVYYCAAHAPPDGYYRYWGQGTQVTVSS

SEQ ID NO: 20416 - protein, 125 aa, Artificial Sequence
  Chemically Synthesized
QVQLQESGGGLVQAGGSLRLSCAASGNISPGDQMGWYRQAPGKEREFVTITVGTTTYYADSVKGRFTISRDNAKNTVYLQMNSLKPEDTAVYYCAVPHYGPYDYVVGDTHYFGYWGQGTQVTVSS

SEQ ID NO: 20417 - protein, 118 aa, Artificial Sequence
  Chemically Synthesized
QVQLQESGGGLVQAGGSLRLSCAASGTISTTYYMGWYRQAPGKEREFVASITRGGITYYADSVKGRFTISRDNAKNTVYLQMNSLKPEDTAVYYCAARRAWQGGYVYWGQGTQVTVSS

SEQ ID NO: 20418 - protein, 118 aa, Artificial Sequence
  Chemically Synthesized
QVQLQESGGGLVQAGGSLRLSCAASGSIFPYRVMGWYRQAPGKERELVAGINHGGSTYYADSVKGRFTISRDNAKNTVYLQMNSLKPEDTAVYYCAAYYRYLRFHAYWGQGTQVTVSS

SEQ ID NO: 20419 - protein, 118 aa, Artificial Sequence
  Chemically Synthesized
QVQLQESGGGLVQAGGSLRLSCAASGYIFAHNIMGWYRQAPGKERELVAGIDYGGSTYYADSVKGRFTISRDNAKNTVYLQMNSLKPEDTAVYYCAVGAYDSKRFYYWGQGTQVTVSS

SEQ ID NO: 20420 - protein, 116 aa, Artificial Sequence
  Chemically Synthesized
QVQLQESGGGLVQAGGSLRLSCAASGYIFYKRMGWYRQAPGKEREFVAGIALGTTTYYADSVKGRFTISRDNAKNTVYLQMNSLKPEDTAVYYCAAIPYYFKHYYWGQGTQVTVSS

SEQ ID NO: 20421 - protein, 122 aa, Artificial Sequence
  Chemically Synthesized
QVQLQESGGGLVQAGGSLRLSCAASGSISPYYGMGWYRQAPGKERELVATISDGSTTYYADSVKGRFTISRDNAKNTVYLQMNSLKPEDTAVYYCAATYGLYAGPPYYHLYWGQGTQVTVSS

SEQ ID NO: 20422 - protein, 118 aa, Artificial Sequence
  Chemically Synthesized
QVQLQESGGGLVQAGGSLRLSCAASGSISVGLHMGWYRQAPGKERELVAAISDGGTTNYADSVKGRFTISRDNAKNTVYLQMNSLKPEDTAVYYCAAADYSNLLYYYWGQGTQVTVSS

SEQ ID NO: 20423 - protein, 121 aa, Artificial Sequence
  Chemically Synthesized
QVQLQESGGGLVQAGGSLRLSCAASGNIFSSLMGWYRQAPGKEREFVASIAHGANTNYADSVKGRFTISRDNAKNTVYLQMNSLKPEDTAVYYCAARRRTGDSPRDAHVYWGQGTQVTVSS

SEQ ID NO: 20424 - protein, 118 aa, Artificial Sequence
  Chemically Synthesized
QVQLQESGGGLVQAGGSLRLSCAASGNISPDRDMGWYRQAPGKEREFVAGIASGTITNYADSVKGRFTISRDNAKNTVYLQMNSLKPEDTAVYYCAVTYALPRRYAYWGQGTQVTVSS

SEQ ID NO: 20425 - protein, 118 aa, Artificial Sequence
  Chemically Synthesized
QVQLQESGGGLVQAGGSLRLSCAASGYIFQQRSMGWYRQAPGKEREFVASINAGGTTYYADSVKGRFTISRDNAKNTVYLQMNSLKPEDTAVYYCAVATYRFRRHVYWGQGTQVTVSS

SEQ ID NO: 20426 - protein, 118 aa, Artificial Sequence
  Chemically Synthesized
QVQLQESGGGLVQAGGSLRLSCAASGYISRGAIMGWYRQAPGKERELVAGINSGGNTYYADSVKGRFTISRDNAKNTVYLQMNSLKPEDTAVYYCAAYRYTYRYFRYWGQGTQVTVSS

SEQ ID NO: 20427 - protein, 122 aa, Artificial Sequence
  Chemically Synthesized
QVQLQESGGGLVQAGGSLRLSCAASGTISQRAVMGWYRQAPGKERELVAAIAQGASTYYADSVKGRFTISRDNAKNTVYLQMNSLKPEDTAVYYCAVALRWYRDQPYRHGYWGQGTQVTVSS

SEQ ID NO: 20428 - protein, 118 aa, Artificial Sequence
  Chemically Synthesized
QVQLQESGGGLVQAGGSLRLSCAASGYISGHTYMGWYRQAPGKEREFVAGIGFGTITNYADSVKGRFTISRDNAKNTVYLQMNSLKPEDTAVYYCAVYLSGRFPLYYWGQGTQVTVSS

SEQ ID NO: 20429 - protein, 109 aa, Artificial Sequence
  Chemically Synthesized
QVQLQESGGGLVQAGGSLRLSCAASGTIFTTMGWYRQAPGKERELVATIGTGSTPYADSVKGRFTISRDNAKNTVYLQMNSLKPEDTAVYYCAAYGCYWGQGTQVTVSS

SEQ ID NO: 20430 - protein, 123 aa, Artificial Sequence
  Chemically Synthesized
QVQLQESGGGLVQAGGSLRLSCAASGSIFNLRAMGWYRQAPGKERELVASITHGGSTNYADSVKGRFTISRDNAKNTVYLQMNSLKPEDTAVYYCAAHGRQRYYTYYRPHRYWGQGTQVTVSS

SEQ ID NO: 20431 - protein, 118 aa, Artificial Sequence
  Chemically Synthesized
QVQLQESGGGLVQAGGSLRLSCAASGTISYWLGMGWYRQAPGKERELVAAITVGSTTYYADSVKGRFTISRDNAKNTVYLQMNSLKPEDTAVYYCAAVWPLYAFFAYWGQGTQVTVSS

SEQ ID NO: 20432 - protein, 122 aa, Artificial Sequence
  Chemically Synthesized
QVQLQESGGGLVQAGGSLRLSCAASGNIFFYGLMGWYRQAPGKEREFVAAISLGSSTYYADSVKGRFTISRDNAKNTVYLQMNSLKPEDTAVYYCAVTGKRAVWSYKTHWYWGQGTQVTVSS

SEQ ID NO: 20433 - protein, 122 aa, Artificial Sequence
  Chemically Synthesized
QVQLQESGGGLVQAGGSLRLSCAASGTISRTAYMGWYRQAPGKERELVATIDKGGNTYYADSVKGRFTISRDNAKNTVYLQMNSLKPEDTAVYYCAAKLRWPTYLYKGHGYWGQGTQVTVSS

SEQ ID NO: 20434 - protein, 122 aa, Artificial Sequence
  Chemically Synthesized
QVQLQESGGGLVQAGGSLRLSCAASGTISAFFPMGWYRQAPGKERELVATISSGANTYYADSVKGRFTISRDNAKNTVYLQMNSLKPEDTAVYYCAAGIHLGYVNRIVFYYWGQGTQVTVSS

SEQ ID NO: 20435 - protein, 118 aa, Artificial Sequence
  Chemically Synthesized
QVQLQESGGGLVQAGGSLRLSCAASGNISGGGYMGWYRQAPGKERELVASISGGSSTYYADSVKGRFTISRDNAKNTVYLQMNSLKPEDTAVYYCAVYYWYSRRHYYWGQGTQVTVSS

SEQ ID NO: 20436 - protein, 122 aa, Artificial Sequence
  Chemically Synthesized
QVQLQESGGGLVQAGGSLRLSCAASGTIFLTTYMGWYRQAPGKEREFVATITAGGTTNYADSVKGRFTISRDNAKNTVYLQMNSLKPEDTAVYYCAVRYYRSIWAYSGHYYWGQGTQVTVSS

SEQ ID NO: 20437 - protein, 122 aa, Artificial Sequence
  Chemically Synthesized
QVQLQESGGGLVQAGGSLRLSCAASGTISWQYFMGWYRQAPGKERELVAAIGWGSSTNYADSVKGRFTISRDNAKNTVYLQMNSLKPEDTAVYYCAATPWRYGYLRKTYNYWGQGTQVTVSS

SEQ ID NO: 20438 - protein, 118 aa, Artificial Sequence
  Chemically Synthesized
QVQLQESGGGLVQAGGSLRLSCAASGNIFPTRLMGWYRQAPGKEREFVAAIGYGAITYYADSVKGRFTISRDNAKNTVYLQMNSLKPEDTAVYYCAVRPKRITYYRYWGQGTQVTVSS

SEQ ID NO: 20439 - protein, 118 aa, Artificial Sequence
  Chemically Synthesized
QVQLQESGGGLVQAGGSLRLSCAASGTIFNHRVMGWYRQAPGKERELVAAISYGANTYYADSVKGRFTISRDNAKNTVYLQMNSLKPEDTAVYYCAATTERRRSLIYWGQGTQVTVSS

SEQ ID NO: 20440 - protein, 118 aa, Artificial Sequence
  Chemically Synthesized
QVQLQESGGGLVQAGGSLRLSCAASGSIFVWAYMGWYRQAPGKERELVAGIDGGGSTYYADSVKGRFTISRDNAKNTVYLQMNSLKPEDTAVYYCAVRVVGSFKYYYWGQGTQVTVSS

SEQ ID NO: 20441 - protein, 122 aa, Artificial Sequence
  Chemically Synthesized
QVQLQESGGGLVQAGGSLRLSCAASGSISPSVDMGWYRQAPGKERELVASINDGTSTYYADSVKGRFTISRDNAKNTVYLQMNSLKPEDTAVYYCAAARGSYGPYTDWFVYWGQGTQVTVSS

SEQ ID NO: 20442 - protein, 113 aa, Artificial Sequence
  Chemically Synthesized
QVQLQESGGGLVQAGGSLRLSCAASGYISDTHYMGWYRQAPGKEREFVAATGGGSTYYADSVKGRFTISRDNAKNTVYLQMNSLKPEDTAVYYCASFYYHDYWGQGTQVTVSS

SEQ ID NO: 20443 - protein, 118 aa, Artificial Sequence
  Chemically Synthesized
QVQLQESGGGLVQAGGSLRLSCAASGSISGLYYMGWYRQAPGKERELVATIDDGGITYYADSVKGRFTISRDNAKNTVYLQMNSLKPEDTAVYYCAANFHGPWPFYYWGQGTQVTVSS

SEQ ID NO: 20444 - protein, 118 aa, Artificial Sequence
  Chemically Synthesized
QVQLQESGGGLVQAGGSLRLSCAASGYISWWDAMGWYRQAPGKERELVATINRGATTNYADSVKGRFTISRDNAKNTVYLQMNSLKPEDTAVYYCAAYYNLEAPHVYWGQGTQVTVSS

SEQ ID NO: 20445 - protein, 117 aa, Artificial Sequence
  Chemically Synthesized
QVQLQESGGGLVQAGGSLRLSCAASGTISGGSEMGWYRQAPGKERELVAAIDYGSNTYYADSVKGRFTISRDNAKNTVYLQMNSLKPEDTAVYYCAVGTLSTRFFYWGQGTQVTVSS

SEQ ID NO: 20446 - protein, 118 aa, Artificial Sequence
  Chemically Synthesized
QVQLQESGGGLVQAGGSLRLSCAASGNISTRRIMGWYRQAPGKERELVATIAVGGTTNYADSVKGRFTISRDNAKNTVYLQMNSLKPEDTAVYYCAVRHRWIWGHDYWGQGTQVTVSS

SEQ ID NO: 20447 - protein, 113 aa, Artificial Sequence
  Chemically Synthesized
QVQLQESGGGLVQAGGSLRLSCAASGNTMGWYRQAPGKEREFVASITYGGITYYADSVKGRFTISRDNAKNTVYLQMNSLKPEDTAVYYCAVTIDVLFGLDYWGQGTQVTVSS

SEQ ID NO: 20448 - protein, 118 aa, Artificial Sequence
  Chemically Synthesized
QVQLQESGGGLVQAGGSLRLSCAASGNISGLIYMGWYRQAPGKEREFVAAIAGGATTNYADSVKGRFTISRDNAKNTVYLQMNSLKPEDTAVYYCAAPTQAYLFYPYWGQGTQVTVSS

SEQ ID NO: 20449 - protein, 118 aa, Artificial Sequence
  Chemically Synthesized
QVQLQESGGGLVQAGGSLRLSCAASGTISWGTRMGWYRQAPGKERELVAGIGYGGITYYADSVKGRFTISRDNAKNTVYLQMNSLKPEDTAVYYCAVRHRFPYRFTYWGQGTQVTVSS

SEQ ID NO: 20450 - protein, 118 aa, Artificial Sequence
  Chemically Synthesized
QVQLQESGGGLVQAGGSLRLSCAASGYIFSWVRMGWYRQAPGKERELVAAINQGGNTYYADSVKGRFTISRDNAKNTVYLQMNSLKPEDTAVYYCAVWYPINYWLTYWGQGTQVTVSS

SEQ ID NO: 20451 - protein, 118 aa, Artificial Sequence
  Chemically Synthesized
QVQLQESGGGLVQAGGSLRLSCAASGSISWVVYMGWYRQAPGKEREFVAGISKGSNTYYADSVKGRFTISRDNAKNTVYLQMNSLKPEDTAVYYCAAFYVRYYRHFYWGQGTQVTVSS

SEQ ID NO: 20452 - protein, 122 aa, Artificial Sequence
  Chemically Synthesized
QVQLQESGGGLVQAGGSLRLSCAASGTIFGPDQMGWYRQAPGKEREFVAAISIGSITYYADSVKGRFTISRDNAKNTVYLQMNSLKPEDTAVYYCAAYYLRYVIYHVFHIYWGQGTQVTVSS

SEQ ID NO: 20453 - protein, 122 aa, Artificial Sequence
  Chemically Synthesized
QVQLQESGGGLVQAGGSLRLSCAASGYISPTYVMGWYRQAPGKEREFVAGISRGATTYYADSVKGRFTISRDNAKNTVYLQMNSLKPEDTAVYYCAAKRWDRHFAQYYHSYWGQGTQVTVSS

SEQ ID NO: 20454 - protein, 125 aa, Artificial Sequence
  Chemically Synthesized
QVQLQESGGGLVQAGGSLRLSCAASGYISLADYMGWYRQAPGKERELVATINDGANTNYADSVKGRFTISRDNAKNTVYLQMNSLKPEDTAVYYCAAGTIKGYVRYSCWSSLSYWGQGTQVTVSS

SEQ ID NO: 20455 - protein, 118 aa, Artificial Sequence
  Chemically Synthesized
QVQLQESGGGLVQAGGSLRLSCAASGYISTNYYMGWYRQAPGKERELVASISDGSNTNYADSVKGRFTISRDNAKNTVYLQMNSLKPEDTAVYYCAVYDYYYPWSFYWGQGTQVTVSS

SEQ ID NO: 20456 - protein, 117 aa, Artificial Sequence
  Chemically Synthesized
QVQLQESGGGLVQAGGSLRLSCAASGNISISQYMGWYRQAPGKEREFVASIATVLVPYADSVKGRFTISRDNAKNTVYLQMNSLKPEDTAVYYCAVVYRYTYAHYYWGQGTQVTVSS

SEQ ID NO: 20457 - protein, 122 aa, Artificial Sequence
  Chemically Synthesized
QVQLQESGGGLVQAGGSLRLSCAASGTIFNYAQMGWYRQAPGKERELVAAINLGSITYYADSVKGRFTISRDNAKNTVYLQMNSLKPEDTAVYYCAVYPDYRDGIGTVHSYWGQGTQVTVSS

SEQ ID NO: 20458 - protein, 122 aa, Artificial Sequence
  Chemically Synthesized
QVQLQESGGGLVQAGGSLRLSCAASGTIFTVNAMGWYRQAPGKERELVATIGTGTTTYYADSVKGRFTISRDNAKNTVYLQMNSLKPEDTAVYYCAAVRDEDYRRYKLHVYWGQGTQVTVSS

SEQ ID NO: 20459 - protein, 118 aa, Artificial Sequence
  Chemically Synthesized
QVQLQESGGGLVQAGGSLRLSCAASGTIFPNGRMGWYRQAPGKERELVATISRGANTYYADSVKGRFTISRDNAKNTVYLQMNSLKPEDTAVYYCAVRGRWFNYLPYWGQGTQVTVSS

SEQ ID NO: 20460 - protein, 121 aa, Artificial Sequence
  Chemically Synthesized
QVQLQESGGGLVQAGGSLRLSCAASGTISWVRQMGWYRQAPGKEREFVAGITRGGSTYYADSVKGRFTISRDNAKNTVYLQMNSLKPEDTAVYYCAVQRGGHLTRARHYYWGQGTQVTVSS

SEQ ID NO: 20461 - protein, 118 aa, Artificial Sequence
  Chemically Synthesized
QVQLQESGGGLVQAGGSLRLSCAASGNIFSFRLMGWYRQAPGKEREFVAAITAGTSTYYADSVKGRFTISRDNAKNTVYLQMNSLKPEDTAVYYCAAYRFFLRSLKYWGQGTQVTVSS

SEQ ID NO: 20462 - protein, 118 aa, Artificial Sequence
  Chemically Synthesized
QVQLQESGGGLVQAGGSLRLSCAASGNISSGGVMGWYRQAPGKEREFVASIGFGGNTYYADSVKGRFTISRDNAKNTVYLQMNSLKPEDTAVYYCAVRRYYTLWHRYWGQGTQVTVSS

SEQ ID NO: 20463 - protein, 115 aa, Artificial Sequence
  Chemically Synthesized
QVQLQESGGGLVQAGGSLRLSCAASGNISAHPDMGWYRQAPGKEREFVATISDGGTTYYADSVKGRFTISRDNAKNTVYLQMNSLKPEDTAVYYCAVGYHGHPYWGQGTQVTVSS

SEQ ID NO: 20464 - protein, 121 aa, Artificial Sequence
  Chemically Synthesized
QVQLQESGGGLVQAGGSLRLSCAASGSISALSYMGWYRQAPGKEREFVASISFGGNTYYADSVKGRFTISRDNAKNTVYLQMNSLKPEDTAVYYCAVVESYGFDYRWSFYWGQGTQVTVSS

SEQ ID NO: 20465 - protein, 122 aa, Artificial Sequence
  Chemically Synthesized
QVQLQESGGGLVQAGGSLRLSCAASGYISRYYYMGWYRQAPGKERELVASIANGTNTNYADSVKGRFTISRDNAKNTVYLQMNSLKPEDTAVYYCAAVYYHWYYRGYYHRYWGQGTQVTVSS

SEQ ID NO: 20466 - protein, 122 aa, Artificial Sequence
  Chemically Synthesized
QVQLQESGGGLVQAGGSLRLSCAASGYISTDSVMGWYRQAPGKEREFVASITDGGITNYADSVKGRFTISRDNAKNTVYLQMNSLKPEDTAVYYCAAGWYHDRRGVRRYTYWGQGTQVTVSS

SEQ ID NO: 20467 - protein, 122 aa, Artificial Sequence
  Chemically Synthesized
QVQLQESGGGLVQAGGSLRLSCAASGYIFRPGYMGWYRQAPGKERELVASIGRGSSTNYADSVKGRFTISRDNAKNTVYLQMNSLKPEDTAVYYCAVAYRPRYGNYTNHTYWGQGTQVTVSS

SEQ ID NO: 20468 - protein, 118 aa, Artificial Sequence
  Chemically Synthesized
QVQLQESGGGLVQAGGSLRLSCAASGYIFGIISMGWYRQAPGKERELVAAITRGGSTYYADSVKGRFTISRDNAKNTVYLQMNSLKPEDTAVYYCAAYTSRRARHGYWGQGTQVTVSS

SEQ ID NO: 20469 - protein, 118 aa, Artificial Sequence
  Chemically Synthesized
QVQLQESGGGLVQAGGSLRLSCAASGTISRSWIMGWYRQAPGKEREFVAAITWGSTTYYADSVKGRFTISRDNAKNTVYLQMNSLKPEDTAVYYCAARIRYQRWHIYWGQGTQVTVSS

SEQ ID NO: 20470 - protein, 118 aa, Artificial Sequence
  Chemically Synthesized
QVQLQESGGGLVQAGGSLRLSCAASGYIFHKYRMGWYRQAPGKEREFVAAIGGSSTNYADSVKGRFTISRDNAKNTVYLQMNSLKPEDTAVYYCAVQHWWRYDRHRYWGQGTQVTVSS

SEQ ID NO: 20471 - protein, 118 aa, Artificial Sequence
  Chemically Synthesized
QVQLQESGGGLVQAGGSLRLSCAASGNIFRVRRMGWYRQAPGKEREFVAGINAGTITNYADSVKGRFTISRDNAKNTVYLQMNSLKPEDTAVYYCAAIRRYTQLHGYWGQGTQVTVSS

SEQ ID NO: 20472 - protein, 122 aa, Artificial Sequence
  Chemically Synthesized
QVQLQESGGGLVQAGGSLRLSCAASGYISWYNFMGWYRQAPGKEREFVATIGRGAITYYADSVKGRFTISRDNAKNTVYLQMNSLKPEDTAVYYCAVRYQRTVYGTRKYKYWGQGTQVTVSS

SEQ ID NO: 20473 - protein, 118 aa, Artificial Sequence
  Chemically Synthesized
QVQLQESGGGLVQAGGSLRLSCAASGSISWPYQMGWYRQAPGKERELVAAIDDGGITYYADSVKGRFTISRDNAKNTVYLQMNSLKPEDTAVYYCAVGYDAGRPHYYWGQGTQVTVSS

SEQ ID NO: 20474 - protein, 126 aa, Artificial Sequence
  Chemically Synthesized
QVQLQESGGGLVQAGGSLRLSCAASGNISWRHRMGWYRQAPGKERELVASITTGGSTYYADSVKGRFTISRDNAKNTVYLQMNSLKPEDTAVYYCAVRWYAYDGYTSRTHFRLGYWGQGTQVTVSS

SEQ ID NO: 20475 - protein, 118 aa, Artificial Sequence
  Chemically Synthesized
QVQLQESGGGLVQAGGSLRLSCAASGYIFINGLMGWYRQAPGKERELVAGISVGGNTNYADSVKGRFTISRDNAKNTVYLQMNSLKPEDTAVYYCAASDRYKWGLRYWGQGTQVTVSS

SEQ ID NO: 20476 - protein, 118 aa, Artificial Sequence
  Chemically Synthesized
QVQLQESGGGLVQAGGSLRLSCAASGTIFRGYLMGWYRQAPGKERELVATIAFGGNTYYADSVKGRFTISRDNAKNTVYLQMNSLKPEDTAVYYCAAPDKRYRYLVYWGQGTQVTVSS

SEQ ID NO: 20477 - protein, 118 aa, Artificial Sequence
  Chemically Synthesized
QVQLQESGGGLVQAGGSLRLSCAASGSISPTWSMGWYRQAPGKEREFVAGIGWGTITNYADSVKGRFTISRDNAKNTVYLQMNSLKPEDTAVYYCAARRRNYVRHGYWGQGTQVTVSS

SEQ ID NO: 20478 - protein, 126 aa, Artificial Sequence
  Chemically Synthesized
QVQLQESGGGLVQAGGSLRLSCAASGSISGRLSMGWYRQAPGKEREFVAAISTGASTNYADSVKGRFTISRDNAKNTVYLQMNSLKPEDTAVYYCAVDYYGYPLWTWYVAAKYTYWGQGTQVTVSS

SEQ ID NO: 20479 - protein, 113 aa, Artificial Sequence
  Chemically Synthesized
QVQLQESGGGLVQAGGSLRLSCAASGTISLGSMGWYRQAPGKEREFVATIDAGSTTYYADSVKGRFTISRDNAKNTVYLQMNSLKPEDTAVYYCAVHGWFGYWGQGTQVTVSS

SEQ ID NO: 20480 - protein, 126 aa, Artificial Sequence
  Chemically Synthesized
QVQLQESGGGLVQAGGSLRLSCAASGTISFADRMGWYRQAPGKERELVAAISQGGTTYYADSVKGRFTISRDNAKNTVYLQMNSLKPEDTAVYYCAADITYDLLGLPPYGLRFRYWGQGTQVTVSS

SEQ ID NO: 20481 - protein, 111 aa, Artificial Sequence
  Chemically Synthesized
QVQLQESGGGLVQAGGSLRLSCAASGNISALLDMGWYRQAPGKERELVASIAHGGITNYADSVKGRFTISRDNAKNTVYLQMNSLKPEDTAVYYCALHWYWGQGTQVTVSS

SEQ ID NO: 20482 - protein, 119 aa, Artificial Sequence
  Chemically Synthesized
QVQLQESGGGLVQAGGSLRLSCAASGSISGDYYMGWYRQAPGKERELVAAISSGGITYYADSVKGRFTISRDNAKNTVYLQMNSLKPEDTAVYYCAVASQTTTLKLIYWGQGTQVTVSS

SEQ ID NO: 20483 - protein, 126 aa, Artificial Sequence
  Chemically Synthesized
QVQLQESGGGLVQAGGSLRLSCAASGTIFDFYIMGWYRQAPGKEREFVAGIGYGGSTNYADSVKGRFTISRDNAKNTVYLQMNSLKPEDTAVYYCAALWGIVGLDDDTTGYGFGYWGQGTQVTVSS

SEQ ID NO: 20484 - protein, 122 aa, Artificial Sequence
  Chemically Synthesized
QVQLQESGGGLVQAGGSLRLSCAASGTIFYTDRMGWYRQAPGKERELVASISRGSNTNYADSVKGRFTISRDNAKNTVYLQMNSLKPEDTAVYYCAVSRYNRYRWWYYHPYWGQGTQVTVSS

SEQ ID NO: 20485 - protein, 126 aa, Artificial Sequence
  Chemically Synthesized
QVQLQESGGGLVQAGGSLRLSCAASGNIFSQFLMGWYRQAPGKERELVAGIDAGGSTYYADSVKGRFTISRDNAKNTVYLQMNSLKPEDTAVYYCAAKPFRWPDRTTIHRGYHRYWGQGTQVTVSS

SEQ ID NO: 20486 - protein, 118 aa, Artificial Sequence
  Chemically Synthesized
QVQLQESGGGLVQAGGSLRLSCAASGSIFWWRSMGWYRQAPGKERELVAAINWGGSTYYADSVKGRFTISRDNAKNTVYLQMNSLKPEDTAVYYCAVYVKRYNDFRYWGQGTQVTVSS

SEQ ID NO: 20487 - protein, 118 aa, Artificial Sequence
  Chemically Synthesized
QVQLQESGGGLVQAGGSLRLSCAASGNISHYDDMGWYRQAPGKEREFVAAIDFGGITYYADSVKGRFTISRDNAKNTVYLQMNSLKPEDTAVYYCAAQLPYYQFHPYWGQGTQVTVSS

SEQ ID NO: 20488 - protein, 118 aa, Artificial Sequence
  Chemically Synthesized
QVQLQESGGGLVQAGGSLRLSCAASGNISARGDMGWYRQAPGKERELVATIATGATTYYADSVKGRFTISRDNAKNTVYLQMNSLKPEDTAVYYCAVVDPSSYYLVYWGQGTQVTVSS

SEQ ID NO: 20489 - protein, 118 aa, Artificial Sequence
  Chemically Synthesized
QVQLQESGGGLVQAGGSLRLSCAASGSISPVVVMGWYRQAPGKEREFVATITPGTSTNYADSVKGRFTISRDNAKNTVYLQMNSLKPEDTAVYYCAAWLIRWSPLIYWGQGTQVTVSS

SEQ ID NO: 20490 - protein, 118 aa, Artificial Sequence
  Chemically Synthesized
QVQLQESGGGLVQAGGSLRLSCAASGTIFLAVNMGWYRQAPGKEREFVAGISYGTTTYYADSVKGRFTISRDNAKNTVYLQMNSLKPEDTAVYYCAVGTGWFWTHSYWGQGTQVTVSS

SEQ ID NO: 20491 - protein, 112 aa, Artificial Sequence
  Chemically Synthesized
QVQLQESGGGLVQAGGSLRLSCAASGTISDDTDMGWYRQAPGKEREFVATIGAGASTNYADSVKGRFTISRDNAKNTVYLQMNSLKPEDTAVYYCAASYPYWGQGTQVTVSS

SEQ ID NO: 20492 - protein, 126 aa, Artificial Sequence
  Chemically Synthesized
QVQLQESGGGLVQAGGSLRLSCAASGSISTVIYMGWYRQAPGKEREFVASINSGTNTNYADSVKGRFTISRDNAKNTVYLQMNSLKPEDTAVYYCAVYTPYSRYSKPTRVRQHPYWGQGTQVTVSS

SEQ ID NO: 20493 - protein, 126 aa, Artificial Sequence
  Chemically Synthesized
QVQLQESGGGLVQAGGSLRLSCAASGTISYWYPMGWYRQAPGKEREFVAAIARGTNTNYADSVKGRFTISRDNAKNTVYLQMNSLKPEDTAVYYCAVEDKPWVWAIVVQDQYYGYWGQGTQVTVSS

SEQ ID NO: 20494 - protein, 117 aa, Artificial Sequence
  Chemically Synthesized
QVQLQESGGGLVQAGGSLRLSCAASGNIFALTSMGWYRQAPGKERELVASINLGGSTYYADSVKGRFTISRDNAKNTVYLQMNSLKPEDTAVYYCAAYRSSRVSLYWGQGTQVTVSS

SEQ ID NO: 20495 - protein, 118 aa, Artificial Sequence
  Chemically Synthesized
QVQLQESGGGLVQAGGSLRLSCAASGNISIYRPMGWYRQAPGKEREFVASISIGATTYYADSVKGRFTISRDNAKNTVYLQMNSLKPEDTAVYYCAVDLLGWKLLVYWGQGTQVTVSS

SEQ ID NO: 20496 - protein, 122 aa, Artificial Sequence
  Chemically Synthesized
QVQLQESGGGLVQAGGSLRLSCAASGNISDLVLMGWYRQAPGKERELVATITLGTNTNYADSVKGRFTISRDNAKNTVYLQMNSLKPEDTAVYYCAAYQQDQWSWWIYFYYWGQGTQVTVSS

SEQ ID NO: 20497 - protein, 118 aa, Artificial Sequence
  Chemically Synthesized
QVQLQESGGGLVQAGGSLRLSCAASGNIFRPLYMGWYRQAPGKEREFVAAINGGGNTNYADSVKGRFTISRDNAKNTVYLQMNSLKPEDTAVYYCAVKTYWSWRYYYWGQGTQVTVSS

SEQ ID NO: 20498 - protein, 122 aa, Artificial Sequence
  Chemically Synthesized
QVQLQESGGGLVQAGGSLRLSCAASGNIFATSPMGWYRQAPGKEREFVAAIDIGSNTNYADSVKGRFTISRDNAKNTVYLQMNSLKPEDTAVYYCAARYDQYDDRASWSCYWGQGTQVTVSS

SEQ ID NO: 20499 - protein, 122 aa, Artificial Sequence
  Chemically Synthesized
QVQLQESGGGLVQAGGSLRLSCAASGSIFDTSYMGWYRQAPGKERELVAAINYGGSTNYADSVKGRFTISRDNAKNTVYLQMNSLKPEDTAVYYCAVRDNHGHWRYKRHYYWGQGTQVTVSS

SEQ ID NO: 20500 - protein, 118 aa, Artificial Sequence
  Chemically Synthesized
QVQLQESGGGLVQAGGSLRLSCAASGNISYTFGMGWYRQAPGKERELVAGINYGGSTNYADSVKGRFTISRDNAKNTVYLQMNSLKPEDTAVYYCAVRTVWWWPYPYWGQGTQVTVSS

SEQ ID NO: 20501 - protein, 121 aa, Artificial Sequence
  Chemically Synthesized
QVQLQESGGGLVQAGGSLRLSCAASGNIFRAIYMGWYRQAPGKEREFVASIGLGGSTYYADSVKGRFTISRDNAKNTVYLQMNSLKPEDTAVYYCAVFGRGFYYWRDYIYWGQGTQVTVSS

SEQ ID NO: 20502 - protein, 122 aa, Artificial Sequence
  Chemically Synthesized
QVQLQESGGGLVQAGGSLRLSCAASGNISRAYNMGWYRQAPGKEREFVATIDRGGSTNYADSVKGRFTISRDNAKNTVYLQMNSLKPEDTAVYYCAVSIRRYRTWYQLHVYWGQGTQVTVSS

SEQ ID NO: 20503 - protein, 122 aa, Artificial Sequence
  Chemically Synthesized
QVQLQESGGGLVQAGGSLRLSCAASGYIFYPQNMGWYRQAPGKEREFVAAIAYGGITNYADSVKGRFTISRDNAKNTVYLQMNSLKPEDTAVYYCAAGRARWVYDHRFLAYWGQGTQVTVSS

SEQ ID NO: 20504 - protein, 118 aa, Artificial Sequence
  Chemically Synthesized
QVQLQESGGGLVQAGGSLRLSCAASGYISRYTFMGWYRQAPGKERELVAAIAYGGSTYYADSVKGRFTISRDNAKNTVYLQMNSLKPEDTAVYYCAVADRPYTHHWYWGQGTQVTVSS

SEQ ID NO: 20505 - protein, 125 aa, Artificial Sequence
  Chemically Synthesized
QVQLQESGGGLVQAGGSLRLSCAASGTISEWDMGWYRQAPGKEREFVASIGDGTTTNYADSVKGRFTISRDNAKNTVYLQMNSLKPEDTAVYYCAVEYADDYHFTIYYPRDHEYWGQGTQVTVSS

SEQ ID NO: 20506 - protein, 122 aa, Artificial Sequence
  Chemically Synthesized
QVQLQESGGGLVQAGGSLRLSCAASGNISRYYGMGWYRQAPGKEREFVAGINTGSSTNYADSVKGRFTISRDNAKNTVYLQMNSLKPEDTAVYYCAAIGYVAVPYGFTLDYWGQGTQVTVSS

SEQ ID NO: 20507 - protein, 122 aa, Artificial Sequence
  Chemically Synthesized
QVQLQESGGGLVQAGGSLRLSCAASGNISRFKVMGWYRQAPGKERELVAAIDYGATTYYADSVKGRFTISRDNAKNTVYLQMNSLKPEDTAVYYCAATSQRIEPDGDYLGYWGQGTQVTVSS

SEQ ID NO: 20508 - protein, 121 aa, Artificial Sequence
  Chemically Synthesized
QVQLQESGGGLVQAGGSLRLSCAASGTISTGTSMGWYRQAPGKERELVATIELVLVPYADSVKGRFTISRDNAKNTVYLQMNSLKPEDTAVYYCAVLGPYVRIISGPLTYWGQGTQVTVSS

SEQ ID NO: 20509 - protein, 122 aa, Artificial Sequence
  Chemically Synthesized
QVQLQESGGGLVQAGGSLRLSCAASGTISEPFLMGWYRQAPGKEREFVAAIAVGASTNYADSVKGRFTISRDNAKNTVYLQMNSLKPEDTAVYYCAALNRDSGGYYDYHYYWGQGTQVTVSS

SEQ ID NO: 20510 - protein, 118 aa, Artificial Sequence
  Chemically Synthesized
QVQLQESGGGLVQAGGSLRLSCAASGTISGLYRMGWYRQAPGKEREFVAAITRGSNTYYADSVKGRFTISRDNAKNTVYLQMNSLKPEDTAVYYCAARDNFPWWLRYWGQGTQVTVSS

SEQ ID NO: 20511 - protein, 122 aa, Artificial Sequence
  Chemically Synthesized
QVQLQESGGGLVQAGGSLRLSCAASGTISRNDVMGWYRQAPGKERELVATIAIGANTNYADSVKGRFTISRDNAKNTVYLQMNSLKPEDTAVYYCAVSYSKTRDDYGGLAYWGQGTQVTVSS

SEQ ID NO: 20512 - protein, 118 aa, Artificial Sequence
  Chemically Synthesized
QVQLQESGGGLVQAGGSLRLSCAASGYIFPRPNMGWYRQAPGKEREFVAAISWGAITYYADSVKGRFTISRDNAKNTVYLQMNSLKPEDTAVYYCAAVRTSGRYHYYWGQGTQVTVSS

SEQ ID NO: 20513 - protein, 118 aa, Artificial Sequence
  Chemically Synthesized
QVQLQESGGGLVQAGGSLRLSCAASGNIFIAFAMGWYRQAPGKEREFVATISDGSTTNYADSVKGRFTISRDNAKNTVYLQMNSLKPEDTAVYYCAVDYDGQARLDYWGQGTQVTVSS

SEQ ID NO: 20514 - protein, 118 aa, Artificial Sequence
  Chemically Synthesized
QVQLQESGGGLVQAGGSLRLSCAASGYISYATIMGWYRQAPGKERELVASITSGGTTYYADSVKGRFTISRDNAKNTVYLQMNSLKPEDTAVYYCAAVYRAYREHAYWGQGTQVTVSS

SEQ ID NO: 20515 - protein, 118 aa, Artificial Sequence
  Chemically Synthesized
QVQLQESGGGLVQAGGSLRLSCAASGTISTHRIMGWYRQAPGKEREFVASISYGSNTNYADSVKGRFTISRDNAKNTVYLQMNSLKPEDTAVYYCAAVRYDTVWYYYWGQGTQVTVSS

SEQ ID NO: 20516 - protein, 117 aa, Artificial Sequence
  Chemically Synthesized
QVQLQESGGGLVQAGGSLRLSCAASGTIFVGSVMGWYRQAPGKEREFVATINPGGTTYYADSVKGRFTISRDNAKNTVYLQMNSLKPEDTAVYYCAVNNGSATTMYWGQGTQVTVSS

SEQ ID NO: 20517 - protein, 118 aa, Artificial Sequence
  Chemically Synthesized
QVQLQESGGGLVQAGGSLRLSCAASGYISEPGYMGWYRQAPGKERELVATIGSGSTTYYADSVKGRFTISRDNAKNTVYLQMNSLKPEDTAVYYCAVDDTRGYYHRYWGQGTQVTVSS

SEQ ID NO: 20518 - protein, 111 aa, Artificial Sequence
  Chemically Synthesized
QVQLQESGGGLVQAGGSLRLSCAASGTISTASGMGWYRQAPGKERELVASIGTGATTYYADSVKGRFTISRDNAKNTVYLQMNSLKPEDTAVYYCARYYYWGQGTQVTVSS

SEQ ID NO: 20519 - protein, 118 aa, Artificial Sequence
  Chemically Synthesized
QVQLQESGGGLVQAGGSLRLSCAASGTIFLPATMGWYRQAPGKEREFVAAINRGGITYYADSVKGRFTISRDNAKNTVYLQMNSLKPEDTAVYYCAADGVLQRTYGYWGQGTQVTVSS

SEQ ID NO: 20520 - protein, 118 aa, Artificial Sequence
  Chemically Synthesized
QVQLQESGGGLVQAGGSLRLSCAASGNIFFYSPMGWYRQAPGKERELVAAINHGSTTNYADSVKGRFTISRDNAKNTVYLQMNSLKPEDTAVYYCAAGLRVKSDFDYWGQGTQVTVSS

SEQ ID NO: 20521 - protein, 112 aa, Artificial Sequence
  Chemically Synthesized
QVQLQESGGGLVQAGGSLRLSCAASGTIFGYTAMGWYRQAPGKERELVAGIAVGTTTYYADSVKGRFTISRDNAKNTVYLQMNSLKPEDTAVYYCAYSYYYWGQGTQVTVSS

SEQ ID NO: 20522 - protein, 122 aa, Artificial Sequence
  Chemically Synthesized
QVQLQESGGGLVQAGGSLRLSCAASGSIFQVRIMGWYRQAPGKERELVAGIDLGGITNYADSVKGRFTISRDNAKNTVYLQMNSLKPEDTAVYYCAVDILEISAFYTDHYYWGQGTQVTVSS

SEQ ID NO: 20523 - protein, 117 aa, Artificial Sequence
  Chemically Synthesized
QVQLQESGGGLVQAGGSLRLSCAASGYIFGYAAMGWYRQAPGKERELVATINDGTNTYYADSVKGRFTISRDNAKNTVYLQMNSLKPEDTAVYYCAAPSLYIDHPYWGQGTQVTVSS

SEQ ID NO: 20524 - protein, 118 aa, Artificial Sequence
  Chemically Synthesized
QVQLQESGGGLVQAGGSLRLSCAASGSISGPVHMGWYRQAPGKEREFVASIDYGGNTNYADSVKGRFTISRDNAKNTVYLQMNSLKPEDTAVYYCAALTAYYVYHAYWGQGTQVTVSS

SEQ ID NO: 20525 - protein, 115 aa, Artificial Sequence
  Chemically Synthesized
QVQLQESGGGLVQAGGSLRLSCAASGTIFSGAHMGWYRQAPGKERETCCHVPYADSVKGRFTISRDNAKNTVYLQMNSLKPEDTAVYYCAVPYTPHLYRDPYIYWGQGTQVTVSS

SEQ ID NO: 20526 - protein, 118 aa, Artificial Sequence
  Chemically Synthesized
QVQLQESGGGLVQAGGSLRLSCAASGYISPHASMGWYRQAPGKERELVAAIAIGANTYYADSVKGRFTISRDNAKNTVYLQMNSLKPEDTAVYYCAVHNIPGSGLGYWGQGTQVTVSS

SEQ ID NO: 20527 - protein, 118 aa, Artificial Sequence
  Chemically Synthesized
QVQLQESGGGLVQAGGSLRLSCAASGNISIVPRMGWYRQAPGKERELVATIAKGATTYYADSVKGRFTISRDNAKNTVYLQMNSLKPEDTAVYYCAAGNRVDDYHFYWGQGTQVTVSS

SEQ ID NO: 20528 - protein, 126 aa, Artificial Sequence
  Chemically Synthesized
QVQLQESGGGLVQAGGSLRLSCAASGNISAQVVMGWYRQAPGKEREFVASITNGTNTYYADSVKGRFTISRDNAKNTVYLQMNSLKPEDTAVYYCAAYQYGHDGGSDRYGLHHYYWGQGTQVTVSS

SEQ ID NO: 20529 - protein, 122 aa, Artificial Sequence
  Chemically Synthesized
QVQLQESGGGLVQAGGSLRLSCAASGSISTSDYMGWYRQAPGKERELVATISVGGTTNYADSVKGRFTISRDNAKNTVYLQMNSLKPEDTAVYYCAAYEVLDWYESLRSLYWGQGTQVTVSS

SEQ ID NO: 20530 - protein, 119 aa, Artificial Sequence
  Chemically Synthesized
QVQLQESGGGLVQAGGSLRLSCAASGYISKSSDMGWYRQAPGKERELVAGIGDGSTTYYADSVKGRFTISRDNAKNTVYLQMNSLKPEDTAVYYCAYPDDVYEDYLAYWGQGTQVTVSS

SEQ ID NO: 20531 - protein, 117 aa, Artificial Sequence
  Chemically Synthesized
QVQLQESGGGLVQAGGSLRLSCAASGTISVSFMGWYRQAPGKERELVATINHGASTNYADSVKGRFTISRDNAKNTVYLQMNSLKPEDTAVYYCAAYQDSRNQHDYWGQGTQVTVSS

SEQ ID NO: 20532 - protein, 118 aa, Artificial Sequence
  Chemically Synthesized
QVQLQESGGGLVQAGGSLRLSCAASGNIFGITAMGWYRQAPGKERELVASISRGAITNYADSVKGRFTISRDNAKNTVYLQMNSLKPEDTAVYYCAAVYYGDGYHGYWGQGTQVTVSS

SEQ ID NO: 20533 - protein, 126 aa, Artificial Sequence
  Chemically Synthesized
QVQLQESGGGLVQAGGSLRLSCAASGTISGYYDMGWYRQAPGKEREFVASIADGANTNYADSVKGRFTISRDNAKNTVYLQMNSLKPEDTAVYYCAVDSAIPQHDISADGAFHRYWGQGTQVTVSS

SEQ ID NO: 20534 - protein, 122 aa, Artificial Sequence
  Chemically Synthesized
QVQLQESGGGLVQAGGSLRLSCAASGSISSYGYMGWYRQAPGKERELVAGIASGTTTYYADSVKGRFTISRDNAKNTVYLQMNSLKPEDTAVYYCAVERGYPLRYRAALYYWGQGTQVTVSS

SEQ ID NO: 20535 - protein, 118 aa, Artificial Sequence
  Chemically Synthesized
QVQLQESGGGLVQAGGSLRLSCAASGSISAADAMGWYRQAPGKERELVASITTGANTNYADSVKGRFTISRDNAKNTVYLQMNSLKPEDTAVYYCAAVWRLDTWHYYWGQGTQVTVSS

SEQ ID NO: 20536 - protein, 113 aa, Artificial Sequence
  Chemically Synthesized
QVQLQESGGGLVQAGGSLRLSCAASGNISSHTIMGWYRQAPGKEREFVATTTNYADSVKGRFTISRDNAKNTVYLQMNSLKPEDTAVYYCAVLWYDGSYHSYWGQGTQVTVSS

SEQ ID NO: 20537 - protein, 121 aa, Artificial Sequence
  Chemically Synthesized
QVQLQESGGGLVQAGGSLRLSCAASGSISYFSDMGWYRQAPGKEREFVAAIDYVLLPYADSVKGRFTISRDNAKNTVYLQMNSLKPEDTAVYYCAVGPLASADPTNGHGYWGQGTQVTVSS

SEQ ID NO: 20538 - protein, 126 aa, Artificial Sequence
  Chemically Synthesized
QVQLQESGGGLVQAGGSLRLSCAASGTIFVSPYMGWYRQAPGKEREFVASISPGSITYYADSVKGRFTISRDNAKNTVYLQMNSLKPEDTAVYYCAVDLVVLWPNAVTPITSYYYWGQGTQVTVSS

SEQ ID NO: 20539 - protein, 118 aa, Artificial Sequence
  Chemically Synthesized
QVQLQESGGGLVQAGGSLRLSCAASGNISHYLIMGWYRQAPGKERELVATIGLGGSTNYADSVKGRFTISRDNAKNTVYLQMNSLKPEDTAVYYCAVSPRLERDHVYWGQGTQVTVSS

SEQ ID NO: 20540 - protein, 121 aa, Artificial Sequence
  Chemically Synthesized
QVQLQESGGGLVQAGGSLRLSCAASGSISQPSSMGWYRQAPGKEREFVATITYGTITYYADSVKGRFTISRDNAKNTVYLQMNSLKPEDTAVYYCAVNDVGSNDSTTTLYWGQGTQVTVSS

SEQ ID NO: 20541 - protein, 118 aa, Artificial Sequence
  Chemically Synthesized
QVQLQESGGGLVQAGGSLRLSCAASGYIFVDGNMGWYRQAPGKERELVAAIASGANTNYADSVKGRFTISRDNAKNTVYLQMNSLKPEDTAVYYCAAVWYGDSWHYYWGQGTQVTVSS

SEQ ID NO: 20542 - protein, 118 aa, Artificial Sequence
  Chemically Synthesized
QVQLQESGGGLVQAGGSLRLSCAASGNISTDTTMGWYRQAPGKERELVAAINYGATTYYADSVKGRFTISRDNAKNTVYLQMNSLKPEDTAVYYCAVSFIRRFYYYYWGQGTQVTVSS

SEQ ID NO: 20543 - protein, 126 aa, Artificial Sequence
  Chemically Synthesized
QVQLQESGGGLVQAGGSLRLSCAASGSISTWDEMGWYRQAPGKERELVAAISDGSSTYYADSVKGRFTISRDNAKNTVYLQMNSLKPEDTAVYYCAVILYDWYDRDYSTSGDLYYWGQGTQVTVSS

SEQ ID NO: 20544 - protein, 112 aa, Artificial Sequence
  Chemically Synthesized
QVQLQESGGGLVQAGGSLRLSCAASGNIFLANGMGWYRQAPGKERELVAAINGGGTTNYADSVKGRFTISRDNAKNTVYLQMNSLKPEDTAVYYCAVSYLYWGQGTQVTVSS

SEQ ID NO: 20545 - protein, 122 aa, Artificial Sequence
  Chemically Synthesized
QVQLQESGGGLVQAGGSLRLSCAASGTIFYFQHMGWYRQAPGKEREFVAAITGGTTTNYADSVKGRFTISRDNAKNTVYLQMNSLKPEDTAVYYCAAVRPYRNYAATYHYYWGQGTQVTVSS

SEQ ID NO: 20546 - protein, 126 aa, Artificial Sequence
  Chemically Synthesized
QVQLQESGGGLVQAGGSLRLSCAASGTISIFYAMGWYRQAPGKERELVAAIAKGTITNYADSVKGRFTISRDNAKNTVYLQMNSLKPEDTAVYYCAVVGKYDKRTDDARYRWFYYWGQGTQVTVSS

SEQ ID NO: 20547 - protein, 125 aa, Artificial Sequence
  Chemically Synthesized
QVQLQESGGGLVQAGGSLRLSCAASGNISARVQMGWYRQAPGKEREFVATIAVVLLPYADSVKGRFTISRDNAKNTVYLQMNSLKPEDTAVYYCAALGYSYVEARDDAWDYLYYWGQGTQVTVSS

SEQ ID NO: 20548 - protein, 118 aa, Artificial Sequence
  Chemically Synthesized
QVQLQESGGGLVQAGGSLRLSCAASGYISHTHGMGWYRQAPGKEREFVAGITVGGITYYADSVKGRFTISRDNAKNTVYLQMNSLKPEDTAVYYCAVAYYRDGYHYYWGQGTQVTVSS

SEQ ID NO: 20549 - protein, 118 aa, Artificial Sequence
  Chemically Synthesized
QVQLQESGGGLVQAGGSLRLSCAASGTISDIDGMGWYRQAPGKERELVASINTGANTNYADSVKGRFTISRDNAKNTVYLQMNSLKPEDTAVYYCAAYWDVRDQLQYWGQGTQVTVSS

SEQ ID NO: 20550 - protein, 118 aa, Artificial Sequence
  Chemically Synthesized
QVQLQESGGGLVQAGGSLRLSCAASGSIFTVATMGWYRQAPGKEREFVASITTGGTTYYADSVKGRFTISRDNAKNTVYLQMNSLKPEDTAVYYCAALSYGGGYYYYWGQGTQVTVSS

SEQ ID NO: 20551 - protein, 117 aa, Artificial Sequence
  Chemically Synthesized
QVQLQESGGGLVQAGGSLRLSCAASGTIFRRYDMGWYRQAPGKEREFVASISAGGITNYADSVKGRFTISRDNAKNTVYLQMNSLKPEDTAVYYCAAQLNDASHSYWGQGTQVTVSS

SEQ ID NO: 20552 - protein, 118 aa, Artificial Sequence
  Chemically Synthesized
QVQLQESGGGLVQAGGSLRLSCAASGTISNDDWMGWYRQAPGKERELVAAINNGGSTNYADSVKGRFTISRDNAKNTVYLQMNSLKPEDTAVYYCAVRTYLYNSFGYWGQGTQVTVSS

SEQ ID NO: 20553 - protein, 121 aa, Artificial Sequence
  Chemically Synthesized
QVQLQESGGGLVQAGGSLRLSCAASGTISYYQDMGWYRQAPGKEREFVAGINDGTSTNYADSVKGRFTISRDNAKNTVYLQMNSLKPEDTAVYYCAAHHFPYPYSAHYPYWGQGTQVTVSS

SEQ ID NO: 20554 - protein, 121 aa, Artificial Sequence
  Chemically Synthesized
QVQLQESGGGLVQAGGSLRLSCAASGNISEYVLMGWYRQAPGKEREFVAGIDVGTITNYADSVKGRFTISRDNAKNTVYLQMNSLKPEDTAVYYCAVRPYFGDSVRTTFYWGQGTQVTVSS

SEQ ID NO: 20555 - protein, 121 aa, Artificial Sequence
  Chemically Synthesized
QVQLQESGGGLVQAGGSLRLSCAASGSFYDYYMGWYRQAPGKERELVATIGYGGITYYADSVKGRFTISRDNAKNTVYLQMNSLKPEDTAVYYCAADYFAFAGNTYYHAYWGQGTQVTVSS

SEQ ID NO: 20556 - protein, 125 aa, Artificial Sequence
  Chemically Synthesized
QVQLQESGGGLVQAGGSLRLSCAASGNISNRYIMGWYRQAPGKEREFVAGIGYGSTTYYADSVKGRFTISRDNAKNTVYLQMNSLKPEDTAVYYCAVPQTGQYLVLLRTPYLYYWGQGTQVTVSS

SEQ ID NO: 20557 - protein, 117 aa, Artificial Sequence
  Chemically Synthesized
QVQLQESGGGLVQAGGSLRLSCAASGSIFRVYAMGWYRQAPGKERELVAAITSVLVPYADSVKGRFTISRDNAKNTVYLQMNSLKPEDTAVYYCAVTYGRYIWYGYWGQGTQVTVSS

SEQ ID NO: 20558 - protein, 118 aa, Artificial Sequence
  Chemically Synthesized
QVQLQESGGGLVQAGGSLRLSCAASGNIFGPHGMGWYRQAPGKERELVAGIDYGSTTNYADSVKGRFTISRDNAKNTVYLQMNSLKPEDTAVYYCAVIIQNTDELYYWGQGTQVTVSS

SEQ ID NO: 20559 - protein, 125 aa, Artificial Sequence
  Chemically Synthesized
QVQLQESGGGLVQAGGSLRLSCAASGTIFDYSKMGWYRQAPGKERELVALLVLVVIPYADSVKGRFTISRDNAKNTVYLQMNSLKPEDTAVYYCAAYEGDPSTYTWTSSTDHDYWGQGTQVTVSS

SEQ ID NO: 20560 - protein, 122 aa, Artificial Sequence
  Chemically Synthesized
QVQLQESGGGLVQAGGSLRLSCAASGTISRDYVMGWYRQAPGKERELVAAIGRGTITYYADSVKGRFTISRDNAKNTVYLQMNSLKPEDTAVYYCAVIYDGYGDYGDAYRYWGQGTQVTVSS

SEQ ID NO: 20561 - protein, 117 aa, Artificial Sequence
  Chemically Synthesized
QVQLQESGGGLVQAGGSLRLSCAASGNIFGSVIMGWYRQAPGKEREFVASIDYGANTYYADSVKGRFTISRDNAKNTVYLQMNSLKPEDTAVYYCAARVTTLMTLYWGQGTQVTVSS

SEQ ID NO: 20562 - protein, 118 aa, Artificial Sequence
  Chemically Synthesized
QVQLQESGGGLVQAGGSLRLSCAASGNISLLSIMGWYRQAPGKERELVASITDGTTTNYADSVKGRFTISRDNAKNTVYLQMNSLKPEDTAVYYCAALAYRGAWYPYWGQGTQVTVSS

SEQ ID NO: 20563 - protein, 118 aa, Artificial Sequence
  Chemically Synthesized
QVQLQESGGGLVQAGGSLRLSCAASGSISPWDGMGWYRQAPGKEREFVASIGYGSSTYYADSVKGRFTISRDNAKNTVYLQMNSLKPEDTAVYYCAAYQYRSKYYYYWGQGTQVTVSS

SEQ ID NO: 20564 - protein, 122 aa, Artificial Sequence
  Chemically Synthesized
QVQLQESGGGLVQAGGSLRLSCAASGNIFPGAVMGWYRQAPGKEREFVAGISQGGSTNYADSVKGRFTISRDNAKNTVYLQMNSLKPEDTAVYYCAAVDQYDRSYAYLHYYWGQGTQVTVSS

SEQ ID NO: 20565 - protein, 118 aa, Artificial Sequence
  Chemically Synthesized
QVQLQESGGGLVQAGGSLRLSCAASGTIFLGGPMGWYRQAPGKERELVATIAFGGNTYYADSVKGRFTISRDNAKNTVYLQMNSLKPEDTAVYYCAAWSWTAYRHPYWGQGTQVTVSS

SEQ ID NO: 20566 - protein, 126 aa, Artificial Sequence
  Chemically Synthesized
QVQLQESGGGLVQAGGSLRLSCAASGNISLDSTMGWYRQAPGKERELVASIGFGTSTNYADSVKGRFTISRDNAKNTVYLQMNSLKPEDTAVYYCAALVVLGRAGGGTRIRYYPYWGQGTQVTVSS

SEQ ID NO: 20567 - protein, 122 aa, Artificial Sequence
  Chemically Synthesized
QVQLQESGGGLVQAGGSLRLSCAASGYISAPYRMGWYRQAPGKERELVAGISGGTTTYYADSVKGRFTISRDNAKNTVYLQMNSLKPEDTAVYYCAVLYPFPYDYTYYLAYWGQGTQVTVSS

SEQ ID NO: 20568 - protein, 118 aa, Artificial Sequence
  Chemically Synthesized
QVQLQESGGGLVQAGGSLRLSCAASGSISSYWYGMGWYRQAPGKERELVAGITRGANTNYADSVKGRFTISRDNAKNTVYLQMNSLKPEDTAVYYCAAPQNTPYVYYWGQGTQVTVSS

SEQ ID NO: 20569 - protein, 118 aa, Artificial Sequence
  Chemically Synthesized
QVQLQESGGGLVQAGGSLRLSCAASGNISPTNAMGWYRQAPGKEREFVAGIGTGGSTNYADSVKGRFTISRDNAKNTVYLQMNSLKPEDTAVYYCAALYPPKKYHYYWGQGTQVTVSS

SEQ ID NO: 20570 - protein, 118 aa, Artificial Sequence
  Chemically Synthesized
QVQLQESGGGLVQAGGSLRLSCAASGSIFGDTVMGWYRQAPGKEREFVAAITLGTTTNYADSVKGRFTISRDNAKNTVYLQMNSLKPEDTAVYYCAVVYYDYNYHWYWGQGTQVTVSS

SEQ ID NO: 20571 - protein, 121 aa, Artificial Sequence
  Chemically Synthesized
QVQLQESGGGLVQAGGSLRLSCAASGSIFGARMGWYRQAPGKERELVAAIGYGTITNYADSVKGRFTISRDNAKNTVYLQMNSLKPEDTAVYYCAVNGLKYVKPDVAHGYWGQGTQVTVSS

SEQ ID NO: 20572 - protein, 126 aa, Artificial Sequence
  Chemically Synthesized
QVQLQESGGGLVQAGGSLRLSCAASGSISYFAFMGWYRQAPGKERELVASISSGGTTYYADSVKGRFTISRDNAKNTVYLQMNSLKPEDTAVYYCAVNDARWNILYDVRILDFLYWGQGTQVTVSS

SEQ ID NO: 20573 - protein, 126 aa, Artificial Sequence
  Chemically Synthesized
QVQLQESGGGLVQAGGSLRLSCAASGTISATEDMGWYRQAPGKERELVASIDPGGSTYYADSVKGRFTISRDNAKNTVYLQMNSLKPEDTAVYYCAAYLLYNADDHPTDSYTLYYWGQGTQVTVSS

SEQ ID NO: 20574 - protein, 124 aa, Artificial Sequence
  Chemically Synthesized
QVQLQESGGGLVQAGGSLRLSCAASGTISRDVLMGWYRQAPGKERELVATITLGTNTYYADSVKGRFTISRDNAKNTVYLQMNSLKPEDTAVYYCAVLYLPYSPLDYHIVHTYWGQGTQVTVSS

SEQ ID NO: 20575 - protein, 122 aa, Artificial Sequence
  Chemically Synthesized
QVQLQESGGGLVQAGGSLRLSCAASGTISTAVAMGWYRQAPGKEREFVAAIGSGTNTNYADSVKGRFTISRDNAKNTVYLQMNSLKPEDTAVYYCAVLYYRHDVPLRYHYYWGQGTQVTVSS

SEQ ID NO: 20576 - protein, 118 aa, Artificial Sequence
  Chemically Synthesized
QVQLQESGGGLVQAGGSLRLSCAASGNIFTLDFMGWYRQAPGKEREFVASIAVGTTTNYADSVKGRFTISRDNAKNTVYLQMNSLKPEDTAVYYCAVYPQDEVGYYYWGQGTQVTVSS

SEQ ID NO: 20577 - protein, 118 aa, Artificial Sequence
  Chemically Synthesized
QVQLQESGGGLVQAGGSLRLSCAASGTIFTYRSMGWYRQAPGKEREFVAAITSGSTTNYADSVKGRFTISRDNAKNTVYLQMNSLKPEDTAVYYCAAIVYKYTYLYYWGQGTQVTVSS

SEQ ID NO: 20578 - protein, 122 aa, Artificial Sequence
  Chemically Synthesized
QVQLQESGGGLVQAGGSLRLSCAASGNIFYDFVMGWYRQAPGKERELVAAIDAGGSTYYADSVKGRFTISRDNAKNTVYLQMNSLKPEDTAVYYCAAIRKVTDLTTYRYAYWGQGTQVTVSS

SEQ ID NO: 20579 - protein, 118 aa, Artificial Sequence
  Chemically Synthesized
QVQLQESGGGLVQAGGSLRLSCAASGYIFHSRDMGWYRQAPGKERELVASITSGANTYYADSVKGRFTISRDNAKNTVYLQMNSLKPEDTAVYYCAVVTYNDNRHVYWGQGTQVTVSS

SEQ ID NO: 20580 - protein, 116 aa, Artificial Sequence
  Chemically Synthesized
QVQLQESGGGLVQAGGSLRLSCAASGTISDRGLMGWYRQAPGKEREFVAAIGRGGNTYYADSVKGRFTISRDNAKNTVYLQMNSLKPEDTAVYYCAVGPIDSYLYWGQGTQVTVSS

SEQ ID NO: 20581 - protein, 116 aa, Artificial Sequence
  Chemically Synthesized
QVQLQESGGGLVQAGGSLRLSCAASGTIFRPSVMGWYRQAPGKEREFVASIVRVVVPYADSVKGRFTISRDNAKNTVYLQMNSLKPEDTAVYYCAAYDRLYSTMYWGQGTQVTVSS

SEQ ID NO: 20582 - protein, 124 aa, Artificial Sequence
  Chemically Synthesized
QVQLQESGGGLVQAGGSLRLSCAASGSIFPYIEMGWYRQAPGKERELLPVLLLVVIPYADSVKGRFTISRDNAKNTVYLQMNSLKPEDTAVYYCAVSSVSTTTGTVLFVTRFYWGQGTQVTVSS

SEQ ID NO: 20583 - protein, 118 aa, Artificial Sequence
  Chemically Synthesized
QVQLQESGGGLVQAGGSLRLSCAASGNIFVYSDMGWYRQAPGKEREFVATITQGGITYYADSVKGRFTISRDNAKNTVYLQMNSLKPEDTAVYYCAVPGDWTPYLDYWGQGTQVTVSS

SEQ ID NO: 20584 - protein, 121 aa, Artificial Sequence
  Chemically Synthesized
QVQLQESGGGLVQAGGSLRLSCAASGYIMGWYRQAPGKERELVATINVGTITYYADSVKGRFTISRDNAKNTVYLQMNSLKPEDTAVYYCAAYQYYDDITYDQPYGVHLYWGQGTQVTVSS

SEQ ID NO: 20585 - protein, 117 aa, Artificial Sequence
  Chemically Synthesized
QVQLQESGGGLVQAGGSLRLSCAASGNISDYYMGWYRQAPGKEREFVAAIALGSNTNYADSVKGRFTISRDNAKNTVYLQMNSLKPEDTAVYYCAAVYTNYPRFYYWGQGTQVTVSS

SEQ ID NO: 20586 - protein, 118 aa, Artificial Sequence
  Chemically Synthesized
QVQLQESGGGLVQAGGSLRLSCAASGYISLRQYMGWYRQAPGKEREFVATIDYGASTYYADSVKGRFTISRDNAKNTVYLQMNSLKPEDTAVYYCAARYGDTDLHPYWGQGTQVTVSS

SEQ ID NO: 20587 - protein, 123 aa, Artificial Sequence
  Chemically Synthesized
QVQLQESGGGLVQAGGSLRLSCAASGNIFPLYYMGWYRQAPGKEREFVAAITLGSNTNYADSVKGRFTISRDNAKNTVYLQMNSLKPEDTAVYYCAAIDPDDYGERLLYEYYWGQGTQVTVSS

SEQ ID NO: 20588 - protein, 116 aa, Artificial Sequence
  Chemically Synthesized
QVQLQESGGGLVQAGGSLRLSCAASGNISSPVIMGWYRQAPGKEREFVAAINRGASTNYADSVKGRFTISRDNAKNTVYLQMNSLKPEDTAVYYCAVIYGDYFYYWGQGTQVTVSS

SEQ ID NO: 20589 - protein, 117 aa, Artificial Sequence
  Chemically Synthesized
QVQLQESGGGLVQAGGSLRLSCAASGSIFHYHYMGWYRQAPGKEREFVASIAYGASTNYADSVKGRFTISRDNAKNTVYLQMNSLKPEDTAVYYCAVYVYDVVFFYWGQGTQVTVSS

SEQ ID NO: 20590 - protein, 122 aa, Artificial Sequence
  Chemically Synthesized
QVQLQESGGGLVQAGGSLRLSCAASGSISHGPDMGWYRQAPGKERELVAAIAGGGITNYADSVKGRFTISRDNAKNTVYLQMNSLKPEDTAVYYCAAGTGDSKEWVGRLGYWGQGTQVTVSS

SEQ ID NO: 20591 - protein, 118 aa, Artificial Sequence
  Chemically Synthesized
QVQLQESGGGLVQAGGSLRLSCAASGNIFPPDAMGWYRQAPGKEREFVAGISRGGTTNYADSVKGRFTISRDNAKNTVYLQMNSLKPEDTAVYYCAVLLSYGRTHYYWGQGTQVTVSS

SEQ ID NO: 20592 - protein, 120 aa, Artificial Sequence
  Chemically Synthesized
QVQLQESGGGLVQAGGSLRLSCAASGTISGLGYYMGWYRQAPGKEREFVASIDVGTTTYYADSVKGRFTISRDNAKNTVYLQMNSLKPEDTAVYYCAVAGRYRHQYYGYWGQGTQVTVSS

SEQ ID NO: 20593 - protein, 118 aa, Artificial Sequence
  Chemically Synthesized
QVQLQESGGGLVQAGGSLRLSCAASGTISGPYGMGWYRQAPGKEREFVAGIGHGSNTNYADSVKGRFTISRDNAKNTVYLQMNSLKPEDTAVYYCAALYKYTYYHVYWGQGTQVTVSS

SEQ ID NO: 20594 - protein, 117 aa, Artificial Sequence
  Chemically Synthesized
QVQLQESGGGLVQAGGSLRLSCAASGNISHPAIMGWYRQAPGKERELVATLVTVLLPYADSVKGRFTISRDNAKNTVYLQMNSLKPEDTAVYYCAAQDQDDEYLYYWGQGTQVTVSS

SEQ ID NO: 20595 - protein, 121 aa, Artificial Sequence
  Chemically Synthesized
QVQLQESGGGLVQAGGSLRLSCAASGNSEGGPMGWYRQAPGKEREFVAGIDLGANTNYADSVKGRFTISRDNAKNTVYLQMNSLKPEDTAVYYCAAVYYRDRYTNRYYFYWGQGTQVTVSS

SEQ ID NO: 20596 - protein, 110 aa, Artificial Sequence
  Chemically Synthesized
QVQLQESGGGLVQAGGSLRLSCAASGNISGYDNMGWYRQAPGKEREFVASITWGTSTYYADSVKGRFTISRDNAKNTVYLQMNSLKPEDTAVYYCAAGYWGQGTQVTVSS

SEQ ID NO: 20597 - protein, 118 aa, Artificial Sequence
  Chemically Synthesized
QVQLQESGGGLVQAGGSLRLSCAASGNISWYYSMGWYRQAPGKEREFVAAIGSGATTYYADSVKGRFTISRDNAKNTVYLQMNSLKPEDTAVYYCAALSRNGSFHPYWGQGTQVTVSS

SEQ ID NO: 20598 - protein, 122 aa, Artificial Sequence
  Chemically Synthesized
QVQLQESGGGLVQAGGSLRLSCAASGYISQDVYMGWYRQAPGKERELVAGIGYGSITNYADSVKGRFTISRDNAKNTVYLQMNSLKPEDTAVYYCAATSDYITVLQHDYIYWGQGTQVTVSS

SEQ ID NO: 20599 - protein, 125 aa, Artificial Sequence
  Chemically Synthesized
QVQLQESGGGLVQAGGSLRLSCAASGNISYLTDMGWYRQAPGKERELVAAINLGANTNYADSVKGRFTISRDNAKNTVYLQMNSLKPEDTAVYYCAAGYSRLVTTFTTKTRTIYWGQGTQVTVSS

SEQ ID NO: 20600 - protein, 120 aa, Artificial Sequence
  Chemically Synthesized
QVQLQESGGGLVQAGGSLRLSCAASGSISDSISMGWYRQAPGKERELVASISQGTNTYYADSVKGRFTISRDNAKNTVYLQMNSLKPEDTAVYYCAAGIHDGDESVTIYWGQGTQVTVSS

SEQ ID NO: 20601 - protein, 121 aa, Artificial Sequence
  Chemically Synthesized
QVQLQESGGGLVQAGGSLRLSCAASGTIFYWGGMGWYRQAPGKEREFVAAIAAGSNTNYADSVKGRFTISRDNAKNTVYLQMNSLKPEDTAVYYCAVLYNDELRDGYHWYWGQGTQVTVSS

SEQ ID NO: 20602 - protein, 118 aa, Artificial Sequence
  Chemically Synthesized
QVQLQESGGGLVQAGGSLRLSCAASGTIFPGFIMGWYRQAPGKERELVAGIGYGATTYYADSVKGRFTISRDNAKNTVYLQMNSLKPEDTAVYYCAAFVGDTPYYAYWGQGTQVTVSS

SEQ ID NO: 20603 - protein, 118 aa, Artificial Sequence
  Chemically Synthesized
QVQLQESGGGLVQAGGSLRLSCAASGYISTVYGMGWYRQAPGKEREFVASIDYGSNTNYADSVKGRFTISRDNAKNTVYLQMNSLKPEDTAVYYCAALLRDNSWHYYWGQGTQVTVSS

SEQ ID NO: 20604 - protein, 117 aa, Artificial Sequence
  Chemically Synthesized
QVQLQESGGGLVQAGGSLRLSCAASGSISLESMGWYRQAPGKERELVAGIDEGGSTNYADSVKGRFTISRDNAKNTVYLQMNSLKPEDTAVYYCAVVDTVYPYHWYWGQGTQVTVSS

SEQ ID NO: 20605 - protein, 125 aa, Artificial Sequence
  Chemically Synthesized
QVQLQESGGGLVQAGGSLRLSCAASGNIFAYVRMGWYRQAPGKEREFVAAISAGGTTYYADSVKGRFTISRDNAKNTVYLQMNSLKPEDTAVYYCAAYPISSWYDDRLQSYDHYWGQGTQVTVSS

SEQ ID NO: 20606 - protein, 116 aa, Artificial Sequence
  Chemically Synthesized
QVQLQESGGGLVQAGGSLRLSCAASGSIFSHYKMGWYRQAPGKEREFVASIGSVLLPYADSVKGRFTISRDNAKNTVYLQMNSLKPEDTAVYYCAAGVQGYPHWYWGQGTQVTVSS

SEQ ID NO: 20607 - protein, 118 aa, Artificial Sequence
  Chemically Synthesized
QVQLQESGGGLVQAGGSLRLSCAASGSISDYDAMGWYRQAPGKEREFVASISRGATTNYADSVKGRFTISRDNAKNTVYLQMNSLKPEDTAVYYCAAYRSVPVLHGYWGQGTQVTVSS

SEQ ID NO: 20608 - protein, 117 aa, Artificial Sequence
  Chemically Synthesized
QVQLQESGGGLVQAGGSLRLSCAASGNIFFSNMGWYRQAPGKERELVASITRGAITYYADSVKGRFTISRDNAKNTVYLQMNSLKPEDTAVYYCAAGAGAEDVYNYWGQGTQVTVSS

SEQ ID NO: 20609 - protein, 117 aa, Artificial Sequence
  Chemically Synthesized
QVQLQESGGGLVQAGGSLRLSCAASGNIFFWQQMGWYRQAPGKERELVATINYGTTTNYADSVKGRFTISRDNAKNTVYLQMNSLKPEDTAVYYCAVYRIGNSTFYWGQGTQVTVSS

SEQ ID NO: 20610 - protein, 122 aa, Artificial Sequence
  Chemically Synthesized
QVQLQESGGGLVQAGGSLRLSCAASGNIFAVGRMGWYRQAPGKERELVAGINYGGTTYYADSVKGRFTISRDNAKNTVYLQMNSLKPEDTAVYYCAVPEDDYPAGTYVHTYWGQGTQVTVSS

SEQ ID NO: 20611 - protein, 118 aa, Artificial Sequence
  Chemically Synthesized
QVQLQESGGGLVQAGGSLRLSCAASGTISARIIMGWYRQAPGKEREFVAGIDYGATTNYADSVKGRFTISRDNAKNTVYLQMNSLKPEDTAVYYCAVIDQGDSYLHYWGQGTQVTVSS

SEQ ID NO: 20612 - protein, 122 aa, Artificial Sequence
  Chemically Synthesized
QVQLQESGGGLVQAGGSLRLSCAASGNISGSRAMGWYRQAPGKERELVASIAGGANTYYADSVKGRFTISRDNAKNTVYLQMNSLKPEDTAVYYCAAWHPWSWYNHAYHNYWGQGTQVTVSS

SEQ ID NO: 20613 - protein, 118 aa, Artificial Sequence
  Chemically Synthesized
QVQLQESGGGLVQAGGSLRLSCAASGSIFTYGAMGWYRQAPGKEREFVAGITTGTTTNYADSVKGRFTISRDNAKNTVYLQMNSLKPEDTAVYYCAVLWYDDTLHYYWGQGTQVTVSS

SEQ ID NO: 20614 - protein, 125 aa, Artificial Sequence
  Chemically Synthesized
QVQLQESGGGLVQAGGSLRLSCAASGTIFGVIGMGWYRQAPGKEREFVATISGGANTNYADSVKGRFTISRDNAKNTVYLQMNSLKPEDTAVYYCAVSVLNCTTTNVVRTVCFYWGQGTQVTVSS

SEQ ID NO: 20615 - protein, 118 aa, Artificial Sequence
  Chemically Synthesized
QVQLQESGGGLVQAGGSLRLSCAASGNISRFAGMGWYRQAPGKEREFVAGINTGATTNYADSVKGRFTISRDNAKNTVYLQMNSLKPEDTAVYYCAVLLQGEYYLYYWGQGTQVTVSS

SEQ ID NO: 20616 - protein, 118 aa, Artificial Sequence
  Chemically Synthesized
QVQLQESGGGLVQAGGSLRLSCAASGSISLQAGMGWYRQAPGKEREFVAAISTGTITNYADSVKGRFTISRDNAKNTVYLQMNSLKPEDTAVYYCAAYGDRGGFYGYWGQGTQVTVSS

SEQ ID NO: 20617 - protein, 118 aa, Artificial Sequence
  Chemically Synthesized
QVQLQESGGGLVQAGGSLRLSCAASGYISYRGYMGWYRQAPGKEREFVAAITHGTITYYADSVKGRFTISRDNAKNTVYLQMNSLKPEDTAVYYCAARGRNSLFHGYWGQGTQVTVSS

SEQ ID NO: 20618 - protein, 118 aa, Artificial Sequence
  Chemically Synthesized
QVQLQESGGGLVQAGGSLRLSCAASGTIFGFIRMGWYRQAPGKERELVAGIGTGATTNYADSVKGRFTISRDNAKNTVYLQMNSLKPEDTAVYYCAAFRYGPKYYYYWGQGTQVTVSS

SEQ ID NO: 20619 - protein, 118 aa, Artificial Sequence
  Chemically Synthesized
QVQLQESGGGLVQAGGSLRLSCAASGYIFAYLGMGWYRQAPGKERELVAGITYGGTTYYADSVKGRFTISRDNAKNTVYLQMNSLKPEDTAVYYCAVVYGYPWGLRYWGQGTQVTVSS

SEQ ID NO: 20620 - protein, 118 aa, Artificial Sequence
  Chemically Synthesized
QVQLQESGGGLVQAGGSLRLSCAASGSIFTVGYMGWYRQAPGKERELVATIGDGSNTYYADSVKGRFTISRDNAKNTVYLQMNSLKPEDTAVYYCAARTVRLARHSYWGQGTQVTVSS

SEQ ID NO: 20621 - protein, 126 aa, Artificial Sequence
  Chemically Synthesized
QVQLQESGGGLVQAGGSLRLSCAASGTIFGTVSMGWYRQAPGKERELVATINAGSTTNYADSVKGRFTISRDNAKNTVYLQMNSLKPEDTAVYYCAAGWTFDYLGHNNYRPELLYWGQGTQVTVSS

SEQ ID NO: 20622 - protein, 118 aa, Artificial Sequence
  Chemically Synthesized
QVQLQESGGGLVQAGGSLRLSCAASGSISAHTAMGWYRQAPGKERELVASIAAGGNTNYADSVKGRFTISRDNAKNTVYLQMNSLKPEDTAVYYCAVLYYEGYYYWYWGQGTQVTVSS

SEQ ID NO: 20623 - protein, 118 aa, Artificial Sequence
  Chemically Synthesized
QVQLQESGGGLVQAGGSLRLSCAASGNISRYPYMGWYRQAPGKERELVASISNGASTYYADSVKGRFTISRDNAKNTVYLQMNSLKPEDTAVYYCAVLGTYYGAYAYWGQGTQVTVSS

SEQ ID NO: 20624 - protein, 118 aa, Artificial Sequence
  Chemically Synthesized
QVQLQESGGGLVQAGGSLRLSCAASGTISVDIRMGWYRQAPGKERELVAGITGGANTYYADSVKGRFTISRDNAKNTVYLQMNSLKPEDTAVYYCAATYHGTRWFYYWGQGTQVTVSS

SEQ ID NO: 20625 - protein, 118 aa, Artificial Sequence
  Chemically Synthesized
QVQLQESGGGLVQAGGSLRLSCAASGTISSAGPMGWYRQAPGKEREFVATIGVGSSTYYADSVKGRFTISRDNAKNTVYLQMNSLKPEDTAVYYCAVLQLYAYWHYYWGQGTQVTVSS

SEQ ID NO: 20626 - protein, 126 aa, Artificial Sequence
  Chemically Synthesized
QVQLQESGGGLVQAGGSLRLSCAASGNIFGSGSMGWYRQAPGKERELVATITGGGTTNYADSVKGRFTISRDNAKNTVYLQMNSLKPEDTAVYYCAVYPYTTWWLYYDLPDYLYYWGQGTQVTVSS

SEQ ID NO: 20627 - protein, 121 aa, Artificial Sequence
  Chemically Synthesized
QVQLQESGGGLVQAGGSLRLSCAASGSISSIGTMGWYRQAPGKEREFVAGISDGAITYYADSVKGRFTISRDNAKNTVYLQMNSLKPEDTAVYYCAAVTYSDQYTRYLYYWGQGTQVTVSS

SEQ ID NO: 20628 - protein, 118 aa, Artificial Sequence
  Chemically Synthesized
QVQLQESGGGLVQAGGSLRLSCAASGTISIRYIMGWYRQAPGKEREFVAGIGDGSTTNYADSVKGRFTISRDNAKNTVYLQMNSLKPEDTAVYYCAAIVTGPAHHWYWGQGTQVTVSS

SEQ ID NO: 20629 - protein, 122 aa, Artificial Sequence
  Chemically Synthesized
QVQLQESGGGLVQAGGSLRLSCAASGTISGPAYMGWYRQAPGKEREFVAGIGQGAITYYADSVKGRFTISRDNAKNTVYLQMNSLKPEDTAVYYCAARNTGRYIEQTDFDYWGQGTQVTVSS

SEQ ID NO: 20630 - protein, 118 aa, Artificial Sequence
  Chemically Synthesized
QVQLQESGGGLVQAGGSLRLSCAASGNIFGPRNMGWYRQAPGKEREFVAGITGGGTTNYADSVKGRFTISRDNAKNTVYLQMNSLKPEDTAVYYCAALVRDGTWHGYWGQGTQVTVSS

SEQ ID NO: 20631 - protein, 118 aa, Artificial Sequence
  Chemically Synthesized
QVQLQESGGGLVQAGGSLRLSCAASGYIFVSDYMGWYRQAPGKERELVATINNGTNTYYADSVKGRFTISRDNAKNTVYLQMNSLKPEDTAVYYCAADLEFSLDYIYWGQGTQVTVSS

SEQ ID NO: 20632 - protein, 111 aa, Artificial Sequence
  Chemically Synthesized
QVQLQESGGGLVQAGGSLRLSCAASGTIFARSNMGWYRQAPGKERELVATISYGGITYYADSVKGRFTISRDNAKNTVYLQMNSLKPEDTAVYYCAYHRYWGQGTQVTVSS

SEQ ID NO: 20633 - protein, 118 aa, Artificial Sequence
  Chemically Synthesized
QVQLQESGGGLVQAGGSLRLSCAASGSISRGRFMGWYRQAPGKEREFVAGITVGATTNYADSVKGRFTISRDNAKNTVYLQMNSLKPEDTAVYYCAVFYRHWYYHSYWGQGTQVTVSS

SEQ ID NO: 20634 - protein, 122 aa, Artificial Sequence
  Chemically Synthesized
QVQLQESGGGLVQAGGSLRLSCAASGNISGGDPMGWYRQAPGKEREFVAGINRGTITYYADSVKGRFTISRDNAKNTVYLQMNSLKPEDTAVYYCAAITRGKQSYTKHHSYWGQGTQVTVSS

SEQ ID NO: 20635 - protein, 121 aa, Artificial Sequence
  Chemically Synthesized
QVQLQESGGGLVQAGGSLRLSCAASGTISYADWMGWYRQAPGKERELVATITYGGITYYADSVKGRFTISRDNAKNTVYLQMNSLKPEDTAVYYCAVHQYYVYDRYKHAYWGQGTQVTVSS

SEQ ID NO: 20636 - protein, 118 aa, Artificial Sequence
  Chemically Synthesized
QVQLQESGGGLVQAGGSLRLSCAASGNISEGPIMGWYRQAPGKEREFVASIDVGSNTNYADSVKGRFTISRDNAKNTVYLQMNSLKPEDTAVYYCAAITHDYLYYYYWGQGTQVTVSS

SEQ ID NO: 20637 - protein, 118 aa, Artificial Sequence
  Chemically Synthesized
QVQLQESGGGLVQAGGSLRLSCAASGNISAVWYMGWYRQAPGKERELVAGIALGGTTNYADSVKGRFTISRDNAKNTVYLQMNSLKPEDTAVYYCAVSQYYDTGHSYWGQGTQVTVSS

SEQ ID NO: 20638 - protein, 118 aa, Artificial Sequence
  Chemically Synthesized
QVQLQESGGGLVQAGGSLRLSCAASGTISDYLNMGWYRQAPGKEREFVAGISHGAITNYADSVKGRFTISRDNAKNTVYLQMNSLKPEDTAVYYCAAIARAEYYHYYWGQGTQVTVSS

SEQ ID NO: 20639 - protein, 122 aa, Artificial Sequence
  Chemically Synthesized
QVQLQESGGGLVQAGGSLRLSCAASGSISIYPPMGWYRQAPGKERELVATIALGSSTNYADSVKGRFTISRDNAKNTVYLQMNSLKPEDTAVYYCAVPDWGVQAYTYLLGYWGQGTQVTVSS

SEQ ID NO: 20640 - protein, 118 aa, Artificial Sequence
  Chemically Synthesized
QVQLQESGGGLVQAGGSLRLSCAASGSISSFVDMGWYRQAPGKERELVASIGDGASTNYADSVKGRFTISRDNAKNTVYLQMNSLKPEDTAVYYCAVGYPSYGDYGYWGQGTQVTVSS

SEQ ID NO: 20641 - protein, 122 aa, Artificial Sequence
  Chemically Synthesized
QVQLQESGGGLVQAGGSLRLSCAASGTIFVNHLMGWYRQAPGKEREFVASIASGTTTYYADSVKGRFTISRDNAKNTVYLQMNSLKPEDTAVYYCAARSQAAYFYYWYHYYWGQGTQVTVSS

SEQ ID NO: 20642 - protein, 118 aa, Artificial Sequence
  Chemically Synthesized
QVQLQESGGGLVQAGGSLRLSCAASGNIFVTGHMGWYRQAPGKEREFVAGIGRGSTTNYADSVKGRFTISRDNAKNTVYLQMNSLKPEDTAVYYCAVIVYDSRYHYYWGQGTQVTVSS

SEQ ID NO: 20643 - protein, 122 aa, Artificial Sequence
  Chemically Synthesized
QVQLQESGGGLVQAGGSLRLSCAASGSISHLYAMGWYRQAPGKERELVASIDYGTNTYYADSVKGRFTISRDNAKNTVYLQMNSLKPEDTAVYYCAAISNGTGLDDAIYVYWGQGTQVTVSS

SEQ ID NO: 20644 - protein, 118 aa, Artificial Sequence
  Chemically Synthesized
QVQLQESGGGLVQAGGSLRLSCAASGTISQWNHMGWYRQAPGKEREFVAGIDRGASTYYADSVKGRFTISRDNAKNTVYLQMNSLKPEDTAVYYCAARVNQFLTLGYWGQGTQVTVSS

SEQ ID NO: 20645 - protein, 118 aa, Artificial Sequence
  Chemically Synthesized
QVQLQESGGGLVQAGGSLRLSCAASGTISWNNTMGWYRQAPGKEREFVAGISDGANTYYADSVKGRFTISRDNAKNTVYLQMNSLKPEDTAVYYCAAWSAEGYDHGYWGQGTQVTVSS

SEQ ID NO: 20646 - protein, 118 aa, Artificial Sequence
  Chemically Synthesized
QVQLQESGGGLVQAGGSLRLSCAASGSISGVYTMGWYRQAPGKERELVASIAEGTITYYADSVKGRFTISRDNAKNTVYLQMNSLKPEDTAVYYCAVIVYGYNTLSYWGQGTQVTVSS

SEQ ID NO: 20647 - protein, 122 aa, Artificial Sequence
  Chemically Synthesized
QVQLQESGGGLVQAGGSLRLSCAASGNIFLTGTMGWYRQAPGKEREFVASIGRGGSTNYADSVKGRFTISRDNAKNTVYLQMNSLKPEDTAVYYCAAYGATTLIYSDVHGYWGQGTQVTVSS

SEQ ID NO: 20648 - protein, 117 aa, Artificial Sequence
  Chemically Synthesized
QVQLQESGGGLVQAGGSLRLSCAASGNISVNDEMGWYRQAPGKERELVATIAYGGNTYYADSVKGRFTISRDNAKNTVYLQMNSLKPEDTAVYYCAVSDQVEYDMYWGQGTQVTVSS

SEQ ID NO: 20649 - protein, 110 aa, Artificial Sequence
  Chemically Synthesized
QVQLQESGGGLVQAGGSLRLSCAASGTISLRTLMGWYRQAPGKERELVAAIGPGGTTNYADSVKGRFTISRDNAKNTVYLQMNSLKPEDTAVYYCAACYWGQGTQVTVSS

SEQ ID NO: 20650 - protein, 121 aa, Artificial Sequence
  Chemically Synthesized
QVQLQESGGGLVQAGGSLRLSCAASGNISVEAYMGWYRQAPGKERELVATIGSGTTTYYADSVKGRFTISRDNAKNTVYLQMNSLKPEDTAVYYCAVYKDDSLVVSLVFYWGQGTQVTVSS

SEQ ID NO: 20651 - protein, 117 aa, Artificial Sequence
  Chemically Synthesized
QVQLQESGGGLVQAGGSLRLSCAASGNISYYASMGWYRQAPGKERELVVLVPYADSVKGRFTISRDNAKNTVYLQMNSLKPEDTAVYYCAAGYFTFEYDYDVYLAYWGQGTQVTVSS

SEQ ID NO: 20652 - protein, 113 aa, Artificial Sequence
  Chemically Synthesized
QVQLQESGGGLVQAGGSLRLSCAASGIFFRTLMGWYRQAPGKEREFVASISSGANTNYADSVKGRFTISRDNAKNTVYLQMNSLKPEDTAVYYCAVDYPHYYWGQGTQVTVSS

SEQ ID NO: 20653 - protein, 125 aa, Artificial Sequence
  Chemically Synthesized
QVQLQESGGGLVQAGGSLRLSCAASGNIFRLRGMGWYRQAPGKEREFVASIGLGSTTYYADSVKGRFTISRDNAKNTVYLQMNSLKPEDTAVYYCAVGLWWDQRFLGPGAYHNYWGQGTQVTVSS

SEQ ID NO: 20654 - protein, 118 aa, Artificial Sequence
  Chemically Synthesized
QVQLQESGGGLVQAGGSLRLSCAASGSISYIADMGWYRQAPGKERELVATIDLGGSTNYADSVKGRFTISRDNAKNTVYLQMNSLKPEDTAVYYCAVYADPEPFYEYWGQGTQVTVSS

SEQ ID NO: 20655 - protein, 118 aa, Artificial Sequence
  Chemically Synthesized
QVQLQESGGGLVQAGGSLRLSCAASGYIFYDSHMGWYRQAPGKEREFVAGITVGANTYYADSVKGRFTISRDNAKNTVYLQMNSLKPEDTAVYYCAAFDVTYPDHDYWGQGTQVTVSS

SEQ ID NO: 20656 - protein, 121 aa, Artificial Sequence
  Chemically Synthesized
QVQLQESGGGLVQAGGSLRLSCAASGTISVPSSMGWYRQAPGKERELVAAINSVVLPYADSVKGRFTISRDNAKNTVYLQMNSLKPEDTAVYYCAAYSVPYYRYAKQHYYWGQGTQVTVSS

SEQ ID NO: 20657 - protein, 122 aa, Artificial Sequence
  Chemically Synthesized
QVQLQESGGGLVQAGGSLRLSCAASGTIFGGRDMGWYRQAPGKEREFVAGITSGSTTNYADSVKGRFTISRDNAKNTVYLQMNSLKPEDTAVYYCAVLPTGLVPFDYDLYYWGQGTQVTVSS

SEQ ID NO: 20658 - protein, 122 aa, Artificial Sequence
  Chemically Synthesized
QVQLQESGGGLVQAGGSLRLSCAASGSISTTELMGWYRQAPGKEREFVAAIGYGSITYYADSVKGRFTISRDNAKNTVYLQMNSLKPEDTAVYYCAAYATHDTGAQGVYYYWGQGTQVTVSS

SEQ ID NO: 20659 - protein, 118 aa, Artificial Sequence
  Chemically Synthesized
QVQLQESGGGLVQAGGSLRLSCAASGNISRTYDMGWYRQAPGKEREFVASIGYGSITYYADSVKGRFTISRDNAKNTVYLQMNSLKPEDTAVYYCAALDWYGSGYRYWGQGTQVTVSS

SEQ ID NO: 20660 - protein, 114 aa, Artificial Sequence
  Chemically Synthesized
QVQLQESGGGLVQAGGSLRLSCAASGTISVLFYMGWYRQAPGKERELVAGIARGTSTYYADSVKGRFTISRDNAKNTVYLQMNSLKPEDTAVYYCAAARNHGYWGQGTQVTVSS

SEQ ID NO: 20661 - protein, 122 aa, Artificial Sequence
  Chemically Synthesized
QVQLQESGGGLVQAGGSLRLSCAASGSISPAGQMGWYRQAPGKEREFVASISDGGSTNYADSVKGRFTISRDNAKNTVYLQMNSLKPEDTAVYYCAVHDPDPVGRKDTYAYWGQGTQVTVSS

SEQ ID NO: 20662 - protein, 128 aa, Artificial Sequence
  Chemically Synthesized
QVQLQESGGGLVQAGGSLRLSCAASGNISEGYEMGWYRQAPGKEREFVAAIDLGSSTYYADSVKGRFTISRDNAKNTVYLQMNSLKPEDTAVYYCAVDNYYTVDGGYEGYGPLLFHYWGQGTQVTVSS

SEQ ID NO: 20663 - protein, 118 aa, Artificial Sequence
  Chemically Synthesized
QVQLQESGGGLVQAGGSLRLSCAASGYIFGVRGMGWYRQAPGKERELVASISQGGTTNYADSVKGRFTISRDNAKNTVYLQMNSLKPEDTAVYYCAAWYGYIYRYGYWGQGTQVTVSS

SEQ ID NO: 20664 - protein, 122 aa, Artificial Sequence
  Chemically Synthesized
QVQLQESGGGLVQAGGSLRLSCAASGSIFVDGSMGWYRQAPGKERELVAAINDGTSTYYADSVKGRFTISRDNAKNTVYLQMNSLKPEDTAVYYCAAIEFYYDHTLGRHFYWGQGTQVTVSS

SEQ ID NO: 20665 - protein, 118 aa, Artificial Sequence
  Chemically Synthesized
QVQLQESGGGLVQAGGSLRLSCAASGSISDDFYMGWYRQAPGKEREFVAGIAYGSNTYYADSVKGRFTISRDNAKNTVYLQMNSLKPEDTAVYYCAVLGGLSPNHDYWGQGTQVTVSS

SEQ ID NO: 20666 - protein, 118 aa, Artificial Sequence
  Chemically Synthesized
QVQLQESGGGLVQAGGSLRLSCAASGTISYSIYMGWYRQAPGKERELVAGISGGSSTNYADSVKGRFTISRDNAKNTVYLQMNSLKPEDTAVYYCAARRGWYQWLPYWGQGTQVTVSS

SEQ ID NO: 20667 - protein, 117 aa, Artificial Sequence
  Chemically Synthesized
QVQLQESGGGLVQAGGSLRLSCAASGTISSGTMGWYRQAPGKERELVAGITTGSTTNYADSVKGRFTISRDNAKNTVYLQMNSLKPEDTAVYYCAADDGIGTYFNYWGQGTQVTVSS

SEQ ID NO: 20668 - protein, 122 aa, Artificial Sequence
  Chemically Synthesized
QVQLQESGGGLVQAGGSLRLSCAASGNIFGYYDMGWYRQAPGKEREFVAGIGVGTTTNYADSVKGRFTISRDNAKNTVYLQMNSLKPEDTAVYYCAAGYYRHSLSRYLHTYWGQGTQVTVSS

SEQ ID NO: 20669 - protein, 118 aa, Artificial Sequence
  Chemically Synthesized
QVQLQESGGGLVQAGGSLRLSCAASGNISDNTTMGWYRQAPGKEREFVATINRGAITNYADSVKGRFTISRDNAKNTVYLQMNSLKPEDTAVYYCAATRTGQYDYRYWGQGTQVTVSS

SEQ ID NO: 20670 - protein, 118 aa, Artificial Sequence
  Chemically Synthesized
QVQLQESGGGLVQAGGSLRLSCAASGNIFEVYLMGWYRQAPGKEREFVAGINDGGITYYADSVKGRFTISRDNAKNTVYLQMNSLKPEDTAVYYCAAYGWVDLVHDYWGQGTQVTVSS

SEQ ID NO: 20671 - protein, 119 aa, Artificial Sequence
  Chemically Synthesized
QVQLQESGGGLVQAGGSLRLSCAASGTISTPYAMGWYRQAPGKEREFVAAIDYGATTYYADSVKGRFTISRDNAKNTVYLQMNSLKPEDTAVYYCAVVRDPYSFDLDYWGQGTQVTVSS

SEQ ID NO: 20672 - protein, 118 aa, Artificial Sequence
  Chemically Synthesized
QVQLQESGGGLVQAGGSLRLSCAASGYISLWGGMGWYRQAPGKEREFVAAIDLGSSTNYADSVKGRFTISRDNAKNTVYLQMNSLKPEDTAVYYCAAYPYYYPYHIYWGQGTQVTVSS

SEQ ID NO: 20673 - protein, 118 aa, Artificial Sequence
  Chemically Synthesized
QVQLQESGGGLVQAGGSLRLSCAASGNIFRYDYMGWYRQAPGKEREFVAAITRGGTTYYADSVKGRFTISRDNAKNTVYLQMNSLKPEDTAVYYCAVVNYTSATLDYWGQGTQVTVSS

SEQ ID NO: 20674 - protein, 118 aa, Artificial Sequence
  Chemically Synthesized
QVQLQESGGGLVQAGGSLRLSCAASGSISATDSMGWYRQAPGKEREFVASIDGGTTTNYADSVKGRFTISRDNAKNTVYLQMNSLKPEDTAVYYCAAIPYYYAWFVYWGQGTQVTVSS

SEQ ID NO: 20675 - protein, 118 aa, Artificial Sequence
  Chemically Synthesized
QVQLQESGGGLVQAGGSLRLSCAASGSISSGAIMGWYRQAPGKEREFVAGIGYGGNTYYADSVKGRFTISRDNAKNTVYLQMNSLKPEDTAVYYCAVFDWYRPLFDYWGQGTQVTVSS

SEQ ID NO: 20676 - protein, 126 aa, Artificial Sequence
  Chemically Synthesized
QVQLQESGGGLVQAGGSLRLSCAASGTISSSAWMGWYRQAPGKERELVASIAIGATTYYADSVKGRFTISRDNAKNTVYLQMNSLKPEDTAVYYCAVGRWANSWPTDSPGSQHQYWGQGTQVTVSS

SEQ ID NO: 20677 - protein, 121 aa, Artificial Sequence
  Chemically Synthesized
QVQLQESGGGLVQAGGSLRLSCAASGSISITRYMGWYRQAPGKEREFVAGIGWGTSTNYADSVKGRFTISRDNAKNTVYLQMNSLKPEDTAVYYCAAYGWWVYYGYPDHYWGQGTQVTVSS

SEQ ID NO: 20678 - protein, 122 aa, Artificial Sequence
  Chemically Synthesized
QVQLQESGGGLVQAGGSLRLSCAASGTIFRLPFMGWYRQAPGKERELVAGIGDGATTYYADSVKGRFTISRDNAKNTVYLQMNSLKPEDTAVYYCAVVSYNPGTHRYPHRYWGQGTQVTVSS

SEQ ID NO: 20679 - protein, 118 aa, Artificial Sequence
  Chemically Synthesized
QVQLQESGGGLVQAGGSLRLSCAASGSIFAYWYMGWYRQAPGKERELVAAIAGGGITYYADSVKGRFTISRDNAKNTVYLQMNSLKPEDTAVYYCAAARRPRARFAYWGQGTQVTVSS

SEQ ID NO: 20680 - protein, 109 aa, Artificial Sequence
  Chemically Synthesized
QVQLQESGGGLVQAGGSLRLSCAASGNIFPNNYMGWYRQAPGKEREFVATIGGGGSTYYADSVKGRFTISRDNAKNTVYLQMNSLKPEDTAVYYCASYWGQGTQVTVSS

SEQ ID NO: 20681 - protein, 118 aa, Artificial Sequence
  Chemically Synthesized
QVQLQESGGGLVQAGGSLRLSCAASGYISRVQGMGWYRQAPGKEREFVASINYGTTTYYADSVKGRFTISRDNAKNTVYLQMNSLKPEDTAVYYCAVIGFWSYFHGYWGQGTQVTVSS

SEQ ID NO: 20682 - protein, 126 aa, Artificial Sequence
  Chemically Synthesized
QVQLQESGGGLVQAGGSLRLSCAASGYIFPWSYMGWYRQAPGKEREFVASIDDGTITYYADSVKGRFTISRDNAKNTVYLQMNSLKPEDTAVYYCAALDQRGGDYYGWSVPHYLYWGQGTQVTVSS

SEQ ID NO: 20683 - protein, 115 aa, Artificial Sequence
  Chemically Synthesized
QVQLQESGGGLVQAGGSLRLSCAASGTISTTTMGWYRQAPGKEREFVAAITDGGNTNYADSVKGRFTISRDNAKNTVYLQMNSLKPEDTAVYYCAAWIRYVLGYWGQGTQVTVSS

SEQ ID NO: 20684 - protein, 126 aa, Artificial Sequence
  Chemically Synthesized
QVQLQESGGGLVQAGGSLRLSCAASGTIFLTYWMGWYRQAPGKERELVATIDDGSTTNYADSVKGRFTISRDNAKNTVYLQMNSLKPEDTAVYYCAVYEQVLLDDYNAYYSGLYYWGQGTQVTVSS

SEQ ID NO: 20685 - protein, 122 aa, Artificial Sequence
  Chemically Synthesized
QVQLQESGGGLVQAGGSLRLSCAASGSIFPRYSMGWYRQAPGKEREFVAGITTGATTYYADSVKGRFTISRDNAKNTVYLQMNSLKPEDTAVYYCAALYPTWYSPRGLLWYWGQGTQVTVSS

SEQ ID NO: 20686 - protein, 122 aa, Artificial Sequence
  Chemically Synthesized
QVQLQESGGGLVQAGGSLRLSCAASGTIFWGAGMGWYRQAPGKEREFVAAIAAGSNTYYADSVKGRFTISRDNAKNTVYLQMNSLKPEDTAVYYCAVYYWYAPIYADPYVYWGQGTQVTVSS

SEQ ID NO: 20687 - protein, 122 aa, Artificial Sequence
  Chemically Synthesized
QVQLQESGGGLVQAGGSLRLSCAASGSISTPDSMGWYRQAPGKERELVATIDYGANTNYADSVKGRFTISRDNAKNTVYLQMNSLKPEDTAVYYCAAPNSARGVRPINLRYWGQGTQVTVSS

SEQ ID NO: 20688 - protein, 122 aa, Artificial Sequence
  Chemically Synthesized
QVQLQESGGGLVQAGGSLRLSCAASGYISVSYPMGWYRQAPGKEREFVATIDYGANTNYADSVKGRFTISRDNAKNTVYLQMNSLKPEDTAVYYCAAAKYFYYGLYYDYPYWGQGTQVTVSS

SEQ ID NO: 20689 - protein, 126 aa, Artificial Sequence
  Chemically Synthesized
QVQLQESGGGLVQAGGSLRLSCAASGNIFSNYWMGWYRQAPGKEREFVASITTGATTNYADSVKGRFTISRDNAKNTVYLQMNSLKPEDTAVYYCAVYRAQITGYGYQYAKNLHYWGQGTQVTVSS

SEQ ID NO: 20690 - protein, 110 aa, Artificial Sequence
  Chemically Synthesized
QVQLQESGGGLVQAGGSLRLSCAASGTIFFIRPMGWYRQAPGKEREFVASISSGATTYYADSVKGRFTISRDNAKNTVYLQMNSLKPEDTAVYYCAFVYWGQGTQVTVSS

SEQ ID NO: 20691 - protein, 122 aa, Artificial Sequence
  Chemically Synthesized
QVQLQESGGGLVQAGGSLRLSCAASGNISYVLQMGWYRQAPGKEREFVASIGYGATTYYADSVKGRFTISRDNAKNTVYLQMNSLKPEDTAVYYCAAITYYPRDLQGDYLYWGQGTQVTVSS

SEQ ID NO: 20692 - protein, 118 aa, Artificial Sequence
  Chemically Synthesized
QVQLQESGGGLVQAGGSLRLSCAASGSIFDYFVMGWYRQAPGKEREFVAAIASGTSTYYADSVKGRFTISRDNAKNTVYLQMNSLKPEDTAVYYCAAGLIVPQTHLYWGQGTQVTVSS

SEQ ID NO: 20693 - protein, 122 aa, Artificial Sequence
  Chemically Synthesized
QVQLQESGGGLVQAGGSLRLSCAASGSIFRGRSMGWYRQAPGKEREFVAGITYGGTTYYADSVKGRFTISRDNAKNTVYLQMNSLKPEDTAVYYCAAITVPYLYPSRYHAYWGQGTQVTVSS

SEQ ID NO: 20694 - protein, 109 aa, Artificial Sequence
  Chemically Synthesized
QVQLQESGGGLVQAGGSLRLSCAASGTIFRGWGMGWYRQAPGKEREFVATIAVGSNTYADSVKGRFTISRDNAKNTVYLQMNSLKPEDTAVYYCAAQYWGQGTQVTVSS

SEQ ID NO: 20695 - protein, 110 aa, Artificial Sequence
  Chemically Synthesized
QVQLQESGGGLVQAGGSLRLSCAASGSISYIKYMGWYRQAPGKEREFVAAITGGGNTNYADSVKGRFTISRDNAKNTVYLQMNSLKPEDTAVYYCAYLYWGQGTQVTVSS

SEQ ID NO: 20696 - protein, 117 aa, Artificial Sequence
  Chemically Synthesized
QVQLQESGGGLVQAGGSLRLSCAASGNISQYSTMGWYRQAPGKERELVAAIGDGATTNYADSVKGRFTISRDNAKNTVYLQMNSLKPEDTAVYYCAVQTSTSLIMYWGQGTQVTVSS

SEQ ID NO: 20697 - protein, 123 aa, Artificial Sequence
  Chemically Synthesized
QVQLQESGGGLVQAGGSLRLSCAASGTIFSIAFMGWYRQAPGKEREFVASIAAGGNTYYADSVKGRFTISRDNAKNTVYLQMNSLKPEDTAVYYCAAAGVRDYALYEYYHSYWGQGTQVTVSS

SEQ ID NO: 20698 - protein, 118 aa, Artificial Sequence
  Chemically Synthesized
QVQLQESGGGLVQAGGSLRLSCAASGTIFRRYAMGWYRQAPGKEREFVAGINRGSNTNYADSVKGRFTISRDNAKNTVYLQMNSLKPEDTAVYYCAAATTYQWYYPYWGQGTQVTVSS

SEQ ID NO: 20699 - protein, 126 aa, Artificial Sequence
  Chemically Synthesized
QVQLQESGGGLVQAGGSLRLSCAASGTIFGRFYMGWYRQAPGKERELVAAIDAGGNTNYADSVKGRFTISRDNAKNTVYLQMNSLKPEDTAVYYCAAYPNHENYKGAADPEYHAYWGQGTQVTVSS

SEQ ID NO: 20700 - protein, 110 aa, Artificial Sequence
  Chemically Synthesized
QVQLQESGGGLVQAGGSLRLSCAASGSIFYYYDMGWYRQAPGKEREFVATIAGGGNTYYADSVKGRFTISRDNAKNTVYLQMNSLKPEDTAVYYCAALYWGQGTQVTVSS

SEQ ID NO: 20701 - protein, 119 aa, Artificial Sequence
  Chemically Synthesized
QVQLQESGGGLVQAGGSLRLSCAASGSIFPGPYMGWYRQAPGKERELVASIASGASTYYADSVKGRFTISRDNAKNTVYLQMNSLKPEDTAVYYCAAWGGGLDVPFGYWGQGTQVTVSS

SEQ ID NO: 20702 - protein, 125 aa, Artificial Sequence
  Chemically Synthesized
QVQLQESGGGLVQAGGSLRLSCAASGNIFYYGYMGWYRQAPGKERELVATIAYGGNTNYADSVKGRFTISRDNAKNTVYLQMNSLKPEDTAVYYCAAFVDGSTQGIPLGLRLCYWGQGTQVTVSS

SEQ ID NO: 20703 - protein, 118 aa, Artificial Sequence
  Chemically Synthesized
QVQLQESGGGLVQAGGSLRLSCAASGYISYDRGMGWYRQAPGKERELVAGIDSGANTNYADSVKGRFTISRDNAKNTVYLQMNSLKPEDTAVYYCAADIEQGTAHPYWGQGTQVTVSS

SEQ ID NO: 20704 - protein, 112 aa, Artificial Sequence
  Chemically Synthesized
QVQLQESGGGLVQAGGSLRLSCAASGSISTLTQMGWYRQAPGKEREFVASIDTGTITYYADSVKGRFTISRDNAKNTVYLQMNSLKPEDTAVYYCATLRIYWGQGTQVTVSS

SEQ ID NO: 20705 - protein, 120 aa, Artificial Sequence
  Chemically Synthesized
QVQLQESGGGLVQAGGSLRLSCAASGIFLLCRMGWYRQAPGKERELVATIGAGGTTYYADSVKGRFTISRDNAKNTVYLQMNSLKPEDTAVYYCAVEPTDRGTYVGYIYWGQGTQVTVSS

SEQ ID NO: 20706 - protein, 118 aa, Artificial Sequence
  Chemically Synthesized
QVQLQESGGGLVQAGGSLRLSCAASGNIFGALLMGWYRQAPGKEREFVAGINLGTTTNYADSVKGRFTISRDNAKNTVYLQMNSLKPEDTAVYYCAAVYWDQGRHDYWGQGTQVTVSS

SEQ ID NO: 20707 - protein, 122 aa, Artificial Sequence
  Chemically Synthesized
QVQLQESGGGLVQAGGSLRLSCAASGNIFQHGDMGWYRQAPGKERELVATIDGGTTTNYADSVKGRFTISRDNAKNTVYLQMNSLKPEDTAVYYCAAYWARDQDAGLYLTYWGQGTQVTVSS

SEQ ID NO: 20708 - protein, 118 aa, Artificial Sequence
  Chemically Synthesized
QVQLQESGGGLVQAGGSLRLSCAASGNIFQYRSMGWYRQAPGKERELVASITGGGNTNYADSVKGRFTISRDNAKNTVYLQMNSLKPEDTAVYYCAAEVDNTGWFDYWGQGTQVTVSS

SEQ ID NO: 20709 - protein, 118 aa, Artificial Sequence
  Chemically Synthesized
QVQLQESGGGLVQAGGSLRLSCAASGNISGGDIMGWYRQAPGKERELVATIGDGSSTNYADSVKGRFTISRDNAKNTVYLQMNSLKPEDTAVYYCAARGIPAFLFTYWGQGTQVTVSS

SEQ ID NO: 20710 - protein, 118 aa, Artificial Sequence
  Chemically Synthesized
QVQLQESGGGLVQAGGSLRLSCAASGYIFYSYYMGWYRQAPGKEREFVATIAYGGITNYADSVKGRFTISRDNAKNTVYLQMNSLKPEDTAVYYCAVARYYPWLFRYWGQGTQVTVSS

SEQ ID NO: 20711 - protein, 124 aa, Artificial Sequence
  Chemically Synthesized
QVQLQESGGGLVQAGGSLRLSCAASGSISRAWYMGWYRQAPGKERELVATIGIGGNTNYADSVKGRFTISRDNAKNTVYLQMNSLKPEDTAVYYCAVAYRYRPYGRNGYRLAYWGQGTQVTVSS

SEQ ID NO: 20712 - protein, 118 aa, Artificial Sequence
  Chemically Synthesized
QVQLQESGGGLVQAGGSLRLSCAASGTISTQRAMGWYRQAPGKERELVAGIARGGTTYYADSVKGRFTISRDNAKNTVYLQMNSLKPEDTAVYYCAVYRWRYAVLQYWGQGTQVTVSS

SEQ ID NO: 20713 - protein, 116 aa, Artificial Sequence
  Chemically Synthesized
QVQLQESGGGLVQAGGSLRLSCAASGYILLCRMGWYRQAPGKEREFVATIAYGSSTNYADSVKGRFTISRDNAKNTVYLQMNSLKPEDTAVYYCAANFWADSVIYWGQGTQVTVSS

SEQ ID NO: 20714 - protein, 118 aa, Artificial Sequence
  Chemically Synthesized
QVQLQESGGGLVQAGGSLRLSCAASGTISASPDMGWYRQAPGKERELVATITGGAITNYADSVKGRFTISRDNAKNTVYLQMNSLKPEDTAVYYCAVNLPIYAGYDYWGQGTQVTVSS

SEQ ID NO: 20715 - protein, 122 aa, Artificial Sequence
  Chemically Synthesized
QVQLQESGGGLVQAGGSLRLSCAASGTISPDVIMGWYRQAPGKEREFVAAIDYGATTYYADSVKGRFTISRDNAKNTVYLQMNSLKPEDTAVYYCAADRQPVAIYFVNHAYWGQGTQVTVSS

SEQ ID NO: 20716 - protein, 118 aa, Artificial Sequence
  Chemically Synthesized
QVQLQESGGGLVQAGGSLRLSCAASGYISWRVRMGWYRQAPGKERELVAAIGFGASTNYADSVKGRFTISRDNAKNTVYLQMNSLKPEDTAVYYCAAYWTAPDYLGYWGQGTQVTVSS

SEQ ID NO: 20717 - protein, 122 aa, Artificial Sequence
  Chemically Synthesized
QVQLQESGGGLVQAGGSLRLSCAASGYIFERTNMGWYRQAPGKEREFVASIGVGSNTNYADSVKGRFTISRDNAKNTVYLQMNSLKPEDTAVYYCAVAYVPPRRVYYRFVYWGQGTQVTVSS

SEQ ID NO: 20718 - protein, 126 aa, Artificial Sequence
  Chemically Synthesized
QVQLQESGGGLVQAGGSLRLSCAASGNISADGGMGWYRQAPGKERELVAAIDYGTITNYADSVKGRFTISRDNAKNTVYLQMNSLKPEDTAVYYCAAGHRYRKRKLQRVRSPFAYWGQGTQVTVSS

SEQ ID NO: 20719 - protein, 118 aa, Artificial Sequence
  Chemically Synthesized
QVQLQESGGGLVQAGGSLRLSCAASGTIFDWYFMGWYRQAPGKERELVASIANGSITYYADSVKGRFTISRDNAKNTVYLQMNSLKPEDTAVYYCAAGDYANSALGYWGQGTQVTVSS

SEQ ID NO: 20720 - protein, 122 aa, Artificial Sequence
  Chemically Synthesized
QVQLQESGGGLVQAGGSLRLSCAASGYISYQDVMGWYRQAPGKERELVVGIDVGASTNYADSVKGRFTISRDNAKNTVYLQMNSLKPEDTAVYYCAVDGRYYLNRYKRFGYWGQGTQVTVSS

SEQ ID NO: 20721 - protein, 122 aa, Artificial Sequence
  Chemically Synthesized
QVQLQESGGGLVQAGGSLRLSCAASGTISRAFWMGWYRQAPGKERELVATITPGTNTNYADSVKGRFTISRDNAKNTVYLQMNSLKPEDTAVYYCAAALNGYYTDYIILGYWGQGTQVTVSS

SEQ ID NO: 20722 - protein, 117 aa, Artificial Sequence
  Chemically Synthesized
QVQLQESGGGLVQAGGSLRLSCAASGTIFPRLSMGWYRQAPGKEREFVAAITSGGSTNYADSVKGRFTISRDNAKNTVYLQMNSLKPEDTAVYYCAASVLTMVTIYWGQGTQVTVSS

SEQ ID NO: 20723 - protein, 119 aa, Artificial Sequence
  Chemically Synthesized
QVQLQESGGGLVQAGGSLRLSCAASGSISKRHMGWYRQAPGKERELVAAISKGTTTNYADSVKGRFTISRDNAKNTVYLQMNSLKPEDTAVYYCAAVGYYGASYSFGYWGQGTQVTVSS

SEQ ID NO: 20724 - protein, 117 aa, Artificial Sequence
  Chemically Synthesized
QVQLQESGGGLVQAGGSLRLSCAASGYISSIAYMGWYRQAPGKERELVASIGIGTITYYADSVKGRFTISRDNAKNTVYLQMNSLKPEDTAVYYCAVADIKGDFAYWGQGTQVTVSS

SEQ ID NO: 20725 - protein, 118 aa, Artificial Sequence
  Chemically Synthesized
QVQLQESGGGLVQAGGSLRLSCAASGYISATGFMGWYRQAPGKEREFVASIDGGANTYYADSVKGRFTISRDNAKNTVYLQMNSLKPEDTAVYYCAADYDRGDRLDYWGQGTQVTVSS

SEQ ID NO: 20726 - protein, 121 aa, Artificial Sequence
  Chemically Synthesized
QVQLQESGGGLVQAGGSLRLSCAASGTILRWVMGWYRQAPGKEREFVAAIAAGGTTNYADSVKGRFTISRDNAKNTVYLQMNSLKPEDTAVYYCAAGDDYYLQGIYLYQYWGQGTQVTVSS

SEQ ID NO: 20727 - protein, 122 aa, Artificial Sequence
  Chemically Synthesized
QVQLQESGGGLVQAGGSLRLSCAASGSIFLYTPMGWYRQAPGKERELVAGIAAGGITNYADSVKGRFTISRDNAKNTVYLQMNSLKPEDTAVYYCAVYHHWWYYDPRTYLYWGQGTQVTVSS

SEQ ID NO: 20728 - protein, 122 aa, Artificial Sequence
  Chemically Synthesized
QVQLQESGGGLVQAGGSLRLSCAASGNISGAYYMGWYRQAPGKERELVAAISQGANTYYADSVKGRFTISRDNAKNTVYLQMNSLKPEDTAVYYCAAQSRHTDQLPRRHQYWGQGTQVTVSS

SEQ ID NO: 20729 - protein, 122 aa, Artificial Sequence
  Chemically Synthesized
QVQLQESGGGLVQAGGSLRLSCAASGYISAFYSMGWYRQAPGKERELVASIDLGASTYYADSVKGRFTISRDNAKNTVYLQMNSLKPEDTAVYYCAVTDGPGYYLDLGHVYWGQGTQVTVSS

SEQ ID NO: 20730 - protein, 109 aa, Artificial Sequence
  Chemically Synthesized
QVQLQESGGGLVQAGGSLRLSCAASGSISASGYMGWYRQAPGKERELVAGISRGSNTNYADSVKGRFTISRDNAKNTVYLQMNSLKPEDTAVYYCAYYWGQGTQVTVSS

SEQ ID NO: 20731 - protein, 118 aa, Artificial Sequence
  Chemically Synthesized
QVQLQESGGGLVQAGGSLRLSCAASGYISSISYMGWYRQAPGKEREFVASIGLGTITNYADSVKGRFTISRDNAKNTVYLQMNSLKPEDTAVYYCAVYGYQGYDFAYWGQGTQVTVSS

SEQ ID NO: 20732 - protein, 126 aa, Artificial Sequence
  Chemically Synthesized
QVQLQESGGGLVQAGGSLRLSCAASGYISGGHYMGWYRQAPGKEREFVASINTGSITNYADSVKGRFTISRDNAKNTVYLQMNSLKPEDTAVYYCAADYQPWWWDAKYPTWAHSYWGQGTQVTVSS

SEQ ID NO: 20733 - protein, 122 aa, Artificial Sequence
  Chemically Synthesized
QVQLQESGGGLVQAGGSLRLSCAASGYIFDGNSMGWYRQAPGKEREFVATIDQGSTTNYADSVKGRFTISRDNAKNTVYLQMNSLKPEDTAVYYCAVYRPAVYRYLPYYDYWGQGTQVTVSS

SEQ ID NO: 20734 - protein, 117 aa, Artificial Sequence
  Chemically Synthesized
QVQLQESGGGLVQAGGSLRLSCAASGTIFGYQSMGWYRQAPGKERELVASIGPGSTTNYADSVKGRFTISRDNAKNTVYLQMNSLKPEDTAVYYCAATRDLYEGWYWGQGTQVTVSS

SEQ ID NO: 20735 - protein, 125 aa, Artificial Sequence
  Chemically Synthesized
QVQLQESGGGLVQAGGSLRLSCAASGYISYGYAMGWYRQAPGKEREFVATIDTGSITNYADSVKGRFTISRDNAKNTVYLQMNSLKPEDTAVYYCAVGPTYDLGYYAPDHRHDYWGQGTQVTVSS

SEQ ID NO: 20736 - protein, 118 aa, Artificial Sequence
  Chemically Synthesized
QVQLQESGGGLVQAGGSLRLSCAASGSIFGTTPMGWYRQAPGKEREFVAGITRGGSTYYADSVKGRFTISRDNAKNTVYLQMNSLKPEDTAVYYCAVNYWIVTFHPYWGQGTQVTVSS

SEQ ID NO: 20737 - protein, 116 aa, Artificial Sequence
  Chemically Synthesized
QVQLQESGGGLVQAGGSLRLSCAASGSISIAADMGWYRQAPGKERELVATTTNYADSVKGRFTISRDNAKNTVYLQMNSLKPEDTAVYYCAATYDQEPDYEPLEYWGQGTQVTVSS

SEQ ID NO: 20738 - protein, 118 aa, Artificial Sequence
  Chemically Synthesized
QVQLQESGGGLVQAGGSLRLSCAASGYISDYAFMGWYRQAPGKERELVATIDAGTITYYADSVKGRFTISRDNAKNTVYLQMNSLKPEDTAVYYCAAGGYDDLYYYYWGQGTQVTVSS

SEQ ID NO: 20739 - protein, 115 aa, Artificial Sequence
  Chemically Synthesized
QVQLQESGGGLVQAGGSLRLSCAASGNIFPAGDMGWYRQAPGKERELVAGITRGGNTNYADSVKGRFTISRDNAKNTVYLQMNSLKPEDTAVYYCAAYISLLFYWGQGTQVTVSS

SEQ ID NO: 20740 - protein, 122 aa, Artificial Sequence
  Chemically Synthesized
QVQLQESGGGLVQAGGSLRLSCAASGSIFWLHYMGWYRQAPGKERELVATINNGGTTNYADSVKGRFTISRDNAKNTVYLQMNSLKPEDTAVYYCAASGYWTRYYGYVLAYWGQGTQVTVSS

SEQ ID NO: 20741 - protein, 119 aa, Artificial Sequence
  Chemically Synthesized
QVQLQESGGGLVQAGGSLRLSCAASGYISASSYMGWYRQAPGKERELVASIGLGGITYYADSVKGRFTISRDNAKNTVYLQMNSLKPEDTAVYYCAVEWSGVYYAHDYWGQGTQVTVSS

SEQ ID NO: 20742 - protein, 121 aa, Artificial Sequence
  Chemically Synthesized
QVQLQESGGGLVQAGGSLRLSCAASGTISYSYMGWYRQAPGKERELVAGIAGGSNTYYADSVKGRFTISRDNAKNTVYLQMNSLKPEDTAVYYCAVNDVADRSTLAQHQYWGQGTQVTVSS

SEQ ID NO: 20743 - protein, 122 aa, Artificial Sequence
  Chemically Synthesized
QVQLQESGGGLVQAGGSLRLSCAASGNIFRLDYMGWYRQAPGKERELVASIDIGGNTYYADSVKGRFTISRDNAKNTVYLQMNSLKPEDTAVYYCAAISDYDGYRQVDHRYWGQGTQVTVSS

SEQ ID NO: 20744 - protein, 112 aa, Artificial Sequence
  Chemically Synthesized
QVQLQESGGGLVQAGGSLRLSCAASGTISWYPIMGWYRQAPGKERELVAAISYGGITYYADSVKGRFTISRDNAKNTVYLQMNSLKPEDTAVYYCAVAHYYWGQGTQVTVSS

SEQ ID NO: 20745 - protein, 118 aa, Artificial Sequence
  Chemically Synthesized
QVQLQESGGGLVQAGGSLRLSCAASGNISSTEHMGWYRQAPGKEREFVAAITRGTTTYYADSVKGRFTISRDNAKNTVYLQMNSLKPEDTAVYYCAADKGVYWSLRYWGQGTQVTVSS

SEQ ID NO: 20746 - protein, 126 aa, Artificial Sequence
  Chemically Synthesized
QVQLQESGGGLVQAGGSLRLSCAASGSISPWFTMGWYRQAPGKEREFVAGITQGATTNYADSVKGRFTISRDNAKNTVYLQMNSLKPEDTAVYYCAVYYYRGRYHAHEPRLRFSYWGQGTQVTVSS

SEQ ID NO: 20747 - protein, 118 aa, Artificial Sequence
  Chemically Synthesized
QVQLQESGGGLVQAGGSLRLSCAASGTISYYKIMGWYRQAPGKEREFVAGISLGTTTNYADSVKGRFTISRDNAKNTVYLQMNSLKPEDTAVYYCAVSYYDTLGHVYWGQGTQVTVSS

SEQ ID NO: 20748 - protein, 120 aa, Artificial Sequence
  Chemically Synthesized
QVQLQESGGGLVQAGGSLRLSCAASGNIFVVYEMGWYRQAPGKEREFVAGITLGANTYADSVKGRFTISRDNAKNTVYLQMNSLKPEDTAVYYCAAYGGFWGYQYNYGYWGQGTQVTVSS

SEQ ID NO: 20749 - protein, 121 aa, Artificial Sequence
  Chemically Synthesized
QVQLQESGGGLVQAGGSLRLSCAASGNISLRGYMGWYRQAPGKERELVAGITQGGTTNYADSVKGRFTISRDNAKNTVYLQMNSLKPEDTAVYYCAVDYYTASNRFTVFYWGQGTQVTVSS

SEQ ID NO: 20750 - protein, 126 aa, Artificial Sequence
  Chemically Synthesized
QVQLQESGGGLVQAGGSLRLSCAASGYIFAEPDMGWYRQAPGKERELVAAISRGSITYYADSVKGRFTISRDNAKNTVYLQMNSLKPEDTAVYYCAVYYTYAGDTDSSSDDYLHYWGQGTQVTVSS

SEQ ID NO: 20751 - protein, 120 aa, Artificial Sequence
  Chemically Synthesized
QVQLQESGGGLVQAGGSLRLSCAASGTISVDPHMGWYRQAPGKERELVAAIGPGGTTYYADSVKGRFTISRDNAKNTVYLQMNSLKPEDTAVYYCAVVVGDSRRNFFNYWGQGTQVTVSS

SEQ ID NO: 20752 - protein, 118 aa, Artificial Sequence
  Chemically Synthesized
QVQLQESGGGLVQAGGSLRLSCAASGSISNASYMGWYRQAPGKERELVAGINIGGITYYADSVKGRFTISRDNAKNTVYLQMNSLKPEDTAVYYCAVLYHWVDDYRYWGQGTQVTVSS

SEQ ID NO: 20753 - protein, 111 aa, Artificial Sequence
  Chemically Synthesized
QVQLQESGGGLVQAGGSLRLSCAASGNISGLVYMGWYRQAPGKERELVATIGFGSITYYADSVKGRFTISRDNAKNTVYLQMNSLKPEDTAVYYCAVHLYWGQGTQVTVSS

SEQ ID NO: 20754 - protein, 122 aa, Artificial Sequence
  Chemically Synthesized
QVQLQESGGGLVQAGGSLRLSCAASGNISGDTYMGWYRQAPGKEREFVAGIASGTITNYADSVKGRFTISRDNAKNTVYLQMNSLKPEDTAVYYCAVEWYGADIDIDRYRYWGQGTQVTVSS

SEQ ID NO: 20755 - protein, 120 aa, Artificial Sequence
  Chemically Synthesized
QVQLQESGGGLVQAGGSLRLSCAASGTISPPGNMGWYRQAPGKEREFVATIAQGSTTNYADSVKGRFTISRDNAKNTVYLQMNSLKPEDTAVYYCAATTLTVNWVTSFYWGQGTQVTVSS

SEQ ID NO: 20756 - protein, 119 aa, Artificial Sequence
  Chemically Synthesized
QVQLQESGGGLVQAGGSLRLSCAASGTISYHGAMGWYRQAPGKERELVASINGGTITNYADSVKGRFTISRDNAKNTVYLQMNSLKPEDTAVYYCAADDWAGDYFYYYWGQGTQVTVSS

SEQ ID NO: 20757 - protein, 118 aa, Artificial Sequence
  Chemically Synthesized
QVQLQESGGGLVQAGGSLRLSCAASGSISGVLFMGWYRQAPGKEREFVAGIDHGGNTNYADSVKGRFTISRDNAKNTVYLQMNSLKPEDTAVYYCAVRPQVLTAHYYWGQGTQVTVSS

SEQ ID NO: 20758 - protein, 126 aa, Artificial Sequence
  Chemically Synthesized
QVQLQESGGGLVQAGGSLRLSCAASGYISPYTVMGWYRQAPGKEREFVASITYGAITNYADSVKGRFTISRDNAKNTVYLQMNSLKPEDTAVYYCAVYDPEVELYYTRYTYGHYYWGQGTQVTVSS

SEQ ID NO: 20759 - protein, 122 aa, Artificial Sequence
  Chemically Synthesized
QVQLQESGGGLVQAGGSLRLSCAASGTISSDPSMGWYRQAPGKERELVAAIGPGSNTYYADSVKGRFTISRDNAKNTVYLQMNSLKPEDTAVYYCAAGYDYTDPSSPRHYYWGQGTQVTVSS

SEQ ID NO: 20760 - protein, 126 aa, Artificial Sequence
  Chemically Synthesized
QVQLQESGGGLVQAGGSLRLSCAASGTIFGDRRMGWYRQAPGKERELVATITSGTSTNYADSVKGRFTISRDNAKNTVYLQMNSLKPEDTAVYYCAAKANYLPSRHGYYYWPHYYWGQGTQVTVSS

SEQ ID NO: 20761 - protein, 110 aa, Artificial Sequence
  Chemically Synthesized
QVQLQESGGGLVQAGGSLRLSCAASGYIFSVYAMGWYRQAPGKEREFVATITDGTTTYYADSVKGRFTISRDNAKNTVYLQMNSLKPEDTAVYYCAAIYWGQGTQVTVSS

SEQ ID NO: 20762 - protein, 119 aa, Artificial Sequence
  Chemically Synthesized
QVQLQESGGGLVQAGGSLRLSCAASGNIFHYYDYMGWYRQAPGKERELVAAIDTGTITYYADSVKGRFTISRDNAKNTVYLQMNSLKPEDTAVYYCAAQTSDRRNYQYWGQGTQVTVSS

SEQ ID NO: 20763 - protein, 122 aa, Artificial Sequence
  Chemically Synthesized
QVQLQESGGGLVQAGGSLRLSCAASGYIFQYTKMGWYRQAPGKERELVAGITYGTITYYADSVKGRFTISRDNAKNTVYLQMNSLKPEDTAVYYCAVALRAYADDPYHLYYWGQGTQVTVSS

SEQ ID NO: 20764 - protein, 118 aa, Artificial Sequence
  Chemically Synthesized
QVQLQESGGGLVQAGGSLRLSCAASGTIFRYRWMGWYRQAPGKERELVATIGFGTSTNYADSVKGRFTISRDNAKNTVYLQMNSLKPEDTAVYYCAAYPWYYPRYEYWGQGTQVTVSS

SEQ ID NO: 20765 - protein, 122 aa, Artificial Sequence
  Chemically Synthesized
QVQLQESGGGLVQAGGSLRLSCAASGSISILDAMGWYRQAPGKEREFVAAIDFGGSTNYADSVKGRFTISRDNAKNTVYLQMNSLKPEDTAVYYCAARRYYGAGDTTQHTYWGQGTQVTVSS

SEQ ID NO: 20766 - protein, 126 aa, Artificial Sequence
  Chemically Synthesized
QVQLQESGGGLVQAGGSLRLSCAASGSISTPGDMGWYRQAPGKEREFVAAIGVGTITNYADSVKGRFTISRDNAKNTVYLQMNSLKPEDTAVYYCAVDDPVPYYGQTGDNLTYRYWGQGTQVTVSS

SEQ ID NO: 20767 - protein, 122 aa, Artificial Sequence
  Chemically Synthesized
QVQLQESGGGLVQAGGSLRLSCAASGTISALVAMGWYRQAPGKERELVASISNGTITYYADSVKGRFTISRDNAKNTVYLQMNSLKPEDTAVYYCAAYAESGTQPEGTLLYWGQGTQVTVSS

SEQ ID NO: 20768 - protein, 118 aa, Artificial Sequence
  Chemically Synthesized
QVQLQESGGGLVQAGGSLRLSCAASGTIFTYVVMGWYRQAPGKEREFVAAINTGGNTYYADSVKGRFTISRDNAKNTVYLQMNSLKPEDTAVYYCAAVYYWVGGHWYWGQGTQVTVSS

SEQ ID NO: 20769 - protein, 122 aa, Artificial Sequence
  Chemically Synthesized
QVQLQESGGGLVQAGGSLRLSCAASGTIFYTTTMGWYRQAPGKEREFVAAITRGASTYYADSVKGRFTISRDNAKNTVYLQMNSLKPEDTAVYYCAANWYYYDRYYANYFYWGQGTQVTVSS

SEQ ID NO: 20770 - protein, 122 aa, Artificial Sequence
  Chemically Synthesized
QVQLQESGGGLVQAGGSLRLSCAASGTISRVATMGWYRQAPGKEREFVAAISRGASTNYADSVKGRFTISRDNAKNTVYLQMNSLKPEDTAVYYCAVVAWYDRLIASVHSYWGQGTQVTVSS

SEQ ID NO: 20771 - protein, 118 aa, Artificial Sequence
  Chemically Synthesized
QVQLQESGGGLVQAGGSLRLSCAASGSISWAYYMGWYRQAPGKERELVATIAYGGNTYYADSVKGRFTISRDNAKNTVYLQMNSLKPEDTAVYYCAVFEDYRQTLLYWGQGTQVTVSS

SEQ ID NO: 20772 - protein, 122 aa, Artificial Sequence
  Chemically Synthesized
QVQLQESGGGLVQAGGSLRLSCAASGYISGDAYMGWYRQAPGKEREFVAAISGGSTTNYADSVKGRFTISRDNAKNTVYLQMNSLKPEDTAVYYCAVDGYREATDYSPYDYWGQGTQVTVSS

SEQ ID NO: 20773 - protein, 117 aa, Artificial Sequence
  Chemically Synthesized
QVQLQESGGGLVQAGGSLRLSCAASGNIFDILGMGWYRQAPGKERELVAAIAGGSTYYADSVKGRFTISRDNAKNTVYLQMNSLKPEDTAVYYCAANAYDSQFHGYWGQGTQVTVSS

SEQ ID NO: 20774 - protein, 126 aa, Artificial Sequence
  Chemically Synthesized
QVQLQESGGGLVQAGGSLRLSCAASGTISSAFYMGWYRQAPGKERELVAAISLGANTYYADSVKGRFTISRDNAKNTVYLQMNSLKPEDTAVYYCAVQDTSFELFTSARIYPHTYWGQGTQVTVSS

SEQ ID NO: 20775 - protein, 118 aa, Artificial Sequence
  Chemically Synthesized
QVQLQESGGGLVQAGGSLRLSCAASGNISVVIDMGWYRQAPGKERELVAGIAHGTITNYADSVKGRFTISRDNAKNTVYLQMNSLKPEDTAVYYCAVGSGTNQVHSYWGQGTQVTVSS

SEQ ID NO: 20776 - protein, 115 aa, Artificial Sequence
  Chemically Synthesized
QVQLQESGGGLVQAGGSLRLSCAASGSISPGTAMGWYRQAPGKEREFVAAIGDGGTTNYADSVKGRFTISRDNAKNTVYLQMNSLKPEDTAVYYCADDEIYHRYWGQGTQVTVSS

SEQ ID NO: 20777 - protein, 118 aa, Artificial Sequence
  Chemically Synthesized
QVQLQESGGGLVQAGGSLRLSCAASGSIFFIVAMGWYRQAPGKEREFVATISYGTTTYYADSVKGRFTISRDNAKNTVYLQMNSLKPEDTAVYYCAVFLYRAHDYPYWGQGTQVTVSS

SEQ ID NO: 20778 - protein, 121 aa, Artificial Sequence
  Chemically Synthesized
QVQLQESGGGLVQAGGSLRLSCAASGYISQHYDMGWYRQAPGKERELVALLLTVLIPYADSVKGRFTISRDNAKNTVYLQMNSLKPEDTAVYYCAVQRVDDGKGVRALDYWGQGTQVTVSS

SEQ ID NO: 20779 - protein, 122 aa, Artificial Sequence
  Chemically Synthesized
QVQLQESGGGLVQAGGSLRLSCAASGYIFPYTFMGWYRQAPGKEREFVATIGYGAITYYADSVKGRFTISRDNAKNTVYLQMNSLKPEDTAVYYCAVYYWYLPYGHRNHTYWGQGTQVTVSS

SEQ ID NO: 20780 - protein, 122 aa, Artificial Sequence
  Chemically Synthesized
QVQLQESGGGLVQAGGSLRLSCAASGSIFNYYAMGWYRQAPGKERELVASITQGANTNYADSVKGRFTISRDNAKNTVYLQMNSLKPEDTAVYYCAAEVYDWERRRNQFYYWGQGTQVTVSS

SEQ ID NO: 20781 - protein, 118 aa, Artificial Sequence
  Chemically Synthesized
QVQLQESGGGLVQAGGSLRLSCAASGYISAESYMGWYRQAPGKERELVATISVGTNTYYADSVKGRFTISRDNAKNTVYLQMNSLKPEDTAVYYCAVSDDDTYPYGYWGQGTQVTVSS

SEQ ID NO: 20782 - protein, 121 aa, Artificial Sequence
  Chemically Synthesized
QVQLQESGGGLVQAGGSLRLSCAASGNIFPAYDMGWYRQAPGKEREFVATIGRGASTYYADSVKGRFTISRDNAKNTVYLQMNSLKPEDTAVYYCAADRPGSELVMTTMYWGQGTQVTVSS

SEQ ID NO: 20783 - protein, 125 aa, Artificial Sequence
  Chemically Synthesized
QVQLQESGGGLVQAGGSLRLSCAASGTILVFRMGWYRQAPGKEREFVASIDWGANTYYADSVKGRFTISRDNAKNTVYLQMNSLKPEDTAVYYCAAWVSGTYPYDYRSYWDLGYWGQGTQVTVSS

SEQ ID NO: 20784 - protein, 118 aa, Artificial Sequence
  Chemically Synthesized
QVQLQESGGGLVQAGGSLRLSCAASGNIFSDYPMGWYRQAPGKEREFVAAIAVGTSTYYADSVKGRFTISRDNAKNTVYLQMNSLKPEDTAVYYCAAVQTYPYTFYYWGQGTQVTVSS

SEQ ID NO: 20785 - protein, 118 aa, Artificial Sequence
  Chemically Synthesized
QVQLQESGGGLVQAGGSLRLSCAASGTISIDSYMGWYRQAPGKERELVATIAGGGITYYADSVKGRFTISRDNAKNTVYLQMNSLKPEDTAVYYCAVTDQYHDVHYYWGQGTQVTVSS

SEQ ID NO: 20786 - protein, 118 aa, Artificial Sequence
  Chemically Synthesized
QVQLQESGGGLVQAGGSLRLSCAASGTIFLFWYMGWYRQAPGKEREFVATISQGGNTNYADSVKGRFTISRDNAKNTVYLQMNSLKPEDTAVYYCAASLWYDIIYRYWGQGTQVTVSS

SEQ ID NO: 20787 - protein, 126 aa, Artificial Sequence
  Chemically Synthesized
QVQLQESGGGLVQAGGSLRLSCAASGSISVLDRMGWYRQAPGKEREFVAGINSGTNTYYADSVKGRFTISRDNAKNTVYLQMNSLKPEDTAVYYCAAYLNVERRRDWQSDDTHFYWGQGTQVTVSS

SEQ ID NO: 20788 - protein, 122 aa, Artificial Sequence
  Chemically Synthesized
QVQLQESGGGLVQAGGSLRLSCAASGTISKAYYMGWYRQAPGKEREFVASINLGTTTNYADSVKGRFTISRDNAKNTVYLQMNSLKPEDTAVYYCAAHPRYTPTWRYRHRYWGQGTQVTVSS

SEQ ID NO: 20789 - protein, 121 aa, Artificial Sequence
  Chemically Synthesized
QVQLQESGGGLVQAGGSLRLSCAASGSISADPDMGWYRQAPGKEREFVASIDRGSNTNYADSVKGRFTISRDNAKNTVYLQMNSLKPEDTAVYYCAVFSLTVFTICTVIYWGQGTQVTVSS

SEQ ID NO: 20790 - protein, 125 aa, Artificial Sequence
  Chemically Synthesized
QVQLQESGGGLVQAGGSLRLSCAASGYFLGLVMGWYRQAPGKEREFVASIGEGTNTNYADSVKGRFTISRDNAKNTVYLQMNSLKPEDTAVYYCAVWPDYDDEVVEESWGDHAYWGQGTQVTVSS

SEQ ID NO: 20791 - protein, 126 aa, Artificial Sequence
  Chemically Synthesized
QVQLQESGGGLVQAGGSLRLSCAASGNISADAYMGWYRQAPGKEREFVAGIGPGGNTYYADSVKGRFTISRDNAKNTVYLQMNSLKPEDTAVYYCAAYWYPARPVRPQEWEDYRYWGQGTQVTVSS

SEQ ID NO: 20792 - protein, 116 aa, Artificial Sequence
  Chemically Synthesized
QVQLQESGGGLVQAGGSLRLSCAASGYIFVPRVMGWYRQAPGKEREFVASINGGSTYYADSVKGRFTISRDNAKNTVYLQMNSLKPEDTAVYYCAARGYYYRFGYWGQGTQVTVSS

SEQ ID NO: 20793 - protein, 126 aa, Artificial Sequence
  Chemically Synthesized
QVQLQESGGGLVQAGGSLRLSCAASGTISEGGGMGWYRQAPGKERELVASIGLGTSTYYADSVKGRFTISRDNAKNTVYLQMNSLKPEDTAVYYCAAGSLYSYTIRYYTDYDHYYWGQGTQVTVSS

SEQ ID NO: 20794 - protein, 118 aa, Artificial Sequence
  Chemically Synthesized
QVQLQESGGGLVQAGGSLRLSCAASGNISTPSFMGWYRQAPGKERELVAGIGYGTITYYADSVKGRFTISRDNAKNTVYLQMNSLKPEDTAVYYCAVPITGYLYLRYWGQGTQVTVSS

SEQ ID NO: 20795 - protein, 121 aa, Artificial Sequence
  Chemically Synthesized
QVQLQESGGGLVQAGGSLRLSCAASGLFLTNTMGWYRQAPGKERELVATITGGGNTNYADSVKGRFTISRDNAKNTVYLQMNSLKPEDTAVYYCAVGPYRRTLLSAQYDYWGQGTQVTVSS

SEQ ID NO: 20796 - protein, 125 aa, Artificial Sequence
  Chemically Synthesized
QVQLQESGGGLVQAGGSLRLSCAASGSFFIVLMGWYRQAPGKERELVATITDGANTNYADSVKGRFTISRDNAKNTVYLQMNSLKPEDTAVYYCAAWVYWYYERPTDYYGYLYYWGQGTQVTVSS

SEQ ID NO: 20797 - protein, 122 aa, Artificial Sequence
  Chemically Synthesized
QVQLQESGGGLVQAGGSLRLSCAASGNISLDQSMGWYRQAPGKERELVATINFGGNTYYADSVKGRFTISRDNAKNTVYLQMNSLKPEDTAVYYCAVDYAYRPDIYEYLDYWGQGTQVTVSS

SEQ ID NO: 20798 - protein, 118 aa, Artificial Sequence
  Chemically Synthesized
QVQLQESGGGLVQAGGSLRLSCAASGTISYWYDMGWYRQAPGKEREFVATIDSGTITYYADSVKGRFTISRDNAKNTVYLQMNSLKPEDTAVYYCAAGVFYYQYHAYWGQGTQVTVSS

SEQ ID NO: 20799 - protein, 126 aa, Artificial Sequence
  Chemically Synthesized
QVQLQESGGGLVQAGGSLRLSCAASGYISTQWYMGWYRQAPGKERELVAAITHGASTYYADSVKGRFTISRDNAKNTVYLQMNSLKPEDTAVYYCAVYIFTDSNEFASYWALHQYWGQGTQVTVSS

SEQ ID NO: 20800 - protein, 118 aa, Artificial Sequence
  Chemically Synthesized
QVQLQESGGGLVQAGGSLRLSCAASGNISYRHYMGWYRQAPGKERELVAGIDPGGITYYADSVKGRFTISRDNAKNTVYLQMNSLKPEDTAVYYCAVVTRSYAGFYYWGQGTQVTVSS

SEQ ID NO: 20801 - protein, 126 aa, Artificial Sequence
  Chemically Synthesized
QVQLQESGGGLVQAGGSLRLSCAASGNISRPAIMGWYRQAPGKERELVASIGTGGNTYYADSVKGRFTISRDNAKNTVYLQMNSLKPEDTAVYYCAVYGITYHSGIFFPRWAYAYWGQGTQVTVSS

SEQ ID NO: 20802 - protein, 126 aa, Artificial Sequence
  Chemically Synthesized
QVQLQESGGGLVQAGGSLRLSCAASGTIFIVPSMGWYRQAPGKERELVATIARGGSTNYADSVKGRFTISRDNAKNTVYLQMNSLKPEDTAVYYCAATGGYYLYYDRIRVWWHRYWGQGTQVTVSS

SEQ ID NO: 20803 - protein, 122 aa, Artificial Sequence
  Chemically Synthesized
QVQLQESGGGLVQAGGSLRLSCAASGNIFTYSYMGWYRQAPGKEREFVASIAYGGNTYYADSVKGRFTISRDNAKNTVYLQMNSLKPEDTAVYYCAVFYWYNRVHVGSFSYWGQGTQVTVSS

SEQ ID NO: 20804 - protein, 118 aa, Artificial Sequence
  Chemically Synthesized
QVQLQESGGGLVQAGGSLRLSCAASGSISERDYMGWYRQAPGKEREFVASIGPGSTTYYADSVKGRFTISRDNAKNTVYLQMNSLKPEDTAVYYCAVWALVATDLYYWGQGTQVTVSS

SEQ ID NO: 20805 - protein, 122 aa, Artificial Sequence
  Chemically Synthesized
QVQLQESGGGLVQAGGSLRLSCAASGTIFWYYTMGWYRQAPGKERELVAAIDRGGTTNYADSVKGRFTISRDNAKNTVYLQMNSLKPEDTAVYYCAADFRAYAYARWRLRYWGQGTQVTVSS

SEQ ID NO: 20806 - protein, 126 aa, Artificial Sequence
  Chemically Synthesized
QVQLQESGGGLVQAGGSLRLSCAASGTISIFFVMGWYRQAPGKEREFVATISYGGNTNYADSVKGRFTISRDNAKNTVYLQMNSLKPEDTAVYYCAVGYDLDERDYRLYWTLFGYWGQGTQVTVSS

SEQ ID NO: 20807 - protein, 122 aa, Artificial Sequence
  Chemically Synthesized
QVQLQESGGGLVQAGGSLRLSCAASGSIFADDTMGWYRQAPGKEREFVAAIDFGTITYYADSVKGRFTISRDNAKNTVYLQMNSLKPEDTAVYYCAVYNGPIFLDTQDYTYWGQGTQVTVSS

SEQ ID NO: 20808 - protein, 116 aa, Artificial Sequence
  Chemically Synthesized
QVQLQESGGGLVQAGGSLRLSCAASGSISVKYGMGWYRQAPGKEREFVATIADGGSTNYADSVKGRFTISRDNAKNTVYLQMNSLKPEDTAVYYCAARGGYDYYYWGQGTQVTVSS

SEQ ID NO: 20809 - protein, 118 aa, Artificial Sequence
  Chemically Synthesized
QVQLQESGGGLVQAGGSLRLSCAASGNISLYDDMGWYRQAPGKERELVAGISSGGSTYYADSVKGRFTISRDNAKNTVYLQMNSLKPEDTAVYYCAAYDAGHHVLYYWGQGTQVTVSS

SEQ ID NO: 20810 - protein, 118 aa, Artificial Sequence
  Chemically Synthesized
QVQLQESGGGLVQAGGSLRLSCAASGNISYDSGMGWYRQAPGKERELVAGIDGGATTNYADSVKGRFTISRDNAKNTVYLQMNSLKPEDTAVYYCAVLTGYGWVLVYWGQGTQVTVSS

SEQ ID NO: 20811 - protein, 118 aa, Artificial Sequence
  Chemically Synthesized
QVQLQESGGGLVQAGGSLRLSCAASGTISLVPNMGWYRQAPGKEREFVAGIDYGGNTYYADSVKGRFTISRDNAKNTVYLQMNSLKPEDTAVYYCAANVTDHYKYPYWGQGTQVTVSS

SEQ ID NO: 20812 - protein, 122 aa, Artificial Sequence
  Chemically Synthesized
QVQLQESGGGLVQAGGSLRLSCAASGTISDASFMGWYRQAPGKEREFVAGINTGSTTNYADSVKGRFTISRDNAKNTVYLQMNSLKPEDTAVYYCAAYGGNYSRHVDNLAYWGQGTQVTVSS

SEQ ID NO: 20813 - protein, 126 aa, Artificial Sequence
  Chemically Synthesized
QVQLQESGGGLVQAGGSLRLSCAASGTIFTSPYMGWYRQAPGKEREFVASINDGTTTNYADSVKGRFTISRDNAKNTVYLQMNSLKPEDTAVYYCAVTYPVYYEGLFAYYELLYYWGQGTQVTVSS

SEQ ID NO: 20814 - protein, 118 aa, Artificial Sequence
  Chemically Synthesized
QVQLQESGGGLVQAGGSLRLSCAASGNISYTGGMGWYRQAPGKEREFVAAISTGGITYYADSVKGRFTISRDNAKNTVYLQMNSLKPEDTAVYYCAAYTVGTTGFRYWGQGTQVTVSS

SEQ ID NO: 20815 - protein, 122 aa, Artificial Sequence
  Chemically Synthesized
QVQLQESGGGLVQAGGSLRLSCAASGNIFGRYRMGWYRQAPGKEREFVAGIGIGAITNYADSVKGRFTISRDNAKNTVYLQMNSLKPEDTAVYYCAADRVRRVGARYRHVYWGQGTQVTVSS

SEQ ID NO: 20816 - protein, 118 aa, Artificial Sequence
  Chemically Synthesized
QVQLQESGGGLVQAGGSLRLSCAASGSISQYQTMGWYRQAPGKERELVAGIDTGASTYYADSVKGRFTISRDNAKNTVYLQMNSLKPEDTAVYYCAVLWRDYIVFAYWGQGTQVTVSS

SEQ ID NO: 20817 - protein, 118 aa, Artificial Sequence
  Chemically Synthesized
QVQLQESGGGLVQAGGSLRLSCAASGSIFNFKIMGWYRQAPGKEREFVAGISYGTITYYADSVKGRFTISRDNAKNTVYLQMNSLKPEDTAVYYCAAGNNWYYVYTYWGQGTQVTVSS

SEQ ID NO: 20818 - protein, 117 aa, Artificial Sequence
  Chemically Synthesized
QVQLQESGGGLVQAGGSLRLSCAASGTISDVNVMGWYRQAPGKERELVATITGGITYYADSVKGRFTISRDNAKNTVYLQMNSLKPEDTAVYYCAAPTTYQPYLAYWGQGTQVTVSS

SEQ ID NO: 20819 - protein, 118 aa, Artificial Sequence
  Chemically Synthesized
QVQLQESGGGLVQAGGSLRLSCAASGSISYDGYMGWYRQAPGKEREFVAAIGIGGTTYYADSVKGRFTISRDNAKNTVYLQMNSLKPEDTAVYYCAVEQGSYDVHYYWGQGTQVTVSS

SEQ ID NO: 20820 - protein, 126 aa, Artificial Sequence
  Chemically Synthesized
QVQLQESGGGLVQAGGSLRLSCAASGSISDQAAMGWYRQAPGKEREFVAGITTGTITNYADSVKGRFTISRDNAKNTVYLQMNSLKPEDTAVYYCAVYQLYAGDHASGVWKDYLYWGQGTQVTVSS

SEQ ID NO: 20821 - protein, 122 aa, Artificial Sequence
  Chemically Synthesized
QVQLQESGGGLVQAGGSLRLSCAASGNIFHDSVMGWYRQAPGKERELVATISTGATTYYADSVKGRFTISRDNAKNTVYLQMNSLKPEDTAVYYCAAPTDGHDYPNSTFGYWGQGTQVTVSS

SEQ ID NO: 20822 - protein, 126 aa, Artificial Sequence
  Chemically Synthesized
QVQLQESGGGLVQAGGSLRLSCAASGYISRQLVMGWYRQAPGKERELVAGIGVGGTTYYADSVKGRFTISRDNAKNTVYLQMNSLKPEDTAVYYCAVGYYVQSYQYHSPPAELYYWGQGTQVTVSS

SEQ ID NO: 20823 - protein, 122 aa, Artificial Sequence
  Chemically Synthesized
QVQLQESGGGLVQAGGSLRLSCAASGSIFESQGMGWYRQAPGKERELVAAITYGTTTNYADSVKGRFTISRDNAKNTVYLQMNSLKPEDTAVYYCAVPYTSIAQSNRGLVYWGQGTQVTVSS

SEQ ID NO: 20824 - protein, 118 aa, Artificial Sequence
  Chemically Synthesized
QVQLQESGGGLVQAGGSLRLSCAASGTIFVNATMGWYRQAPGKERELVAAIGVGGNTYYADSVKGRFTISRDNAKNTVYLQMNSLKPEDTAVYYCAAHSGTHDFLDYWGQGTQVTVSS

SEQ ID NO: 20825 - protein, 118 aa, Artificial Sequence
  Chemically Synthesized
QVQLQESGGGLVQAGGSLRLSCAASGSIFTYAYMGWYRQAPGKERELVAAIDGGGTTYYADSVKGRFTISRDNAKNTVYLQMNSLKPEDTAVYYCAAKRRGRAGLRYWGQGTQVTVSS

SEQ ID NO: 20826 - protein, 118 aa, Artificial Sequence
  Chemically Synthesized
QVQLQESGGGLVQAGGSLRLSCAASGNISDLGYMGWYRQAPGKERELVAAINNGSSTYYADSVKGRFTISRDNAKNTVYLQMNSLKPEDTAVYYCAANWNGDEGFAYWGQGTQVTVSS

SEQ ID NO: 20827 - protein, 125 aa, Artificial Sequence
  Chemically Synthesized
QVQLQESGGGLVQAGGSLRLSCAASGIFLNGVMGWYRQAPGKERELVASITVGGNTYYADSVKGRFTISRDNAKNTVYLQMNSLKPEDTAVYYCAVGRYGTVYDESPQYPAFVYWGQGTQVTVSS

SEQ ID NO: 20828 - protein, 118 aa, Artificial Sequence
  Chemically Synthesized
QVQLQESGGGLVQAGGSLRLSCAASGSISYSLDMGWYRQAPGKERELVAGIDWGTNTNYADSVKGRFTISRDNAKNTVYLQMNSLKPEDTAVYYCAADRSNYSYFPYWGQGTQVTVSS

SEQ ID NO: 20829 - protein, 118 aa, Artificial Sequence
  Chemically Synthesized
QVQLQESGGGLVQAGGSLRLSCAASGSIFPYDEMGWYRQAPGKERELVAGIAAGTNTNYADSVKGRFTISRDNAKNTVYLQMNSLKPEDTAVYYCAVWDRLKYYHSYWGQGTQVTVSS

SEQ ID NO: 20830 - protein, 121 aa, Artificial Sequence
  Chemically Synthesized
QVQLQESGGGLVQAGGSLRLSCAASGTIFYSIMGWYRQAPGKERELVATIGSGGSTNYADSVKGRFTISRDNAKNTVYLQMNSLKPEDTAVYYCAVVYEYIVYYWTDHDYWGQGTQVTVSS

SEQ ID NO: 20831 - protein, 122 aa, Artificial Sequence
  Chemically Synthesized
QVQLQESGGGLVQAGGSLRLSCAASGTIFGIIYMGWYRQAPGKERELVATISYGGTTYYADSVKGRFTISRDNAKNTVYLQMNSLKPEDTAVYYCAVVGDAYYDGTGYLSYWGQGTQVTVSS

SEQ ID NO: 20832 - protein, 126 aa, Artificial Sequence
  Chemically Synthesized
QVQLQESGGGLVQAGGSLRLSCAASGSISNYQWMGWYRQAPGKERELVAGIDQGAITYYADSVKGRFTISRDNAKNTVYLQMNSLKPEDTAVYYCAVDYDYYFREGYLDNVYLAYWGQGTQVTVSS

SEQ ID NO: 20833 - protein, 122 aa, Artificial Sequence
  Chemically Synthesized
QVQLQESGGGLVQAGGSLRLSCAASGNIFRNWPMGWYRQAPGKERELVATISYGGNTYYADSVKGRFTISRDNAKNTVYLQMNSLKPEDTAVYYCAAGVQRTLTRERLHAYWGQGTQVTVSS

SEQ ID NO: 20834 - protein, 115 aa, Artificial Sequence
  Chemically Synthesized
QVQLQESGGGLVQAGGSLRLSCAASGTISDEVPMGWYRQAPGKEREFVASIGFGGITNYADSVKGRFTISRDNAKNTVYLQMNSLKPEDTAVYYCAVVHYRSYYWGQGTQVTVSS

SEQ ID NO: 20835 - protein, 115 aa, Artificial Sequence
  Chemically Synthesized
QVQLQESGGGLVQAGGSLRLSCAASGTIFYDFPMGWYRQAPGKEREFVASINTGTSTYYADSVKGRFTISRDNAKNTVYLQMNSLKPEDTAVYYCAAGGKRHYYWGQGTQVTVSS

SEQ ID NO: 20836 - protein, 117 aa, Artificial Sequence
  Chemically Synthesized
QVQLQESGGGLVQAGGSLRLSCAASGNIFRGTYMGWYRQAPGKERELVAGIASVLLPYADSVKGRFTISRDNAKNTVYLQMNSLKPEDTAVYYCAAYITDGQGFVYWGQGTQVTVSS

SEQ ID NO: 20837 - protein, 118 aa, Artificial Sequence
  Chemically Synthesized
QVQLQESGGGLVQAGGSLRLSCAASGTISGLVVMGWYRQAPGKEREFVAGITDGGITYYADSVKGRFTISRDNAKNTVYLQMNSLKPEDTAVYYCAAYGRYAPPLVYWGQGTQVTVSS

SEQ ID NO: 20838 - protein, 118 aa, Artificial Sequence
  Chemically Synthesized
QVQLQESGGGLVQAGGSLRLSCAASGYIFDAGPMGWYRQAPGKEREFVAAIAVGTSTYYADSVKGRFTISRDNAKNTVYLQMNSLKPEDTAVYYCAARRTDLNRFQYWGQGTQVTVSS

SEQ ID NO: 20839 - protein, 112 aa, Artificial Sequence
  Chemically Synthesized
QVQLQESGGGLVQAGGSLRLSCAASGSIFDYQEMGWYRQAPGKEREFVAAITSVLLPYADSVKGRFTISRDNAKNTVYLQMNSLKPEDTAVYYCAVRVLRYWGQGTQVTVSS

SEQ ID NO: 20840 - protein, 118 aa, Artificial Sequence
  Chemically Synthesized
QVQLQESGGGLVQAGGSLRLSCAASGSIFGRDYMGWYRQAPGKERELVAAIARGGTTNYADSVKGRFTISRDNAKNTVYLQMNSLKPEDTAVYYCAATTLTFTVRMYWGQGTQVTVSS

SEQ ID NO: 20841 - protein, 123 aa, Artificial Sequence
  Chemically Synthesized
QVQLQESGGGLVQAGGSLRLSCAASGSISANDSMGWYRQAPGKEREFVASIGDGSSTYYADSVKGRFTISRDNAKNTVYLQMNSLKPEDTAVYYCAGPRRAPGGTGWGYHWYWGQGTQVTVSS

SEQ ID NO: 20842 - protein, 126 aa, Artificial Sequence
  Chemically Synthesized
QVQLQESGGGLVQAGGSLRLSCAASGTIFQHYNMGWYRQAPGKERELVATITQGGITNYADSVKGRFTISRDNAKNTVYLQMNSLKPEDTAVYYCAAYAGDAAYERPLTEAYYVYWGQGTQVTVSS

SEQ ID NO: 20843 - protein, 118 aa, Artificial Sequence
  Chemically Synthesized
QVQLQESGGGLVQAGGSLRLSCAASGNISYAAYMGWYRQAPGKERELVASITYGAITYYADSVKGRFTISRDNAKNTVYLQMNSLKPEDTAVYYCAVPDLEYLTYWYWGQGTQVTVSS

SEQ ID NO: 20844 - protein, 121 aa, Artificial Sequence
  Chemically Synthesized
QVQLQESGGGLVQAGGSLRLSCAASGSISEGDSMGWYRQAPGKEREFVASIGRGATTYYADSVKGRFTISRDNAKNTVYLQMNSLKPEDTAVYYCAGDTRNRGQYRLLDYWGQGTQVTVSS

SEQ ID NO: 20845 - protein, 122 aa, Artificial Sequence
  Chemically Synthesized
QVQLQESGGGLVQAGGSLRLSCAASGSISVLYFMGWYRQAPGKEREFVATIDRGGSTYYADSVKGRFTISRDNAKNTVYLQMNSLKPEDTAVYYCAVSTYGPQDVGPAYPYWGQGTQVTVSS

SEQ ID NO: 20846 - protein, 126 aa, Artificial Sequence
  Chemically Synthesized
QVQLQESGGGLVQAGGSLRLSCAASGTIFYAAYMGWYRQAPGKERELVATIAPWCYYLYADSVKGRFTISRDNAKNTVYLQMNSLKPEDTAVYYCAAKYGYGASVNVHTGGQLYYWGQGTQVTVSS

SEQ ID NO: 20847 - protein, 118 aa, Artificial Sequence
  Chemically Synthesized
QVQLQESGGGLVQAGGSLRLSCAASGTIFKPYYMGWYRQAPGKERELVAGIALGATTYYADSVKGRFTISRDNAKNTVYLQMNSLKPEDTAVYYCAVYLSSRRIYVYWGQGTQVTVSS

SEQ ID NO: 20848 - protein, 122 aa, Artificial Sequence
  Chemically Synthesized
QVQLQESGGGLVQAGGSLRLSCAASGNISPFTYMGWYRQAPGKERELVAGIDYGSTTNYADSVKGRFTISRDNAKNTVYLQMNSLKPEDTAVYYCAVYSYWAGTNLTYFPYWGQGTQVTVSS

SEQ ID NO: 20849 - protein, 124 aa, Artificial Sequence
  Chemically Synthesized
QVQLQESGGGLVQAGGSLRLSCAASGTISYWYKMGWYRQAPGKERELVPLLLVVLVPYADSVKGRFTISRDNAKNTVYLQMNSLKPEDTAVYYCAVRNAVRYKVGNYSLWFFYWGQGTQVTVSS

SEQ ID NO: 20850 - protein, 117 aa, Artificial Sequence
  Chemically Synthesized
QVQLQESGGGLVQAGGSLRLSCAASGNISDDYLMGWYRQAPGKERELVAAISVGATTYYADSVKGRFTISRDNAKNTVYLQMNSLKPEDTAVYYCAAAYVTDVHTYWGQGTQVTVSS

SEQ ID NO: 20851 - protein, 122 aa, Artificial Sequence
  Chemically Synthesized
QVQLQESGGGLVQAGGSLRLSCAASGYISAYWSMGWYRQAPGKERELVAGIASGGTTNYADSVKGRFTISRDNAKNTVYLQMNSLKPEDTAVYYCAAGYGESGPFTFYLGYWGQGTQVTVSS

SEQ ID NO: 20852 - protein, 126 aa, Artificial Sequence
  Chemically Synthesized
QVQLQESGGGLVQAGGSLRLSCAASGSIFDATIMGWYRQAPGKERELVATIAPGGNTNYADSVKGRFTISRDNAKNTVYLQMNSLKPEDTAVYYCAAYPQDTFYRVVYRSVVHEYWGQGTQVTVSS

SEQ ID NO: 20853 - protein, 122 aa, Artificial Sequence
  Chemically Synthesized
QVQLQESGGGLVQAGGSLRLSCAASGNIFYWDDMGWYRQAPGKEREFVAGIGYGGSTNYADSVKGRFTISRDNAKNTVYLQMNSLKPEDTAVYYCAVDDFASRGRGRHHGYWGQGTQVTVSS

SEQ ID NO: 20854 - protein, 122 aa, Artificial Sequence
  Chemically Synthesized
QVQLQESGGGLVQAGGSLRLSCAASGSISGWPYMGWYRQAPGKEREFVATIAQGATTYYADSVKGRFTISRDNAKNTVYLQMNSLKPEDTAVYYCAAHEPYLDYKRWWYWYWGQGTQVTVSS

SEQ ID NO: 20855 - protein, 120 aa, Artificial Sequence
  Chemically Synthesized
QVQLQESGGGLVQAGGSLRLSCAASGYIFTCRMGWYRQAPGKERELVAAIGVGTTTYYADSVKGRFTISRDNAKNTVYLQMNSLKPEDTAVYYCAAQGYDTPYNWDILYWGQGTQVTVSS

SEQ ID NO: 20856 - protein, 125 aa, Artificial Sequence
  Chemically Synthesized
QVQLQESGGGLVQAGGSLRLSCAASGYISNTWQMGWYRQAPGKERELVAGINNGGSTYYADSVKGRFTISRDNAKNTVYLQMNSLKPEDTAVYYCAVQYAYITYNERDRGGYTYWGQGTQVTVSS

SEQ ID NO: 20857 - protein, 118 aa, Artificial Sequence
  Chemically Synthesized
QVQLQESGGGLVQAGGSLRLSCAASGYISDYWKMGWYRQAPGKEREFVAAIDKGGNTNYADSVKGRFTISRDNAKNTVYLQMNSLKPEDTAVYYCAVKDGAADPYGYWGQGTQVTVSS

SEQ ID NO: 20858 - protein, 125 aa, Artificial Sequence
  Chemically Synthesized
QVQLQESGGGLVQAGGSLRLSCAASGSISAPTGMGWYRQAPGKERELVAGIDGGGITYYADSVKGRFTISRDNAKNTVYLQMNSLKPEDTAVYYCAARYLSYAEPFGNVQYLSYWGQGTQVTVSS

SEQ ID NO: 20859 - protein, 122 aa, Artificial Sequence
  Chemically Synthesized
QVQLQESGGGLVQAGGSLRLSCAASGYIFYHGSMGWYRQAPGKERELVATIDSGASTYYADSVKGRFTISRDNAKNTVYLQMNSLKPEDTAVYYCAAYANPIGGYSDNFPYWGQGTQVTVSS

SEQ ID NO: 20860 - protein, 117 aa, Artificial Sequence
  Chemically Synthesized
QVQLQESGGGLVQAGGSLRLSCAASGNIFWRWAMGWYRQAPGKEREFVATIARGTTTNYADSVKGRFTISRDNAKNTVYLQMNSLKPEDTAVYYCAVVGLPVGALYWGQGTQVTVSS

SEQ ID NO: 20861 - protein, 122 aa, Artificial Sequence
  Chemically Synthesized
QVQLQESGGGLVQAGGSLRLSCAASGTIFSDRWMGWYRQAPGKERELVASIDPGGTTYYADSVKGRFTISRDNAKNTVYLQMNSLKPEDTAVYYCAAAWNVVPYFNWGLYYWGQGTQVTVSS

SEQ ID NO: 20862 - protein, 118 aa, Artificial Sequence
  Chemically Synthesized
QVQLQESGGGLVQAGGSLRLSCAASGTISSPTTMGWYRQAPGKERELVAGISGGTNTNYADSVKGRFTISRDNAKNTVYLQMNSLKPEDTAVYYCAVIWYVFPLFNYWGQGTQVTVSS

SEQ ID NO: 20863 - protein, 122 aa, Artificial Sequence
  Chemically Synthesized
QVQLQESGGGLVQAGGSLRLSCAASGTIFPYTWMGWYRQAPGKERELVASIATGGSTYYADSVKGRFTISRDNAKNTVYLQMNSLKPEDTAVYYCAVYGYSQGAPDYAYYYWGQGTQVTVSS

SEQ ID NO: 20864 - protein, 122 aa, Artificial Sequence
  Chemically Synthesized
QVQLQESGGGLVQAGGSLRLSCAASGTISRSTYMGWYRQAPGKERELVAGIATGGTTNYADSVKGRFTISRDNAKNTVYLQMNSLKPEDTAVYYCAATTYSADGYTPIHSYWGQGTQVTVSS

SEQ ID NO: 20865 - protein, 118 aa, Artificial Sequence
  Chemically Synthesized
QVQLQESGGGLVQAGGSLRLSCAASGSISLYSAMGWYRQAPGKEREFVAGIGRGSNTYYADSVKGRFTISRDNAKNTVYLQMNSLKPEDTAVYYCAVLVPLDGPHWYWGQGTQVTVSS

SEQ ID NO: 20866 - protein, 126 aa, Artificial Sequence
  Chemically Synthesized
QVQLQESGGGLVQAGGSLRLSCAASGYIFRHYRMGWYRQAPGKERELVASIGYGSNTNYADSVKGRFTISRDNAKNTVYLQMNSLKPEDTAVYYCAVNANSSYAWSGWVAVWLSYWGQGTQVTVSS

SEQ ID NO: 20867 - protein, 122 aa, Artificial Sequence
  Chemically Synthesized
QVQLQESGGGLVQAGGSLRLSCAASGSISGYRSMGWYRQAPGKEREFVATIDGGAITYYADSVKGRFTISRDNAKNTVYLQMNSLKPEDTAVYYCAAQLLDHHHIYGDYWYWGQGTQVTVSS

SEQ ID NO: 20868 - protein, 122 aa, Artificial Sequence
  Chemically Synthesized
QVQLQESGGGLVQAGGSLRLSCAASGYIFAEDPMGWYRQAPGKERELVASIGDGGSTNYADSVKGRFTISRDNAKNTVYLQMNSLKPEDTAVYYCAVLYGYSEALEPTYYYWGQGTQVTVSS

SEQ ID NO: 20869 - protein, 118 aa, Artificial Sequence
  Chemically Synthesized
QVQLQESGGGLVQAGGSLRLSCAASGSISGFGYMGWYRQAPGKERELVASITSGGSTYYADSVKGRFTISRDNAKNTVYLQMNSLKPEDTAVYYCAAGRAGQYIFPYWGQGTQVTVSS

SEQ ID NO: 20870 - protein, 118 aa, Artificial Sequence
  Chemically Synthesized
QVQLQESGGGLVQAGGSLRLSCAASGTISWAYGMGWYRQAPGKEREFVAAIGYGTSTNYADSVKGRFTISRDNAKNTVYLQMNSLKPEDTAVYYCAAHDDRGWHFWYWGQGTQVTVSS

SEQ ID NO: 20871 - protein, 121 aa, Artificial Sequence
  Chemically Synthesized
QVQLQESGGGLVQAGGSLRLSCAASGNIFLYVMGWYRQAPGKEREFVATISHGSITYYADSVKGRFTISRDNAKNTVYLQMNSLKPEDTAVYYCAVTPYYPYYYRSRYRYWGQGTQVTVSS

SEQ ID NO: 20872 - protein, 125 aa, Artificial Sequence
  Chemically Synthesized
QVQLQESGGGLVQAGGSLRLSCAASGTISRHYVMGWYRQAPGKERELVAGITSVVLPYADSVKGRFTISRDNAKNTVYLQMNSLKPEDTAVYYCAARGYSHGRGFISSLPSLAYWGQGTQVTVSS

SEQ ID NO: 20873 - protein, 118 aa, Artificial Sequence
  Chemically Synthesized
QVQLQESGGGLVQAGGSLRLSCAASGTIFGAAFMGWYRQAPGKEREFVASINAGGNTNYADSVKGRFTISRDNAKNTVYLQMNSLKPEDTAVYYCAAWASPRLHLSYWGQGTQVTVSS

SEQ ID NO: 20874 - protein, 126 aa, Artificial Sequence
  Chemically Synthesized
QVQLQESGGGLVQAGGSLRLSCAASGYIFAHVSMGWYRQAPGKERELVATIGYGGSTNYADSVKGRFTISRDNAKNTVYLQMNSLKPEDTAVYYCAAWYFNLVEDNHAYVDEHYYWGQGTQVTVSS

SEQ ID NO: 20875 - protein, 113 aa, Artificial Sequence
  Chemically Synthesized
QVQLQESGGGLVQAGGSLRLSCAASGYYMGWYRQAPGKERELVATISWGGITYYADSVKGRFTISRDNAKNTVYLQMNSLKPEDTAVYYCAATGVHTYRHYYWGQGTQVTVSS

SEQ ID NO: 20876 - protein, 122 aa, Artificial Sequence
  Chemically Synthesized
QVQLQESGGGLVQAGGSLRLSCAASGYIFQWSDMGWYRQAPGKEREFVAGIGRGSSTNYADSVKGRFTISRDNAKNTVYLQMNSLKPEDTAVYYCAVFYRQGSYRRIHHIYWGQGTQVTVSS

SEQ ID NO: 20877 - protein, 124 aa, Artificial Sequence
  Chemically Synthesized
QVQLQESGGGLVQAGGSLRLSCAASGSIFTFVMGWYRQAPGKERELVATIGGGATTNYADSVKGRFTISRDNAKNTVYLQMNSLKPEDTAVYYCAVVYQWRYDARTNRPIRLYWGQGTQVTVSS

SEQ ID NO: 20878 - protein, 110 aa, Artificial Sequence
  Chemically Synthesized
QVQLQESGGGLVQAGGSLRLSCAASGSIFPHGAMGWYRQAPGKERELVATIGRGGSTNYADSVKGRFTISRDNAKNTVYLQMNSLKPEDTAVYYCADVYWGQGTQVTVSS

SEQ ID NO: 20879 - protein, 117 aa, Artificial Sequence
  Chemically Synthesized
QVQLQESGGGLVQAGGSLRLSCAASGLFLLFVMGWYRQAPGKEREFVAAIDPGATTYYADSVKGRFTISRDNAKNTVYLQMNSLKPEDTAVYYCAVFPYVDGSHFYWGQGTQVTVSS

SEQ ID NO: 20880 - protein, 126 aa, Artificial Sequence
  Chemically Synthesized
QVQLQESGGGLVQAGGSLRLSCAASGNIFWLRTMGWYRQAPGKEREFVAAITGGGSTYYADSVKGRFTISRDNAKNTVYLQMNSLKPEDTAVYYCAVYRLLDLLVYDPIRPYHSYWGQGTQVTVSS

SEQ ID NO: 20881 - protein, 125 aa, Artificial Sequence
  Chemically Synthesized
QVQLQESGGGLVQAGGSLRLSCAASGNIFAPYIMGWYRQAPGKEREFVASIGIGTTTNYADSVKGRFTISRDNAKNTVYLQMNSLKPEDTAVYYCAVHYSYASDWRANGIWHYYWGQGTQVTVSS

SEQ ID NO: 20882 - protein, 118 aa, Artificial Sequence
  Chemically Synthesized
QVQLQESGGGLVQAGGSLRLSCAASGTISARHRMGWYRQAPGKERELVAGITAGGSTNYADSVKGRFTISRDNAKNTVYLQMNSLKPEDTAVYYCAVGDYGRASHAYWGQGTQVTVSS

SEQ ID NO: 20883 - protein, 122 aa, Artificial Sequence
  Chemically Synthesized
QVQLQESGGGLVQAGGSLRLSCAASGTISFRPAMGWYRQAPGKEREFVASISYGGTTNYADSVKGRFTISRDNAKNTVYLQMNSLKPEDTAVYYCAASTSFTKIYGIGLGYWGQGTQVTVSS

SEQ ID NO: 20884 - protein, 118 aa, Artificial Sequence
  Chemically Synthesized
QVQLQESGGGLVQAGGSLRLSCAASGTISIFLYMGWYRQAPGKEREFVAGIAAGATTNYADSVKGRFTISRDNAKNTVYLQMNSLKPEDTAVYYCAVKGYRSDVYSYWGQGTQVTVSS

SEQ ID NO: 20885 - protein, 118 aa, Artificial Sequence
  Chemically Synthesized
QVQLQESGGGLVQAGGSLRLSCAASGTISPPYYMGWYRQAPGKERELVATITDGTTTYYADSVKGRFTISRDNAKNTVYLQMNSLKPEDTAVYYCAVRGYKASRYYYWGQGTQVTVSS

SEQ ID NO: 20886 - protein, 111 aa, Artificial Sequence
  Chemically Synthesized
QVQLQESGGGLVQAGGSLRLSCAASGTISYSSYMGWYRQAPGKERELVATINFGSTTNYADSVKGRFTISRDNAKNTVYLQMNSLKPEDTAVYYCAASIYWGQGTQVTVSS

SEQ ID NO: 20887 - protein, 121 aa, Artificial Sequence
  Chemically Synthesized
QVQLQESGGGLVQAGGSLRLSCAASGTISEGSDMGWYRQAPGKERELVAAIDVGSNTNYADSVKGRFTISRDNAKNTVYLQMNSLKPEDTAVYYCAVEDGVQASVTTVMYWGQGTQVTVSS

SEQ ID NO: 20888 - protein, 126 aa, Artificial Sequence
  Chemically Synthesized
QVQLQESGGGLVQAGGSLRLSCAASGYISDYFYMGWYRQAPGKEREFVAGITYGANTNYADSVKGRFTISRDNAKNTVYLQMNSLKPEDTAVYYCAAIYVLPGTLDARYYRAHDYWGQGTQVTVSS

SEQ ID NO: 20889 - protein, 126 aa, Artificial Sequence
  Chemically Synthesized
QVQLQESGGGLVQAGGSLRLSCAASGSISYDALMGWYRQAPGKEREFVAGIDYGANTYYADSVKGRFTISRDNAKNTVYLQMNSLKPEDTAVYYCAVYGTYIYRYGYGYVYTHWYWGQGTQVTVSS

SEQ ID NO: 20890 - protein, 126 aa, Artificial Sequence
  Chemically Synthesized
QVQLQESGGGLVQAGGSLRLSCAASGSIFPAYDMGWYRQAPGKEREFVAGIGFGSITNYADSVKGRFTISRDNAKNTVYLQMNSLKPEDTAVYYCAVVTGYGPYPGLVGASVLYYWGQGTQVTVSS

SEQ ID NO: 20891 - protein, 118 aa, Artificial Sequence
  Chemically Synthesized
QVQLQESGGGLVQAGGSLRLSCAASGTIFDRVMGWYRQAPGKEREFVATISRGTNTYYADSVKGRFTISRDNAKNTVYLQMNSLKPEDTAVYYCAAVDEYTYSNHYYWGQGTQVTVSS

SEQ ID NO: 20892 - protein, 122 aa, Artificial Sequence
  Chemically Synthesized
QVQLQESGGGLVQAGGSLRLSCAASGYIFSVYYMGWYRQAPGKERELVASINVGTITYYADSVKGRFTISRDNAKNTVYLQMNSLKPEDTAVYYCAAYESAYYSYYGIYAYWGQGTQVTVSS

SEQ ID NO: 20893 - protein, 118 aa, Artificial Sequence
  Chemically Synthesized
QVQLQESGGGLVQAGGSLRLSCAASGSIFLADDMGWYRQAPGKERELVASITDGATTYYADSVKGRFTISRDNAKNTVYLQMNSLKPEDTAVYYCAVQDVWEIVLGYWGQGTQVTVSS

SEQ ID NO: 20894 - protein, 117 aa, Artificial Sequence
  Chemically Synthesized
QVQLQESGGGLVQAGGSLRLSCAASGTISRGYWMGWYRQAPGKERELVASIITVVLPYADSVKGRFTISRDNAKNTVYLQMNSLKPEDTAVYYCAVGGDVFDIHTYWGQGTQVTVSS

SEQ ID NO: 20895 - protein, 122 aa, Artificial Sequence
  Chemically Synthesized
QVQLQESGGGLVQAGGSLRLSCAASGNISYRSTMGWYRQAPGKEREFVAGIGGGSTTNYADSVKGRFTISRDNAKNTVYLQMNSLKPEDTAVYYCAVLSTNSDGPAYWHWYWGQGTQVTVSS

SEQ ID NO: 20896 - protein, 112 aa, Artificial Sequence
  Chemically Synthesized
QVQLQESGGGLVQAGGSLRLSCAASGYVYMGWYRQAPGKEREFVAGIASGTSTNYADSVKGRFTISRDNAKNTVYLQMNSLKPEDTAVYYCAAVQDYSHYYWGQGTQVTVSS

SEQ ID NO: 20897 - protein, 117 aa, Artificial Sequence
  Chemically Synthesized
QVQLQESGGGLVQAGGSLRLSCAASGYISYFEMGWYRQAPGKEREFVAAIDDGGNTNYADSVKGRFTISRDNAKNTVYLQMNSLKPEDTAVYYCAATYGPSSTLLYWGQGTQVTVSS

SEQ ID NO: 20898 - protein, 113 aa, Artificial Sequence
  Chemically Synthesized
QVQLQESGGGLVQAGGSLRLSCAASGNIFYGSYMGWYRQAPGKERELVASISTGATTNYADSVKGRFTISRDNAKNTVYLQMNSLKPEDTAVYYCAVYELDYWGQGTQVTVSS

SEQ ID NO: 20899 - protein, 118 aa, Artificial Sequence
  Chemically Synthesized
QVQLQESGGGLVQAGGSLRLSCAASGSIFYYHYMGWYRQAPGKERELVAAIGLGGTTNYADSVKGRFTISRDNAKNTVYLQMNSLKPEDTAVYYCAVWNGLYAYLGYWGQGTQVTVSS

SEQ ID NO: 20900 - protein, 118 aa, Artificial Sequence
  Chemically Synthesized
QVQLQESGGGLVQAGGSLRLSCAASGNISGFPYMGWYRQAPGKERELVAAITRGGSTNYADSVKGRFTISRDNAKNTVYLQMNSLKPEDTAVYYCAVYVSGDTGHLYWGQGTQVTVSS

SEQ ID NO: 20901 - protein, 118 aa, Artificial Sequence
  Chemically Synthesized
QVQLQESGGGLVQAGGSLRLSCAASGNIFSRYNMGWYRQAPGKEREFVAGIAYGGSTYYADSVKGRFTISRDNAKNTVYLQMNSLKPEDTAVYYCAAVYVSGGSHYYWGQGTQVTVSS

SEQ ID NO: 20902 - protein, 118 aa, Artificial Sequence
  Chemically Synthesized
QVQLQESGGGLVQAGGSLRLSCAASGYISGGDYMGWYRQAPGKERELVAAIGTGASTYYADSVKGRFTISRDNAKNTVYLQMNSLKPEDTAVYYCAADNDYSDAFWYWGQGTQVTVSS

SEQ ID NO: 20903 - protein, 121 aa, Artificial Sequence
  Chemically Synthesized
QVQLQESGGGLVQAGGSLRLSCAASGNISTWSMGWYRQAPGKEREFVATINDGSTTNYADSVKGRFTISRDNAKNTVYLQMNSLKPEDTAVYYCAATTQQYDPAWYDHQYWGQGTQVTVSS

SEQ ID NO: 20904 - protein, 118 aa, Artificial Sequence
  Chemically Synthesized
QVQLQESGGGLVQAGGSLRLSCAASGSISGSVDMGWYRQAPGKEREFVASIAYGSTTNYADSVKGRFTISRDNAKNTVYLQMNSLKPEDTAVYYCAAGAVINSYLSYWGQGTQVTVSS

SEQ ID NO: 20905 - protein, 122 aa, Artificial Sequence
  Chemically Synthesized
QVQLQESGGGLVQAGGSLRLSCAASGYISEETRMGWYRQAPGKEREFVAAIDSGTSTYYADSVKGRFTISRDNAKNTVYLQMNSLKPEDTAVYYCAAYYYGYRYTYEYYVYWGQGTQVTVSS

SEQ ID NO: 20906 - protein, 115 aa, Artificial Sequence
  Chemically Synthesized
QVQLQESGGGLVQAGGSLRLSCAASGTISGTYPMGWYRQAPGKERELVASITTGSNTNYADSVKGRFTISRDNAKNTVYLQMNSLKPEDTAVYYCAVTKNRVLYWGQGTQVTVSS

SEQ ID NO: 20907 - protein, 125 aa, Artificial Sequence
  Chemically Synthesized
QVQLQESGGGLVQAGGSLRLSCAASGTILLVLMGWYRQAPGKERELVATITTGANTNYADSVKGRFTISRDNAKNTVYLQMNSLKPEDTAVYYCAAVGYDHDLPAHRGGPPHDYWGQGTQVTVSS

SEQ ID NO: 20908 - protein, 122 aa, Artificial Sequence
  Chemically Synthesized
QVQLQESGGGLVQAGGSLRLSCAASGNISGHPPMGWYRQAPGKEREFVASINWGGNTNYADSVKGRFTISRDNAKNTVYLQMNSLKPEDTAVYYCAVPQIDDPEDSYDYHYWGQGTQVTVSS

SEQ ID NO: 20909 - protein, 118 aa, Artificial Sequence
  Chemically Synthesized
QVQLQESGGGLVQAGGSLRLSCAASGSISQGGNMGWYRQAPGKEREFVAAIDRGGNTNYADSVKGRFTISRDNAKNTVYLQMNSLKPEDTAVYYCAVLWQGGRPLYYWGQGTQVTVSS

SEQ ID NO: 20910 - protein, 118 aa, Artificial Sequence
  Chemically Synthesized
QVQLQESGGGLVQAGGSLRLSCAASGYISAIDYMGWYRQAPGKEREFVATIGQGSTTNYADSVKGRFTISRDNAKNTVYLQMNSLKPEDTAVYYCAVVYYDGGYHSYWGQGTQVTVSS

SEQ ID NO: 20911 - protein, 118 aa, Artificial Sequence
  Chemically Synthesized
QVQLQESGGGLVQAGGSLRLSCAASGTISLYEHMGWYRQAPGKERELVASINDGASTYYADSVKGRFTISRDNAKNTVYLQMNSLKPEDTAVYYCAAPTTADPAYRYWGQGTQVTVSS

SEQ ID NO: 20912 - protein, 122 aa, Artificial Sequence
  Chemically Synthesized
QVQLQESGGGLVQAGGSLRLSCAASGTISVGGYMGWYRQAPGKEREFVAGISYGSTTYYADSVKGRFTISRDNAKNTVYLQMNSLKPEDTAVYYCAAVRLLSYWTFVWHGYWGQGTQVTVSS

SEQ ID NO: 20913 - protein, 118 aa, Artificial Sequence
  Chemically Synthesized
QVQLQESGGGLVQAGGSLRLSCAASGTIFLIRYMGWYRQAPGKEREFVASIADGASTYYADSVKGRFTISRDNAKNTVYLQMNSLKPEDTAVYYCAAPDLDRGKFLYWGQGTQVTVSS

SEQ ID NO: 20914 - protein, 121 aa, Artificial Sequence
  Chemically Synthesized
QVQLQESGGGLVQAGGSLRLSCAASGTISRDLTMGWYRQAPGKEREFVAGIDEGANTNYADSVKGRFTISRDNAKNTVYLQMNSLKPEDTAVYYCAAWTYVYGGTVLFGYWGQGTQVTVSS

SEQ ID NO: 20915 - protein, 122 aa, Artificial Sequence
  Chemically Synthesized
QVQLQESGGGLVQAGGSLRLSCAASGSIFRTGTMGWYRQAPGKERELVAAITGGAITNYADSVKGRFTISRDNAKNTVYLQMNSLKPEDTAVYYCAVRSGRIHDAFAYHDYWGQGTQVTVSS

SEQ ID NO: 20916 - protein, 117 aa, Artificial Sequence
  Chemically Synthesized
QVQLQESGGGLVQAGGSLRLSCAASGYISRYDLMGWYRQAPGKERELVASINPGATTNYADSVKGRFTISRDNAKNTVYLQMNSLKPEDTAVYYCAAAASRLTCIYWGQGTQVTVSS

SEQ ID NO: 20917 - protein, 126 aa, Artificial Sequence
  Chemically Synthesized
QVQLQESGGGLVQAGGSLRLSCAASGYISRYSLMGWYRQAPGKEREFVASITIGTTTNYADSVKGRFTISRDNAKNTVYLQMNSLKPEDTAVYYCAVVFRSAAGYVNRDHYWYYYWGQGTQVTVSS

SEQ ID NO: 20918 - protein, 121 aa, Artificial Sequence
  Chemically Synthesized
QVQLQESGGGLVQAGGSLRLSCAASGSISYSAYMGWYRQAPGKERELVATINSGTNTNYADSVKGRFTISRDNAKNTVYLQMNSLKPEDTAVYYCAAYGLDGHSRCVVIYWGQGTQVTVSS

SEQ ID NO: 20919 - protein, 118 aa, Artificial Sequence
  Chemically Synthesized
QVQLQESGGGLVQAGGSLRLSCAASGSISRAKLMGWYRQAPGKEREFVAAINLGSNTNYADSVKGRFTISRDNAKNTVYLQMNSLKPEDTAVYYCAAAWDAYGHYNYWGQGTQVTVSS

SEQ ID NO: 20920 - protein, 115 aa, Artificial Sequence
  Chemically Synthesized
QVQLQESGGGLVQAGGSLRLSCAASGYISVPYTMGWYRQAPGKERELVAAIGYGTITNYADSVKGRFTISRDNAKNTVYLQMNSLKPEDTAVYYCAACVEDLYYWGQGTQVTVSS

SEQ ID NO: 20921 - protein, 123 aa, Artificial Sequence
  Chemically Synthesized
QVQLQESGGGLVQAGGSLRLSCAASGSIFWHRVSMGWYRQAPGKEREFVAGINTGGSTYYADSVKGRFTISRDNAKNTVYLQMNSLKPEDTAVYYCAAYRRTDYVRDSEYNYWGQGTQVTVSS

SEQ ID NO: 20922 - protein, 125 aa, Artificial Sequence
  Chemically Synthesized
QVQLQESGGGLVQAGGSLRLSCAASGNISPIYIMGWYRQAPGKERELVAGISGGSVPYADSVKGRFTISRDNAKNTVYLQMNSLKPEDTAVYYCAVWLVEGGYVGQSYYPGFAYWGQGTQVTVSS

SEQ ID NO: 20923 - protein, 122 aa, Artificial Sequence
  Chemically Synthesized
QVQLQESGGGLVQAGGSLRLSCAASGTIFLSYAMGWYRQAPGKERELVASIAYGSITYYADSVKGRFTISRDNAKNTVYLQMNSLKPEDTAVYYCAVKYYYYGPIEVRYGYWGQGTQVTVSS

SEQ ID NO: 20924 - protein, 115 aa, Artificial Sequence
  Chemically Synthesized
QVQLQESGGGLVQAGGSLRLSCAASGSISYGREMGWYRQAPGKERELVAGIADGANTNYADSVKGRFTISRDNAKNTVYLQMNSLKPEDTAVYYCAVGSCRLFYWGQGTQVTVSS

SEQ ID NO: 20925 - protein, 117 aa, Artificial Sequence
  Chemically Synthesized
QVQLQESGGGLVQAGGSLRLSCAASGNISWEPMGWYRQAPGKERELVATITYGGTTYYADSVKGRFTISRDNAKNTVYLQMNSLKPEDTAVYYCAASGGNDTIHDYWGQGTQVTVSS

SEQ ID NO: 20926 - protein, 116 aa, Artificial Sequence
  Chemically Synthesized
QVQLQESGGGLVQAGGSLRLSCAASGNIFFRSDMGWYRQAPGKERELVASISDGGNTYYADSVKGRFTISRDNAKNTVYLQMNSLKPEDTAVYYCAAFGPHESCYWGQGTQVTVSS

SEQ ID NO: 20927 - protein, 118 aa, Artificial Sequence
  Chemically Synthesized
QVQLQESGGGLVQAGGSLRLSCAASGTISARYVMGWYRQAPGKEREFVAGITGGTNTNYADSVKGRFTISRDNAKNTVYLQMNSLKPEDTAVYYCAVLYVGQGYHWYWGQGTQVTVSS

SEQ ID NO: 20928 - protein, 125 aa, Artificial Sequence
  Chemically Synthesized
QVQLQESGGGLVQAGGSLRLSCAASGTISYTTMGWYRQAPGKERELVASIAGGTITNYADSVKGRFTISRDNAKNTVYLQMNSLKPEDTAVYYCAVGRKIDVYDAPQPTYTHAYWGQGTQVTVSS

SEQ ID NO: 20929 - protein, 122 aa, Artificial Sequence
  Chemically Synthesized
QVQLQESGGGLVQAGGSLRLSCAASGNIFTVGSMGWYRQAPGKERELVAAIGLGTTTNYADSVKGRFTISRDNAKNTVYLQMNSLKPEDTAVYYCAARVWVRHRGRWYHVYWGQGTQVTVSS

SEQ ID NO: 20930 - protein, 118 aa, Artificial Sequence
  Chemically Synthesized
QVQLQESGGGLVQAGGSLRLSCAASGNISKWLAMGWYRQAPGKERELVASISDGANTNYADSVKGRFTISRDNAKNTVYLQMNSLKPEDTAVYYCAAVTYYDGPHGYWGQGTQVTVSS

SEQ ID NO: 20931 - protein, 118 aa, Artificial Sequence
  Chemically Synthesized
QVQLQESGGGLVQAGGSLRLSCAASGNIFPRWTMGWYRQAPGKERELVAAIDIGANTNYADSVKGRFTISRDNAKNTVYLQMNSLKPEDTAVYYCAALGDDVYSHAYWGQGTQVTVSS

SEQ ID NO: 20932 - protein, 118 aa, Artificial Sequence
  Chemically Synthesized
QVQLQESGGGLVQAGGSLRLSCAASGSISRFYEMGWYRQAPGKERELVAAITDGANTYYADSVKGRFTISRDNAKNTVYLQMNSLKPEDTAVYYCAVDGYDQPSHVYWGQGTQVTVSS

SEQ ID NO: 20933 - protein, 111 aa, Artificial Sequence
  Chemically Synthesized
QVQLQESGGGLVQAGGSLRLSCAASGSISDSTYMGWYRQAPGKERELVAAIDYGSNTNYADSVKGRFTISRDNAKNTVYLQMNSLKPEDTAVYYCALFFYWGQGTQVTVSS

SEQ ID NO: 20934 - protein, 118 aa, Artificial Sequence
  Chemically Synthesized
QVQLQESGGGLVQAGGSLRLSCAASGNISDQQYMGWYRQAPGKERELVAGITVGTTTNYADSVKGRFTISRDNAKNTVYLQMNSLKPEDTAVYYCAAWGTDTYHFTYWGQGTQVTVSS

SEQ ID NO: 20935 - protein, 118 aa, Artificial Sequence
  Chemically Synthesized
QVQLQESGGGLVQAGGSLRLSCAASGTIFDNSYMGWYRQAPGKEREFVAAIADGTSTNYADSVKGRFTISRDNAKNTVYLQMNSLKPEDTAVYYCAVVYYLRGWHDYWGQGTQVTVSS

SEQ ID NO: 20936 - protein, 118 aa, Artificial Sequence
  Chemically Synthesized
QVQLQESGGGLVQAGGSLRLSCAASGTISRYITMGWYRQAPGKEREFVAGISGGGTTNYADSVKGRFTISRDNAKNTVYLQMNSLKPEDTAVYYCAVLFRSTQLHYYWGQGTQVTVSS

SEQ ID NO: 20937 - protein, 118 aa, Artificial Sequence
  Chemically Synthesized
QVQLQESGGGLVQAGGSLRLSCAASGSIFYSYYMGWYRQAPGKEREFVATIGGGGTTNYADSVKGRFTISRDNAKNTVYLQMNSLKPEDTAVYYCAALYRDYEYHSYWGQGTQVTVSS

SEQ ID NO: 20938 - protein, 118 aa, Artificial Sequence
  Chemically Synthesized
QVQLQESGGGLVQAGGSLRLSCAASGTIFQRGYMGWYRQAPGKEREFVASIDGGSNTNYADSVKGRFTISRDNAKNTVYLQMNSLKPEDTAVYYCAALTVGTRYHWYWGQGTQVTVSS

SEQ ID NO: 20939 - protein, 118 aa, Artificial Sequence
  Chemically Synthesized
QVQLQESGGGLVQAGGSLRLSCAASGSIFAEGFMGWYRQAPGKERELVASISYGGTTYYADSVKGRFTISRDNAKNTVYLQMNSLKPEDTAVYYCAAEQGTVRAHVYWGQGTQVTVSS

SEQ ID NO: 20940 - protein, 118 aa, Artificial Sequence
  Chemically Synthesized
QVQLQESGGGLVQAGGSLRLSCAASGSISTFLAMGWYRQAPGKERELVATIDYGTTTYYADSVKGRFTISRDNAKNTVYLQMNSLKPEDTAVYYCAVYKYKDYALLYWGQGTQVTVSS

SEQ ID NO: 20941 - protein, 118 aa, Artificial Sequence
  Chemically Synthesized
QVQLQESGGGLVQAGGSLRLSCAASGNISADYHMGWYRQAPGKERELVATITNGGNTNYADSVKGRFTISRDNAKNTVYLQMNSLKPEDTAVYYCAALGYAGRYLYYWGQGTQVTVSS

SEQ ID NO: 20942 - protein, 118 aa, Artificial Sequence
  Chemically Synthesized
QVQLQESGGGLVQAGGSLRLSCAASGNIFYSYFMGWYRQAPGKEREFVAAISQGANTNYADSVKGRFTISRDNAKNTVYLQMNSLKPEDTAVYYCAAVGNSDRHYYYWGQGTQVTVSS

SEQ ID NO: 20943 - protein, 122 aa, Artificial Sequence
  Chemically Synthesized
QVQLQESGGGLVQAGGSLRLSCAASGNIFGWWYMGWYRQAPGKERELVATINYGANTYYADSVKGRFTISRDNAKNTVYLQMNSLKPEDTAVYYCAVYYQYYDTSRYGYQYWGQGTQVTVSS

SEQ ID NO: 20944 - protein, 126 aa, Artificial Sequence
  Chemically Synthesized
QVQLQESGGGLVQAGGSLRLSCAASGSISPLTYMGWYRQAPGKERELVAAISYGASTNYADSVKGRFTISRDNAKNTVYLQMNSLKPEDTAVYYCAVGPYGHTLLYTAAETIYDYWGQGTQVTVSS

SEQ ID NO: 20945 - protein, 118 aa, Artificial Sequence
  Chemically Synthesized
QVQLQESGGGLVQAGGSLRLSCAASGTISTYYDMGWYRQAPGKEREFVASIAPGGSTNYADSVKGRFTISRDNAKNTVYLQMNSLKPEDTAVYYCAADGVPSIAHTYWGQGTQVTVSS

SEQ ID NO: 20946 - protein, 122 aa, Artificial Sequence
  Chemically Synthesized
QVQLQESGGGLVQAGGSLRLSCAASGSIFDTGTMGWYRQAPGKEREFVAGITTGGTTNYADSVKGRFTISRDNAKNTVYLQMNSLKPEDTAVYYCAALYEGGDYPRRYHHYWGQGTQVTVSS

SEQ ID NO: 20947 - protein, 118 aa, Artificial Sequence
  Chemically Synthesized
QVQLQESGGGLVQAGGSLRLSCAASGYIFVFDRMGWYRQAPGKEREFVASIADGGNTNYADSVKGRFTISRDNAKNTVYLQMNSLKPEDTAVYYCAVLRYDGKWYYYWGQGTQVTVSS

SEQ ID NO: 20948 - protein, 118 aa, Artificial Sequence
  Chemically Synthesized
QVQLQESGGGLVQAGGSLRLSCAASGTISYDDLMGWYRQAPGKEREFVATIGRGAITYYADSVKGRFTISRDNAKNTVYLQMNSLKPEDTAVYYCAVEYDYALNYQYWGQGTQVTVSS

SEQ ID NO: 20949 - protein, 122 aa, Artificial Sequence
  Chemically Synthesized
QVQLQESGGGLVQAGGSLRLSCAASGSISYGDYMGWYRQAPGKERELVASITWGGSTYYADSVKGRFTISRDNAKNTVYLQMNSLKPEDTAVYYCAVHSGLLYIGGLYYSYWGQGTQVTVSS

SEQ ID NO: 20950 - protein, 121 aa, Artificial Sequence
  Chemically Synthesized
QVQLQESGGGLVQAGGSLRLSCAASGYISDTSMGWYRQAPGKEREFVAAINRGGTTNYADSVKGRFTISRDNAKNTVYLQMNSLKPEDTAVYYCAVEGETYYTNAISHDYWGQGTQVTVSS

SEQ ID NO: 20951 - protein, 122 aa, Artificial Sequence
  Chemically Synthesized
QVQLQESGGGLVQAGGSLRLSCAASGSIFYIYWMGWYRQAPGKEREFVATINYGGTTNYADSVKGRFTISRDNAKNTVYLQMNSLKPEDTAVYYCAATLDDYQGRAYYHDYWGQGTQVTVSS

SEQ ID NO: 20952 - protein, 118 aa, Artificial Sequence
  Chemically Synthesized
QVQLQESGGGLVQAGGSLRLSCAASGNISRYWGMGWYRQAPGKERELVAAINDGGITNYADSVKGRFTISRDNAKNTVYLQMNSLKPEDTAVYYCAVQTPVRYDHWYWGQGTQVTVSS

SEQ ID NO: 20953 - protein, 117 aa, Artificial Sequence
  Chemically Synthesized
QVQLQESGGGLVQAGGSLRLSCAASGNIFALYMGWYRQAPGKEREFVAGIDYGGTTNYADSVKGRFTISRDNAKNTVYLQMNSLKPEDTAVYYCAADDDDIGGLYYWGQGTQVTVSS

SEQ ID NO: 20954 - protein, 118 aa, Artificial Sequence
  Chemically Synthesized
QVQLQESGGGLVQAGGSLRLSCAASGYISWQYYMGWYRQAPGKERELVAAINYGSTTYYADSVKGRFTISRDNAKNTVYLQMNSLKPEDTAVYYCAVDDDEWPTHYYWGQGTQVTVSS

SEQ ID NO: 20955 - protein, 118 aa, Artificial Sequence
  Chemically Synthesized
QVQLQESGGGLVQAGGSLRLSCAASGTIFTHYYMGWYRQAPGKERELVAAIDHGGITYYADSVKGRFTISRDNAKNTVYLQMNSLKPEDTAVYYCAVDDDGAPTHYYWGQGTQVTVSS

SEQ ID NO: 20956 - protein, 118 aa, Artificial Sequence
  Chemically Synthesized
QVQLQESGGGLVQAGGSLRLSCAASGNIFHDYYMGWYRQAPGKEREFVAGIAVGANTNYADSVKGRFTISRDNAKNTVYLQMNSLKPEDTAVYYCAADSDDVYGHYYWGQGTQVTVSS

SEQ ID NO: 20957 - protein, 118 aa, Artificial Sequence
  Chemically Synthesized
QVQLQESGGGLVQAGGSLRLSCAASGTISFWEVMGWYRQAPGKEREFVAAIAVGSNTYYADSVKGRFTISRDNAKNTVYLQMNSLKPEDTAVYYCAVDNDTVDGYWYWGQGTQVTVSS

SEQ ID NO: 20958 - protein, 118 aa, Artificial Sequence
  Chemically Synthesized
QVQLQESGGGLVQAGGSLRLSCAASGYIFDDAYMGWYRQAPGKEREFVAGINDGGNTYYADSVKGRFTISRDNAKNTVYLQMNSLKPEDTAVYYCAVDWDAVDELYYWGQGTQVTVSS

SEQ ID NO: 20959 - protein, 116 aa, Artificial Sequence
  Chemically Synthesized
QVQLQESGGGLVQAGGSLRLSCAASGTISYWAYMGWYRQAPGKERELVAAISDGGITYYADSVKGRFTISRDNAKNTVYLQMNSLKPEDTAVYYCAVDDDQYYYYWGQGTQVTVSS

SEQ ID NO: 20960 - protein, 122 aa, Artificial Sequence
  Chemically Synthesized
QVQLQESGGGLVQAGGSLRLSCAASGTISVGYYMGWYRQAPGKEREFVAGISYGSITYYADSVKGRFTISRDNAKNTVYLQMNSLKPEDTAVYYCAVDDDDWDHITDEYYYWGQGTQVTVSS

SEQ ID NO: 20961 - protein, 118 aa, Artificial Sequence
  Chemically Synthesized
QVQLQESGGGLVQAGGSLRLSCAASGNISRDGYMGWYRQAPGKEREFVAGISYGASTNYADSVKGRFTISRDNAKNTVYLQMNSLKPEDTAVYYCAVDWTRDRDYYYWGQGTQVTVSS

SEQ ID NO: 20962 - protein, 118 aa, Artificial Sequence
  Chemically Synthesized
QVQLQESGGGLVQAGGSLRLSCAASGNISVDWYMGWYRQAPGKEREFVAGINYGGTTNYADSVKGRFTISRDNAKNTVYLQMNSLKPEDTAVYYCAVDWYYSRAHYYWGQGTQVTVSS

SEQ ID NO: 20963 - protein, 118 aa, Artificial Sequence
  Chemically Synthesized
QVQLQESGGGLVQAGGSLRLSCAASGTIFDSYWMGWYRQAPGKEREFVAAIDSGTITYYADSVKGRFTISRDNAKNTVYLQMNSLKPEDTAVYYCAADHYVYDDLYYWGQGTQVTVSS

SEQ ID NO: 20964 - protein, 122 aa, Artificial Sequence
  Chemically Synthesized
QVQLQESGGGLVQAGGSLRLSCAASGSISHVYYMGWYRQAPGKEREFVAGITYGGITNYADSVKGRFTISRDNAKNTVYLQMNSLKPEDTAVYYCAVDDDRWDAYIDDYYYWGQGTQVTVSS

SEQ ID NO: 20965 - protein, 122 aa, Artificial Sequence
  Chemically Synthesized
QVQLQESGGGLVQAGGSLRLSCAASGNISQGYYMGWYRQAPGKEREFVAGIAYGSSTNYADSVKGRFTISRDNAKNTVYLQMNSLKPEDTAVYYCAADDDGNDPYGDTYYYWGQGTQVTVSS

SEQ ID NO: 20966 - protein, 118 aa, Artificial Sequence
  Chemically Synthesized
QVQLQESGGGLVQAGGSLRLSCAASGNISADWYMGWYRQAPGKERELVAAIGAGASTNYADSVKGRFTISRDNAKNTVYLQMNSLKPEDTAVYYCAVDDDYVTGLYYWGQGTQVTVSS

SEQ ID NO: 20967 - protein, 118 aa, Artificial Sequence
  Chemically Synthesized
QVQLQESGGGLVQAGGSLRLSCAASGSIFDRYYMGWYRQAPGKEREFVAGIDSGGNTNYADSVKGRFTISRDNAKNTVYLQMNSLKPEDTAVYYCAADDYTDWDLYYWGQGTQVTVSS

SEQ ID NO: 20968 - protein, 118 aa, Artificial Sequence
  Chemically Synthesized
QVQLQESGGGLVQAGGSLRLSCAASGYISKTDYMGWYRQAPGKEREFVAGINYGASTYYADSVKGRFTISRDNAKNTVYLQMNSLKPEDTAVYYCAVDGDDYRDYYYWGQGTQVTVSS

SEQ ID NO: 20969 - protein, 118 aa, Artificial Sequence
  Chemically Synthesized
QVQLQESGGGLVQAGGSLRLSCAASGSIFADYYMGWYRQAPGKEREFVAGIGSGANTNYADSVKGRFTISRDNAKNTVYLQMNSLKPEDTAVYYCAVDWWDGYDFYYWGQGTQVTVSS

SEQ ID NO: 20970 - protein, 118 aa, Artificial Sequence
  Chemically Synthesized
QVQLQESGGGLVQAGGSLRLSCAASGTIFYNSYMGWYRQAPGKEREFVAGISSGATTYYADSVKGRFTISRDNAKNTVYLQMNSLKPEDTAVYYCAVDWDDIGDLYYWGQGTQVTVSS

SEQ ID NO: 20971 - protein, 118 aa, Artificial Sequence
  Chemically Synthesized
QVQLQESGGGLVQAGGSLRLSCAASGYIFDYYYMGWYRQAPGKEREFVAGIAEGAITNYADSVKGRFTISRDNAKNTVYLQMNSLKPEDTAVYYCAVDDDTYAGLYYWGQGTQVTVSS

SEQ ID NO: 20972 - protein, 117 aa, Artificial Sequence
  Chemically Synthesized
QVQLQESGGGLVQAGGSLRLSCAASGTIFDELYMGWYRQAPGKEREFVAGIDVGATTNYADSVKGRFTISRDNAKNTVYLQMNSLKPEDTAVYYCAADYDDYTFYYWGQGTQVTVSS

SEQ ID NO: 20973 - protein, 118 aa, Artificial Sequence
  Chemically Synthesized
QVQLQESGGGLVQAGGSLRLSCAASGYISWSVYMGWYRQAPGKEREFVAAIDLGANTYYADSVKGRFTISRDNAKNTVYLQMNSLKPEDTAVYYCAVDDDGWPTLFYWGQGTQVTVSS

SEQ ID NO: 20974 - protein, 122 aa, Artificial Sequence
  Chemically Synthesized
QVQLQESGGGLVQAGGSLRLSCAASGNIFNTDDMGWYRQAPGKEREFVASIARGGITYYADSVKGRFTISRDNAKNTVYLQMNSLKPEDTAVYYCAVYARDYYGPPYVHWYWGQGTQVTVSS

SEQ ID NO: 20975 - protein, 122 aa, Artificial Sequence
  Chemically Synthesized
QVQLQESGGGLVQAGGSLRLSCAASGTISYDTYMGWYRQAPGKEREFVAGISAGATTNYADSVKGRFTISRDNAKNTVYLQMNSLKPEDTAVYYCAVDWEVGDTTGDNFYYWGQGTQVTVSS

SEQ ID NO: 20976 - protein, 118 aa, Artificial Sequence
  Chemically Synthesized
QVQLQESGGGLVQAGGSLRLSCAASGNISAGYYMGWYRQAPGKEREFVAGIDAGSITNYADSVKGRFTISRDNAKNTVYLQMNSLKPEDTAVYYCAVDNDDQWDLYYWGQGTQVTVSS

SEQ ID NO: 20977 - protein, 118 aa, Artificial Sequence
  Chemically Synthesized
QVQLQESGGGLVQAGGSLRLSCAASGNISPDIYMGWYRQAPGKEREFVAGIDRGSNTNYADSVKGRFTISRDNAKNTVYLQMNSLKPEDTAVYYCAVDWPSDYVLYYWGQGTQVTVSS

SEQ ID NO: 20978 - protein, 120 aa, Artificial Sequence
  Chemically Synthesized
QVQLQESGGGLVQAGGSLRLSCAASGSISAGRAMGWYRQAPGKERELVAGITSGGSTYYADSVKGRFTISRDNAKNTVYLQMNSLKPEDTAVYYCAVYEQAVSAYDYEYWGQGTQVTVSS

SEQ ID NO: 20979 - protein, 116 aa, Artificial Sequence
  Chemically Synthesized
QVQLQESGGGLVQAGGSLRLSCAASGSIFVHWVMGWYRQAPGKERELVAAISYGATTYYADSVKGRFTISRDNAKNTVYLQMNSLKPEDTAVYYCAVDDDYDYYYWGQGTQVTVSS

SEQ ID NO: 20980 - protein, 118 aa, Artificial Sequence
  Chemically Synthesized
QVQLQESGGGLVQAGGSLRLSCAASGNISSRYYMGWYRQAPGKEREFVAGIDGGGNTNYADSVKGRFTISRDNAKNTVYLQMNSLKPEDTAVYYCAADDDDVDGYYYWGQGTQVTVSS

SEQ ID NO: 20981 - protein, 121 aa, Artificial Sequence
  Chemically Synthesized
QVQLQESGGGLVQAGGSLRLSCAASGTIFHYLYMGWYRQAPGKEREFVATIGGVVIPYADSVKGRFTISRDNAKNTVYLQMNSLKPEDTAVYYCAAQISSRENIKLAHAYWGQGTQVTVSS

SEQ ID NO: 20982 - protein, 118 aa, Artificial Sequence
  Chemically Synthesized
QVQLQESGGGLVQAGGSLRLSCAASGNIFDHWYMGWYRQAPGKEREFVAGIGKGAITNYADSVKGRFTISRDNAKNTVYLQMNSLKPEDTAVYYCAVDQDVVDTLYYWGQGTQVTVSS

SEQ ID NO: 20983 - protein, 120 aa, Artificial Sequence
  Chemically Synthesized
QVQLQESGGGLVQAGGSLRLSCAASGSISPVDYMGWYRQAPGKERELVATIGYGANTNYADSVKGRFTISRDNAKNTVYLQMNSLKPEDTAVYYCAAQSTYARQRDYVYWGQGTQVTVSS

SEQ ID NO: 20984 - protein, 122 aa, Artificial Sequence
  Chemically Synthesized
QVQLQESGGGLVQAGGSLRLSCAASGTIFGDFYMGWYRQAPGKEREFVAGISVGTITYYADSVKGRFTISRDNAKNTVYLQMNSLKPEDTAVYYCAADYDNDQDYDDYLYYWGQGTQVTVSS

SEQ ID NO: 20985 - protein, 122 aa, Artificial Sequence
  Chemically Synthesized
QVQLQESGGGLVQAGGSLRLSCAASGNISFNDYMGWYRQAPGKEREFVAGISYGGTTNYADSVKGRFTISRDNAKNTVYLQMNSLKPEDTAVYYCAVDDDYYYDYADWFYYWGQGTQVTVSS

SEQ ID NO: 20986 - protein, 117 aa, Artificial Sequence
  Chemically Synthesized
QVQLQESGGGLVQAGGSLRLSCAASGTIFTTTMGWYRQAPGKEREFVATISPGTTTNYADSVKGRFTISRDNAKNTVYLQMNSLKPEDTAVYYCAAGYVTVKRHTYWGQGTQVTVSS

SEQ ID NO: 20987 - protein, 118 aa, Artificial Sequence
  Chemically Synthesized
QVQLQESGGGLVQAGGSLRLSCAASGSISDVIPMGWYRQAPGKEREFVAAIAYGSITYYADSVKGRFTISRDNAKNTVYLQMNSLKPEDTAVYYCAVWYWAPFGLIYWGQGTQVTVSS

SEQ ID NO: 20988 - protein, 122 aa, Artificial Sequence
  Chemically Synthesized
QVQLQESGGGLVQAGGSLRLSCAASGYISVPRIMGWYRQAPGKEREFVAGIARGASTNYADSVKGRFTISRDNAKNTVYLQMNSLKPEDTAVYYCAAAGGFEGVGPYGHFYWGQGTQVTVSS

SEQ ID NO: 20989 - protein, 118 aa, Artificial Sequence
  Chemically Synthesized
QVQLQESGGGLVQAGGSLRLSCAASGSISNYYYMGWYRQAPGKERELVAAIAVGASTNYADSVKGRFTISRDNAKNTVYLQMNSLKPEDTAVYYCAVGDVYYAYHWYWGQGTQVTVSS

SEQ ID NO: 20990 - protein, 118 aa, Artificial Sequence
  Chemically Synthesized
QVQLQESGGGLVQAGGSLRLSCAASGYISAYVYMGWYRQAPGKERELVAAIDRGSTTNYADSVKGRFTISRDNAKNTVYLQMNSLKPEDTAVYYCAAYGYKQRRHWYWGQGTQVTVSS

SEQ ID NO: 20991 - protein, 118 aa, Artificial Sequence
  Chemically Synthesized
QVQLQESGGGLVQAGGSLRLSCAASGYISPTYYMGWYRQAPGKERELVATITYGASTYYADSVKGRFTISRDNAKNTVYLQMNSLKPEDTAVYYCAADSYYRRYFAYWGQGTQVTVSS

SEQ ID NO: 20992 - protein, 118 aa, Artificial Sequence
  Chemically Synthesized
QVQLQESGGGLVQAGGSLRLSCAASGTISDYNYMGWYRQAPGKERELVAAINEGGTTYYADSVKGRFTISRDNAKNTVYLQMNSLKPEDTAVYYCAVGVYYYGYLRYWGQGTQVTVSS

SEQ ID NO: 20993 - protein, 122 aa, Artificial Sequence
  Chemically Synthesized
QVQLQESGGGLVQAGGSLRLSCAASGTIFRYAEMGWYRQAPGKERELVAAIDPGATTYYADSVKGRFTISRDNAKNTVYLQMNSLKPEDTAVYYCAAFIANRTRYDGHHNYWGQGTQVTVSS

SEQ ID NO: 20994 - protein, 122 aa, Artificial Sequence
  Chemically Synthesized
QVQLQESGGGLVQAGGSLRLSCAASGNIFTRAYMGWYRQAPGKERELVAGITDGGITYYADSVKGRFTISRDNAKNTVYLQMNSLKPEDTAVYYCAAYPYQLHWYFGSHGYWGQGTQVTVSS

SEQ ID NO: 20995 - protein, 125 aa, Artificial Sequence
  Chemically Synthesized
QVQLQESGGGLVQAGGSLRLSCAASGNIFRWRGMGWYRQAPGKEREFVAGITVGSNTNYADSVKGRFTISRDNAKNTVYLQMNSLKPEDTAVYYCAAVHGYGTRIEARRPDHIYWGQGTQVTVSS

SEQ ID NO: 20996 - protein, 118 aa, Artificial Sequence
  Chemically Synthesized
QVQLQESGGGLVQAGGSLRLSCAASGSIFRPGDMGWYRQAPGKEREFVATIAQGTITNYADSVKGRFTISRDNAKNTVYLQMNSLKPEDTAVYYCAASYYLTVPHFYWGQGTQVTVSS

SEQ ID NO: 20997 - protein, 122 aa, Artificial Sequence
  Chemically Synthesized
QVQLQESGGGLVQAGGSLRLSCAASGSIFPGRYMGWYRQAPGKEREFVATITYGSTTYYADSVKGRFTISRDNAKNTVYLQMNSLKPEDTAVYYCAANYRRNAYRGTQFTYWGQGTQVTVSS

SEQ ID NO: 20998 - protein, 118 aa, Artificial Sequence
  Chemically Synthesized
QVQLQESGGGLVQAGGSLRLSCAASGSISVTSNMGWYRQAPGKEREFVATINQGSNTYYADSVKGRFTISRDNAKNTVYLQMNSLKPEDTAVYYCAVGSPQDHGLTYWGQGTQVTVSS

SEQ ID NO: 20999 - protein, 118 aa, Artificial Sequence
  Chemically Synthesized
QVQLQESGGGLVQAGGSLRLSCAASGNIFTESLMGWYRQAPGKERELVAAITTGAITYYADSVKGRFTISRDNAKNTVYLQMNSLKPEDTAVYYCAARIWDTYVLYYWGQGTQVTVSS

SEQ ID NO: 21000 - protein, 126 aa, Artificial Sequence
  Chemically Synthesized
QVQLQESGGGLVQAGGSLRLSCAASGTIFQGYFMGWYRQAPGKERELVAGIDRGTITYYADSVKGRFTISRDNAKNTVYLQMNSLKPEDTAVYYCAVYRSVFDTPYLQNRTRFDYWGQGTQVTVSS

SEQ ID NO: 21001 - protein, 118 aa, Artificial Sequence
  Chemically Synthesized
QVQLQESGGGLVQAGGSLRLSCAASGTIFYGYGMGWYRQAPGKEREFVAAINTGGITNYADSVKGRFTISRDNAKNTVYLQMNSLKPEDTAVYYCAANYYTYRNFFYWGQGTQVTVSS

SEQ ID NO: 21002 - protein, 122 aa, Artificial Sequence
  Chemically Synthesized
QVQLQESGGGLVQAGGSLRLSCAASGYIFPWTFMGWYRQAPGKERELVATIGRGATTNYADSVKGRFTISRDNAKNTVYLQMNSLKPEDTAVYYCAVSVQGDLKSDDPHDYWGQGTQVTVSS

SEQ ID NO: 21003 - protein, 126 aa, Artificial Sequence
  Chemically Synthesized
QVQLQESGGGLVQAGGSLRLSCAASGYISEDNYMGWYRQAPGKEREFVAAIDDGAITYYADSVKGRFTISRDNAKNTVYLQMNSLKPEDTAVYYCAAGYRTYGGRYPGSAWWYDYWGQGTQVTVSS

SEQ ID NO: 21004 - protein, 114 aa, Artificial Sequence
  Chemically Synthesized
QVQLQESGGGLVQAGGSLRLSCAASGTISQYQWMGWYRQAPGKEREFVASIAAGGITNYADSVKGRFTISRDNAKNTVYLQMNSLKPEDTAVYYCAACCSVSYWGQGTQVTVSS

SEQ ID NO: 21005 - protein, 122 aa, Artificial Sequence
  Chemically Synthesized
QVQLQESGGGLVQAGGSLRLSCAASGTISYDDAMGWYRQAPGKEREFVAGITVGANTNYADSVKGRFTISRDNAKNTVYLQMNSLKPEDTAVYYCAAYGAYTDGLAGGHTYWGQGTQVTVSS

SEQ ID NO: 21006 - protein, 122 aa, Artificial Sequence
  Chemically Synthesized
QVQLQESGGGLVQAGGSLRLSCAASGSIFEAVYMGWYRQAPGKEREFVASIAFGASTNYADSVKGRFTISRDNAKNTVYLQMNSLKPEDTAVYYCAVYDYYFGTVFPNLVYWGQGTQVTVSS

SEQ ID NO: 21007 - protein, 122 aa, Artificial Sequence
  Chemically Synthesized
QVQLQESGGGLVQAGGSLRLSCAASGYISPVETMGWYRQAPGKERELVAAINYGSITYYADSVKGRFTISRDNAKNTVYLQMNSLKPEDTAVYYCAVYYLSDSYSDSELQYWGQGTQVTVSS

SEQ ID NO: 21008 - protein, 118 aa, Artificial Sequence
  Chemically Synthesized
QVQLQESGGGLVQAGGSLRLSCAASGSIFLEPHMGWYRQAPGKERELVATIAWGGNTYYADSVKGRFTISRDNAKNTVYLQMNSLKPEDTAVYYCAADRDFDLSHGYWGQGTQVTVSS

SEQ ID NO: 21009 - protein, 118 aa, Artificial Sequence
  Chemically Synthesized
QVQLQESGGGLVQAGGSLRLSCAASGSISRADPMGWYRQAPGKERELVAGIDYGSITYYADSVKGRFTISRDNAKNTVYLQMNSLKPEDTAVYYCAAGSYSWYYYAYWGQGTQVTVSS

SEQ ID NO: 21010 - protein, 125 aa, Artificial Sequence
  Chemically Synthesized
QVQLQESGGGLVQAGGSLRLSCAASGTISQYYIMGWYRQAPGKEREFVAGIASGGTTNYADSVKGRFTISRDNAKNTVYLQMNSLKPEDTAVYYCAVYYYDYGRYPHSTSLNIYWGQGTQVTVSS

SEQ ID NO: 21011 - protein, 117 aa, Artificial Sequence
  Chemically Synthesized
QVQLQESGGGLVQAGGSLRLSCAASGNISSAYTMGWYRQAPGKEREFVATITDGTSTYYADSVKGRFTISRDNAKNTVYLQMNSLKPEDTAVYYCAAGWYTVYFLYWGQGTQVTVSS

SEQ ID NO: 21012 - protein, 111 aa, Artificial Sequence
  Chemically Synthesized
QVQLQESGGGLVQAGGSLRLSCAASGTISYQNGMGWYRQAPGKERELVATISVGTNTYYADSVKGRFTISRDNAKNTVYLQMNSLKPEDTAVYYCAVTLYWGQGTQVTVSS

SEQ ID NO: 21013 - protein, 126 aa, Artificial Sequence
  Chemically Synthesized
QVQLQESGGGLVQAGGSLRLSCAASGSISTQQGMGWYRQAPGKERELVAGITLGGSTYYADSVKGRFTISRDNAKNTVYLQMNSLKPEDTAVYYCAVVTPYYWGDIPLYGLHHVYWGQGTQVTVSS

SEQ ID NO: 21014 - protein, 126 aa, Artificial Sequence
  Chemically Synthesized
QVQLQESGGGLVQAGGSLRLSCAASGTIFRWLNMGWYRQAPGKEREFVASITSGSITYYADSVKGRFTISRDNAKNTVYLQMNSLKPEDTAVYYCAVGTYRTVTFGETFQGDHDYWGQGTQVTVSS

SEQ ID NO: 21015 - protein, 118 aa, Artificial Sequence
  Chemically Synthesized
QVQLQESGGGLVQAGGSLRLSCAASGTIFPFIYMGWYRQAPGKERELVATIATGSSTYYADSVKGRFTISRDNAKNTVYLQMNSLKPEDTAVYYCAVAYYDLGVLDYWGQGTQVTVSS

SEQ ID NO: 21016 - protein, 118 aa, Artificial Sequence
  Chemically Synthesized
QVQLQESGGGLVQAGGSLRLSCAASGTISGRYLMGWYRQAPGKEREFVAGIGYGTITYYADSVKGRFTISRDNAKNTVYLQMNSLKPEDTAVYYCAVFSIPDSAFDYWGQGTQVTVSS

SEQ ID NO: 21017 - protein, 118 aa, Artificial Sequence
  Chemically Synthesized
QVQLQESGGGLVQAGGSLRLSCAASGSIFAYHPMGWYRQAPGKERELVAAITQGSSTYYADSVKGRFTISRDNAKNTVYLQMNSLKPEDTAVYYCAVAPVVGTHHFYWGQGTQVTVSS

SEQ ID NO: 21018 - protein, 118 aa, Artificial Sequence
  Chemically Synthesized
QVQLQESGGGLVQAGGSLRLSCAASGNIFWAPSMGWYRQAPGKEREFVAAIADGSNTNYADSVKGRFTISRDNAKNTVYLQMNSLKPEDTAVYYCAVGEQDPEDYDYWGQGTQVTVSS

SEQ ID NO: 21019 - protein, 122 aa, Artificial Sequence
  Chemically Synthesized
QVQLQESGGGLVQAGGSLRLSCAASGNIFYYIYMGWYRQAPGKERELVATITGGGTTYYADSVKGRFTISRDNAKNTVYLQMNSLKPEDTAVYYCAVSWYARDGYVLNHDYWGQGTQVTVSS

SEQ ID NO: 21020 - protein, 118 aa, Artificial Sequence
  Chemically Synthesized
QVQLQESGGGLVQAGGSLRLSCAASGNIFLFSIMGWYRQAPGKERELVAGIDRGGNTNYADSVKGRFTISRDNAKNTVYLQMNSLKPEDTAVYYCAVPYGDAGFHVYWGQGTQVTVSS

SEQ ID NO: 21021 - protein, 121 aa, Artificial Sequence
  Chemically Synthesized
QVQLQESGGGLVQAGGSLRLSCAASGSISGESKMGWYRQAPGKEREFVAAIAFGAITNYADSVKGRFTISRDNAKNTVYLQMNSLKPEDTAVYYCAVYDSDSYSQDDHRYWGQGTQVTVSS

SEQ ID NO: 21022 - protein, 126 aa, Artificial Sequence
  Chemically Synthesized
QVQLQESGGGLVQAGGSLRLSCAASGNISTYLGMGWYRQAPGKEREFVASIAGGATTNYADSVKGRFTISRDNAKNTVYLQMNSLKPEDTAVYYCAVGVRQDYVYYRALHVDHGYWGQGTQVTVSS

SEQ ID NO: 21023 - protein, 118 aa, Artificial Sequence
  Chemically Synthesized
QVQLQESGGGLVQAGGSLRLSCAASGYISAITGMGWYRQAPGKEREFVAGITYGTNTYYADSVKGRFTISRDNAKNTVYLQMNSLKPEDTAVYYCAVVYRRGLFHFYWGQGTQVTVSS

SEQ ID NO: 21024 - protein, 117 aa, Artificial Sequence
  Chemically Synthesized
QVQLQESGGGLVQAGGSLRLSCAASGYIFAAFAMGWYRQAPGKEREFVATIAYGATTYYADSVKGRFTISRDNAKNTVYLQMNSLKPEDTAVYYCAASYYLPWHVYWGQGTQVTVSS

SEQ ID NO: 21025 - protein, 113 aa, Artificial Sequence
  Chemically Synthesized
QVQLQESGGGLVQAGGSLRLSCAASGSISANSTMGWYRQAPGKEREFVAAITDGGSTTNYADSVKGRFTISRDNAKNTVYLQMNSLKPEDTAVYYCAATHYYWGQGTQVTVSS

SEQ ID NO: 21026 - protein, 118 aa, Artificial Sequence
  Chemically Synthesized
QVQLQESGGGLVQAGGSLRLSCAASGTIFLDRDMGWYRQAPGKERELVAGIAHGGSTYYADSVKGRFTISRDNAKNTVYLQMNSLKPEDTAVYYCAAAGNFARYHAYWGQGTQVTVSS

SEQ ID NO: 21027 - protein, 118 aa, Artificial Sequence
  Chemically Synthesized
QVQLQESGGGLVQAGGSLRLSCAASGTISVINYMGWYRQAPGKERELVASIADGASTYYADSVKGRFTISRDNAKNTVYLQMNSLKPEDTAVYYCAVSVTFVSSHSYWGQGTQVTVSS

SEQ ID NO: 21028 - protein, 118 aa, Artificial Sequence
  Chemically Synthesized
QVQLQESGGGLVQAGGSLRLSCAASGYISGYQDMGWYRQAPGKEREFVASINPGGTTYYADSVKGRFTISRDNAKNTVYLQMNSLKPEDTAVYYCAAFYDYDYAHDYWGQGTQVTVSS

SEQ ID NO: 21029 - protein, 118 aa, Artificial Sequence
  Chemically Synthesized
QVQLQESGGGLVQAGGSLRLSCAASGSISHPNLMGWYRQAPGKERELVATIGGGATTNYADSVKGRFTISRDNAKNTVYLQMNSLKPEDTAVYYCAAFISDDAYLTYWGQGTQVTVSS

SEQ ID NO: 21030 - protein, 117 aa, Artificial Sequence
  Chemically Synthesized
QVQLQESGGGLVQAGGSLRLSCAASGNIFGAGEMGWYRQAPGKEREFVPVLITVVLPYADSVKGRFTISRDNAKNTVYLQMNSLKPEDTAVYYCAAYRSATREFVYWGQGTQVTVSS

SEQ ID NO: 21031 - protein, 126 aa, Artificial Sequence
  Chemically Synthesized
QVQLQESGGGLVQAGGSLRLSCAASGTIFQAWIMGWYRQAPGKEREFVATITFGTSTNYADSVKGRFTISRDNAKNTVYLQMNSLKPEDTAVYYCAVSAIEPTLYVYDWYHTHAYWGQGTQVTVSS

SEQ ID NO: 21032 - protein, 126 aa, Artificial Sequence
  Chemically Synthesized
QVQLQESGGGLVQAGGSLRLSCAASGYIFGRRQMGWYRQAPGKEREFVAGIGRGGNTNYADSVKGRFTISRDNAKNTVYLQMNSLKPEDTAVYYCAAYRNRVYPSAYAGPRYFLYWGQGTQVTVSS

SEQ ID NO: 21033 - protein, 122 aa, Artificial Sequence
  Chemically Synthesized
QVQLQESGGGLVQAGGSLRLSCAASGNIFGPSVMGWYRQAPGKERELVATITGGSITYYADSVKGRFTISRDNAKNTVYLQMNSLKPEDTAVYYCAVFTYQPDGYRYELGYWGQGTQVTVSS

SEQ ID NO: 21034 - protein, 118 aa, Artificial Sequence
  Chemically Synthesized
QVQLQESGGGLVQAGGSLRLSCAASGYISYVYPMGWYRQAPGKERELVAGITTGASTNYADSVKGRFTISRDNAKNTVYLQMNSLKPEDTAVYYCAARTQGGVAYYYWGQGTQVTVSS

SEQ ID NO: 21035 - protein, 118 aa, Artificial Sequence
  Chemically Synthesized
QVQLQESGGGLVQAGGSLRLSCAASGYISENYYMGWYRQAPGKEREFVATISFGGSTNYADSVKGRFTISRDNAKNTVYLQMNSLKPEDTAVYYCAAYARTATWFHYWGQGTQVTVSS

SEQ ID NO: 21036 - protein, 122 aa, Artificial Sequence
  Chemically Synthesized
QVQLQESGGGLVQAGGSLRLSCAASGTISVAAVMGWYRQAPGKEREFVAGIDGGTTTYYADSVKGRFTISRDNAKNTVYLQMNSLKPEDTAVYYCAVASDTDYRASGRHAYWGQGTQVTVSS

SEQ ID NO: 21037 - protein, 118 aa, Artificial Sequence
  Chemically Synthesized
QVQLQESGGGLVQAGGSLRLSCAASGTIFTRKYMGWYRQAPGKEREFVAGIDIGSNTNYADSVKGRFTISRDNAKNTVYLQMNSLKPEDTAVYYCAVADDFLAGLAYWGQGTQVTVSS

SEQ ID NO: 21038 - protein, 117 aa, Artificial Sequence
  Chemically Synthesized
QVQLQESGGGLVQAGGSLRLSCAASGNISDYVYMGWYRQAPGKERELVATIAYGSTTYYADSVKGRFTISRDNAKNTVYLQMNSLKPEDTAVYYCAAAFISTVTMYWGQGTQVTVSS

SEQ ID NO: 21039 - protein, 122 aa, Artificial Sequence
  Chemically Synthesized
QVQLQESGGGLVQAGGSLRLSCAASGSIFDNLIMGWYRQAPGKERELVAGIGPGGSTYYADSVKGRFTISRDNAKNTVYLQMNSLKPEDTAVYYCAATRQYRHWSGRYLRYWGQGTQVTVSS

SEQ ID NO: 21040 - protein, 124 aa, Artificial Sequence
  Chemically Synthesized
QVQLQESGGGLVQAGGSLRLSCAASGYISHDFMGWYRQAPGKERELVAGITYGTITNYADSVKGRFTISRDNAKNTVYLQMNSLKPEDTAVYYCAAEYPCSVFPGRSAVLLFYWGQGTQVTVSS

SEQ ID NO: 21041 - protein, 118 aa, Artificial Sequence
  Chemically Synthesized
QVQLQESGGGLVQAGGSLRLSCAASGTISPGSAMGWYRQAPGKERELVAGIGYGTSTNYADSVKGRFTISRDNAKNTVYLQMNSLKPEDTAVYYCAVPLYWPAFFGYWGQGTQVTVSS

SEQ ID NO: 21042 - protein, 121 aa, Artificial Sequence
  Chemically Synthesized
QVQLQESGGGLVQAGGSLRLSCAASGTIFDTTMGWYRQAPGKEREFVASINTGGITYYADSVKGRFTISRDNAKNTVYLQMNSLKPEDTAVYYCAAIGYFYGPTDPRLLYWGQGTQVTVSS

SEQ ID NO: 21043 - protein, 118 aa, Artificial Sequence
  Chemically Synthesized
QVQLQESGGGLVQAGGSLRLSCAASGSIFYYRRMGWYRQAPGKEREFVATISYGATTNYADSVKGRFTISRDNAKNTVYLQMNSLKPEDTAVYYCAAWSYILYYHQYWGQGTQVTVSS

SEQ ID NO: 21044 - protein, 120 aa, Artificial Sequence
  Chemically Synthesized
QVQLQESGGGLVQAGGSLRLSCAASGSISLIMMGWYRQAPGKERELVAAINTGASTYYADSVKGRFTISRDNAKNTVYLQMNSLKPEDTAVYYCAATIRYDSIVAYFIYWGQGTQVTVSS

SEQ ID NO: 21045 - protein, 113 aa, Artificial Sequence
  Chemically Synthesized
QVQLQESGGGLVQAGGSLRLSCAASGTIMGWYRQAPGKERELVAAIGVGSNTYYADSVKGRFTISRDNAKNTVYLQMNSLKPEDTAVYYCAVITRQVDTHQYWGQGTQVTVSS

SEQ ID NO: 21046 - protein, 117 aa, Artificial Sequence
  Chemically Synthesized
QVQLQESGGGLVQAGGSLRLSCAASGTISSPYMGWYRQAPGKEREFVASITVGSTTNYADSVKGRFTISRDNAKNTVYLQMNSLKPEDTAVYYCAADGYSAGVHDYWGQGTQVTVSS

SEQ ID NO: 21047 - protein, 113 aa, Artificial Sequence
  Chemically Synthesized
QVQLQESGGGLVQAGGSLRLSCAASGSIMGWYRQAPGKEREFVAAITLGSSTYYADSVKGRFTISRDNAKNTVYLQMNSLKPEDTAVYYCAADYYYPTSYYYWGQGTQVTVSS

SEQ ID NO: 21048 - protein, 118 aa, Artificial Sequence
  Chemically Synthesized
QVQLQESGGGLVQAGGSLRLSCAASGYIFGKYYMGWYRQAPGKERELVATIGGGTTTYYADSVKGRFTISRDNAKNTVYLQMNSLKPEDTAVYYCAADVNDDVYYAYWGQGTQVTVSS

SEQ ID NO: 21049 - protein, 124 aa, Artificial Sequence
  Chemically Synthesized
QVQLQESGGGLVQAGGSLRLSCAASGNISWRQNMGWYRQAPGKEREFVAGIAIGGTTNYADSVKGRFTISRDNAKNTVYLQMNSLKPEDTAVYYCAASIYGAYVRDFGRSFGYWGQGTQVTVSS

SEQ ID NO: 21050 - protein, 121 aa, Artificial Sequence
  Chemically Synthesized
QVQLQESGGGLVQAGGSLRLSCAASGNIFRFRMGWYRQAPGKEREFVAAIAAGANTNYADSVKGRFTISRDNAKNTVYLQMNSLKPEDTAVYYCAVPLWRPWTRRTDHDYWGQGTQVTVSS

SEQ ID NO: 21051 - protein, 117 aa, Artificial Sequence
  Chemically Synthesized
QVQLQESGGGLVQAGGSLRLSCAASGYIFPGRDMGWYRQAPGKERELVASISAGGTSTNYADSVKGRFTISRDNAKNTVYLQMNSLKPEDTAVYYCAAYYYQGLCYWGQGTQVTVSS

SEQ ID NO: 21052 - protein, 118 aa, Artificial Sequence
  Chemically Synthesized
QVQLQESGGGLVQAGGSLRLSCAASGTISTWPVMGWYRQAPGKEREFVAAIDIGASTNYADSVKGRFTISRDNAKNTVYLQMNSLKPEDTAVYYCAAQRASPFHHTYWGQGTQVTVSS

SEQ ID NO: 21053 - protein, 118 aa, Artificial Sequence
  Chemically Synthesized
QVQLQESGGGLVQAGGSLRLSCAASGYISTYRTMGWYRQAPGKEREFVATIDRGGITNYADSVKGRFTISRDNAKNTVYLQMNSLKPEDTAVYYCAVRYSSYSYHYYWGQGTQVTVSS

SEQ ID NO: 21054 - protein, 121 aa, Artificial Sequence
  Chemically Synthesized
QVQLQESGGGLVQAGGSLRLSCAASGNISNIVFMGWYRQAPGKEREFVASISYGSTTYYADSVKGRFTISRDNAKNTVYLQMNSLKPEDTAVYYCAVLSDQADVQFGSIYWGQGTQVTVSS

SEQ ID NO: 21055 - protein, 126 aa, Artificial Sequence
  Chemically Synthesized
QVQLQESGGGLVQAGGSLRLSCAASGNIFGSGPMGWYRQAPGKEREFVASISDGTSTNYADSVKGRFTISRDNAKNTVYLQMNSLKPEDTAVYYCAVGQYRRSYLPYQEGWGHAYWGQGTQVTVSS

SEQ ID NO: 21056 - protein, 118 aa, Artificial Sequence
  Chemically Synthesized
QVQLQESGGGLVQAGGSLRLSCAASGYIFYAGYMGWYRQAPGKEREFVAAIDPGTITYYADSVKGRFTISRDNAKNTVYLQMNSLKPEDTAVYYCAVYRYTAQYLDYWGQGTQVTVSS

SEQ ID NO: 21057 - protein, 118 aa, Artificial Sequence
  Chemically Synthesized
QVQLQESGGGLVQAGGSLRLSCAASGNIFGAYGMGWYRQAPGKEREFVAAIDGGATTNYADSVKGRFTISRDNAKNTVYLQMNSLKPEDTAVYYCAAQTESDATHQYWGQGTQVTVSS

SEQ ID NO: 21058 - protein, 118 aa, Artificial Sequence
  Chemically Synthesized
QVQLQESGGGLVQAGGSLRLSCAASGYISAWDYMGWYRQAPGKERELVASISYGSSTNYADSVKGRFTISRDNAKNTVYLQMNSLKPEDTAVYYCAVNSYVPRDYDYWGQGTQVTVSS

SEQ ID NO: 21059 - protein, 118 aa, Artificial Sequence
  Chemically Synthesized
QVQLQESGGGLVQAGGSLRLSCAASGNIFNNAYMGWYRQAPGKEREFVASISDGGNTYYADSVKGRFTISRDNAKNTVYLQMNSLKPEDTAVYYCAVGNDLGAYYSYWGQGTQVTVSS

SEQ ID NO: 21060 - protein, 126 aa, Artificial Sequence
  Chemically Synthesized
QVQLQESGGGLVQAGGSLRLSCAASGSIFRTSCMGWYRQAPGKEREFVATIAFGSSTYYADSVKGRFTISRDNAKNTVYLQMNSLKPEDTAVYYCAANTDTVQDGADRLAQEHYYWGQGTQVTVSS

SEQ ID NO: 21061 - protein, 121 aa, Artificial Sequence
  Chemically Synthesized
QVQLQESGGGLVQAGGSLRLSCAASGTISYTQHMGWYRQAPGKERELVPLLIMVLIPYADSVKGRFTISRDNAKNTVYLQMNSLKPEDTAVYYCAAQPLIVYGYRSDHYYWGQGTQVTVSS

SEQ ID NO: 21062 - protein, 118 aa, Artificial Sequence
  Chemically Synthesized
QVQLQESGGGLVQAGGSLRLSCAASGNIFVLYYMGWYRQAPGKEREFVAGITYGASTYYADSVKGRFTISRDNAKNTVYLQMNSLKPEDTAVYYCAVYNTSDYHLDYWGQGTQVTVSS

SEQ ID NO: 21063 - protein, 122 aa, Artificial Sequence
  Chemically Synthesized
QVQLQESGGGLVQAGGSLRLSCAASGSIFPRYHMGWYRQAPGKERELVASINYGGSTNYADSVKGRFTISRDNAKNTVYLQMNSLKPEDTAVYYCAVVKPDVYRVGYFFWYWGQGTQVTVSS

SEQ ID NO: 21064 - protein, 118 aa, Artificial Sequence
  Chemically Synthesized
QVQLQESGGGLVQAGGSLRLSCAASGTIFDSDYMGWYRQAPGKEREFVASINVGAITNYADSVKGRFTISRDNAKNTVYLQMNSLKPEDTAVYYCAASWTLFGDFDYWGQGTQVTVSS

SEQ ID NO: 21065 - protein, 118 aa, Artificial Sequence
  Chemically Synthesized
QVQLQESGGGLVQAGGSLRLSCAASGYIFTTRYMGWYRQAPGKEREFVATIARGTITYYADSVKGRFTISRDNAKNTVYLQMNSLKPEDTAVYYCAADYPDYYTLGYWGQGTQVTVSS

SEQ ID NO: 21066 - protein, 118 aa, Artificial Sequence
  Chemically Synthesized
QVQLQESGGGLVQAGGSLRLSCAASGYISDYDYMGWYRQAPGKEREFVAGIGYGTNTYYADSVKGRFTISRDNAKNTVYLQMNSLKPEDTAVYYCAVFSHYLYAHDYWGQGTQVTVSS

SEQ ID NO: 21067 - protein, 118 aa, Artificial Sequence
  Chemically Synthesized
QVQLQESGGGLVQAGGSLRLSCAASGSISDASVMGWYRQAPGKERELVASIGYGGITYYADSVKGRFTISRDNAKNTVYLQMNSLKPEDTAVYYCAAYAYQRIIFYYWGQGTQVTVSS

SEQ ID NO: 21068 - protein, 118 aa, Artificial Sequence
  Chemically Synthesized
QVQLQESGGGLVQAGGSLRLSCAASGYIFPYYYMGWYRQAPGKERELVATITYGGITYYADSVKGRFTISRDNAKNTVYLQMNSLKPEDTAVYYCAVDDYSRRYHGYWGQGTQVTVSS

SEQ ID NO: 21069 - protein, 118 aa, Artificial Sequence
  Chemically Synthesized
QVQLQESGGGLVQAGGSLRLSCAASGSISWAYTMGWYRQAPGKEREFVAGITGGGITYYADSVKGRFTISRDNAKNTVYLQMNSLKPEDTAVYYCAAYYPWYYQHLYWGQGTQVTVSS

SEQ ID NO: 21070 - protein, 113 aa, Artificial Sequence
  Chemically Synthesized
QVQLQESGGGLVQAGGSLRLSCAASGTIFYYFVMGWYRQAPGKEREFVAGIANGGSTYYADSVKGRFTISRDNAKNTVYLQMNSLKPEDTAVYYCAVVAHPYWGQGTQVTVSS

SEQ ID NO: 21071 - protein, 122 aa, Artificial Sequence
  Chemically Synthesized
QVQLQESGGGLVQAGGSLRLSCAASGSIFQYYVMGWYRQAPGKEREFVAGITYGGNTYYADSVKGRFTISRDNAKNTVYLQMNSLKPEDTAVYYCAVHYIDDYSDYSIFSYWGQGTQVTVSS

SEQ ID NO: 21072 - protein, 118 aa, Artificial Sequence
  Chemically Synthesized
QVQLQESGGGLVQAGGSLRLSCAASGSISDTSGMGWYRQAPGKERELVAAIDQGGNTNYADSVKGRFTISRDNAKNTVYLQMNSLKPEDTAVYYCAAIQAYYPLLTYWGQGTQVTVSS

SEQ ID NO: 21073 - protein, 117 aa, Artificial Sequence
  Chemically Synthesized
QVQLQESGGGLVQAGGSLRLSCAASGYISWAGHMGWYRQAPGKERELVATIDVGSSTNYADSVKGRFTISRDNAKNTVYLQMNSLKPEDTAVYYCAADDSWTAHTYWGQGTQVTVSS

SEQ ID NO: 21074 - protein, 122 aa, Artificial Sequence
  Chemically Synthesized
QVQLQESGGGLVQAGGSLRLSCAASGYISVVVAMGWYRQAPGKERELVATIAYGANTNYADSVKGRFTISRDNAKNTVYLQMNSLKPEDTAVYYCAAQYYQYYFAYGRFDYWGQGTQVTVSS

SEQ ID NO: 21075 - protein, 118 aa, Artificial Sequence
  Chemically Synthesized
QVQLQESGGGLVQAGGSLRLSCAASGSISEPPSMGWYRQAPGKERELVAAINQGAITNYADSVKGRFTISRDNAKNTVYLQMNSLKPEDTAVYYCAVPIDPPIWLDYWGQGTQVTVSS

SEQ ID NO: 21076 - protein, 117 aa, Artificial Sequence
  Chemically Synthesized
QVQLQESGGGLVQAGGSLRLSCAASGTIFTLYVMGWYRQAPGKERELVATIDSGSTTYYADSVKGRFTISRDNAKNTVYLQMNSLKPEDTAVYYCAVAYESLLTIYWGQGTQVTVSS

SEQ ID NO: 21077 - protein, 122 aa, Artificial Sequence
  Chemically Synthesized
QVQLQESGGGLVQAGGSLRLSCAASGTIFFYVLMGWYRQAPGKEREFVAGITSGGSTYYADSVKGRFTISRDNAKNTVYLQMNSLKPEDTAVYYCAALATNYGGARHRHDYWGQGTQVTVSS

SEQ ID NO: 21078 - protein, 118 aa, Artificial Sequence
  Chemically Synthesized
QVQLQESGGGLVQAGGSLRLSCAASGTISPWYWMGWYRQAPGKEREFVAGISRGTTTYYADSVKGRFTISRDNAKNTVYLQMNSLKPEDTAVYYCAANGYSVTDHHYWGQGTQVTVSS

SEQ ID NO: 21079 - protein, 118 aa, Artificial Sequence
  Chemically Synthesized
QVQLQESGGGLVQAGGSLRLSCAASGNISIGVYMGWYRQAPGKERELVAGITYGGTTNYADSVKGRFTISRDNAKNTVYLQMNSLKPEDTAVYYCAVYVYFYAPFVYWGQGTQVTVSS

SEQ ID NO: 21080 - protein, 121 aa, Artificial Sequence
  Chemically Synthesized
QVQLQESGGGLVQAGGSLRLSCAASGTIFTSYMGWYRQAPGKERELVASIAWGSSTNYADSVKGRFTISRDNAKNTVYLQMNSLKPEDTAVYYCAVVSYFYSRYFPRFRYWGQGTQVTVSS

SEQ ID NO: 21081 - protein, 122 aa, Artificial Sequence
  Chemically Synthesized
QVQLQESGGGLVQAGGSLRLSCAASGNISRNRYMGWYRQAPGKEREFVAGISNGGSTYYADSVKGRFTISRDNAKNTVYLQMNSLKPEDTAVYYCAVYANWGYAVYHTLYYWGQGTQVTVSS

SEQ ID NO: 21082 - protein, 122 aa, Artificial Sequence
  Chemically Synthesized
QVQLQESGGGLVQAGGSLRLSCAASGNISSADDMGWYRQAPGKERELVATIAHGAITYYADSVKGRFTISRDNAKNTVYLQMNSLKPEDTAVYYCAAGEYNRNHGTLRHRYWGQGTQVTVSS

SEQ ID NO: 21083 - protein, 122 aa, Artificial Sequence
  Chemically Synthesized
QVQLQESGGGLVQAGGSLRLSCAASGTIFYYAIMGWYRQAPGKEREFVAAISYGANTNYADSVKGRFTISRDNAKNTVYLQMNSLKPEDTAVYYCAVARFRRYYVDKDYRYWGQGTQVTVSS

SEQ ID NO: 21084 - protein, 122 aa, Artificial Sequence
  Chemically Synthesized
QVQLQESGGGLVQAGGSLRLSCAASGTIFAHRDMGWYRQAPGKERELVAGIDYGTSTYYADSVKGRFTISRDNAKNTVYLQMNSLKPEDTAVYYCAARFARDSYRNHFHWYWGQGTQVTVSS

SEQ ID NO: 21085 - protein, 118 aa, Artificial Sequence
  Chemically Synthesized
QVQLQESGGGLVQAGGSLRLSCAASGSIFAGLSMGWYRQAPGKERELVASITEGATTYYADSVKGRFTISRDNAKNTVYLQMNSLKPEDTAVYYCAVPYNYPLPYTYWGQGTQVTVSS

SEQ ID NO: 21086 - protein, 122 aa, Artificial Sequence
  Chemically Synthesized
QVQLQESGGGLVQAGGSLRLSCAASGTISTEYDMGWYRQAPGKEREFVATINLGTNTNYADSVKGRFTISRDNAKNTVYLQMNSLKPEDTAVYYCAAEYGYREYSDYGYDYWGQGTQVTVSS

SEQ ID NO: 21087 - protein, 122 aa, Artificial Sequence
  Chemically Synthesized
QVQLQESGGGLVQAGGSLRLSCAASGNIFRPAFMGWYRQAPGKEREFVATIGLGGTTNYADSVKGRFTISRDNAKNTVYLQMNSLKPEDTAVYYCAVYYLTIVQPVDWLVYWGQGTQVTVSS

SEQ ID NO: 21088 - protein, 118 aa, Artificial Sequence
  Chemically Synthesized
QVQLQESGGGLVQAGGSLRLSCAASGSIFNSNTMGWYRQAPGKERELVASISSGGITYYADSVKGRFTISRDNAKNTVYLQMNSLKPEDTAVYYCAVGVHRGWSLSYWGQGTQVTVSS

SEQ ID NO: 21089 - protein, 118 aa, Artificial Sequence
  Chemically Synthesized
QVQLQESGGGLVQAGGSLRLSCAASGNISDAVYMGWYRQAPGKERELVAGIDYGGSTYYADSVKGRFTISRDNAKNTVYLQMNSLKPEDTAVYYCAVVYLPSRYLLYWGQGTQVTVSS

SEQ ID NO: 21090 - protein, 118 aa, Artificial Sequence
  Chemically Synthesized
QVQLQESGGGLVQAGGSLRLSCAASGTIFVGQYMGWYRQAPGKEREFVAGINLGSTTNYADSVKGRFTISRDNAKNTVYLQMNSLKPEDTAVYYCAAYYPKVDKHLYWGQGTQVTVSS

SEQ ID NO: 21091 - protein, 118 aa, Artificial Sequence
  Chemically Synthesized
QVQLQESGGGLVQAGGSLRLSCAASGYISSYSYMGWYRQAPGKERELVATIAYGASTYYADSVKGRFTISRDNAKNTVYLQMNSLKPEDTAVYYCAVTDYVYEYYLYWGQGTQVTVSS

SEQ ID NO: 21092 - protein, 118 aa, Artificial Sequence
  Chemically Synthesized
QVQLQESGGGLVQAGGSLRLSCAASGNISKPRIMGWYRQAPGKERELVAGIAFGAITYYADSVKGRFTISRDNAKNTVYLQMNSLKPEDTAVYYCAANWYRFVRHYYWGQGTQVTVSS

SEQ ID NO: 21093 - protein, 118 aa, Artificial Sequence
  Chemically Synthesized
QVQLQESGGGLVQAGGSLRLSCAASGYIFVSVVMGWYRQAPGKERELVASITVGSNTNYADSVKGRFTISRDNAKNTVYLQMNSLKPEDTAVYYCAAVLSEVYRHDYWGQGTQVTVSS

SEQ ID NO: 21094 - protein, 121 aa, Artificial Sequence
  Chemically Synthesized
QVQLQESGGGLVQAGGSLRLSCAASGTIFDLQIMGWYRQAPGKERELVAGISSVVIPYADSVKGRFTISRDNAKNTVYLQMNSLKPEDTAVYYCAVGGPDQYYYGHGLFYWGQGTQVTVSS

SEQ ID NO: 21095 - protein, 116 aa, Artificial Sequence
  Chemically Synthesized
QVQLQESGGGLVQAGGSLRLSCAASGNISYYVGMGWYRQAPGKERELVAGINAGGNTYYADSVKGRFTISRDNAKNTVYLQMNSLKPEDTAVYYCAAYTDRVVVYWGQGTQVTVSS

SEQ ID NO: 21096 - protein, 113 aa, Artificial Sequence
  Chemically Synthesized
QVQLQESGGGLVQAGGSLRLSCAASGSISYRRQMGWYRQAPGKERELVAGIGYGGNTNYADSVKGRFTISRDNAKNTVYLQMNSLKPEDTAVYYCADPLYAYWGQGTQVTVSS

SEQ ID NO: 21097 - protein, 118 aa, Artificial Sequence
  Chemically Synthesized
QVQLQESGGGLVQAGGSLRLSCAASGTIFYRCLMGWYRQAPGKERELVATITNGASTYYADSVKGRFTISRDNAKNTVYLQMNSLKPEDTAVYYCAANQYGSGLLYYWGQGTQVTVSS

SEQ ID NO: 21098 - protein, 118 aa, Artificial Sequence
  Chemically Synthesized
QVQLQESGGGLVQAGGSLRLSCAASGNIFDDRDMGWYRQAPGKERELVATITVGGSTNYADSVKGRFTISRDNAKNTVYLQMNSLKPEDTAVYYCAVTYRTRIYHHYWGQGTQVTVSS

SEQ ID NO: 21099 - protein, 122 aa, Artificial Sequence
  Chemically Synthesized
QVQLQESGGGLVQAGGSLRLSCAASGYISYSYSMGWYRQAPGKERELVAAIGGGATTYYADSVKGRFTISRDNAKNTVYLQMNSLKPEDTAVYYCAALDRYYFVTARVLRYWGQGTQVTVSS

SEQ ID NO: 21100 - protein, 118 aa, Artificial Sequence
  Chemically Synthesized
QVQLQESGGGLVQAGGSLRLSCAASGSISGDDNMGWYRQAPGKEREFVATIGYGGNTNYADSVKGRFTISRDNAKNTVYLQMNSLKPEDTAVYYCAAVYEYDVDLSYWGQGTQVTVSS

SEQ ID NO: 21101 - protein, 126 aa, Artificial Sequence
  Chemically Synthesized
QVQLQESGGGLVQAGGSLRLSCAASGNISYYYVMGWYRQAPGKERELVAAITPGATTYYADSVKGRFTISRDNAKNTVYLQMNSLKPEDTAVYYCAAPGAWGTKYYVYLSDLLWYWGQGTQVTVSS

SEQ ID NO: 21102 - protein, 122 aa, Artificial Sequence
  Chemically Synthesized
QVQLQESGGGLVQAGGSLRLSCAASGNISWLDIMGWYRQAPGKERELVASINYGATTNYADSVKGRFTISRDNAKNTVYLQMNSLKPEDTAVYYCAVHYATHTVYYVFHAYWGQGTQVTVSS

SEQ ID NO: 21103 - protein, 122 aa, Artificial Sequence
  Chemically Synthesized
QVQLQESGGGLVQAGGSLRLSCAASGSIFAYIFMGWYRQAPGKERELVAAINVGGTTNYADSVKGRFTISRDNAKNTVYLQMNSLKPEDTAVYYCAVYGDVPQGYGDSYEYWGQGTQVTVSS

SEQ ID NO: 21104 - protein, 118 aa, Artificial Sequence
  Chemically Synthesized
QVQLQESGGGLVQAGGSLRLSCAASGTIFGARYMGWYRQAPGKEREFVASIGKGANTNYADSVKGRFTISRDNAKNTVYLQMNSLKPEDTAVYYCAVRTYYGGNFRYWGQGTQVTVSS

SEQ ID NO: 21105 - protein, 118 aa, Artificial Sequence
  Chemically Synthesized
QVQLQESGGGLVQAGGSLRLSCAASGNIFYPYVMGWYRQAPGKERELVAGITYGGSTNYADSVKGRFTISRDNAKNTVYLQMNSLKPEDTAVYYCAAREAIDFYHTYWGQGTQVTVSS

SEQ ID NO: 21106 - protein, 118 aa, Artificial Sequence
  Chemically Synthesized
QVQLQESGGGLVQAGGSLRLSCAASGNISLTYNMGWYRQAPGKERELVATIGLGGTTYYADSVKGRFTISRDNAKNTVYLQMNSLKPEDTAVYYCAAIGWGVSDHVYWGQGTQVTVSS

SEQ ID NO: 21107 - protein, 118 aa, Artificial Sequence
  Chemically Synthesized
QVQLQESGGGLVQAGGSLRLSCAASGTISANDYMGWYRQAPGKEREFVAGIDAGGTTYYADSVKGRFTISRDNAKNTVYLQMNSLKPEDTAVYYCAVRYPTSSGHTYWGQGTQVTVSS

SEQ ID NO: 21108 - protein, 122 aa, Artificial Sequence
  Chemically Synthesized
QVQLQESGGGLVQAGGSLRLSCAASGNISDTPWMGWYRQAPGKEREFVAAITDGANTNYADSVKGRFTISRDNAKNTVYLQMNSLKPEDTAVYYCAVVGYAYGWNDWELTYWGQGTQVTVSS

SEQ ID NO: 21109 - protein, 123 aa, Artificial Sequence
  Chemically Synthesized
QVQLQESGGGLVQAGGSLRLSCAASGTATHMGWYRQAPGKERELVAGIGGGTITYYADSVKGRFTISRDNAKNTVYLQMNSLKPEDTAVYYCAVSRRWVYPTTRYPSDLHSYWGQGTQVTVSS

SEQ ID NO: 21110 - protein, 126 aa, Artificial Sequence
  Chemically Synthesized
QVQLQESGGGLVQAGGSLRLSCAASGSISYAAYMGWYRQAPGKEREFVATIAAGGSTNYADSVKGRFTISRDNAKNTVYLQMNSLKPEDTAVYYCAVARWSFQRWWGGYRLAHDYWGQGTQVTVSS

SEQ ID NO: 21111 - protein, 118 aa, Artificial Sequence
  Chemically Synthesized
QVQLQESGGGLVQAGGSLRLSCAASGNISRFDYMGWYRQAPGKEREFVASITAGTTTYYADSVKGRFTISRDNAKNTVYLQMNSLKPEDTAVYYCAAPSPPLVGFAYWGQGTQVTVSS

SEQ ID NO: 21112 - protein, 118 aa, Artificial Sequence
  Chemically Synthesized
QVQLQESGGGLVQAGGSLRLSCAASGTIFYAVAMGWYRQAPGKEREFVATITYGSNTNYADSVKGRFTISRDNAKNTVYLQMNSLKPEDTAVYYCAAFPYIIVDFDYWGQGTQVTVSS

SEQ ID NO: 21113 - protein, 118 aa, Artificial Sequence
  Chemically Synthesized
QVQLQESGGGLVQAGGSLRLSCAASGYIFVPGFMGWYRQAPGKEREFVASIGHGATTYYADSVKGRFTISRDNAKNTVYLQMNSLKPEDTAVYYCAVDRDYYRYHDYWGQGTQVTVSS

SEQ ID NO: 21114 - protein, 118 aa, Artificial Sequence
  Chemically Synthesized
QVQLQESGGGLVQAGGSLRLSCAASGNIFYWVYMGWYRQAPGKEREFVAAITDGATTYYADSVKGRFTISRDNAKNTVYLQMNSLKPEDTAVYYCAVNQVRDRKLAYWGQGTQVTVSS

SEQ ID NO: 21115 - protein, 118 aa, Artificial Sequence
  Chemically Synthesized
QVQLQESGGGLVQAGGSLRLSCAASGTISPYLYMGWYRQAPGKERELVATINQGTTTYYADSVKGRFTISRDNAKNTVYLQMNSLKPEDTAVYYCAAGDRQKTDHGYWGQGTQVTVSS

SEQ ID NO: 21116 - protein, 124 aa, Artificial Sequence
  Chemically Synthesized
QVQLQESGGGLVQAGGSLRLSCAASGNISDGTYMGWYRQAPGKEREFVAAITTGTYYADSVKGRFTISRDNAKNTVYLQMNSLKPEDTAVYYCAVLIYSTTTADIIAPRYYWYWGQGTQVTVSS

SEQ ID NO: 21117 - protein, 126 aa, Artificial Sequence
  Chemically Synthesized
QVQLQESGGGLVQAGGSLRLSCAASGSISVEWDMGWYRQAPGKERELVATIGRGANTYYADSVKGRFTISRDNAKNTVYLQMNSLKPEDTAVYYCAVQTQPWSFDLYYADNGYLYWGQGTQVTVSS

SEQ ID NO: 21118 - protein, 120 aa, Artificial Sequence
  Chemically Synthesized
QVQLQESGGGLVQAGGSLRLSCAASGNIFYSSMGWYRQAPGKERELVATIGSVVIPYADSVKGRFTISRDNAKNTVYLQMNSLKPEDTAVYYCAAQEYYPYLNRYSFYYWGQGTQVTVSS

SEQ ID NO: 21119 - protein, 126 aa, Artificial Sequence
  Chemically Synthesized
QVQLQESGGGLVQAGGSLRLSCAASGYIFSVDYMGWYRQAPGKERELVATITWGGTTYYADSVKGRFTISRDNAKNTVYLQMNSLKPEDTAVYYCAVQHRYPWIAAVYRYWIYPYWGQGTQVTVSS

SEQ ID NO: 21120 - protein, 126 aa, Artificial Sequence
  Chemically Synthesized
QVQLQESGGGLVQAGGSLRLSCAASGTISLYVAMGWYRQAPGKEREFVATIATGSTTYYADSVKGRFTISRDNAKNTVYLQMNSLKPEDTAVYYCAVRAYPYYWPWERGGQYLVYWGQGTQVTVSS

SEQ ID NO: 21121 - protein, 118 aa, Artificial Sequence
  Chemically Synthesized
QVQLQESGGGLVQAGGSLRLSCAASGSIFRNDSMGWYRQAPGKEREFVATISYGAITNYADSVKGRFTISRDNAKNTVYLQMNSLKPEDTAVYYCAVYFRGDEYHVYWGQGTQVTVSS

SEQ ID NO: 21122 - protein, 118 aa, Artificial Sequence
  Chemically Synthesized
QVQLQESGGGLVQAGGSLRLSCAASGTIFVHLSMGWYRQAPGKEREFVAGIGRGANTNYADSVKGRFTISRDNAKNTVYLQMNSLKPEDTAVYYCAAYSKRSGQFGYWGQGTQVTVSS

SEQ ID NO: 21123 - protein, 122 aa, Artificial Sequence
  Chemically Synthesized
QVQLQESGGGLVQAGGSLRLSCAASGNIFGVWGMGWYRQAPGKERELVASISVGANTYYADSVKGRFTISRDNAKNTVYLQMNSLKPEDTAVYYCAAAIWSYLRLYPYYTYWGQGTQVTVSS

SEQ ID NO: 21124 - protein, 117 aa, Artificial Sequence
  Chemically Synthesized
QVQLQESGGGLVQAGGSLRLSCAASGTISSADMGWYRQAPGKERELVATIAYGSTTNYADSVKGRFTISRDNAKNTVYLQMNSLKPEDTAVYYCAADYPVGTDHAYWGQGTQVTVSS

SEQ ID NO: 21125 - protein, 122 aa, Artificial Sequence
  Chemically Synthesized
QVQLQESGGGLVQAGGSLRLSCAASGNISYVVPMGWYRQAPGKEREFVATIDAGSTTNYADSVKGRFTISRDNAKNTVYLQMNSLKPEDTAVYYCAAYRVDPRQNRYTHSYWGQGTQVTVSS

SEQ ID NO: 21126 - protein, 118 aa, Artificial Sequence
  Chemically Synthesized
QVQLQESGGGLVQAGGSLRLSCAASGNIFYYPYMGWYRQAPGKEREFVAAIATGAITYYADSVKGRFTISRDNAKNTVYLQMNSLKPEDTAVYYCAVWYAAYRYYYYWGQGTQVTVSS

SEQ ID NO: 21127 - protein, 117 aa, Artificial Sequence
  Chemically Synthesized
QVQLQESGGGLVQAGGSLRLSCAASGNIFNSDFMGWYRQAPGKEREFVAAIARGNYLYADSVKGRFTISRDNAKNTVYLQMNSLKPEDTAVYYCAAPTTYPRSLVYWGQGTQVTVSS

SEQ ID NO: 21128 - protein, 122 aa, Artificial Sequence
  Chemically Synthesized
QVQLQESGGGLVQAGGSLRLSCAASGTIFSRPTMGWYRQAPGKERELVAGIAWGGITNYADSVKGRFTISRDNAKNTVYLQMNSLKPEDTAVYYCAAWNIADYDLDQSHYYWGQGTQVTVSS

SEQ ID NO: 21129 - protein, 126 aa, Artificial Sequence
  Chemically Synthesized
QVQLQESGGGLVQAGGSLRLSCAASGSIFRDYSMGWYRQAPGKEREFVAAIAAGATTNYADSVKGRFTISRDNAKNTVYLQMNSLKPEDTAVYYCAANRHVVGPYGYISARPYGYWGQGTQVTVSS

SEQ ID NO: 21130 - protein, 118 aa, Artificial Sequence
  Chemically Synthesized
QVQLQESGGGLVQAGGSLRLSCAASGTIFAYAVMGWYRQAPGKEREFVAAISGGSTTNYADSVKGRFTISRDNAKNTVYLQMNSLKPEDTAVYYCAVGLAAWDYFNYWGQGTQVTVSS

SEQ ID NO: 21131 - protein, 118 aa, Artificial Sequence
  Chemically Synthesized
QVQLQESGGGLVQAGGSLRLSCAASGYIFWDKYMGWYRQAPGKEREFVAGIAYGGITNYADSVKGRFTISRDNAKNTVYLQMNSLKPEDTAVYYCAVRYPIVWWFSYWGQGTQVTVSS

SEQ ID NO: 21132 - protein, 118 aa, Artificial Sequence
  Chemically Synthesized
QVQLQESGGGLVQAGGSLRLSCAASGTIFRILHMGWYRQAPGKERELVASINIGGNTYYADSVKGRFTISRDNAKNTVYLQMNSLKPEDTAVYYCAAVGNSYRSHLYWGQGTQVTVSS

SEQ ID NO: 21133 - protein, 121 aa, Artificial Sequence
  Chemically Synthesized
QVQLQESGGGLVQAGGSLRLSCAASGTIFDVYMGWYRQAPGKEREFVATITVGGTTNYADSVKGRFTISRDNAKNTVYLQMNSLKPEDTAVYYCAVWPYQYADYGGDHIYWGQGTQVTVSS

SEQ ID NO: 21134 - protein, 118 aa, Artificial Sequence
  Chemically Synthesized
QVQLQESGGGLVQAGGSLRLSCAASGNIFQYSYMGWYRQAPGKERELVAAINVGSTTYYADSVKGRFTISRDNAKNTVYLQMNSLKPEDTAVYYCAAAVYAHRYYAYWGQGTQVTVSS

SEQ ID NO: 21135 - protein, 122 aa, Artificial Sequence
  Chemically Synthesized
QVQLQESGGGLVQAGGSLRLSCAASGTIFYFPIMGWYRQAPGKERELVAAITRGGSTYYADSVKGRFTISRDNAKNTVYLQMNSLKPEDTAVYYCAVGYRYDYVRYSQFRYWGQGTQVTVSS

SEQ ID NO: 21136 - protein, 122 aa, Artificial Sequence
  Chemically Synthesized
QVQLQESGGGLVQAGGSLRLSCAASGSISSYLWMGWYRQAPGKEREFVAGISRGSSTNYADSVKGRFTISRDNAKNTVYLQMNSLKPEDTAVYYCAAYILYPYWYRNYFGYWGQGTQVTVSS

SEQ ID NO: 21137 - protein, 118 aa, Artificial Sequence
  Chemically Synthesized
QVQLQESGGGLVQAGGSLRLSCAASGNISIGYDMGWYRQAPGKEREFVASIGDGSTTYYADSVKGRFTISRDNAKNTVYLQMNSLKPEDTAVYYCAVVQVIQVDFRYWGQGTQVTVSS

SEQ ID NO: 21138 - protein, 126 aa, Artificial Sequence
  Chemically Synthesized
QVQLQESGGGLVQAGGSLRLSCAASGYIFYDLYMGWYRQAPGKEREFVATIGHGSSTYYADSVKGRFTISRDNAKNTVYLQMNSLKPEDTAVYYCAADWSQTDGTNYFQQAYHYYWGQGTQVTVSS

SEQ ID NO: 21139 - protein, 126 aa, Artificial Sequence
  Chemically Synthesized
QVQLQESGGGLVQAGGSLRLSCAASGTISVDQDMGWYRQAPGKEREFVASITDGGSTYYADSVKGRFTISRDNAKNTVYLQMNSLKPEDTAVYYCAVYWAIFDYVEWFSDRIFDYWGQGTQVTVSS

SEQ ID NO: 21140 - protein, 120 aa, Artificial Sequence
  Chemically Synthesized
QVQLQESGGGLVQAGGSLRLSCAASGYIFPEGDMGWYRQAPGKEREFVATIARGSTTNYADSVKGRFTISRDNAKNTVYLQMNSLKPEDTAVYYCAAGGYTYSTLVVFYWGQGTQVTVSS

SEQ ID NO: 21141 - protein, 124 aa, Artificial Sequence
  Chemically Synthesized
QVQLQESGGGLVQAGGSLRLSCAASGTISWTRDMGWYRQAPGKEREFVATIGIGSSTYYADSVKGRFTISRDNAKNTVYLQMNSLKPEDTAVYYCAVGSATDGYADLPQTLRYWGQGTQVTVSS

SEQ ID NO: 21142 - protein, 117 aa, Artificial Sequence
  Chemically Synthesized
QVQLQESGGGLVQAGGSLRLSCAASGSIFANDTMGWYRQAPGKERELVATIDDGATTNYADSVKGRFTISRDNAKNTVYLQMNSLKPEDTAVYYCAVYRNYLEIHYWGQGTQVTVSS

SEQ ID NO: 21143 - protein, 118 aa, Artificial Sequence
  Chemically Synthesized
QVQLQESGGGLVQAGGSLRLSCAASGNISSGYLMGWYRQAPGKEREFVAGISTGGTTYYADSVKGRFTISRDNAKNTVYLQMNSLKPEDTAVYYCAALSTVYPIYDYWGQGTQVTVSS

SEQ ID NO: 21144 - protein, 118 aa, Artificial Sequence
  Chemically Synthesized
QVQLQESGGGLVQAGGSLRLSCAASGTISTFLYMGWYRQAPGKEREFVATITTGGSTNYADSVKGRFTISRDNAKNTVYLQMNSLKPEDTAVYYCAVITYGDTTHDYWGQGTQVTVSS

SEQ ID NO: 21145 - protein, 118 aa, Artificial Sequence
  Chemically Synthesized
QVQLQESGGGLVQAGGSLRLSCAASGYIFGRVRMGWYRQAPGKEREFVAAIGVGTTTYYADSVKGRFTISRDNAKNTVYLQMNSLKPEDTAVYYCAAQRSWAVYHTYWGQGTQVTVSS

SEQ ID NO: 21146 - protein, 118 aa, Artificial Sequence
  Chemically Synthesized
QVQLQESGGGLVQAGGSLRLSCAASGNIFRNRYMGWYRQAPGKEREFVAGIGWGGITYYADSVKGRFTISRDNAKNTVYLQMNSLKPEDTAVYYCAVFQYWTRNHDYWGQGTQVTVSS

SEQ ID NO: 21147 - protein, 118 aa, Artificial Sequence
  Chemically Synthesized
QVQLQESGGGLVQAGGSLRLSCAASGSIFPIGGMGWYRQAPGKEREFVAGISYGGNTNYADSVKGRFTISRDNAKNTVYLQMNSLKPEDTAVYYCAAVRAYYLWFGYWGQGTQVTVSS

SEQ ID NO: 21148 - protein, 126 aa, Artificial Sequence
  Chemically Synthesized
QVQLQESGGGLVQAGGSLRLSCAASGTISRGYVMGWYRQAPGKERELVASIDTGASTYYADSVKGRFTISRDNAKNTVYLQMNSLKPEDTAVYYCAVAASVYYSHTDAQSYPYYYWGQGTQVTVSS

SEQ ID NO: 21149 - protein, 119 aa, Artificial Sequence
  Chemically Synthesized
QVQLQESGGGLVQAGGSLRLSCAASGYIFYPIWMGWYRQAPGKERELVAAITNGATTNYADSVKGRFTISRDNAKNTVYLQMNSLKPEDTAVYYCAAYPYGYEFGTEYWGQGTQVTVSS

SEQ ID NO: 21150 - protein, 122 aa, Artificial Sequence
  Chemically Synthesized
QVQLQESGGGLVQAGGSLRLSCAASGTIFSFSSMGWYRQAPGKEREFVASIDLGGSTYYADSVKGRFTISRDNAKNTVYLQMNSLKPEDTAVYYCAAAQVAYGYTPYDLYYWGQGTQVTVSS

SEQ ID NO: 21151 - protein, 122 aa, Artificial Sequence
  Chemically Synthesized
QVQLQESGGGLVQAGGSLRLSCAASGYIFATYLMGWYRQAPGKEREFVASIGRGGNTNYADSVKGRFTISRDNAKNTVYLQMNSLKPEDTAVYYCAVRGYLGPYTGVAHDYWGQGTQVTVSS

SEQ ID NO: 21152 - protein, 122 aa, Artificial Sequence
  Chemically Synthesized
QVQLQESGGGLVQAGGSLRLSCAASGNISDAYLMGWYRQAPGKERELVATIGNGGTTNYADSVKGRFTISRDNAKNTVYLQMNSLKPEDTAVYYCAVYYEGQIAIGYTHPYWGQGTQVTVSS

SEQ ID NO: 21153 - protein, 118 aa, Artificial Sequence
  Chemically Synthesized
QVQLQESGGGLVQAGGSLRLSCAASGNISQYDNMGWYRQAPGKEREFVAGIAVGSITYYADSVKGRFTISRDNAKNTVYLQMNSLKPEDTAVYYCAAYRTSYPRHNYWGQGTQVTVSS

SEQ ID NO: 21154 - protein, 122 aa, Artificial Sequence
  Chemically Synthesized
QVQLQESGGGLVQAGGSLRLSCAASGNISYDYDMGWYRQAPGKERELVAAITPGASTYYADSVKGRFTISRDNAKNTVYLQMNSLKPEDTAVYYCAVGDNFWYYYDLYLGYWGQGTQVTVSS

SEQ ID NO: 21155 - protein, 120 aa, Artificial Sequence
  Chemically Synthesized
QVQLQESGGGLVQAGGSLRLSCAASGNISRAAIMGWYRQAPGKERELVAAIGEGASTNYADSVKGRFTISRDNAKNTVYLQMNSLKPEDTAVYYCAVYRFYRPPSLVLYWGQGTQVTVSS

SEQ ID NO: 21156 - protein, 118 aa, Artificial Sequence
  Chemically Synthesized
QVQLQESGGGLVQAGGSLRLSCAASGYIFEYWYMGWYRQAPGKEREFVATIGFGSITYYADSVKGRFTISRDNAKNTVYLQMNSLKPEDTAVYYCAVERGDYHYFGYWGQGTQVTVSS

SEQ ID NO: 21157 - protein, 118 aa, Artificial Sequence
  Chemically Synthesized
QVQLQESGGGLVQAGGSLRLSCAASGTISAPIYMGWYRQAPGKERELVAAINRGSITYYADSVKGRFTISRDNAKNTVYLQMNSLKPEDTAVYYCAVPYKRYGRLRYWGQGTQVTVSS

SEQ ID NO: 21158 - protein, 126 aa, Artificial Sequence
  Chemically Synthesized
QVQLQESGGGLVQAGGSLRLSCAASGNIFGAPYMGWYRQAPGKERELVAAITSGGSTYYADSVKGRFTISRDNAKNTVYLQMNSLKPEDTAVYYCAAYYEPENAEYFQRDPHLPYWGQGTQVTVSS

SEQ ID NO: 21159 - protein, 118 aa, Artificial Sequence
  Chemically Synthesized
QVQLQESGGGLVQAGGSLRLSCAASGTISKTHLMGWYRQAPGKEREFVAGIGYGGTTYYADSVKGRFTISRDNAKNTVYLQMNSLKPEDTAVYYCAAIAWYYRLHDYWGQGTQVTVSS

SEQ ID NO: 21160 - protein, 122 aa, Artificial Sequence
  Chemically Synthesized
QVQLQESGGGLVQAGGSLRLSCAASGTISAYDEMGWYRQAPGKEREFVASIGYGTSTYYADSVKGRFTISRDNAKNTVYLQMNSLKPEDTAVYYCAVYLTFDTWDLSDHIYWGQGTQVTVSS

SEQ ID NO: 21161 - protein, 126 aa, Artificial Sequence
  Chemically Synthesized
QVQLQESGGGLVQAGGSLRLSCAASGTISRVSLMGWYRQAPGKEREFVASISWGTTTYYADSVKGRFTISRDNAKNTVYLQMNSLKPEDTAVYYCAAVSYYWFIDDAYLSRWLTYWGQGTQVTVSS

SEQ ID NO: 21162 - protein, 122 aa, Artificial Sequence
  Chemically Synthesized
QVQLQESGGGLVQAGGSLRLSCAASGTISSYVGMGWYRQAPGKEREFVAAIGFGSTTYYADSVKGRFTISRDNAKNTVYLQMNSLKPEDTAVYYCAAAGYDTPYNNVSHFYWGQGTQVTVSS

SEQ ID NO: 21163 - protein, 126 aa, Artificial Sequence
  Chemically Synthesized
QVQLQESGGGLVQAGGSLRLSCAASGYIFPTPAMGWYRQAPGKEREFVAGINHGTITNYADSVKGRFTISRDNAKNTVYLQMNSLKPEDTAVYYCAAVRKGYSYPARTYDKYHWYWGQGTQVTVSS

SEQ ID NO: 21164 - protein, 118 aa, Artificial Sequence
  Chemically Synthesized
QVQLQESGGGLVQAGGSLRLSCAASGTISVRYSMGWYRQAPGKERELVATISYGSNTNYADSVKGRFTISRDNAKNTVYLQMNSLKPEDTAVYYCAAYYYDFPWFYYWGQGTQVTVSS

SEQ ID NO: 21165 - protein, 118 aa, Artificial Sequence
  Chemically Synthesized
QVQLQESGGGLVQAGGSLRLSCAASGNISLRRRMGWYRQAPGKERELVAAINAGGNTYYADSVKGRFTISRDNAKNTVYLQMNSLKPEDTAVYYCAVYTRRSAYYQYWGQGTQVTVSS

SEQ ID NO: 21166 - protein, 118 aa, Artificial Sequence
  Chemically Synthesized
QVQLQESGGGLVQAGGSLRLSCAASGNIFNLRFMGWYRQAPGKEREFVATINRGASTYYADSVKGRFTISRDNAKNTVYLQMNSLKPEDTAVYYCAASTRAYHYFTYWGQGTQVTVSS

SEQ ID NO: 21167 - protein, 118 aa, Artificial Sequence
  Chemically Synthesized
QVQLQESGGGLVQAGGSLRLSCAASGYIFYDWVMGWYRQAPGKERELVAGIDYGGTTYYADSVKGRFTISRDNAKNTVYLQMNSLKPEDTAVYYCAAPGAAVNTHGYWGQGTQVTVSS

SEQ ID NO: 21168 - protein, 122 aa, Artificial Sequence
  Chemically Synthesized
QVQLQESGGGLVQAGGSLRLSCAASGYIFGDAVMGWYRQAPGKEREFVATIDYGTNTYYADSVKGRFTISRDNAKNTVYLQMNSLKPEDTAVYYCAVYTYYYWPLEQYYNYWGQGTQVTVSS

SEQ ID NO: 21169 - protein, 122 aa, Artificial Sequence
  Chemically Synthesized
QVQLQESGGGLVQAGGSLRLSCAASGTIFYYGWMGWYRQAPGKERELVATIAFGGTTYYADSVKGRFTISRDNAKNTVYLQMNSLKPEDTAVYYCAVALLLDYSQALVLNYWGQGTQVTVSS

SEQ ID NO: 21170 - protein, 118 aa, Artificial Sequence
  Chemically Synthesized
QVQLQESGGGLVQAGGSLRLSCAASGNISPTQYMGWYRQAPGKERELVASIGTGGNTYYADSVKGRFTISRDNAKNTVYLQMNSLKPEDTAVYYCAAVYNYLRAYDYWGQGTQVTVSS

SEQ ID NO: 21171 - protein, 118 aa, Artificial Sequence
  Chemically Synthesized
QVQLQESGGGLVQAGGSLRLSCAASGTISRNQLMGWYRQAPGKEREFVAGIAYGTSTYYADSVKGRFTISRDNAKNTVYLQMNSLKPEDTAVYYCAVHGYTTQAHDYWGQGTQVTVSS

SEQ ID NO: 21172 - protein, 122 aa, Artificial Sequence
  Chemically Synthesized
QVQLQESGGGLVQAGGSLRLSCAASGYIFYALAMGWYRQAPGKERELVATITYGTTTNYADSVKGRFTISRDNAKNTVYLQMNSLKPEDTAVYYCAAQLYRILPYPYLHAYWGQGTQVTVSS

SEQ ID NO: 21173 - protein, 118 aa, Artificial Sequence
  Chemically Synthesized
QVQLQESGGGLVQAGGSLRLSCAASGTISFPLSMGWYRQAPGKERELVAAISLGSSTYYADSVKGRFTISRDNAKNTVYLQMNSLKPEDTAVYYCAVKTYWQSQFPYWGQGTQVTVSS

SEQ ID NO: 21174 - protein, 126 aa, Artificial Sequence
  Chemically Synthesized
QVQLQESGGGLVQAGGSLRLSCAASGTIFSPDTMGWYRQAPGKEREFVATIDVGGSTNYADSVKGRFTISRDNAKNTVYLQMNSLKPEDTAVYYCAVTLTLGYQLPYRVDLPYYYWGQGTQVTVSS

SEQ ID NO: 21175 - protein, 125 aa, Artificial Sequence
  Chemically Synthesized
QVQLQESGGGLVQAGGSLRLSCAASGYISILRMGWYRQAPGKERELVATIGYGATTNYADSVKGRFTISRDNAKNTVYLQMNSLKPEDTAVYYCAAGELNYDFTDGDADSDLPYWGQGTQVTVSS

SEQ ID NO: 21176 - protein, 115 aa, Artificial Sequence
  Chemically Synthesized
QVQLQESGGGLVQAGGSLRLSCAASGSIFLYAYMGWYRQAPGKEREFVASIGYGANTNYADSVKGRFTISRDNAKNTVYLQMNSLKPEDTAVYYCANVRYDFEYWGQGTQVTVSS

SEQ ID NO: 21177 - protein, 118 aa, Artificial Sequence
  Chemically Synthesized
QVQLQESGGGLVQAGGSLRLSCAASGSIFPFTDMGWYRQAPGKEREFVATITKGGNTNYADSVKGRFTISRDNAKNTVYLQMNSLKPEDTAVYYCAAGWDDNYAHDYWGQGTQVTVSS

SEQ ID NO: 21178 - protein, 126 aa, Artificial Sequence
  Chemically Synthesized
QVQLQESGGGLVQAGGSLRLSCAASGSIFGDIYMGWYRQAPGKERELVATIAPGSSTNYADSVKGRFTISRDNAKNTVYLQMNSLKPEDTAVYYCAALSNQGTRDLPDDVPIYWYWGQGTQVTVSS

SEQ ID NO: 21179 - protein, 118 aa, Artificial Sequence
  Chemically Synthesized
QVQLQESGGGLVQAGGSLRLSCAASGNIFVFPYMGWYRQAPGKEREFVASIAQGGNTYYADSVKGRFTISRDNAKNTVYLQMNSLKPEDTAVYYCAARRGRRLPFDYWGQGTQVTVSS

SEQ ID NO: 21180 - protein, 119 aa, Artificial Sequence
  Chemically Synthesized
QVQLQESGGGLVQAGGSLRLSCAASGNIFGSYEMGWYRQAPGKERELVATINAGSGTTYYADSVKGRFTISRDNAKNTVYLQMNSLKPEDTAVYYCAAADSDASFRLYWGQGTQVTVSS

SEQ ID NO: 21181 - protein, 118 aa, Artificial Sequence
  Chemically Synthesized
QVQLQESGGGLVQAGGSLRLSCAASGNIFRPAYMGWYRQAPGKEREFVASIGYGASTNYADSVKGRFTISRDNAKNTVYLQMNSLKPEDTAVYYCAALLGGDSYLPYWGQGTQVTVSS

SEQ ID NO: 21182 - protein, 118 aa, Artificial Sequence
  Chemically Synthesized
QVQLQESGGGLVQAGGSLRLSCAASGNIFVGPIMGWYRQAPGKEREFVASIGLGAITYYADSVKGRFTISRDNAKNTVYLQMNSLKPEDTAVYYCAVGYPYLYGHTYWGQGTQVTVSS

SEQ ID NO: 21183 - protein, 115 aa, Artificial Sequence
  Chemically Synthesized
QVQLQESGGGLVQAGGSLRLSCAASGSISASSFMGWYRQAPGKERELVAAITDGSNTYYADSVKGRFTISRDNAKNTVYLQMNSLKPEDTAVYYCAVGWRRHPYWGQGTQVTVSS

SEQ ID NO: 21184 - protein, 122 aa, Artificial Sequence
  Chemically Synthesized
QVQLQESGGGLVQAGGSLRLSCAASGYIFFSGYMGWYRQAPGKEREFVATISYGSTTNYADSVKGRFTISRDNAKNTVYLQMNSLKPEDTAVYYCAVGHYDGYKYVVDHGYWGQGTQVTVSS

SEQ ID NO: 21185 - protein, 121 aa, Artificial Sequence
  Chemically Synthesized
QVQLQESGGGLVQAGGSLRLSCAASGYIFYDFYMGWYRQAPGKEREFVASINPGASTNYADSVKGRFTISRDNAKNTVYLQMNSLKPEDTAVYYCAAAAYRRYDRWRHIYWGQGTQVTVSS

SEQ ID NO: 21186 - protein, 118 aa, Artificial Sequence
  Chemically Synthesized
QVQLQESGGGLVQAGGSLRLSCAASGSIFLYPPMGWYRQAPGKEREFVASISGGGITYYADSVKGRFTISRDNAKNTVYLQMNSLKPEDTAVYYCAVPIVHRWYLAYWGQGTQVTVSS

SEQ ID NO: 21187 - protein, 126 aa, Artificial Sequence
  Chemically Synthesized
QVQLQESGGGLVQAGGSLRLSCAASGNISDSPYMGWYRQAPGKEREFVASIAYGAITNYADSVKGRFTISRDNAKNTVYLQMNSLKPEDTAVYYCAAVGGDWNQSHYISQSGHWYWGQGTQVTVSS

SEQ ID NO: 21188 - protein, 118 aa, Artificial Sequence
  Chemically Synthesized
QVQLQESGGGLVQAGGSLRLSCAASGYIFGPDNMGWYRQAPGKERELVAAIDTGGTTYYADSVKGRFTISRDNAKNTVYLQMNSLKPEDTAVYYCAALSDDHPYFLYWGQGTQVTVSS

SEQ ID NO: 21189 - protein, 126 aa, Artificial Sequence
  Chemically Synthesized
QVQLQESGGGLVQAGGSLRLSCAASGTISGTYSMGWYRQAPGKEREFVATISRGTNTYYADSVKGRFTISRDNAKNTVYLQMNSLKPEDTAVYYCAANLSDAGNYLTKRQYTYPYWGQGTQVTVSS

SEQ ID NO: 21190 - protein, 118 aa, Artificial Sequence
  Chemically Synthesized
QVQLQESGGGLVQAGGSLRLSCAASGTIFRWISMGWYRQAPGKEREFVAGINAGGSTNYADSVKGRFTISRDNAKNTVYLQMNSLKPEDTAVYYCAVYAYRRYGHWYWGQGTQVTVSS

SEQ ID NO: 21191 - protein, 126 aa, Artificial Sequence
  Chemically Synthesized
QVQLQESGGGLVQAGGSLRLSCAASGSISDVYTMGWYRQAPGKEREFVATIGTGASTYYADSVKGRFTISRDNAKNTVYLQMNSLKPEDTAVYYCAVGRYIRYNSLLHVRGTFYYWGQGTQVTVSS

SEQ ID NO: 21192 - protein, 118 aa, Artificial Sequence
  Chemically Synthesized
QVQLQESGGGLVQAGGSLRLSCAASGNISPAVYMGWYRQAPGKERELVASISPGSNTNYADSVKGRFTISRDNAKNTVYLQMNSLKPEDTAVYYCAALPGYLVSHQYWGQGTQVTVSS

SEQ ID NO: 21193 - protein, 126 aa, Artificial Sequence
  Chemically Synthesized
QVQLQESGGGLVQAGGSLRLSCAASGYISNYYDMGWYRQAPGKEREFVASITTGATTNYADSVKGRFTISRDNAKNTVYLQMNSLKPEDTAVYYCAVYQYYDISSVLTRYKYHDYWGQGTQVTVSS

SEQ ID NO: 21194 - protein, 121 aa, Artificial Sequence
  Chemically Synthesized
QVQLQESGGGLVQAGGSLRLSCAASGYIFTTVMGWYRQAPGKEREFVAGINYGSTTNYADSVKGRFTISRDNAKNTVYLQMNSLKPEDTAVYYCAAIGLYTDTGHKTYFYWGQGTQVTVSS

SEQ ID NO: 21195 - protein, 118 aa, Artificial Sequence
  Chemically Synthesized
QVQLQESGGGLVQAGGSLRLSCAASGNISRWLDMGWYRQAPGKERELVAGIAYGSTTNYADSVKGRFTISRDNAKNTVYLQMNSLKPEDTAVYYCAVWWWLFPIHAYWGQGTQVTVSS

SEQ ID NO: 21196 - protein, 118 aa, Artificial Sequence
  Chemically Synthesized
QVQLQESGGGLVQAGGSLRLSCAASGTIFEYVYMGWYRQAPGKERELVASIGSGASTYYADSVKGRFTISRDNAKNTVYLQMNSLKPEDTAVYYCAAIYPLLRNLGYWGQGTQVTVSS

SEQ ID NO: 21197 - protein, 122 aa, Artificial Sequence
  Chemically Synthesized
QVQLQESGGGLVQAGGSLRLSCAASGYISAYPTMGWYRQAPGKERELVATISDGTITYYADSVKGRFTISRDNAKNTVYLQMNSLKPEDTAVYYCAVETGLTGKFGDIHDYWGQGTQVTVSS

SEQ ID NO: 21198 - protein, 118 aa, Artificial Sequence
  Chemically Synthesized
QVQLQESGGGLVQAGGSLRLSCAASGYISRDRIMGWYRQAPGKERELVAGIADGTNTNYADSVKGRFTISRDNAKNTVYLQMNSLKPEDTAVYYCAAIAAGYYVHYYWGQGTQVTVSS

SEQ ID NO: 21199 - protein, 126 aa, Artificial Sequence
  Chemically Synthesized
QVQLQESGGGLVQAGGSLRLSCAASGSISLLPDMGWYRQAPGKEREFVASITTGGNTYYADSVKGRFTISRDNAKNTVYLQMNSLKPEDTAVYYCAVYYTANLGSLDGDTYYYPYWGQGTQVTVSS

SEQ ID NO: 21200 - protein, 122 aa, Artificial Sequence
  Chemically Synthesized
QVQLQESGGGLVQAGGSLRLSCAASGSISGGTYMGWYRQAPGKEREFVAAIGYGGSTNYADSVKGRFTISRDNAKNTVYLQMNSLKPEDTAVYYCAASDGLSLDNVLRHIYWGQGTQVTVSS

SEQ ID NO: 21201 - protein, 118 aa, Artificial Sequence
  Chemically Synthesized
QVQLQESGGGLVQAGGSLRLSCAASGTIFAGPIMGWYRQAPGKERELVASISGGASTYYADSVKGRFTISRDNAKNTVYLQMNSLKPEDTAVYYCAVPVDDYVYFGYWGQGTQVTVSS

SEQ ID NO: 21202 - protein, 122 aa, Artificial Sequence
  Chemically Synthesized
QVQLQESGGGLVQAGGSLRLSCAASGYIFAYLRMGWYRQAPGKEREFVAGIGRGGTTYYADSVKGRFTISRDNAKNTVYLQMNSLKPEDTAVYYCAVVTTYPYRLNYSYGYWGQGTQVTVSS

SEQ ID NO: 21203 - protein, 118 aa, Artificial Sequence
  Chemically Synthesized
QVQLQESGGGLVQAGGSLRLSCAASGNIFRLQYMGWYRQAPGKERELVATIARGGITYYADSVKGRFTISRDNAKNTVYLQMNSLKPEDTAVYYCAVRAYYYSSYRYWGQGTQVTVSS

SEQ ID NO: 21204 - protein, 118 aa, Artificial Sequence
  Chemically Synthesized
QVQLQESGGGLVQAGGSLRLSCAASGNISTQEGMGWYRQAPGKEREFVATISGGATTYYADSVKGRFTISRDNAKNTVYLQMNSLKPEDTAVYYCAAYPRYVSGYFYWGQGTQVTVSS

SEQ ID NO: 21205 - protein, 111 aa, Artificial Sequence
  Chemically Synthesized
QVQLQESGGGLVQAGGSLRLSCAASGTISSLPFMGWYRQAPGKERELVASIAYGSSTYYADSVKGRFTISRDNAKNTVYLQMNSLKPEDTAVYYCAAHSYWGQGTQVTVSS

SEQ ID NO: 21206 - protein, 109 aa, Artificial Sequence
  Chemically Synthesized
QVQLQESGGGLVQAGGSLRLSCAASGNIFGDYIMGWYRQAPGKEREFVAYADSVKGRFTISRDNAKNTVYLQMNSLKPEDTAVYYCAVPPWQSLYLAYWGQGTQVTVSS

SEQ ID NO: 21207 - protein, 118 aa, Artificial Sequence
  Chemically Synthesized
QVQLQESGGGLVQAGGSLRLSCAASGSISPYDAMGWYRQAPGKEREFVATIDSGSSTYYADSVKGRFTISRDNAKNTVYLQMNSLKPEDTAVYYCAAVRHPYRPHDYWGQGTQVTVSS

SEQ ID NO: 21208 - protein, 118 aa, Artificial Sequence
  Chemically Synthesized
QVQLQESGGGLVQAGGSLRLSCAASGSIFRAYAMGWYRQAPGKEREFVASIDRGGITYYADSVKGRFTISRDNAKNTVYLQMNSLKPEDTAVYYCAAGFTYYRFHYYWGQGTQVTVSS

SEQ ID NO: 21209 - protein, 117 aa, Artificial Sequence
  Chemically Synthesized
QVQLQESGGGLVQAGGSLRLSCAASGYISYALYMGWYRQAPGKERELVAAINTGTSTYYADSVKGRFTISRDNAKNTVYLQMNSLKPEDTAVYYCAVDYHGGPLPYWGQGTQVTVSS

SEQ ID NO: 21210 - protein, 118 aa, Artificial Sequence
  Chemically Synthesized
QVQLQESGGGLVQAGGSLRLSCAASGSIFRRITMGWYRQAPGKEREFVAGIGRGAITNYADSVKGRFTISRDNAKNTVYLQMNSLKPEDTAVYYCAVYEWREPGHAYWGQGTQVTVSS

SEQ ID NO: 21211 - protein, 118 aa, Artificial Sequence
  Chemically Synthesized
QVQLQESGGGLVQAGGSLRLSCAASGTISRYAFMGWYRQAPGKEREFVATIGSGANTYYADSVKGRFTISRDNAKNTVYLQMNSLKPEDTAVYYCAVRPWTWYYHYYWGQGTQVTVSS

SEQ ID NO: 21212 - protein, 118 aa, Artificial Sequence
  Chemically Synthesized
QVQLQESGGGLVQAGGSLRLSCAASGTISFRSGMGWYRQAPGKERELVAAIGRGANTYYADSVKGRFTISRDNAKNTVYLQMNSLKPEDTAVYYCAAVDGPGGFLRYWGQGTQVTVSS

SEQ ID NO: 21213 - protein, 117 aa, Artificial Sequence
  Chemically Synthesized
QVQLQESGGGLVQAGGSLRLSCAASGSIFRAHAMGWYRQAPGKEREFVATINYGGNTYYADSVKGRFTISRDNAKNTVYLQMNSLKPEDTAVYYCALTCGTSVTMYWGQGTQVTVSS

SEQ ID NO: 21214 - protein, 117 aa, Artificial Sequence
  Chemically Synthesized
QVQLQESGGGLVQAGGSLRLSCAASGSISDRDVMGWYRQAPGKEREFVATIGDGGNTNYADSVKGRFTISRDNAKNTVYLQMNSLKPEDTAVYYCAASIGTLDSIYWGQGTQVTVSS

SEQ ID NO: 21215 - protein, 118 aa, Artificial Sequence
  Chemically Synthesized
QVQLQESGGGLVQAGGSLRLSCAASGNISTSYSMGWYRQAPGKEREFVATINDRWYYQYADSVKGRFTISRDNAKNTVYLQMNSLKPEDTAVYYCAAPITYPWQFQYWGQGTQVTVSS

SEQ ID NO: 21216 - protein, 118 aa, Artificial Sequence
  Chemically Synthesized
QVQLQESGGGLVQAGGSLRLSCAASGTISLTAYMGWYRQAPGKEREFVAAIGRGGNTNYADSVKGRFTISRDNAKNTVYLQMNSLKPEDTAVYYCAVNYDVGLSFGYWGQGTQVTVSS

SEQ ID NO: 21217 - protein, 117 aa, Artificial Sequence
  Chemically Synthesized
QVQLQESGGGLVQAGGSLRLSCAASGYISYYHMGWYRQAPGKEREFVAGIGYGGITNYADSVKGRFTISRDNAKNTVYLQMNSLKPEDTAVYYCAAVNIYGRPHRYWGQGTQVTVSS

SEQ ID NO: 21218 - protein, 118 aa, Artificial Sequence
  Chemically Synthesized
QVQLQESGGGLVQAGGSLRLSCAASGSIFIHFYMGWYRQAPGKERELVAGITDGANTYYADSVKGRFTISRDNAKNTVYLQMNSLKPEDTAVYYCAVGDPNHQDHDYWGQGTQVTVSS

SEQ ID NO: 21219 - protein, 111 aa, Artificial Sequence
  Chemically Synthesized
QVQLQESGGGLVQAGGSLRLSCAASGSISPSYTMGWYRQAPGKERELVATIDPGTSTNYADSVKGRFTISRDNAKNTVYLQMNSLKPEDTAVYYCAAYCYWGQGTQVTVSS

SEQ ID NO: 21220 - protein, 122 aa, Artificial Sequence
  Chemically Synthesized
QVQLQESGGGLVQAGGSLRLSCAASGNISYRLYMGWYRQAPGKERELVAAINGGTTTNYADSVKGRFTISRDNAKNTVYLQMNSLKPEDTAVYYCAVPRRWYRTASVNHYYWGQGTQVTVSS

SEQ ID NO: 21221 - protein, 121 aa, Artificial Sequence
  Chemically Synthesized
QVQLQESGGGLVQAGGSLRLSCAASGTISVLDVMGWYRQAPGKEREFVATIGYGAITNYADSVKGRFTISRDNAKNTVYLQMNSLKPEDTAVYYCAADYDYSDYPHAYHYWGQGTQVTVSS

SEQ ID NO: 21222 - protein, 122 aa, Artificial Sequence
  Chemically Synthesized
QVQLQESGGGLVQAGGSLRLSCAASGTISYLATMGWYRQAPGKERELVAGITTGSNTYYADSVKGRFTISRDNAKNTVYLQMNSLKPEDTAVYYCAVTVLADWVYGDAHIYWGQGTQVTVSS

SEQ ID NO: 21223 - protein, 122 aa, Artificial Sequence
  Chemically Synthesized
QVQLQESGGGLVQAGGSLRLSCAASGSISPFDSMGWYRQAPGKERELVASIAYGTITNYADSVKGRFTISRDNAKNTVYLQMNSLKPEDTAVYYCAADIREWTYDYYRFPYWGQGTQVTVSS

SEQ ID NO: 21224 - protein, 126 aa, Artificial Sequence
  Chemically Synthesized
QVQLQESGGGLVQAGGSLRLSCAASGTISAARAMGWYRQAPGKEREFVAGITVGGNTNYADSVKGRFTISRDNAKNTVYLQMNSLKPEDTAVYYCAVGRDHEYNVYYRGHAYYYYWGQGTQVTVSS

SEQ ID NO: 21225 - protein, 112 aa, Artificial Sequence
  Chemically Synthesized
QVQLQESGGGLVQAGGSLRLSCAASGNIFHQADMGWYRQAPGKERELVATIGSGATTNYADSVKGRFTISRDNAKNTVYLQMNSLKPEDTAVYYCAVVLLYWGQGTQVTVSS

SEQ ID NO: 21226 - protein, 122 aa, Artificial Sequence
  Chemically Synthesized
QVQLQESGGGLVQAGGSLRLSCAASGNIFPHYFMGWYRQAPGKEREFVAGIALGTNTNYADSVKGRFTISRDNAKNTVYLQMNSLKPEDTAVYYCAAPLIDRAGGQYRLPYWGQGTQVTVSS

SEQ ID NO: 21227 - protein, 117 aa, Artificial Sequence
  Chemically Synthesized
QVQLQESGGGLVQAGGSLRLSCAASGYISDLSYMGWYRQAPGKEREFVAAIASVVVPYADSVKGRFTISRDNAKNTVYLQMNSLKPEDTAVYYCAADRDQWDQYSYWGQGTQVTVSS

SEQ ID NO: 21228 - protein, 117 aa, Artificial Sequence
  Chemically Synthesized
QVQLQESGGGLVQAGGSLRLSCAASGNIFAYDNMGWYRQAPGKEREFVASMMTVEYLYADSVKGRFTISRDNAKNTVYLQMNSLKPEDTAVYYCAVTITVIGAFGYWGQGTQVTVSS

SEQ ID NO: 21229 - protein, 118 aa, Artificial Sequence
  Chemically Synthesized
QVQLQESGGGLVQAGGSLRLSCAASGTIFGWDSMGWYRQAPGKERELVATITDGTTTNYADSVKGRFTISRDNAKNTVYLQMNSLKPEDTAVYYCAVGYLSTLYHVYWGQGTQVTVSS

SEQ ID NO: 21230 - protein, 118 aa, Artificial Sequence
  Chemically Synthesized
QVQLQESGGGLVQAGGSLRLSCAASGSISRLRGMGWYRQAPGKEREFVAAIAYGASTNYADSVKGRFTISRDNAKNTVYLQMNSLKPEDTAVYYCAVVIFYGTPHGYWGQGTQVTVSS

SEQ ID NO: 21231 - protein, 126 aa, Artificial Sequence
  Chemically Synthesized
QVQLQESGGGLVQAGGSLRLSCAASGSISPSYRMGWYRQAPGKERELVAAITRGSNTYYADSVKGRFTISRDNAKNTVYLQMNSLKPEDTAVYYCAAIIYVDTRTRDRGRPYYWYWGQGTQVTVSS

SEQ ID NO: 21232 - protein, 122 aa, Artificial Sequence
  Chemically Synthesized
QVQLQESGGGLVQAGGSLRLSCAASGYIFGQSIMGWYRQAPGKEREFVAGIDYGGSTNYADSVKGRFTISRDNAKNTVYLQMNSLKPEDTAVYYCAALYRGRDFKGGGHGYWGQGTQVTVSS

SEQ ID NO: 21233 - protein, 117 aa, Artificial Sequence
  Chemically Synthesized
QVQLQESGGGLVQAGGSLRLSCAASGSISGLEYMGWYRQAPGKERELVASIARGGITYYADSVKGRFTISRDNAKNTVYLQMNSLKPEDTAVYYCAVGTYDRPSFYWGQGTQVTVSS

SEQ ID NO: 21234 - protein, 118 aa, Artificial Sequence
  Chemically Synthesized
QVQLQESGGGLVQAGGSLRLSCAASGTISYDDYMGWYRQAPGKEREFVAAIGRGATTYYADSVKGRFTISRDNAKNTVYLQMNSLKPEDTAVYYCAAYGVDDHYLLYWGQGTQVTVSS

SEQ ID NO: 21235 - protein, 118 aa, Artificial Sequence
  Chemically Synthesized
QVQLQESGGGLVQAGGSLRLSCAASGNISRTSFMGWYRQAPGKERELVASIDDGSNTNYADSVKGRFTISRDNAKNTVYLQMNSLKPEDTAVYYCAVGGTVLGIYYYWGQGTQVTVSS

SEQ ID NO: 21236 - protein, 118 aa, Artificial Sequence
  Chemically Synthesized
QVQLQESGGGLVQAGGSLRLSCAASGNISDRGAMGWYRQAPGKEREFVAAINTGTSTNYADSVKGRFTISRDNAKNTVYLQMNSLKPEDTAVYYCAAIYYLRNYHAYWGQGTQVTVSS

SEQ ID NO: 21237 - protein, 122 aa, Artificial Sequence
  Chemically Synthesized
QVQLQESGGGLVQAGGSLRLSCAASGYISRYSYMGWYRQAPGKERELVASIGFGGSTNYADSVKGRFTISRDNAKNTVYLQMNSLKPEDTAVYYCAVYRYYSPTDWRELPYWGQGTQVTVSS

SEQ ID NO: 21238 - protein, 121 aa, Artificial Sequence
  Chemically Synthesized
QVQLQESGGGLVQAGGSLRLSCAASGSISTAHYMGWYRQAPGKEREFVAGITSGTSTYADSVKGRFTISRDNAKNTVYLQMNSLKPEDTAVYYCAVDPDQRVYYQVGYLYWGQGTQVTVSS

SEQ ID NO: 21239 - protein, 126 aa, Artificial Sequence
  Chemically Synthesized
QVQLQESGGGLVQAGGSLRLSCAASGYIFRPRYMGWYRQAPGKERELVAAIGDGSITYYADSVKGRFTISRDNAKNTVYLQMNSLKPEDTAVYYCAVVADYDYYESDNRLDALNYWGQGTQVTVSS

SEQ ID NO: 21240 - protein, 117 aa, Artificial Sequence
  Chemically Synthesized
QVQLQESGGGLVQAGGSLRLSCAASGSISNPLFMGWYRQAPGKEREFVAAIDYGGTTNYADSVKGRFTISRDNAKNTVYLQMNSLKPEDTAVYYCAVYYFGWHHAYWGQGTQVTVSS

SEQ ID NO: 21241 - protein, 122 aa, Artificial Sequence
  Chemically Synthesized
QVQLQESGGGLVQAGGSLRLSCAASGSISLDDTMGWYRQAPGKEREFVATINLGASTYYADSVKGRFTISRDNAKNTVYLQMNSLKPEDTAVYYCAAGYALDGYRVYNHVYWGQGTQVTVSS

SEQ ID NO: 21242 - protein, 118 aa, Artificial Sequence
  Chemically Synthesized
QVQLQESGGGLVQAGGSLRLSCAASGTISVSQYMGWYRQAPGKERELVASIGTGGSTNYADSVKGRFTISRDNAKNTVYLQMNSLKPEDTAVYYCAVGGPAWRALRYWGQGTQVTVSS

SEQ ID NO: 21243 - protein, 118 aa, Artificial Sequence
  Chemically Synthesized
QVQLQESGGGLVQAGGSLRLSCAASGTISPLVYMGWYRQAPGKEREFVAAIAYGGNTNYADSVKGRFTISRDNAKNTVYLQMNSLKPEDTAVYYCAVIYYDLNYHYYWGQGTQVTVSS

SEQ ID NO: 21244 - protein, 118 aa, Artificial Sequence
  Chemically Synthesized
QVQLQESGGGLVQAGGSLRLSCAASGYIFVYVFMGWYRQAPGKEREFVAAIGYGTNTYYADSVKGRFTISRDNAKNTVYLQMNSLKPEDTAVYYCAVTVYNYDPYTYWGQGTQVTVSS

SEQ ID NO: 21245 - protein, 121 aa, Artificial Sequence
  Chemically Synthesized
QVQLQESGGGLVQAGGSLRLSCAASGTIFDYKSMGWYRQAPGKERELVATIARGGSTYYADSVKGRFTISRDNAKNTVYLQMNSLKPEDTAVYYCAVDTHGWRRRNSLYYWGQGTQVTVSS

SEQ ID NO: 21246 - protein, 118 aa, Artificial Sequence
  Chemically Synthesized
QVQLQESGGGLVQAGGSLRLSCAASGYISGRDDMGWYRQAPGKERELVAAIGRGGTTYYADSVKGRFTISRDNAKNTVYLQMNSLKPEDTAVYYCAADIDGYSSHLYWGQGTQVTVSS

SEQ ID NO: 21247 - protein, 118 aa, Artificial Sequence
  Chemically Synthesized
QVQLQESGGGLVQAGGSLRLSCAASGTIFNGLYMGWYRQAPGKEREFVAAITAGAITNYADSVKGRFTISRDNAKNTVYLQMNSLKPEDTAVYYCAAYLSGRREHEYWGQGTQVTVSS

SEQ ID NO: 21248 - protein, 122 aa, Artificial Sequence
  Chemically Synthesized
QVQLQESGGGLVQAGGSLRLSCAASGTISDAQIMGWYRQAPGKERELVASINYGATTYYADSVKGRFTISRDNAKNTVYLQMNSLKPEDTAVYYCAVRSDDWIDGDDDHGYWGQGTQVTVSS

SEQ ID NO: 21249 - protein, 118 aa, Artificial Sequence
  Chemically Synthesized
QVQLQESGGGLVQAGGSLRLSCAASGYIFWDYYMGWYRQAPGKEREFVASISRGANTYYADSVKGRFTISRDNAKNTVYLQMNSLKPEDTAVYYCAANIPYSRTYAYWGQGTQVTVSS

SEQ ID NO: 21250 - protein, 118 aa, Artificial Sequence
  Chemically Synthesized
QVQLQESGGGLVQAGGSLRLSCAASGTIFSKLTMGWYRQAPGKEREFVASIGPGANTNYADSVKGRFTISRDNAKNTVYLQMNSLKPEDTAVYYCAALSYTTYYHHYWGQGTQVTVSS

SEQ ID NO: 21251 - protein, 122 aa, Artificial Sequence
  Chemically Synthesized
QVQLQESGGGLVQAGGSLRLSCAASGNISASYSMGWYRQAPGKEREFVAGISTGGITNYADSVKGRFTISRDNAKNTVYLQMNSLKPEDTAVYYCAVVTYQHDVSPSWFFYWGQGTQVTVSS

SEQ ID NO: 21252 - protein, 122 aa, Artificial Sequence
  Chemically Synthesized
QVQLQESGGGLVQAGGSLRLSCAASGNIFPYRSMGWYRQAPGKERELVASIAYGGNTYYADSVKGRFTISRDNAKNTVYLQMNSLKPEDTAVYYCAVLWYDDRGSPTYHYYWGQGTQVTVSS

SEQ ID NO: 21253 - protein, 118 aa, Artificial Sequence
  Chemically Synthesized
QVQLQESGGGLVQAGGSLRLSCAASGTISGLTDMGWYRQAPGKERELVASIAAGTNTYYADSVKGRFTISRDNAKNTVYLQMNSLKPEDTAVYYCAVDAIVWPDFPYWGQGTQVTVSS

SEQ ID NO: 21254 - protein, 118 aa, Artificial Sequence
  Chemically Synthesized
QVQLQESGGGLVQAGGSLRLSCAASGSIFDASHMGWYRQAPGKERELVAGINQGANTNYADSVKGRFTISRDNAKNTVYLQMNSLKPEDTAVYYCAADGYGSGYFPYWGQGTQVTVSS

SEQ ID NO: 21255 - protein, 117 aa, Artificial Sequence
  Chemically Synthesized
QVQLQESGGGLVQAGGSLRLSCAASGTISRRYSMGWYRQAPGKEREFVPLLLWVVLPYADSVKGRFTISRDNAKNTVYLQMNSLKPEDTAVYYCAAGAPQIARYTYWGQGTQVTVSS

SEQ ID NO: 21256 - protein, 118 aa, Artificial Sequence
  Chemically Synthesized
QVQLQESGGGLVQAGGSLRLSCAASGTISFYQQMGWYRQAPGKERELVAAIDHGGTTNYADSVKGRFTISRDNAKNTVYLQMNSLKPEDTAVYYCAAQGTTWEYLPYWGQGTQVTVSS

SEQ ID NO: 21257 - protein, 122 aa, Artificial Sequence
  Chemically Synthesized
QVQLQESGGGLVQAGGSLRLSCAASGYIFSDPDMGWYRQAPGKEREFVASIGDGGTTYYADSVKGRFTISRDNAKNTVYLQMNSLKPEDTAVYYCAAVGPWYDQLIVDYGYWGQGTQVTVSS

SEQ ID NO: 21258 - protein, 122 aa, Artificial Sequence
  Chemically Synthesized
QVQLQESGGGLVQAGGSLRLSCAASGSIFDEYHMGWYRQAPGKEREFVAGIGVGGTTNYADSVKGRFTISRDNAKNTVYLQMNSLKPEDTAVYYCAVDDFDQLTKVNSHYYWGQGTQVTVSS

SEQ ID NO: 21259 - protein, 118 aa, Artificial Sequence
  Chemically Synthesized
QVQLQESGGGLVQAGGSLRLSCAASGSISDVNYMGWYRQAPGKERELVAGIGDGGITYYADSVKGRFTISRDNAKNTVYLQMNSLKPEDTAVYYCAVGYGVVAYLGYWGQGTQVTVSS

SEQ ID NO: 21260 - protein, 118 aa, Artificial Sequence
  Chemically Synthesized
QVQLQESGGGLVQAGGSLRLSCAASGTISVLRVMGWYRQAPGKEREFVAGITYGATTNYADSVKGRFTISRDNAKNTVYLQMNSLKPEDTAVYYCAAVAWYQVYLAYWGQGTQVTVSS

SEQ ID NO: 21261 - protein, 118 aa, Artificial Sequence
  Chemically Synthesized
QVQLQESGGGLVQAGGSLRLSCAASGNISTRYVMGWYRQAPGKEREFVAAINDGSSTNYADSVKGRFTISRDNAKNTVYLQMNSLKPEDTAVYYCAVLLIHRPYLYYWGQGTQVTVSS

SEQ ID NO: 21262 - protein, 118 aa, Artificial Sequence
  Chemically Synthesized
QVQLQESGGGLVQAGGSLRLSCAASGTISGAGGMGWYRQAPGKEREFVASIGAGSNTNYADSVKGRFTISRDNAKNTVYLQMNSLKPEDTAVYYCAVVQYTLGYHWYWGQGTQVTVSS

SEQ ID NO: 21263 - protein, 118 aa, Artificial Sequence
  Chemically Synthesized
QVQLQESGGGLVQAGGSLRLSCAASGTISPYLYMGWYRQAPGKEREFVAGISAGGITNYADSVKGRFTISRDNAKNTVYLQMNSLKPEDTAVYYCAAIFRAYNYHGYWGQGTQVTVSS

SEQ ID NO: 21264 - protein, 111 aa, Artificial Sequence
  Chemically Synthesized
QVQLQESGGGLVQAGGSLRLSCAASGTISGAYAMGWYRQAPGKEREFVASIDVGGTTNYADSVKGRFTISRDNAKNTVYLQMNSLKPEDTAVYYCALKIYWGQGTQVTVSS

SEQ ID NO: 21265 - protein, 117 aa, Artificial Sequence
  Chemically Synthesized
QVQLQESGGGLVQAGGSLRLSCAASGYISAYDYMGWYRQAPGKERELVATITVGGSTYYADSVKGRFTISRDNAKNTVYLQMNSLKPEDTAVYYCAANDYSFTLMYWGQGTQVTVSS

SEQ ID NO: 21266 - protein, 121 aa, Artificial Sequence
  Chemically Synthesized
QVQLQESGGGLVQAGGSLRLSCAASGNISNYDYMGWYRQAPGKEREFVPLLLTVVLPYADSVKGRFTISRDNAKNTVYLQMNSLKPEDTAVYYCAANDVRGVRYNGRFYYWGQGTQVTVSS

SEQ ID NO: 21267 - protein, 117 aa, Artificial Sequence
  Chemically Synthesized
QVQLQESGGGLVQAGGSLRLSCAASGNISYTYYMGWYRQAPGKEREFVASITDGTITYADSVKGRFTISRDNAKNTVYLQMNSLKPEDTAVYYCAAWGSDNLAYWYWGQGTQVTVSS

SEQ ID NO: 21268 - protein, 118 aa, Artificial Sequence
  Chemically Synthesized
QVQLQESGGGLVQAGGSLRLSCAASGNIFAVGTMGWYRQAPGKEREFVAGIGRGGTTYYADSVKGRFTISRDNAKNTVYLQMNSLKPEDTAVYYCAVVGYRVPRYYYWGQGTQVTVSS

SEQ ID NO: 21269 - protein, 117 aa, Artificial Sequence
  Chemically Synthesized
QVQLQESGGGLVQAGGSLRLSCAASGSIFTQYGMGWYRQAPGKEREFVATILLVVLPYADSVKGRFTISRDNAKNTVYLQMNSLKPEDTAVYYCAVGPFKWDGLQYWGQGTQVTVSS

SEQ ID NO: 21270 - protein, 118 aa, Artificial Sequence
  Chemically Synthesized
QVQLQESGGGLVQAGGSLRLSCAASGTISDTPDMGWYRQAPGKERELVASIDTGGITNYADSVKGRFTISRDNAKNTVYLQMNSLKPEDTAVYYCAAVDVYYDRHRYWGQGTQVTVSS

SEQ ID NO: 21271 - protein, 118 aa, Artificial Sequence
  Chemically Synthesized
QVQLQESGGGLVQAGGSLRLSCAASGYISHYLYMGWYRQAPGKEREFVAAITPGSNTYYADSVKGRFTISRDNAKNTVYLQMNSLKPEDTAVYYCAVYGITIDGYAYWGQGTQVTVSS

SEQ ID NO: 21272 - protein, 120 aa, Artificial Sequence
  Chemically Synthesized
QVQLQESGGGLVQAGGSLRLSCAASGYISNNFMGWYRQAPGKEREFVAGMMVVVIPYADSVKGRFTISRDNAKNTVYLQMNSLKPEDTAVYYCAAKLYQQYPSIIDYTYWGQGTQVTVSS

SEQ ID NO: 21273 - protein, 118 aa, Artificial Sequence
  Chemically Synthesized
QVQLQESGGGLVQAGGSLRLSCAASGTTWPNRMGWYRQAPGKEREFVAGIDRGANTYYADSVKGRFTISRDNAKNTVYLQMNSLKPEDTAVYYCAAIGQHRDGWFNYWGQGTQVTVSS

SEQ ID NO: 21274 - protein, 122 aa, Artificial Sequence
  Chemically Synthesized
QVQLQESGGGLVQAGGSLRLSCAASGSIFAVYYMGWYRQAPGKERELVAAIDWGGSTNYADSVKGRFTISRDNAKNTVYLQMNSLKPEDTAVYYCAVTVGVYYPTAFPHQYWGQGTQVTVSS

SEQ ID NO: 21275 - protein, 126 aa, Artificial Sequence
  Chemically Synthesized
QVQLQESGGGLVQAGGSLRLSCAASGNIFDHSGMGWYRQAPGKEREFVAAIAYGAITNYADSVKGRFTISRDNAKNTVYLQMNSLKPEDTAVYYCAAYYYEDAIHYAYDYAVYYYWGQGTQVTVSS

SEQ ID NO: 21276 - protein, 118 aa, Artificial Sequence
  Chemically Synthesized
QVQLQESGGGLVQAGGSLRLSCAASGTIFTTYNMGWYRQAPGKERELVASIGRGGSTYYADSVKGRFTISRDNAKNTVYLQMNSLKPEDTAVYYCAAIRYASPYLYYWGQGTQVTVSS

SEQ ID NO: 21277 - protein, 114 aa, Artificial Sequence
  Chemically Synthesized
QVQLQESGGGLVQAGGSLRLSCAASGTISPDDVMGWYRQAPGKERELVAAINSGGSTNYADSVKGRFTISRDNAKNTVYLQMNSLKPEDTAVYYCAVTTLTFYWGQGTQVTVSS

SEQ ID NO: 21278 - protein, 122 aa, Artificial Sequence
  Chemically Synthesized
QVQLQESGGGLVQAGGSLRLSCAASGNIFFDTPMGWYRQAPGKEREFVAGIDYGGITYYADSVKGRFTISRDNAKNTVYLQMNSLKPEDTAVYYCAAGYSVRQRFSNGHKYWGQGTQVTVSS

SEQ ID NO: 21279 - protein, 122 aa, Artificial Sequence
  Chemically Synthesized
QVQLQESGGGLVQAGGSLRLSCAASGTISYFYKMGWYRQAPGKEREFVASIDHGGSTYYADSVKGRFTISRDNAKNTVYLQMNSLKPEDTAVYYCAVVYYYGDAVPTYHGYWGQGTQVTVSS

SEQ ID NO: 21280 - protein, 122 aa, Artificial Sequence
  Chemically Synthesized
QVQLQESGGGLVQAGGSLRLSCAASGNISGWYYMGWYRQAPGKERELVAAISGGSNTNYADSVKGRFTISRDNAKNTVYLQMNSLKPEDTAVYYCAVDWRRWPIPYVTHLYWGQGTQVTVSS

SEQ ID NO: 21281 - protein, 122 aa, Artificial Sequence
  Chemically Synthesized
QVQLQESGGGLVQAGGSLRLSCAASGYIFGYVAMGWYRQAPGKERELVASINRGGNTNYADSVKGRFTISRDNAKNTVYLQMNSLKPEDTAVYYCAVLGVTEGDRTYYHYYWGQGTQVTVSS

SEQ ID NO: 21282 - protein, 117 aa, Artificial Sequence
  Chemically Synthesized
QVQLQESGGGLVQAGGSLRLSCAASGNIFAERLMGWYRQAPGKEREFVAGIARGGSTNYADSVKGRFTISRDNAKNTVYLQMNSLKPEDTAVYYCAAGMVRTTLIYWGQGTQVTVSS

SEQ ID NO: 21283 - protein, 118 aa, Artificial Sequence
  Chemically Synthesized
QVQLQESGGGLVQAGGSLRLSCAASGSIFPIAWMGWYRQAPGKEREFVASIDGGANTNYADSVKGRFTISRDNAKNTVYLQMNSLKPEDTAVYYCAVGIHWYAVHKYWGQGTQVTVSS

SEQ ID NO: 21284 - protein, 117 aa, Artificial Sequence
  Chemically Synthesized
QVQLQESGGGLVQAGGSLRLSCAASGTIFPIWRMGWYRQAPGKERELVAAIGIGGNTYYADSVKGRFTISRDNAKNTVYLQMNSLKPEDTAVYYCAVGHYIRTLAYWGQGTQVTVSS

SEQ ID NO: 21285 - protein, 118 aa, Artificial Sequence
  Chemically Synthesized
QVQLQESGGGLVQAGGSLRLSCAASGTISYAVYMGWYRQAPGKEREFVASIGIGSTTNYADSVKGRFTISRDNAKNTVYLQMNSLKPEDTAVYYCAAVLHITRWYGYWGQGTQVTVSS

SEQ ID NO: 21286 - protein, 116 aa, Artificial Sequence
  Chemically Synthesized
QVQLQESGGGLVQAGGSLRLSCAASGSISRAARMGWYRQAPGKEREFVAAIAYGASTNYADSVKGRFTISRDNAKNTVYLQMNSLKPEDTAVYYCAAVQGSYHGYWGQGTQVTVSS

SEQ ID NO: 21287 - protein, 118 aa, Artificial Sequence
  Chemically Synthesized
QVQLQESGGGLVQAGGSLRLSCAASGYIFPSTAMGWYRQAPGKEREFVAGITDGGITNYADSVKGRFTISRDNAKNTVYLQMNSLKPEDTAVYYCAALTHYITRFYYWGQGTQVTVSS

SEQ ID NO: 21288 - protein, 117 aa, Artificial Sequence
  Chemically Synthesized
QVQLQESGGGLVQAGGSLRLSCAASGTIFPFFMGWYRQAPGKERELVAAIGLGSITYYADSVKGRFTISRDNAKNTVYLQMNSLKPEDTAVYYCAVYRLSQIDHGYWGQGTQVTVSS

SEQ ID NO: 21289 - protein, 118 aa, Artificial Sequence
  Chemically Synthesized
QVQLQESGGGLVQAGGSLRLSCAASGTIFYAGYMGWYRQAPGKERELVAGISHGSITYYADSVKGRFTISRDNAKNTVYLQMNSLKPEDTAVYYCAVRGTWPYAYTYWGQGTQVTVSS

SEQ ID NO: 21290 - protein, 122 aa, Artificial Sequence
  Chemically Synthesized
QVQLQESGGGLVQAGGSLRLSCAASGNIFVAWTMGWYRQAPGKERELVAGITQGGNTNYADSVKGRFTISRDNAKNTVYLQMNSLKPEDTAVYYCAAYIAPQRDNVYYHFYWGQGTQVTVSS

SEQ ID NO: 21291 - protein, 118 aa, Artificial Sequence
  Chemically Synthesized
QVQLQESGGGLVQAGGSLRLSCAASGTIFILRSMGWYRQAPGKEREFVAGISNGSSTNYADSVKGRFTISRDNAKNTVYLQMNSLKPEDTAVYYCAAIDRSPGYLGYWGQGTQVTVSS

SEQ ID NO: 21292 - protein, 122 aa, Artificial Sequence
  Chemically Synthesized
QVQLQESGGGLVQAGGSLRLSCAASGNISSQYDMGWYRQAPGKERELVAAIGAGGNTYYADSVKGRFTISRDNAKNTVYLQMNSLKPEDTAVYYCAATFGLLTYEDQSHLYWGQGTQVTVSS

SEQ ID NO: 21293 - protein, 126 aa, Artificial Sequence
  Chemically Synthesized
QVQLQESGGGLVQAGGSLRLSCAASGNIFYWLRMGWYRQAPGKERELVAGISVGANTYYADSVKGRFTISRDNAKNTVYLQMNSLKPEDTAVYYCAVYDYRDVYIAAVRSYDFTYWGQGTQVTVSS

SEQ ID NO: 21294 - protein, 118 aa, Artificial Sequence
  Chemically Synthesized
QVQLQESGGGLVQAGGSLRLSCAASGSIFYDGYMGWYRQAPGKEREFVASINYGASTYYADSVKGRFTISRDNAKNTVYLQMNSLKPEDTAVYYCAVWARYSHHLDYWGQGTQVTVSS

SEQ ID NO: 21295 - protein, 122 aa, Artificial Sequence
  Chemically Synthesized
QVQLQESGGGLVQAGGSLRLSCAASGSISGFFVMGWYRQAPGKERELVAAINSGAITYYADSVKGRFTISRDNAKNTVYLQMNSLKPEDTAVYYCAVLPWTDSGPYRGYYYWGQGTQVTVSS

SEQ ID NO: 21296 - protein, 126 aa, Artificial Sequence
  Chemically Synthesized
QVQLQESGGGLVQAGGSLRLSCAASGTIFPRANMGWYRQAPGKERELVATIAFGSNTYYADSVKGRFTISRDNAKNTVYLQMNSLKPEDTAVYYCAVDRESDGALYRYWYYEYDYWGQGTQVTVSS

SEQ ID NO: 21297 - protein, 122 aa, Artificial Sequence
  Chemically Synthesized
QVQLQESGGGLVQAGGSLRLSCAASGYISIWSGMGWYRQAPGKEREFVASIDVGTSTNYADSVKGRFTISRDNAKNTVYLQMNSLKPEDTAVYYCAAHKSTTFTGTSLSFYWGQGTQVTVSS

SEQ ID NO: 21298 - protein, 118 aa, Artificial Sequence
  Chemically Synthesized
QVQLQESGGGLVQAGGSLRLSCAASGTISPRYIMGWYRQAPGKEREFVAAIAGGSTTYYADSVKGRFTISRDNAKNTVYLQMNSLKPEDTAVYYCAAYYLGTQSFTYWGQGTQVTVSS

SEQ ID NO: 21299 - protein, 118 aa, Artificial Sequence
  Chemically Synthesized
QVQLQESGGGLVQAGGSLRLSCAASGTIFTHYVMGWYRQAPGKEREFVAAIAFGTNTYYADSVKGRFTISRDNAKNTVYLQMNSLKPEDTAVYYCAAVRAQSTYHYYWGQGTQVTVSS

SEQ ID NO: 21300 - protein, 118 aa, Artificial Sequence
  Chemically Synthesized
QVQLQESGGGLVQAGGSLRLSCAASGSISGVVIMGWYRQAPGKERELVAAIGPGGNTYYADSVKGRFTISRDNAKNTVYLQMNSLKPEDTAVYYCAVVDETGHGFPYWGQGTQVTVSS

SEQ ID NO: 21301 - protein, 126 aa, Artificial Sequence
  Chemically Synthesized
QVQLQESGGGLVQAGGSLRLSCAASGNISLPAPMGWYRQAPGKERELVAGIGTGTSTYYADSVKGRFTISRDNAKNTVYLQMNSLKPEDTAVYYCAVEDPEAHAWYRYWESSFPYWGQGTQVTVSS

SEQ ID NO: 21302 - protein, 126 aa, Artificial Sequence
  Chemically Synthesized
QVQLQESGGGLVQAGGSLRLSCAASGSIFATDSMGWYRQAPGKEREFVAGIGQGANTNYADSVKGRFTISRDNAKNTVYLQMNSLKPEDTAVYYCAVDETVLYSGYDDGLSHLVYWGQGTQVTVSS

SEQ ID NO: 21303 - protein, 118 aa, Artificial Sequence
  Chemically Synthesized
QVQLQESGGGLVQAGGSLRLSCAASGTIFRSQLMGWYRQAPGKERELVAAITYGSTTYYADSVKGRFTISRDNAKNTVYLQMNSLKPEDTAVYYCAAYRGRYRGHAYWGQGTQVTVSS

SEQ ID NO: 21304 - protein, 117 aa, Artificial Sequence
  Chemically Synthesized
QVQLQESGGGLVQAGGSLRLSCAASGSISVFRMGWYRQAPGKERELVASINFGAITNYADSVKGRFTISRDNAKNTVYLQMNSLKPEDTAVYYCAVGYGFGRYLYYWGQGTQVTVSS

SEQ ID NO: 21305 - protein, 111 aa, Artificial Sequence
  Chemically Synthesized
QVQLQESGGGLVQAGGSLRLSCAASGYIFPADTMGWYRQAPGKERELVASIADGSTTNYADSVKGRFTISRDNAKNTVYLQMNSLKPEDTAVYYCAADLYWGQGTQVTVSS

SEQ ID NO: 21306 - protein, 112 aa, Artificial Sequence
  Chemically Synthesized
QVQLQESGGGLVQAGGSLRLSCAASGSISQTPFMGWYRQAPGKERELVASIDYGSNTYYADSVKGRFTISRDNAKNTVYLQMNSLKPEDTAVYYCAAGLNYWGQGTQVTVSS

SEQ ID NO: 21307 - protein, 118 aa, Artificial Sequence
  Chemically Synthesized
QVQLQESGGGLVQAGGSLRLSCAASGNIFRYLRMGWYRQAPGKEREFVATIGYGGNTNYADSVKGRFTISRDNAKNTVYLQMNSLKPEDTAVYYCAAILQRDRWYAYWGQGTQVTVSS

SEQ ID NO: 21308 - protein, 117 aa, Artificial Sequence
  Chemically Synthesized
QVQLQESGGGLVQAGGSLRLSCAASGTIFAYHMGWYRQAPGKERELVAAIAYGGITYYADSVKGRFTISRDNAKNTVYLQMNSLKPEDTAVYYCAVDGVATRAHSYWGQGTQVTVSS

SEQ ID NO: 21309 - protein, 126 aa, Artificial Sequence
  Chemically Synthesized
QVQLQESGGGLVQAGGSLRLSCAASGSISYPSTMGWYRQAPGKEREFVAGITYGATTNYADSVKGRFTISRDNAKNTVYLQMNSLKPEDTAVYYCAVLERYPADGSGPRYGYHVYWGQGTQVTVSS

SEQ ID NO: 21310 - protein, 121 aa, Artificial Sequence
  Chemically Synthesized
QVQLQESGGGLVQAGGSLRLSCAASGNISWGYMGWYRQAPGKEREFVAGITVGAITNYADSVKGRFTISRDNAKNTVYLQMNSLKPEDTAVYYCAVDLPVSPYYPLGHVYWGQGTQVTVSS

SEQ ID NO: 21311 - protein, 126 aa, Artificial Sequence
  Chemically Synthesized
QVQLQESGGGLVQAGGSLRLSCAASGNIFDNLYMGWYRQAPGKEREFVAGINRGSSTNYADSVKGRFTISRDNAKNTVYLQMNSLKPEDTAVYYCAVLSFRYDADGKWKYGYHYYWGQGTQVTVSS

SEQ ID NO: 21312 - protein, 121 aa, Artificial Sequence
  Chemically Synthesized
QVQLQESGGGLVQAGGSLRLSCAASGYIFVGDKMGWYRQAPGKERELVAGISSGTSTNYADSVKGRFTISRDNAKNTVYLQMNSLKPEDTAVYYCAVFLTLTRTRVLVMYWGQGTQVTVSS

SEQ ID NO: 21313 - protein, 118 aa, Artificial Sequence
  Chemically Synthesized
QVQLQESGGGLVQAGGSLRLSCAASGYISQSGVMGWYRQAPGKEREFVASISIGANTNYADSVKGRFTISRDNAKNTVYLQMNSLKPEDTAVYYCAALIYRTAYHGYWGQGTQVTVSS

SEQ ID NO: 21314 - protein, 118 aa, Artificial Sequence
  Chemically Synthesized
QVQLQESGGGLVQAGGSLRLSCAASGNIFAGAAMGWYRQAPGKEREFVAAISWGGSTNYADSVKGRFTISRDNAKNTVYLQMNSLKPEDTAVYYCAVVRYYSVWYYYWGQGTQVTVSS

SEQ ID NO: 21315 - protein, 126 aa, Artificial Sequence
  Chemically Synthesized
QVQLQESGGGLVQAGGSLRLSCAASGTISANGIMGWYRQAPGKEREFVAAINYGSNTNYADSVKGRFTISRDNAKNTVYLQMNSLKPEDTAVYYCAAILHGASPEGSQAWNWLYYWGQGTQVTVSS

SEQ ID NO: 21316 - protein, 118 aa, Artificial Sequence
  Chemically Synthesized
QVQLQESGGGLVQAGGSLRLSCAASGTIFPYARMGWYRQAPGKERELVASIGPGASTNYADSVKGRFTISRDNAKNTVYLQMNSLKPEDTAVYYCAAWHHGRAVHAYWGQGTQVTVSS

SEQ ID NO: 21317 - protein, 115 aa, Artificial Sequence
  Chemically Synthesized
QVQLQESGGGLVQAGGSLRLSCAASGSMGWYRQAPGKEREFVAAIADGGTTYYADSVKGRFTISRDNAKNTVYLQMNSLKPEDTAVYYCAVEDGYAYYPALYRYWGQGTQVTVSS

SEQ ID NO: 21318 - protein, 122 aa, Artificial Sequence
  Chemically Synthesized
QVQLQESGGGLVQAGGSLRLSCAASGNISRVYSMGWYRQAPGKERELVAAINGGSNTNYADSVKGRFTISRDNAKNTVYLQMNSLKPEDTAVYYCAADNHPYVDLDVVHDYWGQGTQVTVSS

SEQ ID NO: 21319 - protein, 122 aa, Artificial Sequence
  Chemically Synthesized
QVQLQESGGGLVQAGGSLRLSCAASGYISEQGTMGWYRQAPGKEREFVASITDGTSTNYADSVKGRFTISRDNAKNTVYLQMNSLKPEDTAVYYCAVVDRGLVRTRRYYWYWGQGTQVTVSS

SEQ ID NO: 21320 - protein, 117 aa, Artificial Sequence
  Chemically Synthesized
QVQLQESGGGLVQAGGSLRLSCAASGTISVLQYMGWYRQAPGKEREFVATISPGGITNYADSVKGRFTISRDNAKNTVYLQMNSLKPEDTAVYYCAADTITVTNIYWGQGTQVTVSS

SEQ ID NO: 21321 - protein, 119 aa, Artificial Sequence
  Chemically Synthesized
QVQLQESGGGLVQAGGSLRLSCAASGTISYADYGKMGWYRQAPGKEREFVATIASGSSTNYADSVKGRFTISRDNAKNTVYLQMNSLKPEDTAVYYCAAAVYYGYHDYWGQGTQVTVSS

SEQ ID NO: 21322 - protein, 125 aa, Artificial Sequence
  Chemically Synthesized
QVQLQESGGGLVQAGGSLRLSCAASGYISARDRMGWYRQAPGKEREFVASISVGGITYYADSVKGRFTISRDNAKNTVYLQMNSLKPEDTAVYYCAVSYDPGLYLALRTGDEHYWGQGTQVTVSS

SEQ ID NO: 21323 - protein, 118 aa, Artificial Sequence
  Chemically Synthesized
QVQLQESGGGLVQAGGSLRLSCAASGTISSRSYMGWYRQAPGKEREFVATIAYGSNTYYADSVKGRFTISRDNAKNTVYLQMNSLKPEDTAVYYCAAAYHQDFWLYYWGQGTQVTVSS

SEQ ID NO: 21324 - protein, 121 aa, Artificial Sequence
  Chemically Synthesized
QVQLQESGGGLVQAGGSLRLSCAASGNISGAIVMGWYRQAPGKERELLPVLLTVVLPYADSVKGRFTISRDNAKNTVYLQMNSLKPEDTAVYYCAAPGQINPYYARKHAYWGQGTQVTVSS

SEQ ID NO: 21325 - protein, 122 aa, Artificial Sequence
  Chemically Synthesized
QVQLQESGGGLVQAGGSLRLSCAASGYIFPHGDMGWYRQAPGKERELVAGIDFGGNTNYADSVKGRFTISRDNAKNTVYLQMNSLKPEDTAVYYCAAAELDGWADPVPHDYWGQGTQVTVSS

SEQ ID NO: 21326 - protein, 118 aa, Artificial Sequence
  Chemically Synthesized
QVQLQESGGGLVQAGGSLRLSCAASGTISPADYMGWYRQAPGKEREFVAGIDVGASTYYADSVKGRFTISRDNAKNTVYLQMNSLKPEDTAVYYCAATSPYSDLFDYWGQGTQVTVSS

SEQ ID NO: 21327 - protein, 118 aa, Artificial Sequence
  Chemically Synthesized
QVQLQESGGGLVQAGGSLRLSCAASGNIFSGPGMGWYRQAPGKEREFVATINPGSTTNYADSVKGRFTISRDNAKNTVYLQMNSLKPEDTAVYYCAVDRYYQQYFYYWGQGTQVTVSS

SEQ ID NO: 21328 - protein, 112 aa, Artificial Sequence
  Chemically Synthesized
QVQLQESGGGLVQAGGSLRLSCAASGNISERADMGWYRQAPGKEREFVAAINAGTTTNYADSVKGRFTISRDNAKNTVYLQMNSLKPEDTAVYYCAVLLMYWGQGTQVTVSS

SEQ ID NO: 21329 - protein, 117 aa, Artificial Sequence
  Chemically Synthesized
QVQLQESGGGLVQAGGSLRLSCAASGSISAGPSMGWYRQAPGKERELVATISHGANTNYADSVKGRFTISRDNAKNTVYLQMNSLKPEDTAVYYCAAVSTLTLPWYWGQGTQVTVSS

SEQ ID NO: 21330 - protein, 122 aa, Artificial Sequence
  Chemically Synthesized
QVQLQESGGGLVQAGGSLRLSCAASGNISYYYDMGWYRQAPGKERELVAGISYGTITYYADSVKGRFTISRDNAKNTVYLQMNSLKPEDTAVYYCAVDGPIWAWHLNRLDYWGQGTQVTVSS

SEQ ID NO: 21331 - protein, 118 aa, Artificial Sequence
  Chemically Synthesized
QVQLQESGGGLVQAGGSLRLSCAASGTISASDAMGWYRQAPGKEREFVATIDVGGTTNYADSVKGRFTISRDNAKNTVYLQMNSLKPEDTAVYYCAAVKRYIGYHYYWGQGTQVTVSS

SEQ ID NO: 21332 - protein, 118 aa, Artificial Sequence
  Chemically Synthesized
QVQLQESGGGLVQAGGSLRLSCAASGNISARYYMGWYRQAPGKEREFVATISHGTNTNYADSVKGRFTISRDNAKNTVYLQMNSLKPEDTAVYYCAALYAIDYYHYYWGQGTQVTVSS

SEQ ID NO: 21333 - protein, 114 aa, Artificial Sequence
  Chemically Synthesized
QVQLQESGGGLVQAGGSLRLSCAASGIFLLRTMGWYRQAPGKEREFVATINQGTTTNYADSVKGRFTISRDNAKNTVYLQMNSLKPEDTAVYYCAAYGYDHNYWGQGTQVTVSS

SEQ ID NO: 21334 - protein, 125 aa, Artificial Sequence
  Chemically Synthesized
QVQLQESGGGLVQAGGSLRLSCAASGTISQYRDMGWYRQAPGKEREFVAAIGRGWYYLYADSVKGRFTISRDNAKNTVYLQMNSLKPEDTAVYYCAAHKAYQYGTDDQVSTLMYWGQGTQVTVSS

SEQ ID NO: 21335 - protein, 118 aa, Artificial Sequence
  Chemically Synthesized
QVQLQESGGGLVQAGGSLRLSCAASGNISSPRYMGWYRQAPGKERELVASIADGSNTYYADSVKGRFTISRDNAKNTVYLQMNSLKPEDTAVYYCAAYTRYGRHYIYWGQGTQVTVSS

SEQ ID NO: 21336 - protein, 122 aa, Artificial Sequence
  Chemically Synthesized
QVQLQESGGGLVQAGGSLRLSCAASGSISDDSSMGWYRQAPGKEREFVATITSGGITNYADSVKGRFTISRDNAKNTVYLQMNSLKPEDTAVYYCAVVTRGRGPRGQWLYYWGQGTQVTVSS

SEQ ID NO: 21337 - protein, 116 aa, Artificial Sequence
  Chemically Synthesized
QVQLQESGGGLVQAGGSLRLSCAASGTIFGRYVMGWYRQAPGKEREFVAAIVYADSVKGRFTISRDNAKNTVYLQMNSLKPEDTAVYYCAVTRYQLFYRADYHDYWGQGTQVTVSS

SEQ ID NO: 21338 - protein, 122 aa, Artificial Sequence
  Chemically Synthesized
QVQLQESGGGLVQAGGSLRLSCAASGTIFSRYAMGWYRQAPGKEREFVAAIARGTITYYADSVKGRFTISRDNAKNTVYLQMNSLKPEDTAVYYCAVEGTYARPYENDHVYWGQGTQVTVSS

SEQ ID NO: 21339 - protein, 117 aa, Artificial Sequence
  Chemically Synthesized
QVQLQESGGGLVQAGGSLRLSCAASGTISHSVMGWYRQAPGKERELVATIDEGSITYYADSVKGRFTISRDNAKNTVYLQMNSLKPEDTAVYYCAVTYFHYVRYDYWGQGTQVTVSS

SEQ ID NO: 21340 - protein, 118 aa, Artificial Sequence
  Chemically Synthesized
QVQLQESGGGLVQAGGSLRLSCAASGNISYIGAMGWYRQAPGKEREFVAAITIGGTTNYADSVKGRFTISRDNAKNTVYLQMNSLKPEDTAVYYCAAIGLLKTYHGYWGQGTQVTVSS

SEQ ID NO: 21341 - protein, 116 aa, Artificial Sequence
  Chemically Synthesized
QVQLQESGGGLVQAGGSLRLSCAASGYISYLTTMGWYRQAPGKERELVATITSVLLPYADSVKGRFTISRDNAKNTVYLQMNSLKPEDTAVYYCAAVRAVFISFYWGQGTQVTVSS

SEQ ID NO: 21342 - protein, 117 aa, Artificial Sequence
  Chemically Synthesized
QVQLQESGGGLVQAGGSLRLSCAASGNIFTYFYMGWYRQAPGKEREFVAAIDIGSTTNYADSVKGRFTISRDNAKNTVYLQMNSLKPEDTAVYYCAADYDYGLHPYWGQGTQVTVSS

SEQ ID NO: 21343 - protein, 121 aa, Artificial Sequence
  Chemically Synthesized
QVQLQESGGGLVQAGGSLRLSCAASGNISIGYMGWYRQAPGKEREFVATISAGGITYYADSVKGRFTISRDNAKNTVYLQMNSLKPEDTAVYYCAVNVYDTKRAHGDHSYWGQGTQVTVSS

SEQ ID NO: 21344 - protein, 114 aa, Artificial Sequence
  Chemically Synthesized
QVQLQESGGGLVQAGGSLRLSCAASGSISRRDDMGWYRQAPGKEREFVASITIGYADSVKGRFTISRDNAKNTVYLQMNSLKPEDTAVYYCAARRYLYYPLVYWGQGTQVTVSS

SEQ ID NO: 21345 - protein, 118 aa, Artificial Sequence
  Chemically Synthesized
QVQLQESGGGLVQAGGSLRLSCAASGTISWTINMGWYRQAPGKERELVAAIDHGGNTNYADSVKGRFTISRDNAKNTVYLQMNSLKPEDTAVYYCAVPYRNAGAFDYWGQGTQVTVSS

SEQ ID NO: 21346 - protein, 118 aa, Artificial Sequence
  Chemically Synthesized
QVQLQESGGGLVQAGGSLRLSCAASGTISDSHYMGWYRQAPGKEREFVAGIDVGASTNYADSVKGRFTISRDNAKNTVYLQMNSLKPEDTAVYYCAVDVASDYWLYYWGQGTQVTVSS

SEQ ID NO: 21347 - protein, 117 aa, Artificial Sequence
  Chemically Synthesized
QVQLQESGGGLVQAGGSLRLSCAASGTISSYSTMGWYRQAPGKEREFVAGIGYGGITNYADSVKGRFTISRDNAKNTVYLQMNSLKPEDTAVYYCAVVWSGPYHHYWGQGTQVTVSS

SEQ ID NO: 21348 - protein, 118 aa, Artificial Sequence
  Chemically Synthesized
QVQLQESGGGLVQAGGSLRLSCAASGTISADFGMGWYRQAPGKEREFVAAITNGTTTYYADSVKGRFTISRDNAKNTVYLQMNSLKPEDTAVYYCAVPAGTGRRFYYWGQGTQVTVSS

SEQ ID NO: 21349 - protein, 122 aa, Artificial Sequence
  Chemically Synthesized
QVQLQESGGGLVQAGGSLRLSCAASGTIFSDGGMGWYRQAPGKERELVAAIDLGGITNYADSVKGRFTISRDNAKNTVYLQMNSLKPEDTAVYYCAVGVDEIERYYYGFGYWGQGTQVTVSS

SEQ ID NO: 21350 - protein, 122 aa, Artificial Sequence
  Chemically Synthesized
QVQLQESGGGLVQAGGSLRLSCAASGTIFDAYVMGWYRQAPGKERELVAAITVGGTTYYADSVKGRFTISRDNAKNTVYLQMNSLKPEDTAVYYCAAYGENNDDDYGYYIYWGQGTQVTVSS

SEQ ID NO: 21351 - protein, 121 aa, Artificial Sequence
  Chemically Synthesized
QVQLQESGGGLVQAGGSLRLSCAASGYISIAYMGWYRQAPGKERELVAAINPGGSTYYADSVKGRFTISRDNAKNTVYLQMNSLKPEDTAVYYCAVYGYWRYGFGVDFQYWGQGTQVTVSS

SEQ ID NO: 21352 - protein, 117 aa, Artificial Sequence
  Chemically Synthesized
QVQLQESGGGLVQAGGSLRLSCAASGTILSTHMGWYRQAPGKERELVATIAYGGTTNYADSVKGRFTISRDNAKNTVYLQMNSLKPEDTAVYYCAADRRAGPYYLYWGQGTQVTVSS

SEQ ID NO: 21353 - protein, 117 aa, Artificial Sequence
  Chemically Synthesized
QVQLQESGGGLVQAGGSLRLSCAASGTISYPGFMGWYRQAPGKEREFVASIDYGTITYYADSVKGRFTISRDNAKNTVYLQMNSLKPEDTAVYYCAVFPSTTSLIYWGQGTQVTVSS

SEQ ID NO: 21354 - protein, 122 aa, Artificial Sequence
  Chemically Synthesized
QVQLQESGGGLVQAGGSLRLSCAASGTISDAPYMGWYRQAPGKEREFVAGIAFGTSTNYADSVKGRFTISRDNAKNTVYLQMNSLKPEDTAVYYCAARPRQFERDYVGHGYWGQGTQVTVSS

SEQ ID NO: 21355 - protein, 126 aa, Artificial Sequence
  Chemically Synthesized
QVQLQESGGGLVQAGGSLRLSCAASGSISAVWYMGWYRQAPGKEREFVASIAYGASTNYADSVKGRFTISRDNAKNTVYLQMNSLKPEDTAVYYCAVSTATATTQYTSQIGGHDYWGQGTQVTVSS

SEQ ID NO: 21356 - protein, 119 aa, Artificial Sequence
  Chemically Synthesized
QVQLQESGGGLVQAGGSLRLSCAASGYTTTMGWYRQAPGKERELVATIATGATTNYADSVKGRFTISRDNAKNTVYLQMNSLKPEDTAVYYCAATPYNRTAGFSSHYYWGQGTQVTVSS

SEQ ID NO: 21357 - protein, 117 aa, Artificial Sequence
  Chemically Synthesized
QVQLQESGGGLVQAGGSLRLSCAASGNIFDPGEMGWYRQAPGKERELVASIANYADSVKGRFTISRDNAKNTVYLQMNSLKPEDTAVYYCAAYDLDGLDGTYGYTYWGQGTQVTVSS

SEQ ID NO: 21358 - protein, 116 aa, Artificial Sequence
  Chemically Synthesized
QVQLQESGGGLVQAGGSLRLSCAASGSIFWTRMGWYRQAPGKEREFVAGINDGGITNYADSVKGRFTISRDNAKNTVYLQMNSLKPEDTAVYYCAVTSLVVTGFYWGQGTQVTVSS

SEQ ID NO: 21359 - protein, 118 aa, Artificial Sequence
  Chemically Synthesized
QVQLQESGGGLVQAGGSLRLSCAASGTISDIRYMGWYRQAPGKEREFVASIAYGATTNYADSVKGRFTISRDNAKNTVYLQMNSLKPEDTAVYYCAVPFYGNRYYPYWGQGTQVTVSS

SEQ ID NO: 21360 - protein, 118 aa, Artificial Sequence
  Chemically Synthesized
QVQLQESGGGLVQAGGSLRLSCAASGTIFGAPTMGWYRQAPGKEREFVASIAPGSTTYYADSVKGRFTISRDNAKNTVYLQMNSLKPEDTAVYYCAVTSWYFPGLFYWGQGTQVTVSS

SEQ ID NO: 21361 - protein, 118 aa, Artificial Sequence
  Chemically Synthesized
QVQLQESGGGLVQAGGSLRLSCAASGYISTSEVMGWYRQAPGKEREFVASIDEGGITYYADSVKGRFTISRDNAKNTVYLQMNSLKPEDTAVYYCAVYDGTYRGYDYWGQGTQVTVSS

SEQ ID NO: 21362 - protein, 118 aa, Artificial Sequence
  Chemically Synthesized
QVQLQESGGGLVQAGGSLRLSCAASGSISGDVYMGWYRQAPGKEREFVASIDYGGNTNYADSVKGRFTISRDNAKNTVYLQMNSLKPEDTAVYYCAALTHYYNYHVYWGQGTQVTVSS

SEQ ID NO: 21363 - protein, 111 aa, Artificial Sequence
  Chemically Synthesized
QVQLQESGGGLVQAGGSLRLSCAASGNIFRYATMGWYRQAPGKEREFVAGIGSVLIPYADSVKGRFTISRDNAKNTVYLQMNSLKPEDTAVYYCAVRGNYWGQGTQVTVSS

SEQ ID NO: 21364 - protein, 114 aa, Artificial Sequence
  Chemically Synthesized
QVQLQESGGGLVQAGGSLRLSCAASGNISVVPYMGWYRQAPGKEREFVAYGGNTNYADSVKGRFTISRDNAKNTVYLQMNSLKPEDTAVYYCAAYSCTVVLMYWGQGTQVTVSS

SEQ ID NO: 21365 - protein, 119 aa, Artificial Sequence
  Chemically Synthesized
QVQLQESGGGLVQAGGSLRLSCAASGYIFRGDSYMGWYRQAPGKERELVATISVGSITNYADSVKGRFTISRDNAKNTVYLQMNSLKPEDTAVYYCAAYYYQGQGPYYWGQGTQVTVSS

SEQ ID NO: 21366 - protein, 115 aa, Artificial Sequence
  Chemically Synthesized
QVQLQESGGGLVQAGGSLRLSCAASGYIYSDMGWYRQAPGKEREFVASIANGGITYYADSVKGRFTISRDNAKNTVYLQMNSLKPEDTAVYYCAVSVTTVSNLYWGQGTQVTVSS

SEQ ID NO: 21367 - protein, 118 aa, Artificial Sequence
  Chemically Synthesized
QVQLQESGGGLVQAGGSLRLSCAASGSIFRAWGMGWYRQAPGKERELVAGINYGSTTQYADSVKGRFTISRDNAKNTVYLQMNSLKPEDTAVYYCAVFGRSDTWFDYWGQGTQVTVSS

SEQ ID NO: 21368 - protein, 118 aa, Artificial Sequence
  Chemically Synthesized
QVQLQESGGGLVQAGGSLRLSCAASGTISPHREMGWYRQAPGKERELVAGISVGGNTYYADSVKGRFTISRDNAKNTVYLQMNSLKPEDTAVYYCAVYWLYFVPHVYWGQGTQVTVSS

SEQ ID NO: 21369 - protein, 118 aa, Artificial Sequence
  Chemically Synthesized
QVQLQESGGGLVQAGGSLRLSCAASGTISATPYMGWYRQAPGKERELVASIAYGTITYYADSVKGRFTISRDNAKNTVYLQMNSLKPEDTAVYYCAVGYSSTAGHDYWGQGTQVTVSS

SEQ ID NO: 21370 - protein, 116 aa, Artificial Sequence
  Chemically Synthesized
QVQLQESGGGLVQAGGSLRLSCAASGSIFLRSGMGWYRQAPGKEREFVAAISFGGTTYYADSVKGRFTISRDNAKNTVYLQMNSLKPEDTAVYYCAVRGKASFIYWGQGTQVTVSS

SEQ ID NO: 21371 - protein, 110 aa, Artificial Sequence
  Chemically Synthesized
QVQLQESGGGLVQAGGSLRLSCAASGNISADYGMGWYRQAPGKERELVAGITYGTTTNYADSVKGRFTISRDNAKNTVYLQMNSLKPEDTAVYYCANMYWGQGTQVTVSS

SEQ ID NO: 21372 - protein, 117 aa, Artificial Sequence
  Chemically Synthesized
QVQLQESGGGLVQAGGSLRLSCAASGTISSCSMGWYRQAPGKERELVAAISGGTITNYADSVKGRFTISRDNAKNTVYLQMNSLKPEDTAVYYCAVGQPAGIAHAYWGQGTQVTVSS

SEQ ID NO: 21373 - protein, 117 aa, Artificial Sequence
  Chemically Synthesized
QVQLQESGGGLVQAGGSLRLSCAASGNISDRTTMGWYRQAPGKERELVASIAWGSNTNYADSVKGRFTISRDNAKNTVYLQMNSLKPEDTAVYYCAVARYHQDYLYWGQGTQVTVSS

SEQ ID NO: 21374 - protein, 118 aa, Artificial Sequence
  Chemically Synthesized
QVQLQESGGGLVQAGGSLRLSCAASGNISDGSFMGWYRQAPGKERELVAAINRGATTNYADSVKGRFTISRDNAKNTVYLQMNSLKPEDTAVYYCAVYEYDLDYHDYWGQGTQVTVSS

SEQ ID NO: 21375 - protein, 126 aa, Artificial Sequence
  Chemically Synthesized
QVQLQESGGGLVQAGGSLRLSCAASGTIFASSYMGWYRQAPGKEREFVASINGGSNTYYADSVKGRFTISRDNAKNTVYLQMNSLKPEDTAVYYCAVAVTPYDLYFYAKRKFHPYWGQGTQVTVSS

SEQ ID NO: 21376 - protein, 121 aa, Artificial Sequence
  Chemically Synthesized
QVQLQESGGGLVQAGGSLRLSCAASGNIFPRYVMGWYRQAPGKERELVAAIAIGSITYYADSVKGRFTISRDNAKNTVYLQMNSLKPEDTAVYYCAAEHRDSTLTSCLIYWGQGTQVTVSS

SEQ ID NO: 21377 - protein, 122 aa, Artificial Sequence
  Chemically Synthesized
QVQLQESGGGLVQAGGSLRLSCAASGTIFASDYMGWYRQAPGKERELVASIGRGANTYYADSVKGRFTISRDNAKNTVYLQMNSLKPEDTAVYYCAVYYYFGTYFQYPYDYWGQGTQVTVSS

SEQ ID NO: 21378 - protein, 121 aa, Artificial Sequence
  Chemically Synthesized
QVQLQESGGGLVQAGGSLRLSCAASGTIFTLLMGWYRQAPGKEREFVATIDRGSSTYYADSVKGRFTISRDNAKNTVYLQMNSLKPEDTAVYYCAAYGVKRNDSYTDYWYWGQGTQVTVSS

SEQ ID NO: 21379 - protein, 116 aa, Artificial Sequence
  Chemically Synthesized
QVQLQESGGGLVQAGGSLRLSCAASGNIFSYGIMGWYRQAPGKEREFVATSWCYYLYADSVKGRFTISRDNAKNTVYLQMNSLKPEDTAVYYCAVVADDDTNLDYWGQGTQVTVSS

SEQ ID NO: 21380 - protein, 118 aa, Artificial Sequence
  Chemically Synthesized
QVQLQESGGGLVQAGGSLRLSCAASGSIFLIGPMGWYRQAPGKERELVAAIGPGANTNYADSVKGRFTISRDNAKNTVYLQMNSLKPEDTAVYYCAADGDTEPEHRYWGQGTQVTVSS

SEQ ID NO: 21381 - protein, 126 aa, Artificial Sequence
  Chemically Synthesized
QVQLQESGGGLVQAGGSLRLSCAASGYISYYVYMGWYRQAPGKERELVAAINVGTTTYYADSVKGRFTISRDNAKNTVYLQMNSLKPEDTAVYYCAVDHDGIGKPRENYYISLRYWGQGTQVTVSS

SEQ ID NO: 21382 - protein, 118 aa, Artificial Sequence
  Chemically Synthesized
QVQLQESGGGLVQAGGSLRLSCAASGNISPRLSMGWYRQAPGKEREFVAGITHGTITNYADSVKGRFTISRDNAKNTVYLQMNSLKPEDTAVYYCAVQRGQDDTFSYWGQGTQVTVSS

SEQ ID NO: 21383 - protein, 118 aa, Artificial Sequence
  Chemically Synthesized
QVQLQESGGGLVQAGGSLRLSCAASGTIFDRYLMGWYRQAPGKERELVAAITYGSSTYYADSVKGRFTISRDNAKNTVYLQMNSLKPEDTAVYYCAVDSSYWSYHFYWGQGTQVTVSS

SEQ ID NO: 21384 - protein, 117 aa, Artificial Sequence
  Chemically Synthesized
QVQLQESGGGLVQAGGSLRLSCAASGSISYSRYMGWYRQAPGKERELVASIGVGSITNYADSVKGRFTISRDNAKNTVYLQMNSLKPEDTAVYYCAATYSMTTTLYWGQGTQVTVSS

SEQ ID NO: 21385 - protein, 118 aa, Artificial Sequence
  Chemically Synthesized
QVQLQESGGGLVQAGGSLRLSCAASGTIFTAYYMGWYRQAPGKEREFVASIDHGATTNYADSVKGRFTISRDNAKNTVYLQMNSLKPEDTAVYYCAVHGRYAYRYYYWGQGTQVTVSS

SEQ ID NO: 21386 - protein, 122 aa, Artificial Sequence
  Chemically Synthesized
QVQLQESGGGLVQAGGSLRLSCAASGTIFADWQMGWYRQAPGKEREFVATIGAGANTNYADSVKGRFTISRDNAKNTVYLQMNSLKPEDTAVYYCAVYNLGRTYYKSPLEYWGQGTQVTVSS

SEQ ID NO: 21387 - protein, 118 aa, Artificial Sequence
  Chemically Synthesized
QVQLQESGGGLVQAGGSLRLSCAASGTIFAVEYMGWYRQAPGKERELVAGIDRGGSTNYADSVKGRFTISRDNAKNTVYLQMNSLKPEDTAVYYCAVDAPQRWGFGYWGQGTQVTVSS

SEQ ID NO: 21388 - protein, 118 aa, Artificial Sequence
  Chemically Synthesized
QVQLQESGGGLVQAGGSLRLSCAASGTISIDSAMGWYRQAPGKERELVATIAGGAITNYADSVKGRFTISRDNAKNTVYLQMNSLKPEDTAVYYCAALFLYDVRHYYWGQGTQVTVSS

SEQ ID NO: 21389 - protein, 118 aa, Artificial Sequence
  Chemically Synthesized
QVQLQESGGGLVQAGGSLRLSCAASGTISGRTDMGWYRQAPGKEREFVAGIGYGTTTYYADSVKGRFTISRDNAKNTVYLQMNSLKPEDTAVYYCAAYRHSPGYYRYWGQGTQVTVSS

SEQ ID NO: 21390 - protein, 118 aa, Artificial Sequence
  Chemically Synthesized
QVQLQESGGGLVQAGGSLRLSCAASGTISAAPGMGWYRQAPGKEREFVAAIAIGSSTNYADSVKGRFTISRDNAKNTVYLQMNSLKPEDTAVYYCAVTALSNGGYKYWGQGTQVTVSS

SEQ ID NO: 21391 - protein, 121 aa, Artificial Sequence
  Chemically Synthesized
QVQLQESGGGLVQAGGSLRLSCAASGTISYDQDMGWYRQAPGKERELVAGISYGTTTYADSVKGRFTISRDNAKNTVYLQMNSLKPEDTAVYYCAVQYYGVDDAGLDHWYWGQGTQVTVSS

SEQ ID NO: 21392 - protein, 121 aa, Artificial Sequence
  Chemically Synthesized
QVQLQESGGGLVQAGGSLRLSCAASGNILVLVMGWYRQAPGKEREFVAAISDGANTNYADSVKGRFTISRDNAKNTVYLQMNSLKPEDTAVYYCAAYEFDGIGGYVAYYYWGQGTQVTVSS

SEQ ID NO: 21393 - protein, 118 aa, Artificial Sequence
  Chemically Synthesized
QVQLQESGGGLVQAGGSLRLSCAASGSISGDVYMGWYRQAPGKEREFVAAITPGSSTNYADSVKGRFTISRDNAKNTVYLQMNSLKPEDTAVYYCAAYYIWVYYLYYWGQGTQVTVSS

SEQ ID NO: 21394 - protein, 117 aa, Artificial Sequence
  Chemically Synthesized
QVQLQESGGGLVQAGGSLRLSCAASGYISHPNRMGWYRQAPGKERELVASITYGILPYADSVKGRFTISRDNAKNTVYLQMNSLKPEDTAVYYCAAVRNPGNTYYYWGQGTQVTVSS

SEQ ID NO: 21395 - protein, 121 aa, Artificial Sequence
  Chemically Synthesized
QVQLQESGGGLVQAGGSLRLSCAASGNISSIGMGWYRQAPGKEREFVAGITGGSNTYYADSVKGRFTISRDNAKNTVYLQMNSLKPEDTAVYYCAVGITREVDDAYAFAYWGQGTQVTVSS

SEQ ID NO: 21396 - protein, 115 aa, Artificial Sequence
  Chemically Synthesized
QVQLQESGGGLVQAGGSLRLSCAASGSISQYSYMGWYRQAPGKEREFVASITYGSITYYADSVKGRFTISRDNAKNTVYLQMNSLKPEDTAVYYCAAYYHPLVYWGQGTQVTVSS

SEQ ID NO: 21397 - protein, 119 aa, Artificial Sequence
  Chemically Synthesized
QVQLQESGGGLVQAGGSLRLSCAASGTIFSPYVMGWYRQAPGKERELVAAITYGTSTYYADSVKGRFTISRDNAKNTVYLQMNSLKPEDTAVYYCAVYVPYHERFDVYWGQGTQVTVSS

SEQ ID NO: 21398 - protein, 125 aa, Artificial Sequence
  Chemically Synthesized
QVQLQESGGGLVQAGGSLRLSCAASGNIFYYDYMGWYRQAPGKEREFVAGIGVGGTTYYADSVKGRFTISRDNAKNTVYLQMNSLKPEDTAVYYCAVYYDWIGHTYYTIHALFYWGQGTQVTVSS

SEQ ID NO: 21399 - protein, 118 aa, Artificial Sequence
  Chemically Synthesized
QVQLQESGGGLVQAGGSLRLSCAASGTISYQRYMGWYRQAPGKERELVAGIGQGATTNYADSVKGRFTISRDNAKNTVYLQMNSLKPEDTAVYYCAVRAWNWSDHTYWGQGTQVTVSS

SEQ ID NO: 21400 - protein, 118 aa, Artificial Sequence
  Chemically Synthesized
QVQLQESGGGLVQAGGSLRLSCAASGTISTPRFMGWYRQAPGKERELVASISDGGNTNYADSVKGRFTISRDNAKNTVYLQMNSLKPEDTAVYYCAAGAYTGGNLYYWGQGTQVTVSS

SEQ ID NO: 21401 - protein, 122 aa, Artificial Sequence
  Chemically Synthesized
QVQLQESGGGLVQAGGSLRLSCAASGTISISRYMGWYRQAPGKERELVATINAGTSTYYADSVKGRFTISRDNAKNTVYLQMNSLKPEDTAVYYCAVDDGWFDRPLSRLIYWGQGTQVTVSS

SEQ ID NO: 21402 - protein, 111 aa, Artificial Sequence
  Chemically Synthesized
QVQLQESGGGLVQAGGSLRLSCAASGTIFDYSMGWYRQAPGKERELVATIAAGGSTNYADSVKGRFTISRDNAKNTVYLQMNSLKPEDTAVYYCAGSALYWGQGTQVTVSS

SEQ ID NO: 21403 - protein, 118 aa, Artificial Sequence
  Chemically Synthesized
QVQLQESGGGLVQAGGSLRLSCAASGNISRQQEMGWYRQAPGKERELVAGISWGSTTYYADSVKGRFTISRDNAKNTVYLQMNSLKPEDTAVYYCAAYRYGQPYHYYWGQGTQVTVSS

SEQ ID NO: 21404 - protein, 116 aa, Artificial Sequence
  Chemically Synthesized
QVQLQESGGGLVQAGGSLRLSCAASGNIFDHYFMGWYRQAPGKERELVAAISKGASTNYADSVKGRFTISRDNAKNTVYLQMNSLKPEDTAVYYCAVGPDYTLAYWGQGTQVTVSS

SEQ ID NO: 21405 - protein, 111 aa, Artificial Sequence
  Chemically Synthesized
QVQLQESGGGLVQAGGSLRLSCAASGNISHYGYMGWYRQAPGKERELVAGIDGGGTTYYADSVKGRFTISRDNAKNTVYLQMNSLKPEDTAVYYCAKLIYWGQGTQVTVSS

SEQ ID NO: 21406 - protein, 118 aa, Artificial Sequence
  Chemically Synthesized
QVQLQESGGGLVQAGGSLRLSCAASGNISTFDDMGWYRQAPGKEREFVAAISYGGTTNYADSVKGRFTISRDNAKNTVYLQMNSLKPEDTAVYYCAVNDGYSLPLPYWGQGTQVTVSS

SEQ ID NO: 21407 - protein, 122 aa, Artificial Sequence
  Chemically Synthesized
QVQLQESGGGLVQAGGSLRLSCAASGYIFGNGWMGWYRQAPGKEREFVAGIDGGGTNLYADSVKGRFTISRDNAKNTVYLQMNSLKPEDTAVYYCAVYVRAYSYDRRFFWYWGQGTQVTVSS

SEQ ID NO: 21408 - protein, 115 aa, Artificial Sequence
  Chemically Synthesized
QVQLQESGGGLVQAGGSLRLSCAASGTIFNGDYMGWYRQAPGKEREFVDAGGITNYADSVKGRFTISRDNAKNTVYLQMNSLKPEDTAVYYCAADLDTTEYFGYWGQGTQVTVSS

SEQ ID NO: 21409 - protein, 118 aa, Artificial Sequence
  Chemically Synthesized
QVQLQESGGGLVQAGGSLRLSCAASGSISRYDYMGWYRQAPGKERELVAAIANGATTNYADSVKGRFTISRDNAKNTVYLQMNSLKPEDTAVYYCAADADGTTSRLYWGQGTQVTVSS

SEQ ID NO: 21410 - protein, 110 aa, Artificial Sequence
  Chemically Synthesized
QVQLQESGGGLVQAGGSLRLSCAASGTISVWDSMGWYRQAPGKEREFVASIDLGATTNYADSVKGRFTISRDNAKNTVYLQMNSLKPEDTAVYYCAHDYWGQGTQVTVSS

SEQ ID NO: 21411 - protein, 118 aa, Artificial Sequence
  Chemically Synthesized
QVQLQESGGGLVQAGGSLRLSCAASGSISNYYFMGWYRQAPGKEREFVAGIGLGGTTYYADSVKGRFTISRDNAKNTVYLQMNSLKPEDTAVYYCAAGDDRIDRHGYWGQGTQVTVSS

SEQ ID NO: 21412 - protein, 114 aa, Artificial Sequence
  Chemically Synthesized
QVQLQESGGGLVQAGGSLRLSCAASGNIFTVGDMGWYRQAPGKERELVATISDGTITNYADSVKGRFTISRDNAKNTVYLQMNSLKPEDTAVYYCACSVRPLYWGQGTQVTVSS

SEQ ID NO: 21413 - protein, 117 aa, Artificial Sequence
  Chemically Synthesized
QVQLQESGGGLVQAGGSLRLSCAASGTIFLTTMGWYRQAPGKEREFVATIGDGANTNYADSVKGRFTISRDNAKNTVYLQMNSLKPEDTAVYYCAVYLVLNSPFHYWGQGTQVTVSS

SEQ ID NO: 21414 - protein, 122 aa, Artificial Sequence
  Chemically Synthesized
QVQLQESGGGLVQAGGSLRLSCAASGTISYDYYMGWYRQAPGKEREFVAGIATGSTTNYADSVKGRFTISRDNAKNTVYLQMNSLKPEDTAVYYCAVALPNNIDLVDHHDYWGQGTQVTVSS

SEQ ID NO: 21415 - protein, 118 aa, Artificial Sequence
  Chemically Synthesized
QVQLQESGGGLVQAGGSLRLSCAASGTIFDSTSMGWYRQAPGKEREFVAAIAYGTSTNYADSVKGRFTISRDNAKNTVYLQMNSLKPEDTAVYYCAVPKRTGDIHSYWGQGTQVTVSS

SEQ ID NO: 21416 - protein, 114 aa, Artificial Sequence
  Chemically Synthesized
QVQLQESGGGLVQAGGSLRLSCAASGTIFGDVYMGWYRQAPGKERELVAGIRLPYADSVKGRFTISRDNAKNTVYLQMNSLKPEDTAVYYCAVTLLVLLTSLYWGQGTQVTVSS

SEQ ID NO: 21417 - protein, 118 aa, Artificial Sequence
  Chemically Synthesized
QVQLQESGGGLVQAGGSLRLSCAASGYISRRLSMGWYRQAPGKERELVAGIADGGNTYYADSVKGRFTISRDNAKNTVYLQMNSLKPEDTAVYYCAAGIYYSGYLDYWGQGTQVTVSS

SEQ ID NO: 21418 - protein, 122 aa, Artificial Sequence
  Chemically Synthesized
QVQLQESGGGLVQAGGSLRLSCAASGSISRYDVMGWYRQAPGKEREFVATIATGGTTYYADSVKGRFTISRDNAKNTVYLQMNSLKPEDTAVYYCAAEFYQSHLQFGSYRYWGQGTQVTVSS

SEQ ID NO: 21419 - protein, 118 aa, Artificial Sequence
  Chemically Synthesized
QVQLQESGGGLVQAGGSLRLSCAASGTISYRDLMGWYRQAPGKERELVATIDTGSTTNYADSVKGRFTISRDNAKNTVYLQMNSLKPEDTAVYYCAAQGHYVRTYHYWGQGTQVTVSS

SEQ ID NO: 21420 - protein, 118 aa, Artificial Sequence
  Chemically Synthesized
QVQLQESGGGLVQAGGSLRLSCAASGTIFGQPDMGWYRQAPGKERELVASIDDGTSTNYADSVKGRFTISRDNAKNTVYLQMNSLKPEDTAVYYCAVRYAADVLHYYWGQGTQVTVSS

SEQ ID NO: 21421 - protein, 118 aa, Artificial Sequence
  Chemically Synthesized
QVQLQESGGGLVQAGGSLRLSCAASGTISTYRYMGWYRQAPGKERELVATIDYGGSTNYADSVKGRFTISRDNAKNTVYLQMNSLKPEDTAVYYCAVYKGQTFLLGYWGQGTQVTVSS

SEQ ID NO: 21422 - protein, 108 aa, Artificial Sequence
  Chemically Synthesized
QVQLQESGGGLVQAGGSLRLSCAASGTISSLYDMGWYRQAPGKERELVALVLVPYADSVKGRFTISRDNAKNTVYLQMNSLKPEDTAVYYCALEHDYWGQGTQVTVSS

SEQ ID NO: 21423 - protein, 114 aa, Artificial Sequence
  Chemically Synthesized
QVQLQESGGGLVQAGGSLRLSCAASGNISTYEMGWYRQAPGKERELLPLLVTVLVPYADSVKGRFTISRDNAKNTVYLQMNSLKPEDTAVYYCAVTTLVLGFYWGQGTQVTVSS

SEQ ID NO: 21424 - protein, 116 aa, Artificial Sequence
  Chemically Synthesized
QVQLQESGGGLVQAGGSLRLSCAASGTIFVDYSMGWYRQAPGKERELVATIAAGTTTYYADSVKGRFTISRDNAKNTVYLQMNSLKPEDTAVYYCAAVNTGTTIYWGQGTQVTVSS

SEQ ID NO: 21425 - protein, 126 aa, Artificial Sequence
  Chemically Synthesized
QVQLQESGGGLVQAGGSLRLSCAASGTIFPTSQMGWYRQAPGKERELVASIDDGGSTYYADSVKGRFTISRDNAKNTVYLQMNSLKPEDTAVYYCAADYRVVLSVNRQGDHWLTYWGQGTQVTVSS

SEQ ID NO: 21426 - protein, 121 aa, Artificial Sequence
  Chemically Synthesized
QVQLQESGGGLVQAGGSLRLSCAASGNISRRNIMGWYRQAPGKERELVAGIILVVIPYADSVKGRFTISRDNAKNTVYLQMNSLKPEDTAVYYCAVYDFDIQYVYTVHPYWGQGTQVTVSS

SEQ ID NO: 21427 - protein, 117 aa, Artificial Sequence
  Chemically Synthesized
QVQLQESGGGLVQAGGSLRLSCAASGTISGPDRMGWYRQAPGKEREFVAGIASGANTNYADSVKGRFTISRDNAKNTVYLQMNSLKPEDTAVYYCAVGYRDGVYGYWGQGTQVTVSS

SEQ ID NO: 21428 - protein, 117 aa, Artificial Sequence
  Chemically Synthesized
QVQLQESGGGLVQAGGSLRLSCAASGTISNGDSMGWYRQAPGKERELVATIAYGTITYYADSVKGRFTISRDNAKNTVYLQMNSLKPEDTAVYYCAVGYDWLLIHYWGQGTQVTVSS

SEQ ID NO: 21429 - protein, 122 aa, Artificial Sequence
  Chemically Synthesized
QVQLQESGGGLVQAGGSLRLSCAASGTIFFVIIMGWYRQAPGKEREFVASIAHGGTTNYADSVKGRFTISRDNAKNTVYLQMNSLKPEDTAVYYCAAYADSYLIDLAFHAYWGQGTQVTVSS

SEQ ID NO: 21430 - protein, 126 aa, Artificial Sequence
  Chemically Synthesized
QVQLQESGGGLVQAGGSLRLSCAASGTISDISRMGWYRQAPGKERELVAAITVGGITNYADSVKGRFTISRDNAKNTVYLQMNSLKPEDTAVYYCAVGNQDRYYGYSQVDSYFGYWGQGTQVTVSS

SEQ ID NO: 21431 - protein, 121 aa, Artificial Sequence
  Chemically Synthesized
QVQLQESGGGLVQAGGSLRLSCAASGNIFRAARMGWYRQAPGKERELVATITGGATTNYADSVKGRFTISRDNAKNTVYLQMNSLKPEDTAVYYCAVRTVDKTRPSTCMYWGQGTQVTVSS

SEQ ID NO: 21432 - protein, 115 aa, Artificial Sequence
  Chemically Synthesized
QVQLQESGGGLVQAGGSLRLSCAASGTISTTQYMGWYRQAPGKEREFVASIGGGAITNYADSVKGRFTISRDNAKNTVYLQMNSLKPEDTAVYYCAAWYAVYRYWGQGTQVTVSS

SEQ ID NO: 21433 - protein, 109 aa, Artificial Sequence
  Chemically Synthesized
QVQLQESGGGLVQAGGSLRLSCAASGNIFGAYFMGWYRQAPGKEREFVATISFGGITYYADSVKGRFTISRDNAKNTVYLQMNSLKPEDTAVYYCAAYWGQGTQVTVSS

SEQ ID NO: 21434 - protein, 117 aa, Artificial Sequence
  Chemically Synthesized
QVQLQESGGGLVQAGGSLRLSCAASGTILRSTMGWYRQAPGKEREFVAGIARGGTTNYADSVKGRFTISRDNAKNTVYLQMNSLKPEDTAVYYCAATQFHGYVLIYWGQGTQVTVSS

SEQ ID NO: 21435 - protein, 121 aa, Artificial Sequence
  Chemically Synthesized
QVQLQESGGGLVQAGGSLRLSCAASGNIFVDGGMGWYRQAPGKEREFVASIAYGGSTYYADSVKGRFTISRDNAKNTVYLQMNSLKPEDTAVYYCALLCTNLVRLKVCIYWGQGTQVTVSS

SEQ ID NO: 21436 - protein, 122 aa, Artificial Sequence
  Chemically Synthesized
QVQLQESGGGLVQAGGSLRLSCAASGTIFLHVGMGWYRQAPGKERELVASIGLGGNTNYADSVKGRFTISRDNAKNTVYLQMNSLKPEDTAVYYCAVGYINWYHIGGGHVYWGQGTQVTVSS

SEQ ID NO: 21437 - protein, 118 aa, Artificial Sequence
  Chemically Synthesized
QVQLQESGGGLVQAGGSLRLSCAASGTIFDYTGMGWYRQAPGKERELVAAIDYGTSTYYADSVKGRFTISRDNAKNTVYLQMNSLKPEDTAVYYCAAYNYVVTDHYYWGQGTQVTVSS

SEQ ID NO: 21438 - protein, 120 aa, Artificial Sequence
  Chemically Synthesized
QVQLQESGGGLVQAGGSLRLSCAASGYIFRVPRMGWYRQAPGKERELVAGISRGIPYADSVKGRFTISRDNAKNTVYLQMNSLKPEDTAVYYCAVPYYLPYAAIYPHDYWGQGTQVTVSS

SEQ ID NO: 21439 - protein, 121 aa, Artificial Sequence
  Chemically Synthesized
QVQLQESGGGLVQAGGSLRLSCAASGYISAGRQMGWYRQAPGKERELVASIGDGTSTNYADSVKGRFTISRDNAKNTVYLQMNSLKPEDTAVYYCAAQEWDRGEAAWSYYWGQGTQVTVSS

SEQ ID NO: 21440 - protein, 117 aa, Artificial Sequence
  Chemically Synthesized
QVQLQESGGGLVQAGGSLRLSCAASGTIFADGEMGWYRQAPGKERELVATIGYGASTYYADSVKGRFTISRDNAKNTVYLQMNSLKPEDTAVYYCAVSPRSTVSIYWGQGTQVTVSS

SEQ ID NO: 21441 - protein, 122 aa, Artificial Sequence
  Chemically Synthesized
QVQLQESGGGLVQAGGSLRLSCAASGYIFVFAQMGWYRQAPGKERELVAAITSGGNTNYADSVKGRFTISRDNAKNTVYLQMNSLKPEDTAVYYCAVEWYPDSILDDYHIYWGQGTQVTVSS

SEQ ID NO: 21442 - protein, 116 aa, Artificial Sequence
  Chemically Synthesized
QVQLQESGGGLVQAGGSLRLSCAASGYISGNQYMGWYRQAPGKERELVAAIEVVVPYADSVKGRFTISRDNAKNTVYLQMNSLKPEDTAVYYCAVIYGYLRGFGYWGQGTQVTVSS

SEQ ID NO: 21443 - protein, 117 aa, Artificial Sequence
  Chemically Synthesized
QVQLQESGGGLVQAGGSLRLSCAASGSISSGHTMGWYRQAPGKEREFVAGIGNGSTTYYADSVKGRFTISRDNAKNTVYLQMNSLKPEDTAVYYCAVGPSLVTLFYWGQGTQVTVSS

SEQ ID NO: 21444 - protein, 121 aa, Artificial Sequence
  Chemically Synthesized
QVQLQESGGGLVQAGGSLRLSCAASGTIFWNNDMGWYRQAPGKEREFVAGIVKVVIPYADSVKGRFTISRDNAKNTVYLQMNSLKPEDTAVYYCAATSDGRAVGEAYYQYWGQGTQVTVSS

SEQ ID NO: 21445 - protein, 118 aa, Artificial Sequence
  Chemically Synthesized
QVQLQESGGGLVQAGGSLRLSCAASGTIFKSYHMGWYRQAPGKEREFVAAIDAGGNTNYADSVKGRFTISRDNAKNTVYLQMNSLKPEDTAVYYCAAYFVQSVDFRYWGQGTQVTVSS

SEQ ID NO: 21446 - protein, 110 aa, Artificial Sequence
  Chemically Synthesized
QVQLQESGGGLVQAGGSLRLSCAASGYIFGLRDMGWYRQAPGKEREFVAAIAYGGITYYADSVKGRFTISRDNAKNTVYLQMNSLKPEDTAVYYCAFNYWGQGTQVTVSS

SEQ ID NO: 21447 - protein, 126 aa, Artificial Sequence
  Chemically Synthesized
QVQLQESGGGLVQAGGSLRLSCAASGTIFDADRMGWYRQAPGKERELVATINGGAITNYADSVKGRFTISRDNAKNTVYLQMNSLKPEDTAVYYCAVNRIYDTYWYDPAYSTHDYWGQGTQVTVSS

SEQ ID NO: 21448 - protein, 112 aa, Artificial Sequence
  Chemically Synthesized
QVQLQESGGGLVQAGGSLRLSCAASGNISYADYMGWYRQAPGKEREFVAAISDGTNTYYADSVKGRFTISRDNAKNTVYLQMNSLKPEDTAVYYCADCSWYWGQGTQVTVSS

SEQ ID NO: 21449 - protein, 120 aa, Artificial Sequence
  Chemically Synthesized
QVQLQESGGGLVQAGGSLRLSCAASGTISYTDQMGWYRQAPGKERELVAAIGNGTTYYADSVKGRFTISRDNAKNTVYLQMNSLKPEDTAVYYCAAVDYGDVTSREFIYWGQGTQVTVSS

SEQ ID NO: 21450 - protein, 117 aa, Artificial Sequence
  Chemically Synthesized
QVQLQESGGGLVQAGGSLRLSCAASGNISQTEMGWYRQAPGKEREFVAGITRGGITNYADSVKGRFTISRDNAKNTVYLQMNSLKPEDTAVYYCAVQVQYDYLHDYWGQGTQVTVSS

SEQ ID NO: 21451 - protein, 125 aa, Artificial Sequence
  Chemically Synthesized
QVQLQESGGGLVQAGGSLRLSCAASGTISEQTYMGWYRQAPGKEREFVAGIASVLYLYADSVKGRFTISRDNAKNTVYLQMNSLKPEDTAVYYCAVSYDYGTYILRSDLGWFWYWGQGTQVTVSS

SEQ ID NO: 21452 - protein, 126 aa, Artificial Sequence
  Chemically Synthesized
QVQLQESGGGLVQAGGSLRLSCAASGTISPSGFMGWYRQAPGKEREFVASIAYGASTYYADSVKGRFTISRDNAKNTVYLQMNSLKPEDTAVYYCAAVDSYQRYHGHRENVDLAYWGQGTQVTVSS

SEQ ID NO: 21453 - protein, 118 aa, Artificial Sequence
  Chemically Synthesized
QVQLQESGGGLVQAGGSLRLSCAASGTISNRSWMGWYRQAPGKERELVATIDGGSNTNYADSVKGRFTISRDNAKNTVYLQMNSLKPEDTAVYYCAVFFINRPNHHYWGQGTQVTVSS

SEQ ID NO: 21454 - protein, 118 aa, Artificial Sequence
  Chemically Synthesized
QVQLQESGGGLVQAGGSLRLSCAASGTISETQYMGWYRQAPGKERELVAGIGDGANTNYADSVKGRFTISRDNAKNTVYLQMNSLKPEDTAVYYCALFVLTVVLVFYWGQGTQVTVSS

SEQ ID NO: 21455 - protein, 122 aa, Artificial Sequence
  Chemically Synthesized
QVQLQESGGGLVQAGGSLRLSCAASGYISPLNWMGWYRQAPGKERELVAGIAGGSTTNYADSVKGRFTISRDNAKNTVYLQMNSLKPEDTAVYYCAVAYHDDPDYGYNHEYWGQGTQVTVSS

SEQ ID NO: 21456 - protein, 116 aa, Artificial Sequence
  Chemically Synthesized
QVQLQESGGGLVQAGGSLRLSCAASGSISIAWPMGWYRQAPGKEREFVASITQGGSYADSVKGRFTISRDNAKNTVYLQMNSLKPEDTAVYYCAADLQRQYYYEYWGQGTQVTVSS

SEQ ID NO: 21457 - protein, 126 aa, Artificial Sequence
  Chemically Synthesized
QVQLQESGGGLVQAGGSLRLSCAASGTISSTRYMGWYRQAPGKERELVAAIGHGANTYYADSVKGRFTISRDNAKNTVYLQMNSLKPEDTAVYYCAVTTGLTYWHYYGPNRWHRYWGQGTQVTVSS

SEQ ID NO: 21458 - protein, 118 aa, Artificial Sequence
  Chemically Synthesized
QVQLQESGGGLVQAGGSLRLSCAASGNIFDWTGMGWYRQAPGKERELVATIGQGGSTYYADSVKGRFTISRDNAKNTVYLQMNSLKPEDTAVYYCAVFYREGALFPYWGQGTQVTVSS

SEQ ID NO: 21459 - protein, 121 aa, Artificial Sequence
  Chemically Synthesized
QVQLQESGGGLVQAGGSLRLSCAASGSIFPLPLMGWYRQAPGKERELVATISDGSSTNYADSVKGRFTISRDNAKNTVYLQMNSLKPEDTAVYYCAVTYDLSTSTVLFFYWGQGTQVTVSS

SEQ ID NO: 21460 - protein, 117 aa, Artificial Sequence
  Chemically Synthesized
QVQLQESGGGLVQAGGSLRLSCAASGSIFYGQRMGWYRQAPGKERELVASIADGARPYADSVKGRFTISRDNAKNTVYLQMNSLKPEDTAVYYCAVYVREDTKFGYWGQGTQVTVSS

SEQ ID NO: 21461 - protein, 109 aa, Artificial Sequence
  Chemically Synthesized
QVQLQESGGGLVQAGGSLRLSCAASGNIFFADMGWYRQAPGKERELYADSVKGRFTISRDNAKNTVYLQMNSLKPEDTAVYYCAATSTSEDRFVYYPYWGQGTQVTVSS

SEQ ID NO: 21462 - protein, 121 aa, Artificial Sequence
  Chemically Synthesized
QVQLQESGGGLVQAGGSLRLSCAASGNISRQFFMGWYRQAPGKEREFVAGITEVVLPYADSVKGRFTISRDNAKNTVYLQMNSLKPEDTAVYYCAAPRTDQADYRLDHKYWGQGTQVTVSS

SEQ ID NO: 21463 - protein, 118 aa, Artificial Sequence
  Chemically Synthesized
QVQLQESGGGLVQAGGSLRLSCAASGTISYGWIMGWYRQAPGKEREFVAAISTGGSTYYADSVKGRFTISRDNAKNTVYLQMNSLKPEDTAVYYCAAVDYYSQDLVYWGQGTQVTVSS

SEQ ID NO: 21464 - protein, 118 aa, Artificial Sequence
  Chemically Synthesized
QVQLQESGGGLVQAGGSLRLSCAASGSISSLRYMGWYRQAPGKERELVAAIDSGSSTNYADSVKGRFTISRDNAKNTVYLQMNSLKPEDTAVYYCAVDLYQYRYLTYWGQGTQVTVSS

SEQ ID NO: 21465 - protein, 118 aa, Artificial Sequence
  Chemically Synthesized
QVQLQESGGGLVQAGGSLRLSCAASGNIFTPSCMGWYRQAPGKERELVAGINPGSTTNYADSVKGRFTISRDNAKNTVYLQMNSLKPEDTAVYYCAVDDAQQTGFLYWGQGTQVTVSS

SEQ ID NO: 21466 - protein, 118 aa, Artificial Sequence
  Chemically Synthesized
QVQLQESGGGLVQAGGSLRLSCAASGNISDGGFMGWYRQAPGKEREFVASISYGGSTYYADSVKGRFTISRDNAKNTVYLQMNSLKPEDTAVYYCAVDLATRTSHPYWGQGTQVTVSS

SEQ ID NO: 21467 - protein, 117 aa, Artificial Sequence
  Chemically Synthesized
QVQLQESGGGLVQAGGSLRLSCAASGNISEYGPMGWYRQAPGKERELVATIGAGASTNYADSVKGRFTISRDNAKNTVYLQMNSLKPEDTAVYYCAAWVVTLVTMYWGQGTQVTVSS

SEQ ID NO: 21468 - protein, 118 aa, Artificial Sequence
  Chemically Synthesized
QVQLQESGGGLVQAGGSLRLSCAASGTIFQIFAMGWYRQAPGKERELVATIGNGGNTNYADSVKGRFTISRDNAKNTVYLQMNSLKPEDTAVYYCAGLPVFLPYSYYWGQGTQVTVSS

SEQ ID NO: 21469 - protein, 120 aa, Artificial Sequence
  Chemically Synthesized
QVQLQESGGGLVQAGGSLRLSCAASGNISLSTMGWYRQAPGKERELVATIARGTTYYADSVKGRFTISRDNAKNTVYLQMNSLKPEDTAVYYCAADPGPYPKQNAWHYYWGQGTQVTVSS

SEQ ID NO: 21470 - protein, 118 aa, Artificial Sequence
  Chemically Synthesized
QVQLQESGGGLVQAGGSLRLSCAASGNISRWDSMGWYRQAPGKEREFVATISYGTNTYYADSVKGRFTISRDNAKNTVYLQMNSLKPEDTAVYYCAVRVYYPIHFRYWGQGTQVTVSS

SEQ ID NO: 21471 - protein, 111 aa, Artificial Sequence
  Chemically Synthesized
QVQLQESGGGLVQAGGSLRLSCAASGNISRPYYMGWYRQAPGKEREFVAGIAYGGNTYYADSVKGRFTISRDNAKNTVYLQMNSLKPEDTAVYYCAWHDYWGQGTQVTVSS

SEQ ID NO: 21472 - protein, 122 aa, Artificial Sequence
  Chemically Synthesized
QVQLQESGGGLVQAGGSLRLSCAASGNISAVLYMGWYRQAPGKEREFVASIDAGGTTYYADSVKGRFTISRDNAKNTVYLQMNSLKPEDTAVYYCAAESYDAYIDGVQHSYWGQGTQVTVSS

SEQ ID NO: 21473 - protein, 110 aa, Artificial Sequence
  Chemically Synthesized
QVQLQESGGGLVQAGGSLRLSCAASGYISTAYDMGWYRQAPGKEREFVAAIGVGGNTNYADSVKGRFTISRDNAKNTVYLQMNSLKPEDTAVYYCAAWYWGQGTQVTVSS

SEQ ID NO: 21474 - protein, 122 aa, Artificial Sequence
  Chemically Synthesized
QVQLQESGGGLVQAGGSLRLSCAASGTIFTWLVMGWYRQAPGKERELVASIDPGTNTYYADSVKGRFTISRDNAKNTVYLQMNSLKPEDTAVYYCAARYVAGYTVGAYHYYWGQGTQVTVSS

SEQ ID NO: 21475 - protein, 118 aa, Artificial Sequence
  Chemically Synthesized
QVQLQESGGGLVQAGGSLRLSCAASGYISYRAIMGWYRQAPGKERELVAAINAGTTTYYADSVKGRFTISRDNAKNTVYLQMNSLKPEDTAVYYCAVRDYYLYKYSYWGQGTQVTVSS

SEQ ID NO: 21476 - protein, 126 aa, Artificial Sequence
  Chemically Synthesized
QVQLQESGGGLVQAGGSLRLSCAASGTISRDWYMGWYRQAPGKEREFVAAIDTGSTTNYADSVKGRFTISRDNAKNTVYLQMNSLKPEDTAVYYCAVDYWDEDDGPVLLKTRCIYWGQGTQVTVSS

SEQ ID NO: 21477 - protein, 126 aa, Artificial Sequence
  Chemically Synthesized
QVQLQESGGGLVQAGGSLRLSCAASGNIFRYDNMGWYRQAPGKEREFVATITYGSNTYYADSVKGRFTISRDNAKNTVYLQMNSLKPEDTAVYYCAAYFPYRSYDNSADTSSHSYWGQGTQVTVSS

SEQ ID NO: 21478 - protein, 118 aa, Artificial Sequence
  Chemically Synthesized
QVQLQESGGGLVQAGGSLRLSCAASGYIFDGRLMGWYRQAPGKEREFVAAINTGTSTNYADSVKGRFTISRDNAKNTVYLQMNSLKPEDTAVYYCAVGRTYPRYYSYWGQGTQVTVSS

SEQ ID NO: 21479 - protein, 125 aa, Artificial Sequence
  Chemically Synthesized
QVQLQESGGGLVQAGGSLRLSCAASGYIFDYYHMGWYRQAPGKEREFVASINDGANTYYADSVKGRFTISRDNAKNTVYLQMNSLKPEDTAVYYCAATWFRTIRVLKLTVVTMYWGQGTQVTVSS

SEQ ID NO: 21480 - protein, 122 aa, Artificial Sequence
  Chemically Synthesized
QVQLQESGGGLVQAGGSLRLSCAASGSIFGHGEMGWYRQAPGKEREFVAAISYGAITYYADSVKGRFTISRDNAKNTVYLQMNSLKPEDTAVYYCAAADAVFVYTSDDYLYWGQGTQVTVSS

SEQ ID NO: 21481 - protein, 118 aa, Artificial Sequence
  Chemically Synthesized
QVQLQESGGGLVQAGGSLRLSCAASGNISDSSTMGWYRQAPGKERELVAGIAYGANTYYADSVKGRFTISRDNAKNTVYLQMNSLKPEDTAVYYCAAYVPGNQYLSYWGQGTQVTVSS

SEQ ID NO: 21482 - protein, 113 aa, Artificial Sequence
  Chemically Synthesized
QVQLQESGGGLVQAGGSLRLSCAASGLFFWLTMGWYRQAPGKEREFVATISYGSSTYYADSVKGRFTISRDNAKNTVYLQMNSLKPEDTAVYYCAATGGLPYWGQGTQVTVSS

SEQ ID NO: 21483 - protein, 126 aa, Artificial Sequence
  Chemically Synthesized
QVQLQESGGGLVQAGGSLRLSCAASGYISRLTGMGWYRQAPGKERELVAAISDGASTYYADSVKGRFTISRDNAKNTVYLQMNSLKPEDTAVYYCAAITIFSPFSTRSERRYHAYWGQGTQVTVSS

SEQ ID NO: 21484 - protein, 119 aa, Artificial Sequence
  Chemically Synthesized
QVQLQESGGGLVQAGGSLRLSCAASGTISRFTMGWYRQAPGKEREFVASITYGGTTYYADSVKGRFTISRDNAKNTVYLQMNSLKPEDTAVYYCAVHSEYRVARYFSYWGQGTQVTVSS

SEQ ID NO: 21485 - protein, 117 aa, Artificial Sequence
  Chemically Synthesized
QVQLQESGGGLVQAGGSLRLSCAASGTILLTFMGWYRQAPGKEREFVASIDGGAITNYADSVKGRFTISRDNAKNTVYLQMNSLKPEDTAVYYCAVYGGEQSDLHYWGQGTQVTVSS

SEQ ID NO: 21486 - protein, 114 aa, Artificial Sequence
  Chemically Synthesized
QVQLQESGGGLVQAGGSLRLSCAASGSIDMGWYRQAPGKEREFVATIARGGTTYYADSVKGRFTISRDNAKNTVYLQMNSLKPEDTAVYYCAVDRYPYDPYQYWGQGTQVTVSS

SEQ ID NO: 21487 - protein, 121 aa, Artificial Sequence
  Chemically Synthesized
QVQLQESGGGLVQAGGSLRLSCAASGTISAYYGMGWYRQAPGKERELVATIASGGTTNYADSVKGRFTISRDNAKNTVYLQMNSLKPEDTAVYYCAATDTYRTPDSTTMYWGQGTQVTVSS

SEQ ID NO: 21488 - protein, 118 aa, Artificial Sequence
  Chemically Synthesized
QVQLQESGGGLVQAGGSLRLSCAASGNISWSAPMGWYRQAPGKERELVATITIGGSTYYADSVKGRFTISRDNAKNTVYLQMNSLKPEDTAVYYCAASVDVQAHLIYWGQGTQVTVSS

SEQ ID NO: 21489 - protein, 118 aa, Artificial Sequence
  Chemically Synthesized
QVQLQESGGGLVQAGGSLRLSCAASGTIFADLFMGWYRQAPGKEREFVATIGRGTNTYYADSVKGRFTISRDNAKNTVYLQMNSLKPEDTAVYYCAAYTDDFYRHDYWGQGTQVTVSS

SEQ ID NO: 21490 - protein, 122 aa, Artificial Sequence
  Chemically Synthesized
QVQLQESGGGLVQAGGSLRLSCAASGYISYSPIMGWYRQAPGKERELVATIGTGGITYYADSVKGRFTISRDNAKNTVYLQMNSLKPEDTAVYYCAVNVDADYGQDVGHHYWGQGTQVTVSS

SEQ ID NO: 21491 - protein, 122 aa, Artificial Sequence
  Chemically Synthesized
QVQLQESGGGLVQAGGSLRLSCAASGTIFYSDSMGWYRQAPGKERELVAGIDVGAITYYADSVKGRFTISRDNAKNTVYLQMNSLKPEDTAVYYCAAFDVELVYTGQYYWYWGQGTQVTVSS

SEQ ID NO: 21492 - protein, 117 aa, Artificial Sequence
  Chemically Synthesized
QVQLQESGGGLVQAGGSLRLSCAASGNISTPYWMGWYRQAPGKERELVAAIDYGASTYYADSVKGRFTISRDNAKNTVYLQMNSLKPEDTAVYYCAVPHWYIDYFYWGQGTQVTVSS

SEQ ID NO: 21493 - protein, 122 aa, Artificial Sequence
  Chemically Synthesized
QVQLQESGGGLVQAGGSLRLSCAASGTIFSRDNMGWYRQAPGKEREFVAGIADGTNTYYADSVKGRFTISRDNAKNTVYLQMNSLKPEDTAVYYCAVWDYHRGGGDVAYTYWGQGTQVTVSS

SEQ ID NO: 21494 - protein, 125 aa, Artificial Sequence
  Chemically Synthesized
QVQLQESGGGLVQAGGSLRLSCAASGNISGVVYMGWYRQAPGKERELVAGIDYGSSTYYADSVKGRFTISRDNAKNTVYLQMNSLKPEDTAVYYCAAGDALDSNCVSTWFRPYYWGQGTQVTVSS

SEQ ID NO: 21495 - protein, 118 aa, Artificial Sequence
  Chemically Synthesized
QVQLQESGGGLVQAGGSLRLSCAASGTIFRTDIMGWYRQAPGKEREFVASINLGASTYYADSVKGRFTISRDNAKNTVYLQMNSLKPEDTAVYYCAVGAYANDYYFYWGQGTQVTVSS

SEQ ID NO: 21496 - protein, 116 aa, Artificial Sequence
  Chemically Synthesized
QVQLQESGGGLVQAGGSLRLSCAASGTILKTMGWYRQAPGKEREFVATIAYGANTYYADSVKGRFTISRDNAKNTVYLQMNSLKPEDTAVYYCAAYLRYYHNLNYWGQGTQVTVSS

SEQ ID NO: 21497 - protein, 126 aa, Artificial Sequence
  Chemically Synthesized
QVQLQESGGGLVQAGGSLRLSCAASGTIFPDLGMGWYRQAPGKERELVATISSGTTTYYADSVKGRFTISRDNAKNTVYLQMNSLKPEDTAVYYCAVDRTPRDGSNPWGRTGYYYWGQGTQVTVSS

SEQ ID NO: 21498 - protein, 126 aa, Artificial Sequence
  Chemically Synthesized
QVQLQESGGGLVQAGGSLRLSCAASGNISRRQSMGWYRQAPGKERELVAGITRGSNTYYADSVKGRFTISRDNAKNTVYLQMNSLKPEDTAVYYCAAYYNGFRRDHVDLTFLHRYWGQGTQVTVSS

SEQ ID NO: 21499 - protein, 126 aa, Artificial Sequence
  Chemically Synthesized
QVQLQESGGGLVQAGGSLRLSCAASGTIFRNWRMGWYRQAPGKERELVATIAVGGITNYADSVKGRFTISRDNAKNTVYLQMNSLKPEDTAVYYCAAYVTSSEYRWWSNFVRFGYWGQGTQVTVSS

SEQ ID NO: 21500 - protein, 118 aa, Artificial Sequence
  Chemically Synthesized
QVQLQESGGGLVQAGGSLRLSCAASGNIFRADEMGWYRQAPGKEREFVAAIGSGGITYYADSVKGRFTISRDNAKNTVYLQMNSLKPEDTAVYYCAAPNYGYLWFGYWGQGTQVTVSS

SEQ ID NO: 21501 - protein, 117 aa, Artificial Sequence
  Chemically Synthesized
QVQLQESGGGLVQAGGSLRLSCAASGYISSSTMGWYRQAPGKERELVAGIDAGGNTYYADSVKGRFTISRDNAKNTVYLQMNSLKPEDTAVYYCAAPYGDYYYHGYWGQGTQVTVSS

SEQ ID NO: 21502 - protein, 118 aa, Artificial Sequence
  Chemically Synthesized
QVQLQESGGGLVQAGGSLRLSCAASGNIFLYTSMGWYRQAPGKERELVATIATGSTTYYADSVKGRFTISRDNAKNTVYLQMNSLKPEDTAVYYCAVWLYDRYTLQYWGQGTQVTVSS

SEQ ID NO: 21503 - protein, 118 aa, Artificial Sequence
  Chemically Synthesized
QVQLQESGGGLVQAGGSLRLSCAASGNIFGDVAMGWYRQAPGKERELVAAIDYGTTTYYADSVKGRFTISRDNAKNTVYLQMNSLKPEDTAVYYCAVTAGLEPELYYWGQGTQVTVSS

SEQ ID NO: 21504 - protein, 126 aa, Artificial Sequence
  Chemically Synthesized
QVQLQESGGGLVQAGGSLRLSCAASGNISAIERMGWYRQAPGKERELVATIATGASTYYADSVKGRFTISRDNAKNTVYLQMNSLKPEDTAVYYCAVIDSKPEDPADYWLVDHGYWGQGTQVTVSS

SEQ ID NO: 21505 - protein, 122 aa, Artificial Sequence
  Chemically Synthesized
QVQLQESGGGLVQAGGSLRLSCAASGNISSTIYMGWYRQAPGKEREFVAGITYGGTTYYADSVKGRFTISRDNAKNTVYLQMNSLKPEDTAVYYCAVERYVWWGTWGWYNYWGQGTQVTVSS

SEQ ID NO: 21506 - protein, 117 aa, Artificial Sequence
  Chemically Synthesized
QVQLQESGGGLVQAGGSLRLSCAASGNIFGLYYMGWYRQAPGKERELVASLLPYADSVKGRFTISRDNAKNTVYLQMNSLKPEDTAVYYCAAYTEYTQYKSTVFGYWGQGTQVTVSS

SEQ ID NO: 21507 - protein, 117 aa, Artificial Sequence
  Chemically Synthesized
QVQLQESGGGLVQAGGSLRLSCAASGNIFDYWLMGWYRQAPGKEREFVAGIDSGSITYYADSVKGRFTISRDNAKNTVYLQMNSLKPEDTAVYYCAAYYYAGSYDYWGQGTQVTVSS

SEQ ID NO: 21508 - protein, 118 aa, Artificial Sequence
  Chemically Synthesized
QVQLQESGGGLVQAGGSLRLSCAASGSIFDASRMGWYRQAPGKEREFVAAIAAGSTTYYADSVKGRFTISRDNAKNTVYLQMNSLKPEDTAVYYCAVYYLGDYDLGYWGQGTQVTVSS

SEQ ID NO: 21509 - protein, 118 aa, Artificial Sequence
  Chemically Synthesized
QVQLQESGGGLVQAGGSLRLSCAASGTISYAPYMGWYRQAPGKEREFVAGIAPGAITYYADSVKGRFTISRDNAKNTVYLQMNSLKPEDTAVYYCAAFRFDDARYDYWGQGTQVTVSS

SEQ ID NO: 21510 - protein, 122 aa, Artificial Sequence
  Chemically Synthesized
QVQLQESGGGLVQAGGSLRLSCAASGTISGRTEMGWYRQAPGKERELVAGISQGSSTYYADSVKGRFTISRDNAKNTVYLQMNSLKPEDTAVYYCAVNPGFDYAGYDSHAYWGQGTQVTVSS

SEQ ID NO: 21511 - protein, 118 aa, Artificial Sequence
  Chemically Synthesized
QVQLQESGGGLVQAGGSLRLSCAASGNISYVPDMGWYRQAPGKERELVATIGPGGTTYYADSVKGRFTISRDNAKNTVYLQMNSLKPEDTAVYYCAVDAYIGRQYYYWGQGTQVTVSS

SEQ ID NO: 21512 - protein, 118 aa, Artificial Sequence
  Chemically Synthesized
QVQLQESGGGLVQAGGSLRLSCAASGNIFYLREMGWYRQAPGKERELVAGISHGSITNYADSVKGRFTISRDNAKNTVYLQMNSLKPEDTAVYYCAVDDSYYIPLVYWGQGTQVTVSS

SEQ ID NO: 21513 - protein, 118 aa, Artificial Sequence
  Chemically Synthesized
QVQLQESGGGLVQAGGSLRLSCAASGTISSLYYMGWYRQAPGKEREFVAGIGLGTTTYYADSVKGRFTISRDNAKNTVYLQMNSLKPEDTAVYYCAVYDDPGPTYPYWGQGTQVTVSS

SEQ ID NO: 21514 - protein, 118 aa, Artificial Sequence
  Chemically Synthesized
QVQLQESGGGLVQAGGSLRLSCAASGSISFRRDMGWYRQAPGKERELVAAIASGTTTYYADSVKGRFTISRDNAKNTVYLQMNSLKPEDTAVYYCAVKLSGPNVHYYWGQGTQVTVSS

SEQ ID NO: 21515 - protein, 118 aa, Artificial Sequence
  Chemically Synthesized
QVQLQESGGGLVQAGGSLRLSCAASGNIFAYSHMGWYRQAPGKERELVAAITWGTITYYADSVKGRFTISRDNAKNTVYLQMNSLKPEDTAVYYCAATDRDIFDFYYWGQGTQVTVSS

SEQ ID NO: 21516 - protein, 118 aa, Artificial Sequence
  Chemically Synthesized
QVQLQESGGGLVQAGGSLRLSCAASGNIFRTYPMGWYRQAPGKEREFVAGINDGASTYYADSVKGRFTISRDNAKNTVYLQMNSLKPEDTAVYYCAVIWGKLLRYRYWGQGTQVTVSS

SEQ ID NO: 21517 - protein, 118 aa, Artificial Sequence
  Chemically Synthesized
QVQLQESGGGLVQAGGSLRLSCAASGSIFWYRNMGWYRQAPGKERELVATISQGGTTNYADSVKGRFTISRDNAKNTVYLQMNSLKPEDTAVYYCAYLYYYYAKHEYWGQGTQVTVSS

SEQ ID NO: 21518 - protein, 122 aa, Artificial Sequence
  Chemically Synthesized
QVQLQESGGGLVQAGGSLRLSCAASGSIFRLVDMGWYRQAPGKERELVAAIDYGTTTYYADSVKGRFTISRDNAKNTVYLQMNSLKPEDTAVYYCAVYDTYPWGGRWRHIYWGQGTQVTVSS

SEQ ID NO: 21519 - protein, 122 aa, Artificial Sequence
  Chemically Synthesized
QVQLQESGGGLVQAGGSLRLSCAASGNISDYSYMGWYRQAPGKEREFVASIGDGSITNYADSVKGRFTISRDNAKNTVYLQMNSLKPEDTAVYYCAVRAADDDAWDYRHGYWGQGTQVTVSS

SEQ ID NO: 21520 - protein, 118 aa, Artificial Sequence
  Chemically Synthesized
QVQLQESGGGLVQAGGSLRLSCAASGNIFAYLPMGWYRQAPGKERELVAGISPGANTYYADSVKGRFTISRDNAKNTVYLQMNSLKPEDTAVYYCAVLYYIRAYHIYWGQGTQVTVSS

SEQ ID NO: 21521 - protein, 117 aa, Artificial Sequence
  Chemically Synthesized
QVQLQESGGGLVQAGGSLRLSCAASGSISHRQDMGWYRQAPGKERELVATIVVVVVPYADSVKGRFTISRDNAKNTVYLQMNSLKPEDTAVYYCAVYSGYYVTFDYWGQGTQVTVSS

SEQ ID NO: 21522 - protein, 119 aa, Artificial Sequence
  Chemically Synthesized
QVQLQESGGGLVQAGGSLRLSCAASGSISVKTAMGWYRQAPGKEREFVATISGDGGTTNYADSVKGRFTISRDNAKNTVYLQMNSLKPEDTAVYYCAADNALYSDHVYWGQGTQVTVSS

SEQ ID NO: 21523 - protein, 125 aa, Artificial Sequence
  Chemically Synthesized
QVQLQESGGGLVQAGGSLRLSCAASGNISPITYMGWYRQAPGKERELVASIMTVLLPYADSVKGRFTISRDNAKNTVYLQMNSLKPEDTAVYYCAARWSEQDNVVPPGYYYHWYWGQGTQVTVSS

SEQ ID NO: 21524 - protein, 118 aa, Artificial Sequence
  Chemically Synthesized
QVQLQESGGGLVQAGGSLRLSCAASGYISFQYVMGWYRQAPGKEREFVATINTGGSTNYADSVKGRFTISRDNAKNTVYLQMNSLKPEDTAVYYCAARYTDDYLHGYWGQGTQVTVSS

SEQ ID NO: 21525 - protein, 122 aa, Artificial Sequence
  Chemically Synthesized
QVQLQESGGGLVQAGGSLRLSCAASGSISTADNMGWYRQAPGKERELVASITSGATTNYADSVKGRFTISRDNAKNTVYLQMNSLKPEDTAVYYCAADDTDPDVARDVHQYWGQGTQVTVSS

SEQ ID NO: 21526 - protein, 117 aa, Artificial Sequence
  Chemically Synthesized
QVQLQESGGGLVQAGGSLRLSCAASGYIFTQQLMGWYRQAPGKEREFVAGIAYGTTTYYADSVKGRFTISRDNAKNTVYLQMNSLKPEDTAVYYCAVHGAKVTFDYWGQGTQVTVSS

SEQ ID NO: 21527 - protein, 118 aa, Artificial Sequence
  Chemically Synthesized
QVQLQESGGGLVQAGGSLRLSCAASGTIFDYRYMGWYRQAPGKERELVASIGVGSNTNYADSVKGRFTISRDNAKNTVYLQMNSLKPEDTAVYYCAAWATNPSPFFYWGQGTQVTVSS

SEQ ID NO: 21528 - protein, 115 aa, Artificial Sequence
  Chemically Synthesized
QVQLQESGGGLVQAGGSLRLSCAASGNISEQPYMGWYRQAPGKEREFVAGIGQGTSTNYADSVKGRFTISRDNAKNTVYLQMNSLKPEDTAVYYCAIHAVRHYYWGQGTQVTVSS

SEQ ID NO: 21529 - protein, 113 aa, Artificial Sequence
  Chemically Synthesized
QVQLQESGGGLVQAGGSLRLSCAASGYIFLSTMGWYRQAPGKERELVASINSGGITYYADSVKGRFTISRDNAKNTVYLQMNSLKPEDTAVYYCARSATLIYWGQGTQVTVSS

SEQ ID NO: 21530 - protein, 118 aa, Artificial Sequence
  Chemically Synthesized
QVQLQESGGGLVQAGGSLRLSCAASGSIFDDRGMGWYRQAPGKERELVAAIGYGSNTNYADSVKGRFTISRDNAKNTVYLQMNSLKPEDTAVYYCAARATYYDYHDYWGQGTQVTVSS

SEQ ID NO: 21531 - protein, 118 aa, Artificial Sequence
  Chemically Synthesized
QVQLQESGGGLVQAGGSLRLSCAASGTIFRPYIMGWYRQAPGKEREFVAAIDRGSITNYADSVKGRFTISRDNAKNTVYLQMNSLKPEDTAVYYCAVQLYDSDYHSYWGQGTQVTVSS

SEQ ID NO: 21532 - protein, 124 aa, Artificial Sequence
  Chemically Synthesized
QVQLQESGGGLVQAGGSLRLSCAASGTISSLTMGWYRQAPGKERELVAGISVGTITYADSVKGRFTISRDNAKNTVYLQMNSLKPEDTAVYYCAVDARYDLWTVDYDLLWFRYWGQGTQVTVSS

SEQ ID NO: 21533 - protein, 122 aa, Artificial Sequence
  Chemically Synthesized
QVQLQESGGGLVQAGGSLRLSCAASGNISYYSYMGWYRQAPGKERELVAAIGPGSTTYYADSVKGRFTISRDNAKNTVYLQMNSLKPEDTAVYYCAVTYYTYDYSSAYYDYWGQGTQVTVSS

SEQ ID NO: 21534 - protein, 122 aa, Artificial Sequence
  Chemically Synthesized
QVQLQESGGGLVQAGGSLRLSCAASGNIFEGVVMGWYRQAPGKERELVASISRGTSTYYADSVKGRFTISRDNAKNTVYLQMNSLKPEDTAVYYCAARRVDRRVRRDYHYYWGQGTQVTVSS

SEQ ID NO: 21535 - protein, 118 aa, Artificial Sequence
  Chemically Synthesized
QVQLQESGGGLVQAGGSLRLSCAASGNIFGFYLMGWYRQAPGKERELVATIGYGTSTYYADSVKGRFTISRDNAKNTVYLQMNSLKPEDTAVYYCAVARARWAWLSYWGQGTQVTVSS

SEQ ID NO: 21536 - protein, 118 aa, Artificial Sequence
  Chemically Synthesized
QVQLQESGGGLVQAGGSLRLSCAASGTIFQSAVMGWYRQAPGKEREFVASIDSGATTNYADSVKGRFTISRDNAKNTVYLQMNSLKPEDTAVYYCAVYDWDEDEHYYWGQGTQVTVSS

SEQ ID NO: 21537 - protein, 118 aa, Artificial Sequence
  Chemically Synthesized
QVQLQESGGGLVQAGGSLRLSCAASGTISDLVIMGWYRQAPGKEREFVASIAVGANTNYADSVKGRFTISRDNAKNTVYLQMNSLKPEDTAVYYCAAYRQQDSTLQYWGQGTQVTVSS

SEQ ID NO: 21538 - protein, 122 aa, Artificial Sequence
  Chemically Synthesized
QVQLQESGGGLVQAGGSLRLSCAASGNIFNVGLMGWYRQAPGKEREFVASITHGGNTYYADSVKGRFTISRDNAKNTVYLQMNSLKPEDTAVYYCAVYPYAYRLDNGPYRYWGQGTQVTVSS

SEQ ID NO: 21539 - protein, 117 aa, Artificial Sequence
  Chemically Synthesized
QVQLQESGGGLVQAGGSLRLSCAASGSISSWDPMGWYRQAPGKERELLPVLLLVLLPYADSVKGRFTISRDNAKNTVYLQMNSLKPEDTAVYYCAASAPGWERLPYWGQGTQVTVSS

SEQ ID NO: 21540 - protein, 118 aa, Artificial Sequence
  Chemically Synthesized
QVQLQESGGGLVQAGGSLRLSCAASGNIFRGYWMGWYRQAPGKEREFVATIAFGASTYYADSVKGRFTISRDNAKNTVYLQMNSLKPEDTAVYYCAVGGGRRGYHGYWGQGTQVTVSS

SEQ ID NO: 21541 - protein, 120 aa, Artificial Sequence
  Chemically Synthesized
QVQLQESGGGLVQAGGSLRLSCAASGSISVYGSMGWYRQAPGKEREFVAGITIGGSTYYADSVKGRFTISRDNAKNTVYLQMNSLKPEDTAVYYCAVVYAHRTGAVHYYWGQGTQVTVSS

SEQ ID NO: 21542 - protein, 122 aa, Artificial Sequence
  Chemically Synthesized
QVQLQESGGGLVQAGGSLRLSCAASGTISVDDVMGWYRQAPGKEREFVASINYGSNTNYADSVKGRFTISRDNAKNTVYLQMNSLKPEDTAVYYCAVDTFVWYRYIQGLDYWGQGTQVTVSS

SEQ ID NO: 21543 - protein, 120 aa, Artificial Sequence
  Chemically Synthesized
QVQLQESGGGLVQAGGSLRLSCAASGSLRQNMGWYRQAPGKEREFVAAISNGATTYYADSVKGRFTISRDNAKNTVYLQMNSLKPEDTAVYYCAVSAAGPYTRDGKHVYWGQGTQVTVSS

SEQ ID NO: 21544 - protein, 118 aa, Artificial Sequence
  Chemically Synthesized
QVQLQESGGGLVQAGGSLRLSCAASGTISYTKLMGWYRQAPGKERELVAGIDWGGSTYYADSVKGRFTISRDNAKNTVYLQMNSLKPEDTAVYYCAVLYFYPLGHDYWGQGTQVTVSS

SEQ ID NO: 21545 - protein, 118 aa, Artificial Sequence
  Chemically Synthesized
QVQLQESGGGLVQAGGSLRLSCAASGYISYYHYMGWYRQAPGKEREFVAGISPGSNTYYADSVKGRFTISRDNAKNTVYLQMNSLKPEDTAVYYCAVFAGWLSRHWYWGQGTQVTVSS

SEQ ID NO: 21546 - protein, 117 aa, Artificial Sequence
  Chemically Synthesized
QVQLQESGGGLVQAGGSLRLSCAASGSISYTTDMGWYRQAPGKERELVATITLVLVPYADSVKGRFTISRDNAKNTVYLQMNSLKPEDTAVYYCAAYPPDLVYFAYWGQGTQVTVSS

SEQ ID NO: 21547 - protein, 118 aa, Artificial Sequence
  Chemically Synthesized
QVQLQESGGGLVQAGGSLRLSCAASGNIFWDSTMGWYRQAPGKEREFVAGITVGGTTNYADSVKGRFTISRDNAKNTVYLQMNSLKPEDTAVYYCAVGLPYVAYFYYWGQGTQVTVSS

SEQ ID NO: 21548 - protein, 118 aa, Artificial Sequence
  Chemically Synthesized
QVQLQESGGGLVQAGGSLRLSCAASGYIFYSYYMGWYRQAPGKERELVATINYGANTYYADSVKGRFTISRDNAKNTVYLQMNSLKPEDTAVYYCAAYRGQDDALVYWGQGTQVTVSS

SEQ ID NO: 21549 - protein, 118 aa, Artificial Sequence
  Chemically Synthesized
QVQLQESGGGLVQAGGSLRLSCAASGYISRYRGMGWYRQAPGKEREFVASITYGGSTYYADSVKGRFTISRDNAKNTVYLQMNSLKPEDTAVYYCAVYAYLSNYYAYWGQGTQVTVSS

SEQ ID NO: 21550 - protein, 112 aa, Artificial Sequence
  Chemically Synthesized
QVQLQESGGGLVQAGGSLRLSCAASGSIFDAPFMGWYRQAPGKERELVAAINGGGSTYYADSVKGRFTISRDNAKNTVYLQMNSLKPEDTAVYYCAVDRQYWGQGTQVTVSS

SEQ ID NO: 21551 - protein, 123 aa, Artificial Sequence
  Chemically Synthesized
QVQLQESGGGLVQAGGSLRLSCAASGYISATYLMGWYRQAPGKERELVASIGYGTSTNYADSVKGRFTISRDNAKNTVYLQMNSLKPEDTAVYYCAARGSDDPYGSSNLLYYWGQGTQVTVSS

SEQ ID NO: 21552 - protein, 122 aa, Artificial Sequence
  Chemically Synthesized
QVQLQESGGGLVQAGGSLRLSCAASGSISHYYAMGWYRQAPGKERELVAAITEGTTTYYADSVKGRFTISRDNAKNTVYLQMNSLKPEDTAVYYCAVYALDGDYTRERHVYWGQGTQVTVSS

SEQ ID NO: 21553 - protein, 122 aa, Artificial Sequence
  Chemically Synthesized
QVQLQESGGGLVQAGGSLRLSCAASGSISGWTGMGWYRQAPGKERELVATIASGSSTYYADSVKGRFTISRDNAKNTVYLQMNSLKPEDTAVYYCAVLQYSTDWSYYRHDYWGQGTQVTVSS

SEQ ID NO: 21554 - protein, 126 aa, Artificial Sequence
  Chemically Synthesized
QVQLQESGGGLVQAGGSLRLSCAASGYISSYYSMGWYRQAPGKEREFVASIGYGGNTNYADSVKGRFTISRDNAKNTVYLQMNSLKPEDTAVYYCAVVYWLEYRYGTDYGSLLWYWGQGTQVTVSS

SEQ ID NO: 21555 - protein, 122 aa, Artificial Sequence
  Chemically Synthesized
QVQLQESGGGLVQAGGSLRLSCAASGNIFYSYTMGWYRQAPGKERELVAAISQGATTNYADSVKGRFTISRDNAKNTVYLQMNSLKPEDTAVYYCAVATRYFVYGPYYLAYWGQGTQVTVSS

SEQ ID NO: 21556 - protein, 126 aa, Artificial Sequence
  Chemically Synthesized
QVQLQESGGGLVQAGGSLRLSCAASGNISDYVIMGWYRQAPGKERELVAAIAYGGTTNYADSVKGRFTISRDNAKNTVYLQMNSLKPEDTAVYYCAAADGLEDQPHWYTYIVHSYWGQGTQVTVSS

SEQ ID NO: 21557 - protein, 117 aa, Artificial Sequence
  Chemically Synthesized
QVQLQESGGGLVQAGGSLRLSCAASGNISVRYSMGWYRQAPGKERELVAAIARGSNTNYADSVKGRFTISRDNAKNTVYLQMNSLKPEDTAVYYCAVSWGDGTSLYWGQGTQVTVSS

SEQ ID NO: 21558 - protein, 118 aa, Artificial Sequence
  Chemically Synthesized
QVQLQESGGGLVQAGGSLRLSCAASGNISGGTLMGWYRQAPGKERELVAAISEGANTYYADSVKGRFTISRDNAKNTVYLQMNSLKPEDTAVYYCAADDITPFEYSYWGQGTQVTVSS

SEQ ID NO: 21559 - protein, 117 aa, Artificial Sequence
  Chemically Synthesized
QVQLQESGGGLVQAGGSLRLSCAASGSISVDGAMGWYRQAPGKEREFVASIGAGTNTNYADSVKGRFTISRDNAKNTVYLQMNSLKPEDTAVYYCAVSTLVNVRLYWGQGTQVTVSS

SEQ ID NO: 21560 - protein, 112 aa, Artificial Sequence
  Chemically Synthesized
QVQLQESGGGLVQAGGSLRLSCAASGYIFVPSMGWYRQAPGKERELVATISNGGNTNYADSVKGRFTISRDNAKNTVYLQMNSLKPEDTAVYYCAAGRLSYWGQGTQVTVSS

SEQ ID NO: 21561 - protein, 118 aa, Artificial Sequence
  Chemically Synthesized
QVQLQESGGGLVQAGGSLRLSCAASGTIFPYSYMGWYRQAPGKEREFVAAINVGSNTYYADSVKGRFTISRDNAKNTVYLQMNSLKPEDTAVYYCAVDTQLSDALPYWGQGTQVTVSS

SEQ ID NO: 21562 - protein, 118 aa, Artificial Sequence
  Chemically Synthesized
QVQLQESGGGLVQAGGSLRLSCAASGTIFPPPVMGWYRQAPGKEREFVAGINWGANTNYADSVKGRFTISRDNAKNTVYLQMNSLKPEDTAVYYCAATAHYARRHSYWGQGTQVTVSS

SEQ ID NO: 21563 - protein, 118 aa, Artificial Sequence
  Chemically Synthesized
QVQLQESGGGLVQAGGSLRLSCAASGTIFTYKDMGWYRQAPGKERELVAAIAYGGNTNYADSVKGRFTISRDNAKNTVYLQMNSLKPEDTAVYYCAVSRWRSWYLRYWGQGTQVTVSS

SEQ ID NO: 21564 - protein, 116 aa, Artificial Sequence
  Chemically Synthesized
QVQLQESGGGLVQAGGSLRLSCAASGNISTYTRMGWYRQAPGKEREFVATIAVVLVPYADSVKGRFTISRDNAKNTVYLQMNSLKPEDTAVYYCAGFFHQTAHYYWGQGTQVTVSS

SEQ ID NO: 21565 - protein, 117 aa, Artificial Sequence
  Chemically Synthesized
QVQLQESGGGLVQAGGSLRLSCAASGSIFALMMGWYRQAPGKEREFVAGIAYGSNTNYADSVKGRFTISRDNAKNTVYLQMNSLKPEDTAVYYCAAHPVATDNHPYWGQGTQVTVSS

SEQ ID NO: 21566 - protein, 122 aa, Artificial Sequence
  Chemically Synthesized
QVQLQESGGGLVQAGGSLRLSCAASGTISALRVMGWYRQAPGKERELVATISDGTSTNYADSVKGRFTISRDNAKNTVYLQMNSLKPEDTAVYYCAAVYYTERYDPWWYLYWGQGTQVTVSS

SEQ ID NO: 21567 - protein, 115 aa, Artificial Sequence
  Chemically Synthesized
QVQLQESGGGLVQAGGSLRLSCAASGTISDAYYMGWYRQAPGKEREPYADSVKGRFTISRDNAKNTVYLQMNSLKPEDTAVYYCAARSDYTGYHFGYYYDILWYWGQGTQVTVSS

SEQ ID NO: 21568 - protein, 118 aa, Artificial Sequence
  Chemically Synthesized
QVQLQESGGGLVQAGGSLRLSCAASGTISPTHAMGWYRQAPGKEREFVAGIGRGANTNYADSVKGRFTISRDNAKNTVYLQMNSLKPEDTAVYYCAAEPRVVVQLGYWGQGTQVTVSS

SEQ ID NO: 21569 - protein, 115 aa, Artificial Sequence
  Chemically Synthesized
QVQLQESGGGLVQAGGSLRLSCAASGNISRGANMGWYRQAPGKERELVASIDDGGTTYYADSVKGRFTISRDNAKNTVYLQMNSLKPEDTAVYYCAVDGDDLYYWGQGTQVTVSS

SEQ ID NO: 21570 - protein, 117 aa, Artificial Sequence
  Chemically Synthesized
QVQLQESGGGLVQAGGSLRLSCAASGSIFGYYYMGWYRQAPGKERELVASIAYGGSTNYADSVKGRFTISRDNAKNTVYLQMNSLKPEDTAVYYCAVSLPFSVSMYWGQGTQVTVSS

SEQ ID NO: 21571 - protein, 114 aa, Artificial Sequence
  Chemically Synthesized
QVQLQESGGGLVQAGGSLRLSCAASGSIFPEDVMGWYRQAPGKEREFVAAINYGGSTYYADSVKGRFTISRDNAKNTVYLQMNSLKPEDTAVYYCAATTRFIYWGQGTQVTVSS

SEQ ID NO: 21572 - protein, 118 aa, Artificial Sequence
  Chemically Synthesized
QVQLQESGGGLVQAGGSLRLSCAASGSISFSRRMGWYRQAPGKEREFVAGINYGSTTNYADSVKGRFTISRDNAKNTVYLQMNSLKPEDTAVYYCAARNLLFRDLDYWGQGTQVTVSS

SEQ ID NO: 21573 - protein, 118 aa, Artificial Sequence
  Chemically Synthesized
QVQLQESGGGLVQAGGSLRLSCAASGNISYIGGMGWYRQAPGKERELVATIDDGASTNYADSVKGRFTISRDNAKNTVYLQMNSLKPEDTAVYYCAVGAWYDQDHGYWGQGTQVTVSS

SEQ ID NO: 21574 - protein, 121 aa, Artificial Sequence
  Chemically Synthesized
QVQLQESGGGLVQAGGSLRLSCAASGSISDGSSMGWYRQAPGKERELVATIGVGASTYYADSVKGRFTISRDNAKNTVYLQMNSLKPEDTAVYYCAVLAPFRVDDTDPMYWGQGTQVTVSS

SEQ ID NO: 21575 - protein, 118 aa, Artificial Sequence
  Chemically Synthesized
QVQLQESGGGLVQAGGSLRLSCAASGYISRFRYMGWYRQAPGKERELVAGISFGTSTYYADSVKGRFTISRDNAKNTVYLQMNSLKPEDTAVYYCAVRRARGGYYYYWGQGTQVTVSS

SEQ ID NO: 21576 - protein, 118 aa, Artificial Sequence
  Chemically Synthesized
QVQLQESGGGLVQAGGSLRLSCAASGYISYRSLMGWYRQAPGKEREFVAAIDRGSNTNYADSVKGRFTISRDNAKNTVYLQMNSLKPEDTAVYYCAVRYVYKHWYTYWGQGTQVTVSS

SEQ ID NO: 21577 - protein, 117 aa, Artificial Sequence
  Chemically Synthesized
QVQLQESGGGLVQAGGSLRLSCAASGTIFNPETMGWYRQAPGKEREFVATIDSVVVPYADSVKGRFTISRDNAKNTVYLQMNSLKPEDTAVYYCAVHDSHVLWFYYWGQGTQVTVSS

SEQ ID NO: 21578 - protein, 118 aa, Artificial Sequence
  Chemically Synthesized
QVQLQESGGGLVQAGGSLRLSCAASGSISPHPPMGWYRQAPGKEREFVASIDPGANTYYADSVKGRFTISRDNAKNTVYLQMNSLKPEDTAVYYCAAEYASADYFDYWGQGTQVTVSS

SEQ ID NO: 21579 - protein, 126 aa, Artificial Sequence
  Chemically Synthesized
QVQLQESGGGLVQAGGSLRLSCAASGNIFDYVPMGWYRQAPGKEREFVAGINDGTSTYYADSVKGRFTISRDNAKNTVYLQMNSLKPEDTAVYYCAATAKALDSSTYFAAGRLAYWGQGTQVTVSS

SEQ ID NO: 21580 - protein, 118 aa, Artificial Sequence
  Chemically Synthesized
QVQLQESGGGLVQAGGSLRLSCAASGTISYAGYMGWYRQAPGKEREFVAAIDDGANTYYADSVKGRFTISRDNAKNTVYLQMNSLKPEDTAVYYCAVVYNLGTTLAYWGQGTQVTVSS

SEQ ID NO: 21581 - protein, 117 aa, Artificial Sequence
  Chemically Synthesized
QVQLQESGGGLVQAGGSLRLSCAASGTIFDRSMGWYRQAPGKEREFVATIAYGASTYYADSVKGRFTISRDNAKNTVYLQMNSLKPEDTAVYYCAAPYDILPDYAYWGQGTQVTVSS

SEQ ID NO: 21582 - protein, 116 aa, Artificial Sequence
  Chemically Synthesized
QVQLQESGGGLVQAGGSLRLSCAASGSISPGAMGWYRQAPGKERELVATIDDGGITYYADSVKGRFTISRDNAKNTVYLQMNSLKPEDTAVYYCAATYGGPRLDYWGQGTQVTVSS

SEQ ID NO: 21583 - protein, 117 aa, Artificial Sequence
  Chemically Synthesized
QVQLQESGGGLVQAGGSLRLSCAASGSIFGAYDMGWYRQAPGKERELVAAIGGGTITNYADSVKGRFTISRDNAKNTVYLQMNSLKPEDTAVYYCAFLVLTSLTMYWGQGTQVTVSS

SEQ ID NO: 21584 - protein, 126 aa, Artificial Sequence
  Chemically Synthesized
QVQLQESGGGLVQAGGSLRLSCAASGNISHTYGMGWYRQAPGKEREFVAGISSGGSTNYADSVKGRFTISRDNAKNTVYLQMNSLKPEDTAVYYCAVGYDTAKSRDYPVRYDLHYWGQGTQVTVSS

SEQ ID NO: 21585 - protein, 116 aa, Artificial Sequence
  Chemically Synthesized
QVQLQESGGGLVQAGGSLRLSCAASGTIFDDYYMGWYRQAPGKERELVATIAWGATTYYADSVKGRFTISRDNAKNTVYLQMNSLKPEDTAVYYCAVVTPAHWWYWGQGTQVTVSS

SEQ ID NO: 21586 - protein, 118 aa, Artificial Sequence
  Chemically Synthesized
QVQLQESGGGLVQAGGSLRLSCAASGYISITRFMGWYRQAPGKERELVAAMMLVVVVPYADSVKGRFTISRDNAKNTVYLQMNSLKPEDTAVYYCAAYYTEVDAHSYWGQGTQVTVSS

SEQ ID NO: 21587 - protein, 121 aa, Artificial Sequence
  Chemically Synthesized
QVQLQESGGGLVQAGGSLRLSCAASGYISQAEVMGWYRQAPGKEREFVATIGGANTYYADSVKGRFTISRDNAKNTVYLQMNSLKPEDTAVYYCAATYDGNDYLNYYHRYWGQGTQVTVSS

SEQ ID NO: 21588 - protein, 115 aa, Artificial Sequence
  Chemically Synthesized
QVQLQESGGGLVQAGGSLRLSCAASGNISYVKDMGWYRQAPGKEREFVASINYGTITYYADSVKGRFTISRDNAKNTVYLQMNSLKPEDTAVYYCAALTDSLTYWGQGTQVTVSS

SEQ ID NO: 21589 - protein, 118 aa, Artificial Sequence
  Chemically Synthesized
QVQLQESGGGLVQAGGSLRLSCAASGTISKRASMGWYRQAPGKERELVAGITNGAITYYADSVKGRFTISRDNAKNTVYLQMNSLKPEDTAVYYCAVVDRGADKYAYWGQGTQVTVSS

SEQ ID NO: 21590 - protein, 121 aa, Artificial Sequence
  Chemically Synthesized
QVQLQESGGGLVQAGGSLRLSCAASGTISYSYMGWYRQAPGKERELVASISDGGSTYYADSVKGRFTISRDNAKNTVYLQMNSLKPEDTAVYYCAVGAFDREDPVGLYSYWGQGTQVTVSS

SEQ ID NO: 21591 - protein, 122 aa, Artificial Sequence
  Chemically Synthesized
QVQLQESGGGLVQAGGSLRLSCAASGTISSSYTMGWYRQAPGKERELVAAIDWGSTTNYADSVKGRFTISRDNAKNTVYLQMNSLKPEDTAVYYCAVWDTTIQDTDHDLNYWGQGTQVTVSS

SEQ ID NO: 21592 - protein, 126 aa, Artificial Sequence
  Chemically Synthesized
QVQLQESGGGLVQAGGSLRLSCAASGNIFGYDSMGWYRQAPGKEREFVAGITYGGTTYYADSVKGRFTISRDNAKNTVYLQMNSLKPEDTAVYYCAVDHTAYVRTTRDGTSPYWYWGQGTQVTVSS

SEQ ID NO: 21593 - protein, 121 aa, Artificial Sequence
  Chemically Synthesized
QVQLQESGGGLVQAGGSLRLSCAASGTISYLIRMGWYRQAPGKERELVATISKGGITNYADSVKGRFTISRDNAKNTVYLQMNSLKPEDTAVYYCAAYDDSFSLTVRGIYWGQGTQVTVSS

SEQ ID NO: 21594 - protein, 122 aa, Artificial Sequence
  Chemically Synthesized
QVQLQESGGGLVQAGGSLRLSCAASGYISVDYPMGWYRQAPGKEREFVAGIGSGATTYYADSVKGRFTISRDNAKNTVYLQMNSLKPEDTAVYYCAARYIGGYGGYVLYLYWGQGTQVTVSS

SEQ ID NO: 21595 - protein, 117 aa, Artificial Sequence
  Chemically Synthesized
QVQLQESGGGLVQAGGSLRLSCAASGSIFDDDAMGWYRQAPGKERELVAAINAGATTNYADSVKGRFTISRDNAKNTVYLQMNSLKPEDTAVYYCAVSRVYFAGIYWGQGTQVTVSS

SEQ ID NO: 21596 - protein, 117 aa, Artificial Sequence
  Chemically Synthesized
QVQLQESGGGLVQAGGSLRLSCAASGNIFYYSMGWYRQAPGKERELVASITRGASTNYADSVKGRFTISRDNAKNTVYLQMNSLKPEDTAVYYCAAYILYFVGHIYWGQGTQVTVSS

SEQ ID NO: 21597 - protein, 119 aa, Artificial Sequence
  Chemically Synthesized
QVQLQESGGGLVQAGGSLRLSCAASGYISPYPIMGWYRQAPGKERELVAGIDFGANTYYADSVKGRFTISRDNAKNTVYLQMNSLKPEDTAVYYCARVRAYNYRYYRYWGQGTQVTVSS

SEQ ID NO: 21598 - protein, 118 aa, Artificial Sequence
  Chemically Synthesized
QVQLQESGGGLVQAGGSLRLSCAASGNISYVVVMGWYRQAPGKERELVASIAFGTNTNYADSVKGRFTISRDNAKNTVYLQMNSLKPEDTAVYYCAVWYYPVFFFPYWGQGTQVTVSS

SEQ ID NO: 21599 - protein, 119 aa, Artificial Sequence
  Chemically Synthesized
QVQLQESGGGLVQAGGSLRLSCAASGNIFSYDYMGWYRQAPGKEREFVATIAYGSTTYYADSVKGRFTISRDNAKNTVYLQMNSLKPEDTAVYYCAAYIPLYGYVHTYWGQGTQVTVSS

SEQ ID NO: 21600 - protein, 118 aa, Artificial Sequence
  Chemically Synthesized
QVQLQESGGGLVQAGGSLRLSCAASGSIFGYVYMGWYRQAPGKERELVAAIAHGSITYYADSVKGRFTISRDNAKNTVYLQMNSLKPEDTAVYYCAAYEPYVNNLYYWGQGTQVTVSS

SEQ ID NO: 21601 - protein, 118 aa, Artificial Sequence
  Chemically Synthesized
QVQLQESGGGLVQAGGSLRLSCAASGSIFPTLVMGWYRQAPGKEREFVATITEGGNTNYADSVKGRFTISRDNAKNTVYLQMNSLKPEDTAVYYCAARFYTNPYLAYWGQGTQVTVSS

SEQ ID NO: 21602 - protein, 121 aa, Artificial Sequence
  Chemically Synthesized
QVQLQESGGGLVQAGGSLRLSCAASGSISIQFLMGWYRQAPGKERELVAAIYGASTNYADSVKGRFTISRDNAKNTVYLQMNSLKPEDTAVYYCAVYYTDIDDGDRAYGYWGQGTQVTVSS

SEQ ID NO: 21603 - protein, 121 aa, Artificial Sequence
  Chemically Synthesized
QVQLQESGGGLVQAGGSLRLSCAASGSISWSVMGWYRQAPGKEREFVASITYGGITNYADSVKGRFTISRDNAKNTVYLQMNSLKPEDTAVYYCAAERYYFDDDYESYVYWGQGTQVTVSS

SEQ ID NO: 21604 - protein, 121 aa, Artificial Sequence
  Chemically Synthesized
QVQLQESGGGLVQAGGSLRLSCAASGTIFGRYYMGWYRQAPGKERELVAAIGLGSNTYYADSVKGRFTISRDNAKNTVYLQMNSLKPEDTAVYYCAAVKRGKGYNLLYKYWGQGTQVTVSS

SEQ ID NO: 21605 - protein, 118 aa, Artificial Sequence
  Chemically Synthesized
QVQLQESGGGLVQAGGSLRLSCAASGNIFYPSYMGWYRQAPGKERELVAGIDVGSITNYADSVKGRFTISRDNAKNTVYLQMNSLKPEDTAVYYCAVDPYITAGLDYWGQGTQVTVSS

SEQ ID NO: 21606 - protein, 118 aa, Artificial Sequence
  Chemically Synthesized
QVQLQESGGGLVQAGGSLRLSCAASGTISVGTPMGWYRQAPGKEREFVASIGGGSSTNYADSVKGRFTISRDNAKNTVYLQMNSLKPEDTAVYYCAWLRLFCSAVSYWGQGTQVTVSS

SEQ ID NO: 21607 - protein, 118 aa, Artificial Sequence
  Chemically Synthesized
QVQLQESGGGLVQAGGSLRLSCAASGNISYSTAMGWYRQAPGKERELVAGIDGGTITNYADSVKGRFTISRDNAKNTVYLQMNSLKPEDTAVYYCAADPDDGLQYDYWGQGTQVTVSS

SEQ ID NO: 21608 - protein, 126 aa, Artificial Sequence
  Chemically Synthesized
QVQLQESGGGLVQAGGSLRLSCAASGTIFLPIHMGWYRQAPGKERELVASITPGATTNYADSVKGRFTISRDNAKNTVYLQMNSLKPEDTAVYYCAVAYHLAGTAVRVTRYNHNYWGQGTQVTVSS

SEQ ID NO: 21609 - protein, 117 aa, Artificial Sequence
  Chemically Synthesized
QVQLQESGGGLVQAGGSLRLSCAASGSISGYGAMGWYRQAPGKERELVAAISWGATTYYADSVKGRFTISRDNAKNTVYLQMNSLKPEDTAVYYCAAHVVNNASFYWGQGTQVTVSS

SEQ ID NO: 21610 - protein, 122 aa, Artificial Sequence
  Chemically Synthesized
QVQLQESGGGLVQAGGSLRLSCAASGNIFARYHMGWYRQAPGKERELVAGINYGATTYYADSVKGRFTISRDNAKNTVYLQMNSLKPEDTAVYYCAARSRRAFYYVHGYYYWGQGTQVTVSS

SEQ ID NO: 21611 - protein, 117 aa, Artificial Sequence
  Chemically Synthesized
QVQLQESGGGLVQAGGSLRLSCAASGNILTLTMGWYRQAPGKERELVAAIASGGITNYADSVKGRFTISRDNAKNTVYLQMNSLKPEDTAVYYCAAWGRADGVYYYWGQGTQVTVSS

SEQ ID NO: 21612 - protein, 118 aa, Artificial Sequence
  Chemically Synthesized
QVQLQESGGGLVQAGGSLRLSCAASGTISDRASMGWYRQAPGKERELVAAIADGGTTYYADSVKGRFTISRDNAKNTVYLQMNSLKPEDTAVYYCAAVHTNKYTYNYWGQGTQVTVSS

SEQ ID NO: 21613 - protein, 118 aa, Artificial Sequence
  Chemically Synthesized
QVQLQESGGGLVQAGGSLRLSCAASGNISEWIEMGWYRQAPGKERELVAGISYGGTTNYADSVKGRFTISRDNAKNTVYLQMNSLKPEDTAVYYCAVDLPATDPFDYWGQGTQVTVSS

SEQ ID NO: 21614 - protein, 122 aa, Artificial Sequence
  Chemically Synthesized
QVQLQESGGGLVQAGGSLRLSCAASGNISTGDAMGWYRQAPGKERELVAGIDFGTTTNYADSVKGRFTISRDNAKNTVYLQMNSLKPEDTAVYYCAAQYYTQADNPVWYTYWGQGTQVTVSS

SEQ ID NO: 21615 - protein, 118 aa, Artificial Sequence
  Chemically Synthesized
QVQLQESGGGLVQAGGSLRLSCAASGYIFSLGYMGWYRQAPGKEREFVAAISLGAITYYADSVKGRFTISRDNAKNTVYLQMNSLKPEDTAVYYCAVSLYAYGAFGYWGQGTQVTVSS

SEQ ID NO: 21616 - protein, 112 aa, Artificial Sequence
  Chemically Synthesized
QVQLQESGGGLVQAGGSLRLSCAASGYIFGYVRMGWYRQAPGKERELVAAITTGGNTYYADSVKGRFTISRDNAKNTVYLQMNSLKPEDTAVYYCAAVHYYWGQGTQVTVSS

SEQ ID NO: 21617 - protein, 114 aa, Artificial Sequence
  Chemically Synthesized
QVQLQESGGGLVQAGGSLRLSCAASGYIPYMGWYRQAPGKERELVAAIGSVVLPYADSVKGRFTISRDNAKNTVYLQMNSLKPEDTAVYYCAVGNANHGVYLYWGQGTQVTVSS

SEQ ID NO: 21618 - protein, 117 aa, Artificial Sequence
  Chemically Synthesized
QVQLQESGGGLVQAGGSLRLSCAASGSISWYTMGWYRQAPGKEREFVATIDVGGTTNYADSVKGRFTISRDNAKNTVYLQMNSLKPEDTAVYYCAVGPHDTAHLPYWGQGTQVTVSS

SEQ ID NO: 21619 - protein, 120 aa, Artificial Sequence
  Chemically Synthesized
QVQLQESGGGLVQAGGSLRLSCAASGNISTGAGMGWYRQAPGKERELVATISYGTSTNYADSVKGRFTISRDNAKNTVYLQMNSLKPEDTAVYYCALVPRGRYDYGFDYWGQGTQVTVSS

SEQ ID NO: 21620 - protein, 118 aa, Artificial Sequence
  Chemically Synthesized
QVQLQESGGGLVQAGGSLRLSCAASGYIFYNYDMGWYRQAPGKEREFVATIANGATTNYADSVKGRFTISRDNAKNTVYLQMNSLKPEDTAVYYCAAGGTHDVYLSYWGQGTQVTVSS

SEQ ID NO: 21621 - protein, 126 aa, Artificial Sequence
  Chemically Synthesized
QVQLQESGGGLVQAGGSLRLSCAASGTIFVFGGMGWYRQAPGKEREFVASIADGSSTNYADSVKGRFTISRDNAKNTVYLQMNSLKPEDTAVYYCAVNIGVHYYYYPPSYSVHLYWGQGTQVTVSS

SEQ ID NO: 21622 - protein, 126 aa, Artificial Sequence
  Chemically Synthesized
QVQLQESGGGLVQAGGSLRLSCAASGTISYRYNMGWYRQAPGKERELVASINWGGSTNYADSVKGRFTISRDNAKNTVYLQMNSLKPEDTAVYYCAVAVRGRWYQVDVATRRHTYWGQGTQVTVSS

SEQ ID NO: 21623 - protein, 118 aa, Artificial Sequence
  Chemically Synthesized
QVQLQESGGGLVQAGGSLRLSCAASGSISVIGVMGWYRQAPGKEREFVASIATGGITNYADSVKGRFTISRDNAKNTVYLQMNSLKPEDTAVYYCAADIYWYNIHGYWGQGTQVTVSS

SEQ ID NO: 21624 - protein, 122 aa, Artificial Sequence
  Chemically Synthesized
QVQLQESGGGLVQAGGSLRLSCAASGSIFATTRMGWYRQAPGKERELVAGINGGGNTYYADSVKGRFTISRDNAKNTVYLQMNSLKPEDTAVYYCAVLTYNYTELGGNYPYWGQGTQVTVSS

SEQ ID NO: 21625 - protein, 126 aa, Artificial Sequence
  Chemically Synthesized
QVQLQESGGGLVQAGGSLRLSCAASGYISGKGTMGWYRQAPGKERELVAAITHGATTYYADSVKGRFTISRDNAKNTVYLQMNSLKPEDTAVYYCAVLDYGWETRGPLVGQWHVYWGQGTQVTVSS

SEQ ID NO: 21626 - protein, 117 aa, Artificial Sequence
  Chemically Synthesized
QVQLQESGGGLVQAGGSLRLSCAASGIFLTTLMGWYRQAPGKEREFVATITPGSITNYADSVKGRFTISRDNAKNTVYLQMNSLKPEDTAVYYCAAYGDVDSWHYYWGQGTQVTVSS

SEQ ID NO: 21627 - protein, 118 aa, Artificial Sequence
  Chemically Synthesized
QVQLQESGGGLVQAGGSLRLSCAASGYIFTPRYMGWYRQAPGKERELVAAISWGSNTYYADSVKGRFTISRDNAKNTVYLQMNSLKPEDTAVYYCAATVWYTKLFDYWGQGTQVTVSS

SEQ ID NO: 21628 - protein, 118 aa, Artificial Sequence
  Chemically Synthesized
QVQLQESGGGLVQAGGSLRLSCAASGSISSSSSMGWYRQAPGKERELVAAISSGGTTYYADSVKGRFTISRDNAKNTVYLQMNSLKPEDTAVYYCAVYLPQKTRHYYWGQGTQVTVSS

SEQ ID NO: 21629 - protein, 118 aa, Artificial Sequence
  Chemically Synthesized
QVQLQESGGGLVQAGGSLRLSCAASGYISRSVHMGWYRQAPGKERELVAAITAGGITNYADSVKGRFTISRDNAKNTVYLQMNSLKPEDTAVYYCAARYWYLSVHYYWGQGTQVTVSS

SEQ ID NO: 21630 - protein, 113 aa, Artificial Sequence
  Chemically Synthesized
QVQLQESGGGLVQAGGSLRLSCAASGYIFESTVMGWYRQAPGKERELVAAIDYGTNNQYADSVKGRFTISRDNAKNTVYLQMNSLKPEDTAVYYCAADDLTYWGQGTQVTVSS

SEQ ID NO: 21631 - protein, 118 aa, Artificial Sequence
  Chemically Synthesized
QVQLQESGGGLVQAGGSLRLSCAASGNISYTYYMGWYRQAPGKERELVAAINKGGITNYADSVKGRFTISRDNAKNTVYLQMNSLKPEDTAVYYCAAYYYSVPAFTYWGQGTQVTVSS

SEQ ID NO: 21632 - protein, 121 aa, Artificial Sequence
  Chemically Synthesized
QVQLQESGGGLVQAGGSLRLSCAASGYISAGFYMGWYRQAPGKEREFVATINSVVIPYADSVKGRFTISRDNAKNTVYLQMNSLKPEDTAVYYCAAVSEIYVDPYYLHDYWGQGTQVTVSS

SEQ ID NO: 21633 - protein, 118 aa, Artificial Sequence
  Chemically Synthesized
QVQLQESGGGLVQAGGSLRLSCAASGNIFVYGDMGWYRQAPGKEREFVATIDSGGNTYYADSVKGRFTISRDNAKNTVYLQMNSLKPEDTAVYYCAVGLIDPLPFGYWGQGTQVTVSS

SEQ ID NO: 21634 - protein, 117 aa, Artificial Sequence
  Chemically Synthesized
QVQLQESGGGLVQAGGSLRLSCAASGYIMGWYRQAPGKERELVAAIGAGASTYYADSVKGRFTISRDNAKNTVYLQMNSLKPEDTAVYYCAVGDADASGYAGYLTYWGQGTQVTVSS

SEQ ID NO: 21635 - protein, 118 aa, Artificial Sequence
  Chemically Synthesized
QVQLQESGGGLVQAGGSLRLSCAASGSIFIGVYMGWYRQAPGKEREFVATITGGAITNYADSVKGRFTISRDNAKNTVYLQMNSLKPEDTAVYYCAAVFATLDKLVYWGQGTQVTVSS

SEQ ID NO: 21636 - protein, 117 aa, Artificial Sequence
  Chemically Synthesized
QVQLQESGGGLVQAGGSLRLSCAASGSIFLTGSMGWYRQAPGKEREFVAGITYGSTNYADSVKGRFTISRDNAKNTVYLQMNSLKPEDTAVYYCAARQDSDGELGYWGQGTQVTVSS

SEQ ID NO: 21637 - protein, 122 aa, Artificial Sequence
  Chemically Synthesized
QVQLQESGGGLVQAGGSLRLSCAASGYISVDWIMGWYRQAPGKERELVASISYGASTYYADSVKGRFTISRDNAKNTVYLQMNSLKPEDTAVYYCAVTDIRPLRYSDIYSYWGQGTQVTVSS

SEQ ID NO: 21638 - protein, 118 aa, Artificial Sequence
  Chemically Synthesized
QVQLQESGGGLVQAGGSLRLSCAASGYIFLHGLMGWYRQAPGKERELVAGINRGSTTYYADSVKGRFTISRDNAKNTVYLQMNSLKPEDTAVYYCAVVQRYTWGHAYWGQGTQVTVSS

SEQ ID NO: 21639 - protein, 124 aa, Artificial Sequence
  Chemically Synthesized
QVQLQESGGGLVQAGGSLRLSCAASGTISERGMGWYRQAPGKERELVASITVGSITYYADSVKGRFTISRDNAKNTVYLQMNSLKPEDTAVYYCAVQDAPYGWEYVGRATPQYWGQGTQVTVSS

SEQ ID NO: 21640 - protein, 118 aa, Artificial Sequence
  Chemically Synthesized
QVQLQESGGGLVQAGGSLRLSCAASGYIFERNYMGWYRQAPGKERELVAAIDAGGTTYYADSVKGRFTISRDNAKNTVYLQMNSLKPEDTAVYYCAAWLSDSWDLIYWGQGTQVTVSS

SEQ ID NO: 21641 - protein, 107 aa, Artificial Sequence
  Chemically Synthesized
QVQLQESGGGLVQAGGSLRLSCAASGSIYMGWYRQAPGKEREFVASIAAGTTTNYADSVKGRFTISRDNAKNTVYLQMNSLKPEDTAVYYCAFTFYWGQGTQVTVSS

SEQ ID NO: 21642 - protein, 126 aa, Artificial Sequence
  Chemically Synthesized
QVQLQESGGGLVQAGGSLRLSCAASGYISRYRTMGWYRQAPGKEREFVAGITKGGNTYYADSVKGRFTISRDNAKNTVYLQMNSLKPEDTAVYYCAVSHHRYPWYPIGEARYLGYWGQGTQVTVSS

SEQ ID NO: 21643 - protein, 126 aa, Artificial Sequence
  Chemically Synthesized
QVQLQESGGGLVQAGGSLRLSCAASGSIFQYLLMGWYRQAPGKERELVATIAGGGNTNYADSVKGRFTISRDNAKNTVYLQMNSLKPEDTAVYYCAVSGFGDEYGYGFRTRGYPYWGQGTQVTVSS

SEQ ID NO: 21644 - protein, 121 aa, Artificial Sequence
  Chemically Synthesized
QVQLQESGGGLVQAGGSLRLSCAASGYIFLGTPMGWYRQAPGKERELVAGIAGGSSTNYADSVKGRFTISRDNAKNTVYLQMNSLKPEDTAVYYCAAKSTWFGSGSTTLYWGQGTQVTVSS

SEQ ID NO: 21645 - protein, 118 aa, Artificial Sequence
  Chemically Synthesized
QVQLQESGGGLVQAGGSLRLSCAASGNIFYAYAMGWYRQAPGKEREFVAAIARGGNTNYADSVKGRFTISRDNAKNTVYLQMNSLKPEDTAVYYCAVIYRTRWAHAYWGQGTQVTVSS

SEQ ID NO: 21646 - protein, 121 aa, Artificial Sequence
  Chemically Synthesized
QVQLQESGGGLVQAGGSLRLSCAASGSISLTRMGWYRQAPGKERELVATIGVGAITYYADSVKGRFTISRDNAKNTVYLQMNSLKPEDTAVYYCAATPFEVWGDTAWLDYWGQGTQVTVSS

SEQ ID NO: 21647 - protein, 117 aa, Artificial Sequence
  Chemically Synthesized
QVQLQESGGGLVQAGGSLRLSCAASGYIFGTGYMGWYRQAPGKEREFVAAISGGSSTYYADSVKGRFTISRDNAKNTVYLQMNSLKPEDTAVYYCAVLDGYYSTIYWGQGTQVTVSS

SEQ ID NO: 21648 - protein, 126 aa, Artificial Sequence
  Chemically Synthesized
QVQLQESGGGLVQAGGSLRLSCAASGTISDFTWMGWYRQAPGKEREFVAAISDGANTYYADSVKGRFTISRDNAKNTVYLQMNSLKPEDTAVYYCAVRPPPTYQYLGGNYNAYGYWGQGTQVTVSS

SEQ ID NO: 21649 - protein, 118 aa, Artificial Sequence
  Chemically Synthesized
QVQLQESGGGLVQAGGSLRLSCAASGYISARRLMGWYRQAPGKERELVAAIGGGGNTNYADSVKGRFTISRDNAKNTVYLQMNSLKPEDTAVYYCAAVWGLLRRYSYWGQGTQVTVSS

SEQ ID NO: 21650 - protein, 117 aa, Artificial Sequence
  Chemically Synthesized
QVQLQESGGGLVQAGGSLRLSCAASGSIFGTGVMGWYRQAPGKERELVALLLVVVLPYADSVKGRFTISRDNAKNTVYLQMNSLKPEDTAVYYCAADGRQNYTYQYWGQGTQVTVSS

SEQ ID NO: 21651 - protein, 118 aa, Artificial Sequence
  Chemically Synthesized
QVQLQESGGGLVQAGGSLRLSCAASGYIFTGPPMGWYRQAPGKERELVASIGGGASTYYADSVKGRFTISRDNAKNTVYLQMNSLKPEDTAVYYCAARPYGYLFHDYWGQGTQVTVSS

SEQ ID NO: 21652 - protein, 118 aa, Artificial Sequence
  Chemically Synthesized
QVQLQESGGGLVQAGGSLRLSCAASGYIFYAYRMGWYRQAPGKERELVASIGWGGNTNYADSVKGRFTISRDNAKNTVYLQMNSLKPEDTAVYYCAVRRSVIYVFTYWGQGTQVTVSS

SEQ ID NO: 21653 - protein, 123 aa, Artificial Sequence
  Chemically Synthesized
QVQLQESGGGLVQAGGSLRLSCAASGSIFRWVGMGWYRQAPGKERELVAAITRGSTTNYADSVKGRFTISRDNAKNTVYLQMNSLKPEDTAVYYCAVLYSRSVYDDHLYLIYWGQGTQVTVSS

SEQ ID NO: 21654 - protein, 118 aa, Artificial Sequence
  Chemically Synthesized
QVQLQESGGGLVQAGGSLRLSCAASGTIFDGLYMGWYRQAPGKEREFVAAINRGTSTYYADSVKGRFTISRDNAKNTVYLQMNSLKPEDTAVYYCAVVAHAAWYFLYWGQGTQVTVSS

SEQ ID NO: 21655 - protein, 117 aa, Artificial Sequence
  Chemically Synthesized
QVQLQESGGGLVQAGGSLRLSCAASGTIFYIVYMGWYRQAPGKEREFVATIGSGGTTYYADSVKGRFTISRDNAKNTVYLQMNSLKPEDTAVYYCAAYIYWGYLAYWGQGTQVTVSS

SEQ ID NO: 21656 - protein, 118 aa, Artificial Sequence
  Chemically Synthesized
QVQLQESGGGLVQAGGSLRLSCAASGYISYRRAMGWYRQAPGKERELVASITRGGSTNYADSVKGRFTISRDNAKNTVYLQMNSLKPEDTAVYYCAVRPRTDLWHRYWGQGTQVTVSS

SEQ ID NO: 21657 - protein, 122 aa, Artificial Sequence
  Chemically Synthesized
QVQLQESGGGLVQAGGSLRLSCAASGTISNGRWMGWYRQAPGKEREFVASINYGGSTYYADSVKGRFTISRDNAKNTVYLQMNSLKPEDTAVYYCAARWHQWRRTPPYLRYWGQGTQVTVSS

SEQ ID NO: 21658 - protein, 121 aa, Artificial Sequence
  Chemically Synthesized
QVQLQESGGGLVQAGGSLRLSCAASGTIFGLYEMGWYRQAPGKEREFVASIATVVVPYADSVKGRFTISRDNAKNTVYLQMNSLKPEDTAVYYCAVYYNDGGDWAWDLYYWGQGTQVTVSS

SEQ ID NO: 21659 - protein, 122 aa, Artificial Sequence
  Chemically Synthesized
QVQLQESGGGLVQAGGSLRLSCAASGNISYHRTMGWYRQAPGKEREFVATIGIGATTNYADSVKGRFTISRDNAKNTVYLQMNSLKPEDTAVYYCAALKVWWHYFGLKHAYWGQGTQVTVSS

SEQ ID NO: 21660 - protein, 117 aa, Artificial Sequence
  Chemically Synthesized
QVQLQESGGGLVQAGGSLRLSCAASGSIFHAYGMGWYRQAPGKERELVATIDVGTTTNYADSVKGRFTISRDNAKNTVYLQMNSLKPEDTAVYYCAAPQIYSRFLYWGQGTQVTVSS

SEQ ID NO: 21661 - protein, 118 aa, Artificial Sequence
  Chemically Synthesized
QVQLQESGGGLVQAGGSLRLSCAASGNISRYYIMGWYRQAPGKERELVAGISGGSSTNYADSVKGRFTISRDNAKNTVYLQMNSLKPEDTAVYYCAAGHHYYVTHNYWGQGTQVTVSS

SEQ ID NO: 21662 - protein, 121 aa, Artificial Sequence
  Chemically Synthesized
QVQLQESGGGLVQAGGSLRLSCAASGNISTYGYMGWYRQAPGKERELVATIDAGATTNYADSVKGRFTISRDNAKNTVYLQMNSLKPEDTAVYYCAATCRTLTSTRSVIYWGQGTQVTVSS

SEQ ID NO: 21663 - protein, 118 aa, Artificial Sequence
  Chemically Synthesized
QVQLQESGGGLVQAGGSLRLSCAASGYISYWRAMGWYRQAPGKERELVAAIDWGSSTYYADSVKGRFTISRDNAKNTVYLQMNSLKPEDTAVYYCAARRYLRLSFSYWGQGTQVTVSS

SEQ ID NO: 21664 - protein, 122 aa, Artificial Sequence
  Chemically Synthesized
QVQLQESGGGLVQAGGSLRLSCAASGNIFSRYRMGWYRQAPGKEREFVATISRGGNTNYADSVKGRFTISRDNAKNTVYLQMNSLKPEDTAVYYCAVYWNGRYAPQDILTYWGQGTQVTVSS

SEQ ID NO: 21665 - protein, 118 aa, Artificial Sequence
  Chemically Synthesized
QVQLQESGGGLVQAGGSLRLSCAASGTISDLAHMGWYRQAPGKEREFVASIGPGTTTYYADSVKGRFTISRDNAKNTVYLQMNSLKPEDTAVYYCAVYRGRTYGHGYWGQGTQVTVSS

SEQ ID NO: 21666 - protein, 118 aa, Artificial Sequence
  Chemically Synthesized
QVQLQESGGGLVQAGGSLRLSCAASGSISRWRYMGWYRQAPGKERELVATINAGGTTNYADSVKGRFTISRDNAKNTVYLQMNSLKPEDTAVYYCAVYYHTYDYFWYWGQGTQVTVSS

SEQ ID NO: 21667 - protein, 118 aa, Artificial Sequence
  Chemically Synthesized
QVQLQESGGGLVQAGGSLRLSCAASGSIFPWVRMGWYRQAPGKERELVATINYGTSTYYADSVKGRFTISRDNAKNTVYLQMNSLKPEDTAVYYCAVQPWYYVNFVYWGQGTQVTVSS

SEQ ID NO: 21668 - protein, 122 aa, Artificial Sequence
  Chemically Synthesized
QVQLQESGGGLVQAGGSLRLSCAASGYISDGQSMGWYRQAPGKEREFVAGINTGTNTNYADSVKGRFTISRDNAKNTVYLQMNSLKPEDTAVYYCAASGEIDDVFTSSHYYWGQGTQVTVSS

SEQ ID NO: 21669 - protein, 112 aa, Artificial Sequence
  Chemically Synthesized
QVQLQESGGGLVQAGGSLRLSCAASGNIFPSYSMGWYRQAPGKEREFVATIDGGGSTYADSVKGRFTISRDNAKNTVYLQMNSLKPEDTAVYYCAAVDYWYWGQGTQVTVSS

SEQ ID NO: 21670 - protein, 122 aa, Artificial Sequence
  Chemically Synthesized
QVQLQESGGGLVQAGGSLRLSCAASGYIFLYYYMGWYRQAPGKERELVAAISYGSSTYYADSVKGRFTISRDNAKNTVYLQMNSLKPEDTAVYYCAAHRPYTYSYLTTLIYWGQGTQVTVSS

SEQ ID NO: 21671 - protein, 122 aa, Artificial Sequence
  Chemically Synthesized
QVQLQESGGGLVQAGGSLRLSCAASGTISLLIQMGWYRQAPGKEREFVATISYGTTTYYADSVKGRFTISRDNAKNTVYLQMNSLKPEDTAVYYCAVSDRGNPVISGPYYYWGQGTQVTVSS

SEQ ID NO: 21672 - protein, 122 aa, Artificial Sequence
  Chemically Synthesized
QVQLQESGGGLVQAGGSLRLSCAASGTIFDWYYMGWYRQAPGKERELVAGIAVGTTTYYADSVKGRFTISRDNAKNTVYLQMNSLKPEDTAVYYCAASLWPYVYGEAGFSYWGQGTQVTVSS

SEQ ID NO: 21673 - protein, 122 aa, Artificial Sequence
  Chemically Synthesized
QVQLQESGGGLVQAGGSLRLSCAASGTIFYVRDMGWYRQAPGKEREFVAGITYGASTYYADSVKGRFTISRDNAKNTVYLQMNSLKPEDTAVYYCAAATYQIYIYNTYYYYWGQGTQVTVSS

SEQ ID NO: 21674 - protein, 116 aa, Artificial Sequence
  Chemically Synthesized
QVQLQESGGGLVQAGGSLRLSCAASGTIFDPYYMGWYRQAPGKERELVAGIDVGSTTNYADSVKGRFTISRDNAKNTVYLQMNSLKPEDTAVYYCAVVGVDSSIYWGQGTQVTVSS

SEQ ID NO: 21675 - protein, 126 aa, Artificial Sequence
  Chemically Synthesized
QVQLQESGGGLVQAGGSLRLSCAASGYIFEWPYMGWYRQAPGKERELVAAITRGAITYYADSVKGRFTISRDNAKNTVYLQMNSLKPEDTAVYYCAAGYTNPTGTIYWREHLHGYWGQGTQVTVSS

SEQ ID NO: 21676 - protein, 118 aa, Artificial Sequence
  Chemically Synthesized
QVQLQESGGGLVQAGGSLRLSCAASGTIFQGFDMGWYRQAPGKERELVASISYGASTNYADSVKGRFTISRDNAKNTVYLQMNSLKPEDTAVYYCAAYHPDEYLHAYWGQGTQVTVSS

SEQ ID NO: 21677 - protein, 118 aa, Artificial Sequence
  Chemically Synthesized
QVQLQESGGGLVQAGGSLRLSCAASGYIFPGQYMGWYRQAPGKERELVASINVGGITYYADSVKGRFTISRDNAKNTVYLQMNSLKPEDTAVYYCAAIFGIYPKFSYWGQGTQVTVSS

SEQ ID NO: 21678 - protein, 126 aa, Artificial Sequence
  Chemically Synthesized
QVQLQESGGGLVQAGGSLRLSCAASGTIFARRGMGWYRQAPGKEREFVASITRGSNTNYADSVKGRFTISRDNAKNTVYLQMNSLKPEDTAVYYCAAYGELYYSGYSNVLRRYRYWGQGTQVTVSS

SEQ ID NO: 21679 - protein, 122 aa, Artificial Sequence
  Chemically Synthesized
QVQLQESGGGLVQAGGSLRLSCAASGTIFQQEYMGWYRQAPGKERELVATITFGAITNYADSVKGRFTISRDNAKNTVYLQMNSLKPEDTAVYYCAATGGLQGGYTGAHGYWGQGTQVTVSS

SEQ ID NO: 21680 - protein, 117 aa, Artificial Sequence
  Chemically Synthesized
QVQLQESGGGLVQAGGSLRLSCAASGTIFSAKAMGWYRQAPGKERELVAAINSVLVPYADSVKGRFTISRDNAKNTVYLQMNSLKPEDTAVYYCAAYLAHRDPYVYWGQGTQVTVSS

SEQ ID NO: 21681 - protein, 117 aa, Artificial Sequence
  Chemically Synthesized
QVQLQESGGGLVQAGGSLRLSCAASGYIFYLPMGWYRQAPGKERELVAAISSGTTTYYADSVKGRFTISRDNAKNTVYLQMNSLKPEDTAVYYCAASGLTIDVFDYWGQGTQVTVSS

SEQ ID NO: 21682 - protein, 122 aa, Artificial Sequence
  Chemically Synthesized
QVQLQESGGGLVQAGGSLRLSCAASGSISRRLYMGWYRQAPGKEREFVASIGGGTTTNYADSVKGRFTISRDNAKNTVYLQMNSLKPEDTAVYYCAARTARRHYGGDTHIYWGQGTQVTVSS

SEQ ID NO: 21683 - protein, 118 aa, Artificial Sequence
  Chemically Synthesized
QVQLQESGGGLVQAGGSLRLSCAASGNISGRRAMGWYRQAPGKEREFVASISYGGNTYYADSVKGRFTISRDNAKNTVYLQMNSLKPEDTAVYYCAAYYTWYRSHYYWGQGTQVTVSS

SEQ ID NO: 21684 - protein, 121 aa, Artificial Sequence
  Chemically Synthesized
QVQLQESGGGLVQAGGSLRLSCAASGYIFGDYYMGWYRQAPGKEREFVAAIANGSITYYADSVKGRFTISRDNAKNTVYLQMNSLKPEDTAVYYCAVRRKVRVRYYYRYYWGQGTQVTVSS

SEQ ID NO: 21685 - protein, 122 aa, Artificial Sequence
  Chemically Synthesized
QVQLQESGGGLVQAGGSLRLSCAASGNISGVRAMGWYRQAPGKERELVASIGRGGTTNYADSVKGRFTISRDNAKNTVYLQMNSLKPEDTAVYYCAARAYYNYLGYRNYPYWGQGTQVTVSS

SEQ ID NO: 21686 - protein, 120 aa, Artificial Sequence
  Chemically Synthesized
QVQLQESGGGLVQAGGSLRLSCAASGTIFRARFMGWYRQAPGKERELVAAIDVGSSTNYADSVKGRFTISRDNAKNTVYLQMNSLKPEDTAVYYCAAYYRYYNYRGHYYWGQGTQVTVSS

SEQ ID NO: 21687 - protein, 122 aa, Artificial Sequence
  Chemically Synthesized
QVQLQESGGGLVQAGGSLRLSCAASGTIFDQGIMGWYRQAPGKERELVATITLGGTTYYADSVKGRFTISRDNAKNTVYLQMNSLKPEDTAVYYCAAQDKQYGYSYTGHVYWGQGTQVTVSS

SEQ ID NO: 21688 - protein, 126 aa, Artificial Sequence
  Chemically Synthesized
QVQLQESGGGLVQAGGSLRLSCAASGNIFYYWYMGWYRQAPGKEREFVAGINFGGNTYYADSVKGRFTISRDNAKNTVYLQMNSLKPEDTAVYYCAVKRAWRLYYYGPDLRPFYYWGQGTQVTVSS

SEQ ID NO: 21689 - protein, 118 aa, Artificial Sequence
  Chemically Synthesized
QVQLQESGGGLVQAGGSLRLSCAASGNISAGYHMGWYRQAPGKEREFVAGIAAGTNTNYADSVKGRFTISRDNAKNTVYLQMNSLKPEDTAVYYCAVWAYGSTPLSYWGQGTQVTVSS

SEQ ID NO: 21690 - protein, 121 aa, Artificial Sequence
  Chemically Synthesized
QVQLQESGGGLVQAGGSLRLSCAASGTISSGTMGWYRQAPGKERELVATINAGTTTYYADSVKGRFTISRDNAKNTVYLQMNSLKPEDTAVYYCAAYDYYPLTVDTVYAYWGQGTQVTVSS

SEQ ID NO: 21691 - protein, 118 aa, Artificial Sequence
  Chemically Synthesized
QVQLQESGGGLVQAGGSLRLSCAASGYISVVFVMGWYRQAPGKERELVASINNGGNTNYADSVKGRFTISRDNAKNTVYLQMNSLKPEDTAVYYCAVDARWVSGHQYWGQGTQVTVSS

SEQ ID NO: 21692 - protein, 118 aa, Artificial Sequence
  Chemically Synthesized
QVQLQESGGGLVQAGGSLRLSCAASGSIFLTTGMGWYRQAPGKEREFVATISYGGSTNYADSVKGRFTISRDNAKNTVYLQMNSLKPEDTAVYYCAVVWLDSYLFLYWGQGTQVTVSS

SEQ ID NO: 21693 - protein, 118 aa, Artificial Sequence
  Chemically Synthesized
QVQLQESGGGLVQAGGSLRLSCAASGYISGQIIMGWYRQAPGKERELVATIDNGGTTNYADSVKGRFTISRDNAKNTVYLQMNSLKPEDTAVYYCAVVSSYYSSHVYWGQGTQVTVSS

SEQ ID NO: 21694 - protein, 126 aa, Artificial Sequence
  Chemically Synthesized
QVQLQESGGGLVQAGGSLRLSCAASGTISLIRIMGWYRQAPGKERELVASIDDGTSTYYADSVKGRFTISRDNAKNTVYLQMNSLKPEDTAVYYCAAGQWSYGWYAQPDWLYLVYWGQGTQVTVSS

SEQ ID NO: 21695 - protein, 122 aa, Artificial Sequence
  Chemically Synthesized
QVQLQESGGGLVQAGGSLRLSCAASGSISYRIVMGWYRQAPGKEREFVAGIGTGGSTYYADSVKGRFTISRDNAKNTVYLQMNSLKPEDTAVYYCAVYDRRGERYAYQLWYWGQGTQVTVSS

SEQ ID NO: 21696 - protein, 126 aa, Artificial Sequence
  Chemically Synthesized
QVQLQESGGGLVQAGGSLRLSCAASGTIFPSSLMGWYRQAPGKEREFVASISQGGITNYADSVKGRFTISRDNAKNTVYLQMNSLKPEDTAVYYCAADGVYRQYGWLRVYVGYEYWGQGTQVTVSS

SEQ ID NO: 21697 - protein, 118 aa, Artificial Sequence
  Chemically Synthesized
QVQLQESGGGLVQAGGSLRLSCAASGTIFDRSSMGWYRQAPGKERELVAAITTGAITNYADSVKGRFTISRDNAKNTVYLQMNSLKPEDTAVYYCAVVAVYDGDYSYWGQGTQVTVSS

SEQ ID NO: 21698 - protein, 125 aa, Artificial Sequence
  Chemically Synthesized
QVQLQESGGGLVQAGGSLRLSCAASGSIFVYPSMGWYRQAPGKEREFLPVLLTVVVPYADSVKGRFTISRDNAKNTVYLQMNSLKPEDTAVYYCAVPLYGPSLYYDSGILDHTYWGQGTQVTVSS

SEQ ID NO: 21699 - protein, 126 aa, Artificial Sequence
  Chemically Synthesized
QVQLQESGGGLVQAGGSLRLSCAASGSISYVEDMGWYRQAPGKERELVAGINLGSITYYADSVKGRFTISRDNAKNTVYLQMNSLKPEDTAVYYCAVYQYLPEVFGVYHIELLVYWGQGTQVTVSS

SEQ ID NO: 21700 - protein, 126 aa, Artificial Sequence
  Chemically Synthesized
QVQLQESGGGLVQAGGSLRLSCAASGTISTVRKMGWYRQAPGKERELVAAIGRGTTTNYADSVKGRFTISRDNAKNTVYLQMNSLKPEDTAVYYCAAYIYPNWARGVRGYHQYVYWGQGTQVTVSS

SEQ ID NO: 21701 - protein, 108 aa, Artificial Sequence
  Chemically Synthesized
QVQLQESGGGLVQAGGSLRLSCAASGSIFSGTMGWYRQAPGKEREFVASITYGTTTNYADSVKGRFTISRDNAKNTVYLQMNSLKPEDTAVYYCALYWGQGTQVTVSS

SEQ ID NO: 21702 - protein, 118 aa, Artificial Sequence
  Chemically Synthesized
QVQLQESGGGLVQAGGSLRLSCAASGNISLYAIMGWYRQAPGKEREFVAGITYGSITYYADSVKGRFTISRDNAKNTVYLQMNSLKPEDTAVYYCAAPSLIYPFFIYWGQGTQVTVSS

SEQ ID NO: 21703 - protein, 122 aa, Artificial Sequence
  Chemically Synthesized
QVQLQESGGGLVQAGGSLRLSCAASGYIFRSRYMGWYRQAPGKEREFVAAIGYGSNTYYADSVKGRFTISRDNAKNTVYLQMNSLKPEDTAVYYCAVRYTKNRYHLPSHYYWGQGTQVTVSS

SEQ ID NO: 21704 - protein, 121 aa, Artificial Sequence
  Chemically Synthesized
QVQLQESGGGLVQAGGSLRLSCAASGSFLITTMGWYRQAPGKERELVATINDGAITNYADSVKGRFTISRDNAKNTVYLQMNSLKPEDTAVYYCAAWDTGERERDNIHAYWGQGTQVTVSS

SEQ ID NO: 21705 - protein, 118 aa, Artificial Sequence
  Chemically Synthesized
QVQLQESGGGLVQAGGSLRLSCAASGSIFHHIRMGWYRQAPGKERELVAGIGYGTSTYYADSVKGRFTISRDNAKNTVYLQMNSLKPEDTAVYYCAALTSWLFRHSYWGQGTQVTVSS

SEQ ID NO: 21706 - protein, 122 aa, Artificial Sequence
  Chemically Synthesized
QVQLQESGGGLVQAGGSLRLSCAASGSIFYWSYMGWYRQAPGKERELVATIGYGSTTYYADSVKGRFTISRDNAKNTVYLQMNSLKPEDTAVYYCAAWSYDGLYYNADFGYWGQGTQVTVSS

SEQ ID NO: 21707 - protein, 126 aa, Artificial Sequence
  Chemically Synthesized
QVQLQESGGGLVQAGGSLRLSCAASGYISDELRMGWYRQAPGKEREFVATINYGASTNYADSVKGRFTISRDNAKNTVYLQMNSLKPEDTAVYYCAVFYPYAIRPFYDTYHQLDYWGQGTQVTVSS

SEQ ID NO: 21708 - protein, 121 aa, Artificial Sequence
  Chemically Synthesized
QVQLQESGGGLVQAGGSLRLSCAASGSIFRIGIMGWYRQAPGKERELVATIGYGTNTYYADSVKGRFTISRDNAKNTVYLQMNSLKPEDTAVYYCAASLRLYYKVGPLPYWGQGTQVTVSS

SEQ ID NO: 21709 - protein, 118 aa, Artificial Sequence
  Chemically Synthesized
QVQLQESGGGLVQAGGSLRLSCAASGTIFPYGPMGWYRQAPGKERELVATISRGGTTNYADSVKGRFTISRDNAKNTVYLQMNSLKPEDTAVYYCAVAPDFDSTHEYWGQGTQVTVSS

SEQ ID NO: 21710 - protein, 121 aa, Artificial Sequence
  Chemically Synthesized
QVQLQESGGGLVQAGGSLRLSCAASGNISGAPGMGWYRQAPGKERELVATIDYGSTTNYADSVKGRFTISRDNAKNTVYLQMNSLKPEDTAVYYCAAVTADSHYINSRIYWGQGTQVTVSS

SEQ ID NO: 21711 - protein, 118 aa, Artificial Sequence
  Chemically Synthesized
QVQLQESGGGLVQAGGSLRLSCAASGNIFLRYDMGWYRQAPGKERELVAAIAFGAITNYADSVKGRFTISRDNAKNTVYLQMNSLKPEDTAVYYCAAGWYYGGDHPYWGQGTQVTVSS

SEQ ID NO: 21712 - protein, 118 aa, Artificial Sequence
  Chemically Synthesized
QVQLQESGGGLVQAGGSLRLSCAASGTISARRTMGWYRQAPGKEREFVATIGNGGITYYADSVKGRFTISRDNAKNTVYLQMNSLKPEDTAVYYCAVVLYTYYLLYYWGQGTQVTVSS

SEQ ID NO: 21713 - protein, 126 aa, Artificial Sequence
  Chemically Synthesized
QVQLQESGGGLVQAGGSLRLSCAASGTIFPHYAMGWYRQAPGKERELVAGIATGGSTNYADSVKGRFTISRDNAKNTVYLQMNSLKPEDTAVYYCAVKYYGGRRAWVIGPRYLGYWGQGTQVTVSS

SEQ ID NO: 21714 - protein, 116 aa, Artificial Sequence
  Chemically Synthesized
QVQLQESGGGLVQAGGSLRLSCAASGYISTYLMGWYRQAPGKEREFVAAIDVGTNTYYADSVKGRFTISRDNAKNTVYLQMNSLKPEDTAVYYCAAEASVTVLFYWGQGTQVTVSS

SEQ ID NO: 21715 - protein, 122 aa, Artificial Sequence
  Chemically Synthesized
QVQLQESGGGLVQAGGSLRLSCAASGTIFSVSTMGWYRQAPGKEREFVASIDLGGTTYYADSVKGRFTISRDNAKNTVYLQMNSLKPEDTAVYYCAAVLPYRQYDDKYYIYWGQGTQVTVSS

SEQ ID NO: 21716 - protein, 126 aa, Artificial Sequence
  Chemically Synthesized
QVQLQESGGGLVQAGGSLRLSCAASGYIFDIITMGWYRQAPGKERELVAGISRGTNTNYADSVKGRFTISRDNAKNTVYLQMNSLKPEDTAVYYCAVYPGDGTIYHYQYGYYHRYWGQGTQVTVSS

SEQ ID NO: 21717 - protein, 125 aa, Artificial Sequence
  Chemically Synthesized
QVQLQESGGGLVQAGGSLRLSCAASGYIFYVSMGWYRQAPGKERELVAAINAGGSTNYADSVKGRFTISRDNAKNTVYLQMNSLKPEDTAVYYCAADYPHGLFRTYRVTLTHYYWGQGTQVTVSS

SEQ ID NO: 21718 - protein, 126 aa, Artificial Sequence
  Chemically Synthesized
QVQLQESGGGLVQAGGSLRLSCAASGYIFTSYYMGWYRQAPGKEREFVASINSGGTTNYADSVKGRFTISRDNAKNTVYLQMNSLKPEDTAVYYCAVGYRAGDWVQDYQYYYYRYWGQGTQVTVSS

SEQ ID NO: 21719 - protein, 118 aa, Artificial Sequence
  Chemically Synthesized
QVQLQESGGGLVQAGGSLRLSCAASGSISRVGYMGWYRQAPGKEREFVAAITKGATTYYADSVKGRFTISRDNAKNTVYLQMNSLKPEDTAVYYCAARRRRYASFGYWGQGTQVTVSS

SEQ ID NO: 21720 - protein, 122 aa, Artificial Sequence
  Chemically Synthesized
QVQLQESGGGLVQAGGSLRLSCAASGTIFAAYRMGWYRQAPGKERELVAAITYGGNTYYADSVKGRFTISRDNAKNTVYLQMNSLKPEDTAVYYCAAYVPGPDVGIVWHGYWGQGTQVTVSS

SEQ ID NO: 21721 - protein, 122 aa, Artificial Sequence
  Chemically Synthesized
QVQLQESGGGLVQAGGSLRLSCAASGNISGGGYMGWYRQAPGKEREFVAGIDTGGTTNYADSVKGRFTISRDNAKNTVYLQMNSLKPEDTAVYYCAVITGYYYWRYTLHAYWGQGTQVTVSS

SEQ ID NO: 21722 - protein, 116 aa, Artificial Sequence
  Chemically Synthesized
QVQLQESGGGLVQAGGSLRLSCAASGYISRLEYMGWYRQAPGKERELVAAISQGASTYYADSVKGRFTISRDNAKNTVYLQMNSLKPEDTAVYYCAATSFDPYDYWGQGTQVTVSS

SEQ ID NO: 21723 - protein, 117 aa, Artificial Sequence
  Chemically Synthesized
QVQLQESGGGLVQAGGSLRLSCAASGSIFTGQIMGWYRQAPGKERELVATIDVGGSTNYADSVKGRFTISRDNAKNTVYLQMNSLKPEDTAVYYCAVVASWASNFYWGQGTQVTVSS

SEQ ID NO: 21724 - protein, 122 aa, Artificial Sequence
  Chemically Synthesized
QVQLQESGGGLVQAGGSLRLSCAASGTIFPYRGMGWYRQAPGKEREFVASIGRGGNTYYADSVKGRFTISRDNAKNTVYLQMNSLKPEDTAVYYCAARYQVYRERSSWHYYWGQGTQVTVSS

SEQ ID NO: 21725 - protein, 125 aa, Artificial Sequence
  Chemically Synthesized
QVQLQESGGGLVQAGGSLRLSCAASGTISPTYDMGWYRQAPGKEREFVATIDSGSTTNYADSVKGRFTISRDNAKNTVYLQMNSLKPEDTAVYYCAAEAPYGDTNSVLLVTTIYWGQGTQVTVSS

SEQ ID NO: 21726 - protein, 115 aa, Artificial Sequence
  Chemically Synthesized
QVQLQESGGGLVQAGGSLRLSCAASGTISGVRGMGWYRQAPGKERELVAAINSGASTYYADSVKGRFTISRDNAKNTVYLQMNSLKPEDTAVYYCAAAGKYHEYWGQGTQVTVSS

SEQ ID NO: 21727 - protein, 118 aa, Artificial Sequence
  Chemically Synthesized
QVQLQESGGGLVQAGGSLRLSCAASGTISDTIYMGWYRQAPGKERELVAGIGVGSNTYYADSVKGRFTISRDNAKNTVYLQMNSLKPEDTAVYYCAAFTRDYESHHYWGQGTQVTVSS

SEQ ID NO: 21728 - protein, 122 aa, Artificial Sequence
  Chemically Synthesized
QVQLQESGGGLVQAGGSLRLSCAASGSIFTGYGMGWYRQAPGKERELVATITYGGSTNYADSVKGRFTISRDNAKNTVYLQMNSLKPEDTAVYYCAVYVIDNGDTLGFYPYWGQGTQVTVSS

SEQ ID NO: 21729 - protein, 121 aa, Artificial Sequence
  Chemically Synthesized
QVQLQESGGGLVQAGGSLRLSCAASGSIFYRPDMGWYRQAPGKEREFVASIASGSITNYADSVKGRFTISRDNAKNTVYLQMNSLKPEDTAVYYCAVTVLLRTTTFTLMYWGQGTQVTVSS

SEQ ID NO: 21730 - protein, 117 aa, Artificial Sequence
  Chemically Synthesized
QVQLQESGGGLVQAGGSLRLSCAASGTIFTRYMGWYRQAPGKEREFVATIGDGSITYYADSVKGRFTISRDNAKNTVYLQMNSLKPEDTAVYYCAATDAYEGDFYYWGQGTQVTVSS

SEQ ID NO: 21731 - protein, 121 aa, Artificial Sequence
  Chemically Synthesized
QVQLQESGGGLVQAGGSLRLSCAASGSIFIAFYMGWYRQAPGKERELVPLLLTVLIPYADSVKGRFTISRDNAKNTVYLQMNSLKPEDTAVYYCAATVYDADTYDYIHAYWGQGTQVTVSS

SEQ ID NO: 21732 - protein, 118 aa, Artificial Sequence
  Chemically Synthesized
QVQLQESGGGLVQAGGSLRLSCAASGSIFGRNIMGWYRQAPGKEREFVATIAAGATTNYADSVKGRFTISRDNAKNTVYLQMNSLKPEDTAVYYCAAYYGRRPDHGYWGQGTQVTVSS

SEQ ID NO: 21733 - protein, 116 aa, Artificial Sequence
  Chemically Synthesized
QVQLQESGGGLVQAGGSLRLSCAASGSISVADFMGWYRQAPGKERELVASINSGSTTNYADSVKGRFTISRDNAKNTVYLQMNSLKPEDTAVYYCANTCTTTCIYWGQGTQVTVSS

SEQ ID NO: 21734 - protein, 111 aa, Artificial Sequence
  Chemically Synthesized
QVQLQESGGGLVQAGGSLRLSCAASGTISPSDDMGWYRQAPGKEREFVATISDGTTTNYADSVKGRFTISRDNAKNTVYLQMNSLKPEDTAVYYCAACMYWGQGTQVTVSS

SEQ ID NO: 21735 - protein, 124 aa, Artificial Sequence
  Chemically Synthesized
QVQLQESGGGLVQAGGSLRLSCAASGSIFYPGGMGWYRQAPGKEREFVASIDYGATTNYADSVKGRFTISRDNAKNTVYLQMNSLKPEDTAVYYCAADYATYNIVVVPTGIYYWGQGTQVTVSS

SEQ ID NO: 21736 - protein, 118 aa, Artificial Sequence
  Chemically Synthesized
QVQLQESGGGLVQAGGSLRLSCAASGSISWAQYMGWYRQAPGKERELVAAISWGSSTNYADSVKGRFTISRDNAKNTVYLQMNSLKPEDTAVYYCAVEEPTISTHTYWGQGTQVTVSS

SEQ ID NO: 21737 - protein, 118 aa, Artificial Sequence
  Chemically Synthesized
QVQLQESGGGLVQAGGSLRLSCAASGYISAWGDMGWYRQAPGKEREFVASISYGSTTNYADSVKGRFTISRDNAKNTVYLQMNSLKPEDTAVYYCAVADQDTQGYDYWGQGTQVTVSS

SEQ ID NO: 21738 - protein, 118 aa, Artificial Sequence
  Chemically Synthesized
QVQLQESGGGLVQAGGSLRLSCAASGSISATHYMGWYRQAPGKERELVAGITQGGITYYADSVKGRFTISRDNAKNTVYLQMNSLKPEDTAVYYCAVGSYRYRPHLYWGQGTQVTVSS

SEQ ID NO: 21739 - protein, 111 aa, Artificial Sequence
  Chemically Synthesized
QVQLQESGGGLVQAGGSLRLSCAASGTIFKAYTMGWYRQAPGKEREFVASIDYGATTYYADSVKGRFTISRDNAKNTVYLQMNSLKPEDTAVYYCAVLYYWGQGTQVTVSS

SEQ ID NO: 21740 - protein, 122 aa, Artificial Sequence
  Chemically Synthesized
QVQLQESGGGLVQAGGSLRLSCAASGTIFYDGMGWYRQAPGKERELVATIGNGGTTNYADSVKGRFTISRDNAKNTVYLQMNSLKPEDTAVYYCAADYDILWSDSDGHHRYWGQGTQVTVSS

SEQ ID NO: 21741 - protein, 122 aa, Artificial Sequence
  Chemically Synthesized
QVQLQESGGGLVQAGGSLRLSCAASGYISYFVNMGWYRQAPGKERELVAGIDYGTNTYYADSVKGRFTISRDNAKNTVYLQMNSLKPEDTAVYYCAVARSGEDLDIGDHYYWGQGTQVTVSS

SEQ ID NO: 21742 - protein, 128 aa, Artificial Sequence
  Chemically Synthesized
QVQLQESGGGLVQAGGSLRLSCAASGYISSRVSMGWYRQAPGKEREFVAAITIGGNTYYADSVKGRFTISRDNAKNTVYLQMNSLKPEDTAVYYCAADDYFDWLDYIYVYDRYILIYWGQGTQVTVSS

SEQ ID NO: 21743 - protein, 118 aa, Artificial Sequence
  Chemically Synthesized
QVQLQESGGGLVQAGGSLRLSCAASGYIFPVTHMGWYRQAPGKERELVAAISDGTTTNYADSVKGRFTISRDNAKNTVYLQMNSLKPEDTAVYYCAVGYYDRYVLTYWGQGTQVTVSS

SEQ ID NO: 21744 - protein, 122 aa, Artificial Sequence
  Chemically Synthesized
QVQLQESGGGLVQAGGSLRLSCAASGTISRYDLMGWYRQAPGKERELVAAIGYGTNTYYADSVKGRFTISRDNAKNTVYLQMNSLKPEDTAVYYCAAYIAGYYVPVYQHAYWGQGTQVTVSS

SEQ ID NO: 21745 - protein, 114 aa, Artificial Sequence
  Chemically Synthesized
QVQLQESGGGLVQAGGSLRLSCAASGTISGEAYMGWYRQAPGKERELVAGIGYGTTTYYADSVKGRFTISRDNAKNTVYLQMNSLKPEDTAVYYCAATEVSYYWGQGTQVTVSS

SEQ ID NO: 21746 - protein, 122 aa, Artificial Sequence
  Chemically Synthesized
QVQLQESGGGLVQAGGSLRLSCAASGTISYTDNMGWYRQAPGKERELVAAISVGTTTNYADSVKGRFTISRDNAKNTVYLQMNSLKPEDTAVYYCAVEAEYYDVPTVDLDYWGQGTQVTVSS

SEQ ID NO: 21747 - protein, 118 aa, Artificial Sequence
  Chemically Synthesized
QVQLQESGGGLVQAGGSLRLSCAASGNISDWYRMGWYRQAPGKEREFVATIGYGATTNYADSVKGRFTISRDNAKNTVYLQMNSLKPEDTAVYYCAVIQDYTYHYAYWGQGTQVTVSS

SEQ ID NO: 21748 - protein, 122 aa, Artificial Sequence
  Chemically Synthesized
QVQLQESGGGLVQAGGSLRLSCAASGNISQASPMGWYRQAPGKEREFVAGIGRGGTTNYADSVKGRFTISRDNAKNTVYLQMNSLKPEDTAVYYCAALDGDNSYVLLFHPYWGQGTQVTVSS

SEQ ID NO: 21749 - protein, 117 aa, Artificial Sequence
  Chemically Synthesized
QVQLQESGGGLVQAGGSLRLSCAASGYISSLLMGWYRQAPGKERELVAAIGVGTNTYYADSVKGRFTISRDNAKNTVYLQMNSLKPEDTAVYYCAVWGISYERHVYWGQGTQVTVSS

SEQ ID NO: 21750 - protein, 126 aa, Artificial Sequence
  Chemically Synthesized
QVQLQESGGGLVQAGGSLRLSCAASGSISSTYSMGWYRQAPGKEREFVATIGYGGITYYADSVKGRFTISRDNAKNTVYLQMNSLKPEDTAVYYCAVHTFTYAVYTSIGESRHGYWGQGTQVTVSS

SEQ ID NO: 21751 - protein, 122 aa, Artificial Sequence
  Chemically Synthesized
QVQLQESGGGLVQAGGSLRLSCAASGYIFKSEAMGWYRQAPGKEREFVAAIAYGGNTNYADSVKGRFTISRDNAKNTVYLQMNSLKPEDTAVYYCAVVLRRGYDDYSIYYYWGQGTQVTVSS

SEQ ID NO: 21752 - protein, 118 aa, Artificial Sequence
  Chemically Synthesized
QVQLQESGGGLVQAGGSLRLSCAASGYIFPDIIMGWYRQAPGKEREFVAAINGGGSTNYADSVKGRFTISRDNAKNTVYLQMNSLKPEDTAVYYCAAAFKAVYYHWYWGQGTQVTVSS

SEQ ID NO: 21753 - protein, 121 aa, Artificial Sequence
  Chemically Synthesized
QVQLQESGGGLVQAGGSLRLSCAASGSISYRLTMGWYRQAPGKEREFVATIDYGASTYADSVKGRFTISRDNAKNTVYLQMNSLKPEDTAVYYCAVENWYSHRTGYIYEYWGQGTQVTVSS

SEQ ID NO: 21754 - protein, 118 aa, Artificial Sequence
  Chemically Synthesized
QVQLQESGGGLVQAGGSLRLSCAASGTISVPSSMGWYRQAPGKEREFVAAISWGTNTYYADSVKGRFTISRDNAKNTVYLQMNSLKPEDTAVYYCAAIAGAPPRHAYWGQGTQVTVSS

SEQ ID NO: 21755 - protein, 115 aa, Artificial Sequence
  Chemically Synthesized
QVQLQESGGGLVQAGGSLRLSCAASGTISDPILMGWYRQAPGKERELVAANYADSVKGRFTISRDNAKNTVYLQMNSLKPEDTAVYYCAVRVHPYTPDADDFHYWGQGTQVTVSS

SEQ ID NO: 21756 - protein, 111 aa, Artificial Sequence
  Chemically Synthesized
QVQLQESGGGLVQAGGSLRLSCAASGYIFYIQDMGWYRQAPGKEREFVASITNGTNTYYADSVKGRFTISRDNAKNTVYLQMNSLKPEDTAVYYCAVVLYWGQGTQVTVSS

SEQ ID NO: 21757 - protein, 118 aa, Artificial Sequence
  Chemically Synthesized
QVQLQESGGGLVQAGGSLRLSCAASGTIFRPSGMGWYRQAPGKERELVAAISDGSITNYADSVKGRFTISRDNAKNTVYLQMNSLKPEDTAVYYCAVPWFGYLSHSYWGQGTQVTVSS

SEQ ID NO: 21758 - protein, 117 aa, Artificial Sequence
  Chemically Synthesized
QVQLQESGGGLVQAGGSLRLSCAASGTISGPTRMGWYRQAPGKERELVAAIAWGGITYYADSVKGRFTISRDNAKNTVYLQMNSLKPEDTAVYYCALLTLTTTVIYWGQGTQVTVSS

SEQ ID NO: 21759 - protein, 118 aa, Artificial Sequence
  Chemically Synthesized
QVQLQESGGGLVQAGGSLRLSCAASGNISPRYYMGWYRQAPGKEREFVAGINKGASTNYADSVKGRFTISRDNAKNTVYLQMNSLKPEDTAVYYCAVVYYGDRYHGYWGQGTQVTVSS

SEQ ID NO: 21760 - protein, 118 aa, Artificial Sequence
  Chemically Synthesized
QVQLQESGGGLVQAGGSLRLSCAASGTIFKYHSMGWYRQAPGKERELVASINRGSNTNYADSVKGRFTISRDNAKNTVYLQMNSLKPEDTAVYYCAVIYYSRWWHYYWGQGTQVTVSS

SEQ ID NO: 21761 - protein, 117 aa, Artificial Sequence
  Chemically Synthesized
QVQLQESGGGLVQAGGSLRLSCAASGTIFLRIVMGWYRQAPGKERELVAGIGSGTSTYYADSVKGRFTISRDNAKNTVYLQMNSLKPEDTAVYYCAAYPYDAVVHYWGQGTQVTVSS

SEQ ID NO: 21762 - protein, 122 aa, Artificial Sequence
  Chemically Synthesized
QVQLQESGGGLVQAGGSLRLSCAASGSISPYYAMGWYRQAPGKEREFVAAINQGGSTYYADSVKGRFTISRDNAKNTVYLQMNSLKPEDTAVYYCAVLVYLHTQYNNGLYYWGQGTQVTVSS

SEQ ID NO: 21763 - protein, 118 aa, Artificial Sequence
  Chemically Synthesized
QVQLQESGGGLVQAGGSLRLSCAASGTISRAFDMGWYRQAPGKEREFVATIAYGASTNYADSVKGRFTISRDNAKNTVYLQMNSLKPEDTAVYYCAAPFDWDGTHDYWGQGTQVTVSS

SEQ ID NO: 21764 - protein, 118 aa, Artificial Sequence
  Chemically Synthesized
QVQLQESGGGLVQAGGSLRLSCAASGTISDYGGMGWYRQAPGKERELVATIGDGANTNYADSVKGRFTISRDNAKNTVYLQMNSLKPEDTAVYYCAAAAFTRSTNLYWGQGTQVTVSS

SEQ ID NO: 21765 - protein, 118 aa, Artificial Sequence
  Chemically Synthesized
QVQLQESGGGLVQAGGSLRLSCAASGNIFRRSAMGWYRQAPGKEREFVASIGIGGNTNYADSVKGRFTISRDNAKNTVYLQMNSLKPEDTAVYYCAVIPDSYYDYTYWGQGTQVTVSS

SEQ ID NO: 21766 - protein, 118 aa, Artificial Sequence
  Chemically Synthesized
QVQLQESGGGLVQAGGSLRLSCAASGYISGVRAMGWYRQAPGKERELVATIDFGSNTNYADSVKGRFTISRDNAKNTVYLQMNSLKPEDTAVYYCAVLYWADQWHYYWGQGTQVTVSS

SEQ ID NO: 21767 - protein, 118 aa, Artificial Sequence
  Chemically Synthesized
QVQLQESGGGLVQAGGSLRLSCAASGNIFDFAYMGWYRQAPGKEREFVATIAYGSSTNYADSVKGRFTISRDNAKNTVYLQMNSLKPEDTAVYYCAAISYVRYYHGYWGQGTQVTVSS

SEQ ID NO: 21768 - protein, 122 aa, Artificial Sequence
  Chemically Synthesized
QVQLQESGGGLVQAGGSLRLSCAASGNIFWYVHMGWYRQAPGKERELVATINIGAITYYADSVKGRFTISRDNAKNTVYLQMNSLKPEDTAVYYCAARYYPWRFYHDQLLYWGQGTQVTVSS

SEQ ID NO: 21769 - protein, 122 aa, Artificial Sequence
  Chemically Synthesized
QVQLQESGGGLVQAGGSLRLSCAASGTISSAYYMGWYRQAPGKERELVATINNGGTTYYADSVKGRFTISRDNAKNTVYLQMNSLKPEDTAVYYCAAGYTTLRAADHLHWYWGQGTQVTVSS

SEQ ID NO: 21770 - protein, 116 aa, Artificial Sequence
  Chemically Synthesized
QVQLQESGGGLVQAGGSLRLSCAASGTISADPAMGWYRQAPGKERELVAGISRGGTTNYADSVKGRFTISRDNAKNTVYLQMNSLKPEDTAVYYCAAVYDVSHYYWGQGTQVTVSS

SEQ ID NO: 21771 - protein, 118 aa, Artificial Sequence
  Chemically Synthesized
QVQLQESGGGLVQAGGSLRLSCAASGYIFVSDAMGWYRQAPGKERELVASIAYGASTNYADSVKGRFTISRDNAKNTVYLQMNSLKPEDTAVYYCAVDTYLSVYFIYWGQGTQVTVSS

SEQ ID NO: 21772 - protein, 116 aa, Artificial Sequence
  Chemically Synthesized
QVQLQESGGGLVQAGGSLRLSCAASGNIFGLYFMGWYRQAPGKERELVATINMVVVPYADSVKGRFTISRDNAKNTVYLQMNSLKPEDTAVYYCAVYRRAWVNHYWGQGTQVTVSS

SEQ ID NO: 21773 - protein, 122 aa, Artificial Sequence
  Chemically Synthesized
QVQLQESGGGLVQAGGSLRLSCAASGNISYTYVMGWYRQAPGKEREFVAAISDGGTTYYADSVKGRFTISRDNAKNTVYLQMNSLKPEDTAVYYCAALYAGIFNLDDLLGYWGQGTQVTVSS

SEQ ID NO: 21774 - protein, 120 aa, Artificial Sequence
  Chemically Synthesized
QVQLQESGGGLVQAGGSLRLSCAASGTILTVLMGWYRQAPGKERELVASITYGSTTNYADSVKGRFTISRDNAKNTVYLQMNSLKPEDTAVYYCAAYVYDYVATDSVMYWGQGTQVTVSS

SEQ ID NO: 21775 - protein, 122 aa, Artificial Sequence
  Chemically Synthesized
QVQLQESGGGLVQAGGSLRLSCAASGSISQPSVMGWYRQAPGKEREFVASIGFGATTNYADSVKGRFTISRDNAKNTVYLQMNSLKPEDTAVYYCAVLADHFGAGRRYHWYWGQGTQVTVSS

SEQ ID NO: 21776 - protein, 125 aa, Artificial Sequence
  Chemically Synthesized
QVQLQESGGGLVQAGGSLRLSCAASGNISGWAYMGWYRQAPGKERELVAAITVGSSTYYADSVKGRFTISRDNAKNTVYLQMNSLKPEDTAVYYCAVRDTSYYYSGYSTGFSIYWGQGTQVTVSS

SEQ ID NO: 21777 - protein, 126 aa, Artificial Sequence
  Chemically Synthesized
QVQLQESGGGLVQAGGSLRLSCAASGYISSDYTMGWYRQAPGKEREFVAGIDWGTNTYYADSVKGRFTISRDNAKNTVYLQMNSLKPEDTAVYYCAVWTYILLIWNDRTRGYYDYWGQGTQVTVSS

SEQ ID NO: 21778 - protein, 118 aa, Artificial Sequence
  Chemically Synthesized
QVQLQESGGGLVQAGGSLRLSCAASGYIFPQPYMGWYRQAPGKERELVATIGTGGNTYYADSVKGRFTISRDNAKNTVYLQMNSLKPEDTAVYYCAVVRSTGNPLRYWGQGTQVTVSS

SEQ ID NO: 21779 - protein, 121 aa, Artificial Sequence
  Chemically Synthesized
QVQLQESGGGLVQAGGSLRLSCAASGTIFLSDHMGWYRQAPGKEREFVPLLMLVLLPYADSVKGRFTISRDNAKNTVYLQMNSLKPEDTAVYYCAALYFQNVETGQQLSYWGQGTQVTVSS

SEQ ID NO: 21780 - protein, 118 aa, Artificial Sequence
  Chemically Synthesized
QVQLQESGGGLVQAGGSLRLSCAASGTISVSVIMGWYRQAPGKEREFVAGIGTGGSTNYADSVKGRFTISRDNAKNTVYLQMNSLKPEDTAVYYCAVAWSDRGYHYYWGQGTQVTVSS

SEQ ID NO: 21781 - protein, 118 aa, Artificial Sequence
  Chemically Synthesized
QVQLQESGGGLVQAGGSLRLSCAASGSIFRVPYMGWYRQAPGKEREFVASIAGGGTTNYADSVKGRFTISRDNAKNTVYLQMNSLKPEDTAVYYCAAYSRYYGSHPYWGQGTQVTVSS

SEQ ID NO: 21782 - protein, 118 aa, Artificial Sequence
  Chemically Synthesized
QVQLQESGGGLVQAGGSLRLSCAASGYISYVPFMGWYRQAPGKERELVAAIAPGGTTNYADSVKGRFTISRDNAKNTVYLQMNSLKPEDTAVYYCAVVWRQDSYYYYWGQGTQVTVSS

SEQ ID NO: 21783 - protein, 118 aa, Artificial Sequence
  Chemically Synthesized
QVQLQESGGGLVQAGGSLRLSCAASGYIFYNLSMGWYRQAPGKERELVATITFGGTTNYADSVKGRFTISRDNAKNTVYLQMNSLKPEDTAVYYCAVTGIGEPHHAYWGQGTQVTVSS

SEQ ID NO: 21784 - protein, 126 aa, Artificial Sequence
  Chemically Synthesized
QVQLQESGGGLVQAGGSLRLSCAASGNISSSATMGWYRQAPGKERELVAGIGSGGSTYYADSVKGRFTISRDNAKNTVYLQMNSLKPEDTAVYYCAVGYVAEPYYYQAEKREHEYWGQGTQVTVSS

SEQ ID NO: 21785 - protein, 121 aa, Artificial Sequence
  Chemically Synthesized
QVQLQESGGGLVQAGGSLRLSCAASGTIFNWKDMGWYRQAPGKERELVALLMLVVIPYADSVKGRFTISRDNAKNTVYLQMNSLKPEDTAVYYCAVGITLADTKKLIHYYWGQGTQVTVSS

SEQ ID NO: 21786 - protein, 122 aa, Artificial Sequence
  Chemically Synthesized
QVQLQESGGGLVQAGGSLRLSCAASGSISAYVGMGWYRQAPGKEREFVATINQGGSTNYADSVKGRFTISRDNAKNTVYLQMNSLKPEDTAVYYCAVVERLGLRTTRYFGYWGQGTQVTVSS

SEQ ID NO: 21787 - protein, 118 aa, Artificial Sequence
  Chemically Synthesized
QVQLQESGGGLVQAGGSLRLSCAASGTISVSSKMGWYRQAPGKEREFVASITGGATTNYADSVKGRFTISRDNAKNTVYLQMNSLKPEDTAVYYCAAIEYTGYFHWYWGQGTQVTVSS

SEQ ID NO: 21788 - protein, 118 aa, Artificial Sequence
  Chemically Synthesized
QVQLQESGGGLVQAGGSLRLSCAASGYIFTSDVMGWYRQAPGKEREFVASITDGTITNYADSVKGRFTISRDNAKNTVYLQMNSLKPEDTAVYYCAAVITSKPYYYYWGQGTQVTVSS

SEQ ID NO: 21789 - protein, 118 aa, Artificial Sequence
  Chemically Synthesized
QVQLQESGGGLVQAGGSLRLSCAASGSIFRLTAMGWYRQAPGKEREFVATIDVGATTNYADSVKGRFTISRDNAKNTVYLQMNSLKPEDTAVYYCAAIRYYGLYHGYWGQGTQVTVSS

SEQ ID NO: 21790 - protein, 126 aa, Artificial Sequence
  Chemically Synthesized
QVQLQESGGGLVQAGGSLRLSCAASGNIFGLYRMGWYRQAPGKEREFVAGISIGTNTYYADSVKGRFTISRDNAKNTVYLQMNSLKPEDTAVYYCAAESGHYDDPDGYDHRLPFYWGQGTQVTVSS

SEQ ID NO: 21791 - protein, 121 aa, Artificial Sequence
  Chemically Synthesized
QVQLQESGGGLVQAGGSLRLSCAASGNISLPLTMGWYRQAPGKERELVAAIAVGGNTYYADSVKGRFTISRDNAKNTVYLQMNSLKPEDTAVYYCAVTVLTTTGTTLTIYWGQGTQVTVSS

SEQ ID NO: 21792 - protein, 126 aa, Artificial Sequence
  Chemically Synthesized
QVQLQESGGGLVQAGGSLRLSCAASGYIFHYLWMGWYRQAPGKERELVATIDSGSNTYYADSVKGRFTISRDNAKNTVYLQMNSLKPEDTAVYYCAAYGRRDAQTWYVQVRGFWYWGQGTQVTVSS

SEQ ID NO: 21793 - protein, 122 aa, Artificial Sequence
  Chemically Synthesized
QVQLQESGGGLVQAGGSLRLSCAASGTIFAGGHMGWYRQAPGKEREFVAAINYGTNTYYADSVKGRFTISRDNAKNTVYLQMNSLKPEDTAVYYCAAVGSRRGPAQGYHYYWGQGTQVTVSS

SEQ ID NO: 21794 - protein, 118 aa, Artificial Sequence
  Chemically Synthesized
QVQLQESGGGLVQAGGSLRLSCAASGTIFADGTMGWYRQAPGKEREFVAAITRGGTTNYADSVKGRFTISRDNAKNTVYLQMNSLKPEDTAVYYCAAVILRPPNLAYWGQGTQVTVSS

SEQ ID NO: 21795 - protein, 118 aa, Artificial Sequence
  Chemically Synthesized
QVQLQESGGGLVQAGGSLRLSCAASGSIFVDSYMGWYRQAPGKERELVATIDYGATTNYADSVKGRFTISRDNAKNTVYLQMNSLKPEDTAVYYCAVPSYSPVDKLYWGQGTQVTVSS

SEQ ID NO: 21796 - protein, 122 aa, Artificial Sequence
  Chemically Synthesized
QVQLQESGGGLVQAGGSLRLSCAASGTISKSYTMGWYRQAPGKEREFVAAITTGATTYYADSVKGRFTISRDNAKNTVYLQMNSLKPEDTAVYYCAVLGGYDYRQYLTHWYWGQGTQVTVSS

SEQ ID NO: 21797 - protein, 118 aa, Artificial Sequence
  Chemically Synthesized
QVQLQESGGGLVQAGGSLRLSCAASGYISRPINMGWYRQAPGKERELVAGITTGTSTYYADSVKGRFTISRDNAKNTVYLQMNSLKPEDTAVYYCAALYLYRATHVYWGQGTQVTVSS

SEQ ID NO: 21798 - protein, 122 aa, Artificial Sequence
  Chemically Synthesized
QVQLQESGGGLVQAGGSLRLSCAASGSISDVAWMGWYRQAPGKERELVAGIASGATTNYADSVKGRFTISRDNAKNTVYLQMNSLKPEDTAVYYCAARPEAGGGFSHRFGYWGQGTQVTVSS

SEQ ID NO: 21799 - protein, 126 aa, Artificial Sequence
  Chemically Synthesized
QVQLQESGGGLVQAGGSLRLSCAASGNISREDNMGWYRQAPGKERELVATISDGTTTYYADSVKGRFTISRDNAKNTVYLQMNSLKPEDTAVYYCAAYQHTGFYDKRYYVANHGYWGQGTQVTVSS

SEQ ID NO: 21800 - protein, 118 aa, Artificial Sequence
  Chemically Synthesized
QVQLQESGGGLVQAGGSLRLSCAASGSIFAPLAMGWYRQAPGKERELVATIGPGGNTYYADSVKGRFTISRDNAKNTVYLQMNSLKPEDTAVYYCAVNTDYGDDYLYWGQGTQVTVSS

SEQ ID NO: 21801 - protein, 126 aa, Artificial Sequence
  Chemically Synthesized
QVQLQESGGGLVQAGGSLRLSCAASGSIFGIQYMGWYRQAPGKEREFVAAITKGGTTNYADSVKGRFTISRDNAKNTVYLQMNSLKPEDTAVYYCAALVHIDFPVSAYSPQYLAYWGQGTQVTVSS

SEQ ID NO: 21802 - protein, 124 aa, Artificial Sequence
  Chemically Synthesized
QVQLQESGGGLVQAGGSLRLSCAASGYIFGDDMGWYRQAPGKEREFVAAINDGSSTNYADSVKGRFTISRDNAKNTVYLQMNSLKPEDTAVYYCAVGLTEPGLAAVLVLSNFYWGQGTQVTVSS

SEQ ID NO: 21803 - protein, 122 aa, Artificial Sequence
  Chemically Synthesized
QVQLQESGGGLVQAGGSLRLSCAASGTISGNFWMGWYRQAPGKEREFVASIGRGSITNYADSVKGRFTISRDNAKNTVYLQMNSLKPEDTAVYYCAAYIRVRWFDVIRLSYWGQGTQVTVSS

SEQ ID NO: 21804 - protein, 118 aa, Artificial Sequence
  Chemically Synthesized
QVQLQESGGGLVQAGGSLRLSCAASGTIFYYRYMGWYRQAPGKERELVAAIDYGATTYYADSVKGRFTISRDNAKNTVYLQMNSLKPEDTAVYYCAVYKGRWTRHYYWGQGTQVTVSS

SEQ ID NO: 21805 - protein, 118 aa, Artificial Sequence
  Chemically Synthesized
QVQLQESGGGLVQAGGSLRLSCAASGYISRYKYMGWYRQAPGKEREFVAAIGDGTITNYADSVKGRFTISRDNAKNTVYLQMNSLKPEDTAVYYCAALLYVKQWHSYWGQGTQVTVSS

SEQ ID NO: 21806 - protein, 122 aa, Artificial Sequence
  Chemically Synthesized
QVQLQESGGGLVQAGGSLRLSCAASGNISDYAFMGWYRQAPGKERELVAAIANGTNTNYADSVKGRFTISRDNAKNTVYLQMNSLKPEDTAVYYCAVDDIYITYYVYQYPYWGQGTQVTVSS

SEQ ID NO: 21807 - protein, 118 aa, Artificial Sequence
  Chemically Synthesized
QVQLQESGGGLVQAGGSLRLSCAASGNIFNSLIMGWYRQAPGKEREFVAAIAPGGNTNYADSVKGRFTISRDNAKNTVYLQMNSLKPEDTAVYYCAAVGPAVAYHSYWGQGTQVTVSS

SEQ ID NO: 21808 - protein, 118 aa, Artificial Sequence
  Chemically Synthesized
QVQLQESGGGLVQAGGSLRLSCAASGSIFALDYMGWYRQAPGKEREFVAAINAGGNTNYADSVKGRFTISRDNAKNTVYLQMNSLKPEDTAVYYCAALHYRDTFHAYWGQGTQVTVSS

SEQ ID NO: 21809 - protein, 126 aa, Artificial Sequence
  Chemically Synthesized
QVQLQESGGGLVQAGGSLRLSCAASGSISRVDYMGWYRQAPGKEREFVATISSGGTTNYADSVKGRFTISRDNAKNTVYLQMNSLKPEDTAVYYCAAVVRRGITQVGPSYGYLYYWGQGTQVTVSS

SEQ ID NO: 21810 - protein, 118 aa, Artificial Sequence
  Chemically Synthesized
QVQLQESGGGLVQAGGSLRLSCAASGSISDFRDMGWYRQAPGKEREFVATISFGSNTNYADSVKGRFTISRDNAKNTVYLQMNSLKPEDTAVYYCAARYGPTPRYVYWGQGTQVTVSS

SEQ ID NO: 21811 - protein, 121 aa, Artificial Sequence
  Chemically Synthesized
QVQLQESGGGLVQAGGSLRLSCAASGYFLLVTMGWYRQAPGKERELVAGITFGSITNYADSVKGRFTISRDNAKNTVYLQMNSLKPEDTAVYYCAVVVGGPPTDDTSYAYWGQGTQVTVSS

SEQ ID NO: 21812 - protein, 117 aa, Artificial Sequence
  Chemically Synthesized
QVQLQESGGGLVQAGGSLRLSCAASGTIFATSAMGWYRQAPGKERELVAGIDTVLVPYADSVKGRFTISRDNAKNTVYLQMNSLKPEDTAVYYCAALDDRPLDLQYWGQGTQVTVSS

SEQ ID NO: 21813 - protein, 121 aa, Artificial Sequence
  Chemically Synthesized
QVQLQESGGGLVQAGGSLRLSCAASGTIFYTVMGWYRQAPGKEREFVASIGNGASTNYADSVKGRFTISRDNAKNTVYLQMNSLKPEDTAVYYCAALLIADHRSQYRLYYWGQGTQVTVSS

SEQ ID NO: 21814 - protein, 118 aa, Artificial Sequence
  Chemically Synthesized
QVQLQESGGGLVQAGGSLRLSCAASGYISPTRFMGWYRQAPGKEREFVAAITYGSSTYYADSVKGRFTISRDNAKNTVYLQMNSLKPEDTAVYYCAVANYLFATLRYWGQGTQVTVSS

SEQ ID NO: 21815 - protein, 122 aa, Artificial Sequence
  Chemically Synthesized
QVQLQESGGGLVQAGGSLRLSCAASGNISLQNDMGWYRQAPGKEREFVASITSGASTNYADSVKGRFTISRDNAKNTVYLQMNSLKPEDTAVYYCAAWYDYAYYWDTSHVYWGQGTQVTVSS

SEQ ID NO: 21816 - protein, 118 aa, Artificial Sequence
  Chemically Synthesized
QVQLQESGGGLVQAGGSLRLSCAASGTISEYTAMGWYRQAPGKEREFVAGIALGGNTNYADSVKGRFTISRDNAKNTVYLQMNSLKPEDTAVYYCAVIFRDWGYFHYWGQGTQVTVSS

SEQ ID NO: 21817 - protein, 118 aa, Artificial Sequence
  Chemically Synthesized
QVQLQESGGGLVQAGGSLRLSCAASGSIFDGYYMGWYRQAPGKERELVASIDFGGNTNYADSVKGRFTISRDNAKNTVYLQMNSLKPEDTAVYYCAAWPYLTPWFVYWGQGTQVTVSS

SEQ ID NO: 21818 - protein, 122 aa, Artificial Sequence
  Chemically Synthesized
QVQLQESGGGLVQAGGSLRLSCAASGYILTGVLMGWYRQAPGKERELVASIASGSITYYADSVKGRFTISRDNAKNTVYLQMNSLKPEDTAVYYCAAGYVNLEDYYYRLEYWGQGTQVTVSS

SEQ ID NO: 21819 - protein, 126 aa, Artificial Sequence
  Chemically Synthesized
QVQLQESGGGLVQAGGSLRLSCAASGTISDVYPMGWYRQAPGKEREFVAGIDLGTSTYYADSVKGRFTISRDNAKNTVYLQMNSLKPEDTAVYYCAAYHDVPRYDGLPERAPHWYWGQGTQVTVSS

SEQ ID NO: 21820 - protein, 118 aa, Artificial Sequence
  Chemically Synthesized
QVQLQESGGGLVQAGGSLRLSCAASGTISYSGIMGWYRQAPGKEREFVAGIGFGGNTYYADSVKGRFTISRDNAKNTVYLQMNSLKPEDTAVYYCAVVQYNTRWLAYWGQGTQVTVSS

SEQ ID NO: 21821 - protein, 118 aa, Artificial Sequence
  Chemically Synthesized
QVQLQESGGGLVQAGGSLRLSCAASGYISNYNYMGWYRQAPGKEREFVATINDGTSTNYADSVKGRFTISRDNAKNTVYLQMNSLKPEDTAVYYCAVTIYHTKWFGYWGQGTQVTVSS

SEQ ID NO: 21822 - protein, 109 aa, Artificial Sequence
  Chemically Synthesized
QVQLQESGGGLVQAGGSLRLSCAASGTISEKRGMGWYRQAPGKERELVAGIDHGATTNYADSVKGRFTISRDNAKNTVYLQMNSLKPEDTAVYYCAAYWGQGTQVTVSS

SEQ ID NO: 21823 - protein, 118 aa, Artificial Sequence
  Chemically Synthesized
QVQLQESGGGLVQAGGSLRLSCAASGSIFYFLSMGWYRQAPGKEREFVAAIGKGGNTNYADSVKGRFTISRDNAKNTVYLQMNSLKPEDTAVYYCAVRNTYVIGFRYWGQGTQVTVSS

SEQ ID NO: 21824 - protein, 118 aa, Artificial Sequence
  Chemically Synthesized
QVQLQESGGGLVQAGGSLRLSCAASGYISPVDIMGWYRQAPGKEREFVATIANGSNTYYADSVKGRFTISRDNAKNTVYLQMNSLKPEDTAVYYCAVRGQYDDAYAYWGQGTQVTVSS

SEQ ID NO: 21825 - protein, 117 aa, Artificial Sequence
  Chemically Synthesized
QVQLQESGGGLVQAGGSLRLSCAASGNIFTRNLMGWYRQAPGKERELVAGISGTNTNYADSVKGRFTISRDNAKNTVYLQMNSLKPEDTAVYYCAAITYRGHYYYYWGQGTQVTVSS

SEQ ID NO: 21826 - protein, 118 aa, Artificial Sequence
  Chemically Synthesized
QVQLQESGGGLVQAGGSLRLSCAASGNISDHSDMGWYRQAPGKEREFVASISTGANTNYADSVKGRFTISRDNAKNTVYLQMNSLKPEDTAVYYCAASRGPLFVYGYWGQGTQVTVSS

SEQ ID NO: 21827 - protein, 121 aa, Artificial Sequence
  Chemically Synthesized
QVQLQESGGGLVQAGGSLRLSCAASGTISATYMGWYRQAPGKERELVAAISDGGITYYADSVKGRFTISRDNAKNTVYLQMNSLKPEDTAVYYCAVGGVDNPDGAPHHVYWGQGTQVTVSS

SEQ ID NO: 21828 - protein, 118 aa, Artificial Sequence
  Chemically Synthesized
QVQLQESGGGLVQAGGSLRLSCAASGYISYLYIMGWYRQAPGKEREFVAAISIGGNTYYADSVKGRFTISRDNAKNTVYLQMNSLKPEDTAVYYCAAIGLYYLTHIYWGQGTQVTVSS

SEQ ID NO: 21829 - protein, 126 aa, Artificial Sequence
  Chemically Synthesized
QVQLQESGGGLVQAGGSLRLSCAASGTIFPWGYMGWYRQAPGKERELVASISYGATTYYADSVKGRFTISRDNAKNTVYLQMNSLKPEDTAVYYCAVWWYAGWRDLNYLYGYHYYWGQGTQVTVSS

SEQ ID NO: 21830 - protein, 120 aa, Artificial Sequence
  Chemically Synthesized
QVQLQESGGGLVQAGGSLRLSCAASGNYETDMGWYRQAPGKERELVATIGSGGITNYADSVKGRFTISRDNAKNTVYLQMNSLKPEDTAVYYCAVNSDDIVYTTYNHIYWGQGTQVTVSS

SEQ ID NO: 21831 - protein, 118 aa, Artificial Sequence
  Chemically Synthesized
QVQLQESGGGLVQAGGSLRLSCAASGYIFFSYRMGWYRQAPGKERELVAGIALGASTYYADSVKGRFTISRDNAKNTVYLQMNSLKPEDTAVYYCAADLEDARVLDYWGQGTQVTVSS

SEQ ID NO: 21832 - protein, 126 aa, Artificial Sequence
  Chemically Synthesized
QVQLQESGGGLVQAGGSLRLSCAASGTIFLDSIMGWYRQAPGKERELVAGIAPGTSTNYADSVKGRFTISRDNAKNTVYLQMNSLKPEDTAVYYCAVQDDQFAPWDIGWDSELIYWGQGTQVTVSS

SEQ ID NO: 21833 - protein, 122 aa, Artificial Sequence
  Chemically Synthesized
QVQLQESGGGLVQAGGSLRLSCAASGNIFQLRAMGWYRQAPGKERELVAGISLGGTTNYADSVKGRFTISRDNAKNTVYLQMNSLKPEDTAVYYCAAVGRPQASPRDYHGYWGQGTQVTVSS

SEQ ID NO: 21834 - protein, 121 aa, Artificial Sequence
  Chemically Synthesized
QVQLQESGGGLVQAGGSLRLSCAASGNIFAVYGMGWYRQAPGKEREFVAAINVGGITNYADSVKGRFTISRDNAKNTVYLQMNSLKPEDTAVYYCAVPVDAVDYPQSSMYWGQGTQVTVSS

SEQ ID NO: 21835 - protein, 122 aa, Artificial Sequence
  Chemically Synthesized
QVQLQESGGGLVQAGGSLRLSCAASGTIFARSSMGWYRQAPGKEREFVAGINTGATTNYADSVKGRFTISRDNAKNTVYLQMNSLKPEDTAVYYCAALSIKRGIRGGYLYYWGQGTQVTVSS

SEQ ID NO: 21836 - protein, 118 aa, Artificial Sequence
  Chemically Synthesized
QVQLQESGGGLVQAGGSLRLSCAASGYISAPSVMGWYRQAPGKEREFVAGIGAGTNTYYADSVKGRFTISRDNAKNTVYLQMNSLKPEDTAVYYCAAYHDFTDAHDYWGQGTQVTVSS

SEQ ID NO: 21837 - protein, 118 aa, Artificial Sequence
  Chemically Synthesized
QVQLQESGGGLVQAGGSLRLSCAASGTISRLQRMGWYRQAPGKEREFVAAINGGGSTNYADSVKGRFTISRDNAKNTVYLQMNSLKPEDTAVYYCAAVGRTYGYYYYWGQGTQVTVSS

SEQ ID NO: 21838 - protein, 122 aa, Artificial Sequence
  Chemically Synthesized
QVQLQESGGGLVQAGGSLRLSCAASGNISWGTIMGWYRQAPGKEREFVAAISHGANTNYADSVKGRFTISRDNAKNTVYLQMNSLKPEDTAVYYCAAQSRAGSTRPRYHKYWGQGTQVTVSS

SEQ ID NO: 21839 - protein, 118 aa, Artificial Sequence
  Chemically Synthesized
QVQLQESGGGLVQAGGSLRLSCAASGSIFNNRVMGWYRQAPGKERELVAAISRGTNTYYADSVKGRFTISRDNAKNTVYLQMNSLKPEDTAVYYCAVFDALKGKFAYWGQGTQVTVSS

SEQ ID NO: 21840 - protein, 118 aa, Artificial Sequence
  Chemically Synthesized
QVQLQESGGGLVQAGGSLRLSCAASGNISGTSVMGWYRQAPGKERELVAAISLGGNTYYADSVKGRFTISRDNAKNTVYLQMNSLKPEDTAVYYCAAYWNYKRGFRYWGQGTQVTVSS

SEQ ID NO: 21841 - protein, 121 aa, Artificial Sequence
  Chemically Synthesized
QVQLQESGGGLVQAGGSLRLSCAASGTIFRETVMGWYRQAPGKERELVAAIDDGTSTYYADSVKGRFTISRDNAKNTVYLQMNSLKPEDTAVYYCAARASYTYGRLRFRYWGQGTQVTVSS

SEQ ID NO: 21842 - protein, 118 aa, Artificial Sequence
  Chemically Synthesized
QVQLQESGGGLVQAGGSLRLSCAASGSISNTYVMGWYRQAPGKERELVAAIGHGGTTYYADSVKGRFTISRDNAKNTVYLQMNSLKPEDTAVYYCAVYLSRVRKFYYWGQGTQVTVSS

SEQ ID NO: 21843 - protein, 114 aa, Artificial Sequence
  Chemically Synthesized
QVQLQESGGGLVQAGGSLRLSCAASGTILMGWYRQAPGKEREFVAAIDYGGSTYYADSVKGRFTISRDNAKNTVYLQMNSLKPEDTAVYYCAAYITVEHTHYYWGQGTQVTVSS

SEQ ID NO: 21844 - protein, 118 aa, Artificial Sequence
  Chemically Synthesized
QVQLQESGGGLVQAGGSLRLSCAASGTISRYGYMGWYRQAPGKERELVASISYGTNTYYADSVKGRFTISRDNAKNTVYLQMNSLKPEDTAVYYCAADDHEDRYHTYWGQGTQVTVSS

SEQ ID NO: 21845 - protein, 114 aa, Artificial Sequence
  Chemically Synthesized
QVQLQESGGGLVQAGGSLRLSCAASGNISTDVDMGWYRQAPGKEREFVAGITPGAITNYADSVKGRFTISRDNAKNTVYLQMNSLKPEDTAVYYCAVVTVLIYWGQGTQVTVSS

SEQ ID NO: 21846 - protein, 125 aa, Artificial Sequence
  Chemically Synthesized
QVQLQESGGGLVQAGGSLRLSCAASGYFFRTRMGWYRQAPGKEREFVAGISGGANTNYADSVKGRFTISRDNAKNTVYLQMNSLKPEDTAVYYCAVRWPNPTDDDVVTAGIFPYWGQGTQVTVSS

SEQ ID NO: 21847 - protein, 116 aa, Artificial Sequence
  Chemically Synthesized
QVQLQESGGGLVQAGGSLRLSCAASGNIFGTLAMGWYRQAPGKERELVAAIDKGSTTNYADSVKGRFTISRDNAKNTVYLQMNSLKPEDTAVYYCAAAVYWAHAYWGQGTQVTVSS

SEQ ID NO: 21848 - protein, 122 aa, Artificial Sequence
  Chemically Synthesized
QVQLQESGGGLVQAGGSLRLSCAASGYISDARIMGWYRQAPGKEREFVAGIGRGGSTNYADSVKGRFTISRDNAKNTVYLQMNSLKPEDTAVYYCAVDYLIRQGYLRGHRYWGQGTQVTVSS

SEQ ID NO: 21849 - protein, 126 aa, Artificial Sequence
  Chemically Synthesized
QVQLQESGGGLVQAGGSLRLSCAASGNISYFYPMGWYRQAPGKERELVAGIAAGGITYYADSVKGRFTISRDNAKNTVYLQMNSLKPEDTAVYYCAVAVEYSDYYTYDAQYSHAYWGQGTQVTVSS

SEQ ID NO: 21850 - protein, 122 aa, Artificial Sequence
  Chemically Synthesized
QVQLQESGGGLVQAGGSLRLSCAASGSISGVGRMGWYRQAPGKERELVATINTGGSTYYADSVKGRFTISRDNAKNTVYLQMNSLKPEDTAVYYCAVDYIWHRRYRLSHTYWGQGTQVTVSS

SEQ ID NO: 21851 - protein, 120 aa, Artificial Sequence
  Chemically Synthesized
QVQLQESGGGLVQAGGSLRLSCAASGTISHDYTMGWYRQAPGKERELVAGIGYGTTTNYADSVKGRFTISRDNAKNTVYLQMNSLKPEDTAVYYCAVYLNYGYWRTLVYWGQGTQVTVSS

SEQ ID NO: 21852 - protein, 118 aa, Artificial Sequence
  Chemically Synthesized
QVQLQESGGGLVQAGGSLRLSCAASGNISPDAGMGWYRQAPGKEREFVAGIAYGSTTNYADSVKGRFTISRDNAKNTVYLQMNSLKPEDTAVYYCAAYGRVNGPFQYWGQGTQVTVSS

SEQ ID NO: 21853 - protein, 126 aa, Artificial Sequence
  Chemically Synthesized
QVQLQESGGGLVQAGGSLRLSCAASGTISAWSRMGWYRQAPGKEREFVAAIALGTITNYADSVKGRFTISRDNAKNTVYLQMNSLKPEDTAVYYCAVQPQLRFTGQRYTKVDHQYWGQGTQVTVSS

SEQ ID NO: 21854 - protein, 118 aa, Artificial Sequence
  Chemically Synthesized
QVQLQESGGGLVQAGGSLRLSCAASGNIFTPDDMGWYRQAPGKEREFVAAITYGSSTNYADSVKGRFTISRDNAKNTVYLQMNSLKPEDTAVYYCAAGQDYWDLFYYWGQGTQVTVSS

SEQ ID NO: 21855 - protein, 118 aa, Artificial Sequence
  Chemically Synthesized
QVQLQESGGGLVQAGGSLRLSCAASGSISNVYYMGWYRQAPGKERELVASITAGASTNYADSVKGRFTISRDNAKNTVYLQMNSLKPEDTAVYYCAVDYIRSGQLTYWGQGTQVTVSS

SEQ ID NO: 21856 - protein, 126 aa, Artificial Sequence
  Chemically Synthesized
QVQLQESGGGLVQAGGSLRLSCAASGSISEITDMGWYRQAPGKEREFVASIAWGASTNYADSVKGRFTISRDNAKNTVYLQMNSLKPEDTAVYYCAVAYVLLHILQLDYDVGYKYWGQGTQVTVSS

SEQ ID NO: 21857 - protein, 121 aa, Artificial Sequence
  Chemically Synthesized
QVQLQESGGGLVQAGGSLRLSCAASGSISGCSMGWYRQAPGKERELVATISPGTNTNYADSVKGRFTISRDNAKNTVYLQMNSLKPEDTAVYYCAVTTQYIDPSSVDLPYWGQGTQVTVSS

SEQ ID NO: 21858 - protein, 122 aa, Artificial Sequence
  Chemically Synthesized
QVQLQESGGGLVQAGGSLRLSCAASGYISWYSYMGWYRQAPGKEREFVATISPGSNTNYADSVKGRFTISRDNAKNTVYLQMNSLKPEDTAVYYCAAYVYWWDKVVRYHNYWGQGTQVTVSS

SEQ ID NO: 21859 - protein, 124 aa, Artificial Sequence
  Chemically Synthesized
QVQLQESGGGLVQAGGSLRLSCAASGYIFGTKIMGWYRQAPGKEREFVATITDGATTYYADSVKGRFTISRDNAKNTVYLQMNSLKPEDTAVYYCAAYDGGDASYGVLRGYSYWGQGTQVTVSS

SEQ ID NO: 21860 - protein, 118 aa, Artificial Sequence
  Chemically Synthesized
QVQLQESGGGLVQAGGSLRLSCAASGNIFLNGDMGWYRQAPGKEREFVATIDIGGITNYADSVKGRFTISRDNAKNTVYLQMNSLKPEDTAVYYCAAFQTKRSRLGYWGQGTQVTVSS

SEQ ID NO: 21861 - protein, 118 aa, Artificial Sequence
  Chemically Synthesized
QVQLQESGGGLVQAGGSLRLSCAASGTIFGSSRMGWYRQAPGKERELVAAINAGASTYYADSVKGRFTISRDNAKNTVYLQMNSLKPEDTAVYYCAVRSWWYRYHNYWGQGTQVTVSS

SEQ ID NO: 21862 - protein, 122 aa, Artificial Sequence
  Chemically Synthesized
QVQLQESGGGLVQAGGSLRLSCAASGYISWAAVMGWYRQAPGKERELVAGISLGANTYYADSVKGRFTISRDNAKNTVYLQMNSLKPEDTAVYYCAVYSPFTYTYFPWHPYWGQGTQVTVSS

SEQ ID NO: 21863 - protein, 128 aa, Artificial Sequence
  Chemically Synthesized
QVQLQESGGGLVQAGGSLRLSCAASGTIFDLGPMGWYRQAPGKERELVASIDFGSTTNYADSVKGRFTISRDNAKNTVYLQMNSLKPEDTAVYYCAADWQDTLTEWVYTAVVPQHYYWGQGTQVTVSS

SEQ ID NO: 21864 - protein, 118 aa, Artificial Sequence
  Chemically Synthesized
QVQLQESGGGLVQAGGSLRLSCAASGTISQDSAMGWYRQAPGKERELVAGIDIGTTTNYADSVKGRFTISRDNAKNTVYLQMNSLKPEDTAVYYCAVPDKLLRPLQYWGQGTQVTVSS

SEQ ID NO: 21865 - protein, 122 aa, Artificial Sequence
  Chemically Synthesized
QVQLQESGGGLVQAGGSLRLSCAASGSISYPVNMGWYRQAPGKERELVAGIGYGAITNYADSVKGRFTISRDNAKNTVYLQMNSLKPEDTAVYYCAARYVTTSPYSYWYSYWGQGTQVTVSS

SEQ ID NO: 21866 - protein, 118 aa, Artificial Sequence
  Chemically Synthesized
QVQLQESGGGLVQAGGSLRLSCAASGSIFVLFDMGWYRQAPGKERELVATIDWGTITNYADSVKGRFTISRDNAKNTVYLQMNSLKPEDTAVYYCAAWHYRQVGHVYWGQGTQVTVSS

SEQ ID NO: 21867 - protein, 117 aa, Artificial Sequence
  Chemically Synthesized
QVQLQESGGGLVQAGGSLRLSCAASGNIFLYDDMGWYRQAPGKERELVASISGGITYYADSVKGRFTISRDNAKNTVYLQMNSLKPEDTAVYYCAAQRWWYATLAYWGQGTQVTVSS

SEQ ID NO: 21868 - protein, 117 aa, Artificial Sequence
  Chemically Synthesized
QVQLQESGGGLVQAGGSLRLSCAASGSISYACCMGWYRQAPGKEREFVATIDTGGSTYYADSVKGRFTISRDNAKNTVYLQMNSLKPEDTAVYYCAVETYYYDYNYWGQGTQVTVSS

SEQ ID NO: 21869 - protein, 118 aa, Artificial Sequence
  Chemically Synthesized
QVQLQESGGGLVQAGGSLRLSCAASGNIFPYGGMGWYRQAPGKEREFVAAIDTGSNTYYADSVKGRFTISRDNAKNTVYLQMNSLKPEDTAVYYCAVYGQDFDFHSYWGQGTQVTVSS

SEQ ID NO: 21870 - protein, 121 aa, Artificial Sequence
  Chemically Synthesized
QVQLQESGGGLVQAGGSLRLSCAASGTIFTAIMGWYRQAPGKEREFVATIARGTITNYADSVKGRFTISRDNAKNTVYLQMNSLKPEDTAVYYCAVRRYDTQLDIVYYNYWGQGTQVTVSS

SEQ ID NO: 21871 - protein, 124 aa, Artificial Sequence
  Chemically Synthesized
QVQLQESGGGLVQAGGSLRLSCAASGYISPWSYMGWYRQAPGKEREFVATIARGGTTYYADSVKGRFTISRDNAKNTVYLQMNSLKPEDTAVYYCAVRGYRWNAYNNSRGHYYWGQGTQVTVSS

SEQ ID NO: 21872 - protein, 117 aa, Artificial Sequence
  Chemically Synthesized
QVQLQESGGGLVQAGGSLRLSCAASGSIFPPDLMGWYRQAPGKEREFVASINSVVLPYADSVKGRFTISRDNAKNTVYLQMNSLKPEDTAVYYCAAGVWERVLHNYWGQGTQVTVSS

SEQ ID NO: 21873 - protein, 118 aa, Artificial Sequence
  Chemically Synthesized
QVQLQESGGGLVQAGGSLRLSCAASGNIFGQSTMGWYRQAPGKEREFVAGIALGGSTNYADSVKGRFTISRDNAKNTVYLQMNSLKPEDTAVYYCAAYYSLSHPLFYWGQGTQVTVSS

SEQ ID NO: 21874 - protein, 122 aa, Artificial Sequence
  Chemically Synthesized
QVQLQESGGGLVQAGGSLRLSCAASGTIFRSYYMGWYRQAPGKEREFVASIGTGTSTYYADSVKGRFTISRDNAKNTVYLQMNSLKPEDTAVYYCAVIYPYDYEILDYLSYWGQGTQVTVSS

SEQ ID NO: 21875 - protein, 125 aa, Artificial Sequence
  Chemically Synthesized
QVQLQESGGGLVQAGGSLRLSCAASGSIFTLLMGWYRQAPGKERELVATIDAGATTYYADSVKGRFTISRDNAKNTVYLQMNSLKPEDTAVYYCAVTQRFYQNFGYYDYWTFYYWGQGTQVTVSS

SEQ ID NO: 21876 - protein, 114 aa, Artificial Sequence
  Chemically Synthesized
QVQLQESGGGLVQAGGSLRLSCAASGSIFDSRTMGWYRQAPGKEREFVASIAHGANTNYADSVKGRFTISRDNAKNTVYLQMNSLKPEDTAVYYCAVGKGHDYWGQGTQVTVSS

SEQ ID NO: 21877 - protein, 124 aa, Artificial Sequence
  Chemically Synthesized
QVQLQESGGGLVQAGGSLRLSCAASGNISVRLYMGWYRQAPGKERELVAGITSVVLPYADSVKGRFTISRDNAKNTVYLQMNSLKPEDTAVYYCAVYFGPRSFTLTNVTKLMYWGQGTQVTVSS

SEQ ID NO: 21878 - protein, 118 aa, Artificial Sequence
  Chemically Synthesized
QVQLQESGGGLVQAGGSLRLSCAASGSISEAYTMGWYRQAPGKERELVASITYGTNTNYADSVKGRFTISRDNAKNTVYLQMNSLKPEDTAVYYCAVTYSLTFELAYWGQGTQVTVSS

SEQ ID NO: 21879 - protein, 121 aa, Artificial Sequence
  Chemically Synthesized
QVQLQESGGGLVQAGGSLRLSCAASGTISLSEVMGWYRQAPGKERELVATISGGGSTYYADSVKGRFTISRDNAKNTVYLQMNSLKPEDTAVYYCAVVYSGYEWTYLHLYWGQGTQVTVSS

SEQ ID NO: 21880 - protein, 126 aa, Artificial Sequence
  Chemically Synthesized
QVQLQESGGGLVQAGGSLRLSCAASGSISAWYIMGWYRQAPGKEREFVATISYVLLPYADSVKGRFTISRDNAKNTVYLQMNSLKPEDTAVYYCAVVYAPGNTSGGQWEGHPHDYWGQGTQVTVSS

SEQ ID NO: 21881 - protein, 118 aa, Artificial Sequence
  Chemically Synthesized
QVQLQESGGGLVQAGGSLRLSCAASGSISASHGMGWYRQAPGKEREFVAGIATGGTTYYADSVKGRFTISRDNAKNTVYLQMNSLKPEDTAVYYCAVIARTWYGFAYWGQGTQVTVSS

SEQ ID NO: 21882 - protein, 118 aa, Artificial Sequence
  Chemically Synthesized
QVQLQESGGGLVQAGGSLRLSCAASGTIFPVIIMGWYRQAPGKERELVAGIDLGGNTNYADSVKGRFTISRDNAKNTVYLQMNSLKPEDTAVYYCAAVSQYDYDHVYWGQGTQVTVSS

SEQ ID NO: 21883 - protein, 120 aa, Artificial Sequence
  Chemically Synthesized
QVQLQESGGGLVQAGGSLRLSCAASGYIFSSIGLMGWYRQAPGKERELVATIGSGSSTYYADSVKGRFTISRDNAKNTVYLQMNSLKPEDTAVYYCAVPYESQSRAYDYWGQGTQVTVSS

SEQ ID NO: 21884 - protein, 118 aa, Artificial Sequence
  Chemically Synthesized
QVQLQESGGGLVQAGGSLRLSCAASGNISRQGYMGWYRQAPGKERELVAAIGRGATTNYADSVKGRFTISRDNAKNTVYLQMNSLKPEDTAVYYCAVGLSRPDQHYYWGQGTQVTVSS

SEQ ID NO: 21885 - protein, 119 aa, Artificial Sequence
  Chemically Synthesized
QVQLQESGGGLVQAGGSLRLSCAASGSISYYTKMGWYRQAPGKEREFVASISYHGSSTYYADSVKGRFTISRDNAKNTVYLQMNSLKPEDTAVYYCAATNRQGRGHRYWGQGTQVTVSS

SEQ ID NO: 21886 - protein, 118 aa, Artificial Sequence
  Chemically Synthesized
QVQLQESGGGLVQAGGSLRLSCAASGTIFDLSTMGWYRQAPGKEREFVAGIGDGGSTNYADSVKGRFTISRDNAKNTVYLQMNSLKPEDTAVYYCAVGSEDVRRYYYWGQGTQVTVSS

SEQ ID NO: 21887 - protein, 118 aa, Artificial Sequence
  Chemically Synthesized
QVQLQESGGGLVQAGGSLRLSCAASGTIFRWTIMGWYRQAPGKEREFVAGIAYGTNTYYADSVKGRFTISRDNAKNTVYLQMNSLKPEDTAVYYCAVYDWGSTDLYYWGQGTQVTVSS

SEQ ID NO: 21888 - protein, 117 aa, Artificial Sequence
  Chemically Synthesized
QVQLQESGGGLVQAGGSLRLSCAASGTISYGHGMGWYRQAPGKEREFVASINSGASTYYADSVKGRFTISRDNAKNTVYLQMNSLKPEDTAVYYCAALNCTFTTFYWGQGTQVTVSS

SEQ ID NO: 21889 - protein, 117 aa, Artificial Sequence
  Chemically Synthesized
QVQLQESGGGLVQAGGSLRLSCAASGNIFYDNMGWYRQAPGKERELVASIDAGATTYYADSVKGRFTISRDNAKNTVYLQMNSLKPEDTAVYYCAVYLNTPYVHEYWGQGTQVTVSS

SEQ ID NO: 21890 - protein, 121 aa, Artificial Sequence
  Chemically Synthesized
QVQLQESGGGLVQAGGSLRLSCAASGSISRVVYMGWYRQAPGKEREFVAAITIGGITYADSVKGRFTISRDNAKNTVYLQMNSLKPEDTAVYYCAVITAPTQWWVYLYRYWGQGTQVTVSS

SEQ ID NO: 21891 - protein, 119 aa, Artificial Sequence
  Chemically Synthesized
QVQLQESGGGLVQAGGSLRLSCAASGNISYTGYMGWYRQAPGKERELVAGIGYGTITYYADSVKGRFTISRDNAKNTVYLQMNSLKPEDTAVYYCAVRLPRPYDNFAYWGQGTQVTVSS

SEQ ID NO: 21892 - protein, 110 aa, Artificial Sequence
  Chemically Synthesized
QVQLQESGGGLVQAGGSLRLSCAASGSISAAQNMGWYRQAPGKERELVATIDGGTITNYADSVKGRFTISRDNAKNTVYLQMNSLKPEDTAVYYCAACYWGQGTQVTVSS

SEQ ID NO: 21893 - protein, 118 aa, Artificial Sequence
  Chemically Synthesized
QVQLQESGGGLVQAGGSLRLSCAASGTISYYPDMGWYRQAPGKEREFVATIGYGTITNYADSVKGRFTISRDNAKNTVYLQMNSLKPEDTAVYYCAVDAYDINRHWYWGQGTQVTVSS

SEQ ID NO: 21894 - protein, 117 aa, Artificial Sequence
  Chemically Synthesized
QVQLQESGGGLVQAGGSLRLSCAASGTIFLLYDMGWYRQAPGKERELVAGINQGGTTYYADSVKGRFTISRDNAKNTVYLQMNSLKPEDTAVYYCAVDYFYYSTIYWGQGTQVTVSS

SEQ ID NO: 21895 - protein, 118 aa, Artificial Sequence
  Chemically Synthesized
QVQLQESGGGLVQAGGSLRLSCAASGNISDLYVMGWYRQAPGKERELVAGIDRGSTTNYADSVKGRFTISRDNAKNTVYLQMNSLKPEDTAVYYCAVYLSTYNLFGYWGQGTQVTVSS

SEQ ID NO: 21896 - protein, 117 aa, Artificial Sequence
  Chemically Synthesized
QVQLQESGGGLVQAGGSLRLSCAASGSIFDGKQMGWYRQAPGKERELVAGIAYGGIPYADSVKGRFTISRDNAKNTVYLQMNSLKPEDTAVYYCAAETGYDYRFYYWGQGTQVTVSS

SEQ ID NO: 21897 - protein, 117 aa, Artificial Sequence
  Chemically Synthesized
QVQLQESGGGLVQAGGSLRLSCAASGSDMGWYRQAPGKEREFVASIAVGSITNYADSVKGRFTISRDNAKNTVYLQMNSLKPEDTAVYYCAADIIVIEVASDYYVYWGQGTQVTVSS

SEQ ID NO: 21898 - protein, 126 aa, Artificial Sequence
  Chemically Synthesized
QVQLQESGGGLVQAGGSLRLSCAASGSIFELKDMGWYRQAPGKERELVATISAGSSTYYADSVKGRFTISRDNAKNTVYLQMNSLKPEDTAVYYCAAVDYLPYTGYVGRAGVLYYWGQGTQVTVSS

SEQ ID NO: 21899 - protein, 126 aa, Artificial Sequence
  Chemically Synthesized
QVQLQESGGGLVQAGGSLRLSCAASGSISGTIDMGWYRQAPGKERELVASISGGTTTYYADSVKGRFTISRDNAKNTVYLQMNSLKPEDTAVYYCAVVAYAQIASSTRYDSAHRYWGQGTQVTVSS

SEQ ID NO: 21900 - protein, 126 aa, Artificial Sequence
  Chemically Synthesized
QVQLQESGGGLVQAGGSLRLSCAASGTIFYYTYMGWYRQAPGKERELVAGINAGSNTNYADSVKGRFTISRDNAKNTVYLQMNSLKPEDTAVYYCAASPFDAVDKSYYPSTGHDYWGQGTQVTVSS

SEQ ID NO: 21901 - protein, 117 aa, Artificial Sequence
  Chemically Synthesized
QVQLQESGGGLVQAGGSLRLSCAASGSISDYHPMGWYRQAPGKERELVASIGGGGITYADSVKGRFTISRDNAKNTVYLQMNSLKPEDTAVYYCAVTIPSGLYFAYWGQGTQVTVSS

SEQ ID NO: 21902 - protein, 118 aa, Artificial Sequence
  Chemically Synthesized
QVQLQESGGGLVQAGGSLRLSCAASGTIFLSAFMGWYRQAPGKERELVASISYGANTNYADSVKGRFTISRDNAKNTVYLQMNSLKPEDTAVYYCAASRYGYAAFPYWGQGTQVTVSS

SEQ ID NO: 21903 - protein, 122 aa, Artificial Sequence
  Chemically Synthesized
QVQLQESGGGLVQAGGSLRLSCAASGNIFYVYAMGWYRQAPGKERELVAAINGGGNTNYADSVKGRFTISRDNAKNTVYLQMNSLKPEDTAVYYCAAIIRHRSPVPRQHYYWGQGTQVTVSS

SEQ ID NO: 21904 - protein, 122 aa, Artificial Sequence
  Chemically Synthesized
QVQLQESGGGLVQAGGSLRLSCAASGTISIYDAMGWYRQAPGKEREFVAAIDHGAITNYADSVKGRFTISRDNAKNTVYLQMNSLKPEDTAVYYCAAVWATHDVTYGYHAYWGQGTQVTVSS

SEQ ID NO: 21905 - protein, 118 aa, Artificial Sequence
  Chemically Synthesized
QVQLQESGGGLVQAGGSLRLSCAASGNISGTYAMGWYRQAPGKEREFVASIGLGGSTNYADSVKGRFTISRDNAKNTVYLQMNSLKPEDTAVYYCAALSKSYTWHGYWGQGTQVTVSS

SEQ ID NO: 21906 - protein, 111 aa, Artificial Sequence
  Chemically Synthesized
QVQLQESGGGLVQAGGSLRLSCAASGTISYETVMGWYRQAPGKEREFVATIAAGSITYYADSVKGRFTISRDNAKNTVYLQMNSLKPEDTAVYYCAVYDYWGQGTQVTVSS

SEQ ID NO: 21907 - protein, 122 aa, Artificial Sequence
  Chemically Synthesized
QVQLQESGGGLVQAGGSLRLSCAASGNISTTFYMGWYRQAPGKEREFVASISPGTNTNYADSVKGRFTISRDNAKNTVYLQMNSLKPEDTAVYYCAAVSRAYPTVTRFLYYWGQGTQVTVSS

SEQ ID NO: 21908 - protein, 121 aa, Artificial Sequence
  Chemically Synthesized
QVQLQESGGGLVQAGGSLRLSCAASGYSYDPTMGWYRQAPGKERELVAAIDYGTTTNYADSVKGRFTISRDNAKNTVYLQMNSLKPEDTAVYYCAANTYAVSWLYYYYDYWGQGTQVTVSS

SEQ ID NO: 21909 - protein, 119 aa, Artificial Sequence
  Chemically Synthesized
QVQLQESGGGLVQAGGSLRLSCAASGTIFVAYSMGWYRQAPGKEREFVATVTVLLPYADSVKGRFTISRDNAKNTVYLQMNSLKPEDTAVYYCAAGATRAANWNTTIYWGQGTQVTVSS

SEQ ID NO: 21910 - protein, 122 aa, Artificial Sequence
  Chemically Synthesized
QVQLQESGGGLVQAGGSLRLSCAASGSISYYDEMGWYRQAPGKEREFVASITQGANTYYADSVKGRFTISRDNAKNTVYLQMNSLKPEDTAVYYCAADHQVGDRYGRNYHYWGQGTQVTVSS

SEQ ID NO: 21911 - protein, 118 aa, Artificial Sequence
  Chemically Synthesized
QVQLQESGGGLVQAGGSLRLSCAASGTIFGNRRMGWYRQAPGKERELVAAIGFGSITYYADSVKGRFTISRDNAKNTVYLQMNSLKPEDTAVYYCAAYSARHTRHYYWGQGTQVTVSS

SEQ ID NO: 21912 - protein, 118 aa, Artificial Sequence
  Chemically Synthesized
QVQLQESGGGLVQAGGSLRLSCAASGSISLSPDMGWYRQAPGKERELVAGIAYGTSTNYADSVKGRFTISRDNAKNTVYLQMNSLKPEDTAVYYCAAFPPYTGAYDYWGQGTQVTVSS

SEQ ID NO: 21913 - protein, 118 aa, Artificial Sequence
  Chemically Synthesized
QVQLQESGGGLVQAGGSLRLSCAASGNISEDYGMGWYRQAPGKEREFVASINFGSNTNYADSVKGRFTISRDNAKNTVYLQMNSLKPEDTAVYYCAVVTAYRYHYYYWGQGTQVTVSS

SEQ ID NO: 21914 - protein, 118 aa, Artificial Sequence
  Chemically Synthesized
QVQLQESGGGLVQAGGSLRLSCAASGSISPVKYMGWYRQAPGKEREFVAAISDGSNTNYADSVKGRFTISRDNAKNTVYLQMNSLKPEDTAVYYCAVLDDYGGYHWYWGQGTQVTVSS

SEQ ID NO: 21915 - protein, 118 aa, Artificial Sequence
  Chemically Synthesized
QVQLQESGGGLVQAGGSLRLSCAASGYISGTFSMGWYRQAPGKEREFVAGIDYGSTTNYADSVKGRFTISRDNAKNTVYLQMNSLKPEDTAVYYCAVLVNGAKHLFYWGQGTQVTVSS

SEQ ID NO: 21916 - protein, 126 aa, Artificial Sequence
  Chemically Synthesized
QVQLQESGGGLVQAGGSLRLSCAASGTISSQSYMGWYRQAPGKERELVAAINTGGSTNYADSVKGRFTISRDNAKNTVYLQMNSLKPEDTAVYYCAVQIHPYTTYYYAVYTWHFYWGQGTQVTVSS

SEQ ID NO: 21917 - protein, 118 aa, Artificial Sequence
  Chemically Synthesized
QVQLQESGGGLVQAGGSLRLSCAASGTISSPNYMGWYRQAPGKERELVAGIGPGAITNYADSVKGRFTISRDNAKNTVYLQMNSLKPEDTAVYYCAAILYVGRYLSYWGQGTQVTVSS

SEQ ID NO: 21918 - protein, 118 aa, Artificial Sequence
  Chemically Synthesized
QVQLQESGGGLVQAGGSLRLSCAASGNISRQVPMGWYRQAPGKEREFVAAISDGTTTNYADSVKGRFTISRDNAKNTVYLQMNSLKPEDTAVYYCAAIIRYHRYYYYWGQGTQVTVSS

SEQ ID NO: 21919 - protein, 118 aa, Artificial Sequence
  Chemically Synthesized
QVQLQESGGGLVQAGGSLRLSCAASGNISATPYMGWYRQAPGKEREFVATIDVGGNTNYADSVKGRFTISRDNAKNTVYLQMNSLKPEDTAVYYCAVILYNVGYHGYWGQGTQVTVSS

SEQ ID NO: 21920 - protein, 122 aa, Artificial Sequence
  Chemically Synthesized
QVQLQESGGGLVQAGGSLRLSCAASGTISSWANMGWYRQAPGKERELVAGINTGTNTNYADSVKGRFTISRDNAKNTVYLQMNSLKPEDTAVYYCAVPQNVTPRWYGRYLYWGQGTQVTVSS

SEQ ID NO: 21921 - protein, 122 aa, Artificial Sequence
  Chemically Synthesized
QVQLQESGGGLVQAGGSLRLSCAASGNISAWYHMGWYRQAPGKEREFVAAITAGGNTNYADSVKGRFTISRDNAKNTVYLQMNSLKPEDTAVYYCAVHDRAYGWQNYIYYYWGQGTQVTVSS

SEQ ID NO: 21922 - protein, 125 aa, Artificial Sequence
  Chemically Synthesized
QVQLQESGGGLVQAGGSLRLSCAASGTIFTTWMGWYRQAPGKERELVASITGGANTNYADSVKGRFTISRDNAKNTVYLQMNSLKPEDTAVYYCAVRNDVTTAYDYLTVNYYSYWGQGTQVTVSS

SEQ ID NO: 21923 - protein, 118 aa, Artificial Sequence
  Chemically Synthesized
QVQLQESGGGLVQAGGSLRLSCAASGTISYYRDMGWYRQAPGKERELVAAISAGGNTYYADSVKGRFTISRDNAKNTVYLQMNSLKPEDTAVYYCAVRRRYGRYHDYWGQGTQVTVSS

SEQ ID NO: 21924 - protein, 125 aa, Artificial Sequence
  Chemically Synthesized
QVQLQESGGGLVQAGGSLRLSCAASGNISADIYMGWYRQAPGKERELVPVLLTVLVPYADSVKGRFTISRDNAKNTVYLQMNSLKPEDTAVYYCAVPDYDKSFGGYRSYPSFRYWGQGTQVTVSS

SEQ ID NO: 21925 - protein, 118 aa, Artificial Sequence
  Chemically Synthesized
QVQLQESGGGLVQAGGSLRLSCAASGNISNRWGMGWYRQAPGKEREFVASINLGSSTYYADSVKGRFTISRDNAKNTVYLQMNSLKPEDTAVYYCAVSVSYSWYLYYWGQGTQVTVSS

SEQ ID NO: 21926 - protein, 118 aa, Artificial Sequence
  Chemically Synthesized
QVQLQESGGGLVQAGGSLRLSCAASGSISQDDGMGWYRQAPGKEREFVAGITGGSITNYADSVKGRFTISRDNAKNTVYLQMNSLKPEDTAVYYCAVVQYQLQYYFYWGQGTQVTVSS

SEQ ID NO: 21927 - protein, 118 aa, Artificial Sequence
  Chemically Synthesized
QVQLQESGGGLVQAGGSLRLSCAASGNISYTPSMGWYRQAPGKERELVAAIAYGTSTYYADSVKGRFTISRDNAKNTVYLQMNSLKPEDTAVYYCAAQRHSYYRHLYWGQGTQVTVSS

SEQ ID NO: 21928 - protein, 104 aa, Artificial Sequence
  Chemically Synthesized
QVQLQESGGGLVQAGGSLRLSCAASGNIFGRDTMGWYRQAPGKERELVAGTYADSVKGRFTISRDNAKNTVYLQMNSLKPEDTAVYYCAALIYWGQGTQVTVSS

SEQ ID NO: 21929 - protein, 126 aa, Artificial Sequence
  Chemically Synthesized
QVQLQESGGGLVQAGGSLRLSCAASGTIFYKAAMGWYRQAPGKEREFVAGISGGGNTYYADSVKGRFTISRDNAKNTVYLQMNSLKPEDTAVYYCAAVTQPYRTGGSARSAYHYYWGQGTQVTVSS

SEQ ID NO: 21930 - protein, 118 aa, Artificial Sequence
  Chemically Synthesized
QVQLQESGGGLVQAGGSLRLSCAASGTISRYYIMGWYRQAPGKERELVAAINTGGSTYYADSVKGRFTISRDNAKNTVYLQMNSLKPEDTAVYYCAVIDLSGLDFAYWGQGTQVTVSS

SEQ ID NO: 21931 - protein, 118 aa, Artificial Sequence
  Chemically Synthesized
QVQLQESGGGLVQAGGSLRLSCAASGTISGQGYMGWYRQAPGKEREFVAAITGGGNTYYADSVKGRFTISRDNAKNTVYLQMNSLKPEDTAVYYCAAAGLVAYQHDYWGQGTQVTVSS

SEQ ID NO: 21932 - protein, 111 aa, Artificial Sequence
  Chemically Synthesized
QVQLQESGGGLVQAGGSLRLSCAASGTIFPLLFMGWYRQAPGKEREFVAGITGGSITYYADSVKGRFTISRDNAKNTVYLQMNSLKPEDTAVYYCATLDYWGQGTQVTVSS

SEQ ID NO: 21933 - protein, 118 aa, Artificial Sequence
  Chemically Synthesized
QVQLQESGGGLVQAGGSLRLSCAASGNISVPKYMGWYRQAPGKEREFVAGITQGANTNYADSVKGRFTISRDNAKNTVYLQMNSLKPEDTAVYYCAVIVYANAYFYYWGQGTQVTVSS

SEQ ID NO: 21934 - protein, 126 aa, Artificial Sequence
  Chemically Synthesized
QVQLQESGGGLVQAGGSLRLSCAASGTISALTYMGWYRQAPGKEREFVATIGVGGTTNYADSVKGRFTISRDNAKNTVYLQMNSLKPEDTAVYYCAVITYASDRSGIQGGHWYYYWGQGTQVTVSS

SEQ ID NO: 21935 - protein, 126 aa, Artificial Sequence
  Chemically Synthesized
QVQLQESGGGLVQAGGSLRLSCAASGNIFYDTTMGWYRQAPGKERELVAGITYGASTYYADSVKGRFTISRDNAKNTVYLQMNSLKPEDTAVYYCAVLSPERGYWGLSEHTDHVYWGQGTQVTVSS

SEQ ID NO: 21936 - protein, 113 aa, Artificial Sequence
  Chemically Synthesized
QVQLQESGGGLVQAGGSLRLSCAASGNISATYLMGWYRQAPGKERELVASIGYGGTTYYADSVKGRFTISRDNAKNTVYLQMNSLKPEDTAVYYCAVGGRKYWGQGTQVTVSS

SEQ ID NO: 21937 - protein, 118 aa, Artificial Sequence
  Chemically Synthesized
QVQLQESGGGLVQAGGSLRLSCAASGTISYYTYMGWYRQAPGKEREFVASISPGTITNYADSVKGRFTISRDNAKNTVYLQMNSLKPEDTAVYYCAVLEAGDTFHFYWGQGTQVTVSS

SEQ ID NO: 21938 - protein, 118 aa, Artificial Sequence
  Chemically Synthesized
QVQLQESGGGLVQAGGSLRLSCAASGYIFARPNMGWYRQAPGKERELVAGIAIGTTTNYADSVKGRFTISRDNAKNTVYLQMNSLKPEDTAVYYCAVYAGVNGYLSYWGQGTQVTVSS

SEQ ID NO: 21939 - protein, 118 aa, Artificial Sequence
  Chemically Synthesized
QVQLQESGGGLVQAGGSLRLSCAASGNISTYVVMGWYRQAPGKEREFVAGIGHGATTNYADSVKGRFTISRDNAKNTVYLQMNSLKPEDTAVYYCAVRPTIQGYLYYWGQGTQVTVSS

SEQ ID NO: 21940 - protein, 118 aa, Artificial Sequence
  Chemically Synthesized
QVQLQESGGGLVQAGGSLRLSCAASGNISNTAKMGWYRQAPGKEREFVAAIGPGGNTNYADSVKGRFTISRDNAKNTVYLQMNSLKPEDTAVYYCAAADWYRFRHYYWGQGTQVTVSS

SEQ ID NO: 21941 - protein, 118 aa, Artificial Sequence
  Chemically Synthesized
QVQLQESGGGLVQAGGSLRLSCAASGTISYYYVMGWYRQAPGKERELVASIGYGGNTNYADSVKGRFTISRDNAKNTVYLQMNSLKPEDTAVYYCAVGYYTIRRLYYWGQGTQVTVSS

SEQ ID NO: 21942 - protein, 122 aa, Artificial Sequence
  Chemically Synthesized
QVQLQESGGGLVQAGGSLRLSCAASGTIFWARGMGWYRQAPGKERELVAGIAAGTITNYADSVKGRFTISRDNAKNTVYLQMNSLKPEDTAVYYCAVRYRAPYDWYRGYEYWGQGTQVTVSS

SEQ ID NO: 21943 - protein, 122 aa, Artificial Sequence
  Chemically Synthesized
QVQLQESGGGLVQAGGSLRLSCAASGTISPDYLMGWYRQAPGKEREFVAGISAGTSTNYADSVKGRFTISRDNAKNTVYLQMNSLKPEDTAVYYCAVSTDRWYRTALGHYYWGQGTQVTVSS

SEQ ID NO: 21944 - protein, 123 aa, Artificial Sequence
  Chemically Synthesized
QVQLQESGGGLVQAGGSLRLSCAASGTISQLLAMGWYRQAPGKERELVAAITIGSNTNYADSVKGRFTISRDNAKNTVYLQMNSLKPEDTAVYYCAALTYVPSAVDYAYHYYWGQGTQVTVSS

SEQ ID NO: 21945 - protein, 122 aa, Artificial Sequence
  Chemically Synthesized
QVQLQESGGGLVQAGGSLRLSCAASGYIFDDLTMGWYRQAPGKEREFVAGIGFGANTYYADSVKGRFTISRDNAKNTVYLQMNSLKPEDTAVYYCAAVGGRGPSYRYAHYYWGQGTQVTVSS

SEQ ID NO: 21946 - protein, 122 aa, Artificial Sequence
  Chemically Synthesized
QVQLQESGGGLVQAGGSLRLSCAASGNISYGYSMGWYRQAPGKERELVAAINYGANTNYADSVKGRFTISRDNAKNTVYLQMNSLKPEDTAVYYCAVSRWRRIYNAWRHGYWGQGTQVTVSS

SEQ ID NO: 21947 - protein, 118 aa, Artificial Sequence
  Chemically Synthesized
QVQLQESGGGLVQAGGSLRLSCAASGNIFYTDYMGWYRQAPGKEREFVAGIDKGGNTNYADSVKGRFTISRDNAKNTVYLQMNSLKPEDTAVYYCAVRDTTAEVHVYWGQGTQVTVSS

SEQ ID NO: 21948 - protein, 113 aa, Artificial Sequence
  Chemically Synthesized
QVQLQESGGGLVQAGGSLRLSCAASGYISWSLAMGWYRQAPGKERELVASIALGANTYYADSVKGRFTISRDNAKNTVYLQMNSLKPEDTAVYYCAVRRAGYWGQGTQVTVSS

SEQ ID NO: 21949 - protein, 118 aa, Artificial Sequence
  Chemically Synthesized
QVQLQESGGGLVQAGGSLRLSCAASGYISYQYTMGWYRQAPGKERELVAGIAAGAITNYADSVKGRFTISRDNAKNTVYLQMNSLKPEDTAVYYCAVVDDPGLDLSYWGQGTQVTVSS

SEQ ID NO: 21950 - protein, 122 aa, Artificial Sequence
  Chemically Synthesized
QVQLQESGGGLVQAGGSLRLSCAASGNISWRPGMGWYRQAPGKEREFVASIALGGITNYADSVKGRFTISRDNAKNTVYLQMNSLKPEDTAVYYCAADLDSTGTFNEVFYYWGQGTQVTVSS

SEQ ID NO: 21951 - protein, 122 aa, Artificial Sequence
  Chemically Synthesized
QVQLQESGGGLVQAGGSLRLSCAASGTISDQSYMGWYRQAPGKEREFVATIGYGTSTYYADSVKGRFTISRDNAKNTVYLQMNSLKPEDTAVYYCAAYAATGDRPRHRHVYWGQGTQVTVSS

SEQ ID NO: 21952 - protein, 122 aa, Artificial Sequence
  Chemically Synthesized
QVQLQESGGGLVQAGGSLRLSCAASGNISDRRYMGWYRQAPGKEREFVAAITAGAITYYADSVKGRFTISRDNAKNTVYLQMNSLKPEDTAVYYCAADPDRLRNVALPHWYWGQGTQVTVSS

SEQ ID NO: 21953 - protein, 116 aa, Artificial Sequence
  Chemically Synthesized
QVQLQESGGGLVQAGGSLRLSCAASGNIFGQRTMGWYRQAPGKERELVASINGGGSTYYADSVKGRFTISRDNAKNTVYLQMNSLKPEDTAVYYCADYLNYAHDYWGQGTQVTVSS

SEQ ID NO: 21954 - protein, 116 aa, Artificial Sequence
  Chemically Synthesized
QVQLQESGGGLVQAGGSLRLSCAASGYFSGLRMGWYRQAPGKEREFVASIADGAITYYADSVKGRFTISRDNAKNTVYLQMNSLKPEDTAVYYCAPDGVGDRHYYWGQGTQVTVSS

SEQ ID NO: 21955 - protein, 118 aa, Artificial Sequence
  Chemically Synthesized
QVQLQESGGGLVQAGGSLRLSCAASGYISRILTMGWYRQAPGKERELVAAITSGSNTYYADSVKGRFTISRDNAKNTVYLQMNSLKPEDTAVYYCAARARYNRSLTYWGQGTQVTVSS

SEQ ID NO: 21956 - protein, 117 aa, Artificial Sequence
  Chemically Synthesized
QVQLQESGGGLVQAGGSLRLSCAASGSISYSPGMGWYRQAPGKEREFVAAIGTVVVPYADSVKGRFTISRDNAKNTVYLQMNSLKPEDTAVYYCAVWRYDTVYFGYWGQGTQVTVSS

SEQ ID NO: 21957 - protein, 118 aa, Artificial Sequence
  Chemically Synthesized
QVQLQESGGGLVQAGGSLRLSCAASGNISQSHFMGWYRQAPGKERELVAGITYGSNTYYADSVKGRFTISRDNAKNTVYLQMNSLKPEDTAVYYCAAYIRPRSYHAYWGQGTQVTVSS

SEQ ID NO: 21958 - protein, 122 aa, Artificial Sequence
  Chemically Synthesized
QVQLQESGGGLVQAGGSLRLSCAASGTIFWEAEMGWYRQAPGKEREFVAGINYGTSTYYADSVKGRFTISRDNAKNTVYLQMNSLKPEDTAVYYCAVAAYYIWYSASVPHYWGQGTQVTVSS

SEQ ID NO: 21959 - protein, 115 aa, Artificial Sequence
  Chemically Synthesized
QVQLQESGGGLVQAGGSLRLSCAASGTIFYDTRMGWYRQAPGKEREFVATIDSGSITNYADSVKGRFTISRDNAKNTVYLQMNSLKPEDTAVYYCAVVRWRSYYWGQGTQVTVSS

SEQ ID NO: 21960 - protein, 126 aa, Artificial Sequence
  Chemically Synthesized
QVQLQESGGGLVQAGGSLRLSCAASGTISAYRNMGWYRQAPGKEREFVAAIAYGTSTYYADSVKGRFTISRDNAKNTVYLQMNSLKPEDTAVYYCAVYDAWSYLGSGRNLDRFVYWGQGTQVTVSS

SEQ ID NO: 21961 - protein, 118 aa, Artificial Sequence
  Chemically Synthesized
QVQLQESGGGLVQAGGSLRLSCAASGNIFYSLYMGWYRQAPGKERELVAGIDYGASTYYADSVKGRFTISRDNAKNTVYLQMNSLKPEDTAVYYCAARNLHTSWYAYWGQGTQVTVSS

SEQ ID NO: 21962 - protein, 122 aa, Artificial Sequence
  Chemically Synthesized
QVQLQESGGGLVQAGGSLRLSCAASGSISYGFVMGWYRQAPGKERELVAAIGPGGSTYADSVKGRFTISRDNAKNTVYLQMNSLKPEDTAVYYCAVGPYTYYVAIRYAHDYWGQGTQVTVSS

SEQ ID NO: 21963 - protein, 117 aa, Artificial Sequence
  Chemically Synthesized
QVQLQESGGGLVQAGGSLRLSCAASGNISIQTGMGWYRQAPGKERELVAGIAVGTNTNYADSVKGRFTISRDNAKNTVYLQMNSLKPEDTAVYYCAVLTTSTMVFYWGQGTQVTVSS

SEQ ID NO: 21964 - protein, 116 aa, Artificial Sequence
  Chemically Synthesized
QVQLQESGGGLVQAGGSLRLSCAASGTILNSSMGWYRQAPGKERELVAGISLGGITNYADSVKGRFTISRDNAKNTVYLQMNSLKPEDTAVYYCAARTTLTVLIYWGQGTQVTVSS

SEQ ID NO: 21965 - protein, 122 aa, Artificial Sequence
  Chemically Synthesized
QVQLQESGGGLVQAGGSLRLSCAASGSIFWYDGMGWYRQAPGKEREFVASIGTGSSTYYADSVKGRFTISRDNAKNTVYLQMNSLKPEDTAVYYCAADARQAYIDYYGFYYWGQGTQVTVSS

SEQ ID NO: 21966 - protein, 118 aa, Artificial Sequence
  Chemically Synthesized
QVQLQESGGGLVQAGGSLRLSCAASGTISHGGVMGWYRQAPGKEREFVATIDAGGITNYADSVKGRFTISRDNAKNTVYLQMNSLKPEDTAVYYCAVPVRNRTDYLYWGQGTQVTVSS

SEQ ID NO: 21967 - protein, 118 aa, Artificial Sequence
  Chemically Synthesized
QVQLQESGGGLVQAGGSLRLSCAASGSIFDAPDMGWYRQAPGKERELVAAIGLGTTTYYADSVKGRFTISRDNAKNTVYLQMNSLKPEDTAVYYCAVQGDQADTHWYWGQGTQVTVSS

SEQ ID NO: 21968 - protein, 122 aa, Artificial Sequence
  Chemically Synthesized
QVQLQESGGGLVQAGGSLRLSCAASGSISPGTAMGWYRQAPGKEREFVASINVGGSTNYADSVKGRFTISRDNAKNTVYLQMNSLKPEDTAVYYCAADHYAHPYEYPYFDYWGQGTQVTVSS

SEQ ID NO: 21969 - protein, 114 aa, Artificial Sequence
  Chemically Synthesized
QVQLQESGGGLVQAGGSLRLSCAASGNISFLADMGWYRQAPGKERELVASIDSGYADSVKGRFTISRDNAKNTVYLQMNSLKPEDTAVYYCAVYNVTKAGLLYWGQGTQVTVSS

SEQ ID NO: 21970 - protein, 126 aa, Artificial Sequence
  Chemically Synthesized
QVQLQESGGGLVQAGGSLRLSCAASGNISTADYMGWYRQAPGKERELVASIGTGGITYYADSVKGRFTISRDNAKNTVYLQMNSLKPEDTAVYYCAATEAYRKRDDSRLVLFHLYWGQGTQVTVSS

SEQ ID NO: 21971 - protein, 126 aa, Artificial Sequence
  Chemically Synthesized
QVQLQESGGGLVQAGGSLRLSCAASGNISQYTDMGWYRQAPGKEREFVATISYGATTNYADSVKGRFTISRDNAKNTVYLQMNSLKPEDTAVYYCAAAYRHVYQGVEVTVQEHDYWGQGTQVTVSS

SEQ ID NO: 21972 - protein, 118 aa, Artificial Sequence
  Chemically Synthesized
QVQLQESGGGLVQAGGSLRLSCAASGNISSYSAMGWYRQAPGKERELVAAIGGGSSTYYADSVKGRFTISRDNAKNTVYLQMNSLKPEDTAVYYCAVYDTNWIGYDYWGQGTQVTVSS

SEQ ID NO: 21973 - protein, 121 aa, Artificial Sequence
  Chemically Synthesized
QVQLQESGGGLVQAGGSLRLSCAASGNISTDIPMGWYRQAPGKEREFVASIGSVLLPYADSVKGRFTISRDNAKNTVYLQMNSLKPEDTAVYYCAVFVRNRTEYLYILRYWGQGTQVTVSS

SEQ ID NO: 21974 - protein, 118 aa, Artificial Sequence
  Chemically Synthesized
QVQLQESGGGLVQAGGSLRLSCAASGTIFYLHYMGWYRQAPGKEREFVAGIASGSITYYADSVKGRFTISRDNAKNTVYLQMNSLKPEDTAVYYCAVVDVTRGWFGYWGQGTQVTVSS

SEQ ID NO: 21975 - protein, 122 aa, Artificial Sequence
  Chemically Synthesized
QVQLQESGGGLVQAGGSLRLSCAASGTIFSSSLMGWYRQAPGKERELVAAISRGASTYYADSVKGRFTISRDNAKNTVYLQMNSLKPEDTAVYYCAAYTRTGEPRQGTYYYWGQGTQVTVSS

SEQ ID NO: 21976 - protein, 121 aa, Artificial Sequence
  Chemically Synthesized
QVQLQESGGGLVQAGGSLRLSCAASGYIFKIWSMGWYRQAPGKERELVAAIGTGGSTNYADSVKGRFTISRDNAKNTVYLQMNSLKPEDTAVYYCAVSTPVYIEPGYYFYWGQGTQVTVSS

SEQ ID NO: 21977 - protein, 118 aa, Artificial Sequence
  Chemically Synthesized
QVQLQESGGGLVQAGGSLRLSCAASGTIFEPNYMGWYRQAPGKERELVASITGGTITYYADSVKGRFTISRDNAKNTVYLQMNSLKPEDTAVYYCAADLRYYDPLDYWGQGTQVTVSS

SEQ ID NO: 21978 - protein, 118 aa, Artificial Sequence
  Chemically Synthesized
QVQLQESGGGLVQAGGSLRLSCAASGNISGRRRMGWYRQAPGKEREFVATITAGGNTNYADSVKGRFTISRDNAKNTVYLQMNSLKPEDTAVYYCAVRLVYHYYHRYWGQGTQVTVSS

SEQ ID NO: 21979 - protein, 118 aa, Artificial Sequence
  Chemically Synthesized
QVQLQESGGGLVQAGGSLRLSCAASGTIFTYDPMGWYRQAPGKEREFVATIAYGGNTYYADSVKGRFTISRDNAKNTVYLQMNSLKPEDTAVYYCAVNHDYVPVLGYWGQGTQVTVSS

SEQ ID NO: 21980 - protein, 118 aa, Artificial Sequence
  Chemically Synthesized
QVQLQESGGGLVQAGGSLRLSCAASGNISSLGVMGWYRQAPGKERELVAAIDRGGTTYYADSVKGRFTISRDNAKNTVYLQMNSLKPEDTAVYYCAVVYVSYTPHHYWGQGTQVTVSS

SEQ ID NO: 21981 - protein, 118 aa, Artificial Sequence
  Chemically Synthesized
QVQLQESGGGLVQAGGSLRLSCAASGYISDVYYMGWYRQAPGKERELVAAITYGAITNYADSVKGRFTISRDNAKNTVYLQMNSLKPEDTAVYYCAVPSDLWHKFAYWGQGTQVTVSS

SEQ ID NO: 21982 - protein, 122 aa, Artificial Sequence
  Chemically Synthesized
QVQLQESGGGLVQAGGSLRLSCAASGYISATAAMGWYRQAPGKERELVAGIATGSNTYYADSVKGRFTISRDNAKNTVYLQMNSLKPEDTAVYYCAVLDRVDEYLLGGHDYWGQGTQVTVSS

SEQ ID NO: 21983 - protein, 126 aa, Artificial Sequence
  Chemically Synthesized
QVQLQESGGGLVQAGGSLRLSCAASGSIFLTDDMGWYRQAPGKERELVASINSGATTYYADSVKGRFTISRDNAKNTVYLQMNSLKPEDTAVYYCAAYDDYIGYAPWQHTAGHTYWGQGTQVTVSS

SEQ ID NO: 21984 - protein, 124 aa, Artificial Sequence
  Chemically Synthesized
QVQLQESGGGLVQAGGSLRLSCAASGYILTTSMGWYRQAPGKEREFVPLLVWVLVPYADSVKGRFTISRDNAKNTVYLQMNSLKPEDTAVYYCAAYDLDRYGTSDSFVSGHPYWGQGTQVTVSS

SEQ ID NO: 21985 - protein, 122 aa, Artificial Sequence
  Chemically Synthesized
QVQLQESGGGLVQAGGSLRLSCAASGNIFRPERMGWYRQAPGKERELVASIGYGGTTNYADSVKGRFTISRDNAKNTVYLQMNSLKPEDTAVYYCAAYPFNYGDRTDWYSYWGQGTQVTVSS

SEQ ID NO: 21986 - protein, 121 aa, Artificial Sequence
  Chemically Synthesized
QVQLQESGGGLVQAGGSLRLSCAASGNIFSKVMGWYRQAPGKERELVAAIGPGATTNYADSVKGRFTISRDNAKNTVYLQMNSLKPEDTAVYYCAVVRALVRTNWSYHLYWGQGTQVTVSS

SEQ ID NO: 21987 - protein, 118 aa, Artificial Sequence
  Chemically Synthesized
QVQLQESGGGLVQAGGSLRLSCAASGNIFYDYTMGWYRQAPGKERELVATITYGATTNYADSVKGRFTISRDNAKNTVYLQMNSLKPEDTAVYYCAVYGRYQNYLGYWGQGTQVTVSS

SEQ ID NO: 21988 - protein, 122 aa, Artificial Sequence
  Chemically Synthesized
QVQLQESGGGLVQAGGSLRLSCAASGNIFQDTVMGWYRQAPGKEREFVAAIGPGTNTNYADSVKGRFTISRDNAKNTVYLQMNSLKPEDTAVYYCAAYGAVSGYYDAQHYYWGQGTQVTVSS

SEQ ID NO: 21989 - protein, 122 aa, Artificial Sequence
  Chemically Synthesized
QVQLQESGGGLVQAGGSLRLSCAASGNISGGYIMGWYRQAPGKEREFVAGITYGGSTYYADSVKGRFTISRDNAKNTVYLQMNSLKPEDTAVYYCAVHSRWRDYYPIVHRYWGQGTQVTVSS

SEQ ID NO: 21990 - protein, 122 aa, Artificial Sequence
  Chemically Synthesized
QVQLQESGGGLVQAGGSLRLSCAASGYIFFQIIMGWYRQAPGKEREFVATIGYGGSTYYADSVKGRFTISRDNAKNTVYLQMNSLKPEDTAVYYCAAYLHGLSARNVGFHYWGQGTQVTVSS

SEQ ID NO: 21991 - protein, 118 aa, Artificial Sequence
  Chemically Synthesized
QVQLQESGGGLVQAGGSLRLSCAASGYISLASSMGWYRQAPGKERELVASIARGATTYYADSVKGRFTISRDNAKNTVYLQMNSLKPEDTAVYYCAVKRSDNGAHNYWGQGTQVTVSS

SEQ ID NO: 21992 - protein, 112 aa, Artificial Sequence
  Chemically Synthesized
QVQLQESGGGLVQAGGSLRLSCAASGSISIYDDMGWYRQAPGKERELVATISYGGSTYYADSVKGRFTISRDNAKNTVYLQMNSLKPEDTAVYYCAVYWAYWGQGTQVTVSS

SEQ ID NO: 21993 - protein, 121 aa, Artificial Sequence
  Chemically Synthesized
QVQLQESGGGLVQAGGSLRLSCAASGNIFGQQRMGWYRQAPGKERELVAGIGYGGITNYADSVKGRFTISRDNAKNTVYLQMNSLKPEDTAVYYCAVYAGYIYYRDISLYWGQGTQVTVSS

SEQ ID NO: 21994 - protein, 118 aa, Artificial Sequence
  Chemically Synthesized
QVQLQESGGGLVQAGGSLRLSCAASGYISDNYRMGWYRQAPGKERELVAGITAGSITYYADSVKGRFTISRDNAKNTVYLQMNSLKPEDTAVYYCAAYLPAGLFSLYWGQGTQVTVSS

SEQ ID NO: 21995 - protein, 126 aa, Artificial Sequence
  Chemically Synthesized
QVQLQESGGGLVQAGGSLRLSCAASGSISFHTYMGWYRQAPGKERELVAAITRGGTTYYADSVKGRFTISRDNAKNTVYLQMNSLKPEDTAVYYCAAYVDDPYTYHGTYNVRHGYWGQGTQVTVSS

SEQ ID NO: 21996 - protein, 114 aa, Artificial Sequence
  Chemically Synthesized
QVQLQESGGGLVQAGGSLRLSCAASGNISWGYIMGWYRQAPGKERELVASISFGANTNYADSVKGRFTISRDNAKNTVYLQMNSLKPEDTAVYYCAADWGHWYWGQGTQVTVSS

SEQ ID NO: 21997 - protein, 118 aa, Artificial Sequence
  Chemically Synthesized
QVQLQESGGGLVQAGGSLRLSCAASGSISDLSHMGWYRQAPGKERELVAAITYGSNTYYADSVKGRFTISRDNAKNTVYLQMNSLKPEDTAVYYCAVGQRLYPYHDYWGQGTQVTVSS

SEQ ID NO: 21998 - protein, 122 aa, Artificial Sequence
  Chemically Synthesized
QVQLQESGGGLVQAGGSLRLSCAASGYISRRGTMGWYRQAPGKEREFVAGIAVGGNTNYADSVKGRFTISRDNAKNTVYLQMNSLKPEDTAVYYCAALWHTDYPDVLQYLYWGQGTQVTVSS

SEQ ID NO: 21999 - protein, 122 aa, Artificial Sequence
  Chemically Synthesized
QVQLQESGGGLVQAGGSLRLSCAASGTIFILWDMGWYRQAPGKEREFVAAIDVGGSTNYADSVKGRFTISRDNAKNTVYLQMNSLKPEDTAVYYCAALRYSRLYPNRQHTYWGQGTQVTVSS

SEQ ID NO: 22000 - protein, 118 aa, Artificial Sequence
  Chemically Synthesized
QVQLQESGGGLVQAGGSLRLSCAASGTIFILWDMGWYRQAPGKEREFVAAIDVGGSTNYADSVKGRFTISRDNAKNTVYLQMNSLKPEDTAVYYCAAPRRYGPTHTYWGQGTQVTVSS

SEQ ID NO: 22001 - protein, 122 aa, Artificial Sequence
  Chemically Synthesized
QVQLQESGGGLVQAGGSLRLSCAASGTISQYRPMGWYRQAPGKERELVAAIGRGSSTYYADSVKGRFTISRDNAKNTVYLQMNSLKPEDTAVYYCAALWHTDYPDVLQYLYWGQGTQVTVSS

SEQ ID NO: 22002 - protein, 124 aa, Artificial Sequence
  Chemically Synthesized
QVQLQESGGGLVQAGGSLRLSCAASGYIFYFQYMGWYRQAPGKERELLPLLVLVLIPYADSVKGRFTISRDNAKNTVYLQMNSLKPEDTAVYYCAAWDEGGDLRRHIYATFVYWGQGTQVTVSS

SEQ ID NO: 22003 - protein, 121 aa, Artificial Sequence
  Chemically Synthesized
QVQLQESGGGLVQAGGSLRLSCAASGSISTQPFMGWYRQAPGKERELVATIGQGTITYYADSVKGRFTISRDNAKNTVYLQMNSLKPEDTAVYYCAATAQPRAAQSGTIYWGQGTQVTVSS

SEQ ID NO: 22004 - protein, 118 aa, Artificial Sequence
  Chemically Synthesized
QVQLQESGGGLVQAGGSLRLSCAASGNISTQFYMGWYRQAPGKERELVATISNGTITYYADSVKGRFTISRDNAKNTVYLQMNSLKPEDTAVYYCAADDGFRYLLYYWGQGTQVTVSS

SEQ ID NO: 22005 - protein, 118 aa, Artificial Sequence
  Chemically Synthesized
QVQLQESGGGLVQAGGSLRLSCAASGTISPSYFMGWYRQAPGKEREFVAGINAGGITYYADSVKGRFTISRDNAKNTVYLQMNSLKPEDTAVYYCAVRSDADPVFSYWGQGTQVTVSS

SEQ ID NO: 22006 - protein, 126 aa, Artificial Sequence
  Chemically Synthesized
QVQLQESGGGLVQAGGSLRLSCAASGYISLFYDMGWYRQAPGKEREFVASIDLGANTNYADSVKGRFTISRDNAKNTVYLQMNSLKPEDTAVYYCAVLFTEWYDDQYDNDYGLYYWGQGTQVTVSS

SEQ ID NO: 22007 - protein, 120 aa, Artificial Sequence
  Chemically Synthesized
QVQLQESGGGLVQAGGSLRLSCAASGYISIYTMGWYRQAPGKERELVAAIASVVVPYADSVKGRFTISRDNAKNTVYLQMNSLKPEDTAVYYCAALNAYGSIYDGVHRYWGQGTQVTVSS

SEQ ID NO: 22008 - protein, 122 aa, Artificial Sequence
  Chemically Synthesized
QVQLQESGGGLVQAGGSLRLSCAASGTISYNYIMGWYRQAPGKERELVATIGYGGTTNYADSVKGRFTISRDNAKNTVYLQMNSLKPEDTAVYYCAAGVAYPHDKEENHVYWGQGTQVTVSS

SEQ ID NO: 22009 - protein, 118 aa, Artificial Sequence
  Chemically Synthesized
QVQLQESGGGLVQAGGSLRLSCAASGTISHSQYMGWYRQAPGKERELVASIDDGSTTNYADSVKGRFTISRDNAKNTVYLQMNSLKPEDTAVYYCAVANARFYDHPYWGQGTQVTVSS

SEQ ID NO: 22010 - protein, 118 aa, Artificial Sequence
  Chemically Synthesized
QVQLQESGGGLVQAGGSLRLSCAASGTIFDYYDMGWYRQAPGKEREFVATIDRGGITNYADSVKGRFTISRDNAKNTVYLQMNSLKPEDTAVYYCAARDIPQQTLGYWGQGTQVTVSS

SEQ ID NO: 22011 - protein, 122 aa, Artificial Sequence
  Chemically Synthesized
QVQLQESGGGLVQAGGSLRLSCAASGTISGYTLMGWYRQAPGKERELVATINVGGITNYADSVKGRFTISRDNAKNTVYLQMNSLKPEDTAVYYCAAYVTLPYDESDPHLYWGQGTQVTVSS

SEQ ID NO: 22012 - protein, 118 aa, Artificial Sequence
  Chemically Synthesized
QVQLQESGGGLVQAGGSLRLSCAASGTISPDYFMGWYRQAPGKERELVAAITSGAITYYADSVKGRFTISRDNAKNTVYLQMNSLKPEDTAVYYCAVAIYDEGYLDYWGQGTQVTVSS

SEQ ID NO: 22013 - protein, 118 aa, Artificial Sequence
  Chemically Synthesized
QVQLQESGGGLVQAGGSLRLSCAASGSISTLRLMGWYRQAPGKEREFVAAIAYGGNTYYADSVKGRFTISRDNAKNTVYLQMNSLKPEDTAVYYCAAIYRRRPRHYYWGQGTQVTVSS

SEQ ID NO: 22014 - protein, 126 aa, Artificial Sequence
  Chemically Synthesized
QVQLQESGGGLVQAGGSLRLSCAASGTISTSVTMGWYRQAPGKEREFVAAIGVGTSTYYADSVKGRFTISRDNAKNTVYLQMNSLKPEDTAVYYCAARRYYEYGYYVSFYGYHYYWGQGTQVTVSS

SEQ ID NO: 22015 - protein, 118 aa, Artificial Sequence
  Chemically Synthesized
QVQLQESGGGLVQAGGSLRLSCAASGSISQPHYMGWYRQAPGKEREFVASIGFGTITNYADSVKGRFTISRDNAKNTVYLQMNSLKPEDTAVYYCAVPTLRLGTHPYWGQGTQVTVSS

SEQ ID NO: 22016 - protein, 121 aa, Artificial Sequence
  Chemically Synthesized
QVQLQESGGGLVQAGGSLRLSCAASGLFLFLFMGWYRQAPGKEREFVATISEGGTTYYADSVKGRFTISRDNAKNTVYLQMNSLKPEDTAVYYCAAYRDYPYLKDGYLLYWGQGTQVTVSS

SEQ ID NO: 22017 - protein, 118 aa, Artificial Sequence
  Chemically Synthesized
QVQLQESGGGLVQAGGSLRLSCAASGSIFRRWDMGWYRQAPGKERELVATIGTGAITNYADSVKGRFTISRDNAKNTVYLQMNSLKPEDTAVYYCAAYYIRFRDHLYWGQGTQVTVSS

SEQ ID NO: 22018 - protein, 123 aa, Artificial Sequence
  Chemically Synthesized
QVQLQESGGGLVQAGGSLRLSCAASGYISPYPNMGWYRQAPGKERELLPLLVTVLPYADSVKGRFTISRDNAKNTVYLQMNSLKPEDTAVYYCAVGDSLKTTTSGRTTTFIYWGQGTQVTVSS

SEQ ID NO: 22019 - protein, 121 aa, Artificial Sequence
  Chemically Synthesized
QVQLQESGGGLVQAGGSLRLSCAASGSIFYTDYMGWYRQAPGKERELVAAITTVLIPYADSVKGRFTISRDNAKNTVYLQMNSLKPEDTAVYYCAAWLGGVDSFHADFVYWGQGTQVTVSS

SEQ ID NO: 22020 - protein, 117 aa, Artificial Sequence
  Chemically Synthesized
QVQLQESGGGLVQAGGSLRLSCAASGSIFWGYSMGWYRQAPGKEREFVATISQGSSTYADSVKGRFTISRDNAKNTVYLQMNSLKPEDTAVYYCAAENDYFWDYPYWGQGTQVTVSS

SEQ ID NO: 22021 - protein, 125 aa, Artificial Sequence
  Chemically Synthesized
QVQLQESGGGLVQAGGSLRLSCAASGSIFLDDYMGWYRQAPGKEREFVAGINPGGTTNYADSVKGRFTISRDNAKNTVYLQMNSLKPEDTAVYYCAAIEKLSRTTTKVKVSGLYWGQGTQVTVSS

SEQ ID NO: 22022 - protein, 122 aa, Artificial Sequence
  Chemically Synthesized
QVQLQESGGGLVQAGGSLRLSCAASGSISGVTWMGWYRQAPGKERELVAAIDWGSITYYADSVKGRFTISRDNAKNTVYLQMNSLKPEDTAVYYCAVDYPDYAPYGGYHAYWGQGTQVTVSS

SEQ ID NO: 22023 - protein, 121 aa, Artificial Sequence
  Chemically Synthesized
QVQLQESGGGLVQAGGSLRLSCAASGTIFALTMGWYRQAPGKERELVATIDVGTTTNYADSVKGRFTISRDNAKNTVYLQMNSLKPEDTAVYYCAVTATDADEQDSFLPYWGQGTQVTVSS

SEQ ID NO: 22024 - protein, 116 aa, Artificial Sequence
  Chemically Synthesized
QVQLQESGGGLVQAGGSLRLSCAASGSIFYTSAMGWYRQAPGKERELVATITGGATNYADSVKGRFTISRDNAKNTVYLQMNSLKPEDTAVYYCAAFRDNRDAHYWGQGTQVTVSS

SEQ ID NO: 22025 - protein, 122 aa, Artificial Sequence
  Chemically Synthesized
QVQLQESGGGLVQAGGSLRLSCAASGNIFAYSGMGWYRQAPGKEREFVASITVGATTNYADSVKGRFTISRDNAKNTVYLQMNSLKPEDTAVYYCAAYTWRRYVLYYLHPYWGQGTQVTVSS

SEQ ID NO: 22026 - protein, 114 aa, Artificial Sequence
  Chemically Synthesized
QVQLQESGGGLVQAGGSLRLSCAASGSISDSLMGWYRQAPGKERELVATITDGANTNYADSVKGRFTISRDNAKNTVYLQMNSLKPEDTAVYYCAVNGLRSCYWGQGTQVTVSS

SEQ ID NO: 22027 - protein, 118 aa, Artificial Sequence
  Chemically Synthesized
QVQLQESGGGLVQAGGSLRLSCAASGSIFAEPYMGWYRQAPGKERELVASISGGGTTNYADSVKGRFTISRDNAKNTVYLQMNSLKPEDTAVYYCAAYDHRVPRYYYWGQGTQVTVSS

SEQ ID NO: 22028 - protein, 118 aa, Artificial Sequence
  Chemically Synthesized
QVQLQESGGGLVQAGGSLRLSCAASGTISGQWDMGWYRQAPGKEREFVAAISGGAITYYADSVKGRFTISRDNAKNTVYLQMNSLKPEDTAVYYCAASRQDSYHYGYWGQGTQVTVSS

SEQ ID NO: 22029 - protein, 126 aa, Artificial Sequence
  Chemically Synthesized
QVQLQESGGGLVQAGGSLRLSCAASGSIFSPVYMGWYRQAPGKEREFVATISKGAITYYADSVKGRFTISRDNAKNTVYLQMNSLKPEDTAVYYCAAAAHIWDTWSGHTSWSLGYWGQGTQVTVSS

SEQ ID NO: 22030 - protein, 117 aa, Artificial Sequence
  Chemically Synthesized
QVQLQESGGGLVQAGGSLRLSCAASGTIFTDADMGWYRQAPGKERELVAGIGRGGITNYADSVKGRFTISRDNAKNTVYLQMNSLKPEDTAVYYCAAWVRDSTCIYWGQGTQVTVSS

SEQ ID NO: 22031 - protein, 119 aa, Artificial Sequence
  Chemically Synthesized
QVQLQESGGGLVQAGGSLRLSCAASGYISTMGWYRQAPGKERELVATINDGSSTYYADSVKGRFTISRDNAKNTVYLQMNSLKPEDTAVYYCAVHEWVERARSPRHDYWGQGTQVTVSS

SEQ ID NO: 22032 - protein, 117 aa, Artificial Sequence
  Chemically Synthesized
QVQLQESGGGLVQAGGSLRLSCAASGTISVAFGMGWYRQAPGKEREFVAGINAGATTNYADSVKGRFTISRDNAKNTVYLQMNSLKPEDTAVYYCAVRSKLTLLIYWGQGTQVTVSS

SEQ ID NO: 22033 - protein, 126 aa, Artificial Sequence
  Chemically Synthesized
QVQLQESGGGLVQAGGSLRLSCAASGYISSYRYMGWYRQAPGKEREFVAAISVGTNTNYADSVKGRFTISRDNAKNTVYLQMNSLKPEDTAVYYCAVTFNQDLVRNTASSTGHHYWGQGTQVTVSS

SEQ ID NO: 22034 - protein, 121 aa, Artificial Sequence
  Chemically Synthesized
QVQLQESGGGLVQAGGSLRLSCAASGNISANVDMGWYRQAPGKERELVAAISLGGNTYYADSVKGRFTISRDNAKNTVYLQMNSLKPEDTAVYYCAAPGFGAPTRSVLIYWGQGTQVTVSS

SEQ ID NO: 22035 - protein, 118 aa, Artificial Sequence
  Chemically Synthesized
QVQLQESGGGLVQAGGSLRLSCAASGTIFVRTDMGWYRQAPGKEREFVAAIGYGTSTNYADSVKGRFTISRDNAKNTVYLQMNSLKPEDTAVYYCAANWYISFPYSYWGQGTQVTVSS

SEQ ID NO: 22036 - protein, 117 aa, Artificial Sequence
  Chemically Synthesized
QVQLQESGGGLVQAGGSLRLSCAASGNISVAQFMGWYRQAPGKERELVATISTVLVPYADSVKGRFTISRDNAKNTVYLQMNSLKPEDTAVYYCAAYYYGYQVLVYWGQGTQVTVSS

SEQ ID NO: 22037 - protein, 126 aa, Artificial Sequence
  Chemically Synthesized
QVQLQESGGGLVQAGGSLRLSCAASGNISYSDTMGWYRQAPGKEREFVAGIDYGTTTYYADSVKGRFTISRDNAKNTVYLQMNSLKPEDTAVYYCAALDNWYYSYYPHPVSASHYWGQGTQVTVSS

SEQ ID NO: 22038 - protein, 118 aa, Artificial Sequence
  Chemically Synthesized
QVQLQESGGGLVQAGGSLRLSCAASGTIFAIAYMGWYRQAPGKEREFVAAIDDGGTTYYADSVKGRFTISRDNAKNTVYLQMNSLKPEDTAVYYCAVWPAYLRYYAYWGQGTQVTVSS

SEQ ID NO: 22039 - protein, 126 aa, Artificial Sequence
  Chemically Synthesized
QVQLQESGGGLVQAGGSLRLSCAASGYIFGYVRMGWYRQAPGKEREFVAAIDQGSSTYYADSVKGRFTISRDNAKNTVYLQMNSLKPEDTAVYYCAAYPQEDGGDYVSHSEDYRYWGQGTQVTVSS

SEQ ID NO: 22040 - protein, 118 aa, Artificial Sequence
  Chemically Synthesized
QVQLQESGGGLVQAGGSLRLSCAASGNISGYSYMGWYRQAPGKEREFVATINTGTSTYYADSVKGRFTISRDNAKNTVYLQMNSLKPEDTAVYYCAADIWLTLIYDYWGQGTQVTVSS

SEQ ID NO: 22041 - protein, 119 aa, Artificial Sequence
  Chemically Synthesized
QVQLQESGGGLVQAGGSLRLSCAASGSIFSDKPMGWYRQAPGKEREFVATITRGANTNYADSVKGRFTISRDNAKNTVYLQMNSLKPEDTAVYYCARDPTAAFYGHYYWGQGTQVTVSS

SEQ ID NO: 22042 - protein, 118 aa, Artificial Sequence
  Chemically Synthesized
QVQLQESGGGLVQAGGSLRLSCAASGTISSLDIMGWYRQAPGKEREFVATITYGASTNYADSVKGRFTISRDNAKNTVYLQMNSLKPEDTAVYYCAARSARWDAHRYWGQGTQVTVSS

SEQ ID NO: 22043 - protein, 118 aa, Artificial Sequence
  Chemically Synthesized
QVQLQESGGGLVQAGGSLRLSCAASGTISRYATMGWYRQAPGKEREFVASITLGGTTNYADSVKGRFTISRDNAKNTVYLQMNSLKPEDTAVYYCAAAGTPGGVYTYWGQGTQVTVSS

SEQ ID NO: 22044 - protein, 118 aa, Artificial Sequence
  Chemically Synthesized
QVQLQESGGGLVQAGGSLRLSCAASGTIFQSYPMGWYRQAPGKEREFVATIDTGGSTYYADSVKGRFTISRDNAKNTVYLQMNSLKPEDTAVYYCAVAFPYDFIFGYWGQGTQVTVSS

SEQ ID NO: 22045 - protein, 121 aa, Artificial Sequence
  Chemically Synthesized
QVQLQESGGGLVQAGGSLRLSCAASGYISRWDMGWYRQAPGKERELVAAITVGTTTYYADSVKGRFTISRDNAKNTVYLQMNSLKPEDTAVYYCAAAPNNIYTPLTGHYYWGQGTQVTVSS

SEQ ID NO: 22046 - protein, 118 aa, Artificial Sequence
  Chemically Synthesized
QVQLQESGGGLVQAGGSLRLSCAASGYISHDSGMGWYRQAPGKEREFVATISDGGSTNYADSVKGRFTISRDNAKNTVYLQMNSLKPEDTAVYYCAATQYASLYLGYWGQGTQVTVSS

SEQ ID NO: 22047 - protein, 118 aa, Artificial Sequence
  Chemically Synthesized
QVQLQESGGGLVQAGGSLRLSCAASGSIFDYHDMGWYRQAPGKEREFVAGIDFGASTNYADSVKGRFTISRDNAKNTVYLQMNSLKPEDTAVYYCAVHYDRRASFGYWGQGTQVTVSS

SEQ ID NO: 22048 - protein, 118 aa, Artificial Sequence
  Chemically Synthesized
QVQLQESGGGLVQAGGSLRLSCAASGYISGGTWMGWYRQAPGKERELVASISDGANTNYADSVKGRFTISRDNAKNTVYLQMNSLKPEDTAVYYCAVRDPNLYLYPYWGQGTQVTVSS

SEQ ID NO: 22049 - protein, 117 aa, Artificial Sequence
  Chemically Synthesized
QVQLQESGGGLVQAGGSLRLSCAASGTISYPGVMGWYRQAPGKEREFVAGIAPGTTTNYADSVKGRFTISRDNAKNTVYLQMNSLKPEDTAVYYCAAQYAGGDLRYWGQGTQVTVSS

SEQ ID NO: 22050 - protein, 122 aa, Artificial Sequence
  Chemically Synthesized
QVQLQESGGGLVQAGGSLRLSCAASGNIFKDIYMGWYRQAPGKERELVAGIADGSTTNYADSVKGRFTISRDNAKNTVYLQMNSLKPEDTAVYYCAADRYGVPRRIYHLTYWGQGTQVTVSS

SEQ ID NO: 22051 - protein, 117 aa, Artificial Sequence
  Chemically Synthesized
QVQLQESGGGLVQAGGSLRLSCAASGTISASTAMGWYRQAPGKERELVAGIAYGTSTYYADSVKGRFTISRDNAKNTVYLQMNSLKPEDTAVYYCAVSSSTTRTMYWGQGTQVTVSS

SEQ ID NO: 22052 - protein, 118 aa, Artificial Sequence
  Chemically Synthesized
QVQLQESGGGLVQAGGSLRLSCAASGYISTTSIMGWYRQAPGKERELVATIGTGSNTYYADSVKGRFTISRDNAKNTVYLQMNSLKPEDTAVYYCAVKYAEYGVLGYWGQGTQVTVSS

SEQ ID NO: 22053 - protein, 118 aa, Artificial Sequence
  Chemically Synthesized
QVQLQESGGGLVQAGGSLRLSCAASGNIFWYYYMGWYRQAPGKERELVATIGGGGTTYYADSVKGRFTISRDNAKNTVYLQMNSLKPEDTAVYYCAVRYPLIYIHRYWGQGTQVTVSS

SEQ ID NO: 22054 - protein, 122 aa, Artificial Sequence
  Chemically Synthesized
QVQLQESGGGLVQAGGSLRLSCAASGTIFPADFMGWYRQAPGKERELVATIGWGGITNYADSVKGRFTISRDNAKNTVYLQMNSLKPEDTAVYYCAVRPYIAYGDYQHLPYWGQGTQVTVSS

SEQ ID NO: 22055 - protein, 117 aa, Artificial Sequence
  Chemically Synthesized
QVQLQESGGGLVQAGGSLRLSCAASGNIFVNWAMGWYRQAPGKEREFVATIAIGGNTNYADSVKGRFTISRDNAKNTVYLQMNSLKPEDTAVYYCAVASVNSSVIYWGQGTQVTVSS

SEQ ID NO: 22056 - protein, 118 aa, Artificial Sequence
  Chemically Synthesized
QVQLQESGGGLVQAGGSLRLSCAASGSISTKYYMGWYRQAPGKERELVAAITNGSTTYYADSVKGRFTISRDNAKNTVYLQMNSLKPEDTAVYYCAASQLGYVNFHYWGQGTQVTVSS

SEQ ID NO: 22057 - protein, 118 aa, Artificial Sequence
  Chemically Synthesized
QVQLQESGGGLVQAGGSLRLSCAASGSIFAYSSMGWYRQAPGKEREFVASISPGTSTYYADSVKGRFTISRDNAKNTVYLQMNSLKPEDTAVYYCAATHDYIYYYGYWGQGTQVTVSS

SEQ ID NO: 22058 - protein, 116 aa, Artificial Sequence
  Chemically Synthesized
QVQLQESGGGLVQAGGSLRLSCAASGTISYSLMGWYRQAPGKERELVAGIALGAITYYADSVKGRFTISRDNAKNTVYLQMNSLKPEDTAVYYCAVILVRSVLIYWGQGTQVTVSS

SEQ ID NO: 22059 - protein, 118 aa, Artificial Sequence
  Chemically Synthesized
QVQLQESGGGLVQAGGSLRLSCAASGYISEAYYMGWYRQAPGKERELVATIALGSITNYADSVKGRFTISRDNAKNTVYLQMNSLKPEDTAVYYCAAYRIDFAGHFYWGQGTQVTVSS

SEQ ID NO: 22060 - protein, 112 aa, Artificial Sequence
  Chemically Synthesized
QVQLQESGGGLVQAGGSLRLSCAASGYISGQTRMGWYRQAPGKEREFVAGIAYADSVKGRFTISRDNAKNTVYLQMNSLKPEDTAVYYCAAEDYVYYRPSYWGQGTQVTVSS

SEQ ID NO: 22061 - protein, 125 aa, Artificial Sequence
  Chemically Synthesized
QVQLQESGGGLVQAGGSLRLSCAASGYIFLDSYMGWYRQAPGKERELVATITAGGTTYYADSVKGRFTISRDNAKNTVYLQMNSLKPEDTAVYYCAAGPERVYYIPGQARYFWYWGQGTQVTVSS

SEQ ID NO: 22062 - protein, 126 aa, Artificial Sequence
  Chemically Synthesized
QVQLQESGGGLVQAGGSLRLSCAASGNISVFLQMGWYRQAPGKEREFVAAINYGSTTNYADSVKGRFTISRDNAKNTVYLQMNSLKPEDTAVYYCAVVYLHDVRQIGYDVYHHAYWGQGTQVTVSS

SEQ ID NO: 22063 - protein, 127 aa, Artificial Sequence
  Chemically Synthesized
QVQLQESGGGLVQAGGSLRLSCAASGSIFDERYMGWYRQAPGKEREFVAGIGKGTSTNYADSVKGRFTISRDNAKNTVYLQMNSLKPEDTAVYYCAATSSDKWRYVEDEDYYTLGYWGQGTQVTVSS

SEQ ID NO: 22064 - protein, 118 aa, Artificial Sequence
  Chemically Synthesized
QVQLQESGGGLVQAGGSLRLSCAASGSISAGHHMGWYRQAPGKERELVAAISTGASTNYADSVKGRFTISRDNAKNTVYLQMNSLKPEDTAVYYCAARFTYFRAHPYWGQGTQVTVSS

SEQ ID NO: 22065 - protein, 118 aa, Artificial Sequence
  Chemically Synthesized
QVQLQESGGGLVQAGGSLRLSCAASGSISVGFSMGWYRQAPGKEREFVAGISSGTSTNYADSVKGRFTISRDNAKNTVYLQMNSLKPEDTAVYYCAAYVPNQGLYVYWGQGTQVTVSS

SEQ ID NO: 22066 - protein, 126 aa, Artificial Sequence
  Chemically Synthesized
QVQLQESGGGLVQAGGSLRLSCAASGNISDGPYMGWYRQAPGKEREFVAAIGTGTITNYADSVKGRFTISRDNAKNTVYLQMNSLKPEDTAVYYCAAESRGYPGRGYDPAWWYVYWGQGTQVTVSS

SEQ ID NO: 22067 - protein, 122 aa, Artificial Sequence
  Chemically Synthesized
QVQLQESGGGLVQAGGSLRLSCAASGSISSVVYMGWYRQAPGKERELVAAITDGSTTYYADSVKGRFTISRDNAKNTVYLQMNSLKPEDTAVYYCAVDNDKSIHEYGWFLYWGQGTQVTVSS

SEQ ID NO: 22068 - protein, 118 aa, Artificial Sequence
  Chemically Synthesized
QVQLQESGGGLVQAGGSLRLSCAASGYISNYVAMGWYRQAPGKEREFVAAIAYGSTTNYADSVKGRFTISRDNAKNTVYLQMNSLKPEDTAVYYCAATGRSYSAHRYWGQGTQVTVSS

SEQ ID NO: 22069 - protein, 109 aa, Artificial Sequence
  Chemically Synthesized
QVQLQESGGGLVQAGGSLRLSCAASGIGYVTMGWYRQAPGKEREFVAAIAGGTTYYADSVKGRFTISRDNAKNTVYLQMNSLKPEDTAVYYCAADLEYWGQGTQVTVSS

SEQ ID NO: 22070 - protein, 118 aa, Artificial Sequence
  Chemically Synthesized
QVQLQESGGGLVQAGGSLRLSCAASGTIFHTYAMGWYRQAPGKEREFVAAIDYGATTYYADSVKGRFTISRDNAKNTVYLQMNSLKPEDTAVYYCAVYESPWAVLSYWGQGTQVTVSS

SEQ ID NO: 22071 - protein, 124 aa, Artificial Sequence
  Chemically Synthesized
QVQLQESGGGLVQAGGSLRLSCAASGSIFAQYFMGWYRQAPGKERELVAGLISVVLPYADSVKGRFTISRDNAKNTVYLQMNSLKPEDTAVYYCAAEDLDPRAAAYYYLQHDYWGQGTQVTVSS

SEQ ID NO: 22072 - protein, 126 aa, Artificial Sequence
  Chemically Synthesized
QVQLQESGGGLVQAGGSLRLSCAASGYISYYYFMGWYRQAPGKEREFVATINYGTTTNYADSVKGRFTISRDNAKNTVYLQMNSLKPEDTAVYYCAVDHDHVYRDDIYRQNALFYWGQGTQVTVSS

SEQ ID NO: 22073 - protein, 121 aa, Artificial Sequence
  Chemically Synthesized
QVQLQESGGGLVQAGGSLRLSCAASGYISPEPDMGWYRQAPGKEREFVAGINFGTSTYYADSVKGRFTISRDNAKNTVYLQMNSLKPEDTAVYYCAAAEDYSRRRLVVIYWGQGTQVTVSS

SEQ ID NO: 22074 - protein, 117 aa, Artificial Sequence
  Chemically Synthesized
QVQLQESGGGLVQAGGSLRLSCAASGNISFWTFMGWYRQAPGKEREFVAGLLLVLVPYADSVKGRFTISRDNAKNTVYLQMNSLKPEDTAVYYCAVRSRPYPVHDYWGQGTQVTVSS

SEQ ID NO: 22075 - protein, 118 aa, Artificial Sequence
  Chemically Synthesized
QVQLQESGGGLVQAGGSLRLSCAASGYISGRDAMGWYRQAPGKEREFVAGITNGAITYYADSVKGRFTISRDNAKNTVYLQMNSLKPEDTAVYYCAAEAPLDLRHYYWGQGTQVTVSS

SEQ ID NO: 22076 - protein, 114 aa, Artificial Sequence
  Chemically Synthesized
QVQLQESGGGLVQAGGSLRLSCAASGTISYDGDMGWYRQAPGKEREFVAAIAYGGNTNYADSVKGRFTISRDNAKNTVYLQMNSLKPEDTAVYYCAVDWYLAYWGQGTQVTVSS

SEQ ID NO: 22077 - protein, 121 aa, Artificial Sequence
  Chemically Synthesized
QVQLQESGGGLVQAGGSLRLSCAASGTISYVTSMGWYRQAPGKERELVATISVGANTNYADSVKGRFTISRDNAKNTVYLQMNSLKPEDTAVYYCAVAHSYLDDGYRHRYWGQGTQVTVSS

SEQ ID NO: 22078 - protein, 110 aa, Artificial Sequence
  Chemically Synthesized
QVQLQESGGGLVQAGGSLRLSCAASGSIFGQSGMGWYRQAPGKEREFVAAINPGGNTNYADSVKGRFTISRDNAKNTVYLQMNSLKPEDTAVYYCAVSYWGQGTQVTVSS

SEQ ID NO: 22079 - protein, 118 aa, Artificial Sequence
  Chemically Synthesized
QVQLQESGGGLVQAGGSLRLSCAASGNISGGDAMGWYRQAPGKEREFVATIGYGTSTNYADSVKGRFTISRDNAKNTVYLQMNSLKPEDTAVYYCAVWWGDYQSHYYWGQGTQVTVSS

SEQ ID NO: 22080 - protein, 122 aa, Artificial Sequence
  Chemically Synthesized
QVQLQESGGGLVQAGGSLRLSCAASGSISHYTCMGWYRQAPGKERELVASIDYGSTTNYADSVKGRFTISRDNAKNTVYLQMNSLKPEDTAVYYCAATRIATRYPAGDFRYWGQGTQVTVSS

SEQ ID NO: 22081 - protein, 115 aa, Artificial Sequence
  Chemically Synthesized
QVQLQESGGGLVQAGGSLRLSCAASGSISPYSSMGWYRQAPGKERELVVNYGSTTNYADSVKGRFTISRDNAKNTVYLQMNSLKPEDTAVYYCAAQRQDTYYPYWGQGTQVTVSS

SEQ ID NO: 22082 - protein, 118 aa, Artificial Sequence
  Chemically Synthesized
QVQLQESGGGLVQAGGSLRLSCAASGTIFPEYYMGWYRQAPGKERELVATIDRGANTYYADSVKGRFTISRDNAKNTVYLQMNSLKPEDTAVYYCAAYNGTSPSFPYWGQGTQVTVSS

SEQ ID NO: 22083 - protein, 118 aa, Artificial Sequence
  Chemically Synthesized
QVQLQESGGGLVQAGGSLRLSCAASGNIFVYIGMGWYRQAPGKERELVATITFGGITYYADSVKGRFTISRDNAKNTVYLQMNSLKPEDTAVYYCAVDHPRAFTYLYWGQGTQVTVSS

SEQ ID NO: 22084 - protein, 118 aa, Artificial Sequence
  Chemically Synthesized
QVQLQESGGGLVQAGGSLRLSCAASGSIFIQHVMGWYRQAPGKERELVATITYGASTNYADSVKGRFTISRDNAKNTVYLQMNSLKPEDTAVYYCAVGYGERLRLYYWGQGTQVTVSS

SEQ ID NO: 22085 - protein, 118 aa, Artificial Sequence
  Chemically Synthesized
QVQLQESGGGLVQAGGSLRLSCAASGTISDGAWMGWYRQAPGKERELVAAISRGTSTYYADSVKGRFTISRDNAKNTVYLQMNSLKPEDTAVYYCAVGTYTLASLPYWGQGTQVTVSS

SEQ ID NO: 22086 - protein, 125 aa, Artificial Sequence
  Chemically Synthesized
QVQLQESGGGLVQAGGSLRLSCAASGTISYDAAMGWYRQAPGKERELVAGIANGSSTYYADSVKGRFTISRDNAKNTVYLQMNSLKPEDTAVYYCAASRVMVVLRNWVVRSTLYWGQGTQVTVSS

SEQ ID NO: 22087 - protein, 118 aa, Artificial Sequence
  Chemically Synthesized
QVQLQESGGGLVQAGGSLRLSCAASGNISRIDSMGWYRQAPGKEREFVASIAGGGTTNYADSVKGRFTISRDNAKNTVYLQMNSLKPEDTAVYYCAAVSGRPSYHGYWGQGTQVTVSS

SEQ ID NO: 22088 - protein, 118 aa, Artificial Sequence
  Chemically Synthesized
QVQLQESGGGLVQAGGSLRLSCAASGNISPGAVMGWYRQAPGKEREFVAGITNGGNTNYADSVKGRFTISRDNAKNTVYLQMNSLKPEDTAVYYCAALSRYLDWLVYWGQGTQVTVSS

SEQ ID NO: 22089 - protein, 118 aa, Artificial Sequence
  Chemically Synthesized
QVQLQESGGGLVQAGGSLRLSCAASGTIFYAATMGWYRQAPGKERELVASIAKGTSTYYADSVKGRFTISRDNAKNTVYLQMNSLKPEDTAVYYCAVSRGREVQYSYWGQGTQVTVSS

SEQ ID NO: 22090 - protein, 122 aa, Artificial Sequence
  Chemically Synthesized
QVQLQESGGGLVQAGGSLRLSCAASGSISDVDQMGWYRQAPGKEREFVAGIAGGTITNYADSVKGRFTISRDNAKNTVYLQMNSLKPEDTAVYYCAADPNDGYVVSRGHDYWGQGTQVTVSS

SEQ ID NO: 22091 - protein, 122 aa, Artificial Sequence
  Chemically Synthesized
QVQLQESGGGLVQAGGSLRLSCAASGYISGSYIMGWYRQAPGKEREFVAGIANGATTNYADSVKGRFTISRDNAKNTVYLQMNSLKPEDTAVYYCAAAGYVNVWKRRWFYYWGQGTQVTVSS

SEQ ID NO: 22092 - protein, 123 aa, Artificial Sequence
  Chemically Synthesized
QVQLQESGGGLVQAGGSLRLSCAASGNISPSDYMGWYRQAPGKERELVAAITTGTTTYYADSVKGRFTISRDNAKNTVYLQMNSLKPEDTAVYYCAAVVFVWLYGRDHYLDYWGQGTQVTVSS

SEQ ID NO: 22093 - protein, 117 aa, Artificial Sequence
  Chemically Synthesized
QVQLQESGGGLVQAGGSLRLSCAASGTIFYDWYMGWYRQAPGKERELVAAIGSVVVPYADSVKGRFTISRDNAKNTVYLQMNSLKPEDTAVYYCAAYLDAYDRYYYWGQGTQVTVSS

SEQ ID NO: 22094 - protein, 121 aa, Artificial Sequence
  Chemically Synthesized
QVQLQESGGGLVQAGGSLRLSCAASGYISFRTMGWYRQAPGKEREFVAAISGGATTYYADSVKGRFTISRDNAKNTVYLQMNSLKPEDTAVYYCAAVYYDETDIAPWHAYWGQGTQVTVSS

SEQ ID NO: 22095 - protein, 118 aa, Artificial Sequence
  Chemically Synthesized
QVQLQESGGGLVQAGGSLRLSCAASGYISYPRRMGWYRQAPGKEREFVAGITDGAITYYADSVKGRFTISRDNAKNTVYLQMNSLKPEDTAVYYCAVPDTDTYDHYYWGQGTQVTVSS

SEQ ID NO: 22096 - protein, 118 aa, Artificial Sequence
  Chemically Synthesized
QVQLQESGGGLVQAGGSLRLSCAASGNISRIYTMGWYRQAPGKEREFVAGIAYGANTYYADSVKGRFTISRDNAKNTVYLQMNSLKPEDTAVYYCAVIWLEKQYHYYWGQGTQVTVSS

SEQ ID NO: 22097 - protein, 112 aa, Artificial Sequence
  Chemically Synthesized
QVQLQESGGGLVQAGGSLRLSCAASGNIMGWYRQAPGKEREFVAAIAYGGNTNYADSVKGRFTISRDNAKNTVYLQMNSLKPEDTAVYYCAALRVGHFLYYWGQGTQVTVSS

SEQ ID NO: 22098 - protein, 122 aa, Artificial Sequence
  Chemically Synthesized
QVQLQESGGGLVQAGGSLRLSCAASGTISDDDVMGWYRQAPGKERELVAGIARGTTTNYADSVKGRFTISRDNAKNTVYLQMNSLKPEDTAVYYCAVGGPYISYVAGYHDYWGQGTQVTVSS

SEQ ID NO: 22099 - protein, 118 aa, Artificial Sequence
  Chemically Synthesized
QVQLQESGGGLVQAGGSLRLSCAASGTIFGYAYMGWYRQAPGKEREFVAAITVGASTYYADSVKGRFTISRDNAKNTVYLQMNSLKPEDTAVYYCAVFQGYTAYLGYWGQGTQVTVSS

SEQ ID NO: 22100 - protein, 126 aa, Artificial Sequence
  Chemically Synthesized
QVQLQESGGGLVQAGGSLRLSCAASGNISWYFTMGWYRQAPGKERELVAAIGYGATTNYADSVKGRFTISRDNAKNTVYLQMNSLKPEDTAVYYCAVVRDGYAYRYGTGYVGYAYWGQGTQVTVSS

SEQ ID NO: 22101 - protein, 121 aa, Artificial Sequence
  Chemically Synthesized
QVQLQESGGGLVQAGGSLRLSCAASGTISDTRQMGWYRQAPGKEREFVAGIGAVLVPYADSVKGRFTISRDNAKNTVYLQMNSLKPEDTAVYYCAAGYDQQVYADVVLVYWGQGTQVTVSS

SEQ ID NO: 22102 - protein, 118 aa, Artificial Sequence
  Chemically Synthesized
QVQLQESGGGLVQAGGSLRLSCAASGTISQGIAMGWYRQAPGKEREFVAGINRGGTTNYADSVKGRFTISRDNAKNTVYLQMNSLKPEDTAVYYCAVYYYADGPHYYWGQGTQVTVSS

SEQ ID NO: 22103 - protein, 118 aa, Artificial Sequence
  Chemically Synthesized
QVQLQESGGGLVQAGGSLRLSCAASGTISLVPVMGWYRQAPGKERELVATIGPGTSTNYADSVKGRFTISRDNAKNTVYLQMNSLKPEDTAVYYCAVEHNYFSNHAYWGQGTQVTVSS

SEQ ID NO: 22104 - protein, 117 aa, Artificial Sequence
  Chemically Synthesized
QVQLQESGGGLVQAGGSLRLSCAASGTISATASMGWYRQAPGKEREFVAGINRGSSTNYADSVKGRFTISRDNAKNTVYLQMNSLKPEDTAVYYCAFTVTLSLLMYWGQGTQVTVSS

SEQ ID NO: 22105 - protein, 120 aa, Artificial Sequence
  Chemically Synthesized
QVQLQESGGGLVQAGGSLRLSCAASGNISALSMGWYRQAPGKERELVATINFGTNTNYADSVKGRFTISRDNAKNTVYLQMNSLKPEDTAVYYCADYALVYFVTQAFYYWGQGTQVTVSS

SEQ ID NO: 22106 - protein, 110 aa, Artificial Sequence
  Chemically Synthesized
QVQLQESGGGLVQAGGSLRLSCAASGNISGQTGMGWYRQAPGKERELVAAIADGSTTNYADSVKGRFTISRDNAKNTVYLQMNSLKPEDTAVYYCAYDYWGQGTQVTVSS

SEQ ID NO: 22107 - protein, 118 aa, Artificial Sequence
  Chemically Synthesized
QVQLQESGGGLVQAGGSLRLSCAASGTIFPWDYMGWYRQAPGKERELVAGIAPGTTTYYADSVKGRFTISRDNAKNTVYLQMNSLKPEDTAVYYCAADLDFHHLHSYWGQGTQVTVSS

SEQ ID NO: 22108 - protein, 122 aa, Artificial Sequence
  Chemically Synthesized
QVQLQESGGGLVQAGGSLRLSCAASGTIFGPSTMGWYRQAPGKERELVAGIGYGANTNYADSVKGRFTISRDNAKNTVYLQMNSLKPEDTAVYYCAVVTHFPWILGGIYYYWGQGTQVTVSS

SEQ ID NO: 22109 - protein, 118 aa, Artificial Sequence
  Chemically Synthesized
QVQLQESGGGLVQAGGSLRLSCAASGNIFDPTYMGWYRQAPGKEREFVATIGTGSTTYYADSVKGRFTISRDNAKNTVYLQMNSLKPEDTAVYYCAVDEPREDGHWYWGQGTQVTVSS

SEQ ID NO: 22110 - protein, 118 aa, Artificial Sequence
  Chemically Synthesized
QVQLQESGGGLVQAGGSLRLSCAASGNISGRISMGWYRQAPGKERELVAAIATGGITNYADSVKGRFTISRDNAKNTVYLQMNSLKPEDTAVYYCAVVTVGAGIHGYWGQGTQVTVSS

SEQ ID NO: 22111 - protein, 118 aa, Artificial Sequence
  Chemically Synthesized
QVQLQESGGGLVQAGGSLRLSCAASGTISTLGGMGWYRQAPGKERELVAGITYGGNTNYADSVKGRFTISRDNAKNTVYLQMNSLKPEDTAVYYCAVVALYSPYLFYWGQGTQVTVSS

SEQ ID NO: 22112 - protein, 118 aa, Artificial Sequence
  Chemically Synthesized
QVQLQESGGGLVQAGGSLRLSCAASGTISTRWYMGWYRQAPGKEREFVATIDDGATTNYADSVKGRFTISRDNAKNTVYLQMNSLKPEDTAVYYCAALYWNGKYHRYWGQGTQVTVSS

SEQ ID NO: 22113 - protein, 118 aa, Artificial Sequence
  Chemically Synthesized
QVQLQESGGGLVQAGGSLRLSCAASGTISPIGGMGWYRQAPGKEREFVAGITRGANTNYADSVKGRFTISRDNAKNTVYLQMNSLKPEDTAVYYCAVIIWGYYRHYYWGQGTQVTVSS

SEQ ID NO: 22114 - protein, 122 aa, Artificial Sequence
  Chemically Synthesized
QVQLQESGGGLVQAGGSLRLSCAASGSISRYYVMGWYRQAPGKERELVAAISGGANTNYADSVKGRFTISRDNAKNTVYLQMNSLKPEDTAVYYCAVGADDNDGSRYPYYYWGQGTQVTVSS

SEQ ID NO: 22115 - protein, 122 aa, Artificial Sequence
  Chemically Synthesized
QVQLQESGGGLVQAGGSLRLSCAASGTIFGTDDMGWYRQAPGKERELVAGITYGATTYYADSVKGRFTISRDNAKNTVYLQMNSLKPEDTAVYYCAAQITTSYYRRNVHIYWGQGTQVTVSS

SEQ ID NO: 22116 - protein, 117 aa, Artificial Sequence
  Chemically Synthesized
QVQLQESGGGLVQAGGSLRLSCAASGYISVWTSMGWYRQAPGKERELLPVLLTVLIPYADSVKGRFTISRDNAKNTVYLQMNSLKPEDTAVYYCAAQGDGRYYFDYWGQGTQVTVSS

SEQ ID NO: 22117 - protein, 110 aa, Artificial Sequence
  Chemically Synthesized
QVQLQESGGGLVQAGGSLRLSCAASGSIFFTRVMGWYRQAPGKERELVAAYADSVKGRFTISRDNAKNTVYLQMNSLKPEDTAVYYCAVYAWRYIYHDYWGQGTQVTVSS

SEQ ID NO: 22118 - protein, 118 aa, Artificial Sequence
  Chemically Synthesized
QVQLQESGGGLVQAGGSLRLSCAASGNISPYELMGWYRQAPGKEREFVATITQGTSTYYADSVKGRFTISRDNAKNTVYLQMNSLKPEDTAVYYCAAYYRINSLYDYWGQGTQVTVSS

SEQ ID NO: 22119 - protein, 122 aa, Artificial Sequence
  Chemically Synthesized
QVQLQESGGGLVQAGGSLRLSCAASGNISGVYAMGWYRQAPGKERELVASISEGASTYYADSVKGRFTISRDNAKNTVYLQMNSLKPEDTAVYYCAVVGNDRRYGHRYYYYWGQGTQVTVSS

SEQ ID NO: 22120 - protein, 118 aa, Artificial Sequence
  Chemically Synthesized
QVQLQESGGGLVQAGGSLRLSCAASGNIFGRDGMGWYRQAPGKERELVAGIGDGASTYYADSVKGRFTISRDNAKNTVYLQMNSLKPEDTAVYYCAARTDPANKLTYWGQGTQVTVSS

SEQ ID NO: 22121 - protein, 117 aa, Artificial Sequence
  Chemically Synthesized
QVQLQESGGGLVQAGGSLRLSCAASGSISPPYFMGWYRQAPGKERELVAAISDGASTYYADSVKGRFTISRDNAKNTVYLQMNSLKPEDTAVYYCAVYGDYRSLFYWGQGTQVTVSS

SEQ ID NO: 22122 - protein, 118 aa, Artificial Sequence
  Chemically Synthesized
QVQLQESGGGLVQAGGSLRLSCAASGTIFHWAYMGWYRQAPGKERELVAAISAGANTNYADSVKGRFTISRDNAKNTVYLQMNSLKPEDTAVYYCAADRGRYQRLYYWGQGTQVTVSS

SEQ ID NO: 22123 - protein, 117 aa, Artificial Sequence
  Chemically Synthesized
QVQLQESGGGLVQAGGSLRLSCAASGSISDRASMGWYRQAPGKERELVAAISAGGNTNYADSVKGRFTISRDNAKNTVYLQMNSLKPEDTAVYYCAFTLSTVISCYWGQGTQVTVSS

SEQ ID NO: 22124 - protein, 126 aa, Artificial Sequence
  Chemically Synthesized
QVQLQESGGGLVQAGGSLRLSCAASGNISGRLYMGWYRQAPGKEREFVAAIGPGANTNYADSVKGRFTISRDNAKNTVYLQMNSLKPEDTAVYYCAAYWSALPVAAGYYLGSLLYWGQGTQVTVSS

SEQ ID NO: 22125 - protein, 122 aa, Artificial Sequence
  Chemically Synthesized
QVQLQESGGGLVQAGGSLRLSCAASGTIFLIYGMGWYRQAPGKEREFVASINHGTNTYYADSVKGRFTISRDNAKNTVYLQMNSLKPEDTAVYYCAVPSYYLDTGYRWLAYWGQGTQVTVSS

SEQ ID NO: 22126 - protein, 118 aa, Artificial Sequence
  Chemically Synthesized
QVQLQESGGGLVQAGGSLRLSCAASGYISPRPIMGWYRQAPGKEREFVAAITAGGNTNYADSVKGRFTISRDNAKNTVYLQMNSLKPEDTAVYYCAAVYRPYYSHYYWGQGTQVTVSS

SEQ ID NO: 22127 - protein, 117 aa, Artificial Sequence
  Chemically Synthesized
QVQLQESGGGLVQAGGSLRLSCAASGSISDAIYMGWYRQAPGKEREFVAGITRGGTTYYADSVKGRFTISRDNAKNTVYLQMNSLKPEDTAVYYCAVYDDPESVMYWGQGTQVTVSS

SEQ ID NO: 22128 - protein, 122 aa, Artificial Sequence
  Chemically Synthesized
QVQLQESGGGLVQAGGSLRLSCAASGTISLMGWYRQAPGKERELVAGLVTVLLPYADSVKGRFTISRDNAKNTVYLQMNSLKPEDTAVYYCAATHPLDELAGGYGYADLYYWGQGTQVTVSS

SEQ ID NO: 22129 - protein, 117 aa, Artificial Sequence
  Chemically Synthesized
QVQLQESGGGLVQAGGSLRLSCAASGNISPSLYMGWYRQAPGKERELVAAIASVLLPYADSVKGRFTISRDNAKNTVYLQMNSLKPEDTAVYYCAAVQFAPPDHAYWGQGTQVTVSS

SEQ ID NO: 22130 - protein, 119 aa, Artificial Sequence
  Chemically Synthesized
QVQLQESGGGLVQAGGSLRLSCAASGTISDNGIMGWYRQAPGKEREFVASIDYGANTYYADSVKGRFTISRDNAKNTVYLQMNSLKPEDTAVYYCAVEPNYTDGVYSYWGQGTQVTVSS

SEQ ID NO: 22131 - protein, 116 aa, Artificial Sequence
  Chemically Synthesized
QVQLQESGGGLVQAGGSLRLSCAASGSIFYDTTMGWYRQAPGKEREFVASIGHGASTYYADSVKGRFTISRDNAKNTVYLQMNSLKPEDTAVYYCAAATRYPHGYWGQGTQVTVSS

SEQ ID NO: 22132 - protein, 118 aa, Artificial Sequence
  Chemically Synthesized
QVQLQESGGGLVQAGGSLRLSCAASGSIFDDTIMGWYRQAPGKEREFVAAIAIGASTYYADSVKGRFTISRDNAKNTVYLQMNSLKPEDTAVYYCAAVTYYYAYHYYWGQGTQVTVSS

SEQ ID NO: 22133 - protein, 121 aa, Artificial Sequence
  Chemically Synthesized
QVQLQESGGGLVQAGGSLRLSCAASGNISRFGPMGWYRQAPGKEREFVAGISSGSITNYADSVKGRFTISRDNAKNTVYLQMNSLKPEDTAVYYCAVIYYLDRTTYRHAYWGQGTQVTVSS

SEQ ID NO: 22134 - protein, 122 aa, Artificial Sequence
  Chemically Synthesized
QVQLQESGGGLVQAGGSLRLSCAASGTISIPWYMGWYRQAPGKERELVAAIARGGTTYYADSVKGRFTISRDNAKNTVYLQMNSLKPEDTAVYYCAAYRRRNYTLRANYPYWGQGTQVTVSS

SEQ ID NO: 22135 - protein, 109 aa, Artificial Sequence
  Chemically Synthesized
QVQLQESGGGLVQAGGSLRLSCAASGSILLLLMGWYRQAPGKEREFVAAITGGGITNYADSVKGRFTISRDNAKNTVYLQMNSLKPEDTAVYYCAVGYWGQGTQVTVSS

SEQ ID NO: 22136 - protein, 118 aa, Artificial Sequence
  Chemically Synthesized
QVQLQESGGGLVQAGGSLRLSCAASGNISRIYDMGWYRQAPGKEREFVATIAAGGSTYYADSVKGRFTISRDNAKNTVYLQMNSLKPEDTAVYYCAVWQNIPNYLDYWGQGTQVTVSS

SEQ ID NO: 22137 - protein, 121 aa, Artificial Sequence
  Chemically Synthesized
QVQLQESGGGLVQAGGSLRLSCAASGTIFTEDWMGWYRQAPGKERELVAGTRGSTTYYADSVKGRFTISRDNAKNTVYLQMNSLKPEDTAVYYCAADVENDETANGGLYYWGQGTQVTVSS

SEQ ID NO: 22138 - protein, 118 aa, Artificial Sequence
  Chemically Synthesized
QVQLQESGGGLVQAGGSLRLSCAASGYISGTYAMGWYRQAPGKERELVAGIGSGATTNYADSVKGRFTISRDNAKNTVYLQMNSLKPEDTAVYYCAVGDDGWRFYAYWGQGTQVTVSS

SEQ ID NO: 22139 - protein, 118 aa, Artificial Sequence
  Chemically Synthesized
QVQLQESGGGLVQAGGSLRLSCAASGTISAGDPMGWYRQAPGKERELVASINAGTNTNYADSVKGRFTISRDNAKNTVYLQMNSLKPEDTAVYYCAVSLYDIKLYAYWGQGTQVTVSS

SEQ ID NO: 22140 - protein, 126 aa, Artificial Sequence
  Chemically Synthesized
QVQLQESGGGLVQAGGSLRLSCAASGYIFRPITMGWYRQAPGKERELVATIGYGGTTYYADSVKGRFTISRDNAKNTVYLQMNSLKPEDTAVYYCAVLDFYETIRIYAPPLLYAYWGQGTQVTVSS

SEQ ID NO: 22141 - protein, 120 aa, Artificial Sequence
  Chemically Synthesized
QVQLQESGGGLVQAGGSLRLSCAASGYISFTADMGWYRQAPGKEREFVASIDTGASTNYADSVKGRFTISRDNAKNTVYLQMNSLKPEDTAVYYCAAGTYLWPYQRGVYWGQGTQVTVSS

SEQ ID NO: 22142 - protein, 118 aa, Artificial Sequence
  Chemically Synthesized
QVQLQESGGGLVQAGGSLRLSCAASGSISAPAFMGWYRQAPGKEREFVATIGFGGNTNYADSVKGRFTISRDNAKNTVYLQMNSLKPEDTAVYYCAAPNWDDPYHDYWGQGTQVTVSS

SEQ ID NO: 22143 - protein, 118 aa, Artificial Sequence
  Chemically Synthesized
QVQLQESGGGLVQAGGSLRLSCAASGNISNVYYMGWYRQAPGKEREFVAAIADGGSTNYADSVKGRFTISRDNAKNTVYLQMNSLKPEDTAVYYCAAAYRDNTWHYYWGQGTQVTVSS

SEQ ID NO: 22144 - protein, 122 aa, Artificial Sequence
  Chemically Synthesized
QVQLQESGGGLVQAGGSLRLSCAASGTISADSWMGWYRQAPGKERELVAGITDGASTNYADSVKGRFTISRDNAKNTVYLQMNSLKPEDTAVYYCAVRQDYYFEYAYDHDYWGQGTQVTVSS

SEQ ID NO: 22145 - protein, 122 aa, Artificial Sequence
  Chemically Synthesized
QVQLQESGGGLVQAGGSLRLSCAASGSIFGDRDMGWYRQAPGKERELVAAIALGASTYYADSVKGRFTISRDNAKNTVYLQMNSLKPEDTAVYYCAALNTVSDAFYGRYVYWGQGTQVTVSS

SEQ ID NO: 22146 - protein, 125 aa, Artificial Sequence
  Chemically Synthesized
QVQLQESGGGLVQAGGSLRLSCAASGTISREPYMGWYRQAPGKERELVAGIATGTNTYADSVKGRFTISRDNAKNTVYLQMNSLKPEDTAVYYCAVWYAVKQAVNVRKGYDHTYWGQGTQVTVSS

SEQ ID NO: 22147 - protein, 107 aa, Artificial Sequence
  Chemically Synthesized
QVQLQESGGGLVQAGGSLRLSCAASGSISDTDRMGWYRQAPGKEREFVARITVLIPYADSVKGRFTISRDNAKNTVYLQMNSLKPEDTAVYYCAAYWGQGTQVTVSS

SEQ ID NO: 22148 - protein, 122 aa, Artificial Sequence
  Chemically Synthesized
QVQLQESGGGLVQAGGSLRLSCAASGTIFDHDIMGWYRQAPGKERELVAAITYGSSTYYADSVKGRFTISRDNAKNTVYLQMNSLKPEDTAVYYCAVDTDTSYYTDYYHTYWGQGTQVTVSS

SEQ ID NO: 22149 - protein, 118 aa, Artificial Sequence
  Chemically Synthesized
QVQLQESGGGLVQAGGSLRLSCAASGTISNRSFMGWYRQAPGKEREFVASIDSGGSTNYADSVKGRFTISRDNAKNTVYLQMNSLKPEDTAVYYCAVATSSDYDFRYWGQGTQVTVSS

SEQ ID NO: 22150 - protein, 122 aa, Artificial Sequence
  Chemically Synthesized
QVQLQESGGGLVQAGGSLRLSCAASGTIFDIDTMGWYRQAPGKEREFVASIGYGTTTNYADSVKGRFTISRDNAKNTVYLQMNSLKPEDTAVYYCAAVYGDVIAQQYGHRYWGQGTQVTVSS

SEQ ID NO: 22151 - protein, 116 aa, Artificial Sequence
  Chemically Synthesized
QVQLQESGGGLVQAGGSLRLSCAASGSISQRYMGWYRQAPGKEREFVAGITAGGNTYYADSVKGRFTISRDNAKNTVYLQMNSLKPEDTAVYYCAVVDRTVVLMYWGQGTQVTVSS

SEQ ID NO: 22152 - protein, 118 aa, Artificial Sequence
  Chemically Synthesized
QVQLQESGGGLVQAGGSLRLSCAASGNISPTYAMGWYRQAPGKERELVAAIGYGTNTNYADSVKGRFTISRDNAKNTVYLQMNSLKPEDTAVYYCAVLWYYGTYYWYWGQGTQVTVSS

SEQ ID NO: 22153 - protein, 116 aa, Artificial Sequence
  Chemically Synthesized
QVQLQESGGGLVQAGGSLRLSCAASGNISDYVGMGWYRQAPGKERELPLLLLVVVPYADSVKGRFTISRDNAKNTVYLQMNSLKPEDTAVYYCAVHFGGWQDHPYWGQGTQVTVSS

SEQ ID NO: 22154 - protein, 117 aa, Artificial Sequence
  Chemically Synthesized
QVQLQESGGGLVQAGGSLRLSCAASGYILTSLMGWYRQAPGKERELVASIDDGGTTNYADSVKGRFTISRDNAKNTVYLQMNSLKPEDTAVYYCAVPYGYRREHGYWGQGTQVTVSS

SEQ ID NO: 22155 - protein, 118 aa, Artificial Sequence
  Chemically Synthesized
QVQLQESGGGLVQAGGSLRLSCAASGSISSDSAMGWYRQAPGKERELVAAISYGTTTYYADSVKGRFTISRDNAKNTVYLQMNSLKPEDTAVYYCAVDGYTYSGFVYWGQGTQVTVSS

SEQ ID NO: 22156 - protein, 113 aa, Artificial Sequence
  Chemically Synthesized
QVQLQESGGGLVQAGGSLRLSCAASGTIFWVVGMGWYRQAPGKERELVAYADSVKGRFTISRDNAKNTVYLQMNSLKPEDTAVYYCAVTPREHWYDYAHHYYWGQGTQVTVSS

SEQ ID NO: 22157 - protein, 117 aa, Artificial Sequence
  Chemically Synthesized
QVQLQESGGGLVQAGGSLRLSCAASGSISDRIVMGWYRQAPGKEREFVASISLGTITYYADSVKGRFTISRDNAKNTVYLQMNSLKPEDTAVYYCAVADSHWQHSYWGQGTQVTVSS

SEQ ID NO: 22158 - protein, 118 aa, Artificial Sequence
  Chemically Synthesized
QVQLQESGGGLVQAGGSLRLSCAASGNISSSYRMGWYRQAPGKERELVAGIGTGASTNYADSVKGRFTISRDNAKNTVYLQMNSLKPEDTAVYYCAVAWHSYYWHSYWGQGTQVTVSS

SEQ ID NO: 22159 - protein, 122 aa, Artificial Sequence
  Chemically Synthesized
QVQLQESGGGLVQAGGSLRLSCAASGYISVDDAMGWYRQAPGKEREFVAGITIGTTTNYADSVKGRFTISRDNAKNTVYLQMNSLKPEDTAVYYCAVGVTWDYPQYVYLSYWGQGTQVTVSS

SEQ ID NO: 22160 - protein, 118 aa, Artificial Sequence
  Chemically Synthesized
QVQLQESGGGLVQAGGSLRLSCAASGSISGDVQMGWYRQAPGKEREFVATIGYGTITYYADSVKGRFTISRDNAKNTVYLQMNSLKPEDTAVYYCAVRFRQLDDHPYWGQGTQVTVSS

SEQ ID NO: 22161 - protein, 118 aa, Artificial Sequence
  Chemically Synthesized
QVQLQESGGGLVQAGGSLRLSCAASGSISLWKSMGWYRQAPGKEREFVASINRGSITNYADSVKGRFTISRDNAKNTVYLQMNSLKPEDTAVYYCAAVYYYRDYHGYWGQGTQVTVSS

SEQ ID NO: 22162 - protein, 118 aa, Artificial Sequence
  Chemically Synthesized
QVQLQESGGGLVQAGGSLRLSCAASGTIFTWYAMGWYRQAPGKEREFVASISFGSNTNYADSVKGRFTISRDNAKNTVYLQMNSLKPEDTAVYYCAVLTRQPYTHGYWGQGTQVTVSS

SEQ ID NO: 22163 - protein, 118 aa, Artificial Sequence
  Chemically Synthesized
QVQLQESGGGLVQAGGSLRLSCAASGNISGDSYMGWYRQAPGKEREFVATINTGSNTNYADSVKGRFTISRDNAKNTVYLQMNSLKPEDTAVYYCAVIDYIYVDYAYWGQGTQVTVSS

SEQ ID NO: 22164 - protein, 110 aa, Artificial Sequence
  Chemically Synthesized
QVQLQESGGGLVQAGGSLRLSCAASGTISWKDVMGWYRQAPGKEREFVATITAGSNTYYADSVKGRFTISRDNAKNTVYLQMNSLKPEDTAVYYCAAWYWGQGTQVTVSS

SEQ ID NO: 22165 - protein, 118 aa, Artificial Sequence
  Chemically Synthesized
QVQLQESGGGLVQAGGSLRLSCAASGNIFVYRYMGWYRQAPGKERELVAAIGPGTNTNYADSVKGRFTISRDNAKNTVYLQMNSLKPEDTAVYYCAVLNASSQQLKYWGQGTQVTVSS

SEQ ID NO: 22166 - protein, 118 aa, Artificial Sequence
  Chemically Synthesized
QVQLQESGGGLVQAGGSLRLSCAASGYISDVPYMGWYRQAPGKEREFVASIAWGANTNYADSVKGRFTISRDNAKNTVYLQMNSLKPEDTAVYYCAAIAGRRRYHGYWGQGTQVTVSS

SEQ ID NO: 22167 - protein, 117 aa, Artificial Sequence
  Chemically Synthesized
QVQLQESGGGLVQAGGSLRLSCAASGSISQEDRMGWYRQAPGKERELVAGIGLGTTTNYADSVKGRFTISRDNAKNTVYLQMNSLKPEDTAVYYCAVDTGEFGFLYWGQGTQVTVSS

SEQ ID NO: 22168 - protein, 118 aa, Artificial Sequence
  Chemically Synthesized
QVQLQESGGGLVQAGGSLRLSCAASGSISDLHAMGWYRQAPGKERELVAGIAVGGTTNYADSVKGRFTISRDNAKNTVYLQMNSLKPEDTAVYYCAVVRYDRRWFGYWGQGTQVTVSS

SEQ ID NO: 22169 - protein, 122 aa, Artificial Sequence
  Chemically Synthesized
QVQLQESGGGLVQAGGSLRLSCAASGTISPLYLMGWYRQAPGKEREFVAGITNGGITNYADSVKGRFTISRDNAKNTVYLQMNSLKPEDTAVYYCAAVDATQGERDRYLAYWGQGTQVTVSS

SEQ ID NO: 22170 - protein, 120 aa, Artificial Sequence
  Chemically Synthesized
QVQLQESGGGLVQAGGSLRLSCAASGTIFDTSLMGWYRQAPGKERELVAAINYGTSTNYADSVKGRFTISRDNAKNTVYLQMNSLKPEDTAVYYCAADAGRIDLYSTIYWGQGTQVTVSS

SEQ ID NO: 22171 - protein, 118 aa, Artificial Sequence
  Chemically Synthesized
QVQLQESGGGLVQAGGSLRLSCAASGTISGVITMGWYRQAPGKEREFVASISYGASTNYADSVKGRFTISRDNAKNTVYLQMNSLKPEDTAVYYCAAVGGRSRWHYYWGQGTQVTVSS

SEQ ID NO: 22172 - protein, 118 aa, Artificial Sequence
  Chemically Synthesized
QVQLQESGGGLVQAGGSLRLSCAASGYISRPGSMGWYRQAPGKEREFVAGIGYGTSTNYADSVKGRFTISRDNAKNTVYLQMNSLKPEDTAVYYCAAVVRDYVVHGYWGQGTQVTVSS

SEQ ID NO: 22173 - protein, 121 aa, Artificial Sequence
  Chemically Synthesized
QVQLQESGGGLVQAGGSLRLSCAASGSISWSVMGWYRQAPGKEREFVAAISGGTSTYYADSVKGRFTISRDNAKNTVYLQMNSLKPEDTAVYYCAAYATVYGYAREDYSYWGQGTQVTVSS

SEQ ID NO: 22174 - protein, 118 aa, Artificial Sequence
  Chemically Synthesized
QVQLQESGGGLVQAGGSLRLSCAASGTISLVAGMGWYRQAPGKERELVAGINAGANTNYADSVKGRFTISRDNAKNTVYLQMNSLKPEDTAVYYCAADDEDTWELGYWGQGTQVTVSS

SEQ ID NO: 22175 - protein, 122 aa, Artificial Sequence
  Chemically Synthesized
QVQLQESGGGLVQAGGSLRLSCAASGTISGVGRMGWYRQAPGKEREFVAGIGGGGNTNYADSVKGRFTISRDNAKNTVYLQMNSLKPEDTAVYYCAALRYLPGYRNGYHGYWGQGTQVTVSS

SEQ ID NO: 22176 - protein, 118 aa, Artificial Sequence
  Chemically Synthesized
QVQLQESGGGLVQAGGSLRLSCAASGSISLGKGMGWYRQAPGKERELVASIDTGANTYYADSVKGRFTISRDNAKNTVYLQMNSLKPEDTAVYYCAAKWYGPSEFEYWGQGTQVTVSS

SEQ ID NO: 22177 - protein, 121 aa, Artificial Sequence
  Chemically Synthesized
QVQLQESGGGLVQAGGSLRLSCAASGNISYSSMGWYRQAPGKERELVASISYGGTTNYADSVKGRFTISRDNAKNTVYLQMNSLKPEDTAVYYCAVYVETLSARQSYFWYWGQGTQVTVSS

SEQ ID NO: 22178 - protein, 118 aa, Artificial Sequence
  Chemically Synthesized
QVQLQESGGGLVQAGGSLRLSCAASGSISSNYIMGWYRQAPGKEREFVATIDAGTSTNYADSVKGRFTISRDNAKNTVYLQMNSLKPEDTAVYYCAALVYGTRWHYYWGQGTQVTVSS

SEQ ID NO: 22179 - protein, 126 aa, Artificial Sequence
  Chemically Synthesized
QVQLQESGGGLVQAGGSLRLSCAASGSISVPYIMGWYRQAPGKERELVASIAQGGSTNYADSVKGRFTISRDNAKNTVYLQMNSLKPEDTAVYYCAAARYSYTVWRGGNDAAFGYWGQGTQVTVSS

SEQ ID NO: 22180 - protein, 121 aa, Artificial Sequence
  Chemically Synthesized
QVQLQESGGGLVQAGGSLRLSCAASGNIFTTYDMGWYRQAPGKERELVATITVGVLPYADSVKGRFTISRDNAKNTVYLQMNSLKPEDTAVYYCAVLDDSTDLVDILHEYWGQGTQVTVSS

SEQ ID NO: 22181 - protein, 122 aa, Artificial Sequence
  Chemically Synthesized
QVQLQESGGGLVQAGGSLRLSCAASGTISGPYVMGWYRQAPGKERELVAGISYGGTTYYADSVKGRFTISRDNAKNTVYLQMNSLKPEDTAVYYCAVLTGVGGWTNQAHYYWGQGTQVTVSS

SEQ ID NO: 22182 - protein, 118 aa, Artificial Sequence
  Chemically Synthesized
QVQLQESGGGLVQAGGSLRLSCAASGNISQPDYMGWYRQAPGKEREFVAGIALGTNTNYADSVKGRFTISRDNAKNTVYLQMNSLKPEDTAVYYCAVVLYNKAYLYYWGQGTQVTVSS

SEQ ID NO: 22183 - protein, 117 aa, Artificial Sequence
  Chemically Synthesized
QVQLQESGGGLVQAGGSLRLSCAASGSISSGLMGWYRQAPGKERELVASISGGTTTNYADSVKGRFTISRDNAKNTVYLQMNSLKPEDTAVYYCAVSGAYYIVLPYWGQGTQVTVSS

SEQ ID NO: 22184 - protein, 126 aa, Artificial Sequence
  Chemically Synthesized
QVQLQESGGGLVQAGGSLRLSCAASGYISWRRPMGWYRQAPGKERELVASITYGGTTNYADSVKGRFTISRDNAKNTVYLQMNSLKPEDTAVYYCAVYLEVEAKRFSQYDPSYEYWGQGTQVTVSS

SEQ ID NO: 22185 - protein, 122 aa, Artificial Sequence
  Chemically Synthesized
QVQLQESGGGLVQAGGSLRLSCAASGYIFVGQNMGWYRQAPGKERELVAGITGGASTYYADSVKGRFTISRDNAKNTVYLQMNSLKPEDTAVYYCAVGYDAGGAYPYHLYYWGQGTQVTVSS

SEQ ID NO: 22186 - protein, 122 aa, Artificial Sequence
  Chemically Synthesized
QVQLQESGGGLVQAGGSLRLSCAASGNISNYTQMGWYRQAPGKEREFVAGITKGGITNYADSVKGRFTISRDNAKNTVYLQMNSLKPEDTAVYYCAARTSYYDSYPVYHSYWGQGTQVTVSS

SEQ ID NO: 22187 - protein, 121 aa, Artificial Sequence
  Chemically Synthesized
QVQLQESGGGLVQAGGSLRLSCAASGSIFDNVFMGWYRQAPGKEREFVASIASVVVPYADSVKGRFTISRDNAKNTVYLQMNSLKPEDTAVYYCAVYDTYQYTDPVGFGYWGQGTQVTVSS

SEQ ID NO: 22188 - protein, 117 aa, Artificial Sequence
  Chemically Synthesized
QVQLQESGGGLVQAGGSLRLSCAASGSISDQYDMGWYRQAPGKERELVATMMLVLLPYADSVKGRFTISRDNAKNTVYLQMNSLKPEDTAVYYCAAYDKYERTHDYWGQGTQVTVSS

SEQ ID NO: 22189 - protein, 118 aa, Artificial Sequence
  Chemically Synthesized
QVQLQESGGGLVQAGGSLRLSCAASGYISVYDAMGWYRQAPGKEREFVAAITWGASTNYADSVKGRFTISRDNAKNTVYLQMNSLKPEDTAVYYCAAITTRGGKHGYWGQGTQVTVSS

SEQ ID NO: 22190 - protein, 117 aa, Artificial Sequence
  Chemically Synthesized
QVQLQESGGGLVQAGGSLRLSCAASGYIFGVVDMGWYRQAPGKEREFVASISDGTNTNYADSVKGRFTISRDNAKNTVYLQMNSLKPEDTAVYYCAVHYRGSLTMYWGQGTQVTVSS

SEQ ID NO: 22191 - protein, 109 aa, Artificial Sequence
  Chemically Synthesized
QVQLQESGGGLVQAGGSLRLSCAASGNISGFRNMGWYRQAPGKERELVATIGQIPYADSVKGRFTISRDNAKNTVYLQMNSLKPEDTAVYYCATTFFYWGQGTQVTVSS

SEQ ID NO: 22192 - protein, 116 aa, Artificial Sequence
  Chemically Synthesized
QVQLQESGGGLVQAGGSLRLSCAASGSISFDTAMGWYRQAPGKEREFVAGIDHGSIPYADSVKGRFTISRDNAKNTVYLQMNSLKPEDTAVYYCAVDDHWSTLIYWGQGTQVTVSS

SEQ ID NO: 22193 - protein, 122 aa, Artificial Sequence
  Chemically Synthesized
QVQLQESGGGLVQAGGSLRLSCAASGYISLPWYMGWYRQAPGKEREFVASIDYGGITNYADSVKGRFTISRDNAKNTVYLQMNSLKPEDTAVYYCAAVDARSADGNRFHGYWGQGTQVTVSS

SEQ ID NO: 22194 - protein, 118 aa, Artificial Sequence
  Chemically Synthesized
QVQLQESGGGLVQAGGSLRLSCAASGNISPTYAMGWYRQAPGKERELVATIGRGSTTYYADSVKGRFTISRDNAKNTVYLQMNSLKPEDTAVYYCAVFYNRDTAHPYWGQGTQVTVSS

SEQ ID NO: 22195 - protein, 122 aa, Artificial Sequence
  Chemically Synthesized
QVQLQESGGGLVQAGGSLRLSCAASGTIFIWRNMGWYRQAPGKEREFVAAIGRGATTYYADSVKGRFTISRDNAKNTVYLQMNSLKPEDTAVYYCAVQAWFDLYQWINYTYWGQGTQVTVSS

SEQ ID NO: 22196 - protein, 118 aa, Artificial Sequence
  Chemically Synthesized
QVQLQESGGGLVQAGGSLRLSCAASGNISSLDIMGWYRQAPGKEREFVASISNGTTTNYADSVKGRFTISRDNAKNTVYLQMNSLKPEDTAVYYCAAVNYAGGLHYYWGQGTQVTVSS

SEQ ID NO: 22197 - protein, 118 aa, Artificial Sequence
  Chemically Synthesized
QVQLQESGGGLVQAGGSLRLSCAASGNIFGIGVMGWYRQAPGKERELVAAIDPGGITNYADSVKGRFTISRDNAKNTVYLQMNSLKPEDTAVYYCAALGGYAIPHLYWGQGTQVTVSS

SEQ ID NO: 22198 - protein, 126 aa, Artificial Sequence
  Chemically Synthesized
QVQLQESGGGLVQAGGSLRLSCAASGTISELLGMGWYRQAPGKEREFVAAIATGGTTNYADSVKGRFTISRDNAKNTVYLQMNSLKPEDTAVYYCAVATYGHSYRYGGPIGYHGYWGQGTQVTVSS

SEQ ID NO: 22199 - protein, 119 aa, Artificial Sequence
  Chemically Synthesized
QVQLQESGGGLVQAGGSLRLSCAASGTIFNRVYMGWYRQAPGKERELVASIGRGTITNYADSVKGRFTISRDNAKNTVYLQMNSLKPEDTAVYYCAAALYDGDEYHGYWGQGTQVTVSS

SEQ ID NO: 22200 - protein, 121 aa, Artificial Sequence
  Chemically Synthesized
QVQLQESGGGLVQAGGSLRLSCAASGSISYGSMGWYRQAPGKEREFVAGISTGSSTNYADSVKGRFTISRDNAKNTVYLQMNSLKPEDTAVYYCAALQRLDDSDGRWHSYWGQGTQVTVSS

SEQ ID NO: 22201 - protein, 126 aa, Artificial Sequence
  Chemically Synthesized
QVQLQESGGGLVQAGGSLRLSCAASGTISVPYLMGWYRQAPGKERELVAAISYGSNTYYADSVKGRFTISRDNAKNTVYLQMNSLKPEDTAVYYCAAPYVNGGSRRYAQRGALAYWGQGTQVTVSS

SEQ ID NO: 22202 - protein, 118 aa, Artificial Sequence
  Chemically Synthesized
QVQLQESGGGLVQAGGSLRLSCAASGTIFGDTYMGWYRQAPGKEREFVASIADGATTNYADSVKGRFTISRDNAKNTVYLQMNSLKPEDTAVYYCAVLFYYTRYYHYWGQGTQVTVSS

SEQ ID NO: 22203 - protein, 122 aa, Artificial Sequence
  Chemically Synthesized
QVQLQESGGGLVQAGGSLRLSCAASGTISTWAGMGWYRQAPGKEREFVASINDGTNTYYADSVKGRFTISRDNAKNTVYLQMNSLKPEDTAVYYCAAVGYIGSDHRRRLYYWGQGTQVTVSS

SEQ ID NO: 22204 - protein, 118 aa, Artificial Sequence
  Chemically Synthesized
QVQLQESGGGLVQAGGSLRLSCAASGSISSYLVMGWYRQAPGKERELVASIANGAITYYADSVKGRFTISRDNAKNTVYLQMNSLKPEDTAVYYCAVVGPKYTPLYYWGQGTQVTVSS

SEQ ID NO: 22205 - protein, 114 aa, Artificial Sequence
  Chemically Synthesized
QVQLQESGGGLVQAGGSLRLSCAASGNIFSLPGMGWYRQAPGKERELVAAIAGGGITNYADSVKGRFTISRDNAKNTVYLQMNSLKPEDTAVYYCAALRDAWYWGQGTQVTVSS

SEQ ID NO: 22206 - protein, 118 aa, Artificial Sequence
  Chemically Synthesized
QVQLQESGGGLVQAGGSLRLSCAASGTISYWQAMGWYRQAPGKEREFVASISTGSSTNYADSVKGRFTISRDNAKNTVYLQMNSLKPEDTAVYYCAAYRLPRYYHYYWGQGTQVTVSS

SEQ ID NO: 22207 - protein, 122 aa, Artificial Sequence
  Chemically Synthesized
QVQLQESGGGLVQAGGSLRLSCAASGTIFVLRFMGWYRQAPGKEREFVASIATGGTTNYADSVKGRFTISRDNAKNTVYLQMNSLKPEDTAVYYCAALSRDQGAYVRWHGYWGQGTQVTVSS

SEQ ID NO: 22208 - protein, 118 aa, Artificial Sequence
  Chemically Synthesized
QVQLQESGGGLVQAGGSLRLSCAASGNISSTNNMGWYRQAPGKERELVASISSGGITYYADSVKGRFTISRDNAKNTVYLQMNSLKPEDTAVYYCAVIWYGSDWHYYWGQGTQVTVSS

SEQ ID NO: 22209 - protein, 116 aa, Artificial Sequence
  Chemically Synthesized
QVQLQESGGGLVQAGGSLRLSCAASGTIFWWTMGWYRQAPGKEREFVAAIAVGTSTNYADSVKGRFTISRDNAKNTVYLQMNSLKPEDTAVYYCAAYARRYYLEYWGQGTQVTVSS

SEQ ID NO: 22210 - protein, 117 aa, Artificial Sequence
  Chemically Synthesized
QVQLQESGGGLVQAGGSLRLSCAASGSISDLRYMGWYRQAPGKEREFVAGLVTVVLPYADSVKGRFTISRDNAKNTVYLQMNSLKPEDTAVYYCAASWSWYVGFPYWGQGTQVTVSS

SEQ ID NO: 22211 - protein, 117 aa, Artificial Sequence
  Chemically Synthesized
QVQLQESGGGLVQAGGSLRLSCAASGTISRGQVMGWYRQAPGKEREFVASINDGSTYYADSVKGRFTISRDNAKNTVYLQMNSLKPEDTAVYYCAVVVSNVPIFDYWGQGTQVTVSS

SEQ ID NO: 22212 - protein, 126 aa, Artificial Sequence
  Chemically Synthesized
QVQLQESGGGLVQAGGSLRLSCAASGNISLISSMGWYRQAPGKEREFVATIGQGTTTYYADSVKGRFTISRDNAKNTVYLQMNSLKPEDTAVYYCAVDHKWYDTGGVPYPADHSYWGQGTQVTVSS

SEQ ID NO: 22213 - protein, 113 aa, Artificial Sequence
  Chemically Synthesized
QVQLQESGGGLVQAGGSLRLSCAASGYISRGQNMGWYRQAPGKEREFVASIDSGTSTYYADSVKGRFTISRDNAKNTVYLQMNSLKPEDTAVYYCAAFWYDYWGQGTQVTVSS

SEQ ID NO: 22214 - protein, 118 aa, Artificial Sequence
  Chemically Synthesized
QVQLQESGGGLVQAGGSLRLSCAASGNISHGGSMGWYRQAPGKEREFVAGIDWGTSTYYADSVKGRFTISRDNAKNTVYLQMNSLKPEDTAVYYCAVGARDGPHLYYWGQGTQVTVSS

SEQ ID NO: 22215 - protein, 118 aa, Artificial Sequence
  Chemically Synthesized
QVQLQESGGGLVQAGGSLRLSCAASGNISDDTSMGWYRQAPGKEREFVAGIGWGGNTYYADSVKGRFTISRDNAKNTVYLQMNSLKPEDTAVYYCAVDDVVNGNLYYWGQGTQVTVSS

SEQ ID NO: 22216 - protein, 118 aa, Artificial Sequence
  Chemically Synthesized
QVQLQESGGGLVQAGGSLRLSCAASGTISYDAYMGWYRQAPGKERELVATIDGGANTNYADSVKGRFTISRDNAKNTVYLQMNSLKPEDTAVYYCAVWLTQDDWHRYWGQGTQVTVSS

SEQ ID NO: 22217 - protein, 118 aa, Artificial Sequence
  Chemically Synthesized
QVQLQESGGGLVQAGGSLRLSCAASGYISQAVIMGWYRQAPGKEREFVAAISAGGTTNYADSVKGRFTISRDNAKNTVYLQMNSLKPEDTAVYYCAVIISNSAYHGYWGQGTQVTVSS

SEQ ID NO: 22218 - protein, 122 aa, Artificial Sequence
  Chemically Synthesized
QVQLQESGGGLVQAGGSLRLSCAASGTIFRNARMGWYRQAPGKEREFVAAITTGSNTYYADSVKGRFTISRDNAKNTVYLQMNSLKPEDTAVYYCAAYSTIWASSAVPYDYWGQGTQVTVSS

SEQ ID NO: 22219 - protein, 122 aa, Artificial Sequence
  Chemically Synthesized
QVQLQESGGGLVQAGGSLRLSCAASGNIFRYSVMGWYRQAPGKERELVATIADGANTNYADSVKGRFTISRDNAKNTVYLQMNSLKPEDTAVYYCAVYYYSDGDIGDILIYWGQGTQVTVSS

SEQ ID NO: 22220 - protein, 118 aa, Artificial Sequence
  Chemically Synthesized
QVQLQESGGGLVQAGGSLRLSCAASGYISGRAPMGWYRQAPGKERELVAAITTGSTTYYADSVKGRFTISRDNAKNTVYLQMNSLKPEDTAVYYCAVVDVYYPPYVYWGQGTQVTVSS

SEQ ID NO: 22221 - protein, 122 aa, Artificial Sequence
  Chemically Synthesized
QVQLQESGGGLVQAGGSLRLSCAASGNISAPADMGWYRQAPGKERELVASIAYGTSTYYADSVKGRFTISRDNAKNTVYLQMNSLKPEDTAVYYCAAGWQYVYYTQDWLTYWGQGTQVTVSS

SEQ ID NO: 22222 - protein, 118 aa, Artificial Sequence
  Chemically Synthesized
QVQLQESGGGLVQAGGSLRLSCAASGYISTWQDMGWYRQAPGKERELVATIDQGTITYYADSVKGRFTISRDNAKNTVYLQMNSLKPEDTAVYYCAADRDADNTHYYWGQGTQVTVSS

SEQ ID NO: 22223 - protein, 122 aa, Artificial Sequence
  Chemically Synthesized
QVQLQESGGGLVQAGGSLRLSCAASGYISSKGSMGWYRQAPGKERELVATIALGAITYYADSVKGRFTISRDNAKNTVYLQMNSLKPEDTAVYYCAATTYSYPPYSSAHDYWGQGTQVTVSS

SEQ ID NO: 22224 - protein, 126 aa, Artificial Sequence
  Chemically Synthesized
QVQLQESGGGLVQAGGSLRLSCAASGYIFWSQAMGWYRQAPGKERELVATITEGGSTNYADSVKGRFTISRDNAKNTVYLQMNSLKPEDTAVYYCAVYLHDIDTAYDDIRYLHGYWGQGTQVTVSS

SEQ ID NO: 22225 - protein, 118 aa, Artificial Sequence
  Chemically Synthesized
QVQLQESGGGLVQAGGSLRLSCAASGSISYRQDMGWYRQAPGKEREFVATISSGGSTNYADSVKGRFTISRDNAKNTVYLQMNSLKPEDTAVYYCAAGQQYYLGHRYWGQGTQVTVSS

SEQ ID NO: 22226 - protein, 116 aa, Artificial Sequence
  Chemically Synthesized
QVQLQESGGGLVQAGGSLRLSCAASGNIFQNPYMGWYRQAPGKERELVASIGWYYQYADSVKGRFTISRDNAKNTVYLQMNSLKPEDTAVYYCAVTSSTNTLFAYWGQGTQVTVSS

SEQ ID NO: 22227 - protein, 118 aa, Artificial Sequence
  Chemically Synthesized
QVQLQESGGGLVQAGGSLRLSCAASGNISRTSSMGWYRQAPGKEREFVATIAYGATTNYADSVKGRFTISRDNAKNTVYLQMNSLKPEDTAVYYCAVHNGGYDDHDYWGQGTQVTVSS

SEQ ID NO: 22228 - protein, 118 aa, Artificial Sequence
  Chemically Synthesized
QVQLQESGGGLVQAGGSLRLSCAASGNISYSVDMGWYRQAPGKEREFVATIANGGNTNYADSVKGRFTISRDNAKNTVYLQMNSLKPEDTAVYYCAAGGGPYPDFLYWGQGTQVTVSS

SEQ ID NO: 22229 - protein, 122 aa, Artificial Sequence
  Chemically Synthesized
QVQLQESGGGLVQAGGSLRLSCAASGNIFLHPFMGWYRQAPGKERELVAGINVGGNTYYADSVKGRFTISRDNAKNTVYLQMNSLKPEDTAVYYCAAWGRDTDDRLEVHAYWGQGTQVTVSS

SEQ ID NO: 22230 - protein, 116 aa, Artificial Sequence
  Chemically Synthesized
QVQLQESGGGLVQAGGSLRLSCAASGYIFFITTMGWYRQAPGKERELVAAIAVGGTTYYADSVKGRFTISRDNAKNTVYLQMNSLKPEDTAVYYCAARNLRIYQYWGQGTQVTVSS

SEQ ID NO: 22231 - protein, 122 aa, Artificial Sequence
  Chemically Synthesized
QVQLQESGGGLVQAGGSLRLSCAASGTISDDARMGWYRQAPGKERELVAAINTGATTNYADSVKGRFTISRDNAKNTVYLQMNSLKPEDTAVYYCAVGDWYGGWQGDVFPYWGQGTQVTVSS

SEQ ID NO: 22232 - protein, 117 aa, Artificial Sequence
  Chemically Synthesized
QVQLQESGGGLVQAGGSLRLSCAASGSISSIRTMGWYRQAPGKEREFVAGINLGGITNYADSVKGRFTISRDNAKNTVYLQMNSLKPEDTAVYYCAAVLLLWLSLYWGQGTQVTVSS

SEQ ID NO: 22233 - protein, 118 aa, Artificial Sequence
  Chemically Synthesized
QVQLQESGGGLVQAGGSLRLSCAASGNIFRRTSMGWYRQAPGKERELVATIGDGSNTNYADSVKGRFTISRDNAKNTVYLQMNSLKPEDTAVYYCAVQDSLDPGYVYWGQGTQVTVSS

SEQ ID NO: 22234 - protein, 117 aa, Artificial Sequence
  Chemically Synthesized
QVQLQESGGGLVQAGGSLRLSCAASGNISDQLQMGWYRQAPGKEREFVAAINSVVIPYADSVKGRFTISRDNAKNTVYLQMNSLKPEDTAVYYCAADGGDPDFLSYWGQGTQVTVSS

SEQ ID NO: 22235 - protein, 118 aa, Artificial Sequence
  Chemically Synthesized
QVQLQESGGGLVQAGGSLRLSCAASGNISAHLYMGWYRQAPGKERELVASIGLGASTYYADSVKGRFTISRDNAKNTVYLQMNSLKPEDTAVYYCAVPADYYYRHAYWGQGTQVTVSS

SEQ ID NO: 22236 - protein, 118 aa, Artificial Sequence
  Chemically Synthesized
QVQLQESGGGLVQAGGSLRLSCAASGSISLYYYMGWYRQAPGKERELVASIDQGTSTNYADSVKGRFTISRDNAKNTVYLQMNSLKPEDTAVYYCAAGRNRGYGLTYWGQGTQVTVSS

SEQ ID NO: 22237 - protein, 122 aa, Artificial Sequence
  Chemically Synthesized
QVQLQESGGGLVQAGGSLRLSCAASGNISLTTVMGWYRQAPGKEREFVASIDFGGNTNYADSVKGRFTISRDNAKNTVYLQMNSLKPEDTAVYYCAATAVGYSWTDGYHGYWGQGTQVTVSS

SEQ ID NO: 22238 - protein, 118 aa, Artificial Sequence
  Chemically Synthesized
QVQLQESGGGLVQAGGSLRLSCAASGYISWYIRMGWYRQAPGKERELVAAITRGATTNYADSVKGRFTISRDNAKNTVYLQMNSLKPEDTAVYYCAVALYEDYILIYWGQGTQVTVSS

SEQ ID NO: 22239 - protein, 118 aa, Artificial Sequence
  Chemically Synthesized
QVQLQESGGGLVQAGGSLRLSCAASGTISHILLMGWYRQAPGKERELVAGINGGGTTNYADSVKGRFTISRDNAKNTVYLQMNSLKPEDTAVYYCAVGYAYHDAHDYWGQGTQVTVSS

SEQ ID NO: 22240 - protein, 121 aa, Artificial Sequence
  Chemically Synthesized
QVQLQESGGGLVQAGGSLRLSCAASGSISSSSMGWYRQAPGKERELVAGISYGTITYYADSVKGRFTISRDNAKNTVYLQMNSLKPEDTAVYYCAVYGSPGHSTLSALYYWGQGTQVTVSS

SEQ ID NO: 22241 - protein, 126 aa, Artificial Sequence
  Chemically Synthesized
QVQLQESGGGLVQAGGSLRLSCAASGYISNLDPMGWYRQAPGKERELVAGINYGGITYYADSVKGRFTISRDNAKNTVYLQMNSLKPEDTAVYYCAAADWPDADYLPYDTQDHDYWGQGTQVTVSS

SEQ ID NO: 22242 - protein, 116 aa, Artificial Sequence
  Chemically Synthesized
QVQLQESGGGLVQAGGSLRLSCAASGSISSSTMGWYRQAPGKERELVATIDRGASTNYADSVKGRFTISRDNAKNTVYLQMNSLKPEDTAVYYCAANYGTSTLFYWGQGTQVTVSS

SEQ ID NO: 22243 - protein, 123 aa, Artificial Sequence
  Chemically Synthesized
QVQLQESGGGLVQAGGSLRLSCAASGSISPYSTMGWYRQAPGKERELVLMLVVLPYADSVKGRFTISRDNAKNTVYLQMNSLKPEDTAVYYCAAQSDGVNLLDLVGYWGHVYWGQGTQVTVSS

SEQ ID NO: 22244 - protein, 122 aa, Artificial Sequence
  Chemically Synthesized
QVQLQESGGGLVQAGGSLRLSCAASGNIFSQSVMGWYRQAPGKEREFVATIDAGATTYYADSVKGRFTISRDNAKNTVYLQMNSLKPEDTAVYYCAVVIQGDFVREAEHSYWGQGTQVTVSS

SEQ ID NO: 22245 - protein, 119 aa, Artificial Sequence
  Chemically Synthesized
QVQLQESGGGLVQAGGSLRLSCAASGDSALMGWYRQAPGKEREFVAAIAAGGITYYADSVKGRFTISRDNAKNTVYLQMNSLKPEDTAVYYCAVYYYDEADRRSYHGYWGQGTQVTVSS

SEQ ID NO: 22246 - protein, 114 aa, Artificial Sequence
  Chemically Synthesized
QVQLQESGGGLVQAGGSLRLSCAASGYISTSWQMGWYRQAPGKERELVATITAGSTTYYADSVKGRFTISRDNAKNTVYLQMNSLKPEDTAVYYCAADQSVIYWGQGTQVTVSS

SEQ ID NO: 22247 - protein, 126 aa, Artificial Sequence
  Chemically Synthesized
QVQLQESGGGLVQAGGSLRLSCAASGSIFIRFAMGWYRQAPGKERELIASISTGASTNYADSVKGRFTISRDNAKNTVYLQMNSLKPEDTAVYYCAAYGREYVRYEDYADQWHNYWGQGTQVTVSS

SEQ ID NO: 22248 - protein, 118 aa, Artificial Sequence
  Chemically Synthesized
QVQLQESGGGLVQAGGSLRLSCAASGTISRQRDMGWYRQAPGKERELVASISTGANTYYADSVKGRFTISRDNAKNTVYLQMNSLKPEDTAVYYCAVYYDPDYLLTYWGQGTQVTVSS

SEQ ID NO: 22249 - protein, 118 aa, Artificial Sequence
  Chemically Synthesized
QVQLQESGGGLVQAGGSLRLSCAASGSIFEAVGMGWYRQAPGKEREFVAAIDAGGNTNYADSVKGRFTISRDNAKNTVYLQMNSLKPEDTAVYYCAADIREALRHVYWGQGTQVTVSS

SEQ ID NO: 22250 - protein, 118 aa, Artificial Sequence
  Chemically Synthesized
QVQLQESGGGLVQAGGSLRLSCAASGYISLTDAMGWYRQAPGKERELVAAINIGASTNYADSVKGRFTISRDNAKNTVYLQMNSLKPEDTAVYYCAAADDVSRYFHYWGQGTQVTVSS

SEQ ID NO: 22251 - protein, 122 aa, Artificial Sequence
  Chemically Synthesized
QVQLQESGGGLVQAGGSLRLSCAASGTISVVYSMGWYRQAPGKEREFVAGISVGAITNYADSVKGRFTISRDNAKNTVYLQMNSLKPEDTAVYYCAARDGPWRARTYGYVYWGQGTQVTVSS

SEQ ID NO: 22252 - protein, 117 aa, Artificial Sequence
  Chemically Synthesized
QVQLQESGGGLVQAGGSLRLSCAASGNIFVEPLMGWYRQAPGKERELVAGIGYGGNTNYADSVKGRFTISRDNAKNTVYLQMNSLKPEDTAVYYCAVSQGRTVTLYWGQGTQVTVSS

SEQ ID NO: 22253 - protein, 118 aa, Artificial Sequence
  Chemically Synthesized
QVQLQESGGGLVQAGGSLRLSCAASGSIFGASAMGWYRQAPGKEREFVAAIAAGGTTYYADSVKGRFTISRDNAKNTVYLQMNSLKPEDTAVYYCAVNKGGSGWHVYWGQGTQVTVSS

SEQ ID NO: 22254 - protein, 121 aa, Artificial Sequence
  Chemically Synthesized
QVQLQESGGGLVQAGGSLRLSCAASGNIFDYRYMGWYRQAPGKEREFVAGISTGANTNYADSVKGRFTISRDNAKNTVYLQMNSLKPEDTAVYYCAAYDGSLALYRPYGYWGQGTQVTVSS

SEQ ID NO: 22255 - protein, 116 aa, Artificial Sequence
  Chemically Synthesized
QVQLQESGGGLVQAGGSLRLSCAASGYISASNKMGWYRQAPGKERELVAGIDHGASTYYADSVKGRFTISRDNAKNTVYLQMNSLKPEDTAVYYCAAGSPQYLTYWGQGTQVTVSS

SEQ ID NO: 22256 - protein, 121 aa, Artificial Sequence
  Chemically Synthesized
QVQLQESGGGLVQAGGSLRLSCAASGLFFCCLMGWYRQAPGKERELVATITTGGNTNYADSVKGRFTISRDNAKNTVYLQMNSLKPEDTAVYYCAVYRLANIAYWAEYYYWGQGTQVTVSS

SEQ ID NO: 22257 - protein, 122 aa, Artificial Sequence
  Chemically Synthesized
QVQLQESGGGLVQAGGSLRLSCAASGSISIGYDMGWYRQAPGKERELVAAITTGANTNYADSVKGRFTISRDNAKNTVYLQMNSLKPEDTAVYYCAVYWYDQLTPYEVHGYWGQGTQVTVSS

SEQ ID NO: 22258 - protein, 122 aa, Artificial Sequence
  Chemically Synthesized
QVQLQESGGGLVQAGGSLRLSCAASGYIFPYNEMGWYRQAPGKEREFVATITGGSTTNYADSVKGRFTISRDNAKNTVYLQMNSLKPEDTAVYYCAAGQDGEIYRNQYHTYWGQGTQVTVSS

SEQ ID NO: 22259 - protein, 118 aa, Artificial Sequence
  Chemically Synthesized
QVQLQESGGGLVQAGGSLRLSCAASGYIFYFIEMGWYRQAPGKERELVAAINAGTITYYADSVKGRFTISRDNAKNTVYLQMNSLKPEDTAVYYCAARARAWIGHRYWGQGTQVTVSS

SEQ ID NO: 22260 - protein, 121 aa, Artificial Sequence
  Chemically Synthesized
QVQLQESGGGLVQAGGSLRLSCAASGNIFDDVAMGWYRQAPGKERELVATINEVLLPYADSVKGRFTISRDNAKNTVYLQMNSLKPEDTAVYYCAVGATYRYVYYREHYYWGQGTQVTVSS

SEQ ID NO: 22261 - protein, 122 aa, Artificial Sequence
  Chemically Synthesized
QVQLQESGGGLVQAGGSLRLSCAASGSISSIGSMGWYRQAPGKERELVAGITGGTTTYYADSVKGRFTISRDNAKNTVYLQMNSLKPEDTAVYYCAVYYRRTPDWVNVFWYWGQGTQVTVSS

SEQ ID NO: 22262 - protein, 126 aa, Artificial Sequence
  Chemically Synthesized
QVQLQESGGGLVQAGGSLRLSCAASGYISYGGYMGWYRQAPGKERELVASIAYGATTYYADSVKGRFTISRDNAKNTVYLQMNSLKPEDTAVYYCAAVLTVEHGYQDADYTHLFYWGQGTQVTVSS

SEQ ID NO: 22263 - protein, 122 aa, Artificial Sequence
  Chemically Synthesized
QVQLQESGGGLVQAGGSLRLSCAASGYIFADVWMGWYRQAPGKERELVAAIDSGATTNYADSVKGRFTISRDNAKNTVYLQMNSLKPEDTAVYYCAVSDDQANRAGYTHGYWGQGTQVTVSS

SEQ ID NO: 22264 - protein, 121 aa, Artificial Sequence
  Chemically Synthesized
QVQLQESGGGLVQAGGSLRLSCAASGYISYEHFMGWYRQAPGKEREFVASIDRGTNTYYADSVKGRFTISRDNAKNTVYLQMNSLKPEDTAVYYCAAGWSLTTTVSLVMYWGQGTQVTVSS

SEQ ID NO: 22265 - protein, 121 aa, Artificial Sequence
  Chemically Synthesized
QVQLQESGGGLVQAGGSLRLSCAASGSIFLDHIMGWYRQAPGKERELVATIDPGGNTYYADSVKGRFTISRDNAKNTVYLQMNSLKPEDTAVYYCAVDYLKSLMTVLTLYWGQGTQVTVSS

SEQ ID NO: 22266 - protein, 117 aa, Artificial Sequence
  Chemically Synthesized
QVQLQESGGGLVQAGGSLRLSCAASGSIFLDIVMGWYRQAPGKEREFVALLVGVVLPYADSVKGRFTISRDNAKNTVYLQMNSLKPEDTAVYYCAALDIVSLILGYWGQGTQVTVSS

SEQ ID NO: 22267 - protein, 118 aa, Artificial Sequence
  Chemically Synthesized
QVQLQESGGGLVQAGGSLRLSCAASGTIFGDIGMGWYRQAPGKEREFVASISAGATYLYADSVKGRFTISRDNAKNTVYLQMNSLKPEDTAVYYCAVKRGGGAYFVYWGQGTQVTVSS

SEQ ID NO: 22268 - protein, 121 aa, Artificial Sequence
  Chemically Synthesized
QVQLQESGGGLVQAGGSLRLSCAASGSIFRGVHMGWYRQAPGKERELVATIGTGSTTYADSVKGRFTISRDNAKNTVYLQMNSLKPEDTAVYYCAAYVYTEPSYYSAYYYWGQGTQVTVSS

SEQ ID NO: 22269 - protein, 118 aa, Artificial Sequence
  Chemically Synthesized
QVQLQESGGGLVQAGGSLRLSCAASGYIFPYALMGWYRQAPGKERELVASISYGTITYYADSVKGRFTISRDNAKNTVYLQMNSLKPEDTAVYYCAVWGTYRYVLAYWGQGTQVTVSS

SEQ ID NO: 22270 - protein, 124 aa, Artificial Sequence
  Chemically Synthesized
QVQLQESGGGLVQAGGSLRLSCAASGSIFQYDTMGWYRQAPGKEREFVATIAFGTITYYADSVKGRFTISRDNAKNTVYLQMNSLKPEDTAVYYCAANAPDYADRGINTVHDYWGQGTQVTVSS

SEQ ID NO: 22271 - protein, 118 aa, Artificial Sequence
  Chemically Synthesized
QVQLQESGGGLVQAGGSLRLSCAASGYIFGMGWYRQAPGKEREFVAGIGGGGTTNYADSVKGRFTISRDNAKNTVYLQMNSLKPEDTAVYYCAALRGYDTDDDYYDYWGQGTQVTVSS

SEQ ID NO: 22272 - protein, 118 aa, Artificial Sequence
  Chemically Synthesized
QVQLQESGGGLVQAGGSLRLSCAASGSIFIGYTMGWYRQAPGKERELVAAINAGSSTNYADSVKGRFTISRDNAKNTVYLQMNSLKPEDTAVYYCAVPIYYDERFDYWGQGTQVTVSS

SEQ ID NO: 22273 - protein, 117 aa, Artificial Sequence
  Chemically Synthesized
QVQLQESGGGLVQAGGSLRLSCAASGSIFYGYMGWYRQAPGKERELVATIALGTTTNYADSVKGRFTISRDNAKNTVYLQMNSLKPEDTAVYYCAAVYDDGEVFAYWGQGTQVTVSS

SEQ ID NO: 22274 - protein, 117 aa, Artificial Sequence
  Chemically Synthesized
QVQLQESGGGLVQAGGSLRLSCAASGIFLVTRMGWYRQAPGKEREFVATIAWGAITNYADSVKGRFTISRDNAKNTVYLQMNSLKPEDTAVYYCAAYVGLEDDLDYWGQGTQVTVSS

SEQ ID NO: 22275 - protein, 118 aa, Artificial Sequence
  Chemically Synthesized
QVQLQESGGGLVQAGGSLRLSCAASGYIFRDELMGWYRQAPGKERELVAGITSGATTNYADSVKGRFTISRDNAKNTVYLQMNSLKPEDTAVYYCAAPGYIFQDFDYWGQGTQVTVSS

SEQ ID NO: 22276 - protein, 122 aa, Artificial Sequence
  Chemically Synthesized
QVQLQESGGGLVQAGGSLRLSCAASGYIFYRGTMGWYRQAPGKERELVASITAGTNTYYADSVKGRFTISRDNAKNTVYLQMNSLKPEDTAVYYCAADRRTYYRYYYWLTYWGQGTQVTVSS

SEQ ID NO: 22277 - protein, 122 aa, Artificial Sequence
  Chemically Synthesized
QVQLQESGGGLVQAGGSLRLSCAASGYIFRVIFMGWYRQAPGKEREFVASISKGGNTNYADSVKGRFTISRDNAKNTVYLQMNSLKPEDTAVYYCAVEDIPRQEKTVILGYWGQGTQVTVSS

SEQ ID NO: 22278 - protein, 115 aa, Artificial Sequence
  Chemically Synthesized
QVQLQESGGGLVQAGGSLRLSCAASGTIFAQRWMGWYRQAPGKEREFVASIDGGSNTYYADSVKGRFTISRDNAKNTVYLQMNSLKPEDTAVYYCAVGAVFYIYWGQGTQVTVSS

SEQ ID NO: 22279 - protein, 117 aa, Artificial Sequence
  Chemically Synthesized
QVQLQESGGGLVQAGGSLRLSCAASGSIFGLRPMGWYRQAPGKERELVASISYGTLPYADSVKGRFTISRDNAKNTVYLQMNSLKPEDTAVYYCAATPGPDAEHPYWGQGTQVTVSS

SEQ ID NO: 22280 - protein, 121 aa, Artificial Sequence
  Chemically Synthesized
QVQLQESGGGLVQAGGSLRLSCAASGYIFYDNDMGWYRQAPGKERELVASITDGGSTYYADSVKGRFTISRDNAKNTVYLQMNSLKPEDTAVYYCAVYSYYYDRPDAPLYWGQGTQVTVSS

SEQ ID NO: 22281 - protein, 121 aa, Artificial Sequence
  Chemically Synthesized
QVQLQESGGGLVQAGGSLRLSCAASGYIFGSTYMGWYRQAPGKEREFVATINGGSSTNYADSVKGRFTISRDNAKNTVYLQMNSLKPEDTAVYYCAVNYSYQWTSHFTHYWGQGTQVTVSS

SEQ ID NO: 22282 - protein, 122 aa, Artificial Sequence
  Chemically Synthesized
QVQLQESGGGLVQAGGSLRLSCAASGNIFYATAMGWYRQAPGKEREFVASIAYGANTNYADSVKGRFTISRDNAKNTVYLQMNSLKPEDTAVYYCAVSSGWDIRDPTAHRYWGQGTQVTVSS

SEQ ID NO: 22283 - protein, 122 aa, Artificial Sequence
  Chemically Synthesized
QVQLQESGGGLVQAGGSLRLSCAASGSISNGPDMGWYRQAPGKERELVAGIAEGTTTNYADSVKGRFTISRDNAKNTVYLQMNSLKPEDTAVYYCAVDRPTDRWRVSQHGYWGQGTQVTVSS

SEQ ID NO: 22284 - protein, 122 aa, Artificial Sequence
  Chemically Synthesized
QVQLQESGGGLVQAGGSLRLSCAASGSISYSQDMGWYRQAPGKERELVASISVGASTYYADSVKGRFTISRDNAKNTVYLQMNSLKPEDTAVYYCAARVRGPWYWYLQHVYWGQGTQVTVSS

SEQ ID NO: 22285 - protein, 118 aa, Artificial Sequence
  Chemically Synthesized
QVQLQESGGGLVQAGGSLRLSCAASGYISDHLDMGWYRQAPGKERELVATITYGSITYYADSVKGRFTISRDNAKNTVYLQMNSLKPEDTAVYYCAAKLGNRWTHEYWGQGTQVTVSS

SEQ ID NO: 22286 - protein, 118 aa, Artificial Sequence
  Chemically Synthesized
QVQLQESGGGLVQAGGSLRLSCAASGSIFSTDYMGWYRQAPGKEREFVAAIAVGASTYYADSVKGRFTISRDNAKNTVYLQMNSLKPEDTAVYYCAVVGHDFTAYAYWGQGTQVTVSS

SEQ ID NO: 22287 - protein, 118 aa, Artificial Sequence
  Chemically Synthesized
QVQLQESGGGLVQAGGSLRLSCAASGTIFGDWSMGWYRQAPGKERELVASIGLGTSTNYADSVKGRFTISRDNAKNTVYLQMNSLKPEDTAVYYCAVKQDVDQNLYYWGQGTQVTVSS

SEQ ID NO: 22288 - protein, 117 aa, Artificial Sequence
  Chemically Synthesized
QVQLQESGGGLVQAGGSLRLSCAASGYISRVTYMGWYRQAPGKERELVAAINKGASTYADSVKGRFTISRDNAKNTVYLQMNSLKPEDTAVYYCAAVGRRRDSLSYWGQGTQVTVSS

SEQ ID NO: 22289 - protein, 123 aa, Artificial Sequence
  Chemically Synthesized
QVQLQESGGGLVQAGGSLRLSCAASGYISWTGYMGWYRQAPGKERELVAAISYGASTNYADSVKGRFTISRDNAKNTVYLQMNSLKPEDTAVYYCAAGKDYGVYLLPETHAYWGQGTQVTVSS

SEQ ID NO: 22290 - protein, 117 aa, Artificial Sequence
  Chemically Synthesized
QVQLQESGGGLVQAGGSLRLSCAASGTIFTGRTMGWYRQAPGKERELVAAIAYGSSTYADSVKGRFTISRDNAKNTVYLQMNSLKPEDTAVYYCAVRDDVLSQYQYWGQGTQVTVSS

SEQ ID NO: 22291 - protein, 121 aa, Artificial Sequence
  Chemically Synthesized
QVQLQESGGGLVQAGGSLRLSCAASGSISDDYYMGWYRQAPGKEREFVAGISDGTSTYYADSVKGRFTISRDNAKNTVYLQMNSLKPEDTAVYYCAAYYDSRGINYILHYWGQGTQVTVSS

SEQ ID NO: 22292 - protein, 125 aa, Artificial Sequence
  Chemically Synthesized
QVQLQESGGGLVQAGGSLRLSCAASGYISRFVMGWYRQAPGKERELVASITRGSTTNYADSVKGRFTISRDNAKNTVYLQMNSLKPEDTAVYYCAVFYRVPYVTSFFPEPGSYYWGQGTQVTVSS

SEQ ID NO: 22293 - protein, 122 aa, Artificial Sequence
  Chemically Synthesized
QVQLQESGGGLVQAGGSLRLSCAASGYISYRYNMGWYRQAPGKEREFVAGITGGGITYYADSVKGRFTISRDNAKNTVYLQMNSLKPEDTAVYYCAVPLIAGVLDEGFYFYWGQGTQVTVSS

SEQ ID NO: 22294 - protein, 122 aa, Artificial Sequence
  Chemically Synthesized
QVQLQESGGGLVQAGGSLRLSCAASGTISYLVYMGWYRQAPGKEREFVAAIAPGASTNYADSVKGRFTISRDNAKNTVYLQMNSLKPEDTAVYYCAVKRSNTESPYYDHQYWGQGTQVTVSS

SEQ ID NO: 22295 - protein, 122 aa, Artificial Sequence
  Chemically Synthesized
QVQLQESGGGLVQAGGSLRLSCAASGYISGRRWMGWYRQAPGKEREFVAGINRGGSTNYADSVKGRFTISRDNAKNTVYLQMNSLKPEDTAVYYCAAYLQPGYGRYPKHDYWGQGTQVTVSS

SEQ ID NO: 22296 - protein, 122 aa, Artificial Sequence
  Chemically Synthesized
QVQLQESGGGLVQAGGSLRLSCAASGNISTFPAMGWYRQAPGKERELVAGIDDGSSTNYADSVKGRFTISRDNAKNTVYLQMNSLKPEDTAVYYCAVGVYTTQVYLGPFPYWGQGTQVTVSS

SEQ ID NO: 22297 - protein, 117 aa, Artificial Sequence
  Chemically Synthesized
QVQLQESGGGLVQAGGSLRLSCAASGYIFYRYRMGWYRQAPGKERELVAGIGLGANTNYADSVKGRFTISRDNAKNTVYLQMNSLKPEDTAVYYCAVTWLYDYDLYWGQGTQVTVSS

SEQ ID NO: 22298 - protein, 118 aa, Artificial Sequence
  Chemically Synthesized
QVQLQESGGGLVQAGGSLRLSCAASGNIFVAKSMGWYRQAPGKERELVATIDEGGNTNYADSVKGRFTISRDNAKNTVYLQMNSLKPEDTAVYYCAVEYEGDYYFSYWGQGTQVTVSS

SEQ ID NO: 22299 - protein, 120 aa, Artificial Sequence
  Chemically Synthesized
QVQLQESGGGLVQAGGSLRLSCAASGNMGWYRQAPGKEREFVAGIADGATTNYADSVKGRFTISRDNAKNTVYLQMNSLKPEDTAVYYCAVSKRVQSNYVTYVYRQYSYWGQGTQVTVSS

SEQ ID NO: 22300 - protein, 117 aa, Artificial Sequence
  Chemically Synthesized
QVQLQESGGGLVQAGGSLRLSCAASGSISFDTMGWYRQAPGKEREFVATITRGTSTNYADSVKGRFTISRDNAKNTVYLQMNSLKPEDTAVYYCAATVTRTWDLGYWGQGTQVTVSS

SEQ ID NO: 22301 - protein, 118 aa, Artificial Sequence
  Chemically Synthesized
QVQLQESGGGLVQAGGSLRLSCAASGYIFGLIYMGWYRQAPGKEREFVAAISGGATTYYADSVKGRFTISRDNAKNTVYLQMNSLKPEDTAVYYCAARYAHPRQHTYWGQGTQVTVSS

SEQ ID NO: 22302 - protein, 110 aa, Artificial Sequence
  Chemically Synthesized
QVQLQESGGGLVQAGGSLRLSCAASGSISDAYDMGWYRQAPGKEREFVASISRGGSTNYADSVKGRFTISRDNAKNTVYLQMNSLKPEDTAVYYCAVMYWGQGTQVTVSS

SEQ ID NO: 22303 - protein, 118 aa, Artificial Sequence
  Chemically Synthesized
QVQLQESGGGLVQAGGSLRLSCAASGTIFVGYLMGWYRQAPGKEREFVAGIDFGGITYYADSVKGRFTISRDNAKNTVYLQMNSLKPEDTAVYYCAAALDGWYRHVYWGQGTQVTVSS

SEQ ID NO: 22304 - protein, 122 aa, Artificial Sequence
  Chemically Synthesized
QVQLQESGGGLVQAGGSLRLSCAASGNISAGYDMGWYRQAPGKEREFVAGIAPGSTTYYADSVKGRFTISRDNAKNTVYLQMNSLKPEDTAVYYCAVAIKQYRWAGGWYIYWGQGTQVTVSS

SEQ ID NO: 22305 - protein, 125 aa, Artificial Sequence
  Chemically Synthesized
QVQLQESGGGLVQAGGSLRLSCAASGYISDQQYMGWYRQAPGKEREFVAGIADGSTTNYADSVKGRFTISRDNAKNTVYLQMNSLKPEDTAVYYCAAGNYSNLVSTSVVTVTFYWGQGTQVTVSS

SEQ ID NO: 22306 - protein, 118 aa, Artificial Sequence
  Chemically Synthesized
QVQLQESGGGLVQAGGSLRLSCAASGSIFDPFDMGWYRQAPGKEREFVAGIADGANTNYADSVKGRFTISRDNAKNTVYLQMNSLKPEDTAVYYCAALVQVGERYRYWGQGTQVTVSS

SEQ ID NO: 22307 - protein, 122 aa, Artificial Sequence
  Chemically Synthesized
QVQLQESGGGLVQAGGSLRLSCAASGNISSAGGMGWYRQAPGKEREFVASITVGGSTYYADSVKGRFTISRDNAKNTVYLQMNSLKPEDTAVYYCAVRRGYGTDSDYVHVYWGQGTQVTVSS

SEQ ID NO: 22308 - protein, 118 aa, Artificial Sequence
  Chemically Synthesized
QVQLQESGGGLVQAGGSLRLSCAASGSIFDAVSMGWYRQAPGKERELVAAIAYGGTTYYADSVKGRFTISRDNAKNTVYLQMNSLKPEDTAVYYCAAYLYDVELHDYWGQGTQVTVSS

SEQ ID NO: 22309 - protein, 122 aa, Artificial Sequence
  Chemically Synthesized
QVQLQESGGGLVQAGGSLRLSCAASGSISAADDMGWYRQAPGKERELVASIGSGTSTNYADSVKGRFTISRDNAKNTVYLQMNSLKPEDTAVYYCAAPTQIYLYRYYVHLYWGQGTQVTVSS

SEQ ID NO: 22310 - protein, 118 aa, Artificial Sequence
  Chemically Synthesized
QVQLQESGGGLVQAGGSLRLSCAASGTISPLYIMGWYRQAPGKERELVAAINWGATTYYADSVKGRFTISRDNAKNTVYLQMNSLKPEDTAVYYCAVDDDFVSYYYYWGQGTQVTVSS

SEQ ID NO: 22311 - protein, 118 aa, Artificial Sequence
  Chemically Synthesized
QVQLQESGGGLVQAGGSLRLSCAASGTIFRGDYMGWYRQAPGKERELVAAIGNGASTYYADSVKGRFTISRDNAKNTVYLQMNSLKPEDTAVYYCAADYFPYTDLGYWGQGTQVTVSS

SEQ ID NO: 22312 - protein, 118 aa, Artificial Sequence
  Chemically Synthesized
QVQLQESGGGLVQAGGSLRLSCAASGNIFDRLYMGWYRQAPGKEREFVATIDNGGSTNYADSVKGRFTISRDNAKNTVYLQMNSLKPEDTAVYYCAAVQWDHGLFDYWGQGTQVTVSS

SEQ ID NO: 22313 - protein, 118 aa, Artificial Sequence
  Chemically Synthesized
QVQLQESGGGLVQAGGSLRLSCAASGTIFTPANMGWYRQAPGKEREFVATITAGATTNYADSVKGRFTISRDNAKNTVYLQMNSLKPEDTAVYYCAAKPTYDSSHWYWGQGTQVTVSS

SEQ ID NO: 22314 - protein, 118 aa, Artificial Sequence
  Chemically Synthesized
QVQLQESGGGLVQAGGSLRLSCAASGTISYYGVMGWYRQAPGKERELVATIGDGGSTYYADSVKGRFTISRDNAKNTVYLQMNSLKPEDTAVYYCAVPVSTVIPLSYWGQGTQVTVSS

SEQ ID NO: 22315 - protein, 117 aa, Artificial Sequence
  Chemically Synthesized
QVQLQESGGGLVQAGGSLRLSCAASGYISRYPQMGWYRQAPGKEREFVASIAQGTNTNYADSVKGRFTISRDNAKNTVYLQMNSLKPEDTAVYYCAADVSTVTTIYWGQGTQVTVSS

SEQ ID NO: 22316 - protein, 122 aa, Artificial Sequence
  Chemically Synthesized
QVQLQESGGGLVQAGGSLRLSCAASGNISPPTLMGWYRQAPGKEREFVAGIARGATTYYADSVKGRFTISRDNAKNTVYLQMNSLKPEDTAVYYCAANDDVQAYRDYRFWYWGQGTQVTVSS

SEQ ID NO: 22317 - protein, 121 aa, Artificial Sequence
  Chemically Synthesized
QVQLQESGGGLVQAGGSLRLSCAASGNISYAARMGWYRQAPGKEREFVAGIGDGAITNYADSVKGRFTISRDNAKNTVYLQMNSLKPEDTAVYYCAAYAIADSTTGVNIYWGQGTQVTVSS

SEQ ID NO: 22318 - protein, 118 aa, Artificial Sequence
  Chemically Synthesized
QVQLQESGGGLVQAGGSLRLSCAASGNISSYYPMGWYRQAPGKEREFVATIDSGANTYYADSVKGRFTISRDNAKNTVYLQMNSLKPEDTAVYYCAVVITDVPQFDYWGQGTQVTVSS

SEQ ID NO: 22319 - protein, 122 aa, Artificial Sequence
  Chemically Synthesized
QVQLQESGGGLVQAGGSLRLSCAASGTISAYYPMGWYRQAPGKEREFVAAIGVGSITYYADSVKGRFTISRDNAKNTVYLQMNSLKPEDTAVYYCAVVDSYNYDPDNLFAYWGQGTQVTVSS

SEQ ID NO: 22320 - protein, 118 aa, Artificial Sequence
  Chemically Synthesized
QVQLQESGGGLVQAGGSLRLSCAASGSIFTRHYMGWYRQAPGKERELVATISRGTNTNYADSVKGRFTISRDNAKNTVYLQMNSLKPEDTAVYYCAAWLWTYRYYRYWGQGTQVTVSS

SEQ ID NO: 22321 - protein, 126 aa, Artificial Sequence
  Chemically Synthesized
QVQLQESGGGLVQAGGSLRLSCAASGNISYYYAMGWYRQAPGKEREFVASIADGANTNYADSVKGRFTISRDNAKNTVYLQMNSLKPEDTAVYYCAVGRDSSGAYQYYATGTHDYWGQGTQVTVSS

SEQ ID NO: 22322 - protein, 118 aa, Artificial Sequence
  Chemically Synthesized
QVQLQESGGGLVQAGGSLRLSCAASGSISYYPYMGWYRQAPGKEREFVAAIGNGSNTNYADSVKGRFTISRDNAKNTVYLQMNSLKPEDTAVYYCAVPTNWDSGHEYWGQGTQVTVSS

SEQ ID NO: 22323 - protein, 126 aa, Artificial Sequence
  Chemically Synthesized
QVQLQESGGGLVQAGGSLRLSCAASGSISEPTPMGWYRQAPGKEREFVASISVGGTTYYADSVKGRFTISRDNAKNTVYLQMNSLKPEDTAVYYCAAAGVGFRGVLAFLHYVFAYWGQGTQVTVSS

SEQ ID NO: 22324 - protein, 118 aa, Artificial Sequence
  Chemically Synthesized
QVQLQESGGGLVQAGGSLRLSCAASGTISRVVIMGWYRQAPGKEREFVAGIGEGATTYYADSVKGRFTISRDNAKNTVYLQMNSLKPEDTAVYYCAVLHYDAGFHDYWGQGTQVTVSS

SEQ ID NO: 22325 - protein, 118 aa, Artificial Sequence
  Chemically Synthesized
QVQLQESGGGLVQAGGSLRLSCAASGNIFGAQEMGWYRQAPGKEREFVASIGGGASTNYADSVKGRFTISRDNAKNTVYLQMNSLKPEDTAVYYCAVDDDLHGYLTYWGQGTQVTVSS

SEQ ID NO: 22326 - protein, 118 aa, Artificial Sequence
  Chemically Synthesized
QVQLQESGGGLVQAGGSLRLSCAASGSISDWPVMGWYRQAPGKEREFVAAIGYGGNTYYADSVKGRFTISRDNAKNTVYLQMNSLKPEDTAVYYCAVYTDYHDLHGYWGQGTQVTVSS

SEQ ID NO: 22327 - protein, 118 aa, Artificial Sequence
  Chemically Synthesized
QVQLQESGGGLVQAGGSLRLSCAASGNIFIYVSMGWYRQAPGKEREFVAGISYGANTYYADSVKGRFTISRDNAKNTVYLQMNSLKPEDTAVYYCAVVTYGDDYYEYWGQGTQVTVSS

SEQ ID NO: 22328 - protein, 118 aa, Artificial Sequence
  Chemically Synthesized
QVQLQESGGGLVQAGGSLRLSCAASGSIFDAVSMGWYRQAPGKERELVAAIAYGGTTYYADSVKGRFTISRDNAKNTVYLQMNSLKPEDTAVYYCAAYYSVSDVLEYWGQGTQVTVSS

SEQ ID NO: 22329 - protein, 118 aa, Artificial Sequence
  Chemically Synthesized
QVQLQESGGGLVQAGGSLRLSCAASGTISPYVGMGWYRQAPGKEREFVASIGIGGITYYADSVKGRFTISRDNAKNTVYLQMNSLKPEDTAVYYCAATLYTVWNHGYWGQGTQVTVSS

SEQ ID NO: 22330 - protein, 122 aa, Artificial Sequence
  Chemically Synthesized
QVQLQESGGGLVQAGGSLRLSCAASGSIFAGPAMGWYRQAPGKERELVAGIATGGTTYYADSVKGRFTISRDNAKNTVYLQMNSLKPEDTAVYYCAAGYLLLWEGQDGHDYWGQGTQVTVSS

SEQ ID NO: 22331 - protein, 119 aa, Artificial Sequence
  Chemically Synthesized
QVQLQESGGGLVQAGGSLRLSCAASGSIFAIYYMGWYRQAPGKERELVAAIGAGGSITNYADSVKGRFTISRDNAKNTVYLQMNSLKPEDTAVYYCAAGAYLDGYLVYWGQGTQVTVSS

SEQ ID NO: 22332 - protein, 117 aa, Artificial Sequence
  Chemically Synthesized
QVQLQESGGGLVQAGGSLRLSCAASGNISGIYIMGWYRQAPGKEREFVAAIAGGGNTNYADSVKGRFTISRDNAKNTVYLQMNSLKPEDTAVYYCAATSYRVWFYYWGQGTQVTVSS

SEQ ID NO: 22333 - protein, 118 aa, Artificial Sequence
  Chemically Synthesized
QVQLQESGGGLVQAGGSLRLSCAASGNISLVYVMGWYRQAPGKEREFVAAISGGTNTNYADSVKGRFTISRDNAKNTVYLQMNSLKPEDTAVYYCAAVTFGRDYYVYWGQGTQVTVSS

SEQ ID NO: 22334 - protein, 118 aa, Artificial Sequence
  Chemically Synthesized
QVQLQESGGGLVQAGGSLRLSCAASGNISGIRWMGWYRQAPGKEREFVAAIAGGGNTNYADSVKGRFTISRDNAKNTVYLQMNSLKPEDTAVYYCAATTYIPEWHYYWGQGTQVTVSS

SEQ ID NO: 22335 - protein, 126 aa, Artificial Sequence
  Chemically Synthesized
QVQLQESGGGLVQAGGSLRLSCAASGTISTWSVMGWYRQAPGKEREFVAGIGYGATTNYADSVKGRFTISRDNAKNTVYLQMNSLKPEDTAVYYCAALTQPDTATTQARGYWHYYWGQGTQVTVSS

SEQ ID NO: 22336 - protein, 120 aa, Artificial Sequence
  Chemically Synthesized
QVQLQESGGGLVQAGGSLRLSCAASGNISRPDVMGWYRQAPGKEREFVAGITYGTNTNYADSVKGRFTISRDNAKNTVYLQMNSLKPEDTAVYYCAALYDYTSYPYHIYWGQGTQVTVSS

SEQ ID NO: 22337 - protein, 118 aa, Artificial Sequence
  Chemically Synthesized
QVQLQESGGGLVQAGGSLRLSCAASGNISQGNTMGWYRQAPGKERELVASISYGSTTYYADSVKGRFTISRDNAKNTVYLQMNSLKPEDTAVYYCAAVTKEDWWYTYWGQGTQVTVSS

SEQ ID NO: 22338 - protein, 117 aa, Artificial Sequence
  Chemically Synthesized
QVQLQESGGGLVQAGGSLRLSCAASGTIFATSTMGWYRQAPGKEREFVATIDYGTNTYYADSVKGRFTISRDNAKNTVYLQMNSLKPEDTAVYYCAVTDSTLTLMYWGQGTQVTVSS

SEQ ID NO: 22339 - protein, 121 aa, Artificial Sequence
  Chemically Synthesized
QVQLQESGGGLVQAGGSLRLSCAASGNIFAGRYMGWYRQAPGKERELVAAITSVVLPYADSVKGRFTISRDNAKNTVYLQMNSLKPEDTAVYYCAASTFQTTGWPVGHFYWGQGTQVTVSS

SEQ ID NO: 22340 - protein, 122 aa, Artificial Sequence
  Chemically Synthesized
QVQLQESGGGLVQAGGSLRLSCAASGTIFYVDVMGWYRQAPGKEREFVAGINDGTTTNYADSVKGRFTISRDNAKNTVYLQMNSLKPEDTAVYYCAVLYVDDQYYAKYFYYWGQGTQVTVSS

SEQ ID NO: 22341 - protein, 122 aa, Artificial Sequence
  Chemically Synthesized
QVQLQESGGGLVQAGGSLRLSCAASGTIFPWSSMGWYRQAPGKERELVASISFGAITNYADSVKGRFTISRDNAKNTVYLQMNSLKPEDTAVYYCAVVVYKYGYPYEAYGYWGQGTQVTVSS

SEQ ID NO: 22342 - protein, 110 aa, Artificial Sequence
  Chemically Synthesized
QVQLQESGGGLVQAGGSLRLSCAASGYISRTRPMGWYRQAPGKEREFVATIDGGTTTYYADSVKGRFTISRDNAKNTVYLQMNSLKPEDTAVYYCAYYYWGQGTQVTVSS

SEQ ID NO: 22343 - protein, 112 aa, Artificial Sequence
  Chemically Synthesized
QVQLQESGGGLVQAGGSLRLSCAASGNISYVDLMGWYRQAPGKERELGSITYYADSVKGRFTISRDNAKNTVYLQMNSLKPEDTAVYYCAALVYVDSDYQYWGQGTQVTVSS

SEQ ID NO: 22344 - protein, 118 aa, Artificial Sequence
  Chemically Synthesized
QVQLQESGGGLVQAGGSLRLSCAASGSISDGGGMGWYRQAPGKERELVAGITYGSITYYADSVKGRFTISRDNAKNTVYLQMNSLKPEDTAVYYCAAADPTYDALDYWGQGTQVTVSS

SEQ ID NO: 22345 - protein, 126 aa, Artificial Sequence
  Chemically Synthesized
QVQLQESGGGLVQAGGSLRLSCAASGNISTSWSMGWYRQAPGKEREFVAGIGDGAITYYADSVKGRFTISRDNAKNTVYLQMNSLKPEDTAVYYCAAVTYRRNIRVGDGTRGHPYWGQGTQVTVSS

SEQ ID NO: 22346 - protein, 122 aa, Artificial Sequence
  Chemically Synthesized
QVQLQESGGGLVQAGGSLRLSCAASGNISPAGAMGWYRQAPGKEREFVAGIAWGSNTYYADSVKGRFTISRDNAKNTVYLQMNSLKPEDTAVYYCAADYYDYVQYSGWLTYWGQGTQVTVSS

SEQ ID NO: 22347 - protein, 125 aa, Artificial Sequence
  Chemically Synthesized
QVQLQESGGGLVQAGGSLRLSCAASGSISVYLRMGWYRQAPGKERELVASISGSTTNYADSVKGRFTISRDNAKNTVYLQMNSLKPEDTAVYYCAVQYAPQRVGAYVTIPNLVYWGQGTQVTVSS

SEQ ID NO: 22348 - protein, 121 aa, Artificial Sequence
  Chemically Synthesized
QVQLQESGGGLVQAGGSLRLSCAASGTISTRSMGWYRQAPGKEREFVASITNGASTYYADSVKGRFTISRDNAKNTVYLQMNSLKPEDTAVYYCAVGRAASTVYYYGYLYWGQGTQVTVSS

SEQ ID NO: 22349 - protein, 122 aa, Artificial Sequence
  Chemically Synthesized
QVQLQESGGGLVQAGGSLRLSCAASGNISRFPYMGWYRQAPGKERELVASIAYGAITYYADSVKGRFTISRDNAKNTVYLQMNSLKPEDTAVYYCAADNPYDADDWPFHQYWGQGTQVTVSS

SEQ ID NO: 22350 - protein, 118 aa, Artificial Sequence
  Chemically Synthesized
QVQLQESGGGLVQAGGSLRLSCAASGTISDTDVMGWYRQAPGKERELVATIARGTTTNYADSVKGRFTISRDNAKNTVYLQMNSLKPEDTAVYYCAVATLFRYTHLYWGQGTQVTVSS

SEQ ID NO: 22351 - protein, 112 aa, Artificial Sequence
  Chemically Synthesized
QVQLQESGGGLVQAGGSLRLSCAASGSMGWYRQAPGKEREFVATISNGTNTNYADSVKGRFTISRDNAKNTVYLQMNSLKPEDTAVYYCAVPYDIYDYLPYWGQGTQVTVSS

SEQ ID NO: 22352 - protein, 119 aa, Artificial Sequence
  Chemically Synthesized
QVQLQESGGGLVQAGGSLRLSCAASGSIFPRSAMGWYRQAPGKERELVAAITLIGANTNYADSVKGRFTISRDNAKNTVYLQMNSLKPEDTAVYYCAVSDYDVVSFPYWGQGTQVTVSS

SEQ ID NO: 22353 - protein, 126 aa, Artificial Sequence
  Chemically Synthesized
QVQLQESGGGLVQAGGSLRLSCAASGNIFEPEEMGWYRQAPGKEREFVASIAYGTSTNYADSVKGRFTISRDNAKNTVYLQMNSLKPEDTAVYYCAAGYIYTFDVLYIVYQTYLYWGQGTQVTVSS

SEQ ID NO: 22354 - protein, 122 aa, Artificial Sequence
  Chemically Synthesized
QVQLQESGGGLVQAGGSLRLSCAASGTISGLEYMGWYRQAPGKEREFVATITEGANTNYADSVKGRFTISRDNAKNTVYLQMNSLKPEDTAVYYCAARPFQPYWTAGRHDYWGQGTQVTVSS

SEQ ID NO: 22355 - protein, 118 aa, Artificial Sequence
  Chemically Synthesized
QVQLQESGGGLVQAGGSLRLSCAASGYISFPRTMGWYRQAPGKERELVATIAYGAITNYADSVKGRFTISRDNAKNTVYLQMNSLKPEDTAVYYCAAHRPTKYAHYYWGQGTQVTVSS

SEQ ID NO: 22356 - protein, 114 aa, Artificial Sequence
  Chemically Synthesized
QVQLQESGGGLVQAGGSLRLSCAASGNIFHEASMGWYRQAPGKERELVATISVGYADSVKGRFTISRDNAKNTVYLQMNSLKPEDTAVYYCAAIYSARADLPYWGQGTQVTVSS

SEQ ID NO: 22357 - protein, 118 aa, Artificial Sequence
  Chemically Synthesized
QVQLQESGGGLVQAGGSLRLSCAASGTISRPDIMGWYRQAPGKERELVAGIDTGGNTNYADSVKGRFTISRDNAKNTVYLQMNSLKPEDTAVYYCAVLFYRPFWLYYWGQGTQVTVSS

SEQ ID NO: 22358 - protein, 118 aa, Artificial Sequence
  Chemically Synthesized
QVQLQESGGGLVQAGGSLRLSCAASGTIFWWYYMGWYRQAPGKERELVAAIDTGGITNYADSVKGRFTISRDNAKNTVYLQMNSLKPEDTAVYYCAVATVRPYWLYYWGQGTQVTVSS

SEQ ID NO: 22359 - protein, 121 aa, Artificial Sequence
  Chemically Synthesized
QVQLQESGGGLVQAGGSLRLSCAASGNIFRPRTMGWYRQAPGKERELVAAIAYGTITYYADSVKGRFTISRDNAKNTVYLQMNSLKPEDTAVYYCAVGYRDRWQQRKHYYWGQGTQVTVSS

SEQ ID NO: 22360 - protein, 118 aa, Artificial Sequence
  Chemically Synthesized
QVQLQESGGGLVQAGGSLRLSCAASGSISVLDTMGWYRQAPGKERELVAAITRGATTYYADSVKGRFTISRDNAKNTVYLQMNSLKPEDTAVYYCAAGYYGTSYFQYWGQGTQVTVSS

SEQ ID NO: 22361 - protein, 118 aa, Artificial Sequence
  Chemically Synthesized
QVQLQESGGGLVQAGGSLRLSCAASGYIFALFLMGWYRQAPGKERELVAAIAIGGSTYYADSVKGRFTISRDNAKNTVYLQMNSLKPEDTAVYYCAVWSVFSPVFDYWGQGTQVTVSS

SEQ ID NO: 22362 - protein, 108 aa, Artificial Sequence
  Chemically Synthesized
QVQLQESGGGLVQAGGSLRLSCAASGSISRQDGMGWYRQAPGKEREYLYADSVKGRFTISRDNAKNTVYLQMNSLKPEDTAVYYCAVYLLAPDYLVYWGQGTQVTVSS

SEQ ID NO: 22363 - protein, 118 aa, Artificial Sequence
  Chemically Synthesized
QVQLQESGGGLVQAGGSLRLSCAASGYISWYRDMGWYRQAPGKEREFVAAIGRGTITNYADSVKGRFTISRDNAKNTVYLQMNSLKPEDTAVYYCAAILSGRLTHRYWGQGTQVTVSS

SEQ ID NO: 22364 - protein, 117 aa, Artificial Sequence
  Chemically Synthesized
QVQLQESGGGLVQAGGSLRLSCAASGNISDPYNMGWYRQAPGKEREFVAGIGDGGSTNYADSVKGRFTISRDNAKNTVYLQMNSLKPEDTAVYYCAASPTPYRHWYWGQGTQVTVSS

SEQ ID NO: 22365 - protein, 112 aa, Artificial Sequence
  Chemically Synthesized
QVQLQESGGGLVQAGGSLRLSCAASGTISDGPAMGWYRQAPGKEREFVATIDYYADSVKGRFTISRDNAKNTVYLQMNSLKPEDTAVYYCAAYYDPLIYLYWGQGTQVTVSS

SEQ ID NO: 22366 - protein, 118 aa, Artificial Sequence
  Chemically Synthesized
QVQLQESGGGLVQAGGSLRLSCAASGTISPGAYMGWYRQAPGKERELVAGIDAGGNTYYADSVKGRFTISRDNAKNTVYLQMNSLKPEDTAVYYCAVFGTHWRYLRYWGQGTQVTVSS

SEQ ID NO: 22367 - protein, 118 aa, Artificial Sequence
  Chemically Synthesized
QVQLQESGGGLVQAGGSLRLSCAASGTISYTTSMGWYRQAPGKERELVAAIGKGTITYYADSVKGRFTISRDNAKNTVYLQMNSLKPEDTAVYYCAVGRAYDPEHSYWGQGTQVTVSS

SEQ ID NO: 22368 - protein, 125 aa, Artificial Sequence
  Chemically Synthesized
QVQLQESGGGLVQAGGSLRLSCAASGSIFPVGDMGWYRQAPGKEREFVAGIGRGTSTNYADSVKGRFTISRDNAKNTVYLQMNSLKPEDTAVYYCAAPTYYYSRDATVYIDLEYWGQGTQVTVSS

SEQ ID NO: 22369 - protein, 117 aa, Artificial Sequence
  Chemically Synthesized
QVQLQESGGGLVQAGGSLRLSCAASGTISEYTSMGWYRQAPGKERELVATIDGGSSTYYADSVKGRFTISRDNAKNTVYLQMNSLKPEDTAVYYCAVEPWPYYYQYWGQGTQVTVSS

SEQ ID NO: 22370 - protein, 118 aa, Artificial Sequence
  Chemically Synthesized
QVQLQESGGGLVQAGGSLRLSCAASGNISFYGVMGWYRQAPGKERELVAGITRGANTYYADSVKGRFTISRDNAKNTVYLQMNSLKPEDTAVYYCAVRPYYIYRHEYWGQGTQVTVSS

SEQ ID NO: 22371 - protein, 122 aa, Artificial Sequence
  Chemically Synthesized
QVQLQESGGGLVQAGGSLRLSCAASGTIFPYGSMGWYRQAPGKERELVAAINDGASTYYADSVKGRFTISRDNAKNTVYLQMNSLKPEDTAVYYCAVAYWYDSVDYYYHRYWGQGTQVTVSS

SEQ ID NO: 22372 - protein, 126 aa, Artificial Sequence
  Chemically Synthesized
QVQLQESGGGLVQAGGSLRLSCAASGTIFYEYLMGWYRQAPGKERELVATIGIGGNTNYADSVKGRFTISRDNAKNTVYLQMNSLKPEDTAVYYCAAKYDYGWDLGIEYRADHIYWGQGTQVTVSS

SEQ ID NO: 22373 - protein, 124 aa, Artificial Sequence
  Chemically Synthesized
QVQLQESGGGLVQAGGSLRLSCAASGNIFYRDYMGWYRQAPGKERELVAAITTGAGGSTYYADSVKGRFTISRDNAKNTVYLQMNSLKPEDTAVYYCAVDRPYSVYRARPHYYWGQGTQVTVSS

SEQ ID NO: 22374 - protein, 118 aa, Artificial Sequence
  Chemically Synthesized
QVQLQESGGGLVQAGGSLRLSCAASGYISDVPNMGWYRQAPGKEREFVAGISRGANTYYADSVKGRFTISRDNAKNTVYLQMNSLKPEDTAVYYCAARDQIVASYSYWGQGTQVTVSS

SEQ ID NO: 22375 - protein, 118 aa, Artificial Sequence
  Chemically Synthesized
QVQLQESGGGLVQAGGSLRLSCAASGYISYDQNMGWYRQAPGKEREFVASITGGANTYYADSVKGRFTISRDNAKNTVYLQMNSLKPEDTAVYYCAVEIRDRPSYQYWGQGTQVTVSS

SEQ ID NO: 22376 - protein, 118 aa, Artificial Sequence
  Chemically Synthesized
QVQLQESGGGLVQAGGSLRLSCAASGTIFWRSTMGWYRQAPGKERELVASISAGSSTYYADSVKGRFTISRDNAKNTVYLQMNSLKPEDTAVYYCAATLADRYYLSYWGQGTQVTVSS

SEQ ID NO: 22377 - protein, 116 aa, Artificial Sequence
  Chemically Synthesized
QVQLQESGGGLVQAGGSLRLSCAASGTISDSFVMGWYRQAPGKERELVATIGSYADSVKGRFTISRDNAKNTVYLQMNSLKPEDTAVYYCAAAYQGYDGQDAHAYWGQGTQVTVSS

SEQ ID NO: 22378 - protein, 125 aa, Artificial Sequence
  Chemically Synthesized
QVQLQESGGGLVQAGGSLRLSCAASGSIFRSDVMGWYRQAPGKEREFVAAITLGAITYYADSVKGRFTISRDNAKNTVYLQMNSLKPEDTAVYYCAVGPGDYLYTYYDDGAYTYWGQGTQVTVSS

SEQ ID NO: 22379 - protein, 118 aa, Artificial Sequence
  Chemically Synthesized
QVQLQESGGGLVQAGGSLRLSCAASGTISSDRVMGWYRQAPGKEREFVAGIAAGAITYYADSVKGRFTISRDNAKNTVYLQMNSLKPEDTAVYYCAVQGAYLSVLYYWGQGTQVTVSS

SEQ ID NO: 22380 - protein, 125 aa, Artificial Sequence
  Chemically Synthesized
QVQLQESGGGLVQAGGSLRLSCAASGNIFDPYYMGWYRQAPGKEREFVAAIASVLIPYADSVKGRFTISRDNAKNTVYLQMNSLKPEDTAVYYCAAKRYQYTNYYTTWRVAHAYWGQGTQVTVSS

SEQ ID NO: 22381 - protein, 118 aa, Artificial Sequence
  Chemically Synthesized
QVQLQESGGGLVQAGGSLRLSCAASGSISDVGDMGWYRQAPGKERELVAGIATGATTNYADSVKGRFTISRDNAKNTVYLQMNSLKPEDTAVYYCAAPYRHRHDHDYWGQGTQVTVSS

SEQ ID NO: 22382 - protein, 122 aa, Artificial Sequence
  Chemically Synthesized
QVQLQESGGGLVQAGGSLRLSCAASGTISYDYSMGWYRQAPGKERELVATITIGGTTNYADSVKGRFTISRDNAKNTVYLQMNSLKPEDTAVYYCAVTYYWLGFVWGDHVYWGQGTQVTVSS

SEQ ID NO: 22383 - protein, 118 aa, Artificial Sequence
  Chemically Synthesized
QVQLQESGGGLVQAGGSLRLSCAASGNISFFRRMGWYRQAPGKEREFVASITDGTNTNYADSVKGRFTISRDNAKNTVYLQMNSLKPEDTAVYYCAANRYGYWTFSYWGQGTQVTVSS

SEQ ID NO: 22384 - protein, 118 aa, Artificial Sequence
  Chemically Synthesized
QVQLQESGGGLVQAGGSLRLSCAASGSISFSYAMGWYRQAPGKERELVATITLGTNTNYADSVKGRFTISRDNAKNTVYLQMNSLKPEDTAVYYCAATYNWDTYHTYWGQGTQVTVSS

SEQ ID NO: 22385 - protein, 117 aa, Artificial Sequence
  Chemically Synthesized
QVQLQESGGGLVQAGGSLRLSCAASGNISRYYMGWYRQAPGKEREFVASISSGASTNYADSVKGRFTISRDNAKNTVYLQMNSLKPEDTAVYYCAVVRVYAAPLSYWGQGTQVTVSS

SEQ ID NO: 22386 - protein, 121 aa, Artificial Sequence
  Chemically Synthesized
QVQLQESGGGLVQAGGSLRLSCAASGYISRSAVMGWYRQAPGKERELVASITLGANTNYADSVKGRFTISRDNAKNTVYLQMNSLKPEDTAVYYCAVVWVDADIPSTLIYWGQGTQVTVSS

SEQ ID NO: 22387 - protein, 121 aa, Artificial Sequence
  Chemically Synthesized
QVQLQESGGGLVQAGGSLRLSCAASGNIFSNTMGWYRQAPGKERELVATISIGATTNYADSVKGRFTISRDNAKNTVYLQMNSLKPEDTAVYYCAAEYSFWFTPYVEHYYWGQGTQVTVSS

SEQ ID NO: 22388 - protein, 117 aa, Artificial Sequence
  Chemically Synthesized
QVQLQESGGGLVQAGGSLRLSCAASGYIFYNLPMGWYRQAPGKERELVASIGDGSSTNYADSVKGRFTISRDNAKNTVYLQMNSLKPEDTAVYYCAVRYRDDEHSYWGQGTQVTVSS

SEQ ID NO: 22389 - protein, 118 aa, Artificial Sequence
  Chemically Synthesized
QVQLQESGGGLVQAGGSLRLSCAASGNIFGRQSMGWYRQAPGKERELVAGIAWGSNTNYADSVKGRFTISRDNAKNTVYLQMNSLKPEDTAVYYCAVSGYKAWRHYYWGQGTQVTVSS

SEQ ID NO: 22390 - protein, 118 aa, Artificial Sequence
  Chemically Synthesized
QVQLQESGGGLVQAGGSLRLSCAASGSIFWTRYMGWYRQAPGKERELVAGINYGASTYYADSVKGRFTISRDNAKNTVYLQMNSLKPEDTAVYYCAASTIYPHYFRYWGQGTQVTVSS

SEQ ID NO: 22391 - protein, 116 aa, Artificial Sequence
  Chemically Synthesized
QVQLQESGGGLVQAGGSLRLSCAASGTMGWYRQAPGKEREFVAAIGGGTTTYYADSVKGRFTISRDNAKNTVYLQMNSLKPEDTAVYYCAANTTSYTQLREWHEYWGQGTQVTVSS

SEQ ID NO: 22392 - protein, 125 aa, Artificial Sequence
  Chemically Synthesized
QVQLQESGGGLVQAGGSLRLSCAASGTIFGALMGWYRQAPGKERELVASINPGSTTNYADSVKGRFTISRDNAKNTVYLQMNSLKPEDTAVYYCAAYDGYYYPYALAGYPEHTYWGQGTQVTVSS

SEQ ID NO: 22393 - protein, 116 aa, Artificial Sequence
  Chemically Synthesized
QVQLQESGGGLVQAGGSLRLSCAASGNIFLIYLMGWYRQAPGKEREFVATITPGSTTNYADSVKGRFTISRDNAKNTVYLQMNSLKPEDTAVYYCAVAYYRGLYYWGQGTQVTVSS

SEQ ID NO: 22394 - protein, 116 aa, Artificial Sequence
  Chemically Synthesized
QVQLQESGGGLVQAGGSLRLSCAASGYIFGDTFMGWYRQAPGKEREFVAAISDGATTYYADSVKGRFTISRDNAKNTVYLQMNSLKPEDTAVYYCAVHYGRDHTYWGQGTQVTVSS

SEQ ID NO: 22395 - protein, 118 aa, Artificial Sequence
  Chemically Synthesized
QVQLQESGGGLVQAGGSLRLSCAASGSIFARGSMGWYRQAPGKERELVAAITTGGTTNYADSVKGRFTISRDNAKNTVYLQMNSLKPEDTAVYYCAARTFTVYDHGYWGQGTQVTVSS

SEQ ID NO: 22396 - protein, 118 aa, Artificial Sequence
  Chemically Synthesized
QVQLQESGGGLVQAGGSLRLSCAASGSISDYADMGWYRQAPGKERELVAAISYGTTTNYADSVKGRFTISRDNAKNTVYLQMNSLKPEDTAVYYCAAQAHDVRLHYYWGQGTQVTVSS

SEQ ID NO: 22397 - protein, 118 aa, Artificial Sequence
  Chemically Synthesized
QVQLQESGGGLVQAGGSLRLSCAASGYISWTRVMGWYRQAPGKERELVATISRGGTTNYADSVKGRFTISRDNAKNTVYLQMNSLKPEDTAVYYCAVYRLRWQHYVYWGQGTQVTVSS

SEQ ID NO: 22398 - protein, 122 aa, Artificial Sequence
  Chemically Synthesized
QVQLQESGGGLVQAGGSLRLSCAASGTISDDIHMGWYRQAPGKERELVASINGGGNTNYADSVKGRFTISRDNAKNTVYLQMNSLKPEDTAVYYCAVYYYWLGTWADPLYYWGQGTQVTVSS

SEQ ID NO: 22399 - protein, 112 aa, Artificial Sequence
  Chemically Synthesized
QVQLQESGGGLVQAGGSLRLSCAASGYISHEGGMGWYRQAPGKEREFVASIGDGANTNYADSVKGRFTISRDNAKNTVYLQMNSLKPEDTAVYYCAFTTMYWGQGTQVTVSS

SEQ ID NO: 22400 - protein, 118 aa, Artificial Sequence
  Chemically Synthesized
QVQLQESGGGLVQAGGSLRLSCAASGYIFRSQYMGWYRQAPGKERELVATITYGGSTNYADSVKGRFTISRDNAKNTVYLQMNSLKPEDTAVYYCAVRYRLYSVHTYWGQGTQVTVSS

SEQ ID NO: 22401 - protein, 118 aa, Artificial Sequence
  Chemically Synthesized
QVQLQESGGGLVQAGGSLRLSCAASGYISQSPIMGWYRQAPGKERELVASIADGGSTNYADSVKGRFTISRDNAKNTVYLQMNSLKPEDTAVYYCAAYTWYFAPYHYWGQGTQVTVSS

SEQ ID NO: 22402 - protein, 122 aa, Artificial Sequence
  Chemically Synthesized
QVQLQESGGGLVQAGGSLRLSCAASGNISDSWFMGWYRQAPGKERELVAGIAYGGTTYYADSVKGRFTISRDNAKNTVYLQMNSLKPEDTAVYYCAAGDRYAAGGYWYLSYWGQGTQVTVSS

SEQ ID NO: 22403 - protein, 122 aa, Artificial Sequence
  Chemically Synthesized
QVQLQESGGGLVQAGGSLRLSCAASGYISGSYGMGWYRQAPGKEREFVAAIDGGGITYYADSVKGRFTISRDNAKNTVYLQMNSLKPEDTAVYYCAVWYILQTTAEYAHYYWGQGTQVTVSS

SEQ ID NO: 22404 - protein, 121 aa, Artificial Sequence
  Chemically Synthesized
QVQLQESGGGLVQAGGSLRLSCAASGTIFWVDSMGWYRQAPGKEREFVAGISGGTTYYADSVKGRFTISRDNAKNTVYLQMNSLKPEDTAVYYCAALFLGKTRYTRWHRYWGQGTQVTVSS

SEQ ID NO: 22405 - protein, 118 aa, Artificial Sequence
  Chemically Synthesized
QVQLQESGGGLVQAGGSLRLSCAASGNIFYPRYMGWYRQAPGKERELVAGIGYGSTTYYADSVKGRFTISRDNAKNTVYLQMNSLKPEDTAVYYCAVWRPRDRAHRYWGQGTQVTVSS

SEQ ID NO: 22406 - protein, 121 aa, Artificial Sequence
  Chemically Synthesized
QVQLQESGGGLVQAGGSLRLSCAASGYIFSDAIMGWYRQAPGKERELVAAISEGTNTNYADSVKGRFTISRDNAKNTVYLQMNSLKPEDTAVYYCAVKHVVYAYSRTNMYWGQGTQVTVSS

SEQ ID NO: 22407 - protein, 125 aa, Artificial Sequence
  Chemically Synthesized
QVQLQESGGGLVQAGGSLRLSCAASGNISWRWSMGWYRQAPGKEREFVATISTGTTTYADSVKGRFTISRDNAKNTVYLQMNSLKPEDTAVYYCAAVDYAGDGYNGSIDRQHDYWGQGTQVTVSS

SEQ ID NO: 22408 - protein, 118 aa, Artificial Sequence
  Chemically Synthesized
QVQLQESGGGLVQAGGSLRLSCAASGNIFTYYSMGWYRQAPGKEREFVAGISYGTNTYYADSVKGRFTISRDNAKNTVYLQMNSLKPEDTAVYYCAALRGAVRVHYYWGQGTQVTVSS

SEQ ID NO: 22409 - protein, 110 aa, Artificial Sequence
  Chemically Synthesized
QVQLQESGGGLVQAGGSLRLSCAASGSIFNDRGMGWYRQAPGKERELDTNYADSVKGRFTISRDNAKNTVYLQMNSLKPEDTAVYYCAVYRDPGGLLPYWGQGTQVTVSS

SEQ ID NO: 22410 - protein, 118 aa, Artificial Sequence
  Chemically Synthesized
QVQLQESGGGLVQAGGSLRLSCAASGYIFRDQYMGWYRQAPGKEREFVAGIAIGSTTNYADSVKGRFTISRDNAKNTVYLQMNSLKPEDTAVYYCAADYGTDEVLGYWGQGTQVTVSS

SEQ ID NO: 22411 - protein, 117 aa, Artificial Sequence
  Chemically Synthesized
QVQLQESGGGLVQAGGSLRLSCAASGTISWDYAMGWYRQAPGKEREFVATIDDGGNTYYADSVKGRFTISRDNAKNTVYLQMNSLKPEDTAVYYCAAGGTVTGTLYWGQGTQVTVSS

SEQ ID NO: 22412 - protein, 116 aa, Artificial Sequence
  Chemically Synthesized
QVQLQESGGGLVQAGGSLRLSCAASGYISWTVSMGWYRQAPGKEREFVAGIANGTTYYADSVKGRFTISRDNAKNTVYLQMNSLKPEDTAVYYCAAFSPYGYFDYWGQGTQVTVSS

SEQ ID NO: 22413 - protein, 118 aa, Artificial Sequence
  Chemically Synthesized
QVQLQESGGGLVQAGGSLRLSCAASGTISGPGGMGWYRQAPGKERELVAAIGAGSITNYADSVKGRFTISRDNAKNTVYLQMNSLKPEDTAVYYCAAYYPQYYYFRYWGQGTQVTVSS

SEQ ID NO: 22414 - protein, 118 aa, Artificial Sequence
  Chemically Synthesized
QVQLQESGGGLVQAGGSLRLSCAASGTIFYGYIMGWYRQAPGKERELVAGIALGGTTYYADSVKGRFTISRDNAKNTVYLQMNSLKPEDTAVYYCAVLGTYTLTYTYWGQGTQVTVSS

SEQ ID NO: 22415 - protein, 122 aa, Artificial Sequence
  Chemically Synthesized
QVQLQESGGGLVQAGGSLRLSCAASGNIFLAVYMGWYRQAPGKERELVAAITRGSNTYYADSVKGRFTISRDNAKNTVYLQMNSLKPEDTAVYYCAAPGGLRRKSGRAHDYWGQGTQVTVSS

SEQ ID NO: 22416 - protein, 118 aa, Artificial Sequence
  Chemically Synthesized
QVQLQESGGGLVQAGGSLRLSCAASGYISIAAYMGWYRQAPGKEREFVAGISTGTITNYADSVKGRFTISRDNAKNTVYLQMNSLKPEDTAVYYCAVFRWYRYYYPYWGQGTQVTVSS

SEQ ID NO: 22417 - protein, 117 aa, Artificial Sequence
  Chemically Synthesized
QVQLQESGGGLVQAGGSLRLSCAASGNISTFAVMGWYRQAPGKERELVAGIASGASTYYADSVKGRFTISRDNAKNTVYLQMNSLKPEDTAVYYCAVYRSDQQSLYWGQGTQVTVSS

SEQ ID NO: 22418 - protein, 118 aa, Artificial Sequence
  Chemically Synthesized
QVQLQESGGGLVQAGGSLRLSCAASGSIFPPAVMGWYRQAPGKEREFVASISWGAITNYADSVKGRFTISRDNAKNTVYLQMNSLKPEDTAVYYCAATRWYAYHHEYWGQGTQVTVSS

SEQ ID NO: 22419 - protein, 118 aa, Artificial Sequence
  Chemically Synthesized
QVQLQESGGGLVQAGGSLRLSCAASGSISVPNLGMGWYRQAPGKEREFVAGIGFGTSTYYADSVKGRFTISRDNAKNTVYLQMNSLKPEDTAVYYCAAWPYYLAFTYWGQGTQVTVSS

SEQ ID NO: 22420 - protein, 126 aa, Artificial Sequence
  Chemically Synthesized
QVQLQESGGGLVQAGGSLRLSCAASGYISGRKYMGWYRQAPGKEREFVAAIAYGGNTNYADSVKGRFTISRDNAKNTVYLQMNSLKPEDTAVYYCAVRANHRPYARWYLDDHYNYWGQGTQVTVSS

SEQ ID NO: 22421 - protein, 118 aa, Artificial Sequence
  Chemically Synthesized
QVQLQESGGGLVQAGGSLRLSCAASGNISEGYAMGWYRQAPGKEREFVAAISYGAITNYADSVKGRFTISRDNAKNTVYLQMNSLKPEDTAVYYCAALAYLVDDYRYWGQGTQVTVSS

SEQ ID NO: 22422 - protein, 122 aa, Artificial Sequence
  Chemically Synthesized
QVQLQESGGGLVQAGGSLRLSCAASGTISAGDSMGWYRQAPGKERELVAGISPGSNTNYADSVKGRFTISRDNAKNTVYLQMNSLKPEDTAVYYCAVPWDWETWSKTGHYYWGQGTQVTVSS

SEQ ID NO: 22423 - protein, 118 aa, Artificial Sequence
  Chemically Synthesized
QVQLQESGGGLVQAGGSLRLSCAASGNIFYWSLMGWYRQAPGKERELVAGINVGGSTYYADSVKGRFTISRDNAKNTVYLQMNSLKPEDTAVYYCAVRHYYRFDFQYWGQGTQVTVSS

SEQ ID NO: 22424 - protein, 120 aa, Artificial Sequence
  Chemically Synthesized
QVQLQESGGGLVQAGGSLRLSCAASGNISDPTIMGWYRQAPGKERELVAGISAGSTTYYADSVKGRFTISRDNAKNTVYLQMNSLKPEDTAVYYCAALRRSAFSRRYYYWGQGTQVTVSS

SEQ ID NO: 22425 - protein, 121 aa, Artificial Sequence
  Chemically Synthesized
QVQLQESGGGLVQAGGSLRLSCAASGTISASVMGWYRQAPGKERELVASITGGSSTNYADSVKGRFTISRDNAKNTVYLQMNSLKPEDTAVYYCAAAYRWYFTSGYDLDYWGQGTQVTVSS

SEQ ID NO: 22426 - protein, 118 aa, Artificial Sequence
  Chemically Synthesized
QVQLQESGGGLVQAGGSLRLSCAASGTISEDWVMGWYRQAPGKERELVASIGSGGITYYADSVKGRFTISRDNAKNTVYLQMNSLKPEDTAVYYCAVGEWGIIRHDYWGQGTQVTVSS

SEQ ID NO: 22427 - protein, 122 aa, Artificial Sequence
  Chemically Synthesized
QVQLQESGGGLVQAGGSLRLSCAASGTISGNSVMGWYRQAPGKERELVATITTGGSTYYADSVKGRFTISRDNAKNTVYLQMNSLKPEDTAVYYCAAEYLDDDLWYPDFLYWGQGTQVTVSS

SEQ ID NO: 22428 - protein, 117 aa, Artificial Sequence
  Chemically Synthesized
QVQLQESGGGLVQAGGSLRLSCAASGSISSPDIMGWYRQAPGKEREFVASIGRGGITNYADSVKGRFTISRDNAKNTVYLQMNSLKPEDTAVYYCAAYDGFQDHAYWGQGTQVTVSS

SEQ ID NO: 22429 - protein, 122 aa, Artificial Sequence
  Chemically Synthesized
QVQLQESGGGLVQAGGSLRLSCAASGSIFYYGYMGWYRQAPGKEREFVAAIGLGGNTNYADSVKGRFTISRDNAKNTVYLQMNSLKPEDTAVYYCAVHLTPYNPIPYRHAYWGQGTQVTVSS

SEQ ID NO: 22430 - protein, 118 aa, Artificial Sequence
  Chemically Synthesized
QVQLQESGGGLVQAGGSLRLSCAASGSIFRQGVMGWYRQAPGKERELVAAIGDGGNTYYADSVKGRFTISRDNAKNTVYLQMNSLKPEDTAVYYCAVYVYVNGLFGYWGQGTQVTVSS

SEQ ID NO: 22431 - protein, 126 aa, Artificial Sequence
  Chemically Synthesized
QVQLQESGGGLVQAGGSLRLSCAASGNISEREDMGWYRQAPGKEREFVAGIGRGATTYYADSVKGRFTISRDNAKNTVYLQMNSLKPEDTAVYYCAVTKITAFTSTDYRFPYHTYWGQGTQVTVSS

SEQ ID NO: 22432 - protein, 126 aa, Artificial Sequence
  Chemically Synthesized
QVQLQESGGGLVQAGGSLRLSCAASGSIFPLYYMGWYRQAPGKEREFVATITYGTTTYYADSVKGRFTISRDNAKNTVYLQMNSLKPEDTAVYYCAAYTWHLFDSYRPPLYRYPYWGQGTQVTVSS

SEQ ID NO: 22433 - protein, 118 aa, Artificial Sequence
  Chemically Synthesized
QVQLQESGGGLVQAGGSLRLSCAASGYIFRTAQMGWYRQAPGKERELVASISGGAITNYADSVKGRFTISRDNAKNTVYLQMNSLKPEDTAVYYCAAGDYPYIVLQYWGQGTQVTVSS

SEQ ID NO: 22434 - protein, 118 aa, Artificial Sequence
  Chemically Synthesized
QVQLQESGGGLVQAGGSLRLSCAASGTIFARVVMGWYRQAPGKEREFVAGITTGTITNYADSVKGRFTISRDNAKNTVYLQMNSLKPEDTAVYYCAAYVTYLTFHGYWGQGTQVTVSS

SEQ ID NO: 22435 - protein, 122 aa, Artificial Sequence
  Chemically Synthesized
QVQLQESGGGLVQAGGSLRLSCAASGYISEGHVMGWYRQAPGKEREFVAGINGGSNTNYADSVKGRFTISRDNAKNTVYLQMNSLKPEDTAVYYCAALEADEGADDDGYDYWGQGTQVTVSS

SEQ ID NO: 22436 - protein, 117 aa, Artificial Sequence
  Chemically Synthesized
QVQLQESGGGLVQAGGSLRLSCAASGTIFYQSMGWYRQAPGKEREFVAGIGEGGSTYYADSVKGRFTISRDNAKNTVYLQMNSLKPEDTAVYYCAVGGRPDVYYYYWGQGTQVTVSS

SEQ ID NO: 22437 - protein, 121 aa, Artificial Sequence
  Chemically Synthesized
QVQLQESGGGLVQAGGSLRLSCAASGTIFYYTSMGWYRQAPGKEREFVATISYGTNTYYADSVKGRFTISRDNAKNTVYLQMNSLKPEDTAVYYCAAHTELSRGMLMFIYWGQGTQVTVSS

SEQ ID NO: 22438 - protein, 122 aa, Artificial Sequence
  Chemically Synthesized
QVQLQESGGGLVQAGGSLRLSCAASGNIFPTSSMGWYRQAPGKEREFVAGIAGGATTYYADSVKGRFTISRDNAKNTVYLQMNSLKPEDTAVYYCAANTGSYLPNDPYHGYWGQGTQVTVSS

SEQ ID NO: 22439 - protein, 118 aa, Artificial Sequence
  Chemically Synthesized
QVQLQESGGGLVQAGGSLRLSCAASGYISYVGIMGWYRQAPGKEREFVAAIGTGSSTNYADSVKGRFTISRDNAKNTVYLQMNSLKPEDTAVYYCAAYWRGQDSHSYWGQGTQVTVSS

SEQ ID NO: 22440 - protein, 118 aa, Artificial Sequence
  Chemically Synthesized
QVQLQESGGGLVQAGGSLRLSCAASGNISARNVMGWYRQAPGKERELVASIGVGGNTYYADSVKGRFTISRDNAKNTVYLQMNSLKPEDTAVYYCAADEGLGDGHTYWGQGTQVTVSS

SEQ ID NO: 22441 - protein, 121 aa, Artificial Sequence
  Chemically Synthesized
QVQLQESGGGLVQAGGSLRLSCAASGSILVRTMGWYRQAPGKERELVAAIGAGSITNYADSVKGRFTISRDNAKNTVYLQMNSLKPEDTAVYYCAVGLGRVFPAFVQLGYWGQGTQVTVSS

SEQ ID NO: 22442 - protein, 118 aa, Artificial Sequence
  Chemically Synthesized
QVQLQESGGGLVQAGGSLRLSCAASGNIFAPGYMGWYRQAPGKEREFVAAITQGSSTYYADSVKGRFTISRDNAKNTVYLQMNSLKPEDTAVYYCAVFNWAESSYNYWGQGTQVTVSS

SEQ ID NO: 22443 - protein, 122 aa, Artificial Sequence
  Chemically Synthesized
QVQLQESGGGLVQAGGSLRLSCAASGSISSASEMGWYRQAPGKERELVASIAAGASTYYADSVKGRFTISRDNAKNTVYLQMNSLKPEDTAVYYCAVDDTLAYYAQRLYGYWGQGTQVTVSS

SEQ ID NO: 22444 - protein, 126 aa, Artificial Sequence
  Chemically Synthesized
QVQLQESGGGLVQAGGSLRLSCAASGNISVPRTMGWYRQAPGKEREFVAGISDGGSTNYADSVKGRFTISRDNAKNTVYLQMNSLKPEDTAVYYCAAFDDGQHWVDIPYEDIFGYWGQGTQVTVSS

SEQ ID NO: 22445 - protein, 118 aa, Artificial Sequence
  Chemically Synthesized
QVQLQESGGGLVQAGGSLRLSCAASGNIFQVFLMGWYRQAPGKEREFVAGITKGGTTYYADSVKGRFTISRDNAKNTVYLQMNSLKPEDTAVYYCAVLDYRPRGYDYWGQGTQVTVSS

SEQ ID NO: 22446 - protein, 122 aa, Artificial Sequence
  Chemically Synthesized
QVQLQESGGGLVQAGGSLRLSCAASGNISDSPLMGWYRQAPGKERELVASITYGASTYYADSVKGRFTISRDNAKNTVYLQMNSLKPEDTAVYYCAAGSSDTFRYDYYHYYWGQGTQVTVSS

SEQ ID NO: 22447 - protein, 118 aa, Artificial Sequence
  Chemically Synthesized
QVQLQESGGGLVQAGGSLRLSCAASGNISRSSFMGWYRQAPGKEREFVAAITTGGTTYYADSVKGRFTISRDNAKNTVYLQMNSLKPEDTAVYYCAVYYGARDSFDYWGQGTQVTVSS

SEQ ID NO: 22448 - protein, 118 aa, Artificial Sequence
  Chemically Synthesized
QVQLQESGGGLVQAGGSLRLSCAASGSISDGSSMGWYRQAPGKERELVASIDYGTTTYYADSVKGRFTISRDNAKNTVYLQMNSLKPEDTAVYYCAVVAVEGGRFTYWGQGTQVTVSS

SEQ ID NO: 22449 - protein, 118 aa, Artificial Sequence
  Chemically Synthesized
QVQLQESGGGLVQAGGSLRLSCAASGNIFVGSDMGWYRQAPGKEREFVAGITGGTITYYADSVKGRFTISRDNAKNTVYLQMNSLKPEDTAVYYCAALDPRDIDHDYWGQGTQVTVSS

SEQ ID NO: 22450 - protein, 117 aa, Artificial Sequence
  Chemically Synthesized
QVQLQESGGGLVQAGGSLRLSCAASGNIFFDVPMGWYRQAPGKERELVASITSGGSTNYADSVKGRFTISRDNAKNTVYLQMNSLKPEDTAVYYCALLRTFRRGLYWGQGTQVTVSS

SEQ ID NO: 22451 - protein, 117 aa, Artificial Sequence
  Chemically Synthesized
QVQLQESGGGLVQAGGSLRLSCAASGNISEYSEMGWYRQAPGKERELVAGINSGAITYYADSVKGRFTISRDNAKNTVYLQMNSLKPEDTAVYYCAVPLGGAYYFYWGQGTQVTVSS

SEQ ID NO: 22452 - protein, 121 aa, Artificial Sequence
  Chemically Synthesized
QVQLQESGGGLVQAGGSLRLSCAASGNIFADVMGWYRQAPGKEREFVAGIAGGGTTNYADSVKGRFTISRDNAKNTVYLQMNSLKPEDTAVYYCAVSPSNIYFFFTSFSYWGQGTQVTVSS

SEQ ID NO: 22453 - protein, 115 aa, Artificial Sequence
  Chemically Synthesized
QVQLQESGGGLVQAGGSLRLSCAASGTISGSSYMGWYRQAPGKERELVVIPYADSVKGRFTISRDNAKNTVYLQMNSLKPEDTAVYYCAADILSDDKWHTDLVYWGQGTQVTVSS

SEQ ID NO: 22454 - protein, 125 aa, Artificial Sequence
  Chemically Synthesized
QVQLQESGGGLVQAGGSLRLSCAASGYIFAHIMGWYRQAPGKEREFVAAIGDGTSTYYADSVKGRFTISRDNAKNTVYLQMNSLKPEDTAVYYCAVPIDGRPLFSKFLAGFLGYWGQGTQVTVSS

SEQ ID NO: 22455 - protein, 118 aa, Artificial Sequence
  Chemically Synthesized
QVQLQESGGGLVQAGGSLRLSCAASGNIFGYVLMGWYRQAPGKEREFVAGIDFGSTTYYADSVKGRFTISRDNAKNTVYLQMNSLKPEDTAVYYCAVYDYPEDGLDYWGQGTQVTVSS

SEQ ID NO: 22456 - protein, 118 aa, Artificial Sequence
  Chemically Synthesized
QVQLQESGGGLVQAGGSLRLSCAASGYISQAYYMGWYRQAPGKERELVAAIGSGSSTYYADSVKGRFTISRDNAKNTVYLQMNSLKPEDTAVYYCAVEWQYTTRFEYWGQGTQVTVSS

SEQ ID NO: 22457 - protein, 117 aa, Artificial Sequence
  Chemically Synthesized
QVQLQESGGGLVQAGGSLRLSCAASGLFLTLLMGWYRQAPGKERELVAGISYGANTNYADSVKGRFTISRDNAKNTVYLQMNSLKPEDTAVYYCAVADPDVTSLDYWGQGTQVTVSS

SEQ ID NO: 22458 - protein, 121 aa, Artificial Sequence
  Chemically Synthesized
QVQLQESGGGLVQAGGSLRLSCAASGYISYDTWYMGWYRQAPGKERELVAAITSVLLPYADSVKGRFTISRDNAKNTVYLQMNSLKPEDTAVYYCAAYAPYDPIRLLVMYWGQGTQVTVSS

SEQ ID NO: 22459 - protein, 117 aa, Artificial Sequence
  Chemically Synthesized
QVQLQESGGGLVQAGGSLRLSCAASGTISLPDYMGWYRQAPGKERELVATIGLGSNTYYADSVKGRFTISRDNAKNTVYLQMNSLKPEDTAVYYCAAYYTIYVFYYWGQGTQVTVSS

SEQ ID NO: 22460 - protein, 118 aa, Artificial Sequence
  Chemically Synthesized
QVQLQESGGGLVQAGGSLRLSCAASGTISNWDYMGWYRQAPGKERELVAGITDGASTNYADSVKGRFTISRDNAKNTVYLQMNSLKPEDTAVYYCAVHDVTYGYLTYWGQGTQVTVSS

SEQ ID NO: 22461 - protein, 118 aa, Artificial Sequence
  Chemically Synthesized
QVQLQESGGGLVQAGGSLRLSCAASGSIFGDVYMGWYRQAPGKERELVAAISGGAITYYADSVKGRFTISRDNAKNTVYLQMNSLKPEDTAVYYCAVYDVDYSGLAYWGQGTQVTVSS

SEQ ID NO: 22462 - protein, 125 aa, Artificial Sequence
  Chemically Synthesized
QVQLQESGGGLVQAGGSLRLSCAASGTILRLTMGWYRQAPGKERELVASINSGSNTYYADSVKGRFTISRDNAKNTVYLQMNSLKPEDTAVYYCAATDGYVTWKDTVQSYPHGYWGQGTQVTVSS

SEQ ID NO: 22463 - protein, 117 aa, Artificial Sequence
  Chemically Synthesized
QVQLQESGGGLVQAGGSLRLSCAASGYISAVSMGWYRQAPGKEREFVATIGRGTITYYADSVKGRFTISRDNAKNTVYLQMNSLKPEDTAVYYCAVRYLVVTPFDYWGQGTQVTVSS

SEQ ID NO: 22464 - protein, 126 aa, Artificial Sequence
  Chemically Synthesized
QVQLQESGGGLVQAGGSLRLSCAASGNISDYTPMGWYRQAPGKERELVAGITYGSNTYYADSVKGRFTISRDNAKNTVYLQMNSLKPEDTAVYYCAVYDSDNGGTGYDLDSDFRYWGQGTQVTVSS

SEQ ID NO: 22465 - protein, 112 aa, Artificial Sequence
  Chemically Synthesized
QVQLQESGGGLVQAGGSLRLSCAASGNIFPLRDMGWYRQAPGKEREFVAAIAQGGSTNYADSVKGRFTISRDNAKNTVYLQMNSLKPEDTAVYYCAVRGWYWGQGTQVTVSS

SEQ ID NO: 22466 - protein, 126 aa, Artificial Sequence
  Chemically Synthesized
QVQLQESGGGLVQAGGSLRLSCAASGYISSLNYMGWYRQAPGKERELVAAIGDGATTYYADSVKGRFTISRDNAKNTVYLQMNSLKPEDTAVYYCAANYWYPPDVLHDLHGEHAYWGQGTQVTVSS

SEQ ID NO: 22467 - protein, 118 aa, Artificial Sequence
  Chemically Synthesized
QVQLQESGGGLVQAGGSLRLSCAASGYIFGALYMGWYRQAPGKERELVATIGKGSNTNYADSVKGRFTISRDNAKNTVYLQMNSLKPEDTAVYYCAAYVDNYGDFAYWGQGTQVTVSS

SEQ ID NO: 22468 - protein, 117 aa, Artificial Sequence
  Chemically Synthesized
QVQLQESGGGLVQAGGSLRLSCAASGNISRSSTMGWYRQAPGKERELVAGITSGANTNYADSVKGRFTISRDNAKNTVYLQMNSLKPEDTAVYYCAAGVLTKTRIYWGQGTQVTVSS

SEQ ID NO: 22469 - protein, 118 aa, Artificial Sequence
  Chemically Synthesized
QVQLQESGGGLVQAGGSLRLSCAASGNISVDITMGWYRQAPGKEREFVASINNGATTYYADSVKGRFTISRDNAKNTVYLQMNSLKPEDTAVYYCAVYSDGSVYHHYWGQGTQVTVSS

SEQ ID NO: 22470 - protein, 122 aa, Artificial Sequence
  Chemically Synthesized
QVQLQESGGGLVQAGGSLRLSCAASGTISYYPTMGWYRQAPGKERELVAAISIGSITNYADSVKGRFTISRDNAKNTVYLQMNSLKPEDTAVYYCAAGSTRYLAVGGQYHYWGQGTQVTVSS

SEQ ID NO: 22471 - protein, 125 aa, Artificial Sequence
  Chemically Synthesized
QVQLQESGGGLVQAGGSLRLSCAASGSIFDLTGMGWYRQAPGKERELVASIGPGASTNYADSVKGRFTISRDNAKNTVYLQMNSLKPEDTAVYYCAVLHTKRPGYQSVVTTVFYWGQGTQVTVSS

SEQ ID NO: 22472 - protein, 118 aa, Artificial Sequence
  Chemically Synthesized
QVQLQESGGGLVQAGGSLRLSCAASGNISVGWYMGWYRQAPGKERELVAGIADGGTTYYADSVKGRFTISRDNAKNTVYLQMNSLKPEDTAVYYCAVLPFYRAGYIYWGQGTQVTVSS

SEQ ID NO: 22473 - protein, 121 aa, Artificial Sequence
  Chemically Synthesized
QVQLQESGGGLVQAGGSLRLSCAASGNISDPASMGWYRQAPGKEREFVAGISYGSIPYADSVKGRFTISRDNAKNTVYLQMNSLKPEDTAVYYCAVDDYFYSHRHFPHGYWGQGTQVTVSS

SEQ ID NO: 22474 - protein, 110 aa, Artificial Sequence
  Chemically Synthesized
QVQLQESGGGLVQAGGSLRLSCAASGTIFLRTMGWYRQAPGKEREFVATIDDGTTTYYADSVKGRFTISRDNAKNTVYLQMNSLKPEDTAVYYCAVYAYWGQGTQVTVSS

SEQ ID NO: 22475 - protein, 110 aa, Artificial Sequence
  Chemically Synthesized
QVQLQESGGGLVQAGGSLRLSCAASGTISYHVYMGWYRQAPGKEREFVAAIADGGSTYYADSVKGRFTISRDNAKNTVYLQMNSLKPEDTAVYYCATIYWGQGTQVTVSS

SEQ ID NO: 22476 - protein, 122 aa, Artificial Sequence
  Chemically Synthesized
QVQLQESGGGLVQAGGSLRLSCAASGTIFYPYSMGWYRQAPGKEREFVATIDIGTITYYADSVKGRFTISRDNAKNTVYLQMNSLKPEDTAVYYCAVWTTRNDLWLDAHGYWGQGTQVTVSS

SEQ ID NO: 22477 - protein, 126 aa, Artificial Sequence
  Chemically Synthesized
QVQLQESGGGLVQAGGSLRLSCAASGYIFFLRYMGWYRQAPGKERELVAAINEGGSTNYADSVKGRFTISRDNAKNTVYLQMNSLKPEDTAVYYCAALYEYTDLQSQYYFTFYGYWGQGTQVTVSS

SEQ ID NO: 22478 - protein, 118 aa, Artificial Sequence
  Chemically Synthesized
QVQLQESGGGLVQAGGSLRLSCAASGYISGGDSMGWYRQAPGKERELVATITVGSNTNYADSVKGRFTISRDNAKNTVYLQMNSLKPEDTAVYYCAALSSVRYGLPYWGQGTQVTVSS

SEQ ID NO: 22479 - protein, 118 aa, Artificial Sequence
  Chemically Synthesized
QVQLQESGGGLVQAGGSLRLSCAASGTISYAWFMGWYRQAPGKERELVATINYGTNTNYADSVKGRFTISRDNAKNTVYLQMNSLKPEDTAVYYCAAGYYYVYSFQYWGQGTQVTVSS

SEQ ID NO: 22480 - protein, 125 aa, Artificial Sequence
  Chemically Synthesized
QVQLQESGGGLVQAGGSLRLSCAASGNIFDRPYMGWYRQAPGKERELVAGINQGSTTNYADSVKGRFTISRDNAKNTVYLQMNSLKPEDTAVYYCAAYDLSSLTTLNCVFTVLYWGQGTQVTVSS

SEQ ID NO: 22481 - protein, 117 aa, Artificial Sequence
  Chemically Synthesized
QVQLQESGGGLVQAGGSLRLSCAASGTISDREQMGWYRQAPGKEREFVAAINRGASTYYADSVKGRFTISRDNAKNTVYLQMNSLKPEDTAVYYCAVDAQESCTLYWGQGTQVTVSS

SEQ ID NO: 22482 - protein, 126 aa, Artificial Sequence
  Chemically Synthesized
QVQLQESGGGLVQAGGSLRLSCAASGSIFVALSMGWYRQAPGKEREFVAGIGDGSNTYYADSVKGRFTISRDNAKNTVYLQMNSLKPEDTAVYYCAAYLDVVDDPYWLVKVSHEYWGQGTQVTVSS

SEQ ID NO: 22483 - protein, 117 aa, Artificial Sequence
  Chemically Synthesized
QVQLQESGGGLVQAGGSLRLSCAASGYIFYQYLMGWYRQAPGKERELVASIDHGGNTNYADSVKGRFTISRDNAKNTVYLQMNSLKPEDTAVYYCAVLTLVLFTMYWGQGTQVTVSS

SEQ ID NO: 22484 - protein, 118 aa, Artificial Sequence
  Chemically Synthesized
QVQLQESGGGLVQAGGSLRLSCAASGSIFNRYYMGWYRQAPGKERELVAAISWGGSTYYADSVKGRFTISRDNAKNTVYLQMNSLKPEDTAVYYCAARRQYGGLLRYWGQGTQVTVSS

SEQ ID NO: 22485 - protein, 121 aa, Artificial Sequence
  Chemically Synthesized
QVQLQESGGGLVQAGGSLRLSCAASGTIFFILRMGWYRQAPGKEREFVATISGGAITNYADSVKGRFTISRDNAKNTVYLQMNSLKPEDTAVYYCAVSYYGPAPEQAHGYWGQGTQVTVSS

SEQ ID NO: 22486 - protein, 119 aa, Artificial Sequence
  Chemically Synthesized
QVQLQESGGGLVQAGGSLRLSCAASGYIFGDTCMGWYRQAPGKEREFVATIAEGGTTYYADSVKGRFTISRDNAKNTVYLQMNSLKPEDTAVYYCAVLTTTTTFTFIYWGQGTQVTVSS

SEQ ID NO: 22487 - protein, 126 aa, Artificial Sequence
  Chemically Synthesized
QVQLQESGGGLVQAGGSLRLSCAASGNISTDVYMGWYRQAPGKEREFVASISDGGNTNYADSVKGRFTISRDNAKNTVYLQMNSLKPEDTAVYYCAAYYVDDLESLPYVQYSLYYWGQGTQVTVSS

SEQ ID NO: 22488 - protein, 122 aa, Artificial Sequence
  Chemically Synthesized
QVQLQESGGGLVQAGGSLRLSCAASGSIFYVDYMGWYRQAPGKEREFVASIGIGGTTYYADSVKGRFTISRDNAKNTVYLQMNSLKPEDTAVYYCAADDPIQRYSYELYSYWGQGTQVTVSS

SEQ ID NO: 22489 - protein, 118 aa, Artificial Sequence
  Chemically Synthesized
QVQLQESGGGLVQAGGSLRLSCAASGNIFGPYGMGWYRQAPGKERELVAAIDAGSSTYYADSVKGRFTISRDNAKNTVYLQMNSLKPEDTAVYYCAAVYRTDLNLAYWGQGTQVTVSS

SEQ ID NO: 22490 - protein, 125 aa, Artificial Sequence
  Chemically Synthesized
QVQLQESGGGLVQAGGSLRLSCAASGSISDRTYMGWYRQAPGKEREFVAGITSVLLPYADSVKGRFTISRDNAKNTVYLQMNSLKPEDTAVYYCAAYYGDLYDGQGNTGYGHVYWGQGTQVTVSS

SEQ ID NO: 22491 - protein, 118 aa, Artificial Sequence
  Chemically Synthesized
QVQLQESGGGLVQAGGSLRLSCAASGTISAGSEMGWYRQAPGKEREFVAAISYGTNTYYADSVKGRFTISRDNAKNTVYLQMNSLKPEDTAVYYCAVPRPLTAQYRYWGQGTQVTVSS

SEQ ID NO: 22492 - protein, 122 aa, Artificial Sequence
  Chemically Synthesized
QVQLQESGGGLVQAGGSLRLSCAASGYISLIGNMGWYRQAPGKEREFVASIARGAITYYADSVKGRFTISRDNAKNTVYLQMNSLKPEDTAVYYCAAYVVPEASDRRIHYYWGQGTQVTVSS

SEQ ID NO: 22493 - protein, 118 aa, Artificial Sequence
  Chemically Synthesized
QVQLQESGGGLVQAGGSLRLSCAASGTIFQSEYMGWYRQAPGKEREFVATIDYGSTTYYADSVKGRFTISRDNAKNTVYLQMNSLKPEDTAVYYCAVYYTAYDPLYYWGQGTQVTVSS

SEQ ID NO: 22494 - protein, 118 aa, Artificial Sequence
  Chemically Synthesized
QVQLQESGGGLVQAGGSLRLSCAASGNIFTDFTMGWYRQAPGKERELVASIDHGGNTNYADSVKGRFTISRDNAKNTVYLQMNSLKPEDTAVYYCAVGYVSSYPHPYWGQGTQVTVSS

SEQ ID NO: 22495 - protein, 110 aa, Artificial Sequence
  Chemically Synthesized
QVQLQESGGGLVQAGGSLRLSCAASGSISDYPMGWYRQAPGKERELVAGISAGGSTNYADSVKGRFTISRDNAKNTVYLQMNSLKPEDTAVYYCAVGIYWGQGTQVTVSS

SEQ ID NO: 22496 - protein, 115 aa, Artificial Sequence
  Chemically Synthesized
QVQLQESGGGLVQAGGSLRLSCAASGSISRPNYMGWYRQAPGKEREFVASIDDGGTTYYADSVKGRFTISRDNAKNTVYLQMNSLKPEDTAVYYCAVYGFHLSYWGQGTQVTVSS

SEQ ID NO: 22497 - protein, 118 aa, Artificial Sequence
  Chemically Synthesized
QVQLQESGGGLVQAGGSLRLSCAASGSISAESYMGWYRQAPGKEREFVAAINRGSNTYYADSVKGRFTISRDNAKNTVYLQMNSLKPEDTAVYYCAVTVARPYWLVYWGQGTQVTVSS

SEQ ID NO: 22498 - protein, 122 aa, Artificial Sequence
  Chemically Synthesized
QVQLQESGGGLVQAGGSLRLSCAASGSISSPDYMGWYRQAPGKERELVAGIAKGASTNYADSVKGRFTISRDNAKNTVYLQMNSLKPEDTAVYYCAVGYRSSDDLSDYHHYWGQGTQVTVSS

SEQ ID NO: 22499 - protein, 117 aa, Artificial Sequence
  Chemically Synthesized
QVQLQESGGGLVQAGGSLRLSCAASGSIFLPSLMGWYRQAPGKEREFVASITAGTITYYADSVKGRFTISRDNAKNTVYLQMNSLKPEDTAVYYCAVDYSLTSLLYWGQGTQVTVSS

SEQ ID NO: 22500 - protein, 121 aa, Artificial Sequence
  Chemically Synthesized
QVQLQESGGGLVQAGGSLRLSCAASGNISDWVMGWYRQAPGKERELVATIGNGGSTYYADSVKGRFTISRDNAKNTVYLQMNSLKPEDTAVYYCAAFVAYYRYSLYAHRYWGQGTQVTVSS

SEQ ID NO: 22501 - protein, 118 aa, Artificial Sequence
  Chemically Synthesized
QVQLQESGGGLVQAGGSLRLSCAASGTISQYPYMGWYRQAPGKERELVAGISAGSTTNYADSVKGRFTISRDNAKNTVYLQMNSLKPEDTAVYYCAVVIPSLYVFVYWGQGTQVTVSS

SEQ ID NO: 22502 - protein, 117 aa, Artificial Sequence
  Chemically Synthesized
QVQLQESGGGLVQAGGSLRLSCAASGNIFYYYMGWYRQAPGKERELVATINAGTSTYYADSVKGRFTISRDNAKNTVYLQMNSLKPEDTAVYYCAVYDFNTRYLPYWGQGTQVTVSS

SEQ ID NO: 22503 - protein, 122 aa, Artificial Sequence
  Chemically Synthesized
QVQLQESGGGLVQAGGSLRLSCAASGNIFRAYGMGWYRQAPGKEREFVAAISQGTNTNYADSVKGRFTISRDNAKNTVYLQMNSLKPEDTAVYYCAAYVRDRAVYPYYYYYWGQGTQVTVSS

SEQ ID NO: 22504 - protein, 118 aa, Artificial Sequence
  Chemically Synthesized
QVQLQESGGGLVQAGGSLRLSCAASGNIFTRVLMGWYRQAPGKERELVATIDSGTSTYYADSVKGRFTISRDNAKNTVYLQMNSLKPEDTAVYYCAAGATWGYPLLYWGQGTQVTVSS

SEQ ID NO: 22505 - protein, 118 aa, Artificial Sequence
  Chemically Synthesized
QVQLQESGGGLVQAGGSLRLSCAASGYIFTPTPMGWYRQAPGKEREFVAAIGFGASTYYADSVKGRFTISRDNAKNTVYLQMNSLKPEDTAVYYCAVYWLNSYRLAYWGQGTQVTVSS

SEQ ID NO: 22506 - protein, 118 aa, Artificial Sequence
  Chemically Synthesized
QVQLQESGGGLVQAGGSLRLSCAASGNIFTASYMGWYRQAPGKERELVATIDTGGSTYYADSVKGRFTISRDNAKNTVYLQMNSLKPEDTAVYYCAVLYNYTYDYGYWGQGTQVTVSS

SEQ ID NO: 22507 - protein, 123 aa, Artificial Sequence
  Chemically Synthesized
QVQLQESGGGLVQAGGSLRLSCAASGYISVPLSMGWYRQAPGKERELVAAIAYDGATTYYADSVKGRFTISRDNAKNTVYLQMNSLKPEDTAVYYCAARRNTYRPYVNRLRYWGQGTQVTVSS

SEQ ID NO: 22508 - protein, 118 aa, Artificial Sequence
  Chemically Synthesized
QVQLQESGGGLVQAGGSLRLSCAASGYISDTGLMGWYRQAPGKERELVAGIGYGSSTNYADSVKGRFTISRDNAKNTVYLQMNSLKPEDTAVYYCAAWILFLNDHYYWGQGTQVTVSS

SEQ ID NO: 22509 - protein, 123 aa, Artificial Sequence
  Chemically Synthesized
QVQLQESGGGLVQAGGSLRLSCAASGTIFHEYFMGWYRQAPGKERELVAGINYGSITYYADSVKGRFTISRDNAKNTVYLQMNSLKPEDTAVYYCAVLHYASYRKEHDDHRYWGQGTQVTVSS

SEQ ID NO: 22510 - protein, 117 aa, Artificial Sequence
  Chemically Synthesized
QVQLQESGGGLVQAGGSLRLSCAASGYISPVVKMGWYRQAPGKERELLPLLVRYYYQYADSVKGRFTISRDNAKNTVYLQMNSLKPEDTAVYYCAAGDALQGYHDYWGQGTQVTVSS

SEQ ID NO: 22511 - protein, 118 aa, Artificial Sequence
  Chemically Synthesized
QVQLQESGGGLVQAGGSLRLSCAASGTISRVRDMGWYRQAPGKERELVAAIGPGASTYYADSVKGRFTISRDNAKNTVYLQMNSLKPEDTAVYYCAALLPTYGTHYYWGQGTQVTVSS

SEQ ID NO: 22512 - protein, 118 aa, Artificial Sequence
  Chemically Synthesized
QVQLQESGGGLVQAGGSLRLSCAASGNIFADADMGWYRQAPGKERELVAGIDSGTSTNYADSVKGRFTISRDNAKNTVYLQMNSLKPEDTAVYYCAAGRIAIDRFRYWGQGTQVTVSS

SEQ ID NO: 22513 - protein, 118 aa, Artificial Sequence
  Chemically Synthesized
QVQLQESGGGLVQAGGSLRLSCAASGNISGFYRMGWYRQAPGKEREFVASINYGSSTYYADSVKGRFTISRDNAKNTVYLQMNSLKPEDTAVYYCAAGGVRSVYYDYWGQGTQVTVSS

SEQ ID NO: 22514 - protein, 117 aa, Artificial Sequence
  Chemically Synthesized
QVQLQESGGGLVQAGGSLRLSCAASGYISPDYYMGWYRQAPGKERELVATINTGTITNYADSVKGRFTISRDNAKNTVYLQMNSLKPEDTAVYYCAVASSNVKLLYWGQGTQVTVSS

SEQ ID NO: 22515 - protein, 121 aa, Artificial Sequence
  Chemically Synthesized
QVQLQESGGGLVQAGGSLRLSCAASGNISASYYMGWYRQAPGKERELVASIAYGSNTNYADSVKGRFTISRDNAKNTVYLQMNSLKPEDTAVYYCAAGSLDYRGAVDSFYWGQGTQVTVSS

SEQ ID NO: 22516 - protein, 118 aa, Artificial Sequence
  Chemically Synthesized
QVQLQESGGGLVQAGGSLRLSCAASGSIFRGSVMGWYRQAPGKEREFVASIDGGAITYYADSVKGRFTISRDNAKNTVYLQMNSLKPEDTAVYYCAATTQPGGYYEYWGQGTQVTVSS

SEQ ID NO: 22517 - protein, 122 aa, Artificial Sequence
  Chemically Synthesized
QVQLQESGGGLVQAGGSLRLSCAASGTISTYPTMGWYRQAPGKEREFVAAIALGTNTYYADSVKGRFTISRDNAKNTVYLQMNSLKPEDTAVYYCAAKDRYAWGFRRRYGYWGQGTQVTVSS

SEQ ID NO: 22518 - protein, 117 aa, Artificial Sequence
  Chemically Synthesized
QVQLQESGGGLVQAGGSLRLSCAASGYIFDPYDMGWYRQAPGKERELVATIGAGTLPYADSVKGRFTISRDNAKNTVYLQMNSLKPEDTAVYYCAAYDYTLPGHGYWGQGTQVTVSS

SEQ ID NO: 22519 - protein, 116 aa, Artificial Sequence
  Chemically Synthesized
QVQLQESGGGLVQAGGSLRLSCAASGTIFYGQWMGWYRQAPGKEREFVAAINRGGNTYYADSVKGRFTISRDNAKNTVYLQMNSLKPEDTAVYYCAASTYDGYYYWGQGTQVTVSS

SEQ ID NO: 22520 - protein, 121 aa, Artificial Sequence
  Chemically Synthesized
QVQLQESGGGLVQAGGSLRLSCAASGNISSTWMGWYRQAPGKEREFVATIDRGASTNYADSVKGRFTISRDNAKNTVYLQMNSLKPEDTAVYYCAVYTWERTSETVYLDYWGQGTQVTVSS

SEQ ID NO: 22521 - protein, 122 aa, Artificial Sequence
  Chemically Synthesized
QVQLQESGGGLVQAGGSLRLSCAASGSISQDGSMGWYRQAPGKERELVAAISAGSNTYYADSVKGRFTISRDNAKNTVYLQMNSLKPEDTAVYYCAVVAVSEADAQYYHTYWGQGTQVTVSS

SEQ ID NO: 22522 - protein, 113 aa, Artificial Sequence
  Chemically Synthesized
QVQLQESGGGLVQAGGSLRLSCAASGYISRWDDMGWYRQAPGKEREFVASIDYGAITNYADSVKGRFTISRDNAKNTVYLQMNSLKPEDTAVYYCAVIWFYYWGQGTQVTVSS

SEQ ID NO: 22523 - protein, 122 aa, Artificial Sequence
  Chemically Synthesized
QVQLQESGGGLVQAGGSLRLSCAASGTISRVPAMGWYRQAPGKERELVASITRGAITNYADSVKGRFTISRDNAKNTVYLQMNSLKPEDTAVYYCAAVRVYHTLHDWVHSYWGQGTQVTVSS

SEQ ID NO: 22524 - protein, 118 aa, Artificial Sequence
  Chemically Synthesized
QVQLQESGGGLVQAGGSLRLSCAASGNIFGSLPMGWYRQAPGKEREFVATINAGGNTNYADSVKGRFTISRDNAKNTVYLQMNSLKPEDTAVYYCAVGGDIYGLHYYWGQGTQVTVSS

SEQ ID NO: 22525 - protein, 117 aa, Artificial Sequence
  Chemically Synthesized
QVQLQESGGGLVQAGGSLRLSCAASGYISGPFNMGWYRQAPGKEREFVAGITSVVLPYADSVKGRFTISRDNAKNTVYLQMNSLKPEDTAVYYCAAITTRFGDFSYWGQGTQVTVSS

SEQ ID NO: 22526 - protein, 126 aa, Artificial Sequence
  Chemically Synthesized
QVQLQESGGGLVQAGGSLRLSCAASGSISYTLYMGWYRQAPGKERELVATIGEGGITNYADSVKGRFTISRDNAKNTVYLQMNSLKPEDTAVYYCAASYYQWPHGGFAPYYLYPYWGQGTQVTVSS

SEQ ID NO: 22527 - protein, 123 aa, Artificial Sequence
  Chemically Synthesized
QVQLQESGGGLVQAGGSLRLSCAASGNIFGATYMGWYRQAPGKERELVAGINGGASTYYADSVKGRFTISRDNAKNTVYLQMNSLKPEDTAVYYCAANPESYPFTGNGTYPYWGQGTQVTVSS

SEQ ID NO: 22528 - protein, 126 aa, Artificial Sequence
  Chemically Synthesized
QVQLQESGGGLVQAGGSLRLSCAASGNISPVPKMGWYRQAPGKERELVATISGGAITYYADSVKGRFTISRDNAKNTVYLQMNSLKPEDTAVYYCAVLRLLGDEPYPDRYWGHQYWGQGTQVTVSS

SEQ ID NO: 22529 - protein, 121 aa, Artificial Sequence
  Chemically Synthesized
QVQLQESGGGLVQAGGSLRLSCAASGNISEGWGMGWYRQAPGKEREFVASIDGGTNTNYADSVKGRFTISRDNAKNTVYLQMNSLKPEDTAVYYCAVDGDQPTIAYVDHYWGQGTQVTVSS

SEQ ID NO: 22530 - protein, 118 aa, Artificial Sequence
  Chemically Synthesized
QVQLQESGGGLVQAGGSLRLSCAASGSISDDPIMGWYRQAPGKERELVASITAGGTTNYADSVKGRFTISRDNAKNTVYLQMNSLKPEDTAVYYCAVPWWRSPFFRYWGQGTQVTVSS

SEQ ID NO: 22531 - protein, 122 aa, Artificial Sequence
  Chemically Synthesized
QVQLQESGGGLVQAGGSLRLSCAASGNIFVVRYMGWYRQAPGKEREFVAGINYGTSTNYADSVKGRFTISRDNAKNTVYLQMNSLKPEDTAVYYCAANGKPRPTYYDDLDYWGQGTQVTVSS

SEQ ID NO: 22532 - protein, 122 aa, Artificial Sequence
  Chemically Synthesized
QVQLQESGGGLVQAGGSLRLSCAASGTIFGYSLMGWYRQAPGKERELVATISQGGITYYADSVKGRFTISRDNAKNTVYLQMNSLKPEDTAVYYCAVPYDRYRIDVSPYLYWGQGTQVTVSS

SEQ ID NO: 22533 - protein, 118 aa, Artificial Sequence
  Chemically Synthesized
QVQLQESGGGLVQAGGSLRLSCAASGSISWIDRMGWYRQAPGKERELVAAINRGSNTYYADSVKGRFTISRDNAKNTVYLQMNSLKPEDTAVYYCAAPQFTRYAFPYWGQGTQVTVSS

SEQ ID NO: 22534 - protein, 121 aa, Artificial Sequence
  Chemically Synthesized
QVQLQESGGGLVQAGGSLRLSCAASGNISLFYSMGWYRQAPGKERELVASIGSGTSTNYADSVKGRFTISRDNAKNTVYLQMNSLKPEDTAVYYCAATSYSAGVGVGDIYWGQGTQVTVSS

SEQ ID NO: 22535 - protein, 117 aa, Artificial Sequence
  Chemically Synthesized
QVQLQESGGGLVQAGGSLRLSCAASGIFLLTTMGWYRQAPGKEREFVASINSGASTNYADSVKGRFTISRDNAKNTVYLQMNSLKPEDTAVYYCAAKYRDGIYFDYWGQGTQVTVSS

SEQ ID NO: 22536 - protein, 118 aa, Artificial Sequence
  Chemically Synthesized
QVQLQESGGGLVQAGGSLRLSCAASGSISYLYTMGWYRQAPGKERELVASIAPGAITNYADSVKGRFTISRDNAKNTVYLQMNSLKPEDTAVYYCAVILAWIAYHVYWGQGTQVTVSS

SEQ ID NO: 22537 - protein, 122 aa, Artificial Sequence
  Chemically Synthesized
QVQLQESGGGLVQAGGSLRLSCAASGYISGWSGMGWYRQAPGKERELVAGITLGTSTYYADSVKGRFTISRDNAKNTVYLQMNSLKPEDTAVYYCAVNGDNKGLWRDLHAYWGQGTQVTVSS

SEQ ID NO: 22538 - protein, 122 aa, Artificial Sequence
  Chemically Synthesized
QVQLQESGGGLVQAGGSLRLSCAASGSIFYTSYMGWYRQAPGKEREFVAAIAQGGTTHYADSVKGRFTISRDNAKNTVYLQMNSLKPEDTAVYYCAAYIRGEVAFKYPYGYWGQGTQVTVSS

SEQ ID NO: 22539 - protein, 116 aa, Artificial Sequence
  Chemically Synthesized
QVQLQESGGGLVQAGGSLRLSCAASGSISYGGTMGWYRQAPGKEREFVASITDGAIPYADSVKGRFTISRDNAKNTVYLQMNSLKPEDTAVYYCAVTTTTYRLWYWGQGTQVTVSS

SEQ ID NO: 22540 - protein, 118 aa, Artificial Sequence
  Chemically Synthesized
QVQLQESGGGLVQAGGSLRLSCAASGNISYLSTMGWYRQAPGKERELVATISTGSNTNYADSVKGRFTISRDNAKNTVYLQMNSLKPEDTAVYYCAADVWPRQALGYWGQGTQVTVSS

SEQ ID NO: 22541 - protein, 118 aa, Artificial Sequence
  Chemically Synthesized
QVQLQESGGGLVQAGGSLRLSCAASGNIFISKRMGWYRQAPGKERELVATITYGGITNYADSVKGRFTISRDNAKNTVYLQMNSLKPEDTAVYYCAAGHWWHSLHLYWGQGTQVTVSS

SEQ ID NO: 22542 - protein, 123 aa, Artificial Sequence
  Chemically Synthesized
QVQLQESGGGLVQAGGSLRLSCAASGYISYSRRMGWYRQAPGKERELVAAIAWGGTTNYADSVKGRFTISRDNAKNTVYLQMNSLKPEDTAVYYCAVSNAKVTAHSYGTLSYWGQGTQVTVSS

SEQ ID NO: 22543 - protein, 112 aa, Artificial Sequence
  Chemically Synthesized
QVQLQESGGGLVQAGGSLRLSCAASGNIFWRTDMGWYRQAPGKERELVASIAPGGNTNYADSVKGRFTISRDNAKNTVYLQMNSLKPEDTAVYYCAVGDMYWGQGTQVTVSS

SEQ ID NO: 22544 - protein, 118 aa, Artificial Sequence
  Chemically Synthesized
QVQLQESGGGLVQAGGSLRLSCAASGSISYEADMGWYRQAPGKEREFVAGIDTGANTNYADSVKGRFTISRDNAKNTVYLQMNSLKPEDTAVYYCAVYSYRNPLHIYWGQGTQVTVSS

SEQ ID NO: 22545 - protein, 118 aa, Artificial Sequence
  Chemically Synthesized
QVQLQESGGGLVQAGGSLRLSCAASGYISFYRWMGWYRQAPGKEREFVASIGFGAITYYADSVKGRFTISRDNAKNTVYLQMNSLKPEDTAVYYCAALVAGVPYYAYWGQGTQVTVSS

SEQ ID NO: 22546 - protein, 120 aa, Artificial Sequence
  Chemically Synthesized
QVQLQESGGGLVQAGGSLRLSCAASGTISTYVDMGWYRQAPGKEREFVASINGGTNTYYADSVKGRFTISRDNAKNTVYLQMNSLKPEDTAVYYCAAYQGLEAYAPHYYWGQGTQVTVSS

SEQ ID NO: 22547 - protein, 121 aa, Artificial Sequence
  Chemically Synthesized
QVQLQESGGGLVQAGGSLRLSCAASGTIFGYLDMGWYRQAPGKERELVAAIDPGASTYYADSVKGRFTISRDNAKNTVYLQMNSLKPEDTAVYYCAATTGESLTTRVLLYWGQGTQVTVSS

SEQ ID NO: 22548 - protein, 118 aa, Artificial Sequence
  Chemically Synthesized
QVQLQESGGGLVQAGGSLRLSCAASGSIFSDRYMGWYRQAPGKERELVAAIATGGSTNYADSVKGRFTISRDNAKNTVYLQMNSLKPEDTAVYYCAADGLKIAFYDYWGQGTQVTVSS

SEQ ID NO: 22549 - protein, 122 aa, Artificial Sequence
  Chemically Synthesized
QVQLQESGGGLVQAGGSLRLSCAASGYISAKSYMGWYRQAPGKERELVAAIDYGTTTNYADSVKGRFTISRDNAKNTVYLQMNSLKPEDTAVYYCAALAVDDYYFPAVHSYWGQGTQVTVSS

SEQ ID NO: 22550 - protein, 122 aa, Artificial Sequence
  Chemically Synthesized
QVQLQESGGGLVQAGGSLRLSCAASGSIFPAGDMGWYRQAPGKERELVAAIAVGGITNYADSVKGRFTISRDNAKNTVYLQMNSLKPEDTAVYYCAVDATPWSDTYDFFSYWGQGTQVTVSS

SEQ ID NO: 22551 - protein, 117 aa, Artificial Sequence
  Chemically Synthesized
QVQLQESGGGLVQAGGSLRLSCAASGNIFAGFIMGWYRQAPGKERELVATITSGVLPYADSVKGRFTISRDNAKNTVYLQMNSLKPEDTAVYYCAVNIDVIPNHSYWGQGTQVTVSS

SEQ ID NO: 22552 - protein, 117 aa, Artificial Sequence
  Chemically Synthesized
QVQLQESGGGLVQAGGSLRLSCAASGTIFTRPTMGWYRQAPGKEREFVATMVLVLLPYADSVKGRFTISRDNAKNTVYLQMNSLKPEDTAVYYCAADGQAFDGLGYWGQGTQVTVSS

SEQ ID NO: 22553 - protein, 122 aa, Artificial Sequence
  Chemically Synthesized
QVQLQESGGGLVQAGGSLRLSCAASGTIFLYNYMGWYRQAPGKERELVAAIGGGTSTYYADSVKGRFTISRDNAKNTVYLQMNSLKPEDTAVYYCAVKPYYSYYPGARYAYWGQGTQVTVSS

SEQ ID NO: 22554 - protein, 118 aa, Artificial Sequence
  Chemically Synthesized
QVQLQESGGGLVQAGGSLRLSCAASGYIFAVYTMGWYRQAPGKEREFVASITSGTTTNYADSVKGRFTISRDNAKNTVYLQMNSLKPEDTAVYYCAARGVYPYAYHYWGQGTQVTVSS

SEQ ID NO: 22555 - protein, 122 aa, Artificial Sequence
  Chemically Synthesized
QVQLQESGGGLVQAGGSLRLSCAASGNIFDLVDMGWYRQAPGKEREFVAAINDGSTTYYADSVKGRFTISRDNAKNTVYLQMNSLKPEDTAVYYCAVGLYAWYYTVWRLGYWGQGTQVTVSS

SEQ ID NO: 22556 - protein, 122 aa, Artificial Sequence
  Chemically Synthesized
QVQLQESGGGLVQAGGSLRLSCAASGYIFPLGTMGWYRQAPGKERELVASIGTGGTTYYADSVKGRFTISRDNAKNTVYLQMNSLKPEDTAVYYCAVKIGIATYYYQDFDYWGQGTQVTVSS

SEQ ID NO: 22557 - protein, 117 aa, Artificial Sequence
  Chemically Synthesized
QVQLQESGGGLVQAGGSLRLSCAASGTIFSRRYMGWYRQAPGKEREFVAAITDGGTTNYADSVKGRFTISRDNAKNTVYLQMNSLKPEDTAVYYCAVLSLLLLTMYWGQGTQVTVSS

SEQ ID NO: 22558 - protein, 122 aa, Artificial Sequence
  Chemically Synthesized
QVQLQESGGGLVQAGGSLRLSCAASGTIFRPQGMGWYRQAPGKEREFVATIGNGTSTYYADSVKGRFTISRDNAKNTVYLQMNSLKPEDTAVYYCAVYPDADGYATKQHFYWGQGTQVTVSS

SEQ ID NO: 22559 - protein, 125 aa, Artificial Sequence
  Chemically Synthesized
QVQLQESGGGLVQAGGSLRLSCAASGSISYPVGMGWYRQAPGKERELVPLLLTVVLPYADSVKGRFTISRDNAKNTVYLQMNSLKPEDTAVYYCAVVGRDLGVGYYWLAPQHGYWGQGTQVTVSS

SEQ ID NO: 22560 - protein, 122 aa, Artificial Sequence
  Chemically Synthesized
QVQLQESGGGLVQAGGSLRLSCAASGYISRDVYMGWYRQAPGKERELVATIDFGANTNYADSVKGRFTISRDNAKNTVYLQMNSLKPEDTAVYYCAALSHNAGDTYTYVHYWGQGTQVTVSS

SEQ ID NO: 22561 - protein, 121 aa, Artificial Sequence
  Chemically Synthesized
QVQLQESGGGLVQAGGSLRLSCAASGTIFRAEMGWYRQAPGKEREFVAGIDWGSSTNYADSVKGRFTISRDNAKNTVYLQMNSLKPEDTAVYYCAVYGAWPYRLFGGHGYWGQGTQVTVSS

SEQ ID NO: 22562 - protein, 122 aa, Artificial Sequence
  Chemically Synthesized
QVQLQESGGGLVQAGGSLRLSCAASGYIFDVSYLMGWYRQAPGKERELVATLIRVLLPYADSVKGRFTISRDNAKNTVYLQMNSLKPEDTAVYYCAVADIQVDYQTGAHLYWGQGTQVTVSS

SEQ ID NO: 22563 - protein, 118 aa, Artificial Sequence
  Chemically Synthesized
QVQLQESGGGLVQAGGSLRLSCAASGSIFDGQAMGWYRQAPGKERELVAAINVGTNTYYADSVKGRFTISRDNAKNTVYLQMNSLKPEDTAVYYCAAYANVPLTFGYWGQGTQVTVSS

SEQ ID NO: 22564 - protein, 126 aa, Artificial Sequence
  Chemically Synthesized
QVQLQESGGGLVQAGGSLRLSCAASGSISAYYVMGWYRQAPGKERELVATITNGGITYYADSVKGRFTISRDNAKNTVYLQMNSLKPEDTAVYYCAVYYYDWPYDYYWLPDGFYYWGQGTQVTVSS

SEQ ID NO: 22565 - protein, 118 aa, Artificial Sequence
  Chemically Synthesized
QVQLQESGGGLVQAGGSLRLSCAASGTISVLSGMGWYRQAPGKERELVAGITYGTTTNYADSVKGRFTISRDNAKNTVYLQMNSLKPEDTAVYYCAAKYLTKDWLAYWGQGTQVTVSS

SEQ ID NO: 22566 - protein, 120 aa, Artificial Sequence
  Chemically Synthesized
QVQLQESGGGLVQAGGSLRLSCAASGTICSGYMGWYRQAPGKERELVARLVTVLVPYADSVKGRFTISRDNAKNTVYLQMNSLKPEDTAVYYCAVDVNVKDVAYQRHDYWGQGTQVTVSS

SEQ ID NO: 22567 - protein, 117 aa, Artificial Sequence
  Chemically Synthesized
QVQLQESGGGLVQAGGSLRLSCAASGSISAYDRMGWYRQAPGKEREFVATIDYGGSTYYADSVKGRFTISRDNAKNTVYLQMNSLKPEDTAVYYCAAVSTLFTTIYWGQGTQVTVSS

SEQ ID NO: 22568 - protein, 126 aa, Artificial Sequence
  Chemically Synthesized
QVQLQESGGGLVQAGGSLRLSCAASGTISWSKYMGWYRQAPGKEREFVASIADGSNTYYADSVKGRFTISRDNAKNTVYLQMNSLKPEDTAVYYCAADFGNHYFATRRVGGVYAYWGQGTQVTVSS

SEQ ID NO: 22569 - protein, 122 aa, Artificial Sequence
  Chemically Synthesized
QVQLQESGGGLVQAGGSLRLSCAASGTIFAPYYMGWYRQAPGKEREFVAGIAEGGITYYADSVKGRFTISRDNAKNTVYLQMNSLKPEDTAVYYCAVVSRGPSKYHLFHDYWGQGTQVTVSS

SEQ ID NO: 22570 - protein, 122 aa, Artificial Sequence
  Chemically Synthesized
QVQLQESGGGLVQAGGSLRLSCAASGTISQPADMGWYRQAPGKEREFVASITTGAITNYADSVKGRFTISRDNAKNTVYLQMNSLKPEDTAVYYCAAPYIRADGLLKIHTYWGQGTQVTVSS

SEQ ID NO: 22571 - protein, 117 aa, Artificial Sequence
  Chemically Synthesized
QVQLQESGGGLVQAGGSLRLSCAASGNIFDSVMGWYRQAPGKEREFVAAIAPGATTNYADSVKGRFTISRDNAKNTVYLQMNSLKPEDTAVYYCAVPYHRGSYHRYWGQGTQVTVSS

SEQ ID NO: 22572 - protein, 117 aa, Artificial Sequence
  Chemically Synthesized
QVQLQESGGGLVQAGGSLRLSCAASGYIFDRYMGWYRQAPGKEREFVAAISYGATTYYADSVKGRFTISRDNAKNTVYLQMNSLKPEDTAVYYCAVNLLDYLSFQYWGQGTQVTVSS

SEQ ID NO: 22573 - protein, 118 aa, Artificial Sequence
  Chemically Synthesized
QVQLQESGGGLVQAGGSLRLSCAASGYIFESQYMGWYRQAPGKEREFVAGINAGTSTYYADSVKGRFTISRDNAKNTVYLQMNSLKPEDTAVYYCAAVIPTYGGHGYWGQGTQVTVSS

SEQ ID NO: 22574 - protein, 120 aa, Artificial Sequence
  Chemically Synthesized
QVQLQESGGGLVQAGGSLRLSCAASGNISRASPMGWYRQAPGKERELVAGIASGTILYADSVKGRFTISRDNAKNTVYLQMNSLKPEDTAVYYCAVYDYGRASTLLLIYWGQGTQVTVSS

SEQ ID NO: 22575 - protein, 121 aa, Artificial Sequence
  Chemically Synthesized
QVQLQESGGGLVQAGGSLRLSCAASGNIFTTLPMGWYRQAPGKEREFVATIGEGTSTNYADSVKGRFTISRDNAKNTVYLQMNSLKPEDTAVYYCAARPFPPAYSNRSIYWGQGTQVTVSS

SEQ ID NO: 22576 - protein, 122 aa, Artificial Sequence
  Chemically Synthesized
QVQLQESGGGLVQAGGSLRLSCAASGSIFHGTWMGWYRQAPGKERELVATISVGSSTNYADSVKGRFTISRDNAKNTVYLQMNSLKPEDTAVYYCAVRGVSPRFFFITYVYWGQGTQVTVSS

SEQ ID NO: 22577 - protein, 122 aa, Artificial Sequence
  Chemically Synthesized
QVQLQESGGGLVQAGGSLRLSCAASGSISRPYYMGWYRQAPGKEREFVAAIDYGGTTYYADSVKGRFTISRDNAKNTVYLQMNSLKPEDTAVYYCAVYAYPYAPSEGDHTYWGQGTQVTVSS

SEQ ID NO: 22578 - protein, 118 aa, Artificial Sequence
  Chemically Synthesized
QVQLQESGGGLVQAGGSLRLSCAASGTISGYRSMGWYRQAPGKEREFVAGINGGGITYYADSVKGRFTISRDNAKNTVYLQMNSLKPEDTAVYYCAVRSVTYRWHAYWGQGTQVTVSS

SEQ ID NO: 22579 - protein, 118 aa, Artificial Sequence
  Chemically Synthesized
QVQLQESGGGLVQAGGSLRLSCAASGTIFRFYAMGWYRQAPGKERELVAGIDYGATTNYADSVKGRFTISRDNAKNTVYLQMNSLKPEDTAVYYCAVPNSEYRYHDYWGQGTQVTVSS

SEQ ID NO: 22580 - protein, 118 aa, Artificial Sequence
  Chemically Synthesized
QVQLQESGGGLVQAGGSLRLSCAASGNIFYPHFMGWYRQAPGKEREFVATIASGGITYYADSVKGRFTISRDNAKNTVYLQMNSLKPEDTAVYYCAVYRQWRYSFDYWGQGTQVTVSS

SEQ ID NO: 22581 - protein, 121 aa, Artificial Sequence
  Chemically Synthesized
QVQLQESGGGLVQAGGSLRLSCAASGYISVVIGMGWYRQAPGKERELVASINRGGNTYYADSVKGRFTISRDNAKNTVYLQMNSLKPEDTAVYYCAAYSYNYYSGYAGHYWGQGTQVTVSS

SEQ ID NO: 22582 - protein, 118 aa, Artificial Sequence
  Chemically Synthesized
QVQLQESGGGLVQAGGSLRLSCAASGYIFQGYRMGWYRQAPGKERELVASINYGTNTNYADSVKGRFTISRDNAKNTVYLQMNSLKPEDTAVYYCAVFAVPIFWFIYWGQGTQVTVSS

SEQ ID NO: 22583 - protein, 126 aa, Artificial Sequence
  Chemically Synthesized
QVQLQESGGGLVQAGGSLRLSCAASGYISADGPMGWYRQAPGKERELVATISQGGNTNYADSVKGRFTISRDNAKNTVYLQMNSLKPEDTAVYYCAAYRLSQSYWRVGYGAVLQYWGQGTQVTVSS

SEQ ID NO: 22584 - protein, 122 aa, Artificial Sequence
  Chemically Synthesized
QVQLQESGGGLVQAGGSLRLSCAASGTIFVKRAMGWYRQAPGKEREFVAAITFGSITYYADSVKGRFTISRDNAKNTVYLQMNSLKPEDTAVYYCAVTVGYIYRKQYWLFYWGQGTQVTVSS

SEQ ID NO: 22585 - protein, 118 aa, Artificial Sequence
  Chemically Synthesized
QVQLQESGGGLVQAGGSLRLSCAASGYIFILTAMGWYRQAPGKEREFVATIDYGATTYYADSVKGRFTISRDNAKNTVYLQMNSLKPEDTAVYYCAAYPGLLPSYTYWGQGTQVTVSS

SEQ ID NO: 22586 - protein, 118 aa, Artificial Sequence
  Chemically Synthesized
QVQLQESGGGLVQAGGSLRLSCAASGYIFSAYIMGWYRQAPGKERELVAAIGYGTNTYYADSVKGRFTISRDNAKNTVYLQMNSLKPEDTAVYYCAVQRRAILSHDYWGQGTQVTVSS

SEQ ID NO: 22587 - protein, 121 aa, Artificial Sequence
  Chemically Synthesized
QVQLQESGGGLVQAGGSLRLSCAASGYISQDYDMGWYRQAPGKERELLPLLLTVVIPYADSVKGRFTISRDNAKNTVYLQMNSLKPEDTAVYYCAVGYAGGSDGYYPFGYWGQGTQVTVSS

SEQ ID NO: 22588 - protein, 118 aa, Artificial Sequence
  Chemically Synthesized
QVQLQESGGGLVQAGGSLRLSCAASGSISARTVMGWYRQAPGKEREFVASIDSGGTTNYADSVKGRFTISRDNAKNTVYLQMNSLKPEDTAVYYCAVTYTFRGTLYYWGQGTQVTVSS

SEQ ID NO: 22589 - protein, 122 aa, Artificial Sequence
  Chemically Synthesized
QVQLQESGGGLVQAGGSLRLSCAASGTISDLGYMGWYRQAPGKEREFVASIGTGTTTYYADSVKGRFTISRDNAKNTVYLQMNSLKPEDTAVYYCAAKYGYLTVLHHYHFYWGQGTQVTVSS

SEQ ID NO: 22590 - protein, 115 aa, Artificial Sequence
  Chemically Synthesized
QVQLQESGGGLVQAGGSLRLSCAASGNIFISAIMGWYRQAPGKERELVAGITDGASTYYADSVKGRFTISRDNAKNTVYLQMNSLKPEDTAVYYCAVYYYRHGYWGQGTQVTVSS

SEQ ID NO: 22591 - protein, 126 aa, Artificial Sequence
  Chemically Synthesized
QVQLQESGGGLVQAGGSLRLSCAASGTISYSTIMGWYRQAPGKEREFVASISSGGTTYYADSVKGRFTISRDNAKNTVYLQMNSLKPEDTAVYYCAAHTISGVPQFDYAVYPLYYWGQGTQVTVSS

SEQ ID NO: 22592 - protein, 126 aa, Artificial Sequence
  Chemically Synthesized
QVQLQESGGGLVQAGGSLRLSCAASGTISHLTRMGWYRQAPGKERELVAGIDYGASTYYADSVKGRFTISRDNAKNTVYLQMNSLKPEDTAVYYCAAIRERPIYYYVTYWLGLRYWGQGTQVTVSS

SEQ ID NO: 22593 - protein, 126 aa, Artificial Sequence
  Chemically Synthesized
QVQLQESGGGLVQAGGSLRLSCAASGNISRADRMGWYRQAPGKERELVAGIDVGTSTNYADSVKGRFTISRDNAKNTVYLQMNSLKPEDTAVYYCAARGPPYPGDYVRAFYAFGYWGQGTQVTVSS

SEQ ID NO: 22594 - protein, 117 aa, Artificial Sequence
  Chemically Synthesized
QVQLQESGGGLVQAGGSLRLSCAASGSISLSKMGWYRQAPGKERELVAGISDGGNTNYADSVKGRFTISRDNAKNTVYLQMNSLKPEDTAVYYCAVLDVGKSVLSYWGQGTQVTVSS

SEQ ID NO: 22595 - protein, 109 aa, Artificial Sequence
  Chemically Synthesized
QVQLQESGGGLVQAGGSLRLSCAASGTISDPDYMGWYRQAPGKERELVASISRGANTYYADSVKGRFTISRDNAKNTVYLQMNSLKPEDTAVYYCAVYWGQGTQVTVSS

SEQ ID NO: 22596 - protein, 119 aa, Artificial Sequence
  Chemically Synthesized
QVQLQESGGGLVQAGGSLRLSCAASGTIFGPTDDMGWYRQAPGKEREFVAGISSGSNTNYADSVKGRFTISRDNAKNTVYLQMNSLKPEDTAVYYCAARDEYITGFAYWGQGTQVTVSS

SEQ ID NO: 22597 - protein, 118 aa, Artificial Sequence
  Chemically Synthesized
QVQLQESGGGLVQAGGSLRLSCAASGTIFSTGQMGWYRQAPGKEREFVAAISWGTSTYYADSVKGRFTISRDNAKNTVYLQMNSLKPEDTAVYYCAARPDDRRVFRYWGQGTQVTVSS

SEQ ID NO: 22598 - protein, 118 aa, Artificial Sequence
  Chemically Synthesized
QVQLQESGGGLVQAGGSLRLSCAASGSISDYFGMGWYRQAPGKEREFVATISSGATTYYADSVKGRFTISRDNAKNTVYLQMNSLKPEDTAVYYCAAVVQDWGLHGYWGQGTQVTVSS

SEQ ID NO: 22599 - protein, 126 aa, Artificial Sequence
  Chemically Synthesized
QVQLQESGGGLVQAGGSLRLSCAASGYISYFYYMGWYRQAPGKERELVATITVGASTYYADSVKGRFTISRDNAKNTVYLQMNSLKPEDTAVYYCAVILPYSDYPIYYDATHFFYWGQGTQVTVSS

SEQ ID NO: 22600 - protein, 122 aa, Artificial Sequence
  Chemically Synthesized
QVQLQESGGGLVQAGGSLRLSCAASGYISDSVIMGWYRQAPGKERELVAAINPGSITYYADSVKGRFTISRDNAKNTVYLQMNSLKPEDTAVYYCAADDYGGHRVRGYHDYWGQGTQVTVSS

SEQ ID NO: 22601 - protein, 118 aa, Artificial Sequence
  Chemically Synthesized
QVQLQESGGGLVQAGGSLRLSCAASGYIFRQLPMGWYRQAPGKERELVAGISYGTITYYADSVKGRFTISRDNAKNTVYLQMNSLKPEDTAVYYCAAATSAGDLLSYWGQGTQVTVSS

SEQ ID NO: 22602 - protein, 117 aa, Artificial Sequence
  Chemically Synthesized
QVQLQESGGGLVQAGGSLRLSCAASGTINVFAMGWYRQAPGKEREFVASIGGGAITYYADSVKGRFTISRDNAKNTVYLQMNSLKPEDTAVYYCAAITQADGGYNYWGQGTQVTVSS

SEQ ID NO: 22603 - protein, 118 aa, Artificial Sequence
  Chemically Synthesized
QVQLQESGGGLVQAGGSLRLSCAASGNIFALVYMGWYRQAPGKEREFVATISDGTTTNYADSVKGRFTISRDNAKNTVYLQMNSLKPEDTAVYYCAAVTLRVVTSLYWGQGTQVTVSS

SEQ ID NO: 22604 - protein, 118 aa, Artificial Sequence
  Chemically Synthesized
QVQLQESGGGLVQAGGSLRLSCAASGYIFQLPHMGWYRQAPGKEREFVAAIDTGGNTYYADSVKGRFTISRDNAKNTVYLQMNSLKPEDTAVYYCAVRHRVGSPHYYWGQGTQVTVSS

SEQ ID NO: 22605 - protein, 119 aa, Artificial Sequence
  Chemically Synthesized
QVQLQESGGGLVQAGGSLRLSCAASGNISTGAPMGWYRQAPGKERELVASITDGSITYYADSVKGRFTISRDNAKNTVYLQMNSLKPEDTAVYYCAARADYGLRLFAYWGQGTQVTVSS

SEQ ID NO: 22606 - protein, 125 aa, Artificial Sequence
  Chemically Synthesized
QVQLQESGGGLVQAGGSLRLSCAASGSISYYPYMGWYRQAPGKERELVAAIGDGSSTYYADSVKGRFTISRDNAKNTVYLQMNSLKPEDTAVYYCAVNRLVDDGGLVASNSVLYWGQGTQVTVSS

SEQ ID NO: 22607 - protein, 118 aa, Artificial Sequence
  Chemically Synthesized
QVQLQESGGGLVQAGGSLRLSCAASGTIFGSNGMGWYRQAPGKEREFVAAIAVGTTTYYADSVKGRFTISRDNAKNTVYLQMNSLKPEDTAVYYCAANENVAGPFGYWGQGTQVTVSS

SEQ ID NO: 22608 - protein, 122 aa, Artificial Sequence
  Chemically Synthesized
QVQLQESGGGLVQAGGSLRLSCAASGTISTAWIMGWYRQAPGKERELVASIGYGASTNYADSVKGRFTISRDNAKNTVYLQMNSLKPEDTAVYYCAARPWYTTRSLGLLIYWGQGTQVTVSS

SEQ ID NO: 22609 - protein, 122 aa, Artificial Sequence
  Chemically Synthesized
QVQLQESGGGLVQAGGSLRLSCAASGTIFNYIYMGWYRQAPGKEREFVAGIDYGSTTYYADSVKGRFTISRDNAKNTVYLQMNSLKPEDTAVYYCAVDRYENYRLTYDHHYWGQGTQVTVSS

SEQ ID NO: 22610 - protein, 118 aa, Artificial Sequence
  Chemically Synthesized
QVQLQESGGGLVQAGGSLRLSCAASGTIFPFTVMGWYRQAPGKERELVASIAQGSTTNYADSVKGRFTISRDNAKNTVYLQMNSLKPEDTAVYYCAAYAVLVYIYAYWGQGTQVTVSS

SEQ ID NO: 22611 - protein, 122 aa, Artificial Sequence
  Chemically Synthesized
QVQLQESGGGLVQAGGSLRLSCAASGNIFPARSMGWYRQAPGKEREFVAGIGYGGNTNYADSVKGRFTISRDNAKNTVYLQMNSLKPEDTAVYYCAAYAIPYYLYVTAHSYWGQGTQVTVSS

SEQ ID NO: 22612 - protein, 118 aa, Artificial Sequence
  Chemically Synthesized
QVQLQESGGGLVQAGGSLRLSCAASGTIFYPDSMGWYRQAPGKERELVASIDRGGTTYYADSVKGRFTISRDNAKNTVYLQMNSLKPEDTAVYYCAVTGSQRVPFVYWGQGTQVTVSS

SEQ ID NO: 22613 - protein, 118 aa, Artificial Sequence
  Chemically Synthesized
QVQLQESGGGLVQAGGSLRLSCAASGSIFGHPAMGWYRQAPGKERELVAGISLGANTYYADSVKGRFTISRDNAKNTVYLQMNSLKPEDTAVYYCAVIGSGYSPLDYWGQGTQVTVSS

SEQ ID NO: 22614 - protein, 122 aa, Artificial Sequence
  Chemically Synthesized
QVQLQESGGGLVQAGGSLRLSCAASGYIFARNWMGWYRQAPGKERELVATIDDGASTNYADSVKGRFTISRDNAKNTVYLQMNSLKPEDTAVYYCAARYQGGGAGTTFPWYWGQGTQVTVSS

SEQ ID NO: 22615 - protein, 118 aa, Artificial Sequence
  Chemically Synthesized
QVQLQESGGGLVQAGGSLRLSCAASGSISDLYYMGWYRQAPGKEREFVASIASGGITNYADSVKGRFTISRDNAKNTVYLQMNSLKPEDTAVYYCAVVGTYWLGLGYWGQGTQVTVSS

SEQ ID NO: 22616 - protein, 120 aa, Artificial Sequence
  Chemically Synthesized
QVQLQESGGGLVQAGGSLRLSCAASGSIFGGFMGWYRQAPGKEREFVAAINSGGTTNYADSVKGRFTISRDNAKNTVYLQMNSLKPEDTAVYYCAAVPNAYQGRADYGYWGQGTQVTVSS

SEQ ID NO: 22617 - protein, 118 aa, Artificial Sequence
  Chemically Synthesized
QVQLQESGGGLVQAGGSLRLSCAASGYISRFTHMGWYRQAPGKERELVAGIDRGTITNYADSVKGRFTISRDNAKNTVYLQMNSLKPEDTAVYYCAVYDAYPSGYDYWGQGTQVTVSS

SEQ ID NO: 22618 - protein, 122 aa, Artificial Sequence
  Chemically Synthesized
QVQLQESGGGLVQAGGSLRLSCAASGTIFPEYGMGWYRQAPGKERELVASITDGTITYYADSVKGRFTISRDNAKNTVYLQMNSLKPEDTAVYYCAAAGQTDWYSWGPHYYWGQGTQVTVSS

SEQ ID NO: 22619 - protein, 126 aa, Artificial Sequence
  Chemically Synthesized
QVQLQESGGGLVQAGGSLRLSCAASGSISYRVYMGWYRQAPGKEREFVAAISIGGSTNYADSVKGRFTISRDNAKNTVYLQMNSLKPEDTAVYYCAADGTDVLVWPPYWDYGHGYWGQGTQVTVSS

SEQ ID NO: 22620 - protein, 117 aa, Artificial Sequence
  Chemically Synthesized
QVQLQESGGGLVQAGGSLRLSCAASGSISNDVYMGWYRQAPGKEREFVAAINVGATTNYADSVKGRFTISRDNAKNTVYLQMNSLKPEDTAVYYCASPADDQSLLYWGQGTQVTVSS

SEQ ID NO: 22621 - protein, 121 aa, Artificial Sequence
  Chemically Synthesized
QVQLQESGGGLVQAGGSLRLSCAASGTIFVRTMGWYRQAPGKERELVASIASGGNTNYADSVKGRFTISRDNAKNTVYLQMNSLKPEDTAVYYCAAYAQFVQGSRDFHPYWGQGTQVTVSS

SEQ ID NO: 22622 - protein, 118 aa, Artificial Sequence
  Chemically Synthesized
QVQLQESGGGLVQAGGSLRLSCAASGTISSVSDMGWYRQAPGKERELVAGIAVGGITYYADSVKGRFTISRDNAKNTVYLQMNSLKPEDTAVYYCAAGPRRPTSLGYWGQGTQVTVSS

SEQ ID NO: 22623 - protein, 118 aa, Artificial Sequence
  Chemically Synthesized
QVQLQESGGGLVQAGGSLRLSCAASGYIFAQTYMGWYRQAPGKERELVAAINLGSSTYYADSVKGRFTISRDNAKNTVYLQMNSLKPEDTAVYYCAADADYYHAHSYWGQGTQVTVSS

SEQ ID NO: 22624 - protein, 121 aa, Artificial Sequence
  Chemically Synthesized
QVQLQESGGGLVQAGGSLRLSCAASGYISTGDDMGWYRQAPGKERELVAAIATVVLPYADSVKGRFTISRDNAKNTVYLQMNSLKPEDTAVYYCAVAQHRTLRWDDVHWYWGQGTQVTVSS

SEQ ID NO: 22625 - protein, 112 aa, Artificial Sequence
  Chemically Synthesized
QVQLQESGGGLVQAGGSLRLSCAASGSISAPPYMGWYRQAPGKEREFVAGIGYGSTTNYADSVKGRFTISRDNAKNTVYLQMNSLKPEDTAVYYCAVYFYYWGQGTQVTVSS

SEQ ID NO: 22626 - protein, 118 aa, Artificial Sequence
  Chemically Synthesized
QVQLQESGGGLVQAGGSLRLSCAASGSISVPVYMGWYRQAPGKEREFVASISYGGSTNYADSVKGRFTISRDNAKNTVYLQMNSLKPEDTAVYYCAVGRAAGYYLDYWGQGTQVTVSS

SEQ ID NO: 22627 - protein, 107 aa, Artificial Sequence
  Chemically Synthesized
QVQLQESGGGLVQAGGSLRLSCAASGTTSMGWYRQAPGKEREFVAGIADGTNTYYADSVKGRFTISRDNAKNTVYLQMNSLKPEDTAVYYCAVGGYWGQGTQVTVSS

SEQ ID NO: 22628 - protein, 118 aa, Artificial Sequence
  Chemically Synthesized
QVQLQESGGGLVQAGGSLRLSCAASGSIFDRYYMGWYRQAPGKERELVAGITFGATTYYADSVKGRFTISRDNAKNTVYLQMNSLKPEDTAVYYCAAGYYDFDVLSYWGQGTQVTVSS

SEQ ID NO: 22629 - protein, 118 aa, Artificial Sequence
  Chemically Synthesized
QVQLQESGGGLVQAGGSLRLSCAASGSISLYSDMGWYRQAPGKEREFVASIDRGASTYYADSVKGRFTISRDNAKNTVYLQMNSLKPEDTAVYYCAATTDPRRDYPYWGQGTQVTVSS

SEQ ID NO: 22630 - protein, 125 aa, Artificial Sequence
  Chemically Synthesized
QVQLQESGGGLVQAGGSLRLSCAASGTIFIGYMGWYRQAPGKERELVATIADGSNTNYADSVKGRFTISRDNAKNTVYLQMNSLKPEDTAVYYCAAATEIDYYVLQDSSHDYGYWGQGTQVTVSS

SEQ ID NO: 22631 - protein, 125 aa, Artificial Sequence
  Chemically Synthesized
QVQLQESGGGLVQAGGSLRLSCAASGYIFDTNMGWYRQAPGKEREFVATIGYGSITYYADSVKGRFTISRDNAKNTVYLQMNSLKPEDTAVYYCAAGSPEIDWWVDRDAGQYAYWGQGTQVTVSS

SEQ ID NO: 22632 - protein, 118 aa, Artificial Sequence
  Chemically Synthesized
QVQLQESGGGLVQAGGSLRLSCAASGTIFVWYRMGWYRQAPGKEREFVASIGLGGTTYYADSVKGRFTISRDNAKNTVYLQMNSLKPEDTAVYYCAALGGRHHQHSYWGQGTQVTVSS

SEQ ID NO: 22633 - protein, 118 aa, Artificial Sequence
  Chemically Synthesized
QVQLQESGGGLVQAGGSLRLSCAASGNIFWYKYMGWYRQAPGKEREFVAGIAVGGITNYADSVKGRFTISRDNAKNTVYLQMNSLKPEDTAVYYCAVYRRQRSPFTYWGQGTQVTVSS

SEQ ID NO: 22634 - protein, 118 aa, Artificial Sequence
  Chemically Synthesized
QVQLQESGGGLVQAGGSLRLSCAASGTISHGSIMGWYRQAPGKERELVASISEGTITYYADSVKGRFTISRDNAKNTVYLQMNSLKPEDTAVYYCAAHERNKVYLVYWGQGTQVTVSS

SEQ ID NO: 22635 - protein, 116 aa, Artificial Sequence
  Chemically Synthesized
QVQLQESGGGLVQAGGSLRLSCAASGSIFPYRYMGWYRQAPGKERELVAGINVGGSTYYADSVKGRFTISRDNAKNTVYLQMNSLKPEDTAVYYCAAASLRGYYYWGQGTQVTVSS

SEQ ID NO: 22636 - protein, 126 aa, Artificial Sequence
  Chemically Synthesized
QVQLQESGGGLVQAGGSLRLSCAASGNIFTDTDMGWYRQAPGKEREFVAGIGFGSSTNYADSVKGRFTISRDNAKNTVYLQMNSLKPEDTAVYYCAAEYRGYYLQPYYVVDNYIYWGQGTQVTVSS

SEQ ID NO: 22637 - protein, 126 aa, Artificial Sequence
  Chemically Synthesized
QVQLQESGGGLVQAGGSLRLSCAASGTISYARIMGWYRQAPGKEREFVASISRGGNTNYADSVKGRFTISRDNAKNTVYLQMNSLKPEDTAVYYCAAYYYQSDRPPDTDQVDHRYWGQGTQVTVSS

SEQ ID NO: 22638 - protein, 122 aa, Artificial Sequence
  Chemically Synthesized
QVQLQESGGGLVQAGGSLRLSCAASGTIFAHYGMGWYRQAPGKEREFVATISIGATTYYADSVKGRFTISRDNAKNTVYLQMNSLKPEDTAVYYCAAYGLSAYYAYSLHVYWGQGTQVTVSS

SEQ ID NO: 22639 - protein, 118 aa, Artificial Sequence
  Chemically Synthesized
QVQLQESGGGLVQAGGSLRLSCAASGNIFYDFSMGWYRQAPGKERELVAGINPGSNTNYADSVKGRFTISRDNAKNTVYLQMNSLKPEDTAVYYCAVVPWEPAVHLYWGQGTQVTVSS

SEQ ID NO: 22640 - protein, 124 aa, Artificial Sequence
  Chemically Synthesized
QVQLQESGGGLVQAGGSLRLSCAASGNIFHGYTMGWYRQAPGKEREFVASIDDGSTTNYADSVKGRFTISRDNAKNTVYLQMNSLKPEDTAVYYCAADGIYAFKWGIQYLFGYWGQGTQVTVSS

SEQ ID NO: 22641 - protein, 118 aa, Artificial Sequence
  Chemically Synthesized
QVQLQESGGGLVQAGGSLRLSCAASGYIFRSPWMGWYRQAPGKEREFVAGIGLGANTNYADSVKGRFTISRDNAKNTVYLQMNSLKPEDTAVYYCAADDSYIALHVYWGQGTQVTVSS

SEQ ID NO: 22642 - protein, 118 aa, Artificial Sequence
  Chemically Synthesized
QVQLQESGGGLVQAGGSLRLSCAASGSISAPLKMGWYRQAPGKEREFVATISDGAITNYADSVKGRFTISRDNAKNTVYLQMNSLKPEDTAVYYCAAGTILLPNYAYWGQGTQVTVSS

SEQ ID NO: 22643 - protein, 124 aa, Artificial Sequence
  Chemically Synthesized
QVQLQESGGGLVQAGGSLRLSCAASGTIFRLAYMGWYRQAPGKERELVATISNGGSTYYADSVKGRFTISRDNAKNTVYLQMNSLKPEDTAVYYCAVSYYWYWYYRDYNHHYYWGQGTQVTVSS

SEQ ID NO: 22644 - protein, 122 aa, Artificial Sequence
  Chemically Synthesized
QVQLQESGGGLVQAGGSLRLSCAASGNIFNPGDMGWYRQAPGKERELVAGIDRGANTYYADSVKGRFTISRDNAKNTVYLQMNSLKPEDTAVYYCAVNYRYDPQYLIDLDYWGQGTQVTVSS

SEQ ID NO: 22645 - protein, 118 aa, Artificial Sequence
  Chemically Synthesized
QVQLQESGGGLVQAGGSLRLSCAASGNIFEGWSMGWYRQAPGKERELVAAIDFGSNTYYADSVKGRFTISRDNAKNTVYLQMNSLKPEDTAVYYCAAYTDSYQYHSYWGQGTQVTVSS

SEQ ID NO: 22646 - protein, 117 aa, Artificial Sequence
  Chemically Synthesized
QVQLQESGGGLVQAGGSLRLSCAASGYISPSLYMGWYRQAPGKEREFVAGIGQGTTTYYADSVKGRFTISRDNAKNTVYLQMNSLKPEDTAVYYCAVRAFYAQFIYWGQGTQVTVSS

SEQ ID NO: 22647 - protein, 118 aa, Artificial Sequence
  Chemically Synthesized
QVQLQESGGGLVQAGGSLRLSCAASGTISRYALMGWYRQAPGKERELVAGIGDGSNTNYADSVKGRFTISRDNAKNTVYLQMNSLKPEDTAVYYCAAWNGYVYDYGYWGQGTQVTVSS

SEQ ID NO: 22648 - protein, 117 aa, Artificial Sequence
  Chemically Synthesized
QVQLQESGGGLVQAGGSLRLSCAASGTISSKYMGWYRQAPGKEREFVATISNGTITYYADSVKGRFTISRDNAKNTVYLQMNSLKPEDTAVYYCAASPYYWYQYPYWGQGTQVTVSS

SEQ ID NO: 22649 - protein, 126 aa, Artificial Sequence
  Chemically Synthesized
QVQLQESGGGLVQAGGSLRLSCAASGSISRYYSMGWYRQAPGKEREFVAAIDRGGITYYADSVKGRFTISRDNAKNTVYLQMNSLKPEDTAVYYCAAGTGSLPWDNDNPYVYLDYWGQGTQVTVSS

SEQ ID NO: 22650 - protein, 118 aa, Artificial Sequence
  Chemically Synthesized
QVQLQESGGGLVQAGGSLRLSCAASGYISYDEGMGWYRQAPGKEREFVAGIGVGAITYYADSVKGRFTISRDNAKNTVYLQMNSLKPEDTAVYYCAVKRDRSVDFYYWGQGTQVTVSS

SEQ ID NO: 22651 - protein, 122 aa, Artificial Sequence
  Chemically Synthesized
QVQLQESGGGLVQAGGSLRLSCAASGYISGRLEMGWYRQAPGKEREFVAAIGYGTTTNYADSVKGRFTISRDNAKNTVYLQMNSLKPEDTAVYYCAAYARGGDYPGLYHAYWGQGTQVTVSS

SEQ ID NO: 22652 - protein, 118 aa, Artificial Sequence
  Chemically Synthesized
QVQLQESGGGLVQAGGSLRLSCAASGNIFRGWGMGWYRQAPGKEREFVAGIASGGITNYADSVKGRFTISRDNAKNTVYLQMNSLKPEDTAVYYCAVRQGLPVYYAYWGQGTQVTVSS

SEQ ID NO: 22653 - protein, 117 aa, Artificial Sequence
  Chemically Synthesized
QVQLQESGGGLVQAGGSLRLSCAASGTIFGGRYMGWYRQAPGKERELVPLLVTVVLPYADSVKGRFTISRDNAKNTVYLQMNSLKPEDTAVYYCAAKRYAYRYHVYWGQGTQVTVSS

SEQ ID NO: 22654 - protein, 122 aa, Artificial Sequence
  Chemically Synthesized
QVQLQESGGGLVQAGGSLRLSCAASGSIFDYPSMGWYRQAPGKEREFVAAINSGSSTNYADSVKGRFTISRDNAKNTVYLQMNSLKPEDTAVYYCAVVAYRISQNDAEYSYWGQGTQVTVSS

SEQ ID NO: 22655 - protein, 118 aa, Artificial Sequence
  Chemically Synthesized
QVQLQESGGGLVQAGGSLRLSCAASGYISRSVVMGWYRQAPGKEREFVAGITDGATTYYADSVKGRFTISRDNAKNTVYLQMNSLKPEDTAVYYCAAGSGYGVAHPYWGQGTQVTVSS

SEQ ID NO: 22656 - protein, 122 aa, Artificial Sequence
  Chemically Synthesized
QVQLQESGGGLVQAGGSLRLSCAASGYISGAVYMGWYRQAPGKERELVAGIGFGAITYYADSVKGRFTISRDNAKNTVYLQMNSLKPEDTAVYYCAAPYLGYAAGDDELRYWGQGTQVTVSS

SEQ ID NO: 22657 - protein, 122 aa, Artificial Sequence
  Chemically Synthesized
QVQLQESGGGLVQAGGSLRLSCAASGSIFLSVAMGWYRQAPGKEREFVASIAYGTITYYADSVKGRFTISRDNAKNTVYLQMNSLKPEDTAVYYCAVPYLVREVGSYRHWYWGQGTQVTVSS

SEQ ID NO: 22658 - protein, 118 aa, Artificial Sequence
  Chemically Synthesized
QVQLQESGGGLVQAGGSLRLSCAASGTIFWPDDMGWYRQAPGKERELVAGIGAGTSTYYADSVKGRFTISRDNAKNTVYLQMNSLKPEDTAVYYCAAPRTYLLPLTYWGQGTQVTVSS

SEQ ID NO: 22659 - protein, 118 aa, Artificial Sequence
  Chemically Synthesized
QVQLQESGGGLVQAGGSLRLSCAASGNISFYDDMGWYRQAPGKERELVAGIDAGGITNYADSVKGRFTISRDNAKNTVYLQMNSLKPEDTAVYYCAALSAPTSTLWYWGQGTQVTVSS

SEQ ID NO: 22660 - protein, 122 aa, Artificial Sequence
  Chemically Synthesized
QVQLQESGGGLVQAGGSLRLSCAASGSISGNRAMGWYRQAPGKERELVAGIDLGTTTYYADSVKGRFTISRDNAKNTVYLQMNSLKPEDTAVYYCAVWWLDSPPNNLSYYYWGQGTQVTVSS

SEQ ID NO: 22661 - protein, 118 aa, Artificial Sequence
  Chemically Synthesized
QVQLQESGGGLVQAGGSLRLSCAASGYISPPYNMGWYRQAPGKERELVASIARGGSTYYADSVKGRFTISRDNAKNTVYLQMNSLKPEDTAVYYCAVPPGSNYYHHYWGQGTQVTVSS

SEQ ID NO: 22662 - protein, 123 aa, Artificial Sequence
  Chemically Synthesized
QVQLQESGGGLVQAGGSLRLSCAASGNIFSALRMGWYRQAPGKERELVAGIDYGSNTNYADSVKGRFTISRDNAKNTVYLQMNSLKPEDTAVYYCAVARDPDSGRWRDGYRYWGQGTQVTVSS

SEQ ID NO: 22663 - protein, 126 aa, Artificial Sequence
  Chemically Synthesized
QVQLQESGGGLVQAGGSLRLSCAASGSIFTYRYMGWYRQAPGKERELVASISEGGSTYYADSVKGRFTISRDNAKNTVYLQMNSLKPEDTAVYYCAVQQGYADDYNPTERPLYWYWGQGTQVTVSS

SEQ ID NO: 22664 - protein, 121 aa, Artificial Sequence
  Chemically Synthesized
QVQLQESGGGLVQAGGSLRLSCAASGYIFRTVMGWYRQAPGKERELVAGINDGSITYYADSVKGRFTISRDNAKNTVYLQMNSLKPEDTAVYYCAASLYDGAGDSAVLNYWGQGTQVTVSS

SEQ ID NO: 22665 - protein, 122 aa, Artificial Sequence
  Chemically Synthesized
QVQLQESGGGLVQAGGSLRLSCAASGYISDEYPMGWYRQAPGKERELVASIAYGGITNYADSVKGRFTISRDNAKNTVYLQMNSLKPEDTAVYYCAVYQWSTPQYDSTHDYWGQGTQVTVSS

SEQ ID NO: 22666 - protein, 117 aa, Artificial Sequence
  Chemically Synthesized
QVQLQESGGGLVQAGGSLRLSCAASGSISPLLFMGWYRQAPGKEREFLPVLITVVVPYADSVKGRFTISRDNAKNTVYLQMNSLKPEDTAVYYCAAPHGTDQILYYWGQGTQVTVSS

SEQ ID NO: 22667 - protein, 121 aa, Artificial Sequence
  Chemically Synthesized
QVQLQESGGGLVQAGGSLRLSCAASGTIFDSRYMGWYRQAPGKEREFVAAISLGSNTYYADSVKGRFTISRDNAKNTVYLQMNSLKPEDTAVYYCAAPSLCTTLVLVTMYWGQGTQVTVSS

SEQ ID NO: 22668 - protein, 118 aa, Artificial Sequence
  Chemically Synthesized
QVQLQESGGGLVQAGGSLRLSCAASGSISSHAGMGWYRQAPGKERELVAAINRGTNTNYADSVKGRFTISRDNAKNTVYLQMNSLKPEDTAVYYCAVWDQIVTAHGYWGQGTQVTVSS

SEQ ID NO: 22669 - protein, 118 aa, Artificial Sequence
  Chemically Synthesized
QVQLQESGGGLVQAGGSLRLSCAASGTISWGDRMGWYRQAPGKERELVATITGGSITYYADSVKGRFTISRDNAKNTVYLQMNSLKPEDTAVYYCAVDSYSYLDHDYWGQGTQVTVSS

SEQ ID NO: 22670 - protein, 118 aa, Artificial Sequence
  Chemically Synthesized
QVQLQESGGGLVQAGGSLRLSCAASGNISRPRYMGWYRQAPGKERELVASIDSGASTYYADSVKGRFTISRDNAKNTVYLQMNSLKPEDTAVYYCAVNTTYRDGYFYWGQGTQVTVSS

SEQ ID NO: 22671 - protein, 122 aa, Artificial Sequence
  Chemically Synthesized
QVQLQESGGGLVQAGGSLRLSCAASGSISHAVYMGWYRQAPGKEREFVASITGGSTTNYADSVKGRFTISRDNAKNTVYLQMNSLKPEDTAVYYCAVHYGADSVSYRLLGYWGQGTQVTVSS

SEQ ID NO: 22672 - protein, 118 aa, Artificial Sequence
  Chemically Synthesized
QVQLQESGGGLVQAGGSLRLSCAASGYISGYSGMGWYRQAPGKEREFVATIGTGGSTNYADSVKGRFTISRDNAKNTVYLQMNSLKPEDTAVYYCAAYAGRSGAFAYWGQGTQVTVSS

SEQ ID NO: 22673 - protein, 118 aa, Artificial Sequence
  Chemically Synthesized
QVQLQESGGGLVQAGGSLRLSCAASGNISYSQRMGWYRQAPGKEREFVAAINYGGITNYADSVKGRFTISRDNAKNTVYLQMNSLKPEDTAVYYCAVQLYSYFALYYWGQGTQVTVSS

SEQ ID NO: 22674 - protein, 122 aa, Artificial Sequence
  Chemically Synthesized
QVQLQESGGGLVQAGGSLRLSCAASGNISDSIVMGWYRQAPGKERELVATIAYGGSTNYADSVKGRFTISRDNAKNTVYLQMNSLKPEDTAVYYCAVIARHYDKAHRGHYYWGQGTQVTVSS

SEQ ID NO: 22675 - protein, 122 aa, Artificial Sequence
  Chemically Synthesized
QVQLQESGGGLVQAGGSLRLSCAASGSIFFDNYMGWYRQAPGKERELVAAIDDGSSTNYADSVKGRFTISRDNAKNTVYLQMNSLKPEDTAVYYCAAYLTRNDYDYAHHSYWGQGTQVTVSS

SEQ ID NO: 22676 - protein, 126 aa, Artificial Sequence
  Chemically Synthesized
QVQLQESGGGLVQAGGSLRLSCAASGYISAYGIMGWYRQAPGKERELVAAITDGTNTYYADSVKGRFTISRDNAKNTVYLQMNSLKPEDTAVYYCAVYTRYEAYHYDLYRYYHAYWGQGTQVTVSS

SEQ ID NO: 22677 - protein, 121 aa, Artificial Sequence
  Chemically Synthesized
QVQLQESGGGLVQAGGSLRLSCAASGTIFTYLDMGWYRQAPGKEREFVAAIALGATTNYADSVKGRFTISRDNAKNTVYLQMNSLKPEDTAVYYCAVRDVRPALSSLSYYWGQGTQVTVSS

SEQ ID NO: 22678 - protein, 126 aa, Artificial Sequence
  Chemically Synthesized
QVQLQESGGGLVQAGGSLRLSCAASGYISGYTDMGWYRQAPGKEREFVAAIDYGTSTNYADSVKGRFTISRDNAKNTVYLQMNSLKPEDTAVYYCAAPASTVRTTDPVPDTGYRYWGQGTQVTVSS

SEQ ID NO: 22679 - protein, 122 aa, Artificial Sequence
  Chemically Synthesized
QVQLQESGGGLVQAGGSLRLSCAASGTIFWDIGMGWYRQAPGKERELVATISWGAITYYADSVKGRFTISRDNAKNTVYLQMNSLKPEDTAVYYCAVYRSGDDRAGWRHPYWGQGTQVTVSS

SEQ ID NO: 22680 - protein, 122 aa, Artificial Sequence
  Chemically Synthesized
QVQLQESGGGLVQAGGSLRLSCAASGYISIGDDMGWYRQAPGKERELVAAINRGGITNYADSVKGRFTISRDNAKNTVYLQMNSLKPEDTAVYYCAADYVHYDVDYKYLSYWGQGTQVTVSS

SEQ ID NO: 22681 - protein, 125 aa, Artificial Sequence
  Chemically Synthesized
QVQLQESGGGLVQAGGSLRLSCAASGYIFIGRVMGWYRQAPGKERELVASIASVVLPYADSVKGRFTISRDNAKNTVYLQMNSLKPEDTAVYYCAVWYRGYYTSYAKTQLDYDYWGQGTQVTVSS

SEQ ID NO: 22682 - protein, 122 aa, Artificial Sequence
  Chemically Synthesized
QVQLQESGGGLVQAGGSLRLSCAASGNISALESMGWYRQAPGKERELVAAINRGASTNYADSVKGRFTISRDNAKNTVYLQMNSLKPEDTAVYYCAAEHPIRDPVDSRYIYWGQGTQVTVSS

SEQ ID NO: 22683 - protein, 118 aa, Artificial Sequence
  Chemically Synthesized
QVQLQESGGGLVQAGGSLRLSCAASGTIFTSVRMGWYRQAPGKEREFVASIGDGGSTNYADSVKGRFTISRDNAKNTVYLQMNSLKPEDTAVYYCAVDAGTYYYHIYWGQGTQVTVSS

SEQ ID NO: 22684 - protein, 118 aa, Artificial Sequence
  Chemically Synthesized
QVQLQESGGGLVQAGGSLRLSCAASGTISGPYIMGWYRQAPGKERELVASIDYGGSTYYADSVKGRFTISRDNAKNTVYLQMNSLKPEDTAVYYCAVWSSWSDRYGYWGQGTQVTVSS

SEQ ID NO: 22685 - protein, 122 aa, Artificial Sequence
  Chemically Synthesized
QVQLQESGGGLVQAGGSLRLSCAASGNIFPTLDMGWYRQAPGKERELVATIGDGASTYYADSVKGRFTISRDNAKNTVYLQMNSLKPEDTAVYYCAAYYTLYADRRYDHYYWGQGTQVTVSS

SEQ ID NO: 22686 - protein, 118 aa, Artificial Sequence
  Chemically Synthesized
QVQLQESGGGLVQAGGSLRLSCAASGTIFDTERMGWYRQAPGKERELVAGISQGTTTNYADSVKGRFTISRDNAKNTVYLQMNSLKPEDTAVYYCAVGYGDYEGHYYWGQGTQVTVSS

SEQ ID NO: 22687 - protein, 117 aa, Artificial Sequence
  Chemically Synthesized
QVQLQESGGGLVQAGGSLRLSCAASGYISTYSYMGWYRQAPGKEREFVAGISTGGITNYADSVKGRFTISRDNAKNTVYLQMNSLKPEDTAVYYCAVSGPDTAHTYWGQGTQVTVSS

SEQ ID NO: 22688 - protein, 117 aa, Artificial Sequence
  Chemically Synthesized
QVQLQESGGGLVQAGGSLRLSCAASGTIFLSSIMGWYRQAPGKERELVAGIASVVVPYADSVKGRFTISRDNAKNTVYLQMNSLKPEDTAVYYCAVGERSTYKLLYWGQGTQVTVSS

SEQ ID NO: 22689 - protein, 118 aa, Artificial Sequence
  Chemically Synthesized
QVQLQESGGGLVQAGGSLRLSCAASGNISYTWWMGWYRQAPGKEREFVASINYGGTTNYADSVKGRFTISRDNAKNTVYLQMNSLKPEDTAVYYCAVLLYHPRFHGYWGQGTQVTVSS

SEQ ID NO: 22690 - protein, 126 aa, Artificial Sequence
  Chemically Synthesized
QVQLQESGGGLVQAGGSLRLSCAASGSISDVAYMGWYRQAPGKERELVATINAGANTNYADSVKGRFTISRDNAKNTVYLQMNSLKPEDTAVYYCAVQEYARVDHHREPYPDHKYWGQGTQVTVSS

SEQ ID NO: 22691 - protein, 122 aa, Artificial Sequence
  Chemically Synthesized
QVQLQESGGGLVQAGGSLRLSCAASGTIFSVFYMGWYRQAPGKEREFVAAIATVVVPYADSVKGRFTISRDNAKNTVYLQMNSLKPEDTAVYYCAVLTDIVNFTDAKTFPYWGQGTQVTVSS

SEQ ID NO: 22692 - protein, 118 aa, Artificial Sequence
  Chemically Synthesized
QVQLQESGGGLVQAGGSLRLSCAASGNIFLGYRMGWYRQAPGKERELVASIGQGGSTNYADSVKGRFTISRDNAKNTVYLQMNSLKPEDTAVYYCAVHSAGDLPHYYWGQGTQVTVSS

SEQ ID NO: 22693 - protein, 118 aa, Artificial Sequence
  Chemically Synthesized
QVQLQESGGGLVQAGGSLRLSCAASGSISGDTYMGWYRQAPGKERELVAAIGRGATTYYADSVKGRFTISRDNAKNTVYLQMNSLKPEDTAVYYCAVWYYWGYDHYYWGQGTQVTVSS

SEQ ID NO: 22694 - protein, 122 aa, Artificial Sequence
  Chemically Synthesized
QVQLQESGGGLVQAGGSLRLSCAASGYISTGGVMGWYRQAPGKERELVATITDGSTTYYADSVKGRFTISRDNAKNTVYLQMNSLKPEDTAVYYCAVGDNVGYGSGSLYYYWGQGTQVTVSS

SEQ ID NO: 22695 - protein, 118 aa, Artificial Sequence
  Chemically Synthesized
QVQLQESGGGLVQAGGSLRLSCAASGTIFYYYNMGWYRQAPGKEREFVATIAVGSNTNYADSVKGRFTISRDNAKNTVYLQMNSLKPEDTAVYYCAVYYATRHYYYYWGQGTQVTVSS

SEQ ID NO: 22696 - protein, 118 aa, Artificial Sequence
  Chemically Synthesized
QVQLQESGGGLVQAGGSLRLSCAASGNISSWDYMGWYRQAPGKERELVASIGVGATTNYADSVKGRFTISRDNAKNTVYLQMNSLKPEDTAVYYCAVDEFAFRRFGYWGQGTQVTVSS

SEQ ID NO: 22697 - protein, 122 aa, Artificial Sequence
  Chemically Synthesized
QVQLQESGGGLVQAGGSLRLSCAASGSISPGTVMGWYRQAPGKEREFVAGIDDGSNTYYADSVKGRFTISRDNAKNTVYLQMNSLKPEDTAVYYCAVVRLQAVSQYARHYYWGQGTQVTVSS

SEQ ID NO: 22698 - protein, 118 aa, Artificial Sequence
  Chemically Synthesized
QVQLQESGGGLVQAGGSLRLSCAASGYISVTVGMGWYRQAPGKERELVATIGTGSITYYADSVKGRFTISRDNAKNTVYLQMNSLKPEDTAVYYCAVARTYLDYLVYWGQGTQVTVSS

SEQ ID NO: 22699 - protein, 122 aa, Artificial Sequence
  Chemically Synthesized
QVQLQESGGGLVQAGGSLRLSCAASGSISPAPAMGWYRQAPGKERELVATIGLGSTTNYADSVKGRFTISRDNAKNTVYLQMNSLKPEDTAVYYCAAEIDDYASSWDAHPYWGQGTQVTVSS

SEQ ID NO: 22700 - protein, 122 aa, Artificial Sequence
  Chemically Synthesized
QVQLQESGGGLVQAGGSLRLSCAASGTIFAYYIMGWYRQAPGKEREFVAAIAQGGNTYYADSVKGRFTISRDNAKNTVYLQMNSLKPEDTAVYYCAAIWPYYDSEYPFYYYWGQGTQVTVSS

SEQ ID NO: 22701 - protein, 126 aa, Artificial Sequence
  Chemically Synthesized
QVQLQESGGGLVQAGGSLRLSCAASGTIFDDRRMGWYRQAPGKEREFVAAIDDGGNTYYADSVKGRFTISRDNAKNTVYLQMNSLKPEDTAVYYCAARPGYYQYAYAERRRWHVYWGQGTQVTVSS

SEQ ID NO: 22702 - protein, 121 aa, Artificial Sequence
  Chemically Synthesized
QVQLQESGGGLVQAGGSLRLSCAASGYIFDFYVMGWYRQAPGKERELLPLLLVVLVPYADSVKGRFTISRDNAKNTVYLQMNSLKPEDTAVYYCAVGVSYTEDAVWGHEYWGQGTQVTVSS

SEQ ID NO: 22703 - protein, 117 aa, Artificial Sequence
  Chemically Synthesized
QVQLQESGGGLVQAGGSLRLSCAASGYISDVYTMGWYRQAPGKERELVAGIADGGSTYYADSVKGRFTISRDNAKNTVYLQMNSLKPEDTAVYYCAASVNCSMTIYWGQGTQVTVSS

SEQ ID NO: 22704 - protein, 126 aa, Artificial Sequence
  Chemically Synthesized
QVQLQESGGGLVQAGGSLRLSCAASGYISDNTDMGWYRQAPGKEREFVAAIGDGGTTNYADSVKGRFTISRDNAKNTVYLQMNSLKPEDTAVYYCAVVHYQPYRAWPSWELSFDYWGQGTQVTVSS

SEQ ID NO: 22705 - protein, 122 aa, Artificial Sequence
  Chemically Synthesized
QVQLQESGGGLVQAGGSLRLSCAASGTISDGSWMGWYRQAPGKERELVATITAGGNTYYADSVKGRFTISRDNAKNTVYLQMNSLKPEDTAVYYCAAREAAGARTVTVYDYWGQGTQVTVSS

SEQ ID NO: 22706 - protein, 117 aa, Artificial Sequence
  Chemically Synthesized
QVQLQESGGGLVQAGGSLRLSCAASGSIFNATSMGWYRQAPGKERELVAAIASVVIPYADSVKGRFTISRDNAKNTVYLQMNSLKPEDTAVYYCAVTWGNPPTHAYWGQGTQVTVSS

SEQ ID NO: 22707 - protein, 118 aa, Artificial Sequence
  Chemically Synthesized
QVQLQESGGGLVQAGGSLRLSCAASGSISAVDTMGWYRQAPGKEREFVATIDTGSNTNYADSVKGRFTISRDNAKNTVYLQMNSLKPEDTAVYYCAVYVVTSTYFPYWGQGTQVTVSS

SEQ ID NO: 22708 - protein, 109 aa, Artificial Sequence
  Chemically Synthesized
QVQLQESGGGLVQAGGSLRLSCAASGYISTYYQMGWYRQAPGKEREFVASIGYGANTNYADSVKGRFTISRDNAKNTVYLQMNSLKPEDTAVYYCAAYWGQGTQVTVSS

SEQ ID NO: 22709 - protein, 122 aa, Artificial Sequence
  Chemically Synthesized
QVQLQESGGGLVQAGGSLRLSCAASGTISRWDPMGWYRQAPGKEREFVAGIDHGANTYYADSVKGRFTISRDNAKNTVYLQMNSLKPEDTAVYYCAAVNNDPYDGELNLPYWGQGTQVTVSS

SEQ ID NO: 22710 - protein, 118 aa, Artificial Sequence
  Chemically Synthesized
QVQLQESGGGLVQAGGSLRLSCAASGSISYWYSMGWYRQAPGKERELVAGITLGGSTYYADSVKGRFTISRDNAKNTVYLQMNSLKPEDTAVYYCAVWVPKYLPHPYWGQGTQVTVSS

SEQ ID NO: 22711 - protein, 118 aa, Artificial Sequence
  Chemically Synthesized
QVQLQESGGGLVQAGGSLRLSCAASGNIFGNRGMGWYRQAPGKERELVAGIGIGGNTNYADSVKGRFTISRDNAKNTVYLQMNSLKPEDTAVYYCAAKYHYYYPFPYWGQGTQVTVSS

SEQ ID NO: 22712 - protein, 125 aa, Artificial Sequence
  Chemically Synthesized
QVQLQESGGGLVQAGGSLRLSCAASGSIFNGGYMGWYRQAPGKERELVATIGVGTTTYYADSVKGRFTISRDNAKNTVYLQMNSLKPEDTAVYYCAAGPPGDYYADDRALWLMYWGQGTQVTVSS

SEQ ID NO: 22713 - protein, 117 aa, Artificial Sequence
  Chemically Synthesized
QVQLQESGGGLVQAGGSLRLSCAASGSISSYSVMGWYRQAPGKEREFVPLLLGVVLPYADSVKGRFTISRDNAKNTVYLQMNSLKPEDTAVYYCAAYGILFYGLYYWGQGTQVTVSS

SEQ ID NO: 22714 - protein, 117 aa, Artificial Sequence
  Chemically Synthesized
QVQLQESGGGLVQAGGSLRLSCAASGYISDSSMGWYRQAPGKERELVASIAYGSSTNYADSVKGRFTISRDNAKNTVYLQMNSLKPEDTAVYYCAARNRYQGGFQYWGQGTQVTVSS

SEQ ID NO: 22715 - protein, 122 aa, Artificial Sequence
  Chemically Synthesized
QVQLQESGGGLVQAGGSLRLSCAASGTISRYRDMGWYRQAPGKEREFVATIAIGTNTNYADSVKGRFTISRDNAKNTVYLQMNSLKPEDTAVYYCALNRVLVVTRGTTLLYWGQGTQVTVSS

SEQ ID NO: 22716 - protein, 126 aa, Artificial Sequence
  Chemically Synthesized
QVQLQESGGGLVQAGGSLRLSCAASGSIFIYPYMGWYRQAPGKEREFVAAIATGATTNYADSVKGRFTISRDNAKNTVYLQMNSLKPEDTAVYYCAVDQFIRAPYNRYTYDSLAYWGQGTQVTVSS

SEQ ID NO: 22717 - protein, 114 aa, Artificial Sequence
  Chemically Synthesized
QVQLQESGGGLVQAGGSLRLSCAASGYISAVYDMGWYRQAPGKERELVASINHGTNTQYADSVKGRFTISRDNAKNTVYLQMNSLKPEDTAVYYCAVSQPFVYWGQGTQVTVSS

SEQ ID NO: 22718 - protein, 118 aa, Artificial Sequence
  Chemically Synthesized
QVQLQESGGGLVQAGGSLRLSCAASGTIFTRRFMGWYRQAPGKEREFVAGITNGGNTYYADSVKGRFTISRDNAKNTVYLQMNSLKPEDTAVYYCAAYAYNDAYFAYWGQGTQVTVSS

SEQ ID NO: 22719 - protein, 122 aa, Artificial Sequence
  Chemically Synthesized
QVQLQESGGGLVQAGGSLRLSCAASGTISAYPLMGWYRQAPGKERELVAAISTGASTYYADSVKGRFTISRDNAKNTVYLQMNSLKPEDTAVYYCAATTNRWVLPSGDYRYWGQGTQVTVSS

SEQ ID NO: 22720 - protein, 120 aa, Artificial Sequence
  Chemically Synthesized
QVQLQESGGGLVQAGGSLRLSCAASGNIFDVAFMGWYRQAPGKEREFVAAIGSGSTTYYADSVKGRFTISRDNAKNTVYLQMNSLKPEDTAVYYCAVAALDTYYSYLEYWGQGTQVTVSS

SEQ ID NO: 22721 - protein, 122 aa, Artificial Sequence
  Chemically Synthesized
QVQLQESGGGLVQAGGSLRLSCAASGNIFDPYDMGWYRQAPGKERELVASIGWGSNTNYADSVKGRFTISRDNAKNTVYLQMNSLKPEDTAVYYCAVVYTGDVYLGGTYAYWGQGTQVTVSS

SEQ ID NO: 22722 - protein, 122 aa, Artificial Sequence
  Chemically Synthesized
QVQLQESGGGLVQAGGSLRLSCAASGSISSPSPMGWYRQAPGKEREFVAAIARGTSTNYADSVKGRFTISRDNAKNTVYLQMNSLKPEDTAVYYCAVARTYYADGPDPFFYWGQGTQVTVSS

SEQ ID NO: 22723 - protein, 119 aa, Artificial Sequence
  Chemically Synthesized
QVQLQESGGGLVQAGGSLRLSCAASGTISESGYMGWYRQAPGKERELVATIAVGTTTYYADSVKGRFTISRDNAKNTVYLQMNSLKPEDTAVYYCAVIIVTDWDILTYWGQGTQVTVSS

SEQ ID NO: 22724 - protein, 118 aa, Artificial Sequence
  Chemically Synthesized
QVQLQESGGGLVQAGGSLRLSCAASGTIFYYANMGWYRQAPGKERELVAAIGWGSSTYYADSVKGRFTISRDNAKNTVYLQMNSLKPEDTAVYYCAAVWQQDGYLYYWGQGTQVTVSS

SEQ ID NO: 22725 - protein, 117 aa, Artificial Sequence
  Chemically Synthesized
QVQLQESGGGLVQAGGSLRLSCAASGNISVTRLMGWYRQAPGKEREFVATIGHGTITYYADSVKGRFTISRDNAKNTVYLQMNSLKPEDTAVYYCAVVTLFSSSFYWGQGTQVTVSS

SEQ ID NO: 22726 - protein, 122 aa, Artificial Sequence
  Chemically Synthesized
QVQLQESGGGLVQAGGSLRLSCAASGYISFNLFMGWYRQAPGKEREFVATITYGAITYYADSVKGRFTISRDNAKNTVYLQMNSLKPEDTAVYYCAAVVNWDDDDAYSFAYWGQGTQVTVSS

SEQ ID NO: 22727 - protein, 126 aa, Artificial Sequence
  Chemically Synthesized
QVQLQESGGGLVQAGGSLRLSCAASGNISIRYYMGWYRQAPGKEREFVATIGYGATTNYADSVKGRFTISRDNAKNTVYLQMNSLKPEDTAVYYCAVYAGGPPTKTYLQIDVYDYWGQGTQVTVSS

SEQ ID NO: 22728 - protein, 122 aa, Artificial Sequence
  Chemically Synthesized
QVQLQESGGGLVQAGGSLRLSCAASGTISPPDAMGWYRQAPGKEREFVATIDDGTTTYYADSVKGRFTISRDNAKNTVYLQMNSLKPEDTAVYYCAAYLTVYGYGWDPHRYWGQGTQVTVSS

SEQ ID NO: 22729 - protein, 118 aa, Artificial Sequence
  Chemically Synthesized
QVQLQESGGGLVQAGGSLRLSCAASGSISSWDWMGWYRQAPGKERELVASISVGATTNYADSVKGRFTISRDNAKNTVYLQMNSLKPEDTAVYYCAVDEGIYYGLIYWGQGTQVTVSS

SEQ ID NO: 22730 - protein, 126 aa, Artificial Sequence
  Chemically Synthesized
QVQLQESGGGLVQAGGSLRLSCAASGSISDVDYMGWYRQAPGKERELVATIAGGTITYYADSVKGRFTISRDNAKNTVYLQMNSLKPEDTAVYYCAAIVLYYGDQAYWDVDFHYYWGQGTQVTVSS

SEQ ID NO: 22731 - protein, 122 aa, Artificial Sequence
  Chemically Synthesized
QVQLQESGGGLVQAGGSLRLSCAASGNISVGGVMGWYRQAPGKERELVAGINTGWYYLYADSVKGRFTISRDNAKNTVYLQMNSLKPEDTAVYYCAVVAIDDGYYGARFGYWGQGTQVTVSS

SEQ ID NO: 22732 - protein, 125 aa, Artificial Sequence
  Chemically Synthesized
QVQLQESGGGLVQAGGSLRLSCAASGYISGRDVMGWYRQAPGKERELVASIDSVVVPYADSVKGRFTISRDNAKNTVYLQMNSLKPEDTAVYYCAAYWEDVVYDRGYGPWDLDYWGQGTQVTVSS

SEQ ID NO: 22733 - protein, 122 aa, Artificial Sequence
  Chemically Synthesized
QVQLQESGGGLVQAGGSLRLSCAASGNISPAGYMGWYRQAPGKEREFVATITQGTITYYADSVKGRFTISRDNAKNTVYLQMNSLKPEDTAVYYCAVDGPEGGGDTTTLAYWGQGTQVTVSS

SEQ ID NO: 22734 - protein, 122 aa, Artificial Sequence
  Chemically Synthesized
QVQLQESGGGLVQAGGSLRLSCAASGYISPPGSMGWYRQAPGKEREFVASITYGGNTYYADSVKGRFTISRDNAKNTVYLQMNSLKPEDTAVYYCAVPTDWYAEWLGGLDYWGQGTQVTVSS

SEQ ID NO: 22735 - protein, 121 aa, Artificial Sequence
  Chemically Synthesized
QVQLQESGGGLVQAGGSLRLSCAASGSIFAYSSMGWYRQAPGKEREFVAAIGDGGSTNYADSVKGRFTISRDNAKNTVYLQMNSLKPEDTAVYYCAADDVGDPGEGSFMYWGQGTQVTVSS

SEQ ID NO: 22736 - protein, 122 aa, Artificial Sequence
  Chemically Synthesized
QVQLQESGGGLVQAGGSLRLSCAASGYIFRDNAMGWYRQAPGKERELVAAIAAGAITNYADSVKGRFTISRDNAKNTVYLQMNSLKPEDTAVYYCAVLSNWRYATLYYYDYWGQGTQVTVSS

SEQ ID NO: 22737 - protein, 112 aa, Artificial Sequence
  Chemically Synthesized
QVQLQESGGGLVQAGGSLRLSCAASGYISQLGYMGWYRQAPGKEREFVATITAGGITYYADSVKGRFTISRDNAKNTVYLQMNSLKPEDTAVYYCAVGLRYWGQGTQVTVSS

SEQ ID NO: 22738 - protein, 122 aa, Artificial Sequence
  Chemically Synthesized
QVQLQESGGGLVQAGGSLRLSCAASGTIFQYGSMGWYRQAPGKERELVATINYGGTTNYADSVKGRFTISRDNAKNTVYLQMNSLKPEDTAVYYCAAYYGYWHDVYQYLEYWGQGTQVTVSS

SEQ ID NO: 22739 - protein, 118 aa, Artificial Sequence
  Chemically Synthesized
QVQLQESGGGLVQAGGSLRLSCAASGYISVVFIMGWYRQAPGKEREFVATISYGSTTYYADSVKGRFTISRDNAKNTVYLQMNSLKPEDTAVYYCAARYGYRNLLLYWGQGTQVTVSS

SEQ ID NO: 22740 - protein, 116 aa, Artificial Sequence
  Chemically Synthesized
QVQLQESGGGLVQAGGSLRLSCAASGNIFRSYDMGWYRQAPGKERELVAAIGPGSSTYYADSVKGRFTISRDNAKNTVYLQMNSLKPEDTAVYYCAARGGTTTIYWGQGTQVTVSS

SEQ ID NO: 22741 - protein, 122 aa, Artificial Sequence
  Chemically Synthesized
QVQLQESGGGLVQAGGSLRLSCAASGNISLDSYMGWYRQAPGKEREFVATIGVGTSTYYADSVKGRFTISRDNAKNTVYLQMNSLKPEDTAVYYCAVDQLYVYYQPYDHTYWGQGTQVTVSS

SEQ ID NO: 22742 - protein, 118 aa, Artificial Sequence
  Chemically Synthesized
QVQLQESGGGLVQAGGSLRLSCAASGNIFIVTIMGWYRQAPGKERELVATIAIGTSTYYADSVKGRFTISRDNAKNTVYLQMNSLKPEDTAVYYCAVAYDGGDPHWYWGQGTQVTVSS

SEQ ID NO: 22743 - protein, 117 aa, Artificial Sequence
  Chemically Synthesized
QVQLQESGGGLVQAGGSLRLSCAASGSIFRARDMGWYRQAPGKERELVASIAYVLLPYADSVKGRFTISRDNAKNTVYLQMNSLKPEDTAVYYCAVPGVQYPAYIYWGQGTQVTVSS

SEQ ID NO: 22744 - protein, 122 aa, Artificial Sequence
  Chemically Synthesized
QVQLQESGGGLVQAGGSLRLSCAASGTIFRPYGMGWYRQAPGKERELVAGIAAGGSTYYADSVKGRFTISRDNAKNTVYLQMNSLKPEDTAVYYCAVPYTRTIERNYYYNYWGQGTQVTVSS

SEQ ID NO: 22745 - protein, 121 aa, Artificial Sequence
  Chemically Synthesized
QVQLQESGGGLVQAGGSLRLSCAASGSISDYAMGWYRQAPGKERELVATISFGATTNYADSVKGRFTISRDNAKNTVYLQMNSLKPEDTAVYYCAVRYGGAYEKTGEYGYWGQGTQVTVSS

SEQ ID NO: 22746 - protein, 118 aa, Artificial Sequence
  Chemically Synthesized
QVQLQESGGGLVQAGGSLRLSCAASGYIFTYGRMGWYRQAPGKEREFVAAIARGTNTYYADSVKGRFTISRDNAKNTVYLQMNSLKPEDTAVYYCAAGWARYRGLTYWGQGTQVTVSS

SEQ ID NO: 22747 - protein, 118 aa, Artificial Sequence
  Chemically Synthesized
QVQLQESGGGLVQAGGSLRLSCAASGTIFIYYYMGWYRQAPGKERELVASIGPGASTNYADSVKGRFTISRDNAKNTVYLQMNSLKPEDTAVYYCAASEIGTVIFQYWGQGTQVTVSS

SEQ ID NO: 22748 - protein, 118 aa, Artificial Sequence
  Chemically Synthesized
QVQLQESGGGLVQAGGSLRLSCAASGSISDINYMGWYRQAPGKEREFVAAINYGTITYYADSVKGRFTISRDNAKNTVYLQMNSLKPEDTAVYYCAAEHQDGTSFIYWGQGTQVTVSS

SEQ ID NO: 22749 - protein, 122 aa, Artificial Sequence
  Chemically Synthesized
QVQLQESGGGLVQAGGSLRLSCAASGTIFVAQYMGWYRQAPGKERELVAGIADGAITNYADSVKGRFTISRDNAKNTVYLQMNSLKPEDTAVYYCAVVVYIGTWSWYQYWYWGQGTQVTVSS

SEQ ID NO: 22750 - protein, 118 aa, Artificial Sequence
  Chemically Synthesized
QVQLQESGGGLVQAGGSLRLSCAASGSIFPSDYMGWYRQAPGKERELVASINDGTNTYYADSVKGRFTISRDNAKNTVYLQMNSLKPEDTAVYYCAAQVTSAFAYAYWGQGTQVTVSS

SEQ ID NO: 22751 - protein, 118 aa, Artificial Sequence
  Chemically Synthesized
QVQLQESGGGLVQAGGSLRLSCAASGTIFGGHQMGWYRQAPGKEREFVATISSGATTNYADSVKGRFTISRDNAKNTVYLQMNSLKPEDTAVYYCAANPDYYGTHVYWGQGTQVTVSS

SEQ ID NO: 22752 - protein, 122 aa, Artificial Sequence
  Chemically Synthesized
QVQLQESGGGLVQAGGSLRLSCAASGTISAAPLMGWYRQAPGKERELVAAISRGTITYYADSVKGRFTISRDNAKNTVYLQMNSLKPEDTAVYYCAVQTTWQLHDDFYFRYWGQGTQVTVSS

SEQ ID NO: 22753 - protein, 125 aa, Artificial Sequence
  Chemically Synthesized
QVQLQESGGGLVQAGGSLRLSCAASGSISYGYRMGWYRQAPGKERELVATIAHGATTNYADSVKGRFTISRDNAKNTVYLQMNSLKPEDTAVYYCAVDYEIADYRDDVDYGYVYWGQGTQVTVSS

SEQ ID NO: 22754 - protein, 122 aa, Artificial Sequence
  Chemically Synthesized
QVQLQESGGGLVQAGGSLRLSCAASGTISTKVVMGWYRQAPGKEREFVATIDTGGITNYADSVKGRFTISRDNAKNTVYLQMNSLKPEDTAVYYCAAQGDADTVGDDTYWYWGQGTQVTVSS

SEQ ID NO: 22755 - protein, 115 aa, Artificial Sequence
  Chemically Synthesized
QVQLQESGGGLVQAGGSLRLSCAASGNIRTMGWYRQAPGKEREFVATITGGGITYYADSVKGRFTISRDNAKNTVYLQMNSLKPEDTAVYYCAVDGHGYGYHRYWGQGTQVTVSS

SEQ ID NO: 22756 - protein, 118 aa, Artificial Sequence
  Chemically Synthesized
QVQLQESGGGLVQAGGSLRLSCAASGTIFPPNSMGWYRQAPGKEREFVAGINDGGSTYYADSVKGRFTISRDNAKNTVYLQMNSLKPEDTAVYYCAVWNASYLTYWYWGQGTQVTVSS

SEQ ID NO: 22757 - protein, 122 aa, Artificial Sequence
  Chemically Synthesized
QVQLQESGGGLVQAGGSLRLSCAASGTIFVDLDMGWYRQAPGKERELVASIDYGGNTYYADSVKGRFTISRDNAKNTVYLQMNSLKPEDTAVYYCAADRYEYEGGATSLIYWGQGTQVTVSS

SEQ ID NO: 22758 - protein, 118 aa, Artificial Sequence
  Chemically Synthesized
QVQLQESGGGLVQAGGSLRLSCAASGTIFNPYDMGWYRQAPGKEREFVASISHGATTYYADSVKGRFTISRDNAKNTVYLQMNSLKPEDTAVYYCAAWTYVWYTHSYWGQGTQVTVSS

SEQ ID NO: 22759 - protein, 117 aa, Artificial Sequence
  Chemically Synthesized
QVQLQESGGGLVQAGGSLRLSCAASGNIFHTAMGWYRQAPGKEREFVASINAGGTTYYADSVKGRFTISRDNAKNTVYLQMNSLKPEDTAVYYCAVYGFAYFSFWYWGQGTQVTVSS

SEQ ID NO: 22760 - protein, 118 aa, Artificial Sequence
  Chemically Synthesized
QVQLQESGGGLVQAGGSLRLSCAASGNIFTGAAMGWYRQAPGKERELVAGIGSGSITYYADSVKGRFTISRDNAKNTVYLQMNSLKPEDTAVYYCAVDLYEGWALTYWGQGTQVTVSS

SEQ ID NO: 22761 - protein, 118 aa, Artificial Sequence
  Chemically Synthesized
QVQLQESGGGLVQAGGSLRLSCAASGNISYYKDMGWYRQAPGKEREFVASIATGSSTYYADSVKGRFTISRDNAKNTVYLQMNSLKPEDTAVYYCAAGDALRTRHGYWGQGTQVTVSS

SEQ ID NO: 22762 - protein, 116 aa, Artificial Sequence
  Chemically Synthesized
QVQLQESGGGLVQAGGSLRLSCAASGYISRLRMGWYRQAPGKEREFVATIGRGTSTNYADSVKGRFTISRDNAKNTVYLQMNSLKPEDTAVYYCAVIDGASEHTYWGQGTQVTVSS

SEQ ID NO: 22763 - protein, 117 aa, Artificial Sequence
  Chemically Synthesized
QVQLQESGGGLVQAGGSLRLSCAASGTIFGYVAMGWYRQAPGKERELVATINGGTTYYADSVKGRFTISRDNAKNTVYLQMNSLKPEDTAVYYCAATDGDVALHHYWGQGTQVTVSS

SEQ ID NO: 22764 - protein, 118 aa, Artificial Sequence
  Chemically Synthesized
QVQLQESGGGLVQAGGSLRLSCAASGTISGWYTMGWYRQAPGKEREFVAAISAGGTTYYADSVKGRFTISRDNAKNTVYLQMNSLKPEDTAVYYCAADSYFTYAYTYWGQGTQVTVSS

SEQ ID NO: 22765 - protein, 109 aa, Artificial Sequence
  Chemically Synthesized
QVQLQESGGGLVQAGGSLRLSCAASGSIFDVGPMGWYRQAPGKEREFVASIAYVLLPYADSVKGRFTISRDNAKNTVYLQMNSLKPEDTAVYYCAVIYWGQGTQVTVSS

SEQ ID NO: 22766 - protein, 116 aa, Artificial Sequence
  Chemically Synthesized
QVQLQESGGGLVQAGGSLRLSCAASGSIFRPSYMGWYRQAPGKERELVAGISAGGTTYYADSVKGRFTISRDNAKNTVYLQMNSLKPEDTAVYYCAVTIPYDYLYWGQGTQVTVSS

SEQ ID NO: 22767 - protein, 126 aa, Artificial Sequence
  Chemically Synthesized
QVQLQESGGGLVQAGGSLRLSCAASGSISDNPYMGWYRQAPGKEREFVAAIAYGGTTNYADSVKGRFTISRDNAKNTVYLQMNSLKPEDTAVYYCAAFYDYSTRYTWDVTVQLVYWGQGTQVTVSS

SEQ ID NO: 22768 - protein, 117 aa, Artificial Sequence
  Chemically Synthesized
QVQLQESGGGLVQAGGSLRLSCAASGTISLSWMGWYRQAPGKERELVATIDRGSSTYYADSVKGRFTISRDNAKNTVYLQMNSLKPEDTAVYYCAVDWPSRDHYLYWGQGTQVTVSS

SEQ ID NO: 22769 - protein, 118 aa, Artificial Sequence
  Chemically Synthesized
QVQLQESGGGLVQAGGSLRLSCAASGTISPRGYMGWYRQAPGKERELVAGIGFGATTYYADSVKGRFTISRDNAKNTVYLQMNSLKPEDTAVYYCAAYVAYQLYYRYWGQGTQVTVSS

SEQ ID NO: 22770 - protein, 112 aa, Artificial Sequence
  Chemically Synthesized
QVQLQESGGGLVQAGGSLRLSCAASGTMGWYRQAPGKEREFVAAIAAGSSTYYADSVKGRFTISRDNAKNTVYLQMNSLKPEDTAVYYCAANLNTYYGFGYWGQGTQVTVSS

SEQ ID NO: 22771 - protein, 126 aa, Artificial Sequence
  Chemically Synthesized
QVQLQESGGGLVQAGGSLRLSCAASGNIFLYLEMGWYRQAPGKERELVAAISYGSTTYYADSVKGRFTISRDNAKNTVYLQMNSLKPEDTAVYYCAAVNVGQNRRGWYTTDVHGYWGQGTQVTVSS

SEQ ID NO: 22772 - protein, 117 aa, Artificial Sequence
  Chemically Synthesized
QVQLQESGGGLVQAGGSLRLSCAASGTIFLSRAMGWYRQAPGKEREFVATMMVVVLPYADSVKGRFTISRDNAKNTVYLQMNSLKPEDTAVYYCAAVVHTSRGYYYWGQGTQVTVSS

SEQ ID NO: 22773 - protein, 122 aa, Artificial Sequence
  Chemically Synthesized
QVQLQESGGGLVQAGGSLRLSCAASGNIFPVQYMGWYRQAPGKEREFVASISQGTTTYYADSVKGRFTISRDNAKNTVYLQMNSLKPEDTAVYYCAAYGTELVIFYTDHVYWGQGTQVTVSS

SEQ ID NO: 22774 - protein, 122 aa, Artificial Sequence
  Chemically Synthesized
QVQLQESGGGLVQAGGSLRLSCAASGTISPAHNMGWYRQAPGKERELVAAITTGGTTNYADSVKGRFTISRDNAKNTVYLQMNSLKPEDTAVYYCAATPYYYGDTSWYHNYWGQGTQVTVSS

SEQ ID NO: 22775 - protein, 117 aa, Artificial Sequence
  Chemically Synthesized
QVQLQESGGGLVQAGGSLRLSCAASGYIFPTAYMGWYRQAPGKERELVAGIASGGITNYADSVKGRFTISRDNAKNTVYLQMNSLKPEDTAVYYCAVYADGDIGLYWGQGTQVTVSS

SEQ ID NO: 22776 - protein, 122 aa, Artificial Sequence
  Chemically Synthesized
QVQLQESGGGLVQAGGSLRLSCAASGTIFLDANMGWYRQAPGKERELVASISTGASTNYADSVKGRFTISRDNAKNTVYLQMNSLKPEDTAVYYCAANELVYPDRYTYFPYWGQGTQVTVSS

SEQ ID NO: 22777 - protein, 118 aa, Artificial Sequence
  Chemically Synthesized
QVQLQESGGGLVQAGGSLRLSCAASGTISVFDGMGWYRQAPGKEREFVATIDLGTTTNYADSVKGRFTISRDNAKNTVYLQMNSLKPEDTAVYYCAANYRTAASHYYWGQGTQVTVSS

SEQ ID NO: 22778 - protein, 121 aa, Artificial Sequence
  Chemically Synthesized
QVQLQESGGGLVQAGGSLRLSCAASGTIFGDDQMGWYRQAPGKEREFVAVLVLVVIPYADSVKGRFTISRDNAKNTVYLQMNSLKPEDTAVYYCAARGYLVLRYAYAHRYWGQGTQVTVSS

SEQ ID NO: 22779 - protein, 125 aa, Artificial Sequence
  Chemically Synthesized
QVQLQESGGGLVQAGGSLRLSCAASGSIFIAFTMGWYRQAPGKEREFVAAINGGSTQYADSVKGRFTISRDNAKNTVYLQMNSLKPEDTAVYYCAVKTQIYIADDYGRGGVHFYWGQGTQVTVSS

SEQ ID NO: 22780 - protein, 125 aa, Artificial Sequence
  Chemically Synthesized
QVQLQESGGGLVQAGGSLRLSCAASGNIFDYQYMGWYRQAPGKEREFVAGINQGSNTYYADSVKGRFTISRDNAKNTVYLQMNSLKPEDTAVYYCAVIDYNSSNSGVLCTKTMYWGQGTQVTVSS

SEQ ID NO: 22781 - protein, 118 aa, Artificial Sequence
  Chemically Synthesized
QVQLQESGGGLVQAGGSLRLSCAASGSISLYVYMGWYRQAPGKERELVAAISYGSSTNYADSVKGRFTISRDNAKNTVYLQMNSLKPEDTAVYYCAVVTDSRPYLVYWGQGTQVTVSS

SEQ ID NO: 22782 - protein, 126 aa, Artificial Sequence
  Chemically Synthesized
QVQLQESGGGLVQAGGSLRLSCAASGNISQPYYMGWYRQAPGKERELVAGITWGGTTYYADSVKGRFTISRDNAKNTVYLQMNSLKPEDTAVYYCAAWWDETYADTVDYPYSLVYWGQGTQVTVSS

SEQ ID NO: 22783 - protein, 110 aa, Artificial Sequence
  Chemically Synthesized
QVQLQESGGGLVQAGGSLRLSCAASGTIFSRWAMGWYRQAPGKEREFVAAINSGGNTNYADSVKGRFTISRDNAKNTVYLQMNSLKPEDTAVYYCAVYYWGQGTQVTVSS

SEQ ID NO: 22784 - protein, 122 aa, Artificial Sequence
  Chemically Synthesized
QVQLQESGGGLVQAGGSLRLSCAASGTIFPHIIMGWYRQAPGKERELVATIDGGGITNYADSVKGRFTISRDNAKNTVYLQMNSLKPEDTAVYYCAVYQGYYYFLRIAHPYWGQGTQVTVSS

SEQ ID NO: 22785 - protein, 117 aa, Artificial Sequence
  Chemically Synthesized
QVQLQESGGGLVQAGGSLRLSCAASGSISRDRAMGWYRQAPGKEREFVAGINVGLVPYADSVKGRFTISRDNAKNTVYLQMNSLKPEDTAVYYCAVDVALTYQHWYWGQGTQVTVSS

SEQ ID NO: 22786 - protein, 116 aa, Artificial Sequence
  Chemically Synthesized
QVQLQESGGGLVQAGGSLRLSCAASGTISRSTMGWYRQAPGKERELVAGITDGGNTYYADSVKGRFTISRDNAKNTVYLQMNSLKPEDTAVYYCAVTLTLLTRLYWGQGTQVTVSS

SEQ ID NO: 22787 - protein, 117 aa, Artificial Sequence
  Chemically Synthesized
QVQLQESGGGLVQAGGSLRLSCAASGNISTLRMGWYRQAPGKEREFVAGITYGTSTNYADSVKGRFTISRDNAKNTVYLQMNSLKPEDTAVYYCAAYKTVYDAHAYWGQGTQVTVSS

SEQ ID NO: 22788 - protein, 118 aa, Artificial Sequence
  Chemically Synthesized
QVQLQESGGGLVQAGGSLRLSCAASGNISPQTGMGWYRQAPGKERELVAAITYGGNTNYADSVKGRFTISRDNAKNTVYLQMNSLKPEDTAVYYCAAVYPYRGRLLYWGQGTQVTVSS

SEQ ID NO: 22789 - protein, 115 aa, Artificial Sequence
  Chemically Synthesized
QVQLQESGGGLVQAGGSLRLSCAASGLPGFMGWYRQAPGKERELVAGIAQGGTTNYADSVKGRFTISRDNAKNTVYLQMNSLKPEDTAVYYCAVYDSPYVHHIYWGQGTQVTVSS

SEQ ID NO: 22790 - protein, 118 aa, Artificial Sequence
  Chemically Synthesized
QVQLQESGGGLVQAGGSLRLSCAASGYISRYFRMGWYRQAPGKERELVATIADGGITNYADSVKGRFTISRDNAKNTVYLQMNSLKPEDTAVYYCAAGYRDVGSHAYWGQGTQVTVSS

SEQ ID NO: 22791 - protein, 126 aa, Artificial Sequence
  Chemically Synthesized
QVQLQESGGGLVQAGGSLRLSCAASGNISIPYNMGWYRQAPGKERELVAAINRGSNTNYADSVKGRFTISRDNAKNTVYLQMNSLKPEDTAVYYCAAHAGWFGTWPTGYRYFHSYWGQGTQVTVSS

SEQ ID NO: 22792 - protein, 117 aa, Artificial Sequence
  Chemically Synthesized
QVQLQESGGGLVQAGGSLRLSCAASGSISDIKDMGWYRQAPGKEREFVAAIAYGATPYADSVKGRFTISRDNAKNTVYLQMNSLKPEDTAVYYCAVGDHADQVYGYWGQGTQVTVSS

SEQ ID NO: 22793 - protein, 122 aa, Artificial Sequence
  Chemically Synthesized
QVQLQESGGGLVQAGGSLRLSCAASGSISLLYAMGWYRQAPGKEREFVAAINDGGSTNYADSVKGRFTISRDNAKNTVYLQMNSLKPEDTAVYYCAALLGTRGGQYSSHYYWGQGTQVTVSS

SEQ ID NO: 22794 - protein, 121 aa, Artificial Sequence
  Chemically Synthesized
QVQLQESGGGLVQAGGSLRLSCAASGTIFPVLMGWYRQAPGKEREFVAAIAFGGSTYYADSVKGRFTISRDNAKNTVYLQMNSLKPEDTAVYYCAVRVYAYSWFTSGLYYWGQGTQVTVSS

SEQ ID NO: 22795 - protein, 118 aa, Artificial Sequence
  Chemically Synthesized
QVQLQESGGGLVQAGGSLRLSCAASGNISYRWVMGWYRQAPGKERELVAAISLGTTYYADSVKGRFTISRDNAKNTVYLQMNSLKPEDTAVYYCAVSRARYTRQYVYWGQGTQVTVSS

SEQ ID NO: 22796 - protein, 118 aa, Artificial Sequence
  Chemically Synthesized
QVQLQESGGGLVQAGGSLRLSCAASGNISYPRYMGWYRQAPGKEREFVAAITIGGSTYYADSVKGRFTISRDNAKNTVYLQMNSLKPEDTAVYYCAVRDLYYRIYDYWGQGTQVTVSS

SEQ ID NO: 22797 - protein, 118 aa, Artificial Sequence
  Chemically Synthesized
QVQLQESGGGLVQAGGSLRLSCAASGTIFGTDYMGWYRQAPGKERELVASINGGANTNYADSVKGRFTISRDNAKNTVYLQMNSLKPEDTAVYYCAAGNDTLSGFRYWGQGTQVTVSS

SEQ ID NO: 22798 - protein, 126 aa, Artificial Sequence
  Chemically Synthesized
QVQLQESGGGLVQAGGSLRLSCAASGTISTGGAMGWYRQAPGKERELVAAISRGAITNYADSVKGRFTISRDNAKNTVYLQMNSLKPEDTAVYYCAAYDPSYGDRITDDNVDHYYWGQGTQVTVSS

SEQ ID NO: 22799 - protein, 115 aa, Artificial Sequence
  Chemically Synthesized
QVQLQESGGGLVQAGGSLRLSCAASGSISYVPGMGWYRQAPGKEREFVAGIAWGTTTYYADSVKGRFTISRDNAKNTVYLQMNSLKPEDTAVYYCAVDLHHHYYWGQGTQVTVSS

SEQ ID NO: 22800 - protein, 118 aa, Artificial Sequence
  Chemically Synthesized
QVQLQESGGGLVQAGGSLRLSCAASGNISTPSAMGWYRQAPGKEREFVASIAHGGTTNYADSVKGRFTISRDNAKNTVYLQMNSLKPEDTAVYYCAAYAYNVVYHGYWGQGTQVTVSS

SEQ ID NO: 22801 - protein, 118 aa, Artificial Sequence
  Chemically Synthesized
QVQLQESGGGLVQAGGSLRLSCAASGYISSFPFMGWYRQAPGKEREFVASIDAGSTTNYADSVKGRFTISRDNAKNTVYLQMNSLKPEDTAVYYCAVITYYHGWHYYWGQGTQVTVSS

SEQ ID NO: 22802 - protein, 117 aa, Artificial Sequence
  Chemically Synthesized
QVQLQESGGGLVQAGGSLRLSCAASGTIFVESWMGWYRQAPGKERELVAAISTVLIPYADSVKGRFTISRDNAKNTVYLQMNSLKPEDTAVYYCAVSWFLVPIHAYWGQGTQVTVSS

SEQ ID NO: 22803 - protein, 117 aa, Artificial Sequence
  Chemically Synthesized
QVQLQESGGGLVQAGGSLRLSCAASGSISYHYPMGWYRQAPGKERELVASISSVLIPYADSVKGRFTISRDNAKNTVYLQMNSLKPEDTAVYYCAVAAWKNTYLLYWGQGTQVTVSS

SEQ ID NO: 22804 - protein, 109 aa, Artificial Sequence
  Chemically Synthesized
QVQLQESGGGLVQAGGSLRLSCAASGTISWYDIMGWYRQAPGKEREFVAAIGGGSSTYYADSVKGRFTISRDNAKNTVYLQMNSLKPEDTAVYYCALYWGQGTQVTVSS

SEQ ID NO: 22805 - protein, 121 aa, Artificial Sequence
  Chemically Synthesized
QVQLQESGGGLVQAGGSLRLSCAASGSISDLDDMGWYRQAPGKEREFVASIASGGTTNYADSVKGRFTISRDNAKNTVYLQMNSLKPEDTAVYYCAAADANFTIRSRYIYWGQGTQVTVSS

SEQ ID NO: 22806 - protein, 118 aa, Artificial Sequence
  Chemically Synthesized
QVQLQESGGGLVQAGGSLRLSCAASGYIFPLYYMGWYRQAPGKERELVAAIAAGGITYYADSVKGRFTISRDNAKNTVYLQMNSLKPEDTAVYYCAAFSFTSERHVYWGQGTQVTVSS

SEQ ID NO: 22807 - protein, 118 aa, Artificial Sequence
  Chemically Synthesized
QVQLQESGGGLVQAGGSLRLSCAASGTIFYYNTMGWYRQAPGKERELVASIGVGSNTYYADSVKGRFTISRDNAKNTVYLQMNSLKPEDTAVYYCAVRRYGRSRLSYWGQGTQVTVSS

SEQ ID NO: 22808 - protein, 112 aa, Artificial Sequence
  Chemically Synthesized
QVQLQESGGGLVQAGGSLRLSCAASGNISITRYMGWYRQAPGKEREFVAAITYGGSTNYADSVKGRFTISRDNAKNTVYLQMNSLKPEDTAVYYCAVRRRYWGQGTQVTVSS

SEQ ID NO: 22809 - protein, 118 aa, Artificial Sequence
  Chemically Synthesized
QVQLQESGGGLVQAGGSLRLSCAASGTISRRTRMGWYRQAPGKERELVAGIDRGSNTNYADSVKGRFTISRDNAKNTVYLQMNSLKPEDTAVYYCAVRDWRRDPYRYWGQGTQVTVSS

SEQ ID NO: 22810 - protein, 126 aa, Artificial Sequence
  Chemically Synthesized
QVQLQESGGGLVQAGGSLRLSCAASGYIFNARRMGWYRQAPGKERELVASISYGSSTYYADSVKGRFTISRDNAKNTVYLQMNSLKPEDTAVYYCAVIWRYGRTDTWVAKGRHAYWGQGTQVTVSS

SEQ ID NO: 22811 - protein, 118 aa, Artificial Sequence
  Chemically Synthesized
QVQLQESGGGLVQAGGSLRLSCAASGNIFALYIMGWYRQAPGKERELVATIGIGGSTYYADSVKGRFTISRDNAKNTVYLQMNSLKPEDTAVYYCAVKRTRQYRHYYWGQGTQVTVSS

SEQ ID NO: 22812 - protein, 118 aa, Artificial Sequence
  Chemically Synthesized
QVQLQESGGGLVQAGGSLRLSCAASGNISRGGDMGWYRQAPGKERELVAGIDYGASTYYADSVKGRFTISRDNAKNTVYLQMNSLKPEDTAVYYCAADPLAEWVHGYWGQGTQVTVSS

SEQ ID NO: 22813 - protein, 122 aa, Artificial Sequence
  Chemically Synthesized
QVQLQESGGGLVQAGGSLRLSCAASGSISPWRGMGWYRQAPGKEREFVAGIDRVVVPYADSVKGRFTISRDNAKNTVYLQMNSLKPEDTAVYYCAVNYGQEYRGWSGLLFYWGQGTQVTVSS

SEQ ID NO: 22814 - protein, 118 aa, Artificial Sequence
  Chemically Synthesized
QVQLQESGGGLVQAGGSLRLSCAASGNIFITVHMGWYRQAPGKEREFVATITVGATTNYADSVKGRFTISRDNAKNTVYLQMNSLKPEDTAVYYCAADEWVIEGHAYWGQGTQVTVSS

SEQ ID NO: 22815 - protein, 122 aa, Artificial Sequence
  Chemically Synthesized
QVQLQESGGGLVQAGGSLRLSCAASGSIFQYADMGWYRQAPGKERELVAAIAVGSNTNYADSVKGRFTISRDNAKNTVYLQMNSLKPEDTAVYYCAVEWSNRWDYYYYHDYWGQGTQVTVSS

SEQ ID NO: 22816 - protein, 126 aa, Artificial Sequence
  Chemically Synthesized
QVQLQESGGGLVQAGGSLRLSCAASGSISSSLDMGWYRQAPGKEREFVATIDQGGTTYYADSVKGRFTISRDNAKNTVYLQMNSLKPEDTAVYYCAVEPWRPIYYYSYYYADLYYWGQGTQVTVSS

SEQ ID NO: 22817 - protein, 120 aa, Artificial Sequence
  Chemically Synthesized
QVQLQESGGGLVQAGGSLRLSCAASGSIFWAWSMGWYRQAPGKEREFVATIAIGTTTNYADSVKGRFTISRDNAKNTVYLQMNSLKPEDTAVYYCAATPDQTDPYVHSYWGQGTQVTVSS

SEQ ID NO: 22818 - protein, 123 aa, Artificial Sequence
  Chemically Synthesized
QVQLQESGGGLVQAGGSLRLSCAASGYISYLCWMGWYRQAPGKERELVATIDIGGNTNYADSVKGRFTISRDNAKNTVYLQMNSLKPEDTAVYYCAVTRDIPTLATDTKHAYWGQGTQVTVSS

SEQ ID NO: 22819 - protein, 122 aa, Artificial Sequence
  Chemically Synthesized
QVQLQESGGGLVQAGGSLRLSCAASGNIFGVTAMGWYRQAPGKEREFVASIDDGSTTYYADSVKGRFTISRDNAKNTVYLQMNSLKPEDTAVYYCAVWEWFYAEYLYDLVYWGQGTQVTVSS

SEQ ID NO: 22820 - protein, 118 aa, Artificial Sequence
  Chemically Synthesized
QVQLQESGGGLVQAGGSLRLSCAASGYISYLYGMGWYRQAPGKERELVAAITNGSTTNYADSVKGRFTISRDNAKNTVYLQMNSLKPEDTAVYYCAATGYVNYAFVYWGQGTQVTVSS

SEQ ID NO: 22821 - protein, 126 aa, Artificial Sequence
  Chemically Synthesized
QVQLQESGGGLVQAGGSLRLSCAASGTIFYAAQMGWYRQAPGKEREFVASIAIGGNTNYADSVKGRFTISRDNAKNTVYLQMNSLKPEDTAVYYCAVYYLYDEDIEYYWEWTHAYWGQGTQVTVSS

SEQ ID NO: 22822 - protein, 126 aa, Artificial Sequence
  Chemically Synthesized
QVQLQESGGGLVQAGGSLRLSCAASGYIFDRDYMGWYRQAPGKEREFVAAIDQGSSTYYADSVKGRFTISRDNAKNTVYLQMNSLKPEDTAVYYCAAYDEPDPNWDGYGIYFYYYWGQGTQVTVSS

SEQ ID NO: 22823 - protein, 117 aa, Artificial Sequence
  Chemically Synthesized
QVQLQESGGGLVQAGGSLRLSCAASGNIFHRSMGWYRQAPGKERELVASITYGANTYYADSVKGRFTISRDNAKNTVYLQMNSLKPEDTAVYYCAVEGNGNVYLTYWGQGTQVTVSS

SEQ ID NO: 22824 - protein, 118 aa, Artificial Sequence
  Chemically Synthesized
QVQLQESGGGLVQAGGSLRLSCAASGYIFWDGAMGWYRQAPGKEREFVASIAYGGTTYYADSVKGRFTISRDNAKNTVYLQMNSLKPEDTAVYYCAALQTYTRRLRYWGQGTQVTVSS

SEQ ID NO: 22825 - protein, 116 aa, Artificial Sequence
  Chemically Synthesized
QVQLQESGGGLVQAGGSLRLSCAASGYISRPNDMGWYRQAPGKEREFVAAISYGTTTNYADSVKGRFTISRDNAKNTVYLQMNSLKPEDTAVYYCAVERYATLGYWGQGTQVTVSS

SEQ ID NO: 22826 - protein, 118 aa, Artificial Sequence
  Chemically Synthesized
QVQLQESGGGLVQAGGSLRLSCAASGSISAYVYMGWYRQAPGKEREFVAAIDSGASTNYADSVKGRFTISRDNAKNTVYLQMNSLKPEDTAVYYCAARTGFETKHPYWGQGTQVTVSS

SEQ ID NO: 22827 - protein, 121 aa, Artificial Sequence
  Chemically Synthesized
QVQLQESGGGLVQAGGSLRLSCAASGNISGSFMGWYRQAPGKEREFVATIDGGGNTNYADSVKGRFTISRDNAKNTVYLQMNSLKPEDTAVYYCAAPDPGLYWFYIRLTYWGQGTQVTVSS

SEQ ID NO: 22828 - protein, 126 aa, Artificial Sequence
  Chemically Synthesized
QVQLQESGGGLVQAGGSLRLSCAASGTISAADWMGWYRQAPGKERELVASITVGSITYYADSVKGRFTISRDNAKNTVYLQMNSLKPEDTAVYYCAVVGARYDDLTTWYYSRHDYWGQGTQVTVSS

SEQ ID NO: 22829 - protein, 126 aa, Artificial Sequence
  Chemically Synthesized
QVQLQESGGGLVQAGGSLRLSCAASGNISAYDDMGWYRQAPGKEREFVASITVGGTTYYADSVKGRFTISRDNAKNTVYLQMNSLKPEDTAVYYCAVRGAEISLGWWYYEEAYYYWGQGTQVTVSS

SEQ ID NO: 22830 - protein, 122 aa, Artificial Sequence
  Chemically Synthesized
QVQLQESGGGLVQAGGSLRLSCAASGTISGFSFMGWYRQAPGKEREFVAGITSGATTYYADSVKGRFTISRDNAKNTVYLQMNSLKPEDTAVYYCAVYRRGGRSVTLTFRYWGQGTQVTVSS

SEQ ID NO: 22831 - protein, 117 aa, Artificial Sequence
  Chemically Synthesized
QVQLQESGGGLVQAGGSLRLSCAASGTIFRNDIMGWYRQAPGKERELVAGIDTGTTTNYADSVKGRFTISRDNAKNTVYLQMNSLKPEDTAVYYCAAGLSCVFRIYWGQGTQVTVSS

SEQ ID NO: 22832 - protein, 122 aa, Artificial Sequence
  Chemically Synthesized
QVQLQESGGGLVQAGGSLRLSCAASGNIFEYIVMGWYRQAPGKEREFVASIAYGTSTNYADSVKGRFTISRDNAKNTVYLQMNSLKPEDTAVYYCAAAQLNPANGVGWHAYWGQGTQVTVSS

SEQ ID NO: 22833 - protein, 118 aa, Artificial Sequence
  Chemically Synthesized
QVQLQESGGGLVQAGGSLRLSCAASGNISRRYTMGWYRQAPGKEREFVAGINYGGSTYYADSVKGRFTISRDNAKNTVYLQMNSLKPEDTAVYYCAVVDSLRTTVIYWGQGTQVTVSS

SEQ ID NO: 22834 - protein, 117 aa, Artificial Sequence
  Chemically Synthesized
QVQLQESGGGLVQAGGSLRLSCAASGYISPYIMGWYRQAPGKERELVATINDGAITNYADSVKGRFTISRDNAKNTVYLQMNSLKPEDTAVYYCAVHNRDTAYLDYWGQGTQVTVSS

SEQ ID NO: 22835 - protein, 122 aa, Artificial Sequence
  Chemically Synthesized
QVQLQESGGGLVQAGGSLRLSCAASGNIFTPLRMGWYRQAPGKEREFVASIGYGGTTYYADSVKGRFTISRDNAKNTVYLQMNSLKPEDTAVYYCAVVKALGPYPYNGHAYWGQGTQVTVSS

SEQ ID NO: 22836 - protein, 126 aa, Artificial Sequence
  Chemically Synthesized
QVQLQESGGGLVQAGGSLRLSCAASGNIFYLYPMGWYRQAPGKEREFVAAIAGGTTTNYADSVKGRFTISRDNAKNTVYLQMNSLKPEDTAVYYCAAANAGIYFASYWGPWVFIYWGQGTQVTVSS

SEQ ID NO: 22837 - protein, 115 aa, Artificial Sequence
  Chemically Synthesized
QVQLQESGGGLVQAGGSLRLSCAASGTISTLHDMGWYRQAPGKEREFVAGITFGATTYYADSVKGRFTISRDNAKNTVYLQMNSLKPEDTAVYYCAVYSSLLLYWGQGTQVTVSS

SEQ ID NO: 22838 - protein, 118 aa, Artificial Sequence
  Chemically Synthesized
QVQLQESGGGLVQAGGSLRLSCAASGYIFIRTIMGWYRQAPGKERELVAAINGGSSTYYADSVKGRFTISRDNAKNTVYLQMNSLKPEDTAVYYCAVDRQSGGVFYYWGQGTQVTVSS

SEQ ID NO: 22839 - protein, 121 aa, Artificial Sequence
  Chemically Synthesized
QVQLQESGGGLVQAGGSLRLSCAASGSISPNGMGWYRQAPGKERELVASIDLGTSTNYADSVKGRFTISRDNAKNTVYLQMNSLKPEDTAVYYCAVFGQPTDVEDFDHVYWGQGTQVTVSS

SEQ ID NO: 22840 - protein, 117 aa, Artificial Sequence
  Chemically Synthesized
QVQLQESGGGLVQAGGSLRLSCAASGTIFLTTNMGWYRQAPGKEREFVAGITSGTSTYYADSVKGRFTISRDNAKNTVYLQMNSLKPEDTAVYYCAAYVYRSQFAYWGQGTQVTVSS

SEQ ID NO: 22841 - protein, 125 aa, Artificial Sequence
  Chemically Synthesized
QVQLQESGGGLVQAGGSLRLSCAASGYISGSQYMGWYRQAPGKEREFVAAIAFGTNTNYADSVKGRFTISRDNAKNTVYLQMNSLKPEDTAVYYCAVFRAYDDRYYHFDTEYAYWGQGTQVTVSS

SEQ ID NO: 22842 - protein, 120 aa, Artificial Sequence
  Chemically Synthesized
QVQLQESGGGLVQAGGSLRLSCAASGTIFRYTEMGWYRQAPGKERELVATRGAITNYADSVKGRFTISRDNAKNTVYLQMNSLKPEDTAVYYCAAGDDHYYVTYYTHAYWGQGTQVTVSS

SEQ ID NO: 22843 - protein, 117 aa, Artificial Sequence
  Chemically Synthesized
QVQLQESGGGLVQAGGSLRLSCAASGNIFPLYGMGWYRQAPGKEREFVALLLLVLLPYADSVKGRFTISRDNAKNTVYLQMNSLKPEDTAVYYCAVGSGYDRDYRYWGQGTQVTVSS

SEQ ID NO: 22844 - protein, 113 aa, Artificial Sequence
  Chemically Synthesized
QVQLQESGGGLVQAGGSLRLSCAASGTISWSSNMGWYRQAPGKERELVATIGANTYYADSVKGRFTISRDNAKNTVYLQMNSLKPEDTAVYYCAALINPYYYWGQGTQVTVSS

SEQ ID NO: 22845 - protein, 117 aa, Artificial Sequence
  Chemically Synthesized
QVQLQESGGGLVQAGGSLRLSCAASGYIFLAWYMGWYRQAPGKERELVAGIAYGASTNYADSVKGRFTISRDNAKNTVYLQMNSLKPEDTAVYYCAAPGSRLTLFYWGQGTQVTVSS

SEQ ID NO: 22846 - protein, 118 aa, Artificial Sequence
  Chemically Synthesized
QVQLQESGGGLVQAGGSLRLSCAASGNISYVSWMGWYRQAPGKERELVASINWGSITYYADSVKGRFTISRDNAKNTVYLQMNSLKPEDTAVYYCAADRYGYTHHDYWGQGTQVTVSS

SEQ ID NO: 22847 - protein, 122 aa, Artificial Sequence
  Chemically Synthesized
QVQLQESGGGLVQAGGSLRLSCAASGNIFAIRIMGWYRQAPGKEREFVASITEGSNTNYADSVKGRFTISRDNAKNTVYLQMNSLKPEDTAVYYCAVWYDYGYNYFWSFYYWGQGTQVTVSS

SEQ ID NO: 22848 - protein, 118 aa, Artificial Sequence
  Chemically Synthesized
QVQLQESGGGLVQAGGSLRLSCAASGNISYPDVMGWYRQAPGKEREFVASIGAGTITNYADSVKGRFTISRDNAKNTVYLQMNSLKPEDTAVYYCAVDHPFADGFGYWGQGTQVTVSS

SEQ ID NO: 22849 - protein, 125 aa, Artificial Sequence
  Chemically Synthesized
QVQLQESGGGLVQAGGSLRLSCAASGSIFALRNMGWYRQAPGKEREFVAAINYGGITYYADSVKGRFTISRDNAKNTVYLQMNSLKPEDTAVYYCAVRYRYWSQYAPRTSRHAYWGQGTQVTVSS

SEQ ID NO: 22850 - protein, 122 aa, Artificial Sequence
  Chemically Synthesized
QVQLQESGGGLVQAGGSLRLSCAASGTISFSPAMGWYRQAPGKERELVASIAYGTNTNYADSVKGRFTISRDNAKNTVYLQMNSLKPEDTAVYYCAVVSISVDVGRSWYNYWGQGTQVTVSS

SEQ ID NO: 22851 - protein, 118 aa, Artificial Sequence
  Chemically Synthesized
QVQLQESGGGLVQAGGSLRLSCAASGTIFQQYSMGWYRQAPGKERELVAGIDYGTNTYYADSVKGRFTISRDNAKNTVYLQMNSLKPEDTAVYYCAAFDYSPSGHIYWGQGTQVTVSS

SEQ ID NO: 22852 - protein, 111 aa, Artificial Sequence
  Chemically Synthesized
QVQLQESGGGLVQAGGSLRLSCAASGSISYVWDMGWYRQAPGKERELVASIASGGSTYYADSVKGRFTISRDNAKNTVYLQMNSLKPEDTAVYYCAYHDYWGQGTQVTVSS

SEQ ID NO: 22853 - protein, 116 aa, Artificial Sequence
  Chemically Synthesized
QVQLQESGGGLVQAGGSLRLSCAASGTIFIGGYMGWYRQAPGKEREFSINPGTITNYADSVKGRFTISRDNAKNTVYLQMNSLKPEDTAVYYCAVDQDQITLHSYWGQGTQVTVSS

SEQ ID NO: 22854 - protein, 126 aa, Artificial Sequence
  Chemically Synthesized
QVQLQESGGGLVQAGGSLRLSCAASGTIFTHHTMGWYRQAPGKEREFVATITYGANTYYADSVKGRFTISRDNAKNTVYLQMNSLKPEDTAVYYCAVLYRRPGGYWYVTRRSHRYWGQGTQVTVSS

SEQ ID NO: 22855 - protein, 118 aa, Artificial Sequence
  Chemically Synthesized
QVQLQESGGGLVQAGGSLRLSCAASGYISGRRYMGWYRQAPGKEREFVASIALGGTTNYADSVKGRFTISRDNAKNTVYLQMNSLKPEDTAVYYCAADYDREDTYDYWGQGTQVTVSS

SEQ ID NO: 22856 - protein, 118 aa, Artificial Sequence
  Chemically Synthesized
QVQLQESGGGLVQAGGSLRLSCAASGTIFAFADMGWYRQAPGKEREFVATIGGGGSTNYADSVKGRFTISRDNAKNTVYLQMNSLKPEDTAVYYCAALRDYDDAHYYWGQGTQVTVSS

SEQ ID NO: 22857 - protein, 117 aa, Artificial Sequence
  Chemically Synthesized
QVQLQESGGGLVQAGGSLRLSCAASGSIFPSYYMGWYRQAPGKEREFVATIAVGGSTYYADSVKGRFTISRDNAKNTVYLQMNSLKPEDTAVYYCAARNAPYSVIYWGQGTQVTVSS

SEQ ID NO: 22858 - protein, 121 aa, Artificial Sequence
  Chemically Synthesized
QVQLQESGGGLVQAGGSLRLSCAASGNISSHSMGWYRQAPGKERELVAAINTGSSTYYADSVKGRFTISRDNAKNTVYLQMNSLKPEDTAVYYCAAFTDDNTLRNLFHVYWGQGTQVTVSS

SEQ ID NO: 22859 - protein, 126 aa, Artificial Sequence
  Chemically Synthesized
QVQLQESGGGLVQAGGSLRLSCAASGYISRRVQMGWYRQAPGKEREFVAGIAKGANTYYADSVKGRFTISRDNAKNTVYLQMNSLKPEDTAVYYCAVPFRWYRTPTLSVSPPFYYWGQGTQVTVSS

SEQ ID NO: 22860 - protein, 126 aa, Artificial Sequence
  Chemically Synthesized
QVQLQESGGGLVQAGGSLRLSCAASGNISGYAYMGWYRQAPGKEREFVAAINFGSNTYYADSVKGRFTISRDNAKNTVYLQMNSLKPEDTAVYYCAVAIIQPWKRGDDLYRSHRYWGQGTQVTVSS

SEQ ID NO: 22861 - protein, 118 aa, Artificial Sequence
  Chemically Synthesized
QVQLQESGGGLVQAGGSLRLSCAASGSIFYTDDMGWYRQAPGKEREFVATISDGSITNYADSVKGRFTISRDNAKNTVYLQMNSLKPEDTAVYYCAVYDGYYHYHDYWGQGTQVTVSS

SEQ ID NO: 22862 - protein, 118 aa, Artificial Sequence
  Chemically Synthesized
QVQLQESGGGLVQAGGSLRLSCAASGTISLREYMGWYRQAPGKERELVARCYYQYADSVKGRFTISRDNAKNTVYLQMNSLKPEDTAVYYCAADQDYLDTDAYGFYYWGQGTQVTVSS

SEQ ID NO: 22863 - protein, 118 aa, Artificial Sequence
  Chemically Synthesized
QVQLQESGGGLVQAGGSLRLSCAASGSISVYGYMGWYRQAPGKERELVASITNGSTTYYADSVKGRFTISRDNAKNTVYLQMNSLKPEDTAVYYCAVSEYDVTAHSYWGQGTQVTVSS

SEQ ID NO: 22864 - protein, 121 aa, Artificial Sequence
  Chemically Synthesized
QVQLQESGGGLVQAGGSLRLSCAASGSISPRVTMGWYRQAPGKEREFVAGIMLVLIPYADSVKGRFTISRDNAKNTVYLQMNSLKPEDTAVYYCAVSLPVVQGGSDPHDYWGQGTQVTVSS

SEQ ID NO: 22865 - protein, 126 aa, Artificial Sequence
  Chemically Synthesized
QVQLQESGGGLVQAGGSLRLSCAASGTIFAIWAMGWYRQAPGKERELVAGIGEGGSTNYADSVKGRFTISRDNAKNTVYLQMNSLKPEDTAVYYCAADFVRSGDDYGYYSTNLDYWGQGTQVTVSS

SEQ ID NO: 22866 - protein, 118 aa, Artificial Sequence
  Chemically Synthesized
QVQLQESGGGLVQAGGSLRLSCAASGNISPYAIMGWYRQAPGKERELVASINRGSTTYYADSVKGRFTISRDNAKNTVYLQMNSLKPEDTAVYYCAVGPRDPEVFHYWGQGTQVTVSS

SEQ ID NO: 22867 - protein, 122 aa, Artificial Sequence
  Chemically Synthesized
QVQLQESGGGLVQAGGSLRLSCAASGSISGWRYMGWYRQAPGKEREFVAGITIGSTTYYADSVKGRFTISRDNAKNTVYLQMNSLKPEDTAVYYCAVPQHTGRGYYYDYTYWGQGTQVTVSS

SEQ ID NO: 22868 - protein, 118 aa, Artificial Sequence
  Chemically Synthesized
QVQLQESGGGLVQAGGSLRLSCAASGSIFYYYYMGWYRQAPGKERELVATISTGTSTNYADSVKGRFTISRDNAKNTVYLQMNSLKPEDTAVYYCAADYDIVGAHIYWGQGTQVTVSS

SEQ ID NO: 22869 - protein, 119 aa, Artificial Sequence
  Chemically Synthesized
QVQLQESGGGLVQAGGSLRLSCAASGTISRPSSMGWYRQAPGKEREFVATIASGASTYYADSVKGRFTISRDNAKNTVYLQMNSLKPEDTAVYYCAAGRWYRGYRYRYWGQGTQVTVSS

SEQ ID NO: 22870 - protein, 117 aa, Artificial Sequence
  Chemically Synthesized
QVQLQESGGGLVQAGGSLRLSCAASGSIFATDYMGWYRQAPGKEREFVAAIGRGTSTNYADSVKGRFTISRDNAKNTVYLQMNSLKPEDTAVYYCAVDDRDAPWLYWGQGTQVTVSS

SEQ ID NO: 22871 - protein, 121 aa, Artificial Sequence
  Chemically Synthesized
QVQLQESGGGLVQAGGSLRLSCAASGSIFGTVYMGWYRQAPGKEREFVASINYGASTYYADSVKGRFTISRDNAKNTVYLQMNSLKPEDTAVYYCAVIINGSFTLLTSMYWGQGTQVTVSS

SEQ ID NO: 22872 - protein, 117 aa, Artificial Sequence
  Chemically Synthesized
QVQLQESGGGLVQAGGSLRLSCAASGSIFYYTAMGWYRQAPGKERELVAGIAYGGNTYYADSVKGRFTISRDNAKNTVYLQMNSLKPEDTAVYYCAVASRLLLVLYWGQGTQVTVSS

SEQ ID NO: 22873 - protein, 118 aa, Artificial Sequence
  Chemically Synthesized
QVQLQESGGGLVQAGGSLRLSCAASGNIFQNVVMGWYRQAPGKEREFVAAITRGGTTYYADSVKGRFTISRDNAKNTVYLQMNSLKPEDTAVYYCAATTTVWRHYRYWGQGTQVTVSS

SEQ ID NO: 22874 - protein, 117 aa, Artificial Sequence
  Chemically Synthesized
QVQLQESGGGLVQAGGSLRLSCAASGTISRAAWMGWYRQAPGKERELVASINPGGTTYYADSVKGRFTISRDNAKNTVYLQMNSLKPEDTAVYYCAATGYYTYHGYWGQGTQVTVSS

SEQ ID NO: 22875 - protein, 126 aa, Artificial Sequence
  Chemically Synthesized
QVQLQESGGGLVQAGGSLRLSCAASGYISRFAYMGWYRQAPGKERELVASISFGGTTYYADSVKGRFTISRDNAKNTVYLQMNSLKPEDTAVYYCAVQYNVDYVGYTDGGYYHWYWGQGTQVTVSS

SEQ ID NO: 22876 - protein, 126 aa, Artificial Sequence
  Chemically Synthesized
QVQLQESGGGLVQAGGSLRLSCAASGTISLLTGMGWYRQAPGKERELVATIGDGGITNYADSVKGRFTISRDNAKNTVYLQMNSLKPEDTAVYYCAVKDRYSVTRPIYDDQPYVYWGQGTQVTVSS

SEQ ID NO: 22877 - protein, 122 aa, Artificial Sequence
  Chemically Synthesized
QVQLQESGGGLVQAGGSLRLSCAASGTISTIYIMGWYRQAPGKEREFVATISRGAITNYADSVKGRFTISRDNAKNTVYLQMNSLKPEDTAVYYCAAYAYAYRYGYSRYYYWGQGTQVTVSS

SEQ ID NO: 22878 - protein, 122 aa, Artificial Sequence
  Chemically Synthesized
QVQLQESGGGLVQAGGSLRLSCAASGTISGSVYMGWYRQAPGKERELVAAINYGANTYYADSVKGRFTISRDNAKNTVYLQMNSLKPEDTAVYYCAARWSSWLQLAIGLQYWGQGTQVTVSS

SEQ ID NO: 22879 - protein, 111 aa, Artificial Sequence
  Chemically Synthesized
QVQLQESGGGLVQAGGSLRLSCAASGYISWVLLMGWYRQAPGKERELVAGISPGSTTYYADSVKGRFTISRDNAKNTVYLQMNSLKPEDTAVYYCAVIAYWGQGTQVTVSS

SEQ ID NO: 22880 - protein, 118 aa, Artificial Sequence
  Chemically Synthesized
QVQLQESGGGLVQAGGSLRLSCAASGNIFGGSAMGWYRQAPGKERELVASISGGAITYYADSVKGRFTISRDNAKNTVYLQMNSLKPEDTAVYYCAVEASLVGYHSYWGQGTQVTVSS

SEQ ID NO: 22881 - protein, 118 aa, Artificial Sequence
  Chemically Synthesized
QVQLQESGGGLVQAGGSLRLSCAASGSISVAVVMGWYRQAPGKEREFVATITRGGNTYYADSVKGRFTISRDNAKNTVYLQMNSLKPEDTAVYYCAADRYYLSPFGYWGQGTQVTVSS

SEQ ID NO: 22882 - protein, 127 aa, Artificial Sequence
  Chemically Synthesized
QVQLQESGGGLVQAGGSLRLSCAASGSIFIRLDMGWYRQAPGKERELVAAIGSGSNTYYADSVKGRFTISRDNAKNTVYLQMNSLKPEDTAVYYCAAANPTIYPIDDVATNYEHYYWGQGTQVTVSS

SEQ ID NO: 22883 - protein, 118 aa, Artificial Sequence
  Chemically Synthesized
QVQLQESGGGLVQAGGSLRLSCAASGYISRDGGMGWYRQAPGKERELVAGIGSGTSTYYADSVKGRFTISRDNAKNTVYLQMNSLKPEDTAVYYCAVPGTATYYLIYWGQGTQVTVSS

SEQ ID NO: 22884 - protein, 118 aa, Artificial Sequence
  Chemically Synthesized
QVQLQESGGGLVQAGGSLRLSCAASGNISYFNRMGWYRQAPGKEREFVAGIAYGTNTYYADSVKGRFTISRDNAKNTVYLQMNSLKPEDTAVYYCAVDRAYANEFQYWGQGTQVTVSS

SEQ ID NO: 22885 - protein, 122 aa, Artificial Sequence
  Chemically Synthesized
QVQLQESGGGLVQAGGSLRLSCAASGTISFGYLMGWYRQAPGKEREFVAAIDPGASTYYADSVKGRFTISRDNAKNTVYLQMNSLKPEDTAVYYCAVLTNSYIPTWPLYTYWGQGTQVTVSS

SEQ ID NO: 22886 - protein, 117 aa, Artificial Sequence
  Chemically Synthesized
QVQLQESGGGLVQAGGSLRLSCAASGNIFTGDYMGWYRQAPGKEREFVAGISYGAIPYADSVKGRFTISRDNAKNTVYLQMNSLKPEDTAVYYCAAQYPYIKWHTYWGQGTQVTVSS

SEQ ID NO: 22887 - protein, 122 aa, Artificial Sequence
  Chemically Synthesized
QVQLQESGGGLVQAGGSLRLSCAASGTIFTAWYMGWYRQAPGKERELVAAISIGSNTNYADSVKGRFTISRDNAKNTVYLQMNSLKPEDTAVYYCAAAPQVETVLRVYHGYWGQGTQVTVSS

SEQ ID NO: 22888 - protein, 126 aa, Artificial Sequence
  Chemically Synthesized
QVQLQESGGGLVQAGGSLRLSCAASGTIFWLDYMGWYRQAPGKEREFVAGIGVGGSTNYADSVKGRFTISRDNAKNTVYLQMNSLKPEDTAVYYCAVRAPQETGRSDGSDWVHDYWGQGTQVTVSS

SEQ ID NO: 22889 - protein, 122 aa, Artificial Sequence
  Chemically Synthesized
QVQLQESGGGLVQAGGSLRLSCAASGYISPLYVMGWYRQAPGKERELVAGIAPGGNTYYADSVKGRFTISRDNAKNTVYLQMNSLKPEDTAVYYCAVDNDFSKEDIAQLAYWGQGTQVTVSS

SEQ ID NO: 22890 - protein, 121 aa, Artificial Sequence
  Chemically Synthesized
QVQLQESGGGLVQAGGSLRLSCAASGYIFSLVMGWYRQAPGKERELVAAIGPGSITYYADSVKGRFTISRDNAKNTVYLQMNSLKPEDTAVYYCAAITRISSKAGGLHYYWGQGTQVTVSS

SEQ ID NO: 22891 - protein, 122 aa, Artificial Sequence
  Chemically Synthesized
QVQLQESGGGLVQAGGSLRLSCAASGTISVWARMGWYRQAPGKEREFVASIGHGTTTYYADSVKGRFTISRDNAKNTVYLQMNSLKPEDTAVYYCAARGNYGHYDARRYSYWGQGTQVTVSS

SEQ ID NO: 22892 - protein, 118 aa, Artificial Sequence
  Chemically Synthesized
QVQLQESGGGLVQAGGSLRLSCAASGTISYWPYMGWYRQAPGKERELVAAISAGSITNYADSVKGRFTISRDNAKNTVYLQMNSLKPEDTAVYYCAVPFILRVGLVYWGQGTQVTVSS

SEQ ID NO: 22893 - protein, 122 aa, Artificial Sequence
  Chemically Synthesized
QVQLQESGGGLVQAGGSLRLSCAASGNISWGDWMGWYRQAPGKEREFVAGINDGSTTYYADSVKGRFTISRDNAKNTVYLQMNSLKPEDTAVYYCAASRADRYGTVYIFAYWGQGTQVTVSS

SEQ ID NO: 22894 - protein, 117 aa, Artificial Sequence
  Chemically Synthesized
QVQLQESGGGLVQAGGSLRLSCAASGNISYYQSMGWYRQAPGKERELVAAINGGTNTYYADSVKGRFTISRDNAKNTVYLQMNSLKPEDTAVYYCAVYGYGYTHDYWGQGTQVTVSS

SEQ ID NO: 22895 - protein, 118 aa, Artificial Sequence
  Chemically Synthesized
QVQLQESGGGLVQAGGSLRLSCAASGTISYTPQMGWYRQAPGKERELVATINLGGNTNYADSVKGRFTISRDNAKNTVYLQMNSLKPEDTAVYYCAADYNGLFYLPYWGQGTQVTVSS

SEQ ID NO: 22896 - protein, 118 aa, Artificial Sequence
  Chemically Synthesized
QVQLQESGGGLVQAGGSLRLSCAASGTIFPYSDMGWYRQAPGKEREFVAGITAGSTTYYADSVKGRFTISRDNAKNTVYLQMNSLKPEDTAVYYCAADADDPYEPHYWGQGTQVTVSS

SEQ ID NO: 22897 - protein, 115 aa, Artificial Sequence
  Chemically Synthesized
QVQLQESGGGLVQAGGSLRLSCAASGSISRYYGMGWYRQAPGKEREFVASITEGATTNYADSVKGRFTISRDNAKNTVYLQMNSLKPEDTAVYYCAVNYLVLCYWGQGTQVTVSS

SEQ ID NO: 22898 - protein, 126 aa, Artificial Sequence
  Chemically Synthesized
QVQLQESGGGLVQAGGSLRLSCAASGTIFYDDTMGWYRQAPGKEREFVATIGVGSTTNYADSVKGRFTISRDNAKNTVYLQMNSLKPEDTAVYYCAAYAPGADQYAYEIWYGYYYWGQGTQVTVSS

SEQ ID NO: 22899 - protein, 118 aa, Artificial Sequence
  Chemically Synthesized
QVQLQESGGGLVQAGGSLRLSCAASGYIFRYADMGWYRQAPGKEREFVAGITFGGITYYADSVKGRFTISRDNAKNTVYLQMNSLKPEDTAVYYCAVTPARARFHVYWGQGTQVTVSS

SEQ ID NO: 22900 - protein, 121 aa, Artificial Sequence
  Chemically Synthesized
QVQLQESGGGLVQAGGSLRLSCAASGFFYSSAMGWYRQAPGKERELVASISYGSTTNYADSVKGRFTISRDNAKNTVYLQMNSLKPEDTAVYYCAAYGRLQPWLYGYYHYWGQGTQVTVSS

SEQ ID NO: 22901 - protein, 126 aa, Artificial Sequence
  Chemically Synthesized
QVQLQESGGGLVQAGGSLRLSCAASGTISEYTIMGWYRQAPGKEREFVATITAGGSTNYADSVKGRFTISRDNAKNTVYLQMNSLKPEDTAVYYCAANQRYDETRLRYAPLGLAYWGQGTQVTVSS

SEQ ID NO: 22902 - protein, 122 aa, Artificial Sequence
  Chemically Synthesized
QVQLQESGGGLVQAGGSLRLSCAASGTIFYGIPMGWYRQAPGKERELVAAINSGGNTNYADSVKGRFTISRDNAKNTVYLQMNSLKPEDTAVYYCAAAPYPSRYPTERFYYWGQGTQVTVSS

SEQ ID NO: 22903 - protein, 122 aa, Artificial Sequence
  Chemically Synthesized
QVQLQESGGGLVQAGGSLRLSCAASGSIFFISYMGWYRQAPGKEREFVASIAYGGTTNYADSVKGRFTISRDNAKNTVYLQMNSLKPEDTAVYYCAAVPYRYGGDDLGYPYWGQGTQVTVSS

SEQ ID NO: 22904 - protein, 118 aa, Artificial Sequence
  Chemically Synthesized
QVQLQESGGGLVQAGGSLRLSCAASGSISRPYTMGWYRQAPGKEREFVASIDLGTNTYYADSVKGRFTISRDNAKNTVYLQMNSLKPEDTAVYYCAVHTRSDYDHDYWGQGTQVTVSS

SEQ ID NO: 22905 - protein, 121 aa, Artificial Sequence
  Chemically Synthesized
QVQLQESGGGLVQAGGSLRLSCAASGNISSNGDMGWYRQAPGKERELVAGINPGATTNYADSVKGRFTISRDNAKNTVYLQMNSLKPEDTAVYYCAANYARYYLFLLLLYWGQGTQVTVSS

SEQ ID NO: 22906 - protein, 122 aa, Artificial Sequence
  Chemically Synthesized
QVQLQESGGGLVQAGGSLRLSCAASGNIFYTYRMGWYRQAPGKEREFVAAIGRGSSTYYADSVKGRFTISRDNAKNTVYLQMNSLKPEDTAVYYCAAGYRYSPYAPPRHRYWGQGTQVTVSS

SEQ ID NO: 22907 - protein, 118 aa, Artificial Sequence
  Chemically Synthesized
QVQLQESGGGLVQAGGSLRLSCAASGSIFRRYVMGWYRQAPGKERELVATISDGANTYYADSVKGRFTISRDNAKNTVYLQMNSLKPEDTAVYYCAARYRWIYSHRYWGQGTQVTVSS

SEQ ID NO: 22908 - protein, 124 aa, Artificial Sequence
  Chemically Synthesized
QVQLQESGGGLVQAGGSLRLSCAASGYIFAETFMGWYRQAPGKERELVATIDSVVIPYADSVKGRFTISRDNAKNTVYLQMNSLKPEDTAVYYCAVTGTDSPSRRVTLTTCMYWGQGTQVTVSS

SEQ ID NO: 22909 - protein, 118 aa, Artificial Sequence
  Chemically Synthesized
QVQLQESGGGLVQAGGSLRLSCAASGTIFPSYVMGWYRQAPGKEREFVASITGGGTTYYADSVKGRFTISRDNAKNTVYLQMNSLKPEDTAVYYCAVGSNFIWPYGYWGQGTQVTVSS

SEQ ID NO: 22910 - protein, 115 aa, Artificial Sequence
  Chemically Synthesized
QVQLQESGGGLVQAGGSLRLSCAASGSIFRGGSMGWYRQAPGKEREFVAGITAGSNTNYADSVKGRFTISRDNAKNTVYLQMNSLKPEDTAVYYCAAYVYQFIYWGQGTQVTVSS

SEQ ID NO: 22911 - protein, 110 aa, Artificial Sequence
  Chemically Synthesized
QVQLQESGGGLVQAGGSLRLSCAASGYISSNTMGWYRQAPGKEREFVAGIDYGGITNYADSVKGRFTISRDNAKNTVYLQMNSLKPEDTAVYYCAALYYWGQGTQVTVSS

SEQ ID NO: 22912 - protein, 118 aa, Artificial Sequence
  Chemically Synthesized
QVQLQESGGGLVQAGGSLRLSCAASGTIFLYSYMGWYRQAPGKERELVAAINSGGITNYADSVKGRFTISRDNAKNTVYLQMNSLKPEDTAVYYCAARLDTDVNLVYWGQGTQVTVSS

SEQ ID NO: 22913 - protein, 117 aa, Artificial Sequence
  Chemically Synthesized
QVQLQESGGGLVQAGGSLRLSCAASGSIFYLGMGWYRQAPGKERELVASITYGANTNYADSVKGRFTISRDNAKNTVYLQMNSLKPEDTAVYYCAVRPRYAPGFGYWGQGTQVTVSS

SEQ ID NO: 22914 - protein, 118 aa, Artificial Sequence
  Chemically Synthesized
QVQLQESGGGLVQAGGSLRLSCAASGSIFWGQYMGWYRQAPGKEREFVATINLGGTTYYADSVKGRFTISRDNAKNTVYLQMNSLKPEDTAVYYCAVRRTPSRIHRYWGQGTQVTVSS

SEQ ID NO: 22915 - protein, 122 aa, Artificial Sequence
  Chemically Synthesized
QVQLQESGGGLVQAGGSLRLSCAASGSISSGRYMGWYRQAPGKERELVAAIASGGSTYYADSVKGRFTISRDNAKNTVYLQMNSLKPEDTAVYYCAVIRGYYRLYSDWHFYWGQGTQVTVSS

SEQ ID NO: 22916 - protein, 118 aa, Artificial Sequence
  Chemically Synthesized
QVQLQESGGGLVQAGGSLRLSCAASGTISDRRVMGWYRQAPGKERELVAAISNGASTNYADSVKGRFTISRDNAKNTVYLQMNSLKPEDTAVYYCAAYRYRIYSHRYWGQGTQVTVSS

SEQ ID NO: 22917 - protein, 118 aa, Artificial Sequence
  Chemically Synthesized
QVQLQESGGGLVQAGGSLRLSCAASGSISTRAYMGWYRQAPGKEREFVAAIGFGGNTYYADSVKGRFTISRDNAKNTVYLQMNSLKPEDTAVYYCAVDRLEWYVYPYWGQGTQVTVSS

SEQ ID NO: 22918 - protein, 118 aa, Artificial Sequence
  Chemically Synthesized
QVQLQESGGGLVQAGGSLRLSCAASGYISFYRAMGWYRQAPGKEREFVATISVGSSTNYADSVKGRFTISRDNAKNTVYLQMNSLKPEDTAVYYCAVGKRYPRRHVYWGQGTQVTVSS

SEQ ID NO: 22919 - protein, 118 aa, Artificial Sequence
  Chemically Synthesized
QVQLQESGGGLVQAGGSLRLSCAASGTIFTDKNMGWYRQAPGKEREFVAGIGYGSTTYYADSVKGRFTISRDNAKNTVYLQMNSLKPEDTAVYYCAASAQYVGVLPYWGQGTQVTVSS

SEQ ID NO: 22920 - protein, 118 aa, Artificial Sequence
  Chemically Synthesized
QVQLQESGGGLVQAGGSLRLSCAASGTISFLRVMGWYRQAPGKEREFVASIGRGGTTNYADSVKGRFTISRDNAKNTVYLQMNSLKPEDTAVYYCAAVNKYRYAHVYWGQGTQVTVSS

SEQ ID NO: 22921 - protein, 122 aa, Artificial Sequence
  Chemically Synthesized
QVQLQESGGGLVQAGGSLRLSCAASGSISQDNVMGWYRQAPGKEREFVAAISYGATTNYADSVKGRFTISRDNAKNTVYLQMNSLKPEDTAVYYCAAVGTLDINVGAYHAYWGQGTQVTVSS

SEQ ID NO: 22922 - protein, 125 aa, Artificial Sequence
  Chemically Synthesized
QVQLQESGGGLVQAGGSLRLSCAASGYISSSRNMGWYRQAPGKEREFVAGIGFGTTTNYADSVKGRFTISRDNAKNTVYLQMNSLKPEDTAVYYCAAGRRYYYASDGIVPYLVYWGQGTQVTVSS

SEQ ID NO: 22923 - protein, 125 aa, Artificial Sequence
  Chemically Synthesized
QVQLQESGGGLVQAGGSLRLSCAASGNISRSRAMGWYRQAPGKERELVATIDRGATTYYADSVKGRFTISRDNAKNTVYLQMNSLKPEDTAVYYCAVRRYYTTYTNYHQSGLKYWGQGTQVTVSS

SEQ ID NO: 22924 - protein, 118 aa, Artificial Sequence
  Chemically Synthesized
QVQLQESGGGLVQAGGSLRLSCAASGYISSLFRMGWYRQAPGKEREFVAAINPGANTNYADSVKGRFTISRDNAKNTVYLQMNSLKPEDTAVYYCAATFAFWHYYRYWGQGTQVTVSS

SEQ ID NO: 22925 - protein, 122 aa, Artificial Sequence
  Chemically Synthesized
QVQLQESGGGLVQAGGSLRLSCAASGSISRDDEMGWYRQAPGKERELVAAIALGTSTNYADSVKGRFTISRDNAKNTVYLQMNSLKPEDTAVYYCAVVDKHEYGGRLLHIYWGQGTQVTVSS

SEQ ID NO: 22926 - protein, 118 aa, Artificial Sequence
  Chemically Synthesized
QVQLQESGGGLVQAGGSLRLSCAASGSIFIRYVMGWYRQAPGKERELVATISYGGNTNYADSVKGRFTISRDNAKNTVYLQMNSLKPEDTAVYYCAVYATYYDLLTYWGQGTQVTVSS

SEQ ID NO: 22927 - protein, 118 aa, Artificial Sequence
  Chemically Synthesized
QVQLQESGGGLVQAGGSLRLSCAASGYISRRAVMGWYRQAPGKERELVAAIGGGGNTNYADSVKGRFTISRDNAKNTVYLQMNSLKPEDTAVYYCAVFRRYDGILRYWGQGTQVTVSS

SEQ ID NO: 22928 - protein, 118 aa, Artificial Sequence
  Chemically Synthesized
QVQLQESGGGLVQAGGSLRLSCAASGYISTIDSMGWYRQAPGKERELVATINIGGSTNYADSVKGRFTISRDNAKNTVYLQMNSLKPEDTAVYYCAAQILYVYPFAYWGQGTQVTVSS

SEQ ID NO: 22929 - protein, 122 aa, Artificial Sequence
  Chemically Synthesized
QVQLQESGGGLVQAGGSLRLSCAASGYIFWLHYMGWYRQAPGKERELVAAIDYGGITNYADSVKGRFTISRDNAKNTVYLQMNSLKPEDTAVYYCAAGTYLGRIIYAYHTYWGQGTQVTVSS

SEQ ID NO: 22930 - protein, 119 aa, Artificial Sequence
  Chemically Synthesized
QVQLQESGGGLVQAGGSLRLSCAASGYISYGRVMGWYRQAPGKERELVASIAAGTTTYYADSVKGRFTISRDNAKNTVYLQMNSLKPEDTAVYYCAVARASTHVYFAYWGQGTQVTVSS

SEQ ID NO: 22931 - protein, 118 aa, Artificial Sequence
  Chemically Synthesized
QVQLQESGGGLVQAGGSLRLSCAASGTIFYRRSMGWYRQAPGKERELVAAINSGASTNYADSVKGRFTISRDNAKNTVYLQMNSLKPEDTAVYYCAAPTYRYPFYHYWGQGTQVTVSS

SEQ ID NO: 22932 - protein, 118 aa, Artificial Sequence
  Chemically Synthesized
QVQLQESGGGLVQAGGSLRLSCAASGTISTSSSMGWYRQAPGKERELVAGIAFGASTNYADSVKGRFTISRDNAKNTVYLQMNSLKPEDTAVYYCAVTAPYSPSYYYWGQGTQVTVSS

SEQ ID NO: 22933 - protein, 118 aa, Artificial Sequence
  Chemically Synthesized
QVQLQESGGGLVQAGGSLRLSCAASGTISPASGMGWYRQAPGKERELVASINGGTNTNYADSVKGRFTISRDNAKNTVYLQMNSLKPEDTAVYYCAARFNDDFWHWYWGQGTQVTVSS

SEQ ID NO: 22934 - protein, 118 aa, Artificial Sequence
  Chemically Synthesized
QVQLQESGGGLVQAGGSLRLSCAASGSIFLARKMGWYRQAPGKERELVASIGRGTSTNYADSVKGRFTISRDNAKNTVYLQMNSLKPEDTAVYYCAARVWYLTAHDYWGQGTQVTVSS

SEQ ID NO: 22935 - protein, 121 aa, Artificial Sequence
  Chemically Synthesized
QVQLQESGGGLVQAGGSLRLSCAASGNISDSPYMGWYRQAPGKERELVAGITYGANTNYADSVKGRFTISRDNAKNTVYLQMNSLKPEDTAVYYCAAYIGRGPSTTLTFYWGQGTQVTVSS

SEQ ID NO: 22936 - protein, 122 aa, Artificial Sequence
  Chemically Synthesized
QVQLQESGGGLVQAGGSLRLSCAASGSISASGFMGWYRQAPGKERELVASISGGSSTYYADSVKGRFTISRDNAKNTVYLQMNSLKPEDTAVYYCAAVRPNTDAYYRTHYYWGQGTQVTVSS

SEQ ID NO: 22937 - protein, 118 aa, Artificial Sequence
  Chemically Synthesized
QVQLQESGGGLVQAGGSLRLSCAASGSIFSRFVMGWYRQAPGKERELVATIATGTTTNYADSVKGRFTISRDNAKNTVYLQMNSLKPEDTAVYYCAAVLSGSYSLGYWGQGTQVTVSS

SEQ ID NO: 22938 - protein, 122 aa, Artificial Sequence
  Chemically Synthesized
QVQLQESGGGLVQAGGSLRLSCAASGTISDDQHMGWYRQAPGKERELVAAINHGTTTNYADSVKGRFTISRDNAKNTVYLQMNSLKPEDTAVYYCAAGGYWSSPVLYYYSYWGQGTQVTVSS

SEQ ID NO: 22939 - protein, 122 aa, Artificial Sequence
  Chemically Synthesized
QVQLQESGGGLVQAGGSLRLSCAASGTISTQTVMGWYRQAPGKEREFVASITSGSSTYYADSVKGRFTISRDNAKNTVYLQMNSLKPEDTAVYYCAAYDTKDGQYWSILVYWGQGTQVTVSS

SEQ ID NO: 22940 - protein, 118 aa, Artificial Sequence
  Chemically Synthesized
QVQLQESGGGLVQAGGSLRLSCAASGTISGLFVMGWYRQAPGKEREFVASISAGGNTYYADSVKGRFTISRDNAKNTVYLQMNSLKPEDTAVYYCAARPANRVGLGYWGQGTQVTVSS

SEQ ID NO: 22941 - protein, 122 aa, Artificial Sequence
  Chemically Synthesized
QVQLQESGGGLVQAGGSLRLSCAASGNIFVWQEMGWYRQAPGKEREFVASIDYGTNTYYADSVKGRFTISRDNAKNTVYLQMNSLKPEDTAVYYCAVGDYDGEIERAVFWYWGQGTQVTVSS

SEQ ID NO: 22942 - protein, 118 aa, Artificial Sequence
  Chemically Synthesized
QVQLQESGGGLVQAGGSLRLSCAASGYIFLWYGMGWYRQAPGKEREFVATIAHGANTNYADSVKGRFTISRDNAKNTVYLQMNSLKPEDTAVYYCAVVHGWKRSHKYWGQGTQVTVSS

SEQ ID NO: 22943 - protein, 126 aa, Artificial Sequence
  Chemically Synthesized
QVQLQESGGGLVQAGGSLRLSCAASGYIFLRYGMGWYRQAPGKEREFVAGINYGSNTYYADSVKGRFTISRDNAKNTVYLQMNSLKPEDTAVYYCAADYYATIVTRDGPYYGFPYWGQGTQVTVSS

SEQ ID NO: 22944 - protein, 122 aa, Artificial Sequence
  Chemically Synthesized
QVQLQESGGGLVQAGGSLRLSCAASGYIFTFQYMGWYRQAPGKEREFVAGINYGGTTNYADSVKGRFTISRDNAKNTVYLQMNSLKPEDTAVYYCAALRTWGNTRYQWHSYWGQGTQVTVSS

SEQ ID NO: 22945 - protein, 121 aa, Artificial Sequence
  Chemically Synthesized
QVQLQESGGGLVQAGGSLRLSCAASGTISADYDMGWYRQAPGKEREFVAAIGSVLVPYADSVKGRFTISRDNAKNTVYLQMNSLKPEDTAVYYCAVDWLYTYYNYVEYTYWGQGTQVTVSS

SEQ ID NO: 22946 - protein, 118 aa, Artificial Sequence
  Chemically Synthesized
QVQLQESGGGLVQAGGSLRLSCAASGYIFATANMGWYRQAPGKEREFVAGIGPGGTTYYADSVKGRFTISRDNAKNTVYLQMNSLKPEDTAVYYCAVLTWSASWYHYWGQGTQVTVSS

SEQ ID NO: 22947 - protein, 125 aa, Artificial Sequence
  Chemically Synthesized
QVQLQESGGGLVQAGGSLRLSCAASGLFLTVRMGWYRQAPGKERELVASINLGSNTYYADSVKGRFTISRDNAKNTVYLQMNSLKPEDTAVYYCAAQDAIGTQDRYADGAGLGYWGQGTQVTVSS

SEQ ID NO: 22948 - protein, 122 aa, Artificial Sequence
  Chemically Synthesized
QVQLQESGGGLVQAGGSLRLSCAASGYISLYASMGWYRQAPGKERELVATIDDGSTTNYADSVKGRFTISRDNAKNTVYLQMNSLKPEDTAVYYCAAGDTIGIDRDRRHTYWGQGTQVTVSS

SEQ ID NO: 22949 - protein, 125 aa, Artificial Sequence
  Chemically Synthesized
QVQLQESGGGLVQAGGSLRLSCAASGYISLGAAMGWYRQAPGKERELVAAIDIGANTNYADSVKGRFTISRDNAKNTVYLQMNSLKPEDTAVYYCAAWGYGLWRPSGWGIVLEYWGQGTQVTVSS

SEQ ID NO: 22950 - protein, 122 aa, Artificial Sequence
  Chemically Synthesized
QVQLQESGGGLVQAGGSLRLSCAASGNIFGTRPMGWYRQAPGKERELVATIARGGNTNYADSVKGRFTISRDNAKNTVYLQMNSLKPEDTAVYYCAVLRSYYGLTYVRHRYWGQGTQVTVSS

SEQ ID NO: 22951 - protein, 118 aa, Artificial Sequence
  Chemically Synthesized
QVQLQESGGGLVQAGGSLRLSCAASGSISYAVSMGWYRQAPGKEREFVASINYGASTNYADSVKGRFTISRDNAKNTVYLQMNSLKPEDTAVYYCAVWPEYLQYYSYWGQGTQVTVSS

SEQ ID NO: 22952 - protein, 121 aa, Artificial Sequence
  Chemically Synthesized
QVQLQESGGGLVQAGGSLRLSCAASGYISDQYYMGWYRQAPGKEREFVASINYGASTNYADSVKGRFTISRDNAKNTVYLQMNSLKPEDTAVYYCAAGTDQVRRSVTVMYWGQGTQVTVSS

SEQ ID NO: 22953 - protein, 118 aa, Artificial Sequence
  Chemically Synthesized
QVQLQESGGGLVQAGGSLRLSCAASGNISIYPGMGWYRQAPGKEREFVAAITFGGNTYYADSVKGRFTISRDNAKNTVYLQMNSLKPEDTAVYYCAAKTYIYRYYFYWGQGTQVTVSS

SEQ ID NO: 22954 - protein, 123 aa, Artificial Sequence
  Chemically Synthesized
QVQLQESGGGLVQAGGSLRLSCAASGNIFRFRIMGWYRQAPGKEREFVAGIGTGGTTNYADSVKGRFTISRDNAKNTVYLQMNSLKPEDTAVYYCAAIWGRFYAWAGYPFGYWGQGTQVTVSS

SEQ ID NO: 22955 - protein, 126 aa, Artificial Sequence
  Chemically Synthesized
QVQLQESGGGLVQAGGSLRLSCAASGTIFNFYYMGWYRQAPGKERELVASINKGSSTNYADSVKGRFTISRDNAKNTVYLQMNSLKPEDTAVYYCAALGLQSYNSYQPRVRRHYYWGQGTQVTVSS

SEQ ID NO: 22956 - protein, 118 aa, Artificial Sequence
  Chemically Synthesized
QVQLQESGGGLVQAGGSLRLSCAASGTIFDRSHMGWYRQAPGKERELVAAIGSGTITYYADSVKGRFTISRDNAKNTVYLQMNSLKPEDTAVYYCAVDYHQDHDLRYWGQGTQVTVSS

SEQ ID NO: 22957 - protein, 121 aa, Artificial Sequence
  Chemically Synthesized
QVQLQESGGGLVQAGGSLRLSCAASGYISARALMGWYRQAPGKEREFVAAINGGANTNYADSVKGRFTISRDNAKNTVYLQMNSLKPEDTAVYYCAAYSVRRTCVLTSIYWGQGTQVTVSS

SEQ ID NO: 22958 - protein, 122 aa, Artificial Sequence
  Chemically Synthesized
QVQLQESGGGLVQAGGSLRLSCAASGTISYRGAMGWYRQAPGKERELVAAIGPGSNTNYADSVKGRFTISRDNAKNTVYLQMNSLKPEDTAVYYCAAQANWIHLVLGKLYYWGQGTQVTVSS

SEQ ID NO: 22959 - protein, 126 aa, Artificial Sequence
  Chemically Synthesized
QVQLQESGGGLVQAGGSLRLSCAASGSISYYYSMGWYRQAPGKERELVATISTGGTTNYADSVKGRFTISRDNAKNTVYLQMNSLKPEDTAVYYCAASQSWYKVRLVYYAPSHTYWGQGTQVTVSS

SEQ ID NO: 22960 - protein, 117 aa, Artificial Sequence
  Chemically Synthesized
QVQLQESGGGLVQAGGSLRLSCAASGTILTTLMGWYRQAPGKERELVASINYGSNTNYADSVKGRFTISRDNAKNTVYLQMNSLKPEDTAVYYCAVYLPDTTPHYYWGQGTQVTVSS

SEQ ID NO: 22961 - protein, 121 aa, Artificial Sequence
  Chemically Synthesized
QVQLQESGGGLVQAGGSLRLSCAASGNISAGPSMGWYRQAPGKEREFVATITKGANTYYADSVKGRFTISRDNAKNTVYLQMNSLKPEDTAVYYCAVTGTYRYVSCSFLYWGQGTQVTVSS

SEQ ID NO: 22962 - protein, 122 aa, Artificial Sequence
  Chemically Synthesized
QVQLQESGGGLVQAGGSLRLSCAASGSIFTSADMGWYRQAPGKERELVAGINDGTSTYYADSVKGRFTISRDNAKNTVYLQMNSLKPEDTAVYYCAVDGLDQYYGHYPLWYWGQGTQVTVSS

SEQ ID NO: 22963 - protein, 122 aa, Artificial Sequence
  Chemically Synthesized
QVQLQESGGGLVQAGGSLRLSCAASGTIFERWLMGWYRQAPGKEREFVATISGGSSTYYADSVKGRFTISRDNAKNTVYLQMNSLKPEDTAVYYCAAQYSKPYYVGIPHLYWGQGTQVTVSS

SEQ ID NO: 22964 - protein, 118 aa, Artificial Sequence
  Chemically Synthesized
QVQLQESGGGLVQAGGSLRLSCAASGSIFYPYVMGWYRQAPGKERELVAGIDTGANTNYADSVKGRFTISRDNAKNTVYLQMNSLKPEDTAVYYCAAESNGWYALYYWGQGTQVTVSS

SEQ ID NO: 22965 - protein, 117 aa, Artificial Sequence
  Chemically Synthesized
QVQLQESGGGLVQAGGSLRLSCAASGTILRILMGWYRQAPGKERELVAGITRGASTNYADSVKGRFTISRDNAKNTVYLQMNSLKPEDTAVYYCAADSQPYPWYDYWGQGTQVTVSS

SEQ ID NO: 22966 - protein, 118 aa, Artificial Sequence
  Chemically Synthesized
QVQLQESGGGLVQAGGSLRLSCAASGSISAKTYMGWYRQAPGKERELVATINYGTSTYYADSVKGRFTISRDNAKNTVYLQMNSLKPEDTAVYYCAVGDLQHDGFLYWGQGTQVTVSS

SEQ ID NO: 22967 - protein, 125 aa, Artificial Sequence
  Chemically Synthesized
QVQLQESGGGLVQAGGSLRLSCAASGNIFYESIMGWYRQAPGKERELVAILLVVLLPYADSVKGRFTISRDNAKNTVYLQMNSLKPEDTAVYYCAAKDNKFDYRYYYHATGFGYWGQGTQVTVSS

SEQ ID NO: 22968 - protein, 118 aa, Artificial Sequence
  Chemically Synthesized
QVQLQESGGGLVQAGGSLRLSCAASGSIFLYPYMGWYRQAPGKERELVASITQGSSTNYADSVKGRFTISRDNAKNTVYLQMNSLKPEDTAVYYCAAVKTKIYGYQYWGQGTQVTVSS

SEQ ID NO: 22969 - protein, 125 aa, Artificial Sequence
  Chemically Synthesized
QVQLQESGGGLVQAGGSLRLSCAASGSISVPFQMGWYRQAPGKEREFVAGIDYGASTNYADSVKGRFTISRDNAKNTVYLQMNSLKPEDTAVYYCAVYYYDNAYRYGDSYIYAYWGQGTQVTVSS

SEQ ID NO: 22970 - protein, 109 aa, Artificial Sequence
  Chemically Synthesized
QVQLQESGGGLVQAGGSLRLSCAASGTISWANMGWYRQAPGKERELVASIGFGTSTYYADSVKGRFTISRDNAKNTVYLQMNSLKPEDTAVYYCALLYWGQGTQVTVSS

SEQ ID NO: 22971 - protein, 122 aa, Artificial Sequence
  Chemically Synthesized
QVQLQESGGGLVQAGGSLRLSCAASGNISYVQTMGWYRQAPGKEREFVASIGSGSTTNYADSVKGRFTISRDNAKNTVYLQMNSLKPEDTAVYYCAALYLTGPYLRGELDYWGQGTQVTVSS

SEQ ID NO: 22972 - protein, 117 aa, Artificial Sequence
  Chemically Synthesized
QVQLQESGGGLVQAGGSLRLSCAASGYIFSYDNMGWYRQAPGKEREFVAGIGTGSSTNYADSVKGRFTISRDNAKNTVYLQMNSLKPEDTAVYYCAVPLLTYSSFYWGQGTQVTVSS

SEQ ID NO: 22973 - protein, 125 aa, Artificial Sequence
  Chemically Synthesized
QVQLQESGGGLVQAGGSLRLSCAASGNISRADVMGWYRQAPGKERELVAAIGDGTNTNYADSVKGRFTISRDNAKNTVYLQMNSLKPEDTAVYYCAAYDYENYTRSARVDSTFYWGQGTQVTVSS

SEQ ID NO: 22974 - protein, 126 aa, Artificial Sequence
  Chemically Synthesized
QVQLQESGGGLVQAGGSLRLSCAASGSISDWDYMGWYRQAPGKERELVASIGYGANTNYADSVKGRFTISRDNAKNTVYLQMNSLKPEDTAVYYCAVAGSVQDYILHVGYDQFDYWGQGTQVTVSS

SEQ ID NO: 22975 - protein, 109 aa, Artificial Sequence
  Chemically Synthesized
QVQLQESGGGLVQAGGSLRLSCAASGNIFLAGYMGWYRQAPGKERELVAGIDRGASTNYADSVKGRFTISRDNAKNTVYLQMNSLKPEDTAVYYCAAYWGQGTQVTVSS

SEQ ID NO: 22976 - protein, 126 aa, Artificial Sequence
  Chemically Synthesized
QVQLQESGGGLVQAGGSLRLSCAASGSISTAGGMGWYRQAPGKERELVASIAYGASTNYADSVKGRFTISRDNAKNTVYLQMNSLKPEDTAVYYCAADVQYGARYLTDYGYGYDYWGQGTQVTVSS

SEQ ID NO: 22977 - protein, 117 aa, Artificial Sequence
  Chemically Synthesized
QVQLQESGGGLVQAGGSLRLSCAASGTISSNTVMGWYRQAPGKEREFVATIAAGANTNYADSVKGRFTISRDNAKNTVYLQMNSLKPEDTAVYYCAAYSKYYWLMYWGQGTQVTVSS

SEQ ID NO: 22978 - protein, 117 aa, Artificial Sequence
  Chemically Synthesized
QVQLQESGGGLVQAGGSLRLSCAASGSIFRPFFMGWYRQAPGKERELVATIGSGGNTNYADSVKGRFTISRDNAKNTVYLQMNSLKPEDTAVYYCAVAYSTLLVLYWGQGTQVTVSS

SEQ ID NO: 22979 - protein, 122 aa, Artificial Sequence
  Chemically Synthesized
QVQLQESGGGLVQAGGSLRLSCAASGNISWDYSMGWYRQAPGKERELVASIDGGGTTYYADSVKGRFTISRDNAKNTVYLQMNSLKPEDTAVYYCAARVRGIPDWIEYYPYWGQGTQVTVSS

SEQ ID NO: 22980 - protein, 126 aa, Artificial Sequence
  Chemically Synthesized
QVQLQESGGGLVQAGGSLRLSCAASGNIFRRYYMGWYRQAPGKERELVASIADGGITYYADSVKGRFTISRDNAKNTVYLQMNSLKPEDTAVYYCAVLIVYDFHNYYDINYGHDYWGQGTQVTVSS

SEQ ID NO: 22981 - protein, 117 aa, Artificial Sequence
  Chemically Synthesized
QVQLQESGGGLVQAGGSLRLSCAASGTISLVSAMGWYRQAPGKERELVASINGGSTNYADSVKGRFTISRDNAKNTVYLQMNSLKPEDTAVYYCAVYVLYYYPYIYWGQGTQVTVSS

SEQ ID NO: 22982 - protein, 118 aa, Artificial Sequence
  Chemically Synthesized
QVQLQESGGGLVQAGGSLRLSCAASGTISGVYPMGWYRQAPGKEREFVASISHGGNTYYADSVKGRFTISRDNAKNTVYLQMNSLKPEDTAVYYCAADTQSGFILGYWGQGTQVTVSS

SEQ ID NO: 22983 - protein, 118 aa, Artificial Sequence
  Chemically Synthesized
QVQLQESGGGLVQAGGSLRLSCAASGTISPYGYMGWYRQAPGKERELVAAITDGTITYYADSVKGRFTISRDNAKNTVYLQMNSLKPEDTAVYYCAVYRQPIRRHVYWGQGTQVTVSS

SEQ ID NO: 22984 - protein, 117 aa, Artificial Sequence
  Chemically Synthesized
QVQLQESGGGLVQAGGSLRLSCAASGTIFIWLGMGWYRQAPGKEREFVAGISIGGSTYYADSVKGRFTISRDNAKNTVYLQMNSLKPEDTAVYYCAASRDPAYHGYWGQGTQVTVSS

SEQ ID NO: 22985 - protein, 118 aa, Artificial Sequence
  Chemically Synthesized
QVQLQESGGGLVQAGGSLRLSCAASGTISHDDNMGWYRQAPGKERELVAGIALGASTNYADSVKGRFTISRDNAKNTVYLQMNSLKPEDTAVYYCAAPYNYDFAYWYWGQGTQVTVSS

SEQ ID NO: 22986 - protein, 116 aa, Artificial Sequence
  Chemically Synthesized
QVQLQESGGGLVQAGGSLRLSCAASGNISADNDMGWYRQAPGKERELVAGIDEGGNTYYADSVKGRFTISRDNAKNTVYLQMNSLKPEDTAVYYCAAGLRRHFCYWGQGTQVTVSS

SEQ ID NO: 22987 - protein, 122 aa, Artificial Sequence
  Chemically Synthesized
QVQLQESGGGLVQAGGSLRLSCAASGTIFYDVDMGWYRQAPGKERELVATIDYGSITNYADSVKGRFTISRDNAKNTVYLQMNSLKPEDTAVYYCAVYYGEDAVTEYYLDYWGQGTQVTVSS

SEQ ID NO: 22988 - protein, 118 aa, Artificial Sequence
  Chemically Synthesized
QVQLQESGGGLVQAGGSLRLSCAASGTISYRYIMGWYRQAPGKEREFVAAITTGSITNYADSVKGRFTISRDNAKNTVYLQMNSLKPEDTAVYYCAAIHFDSGYHFYWGQGTQVTVSS

SEQ ID NO: 22989 - protein, 118 aa, Artificial Sequence
  Chemically Synthesized
QVQLQESGGGLVQAGGSLRLSCAASGYIFDNQDMGWYRQAPGKERELVAGIDRGTITYYADSVKGRFTISRDNAKNTVYLQMNSLKPEDTAVYYCAVSSAVLNTLRYWGQGTQVTVSS

SEQ ID NO: 22990 - protein, 126 aa, Artificial Sequence
  Chemically Synthesized
QVQLQESGGGLVQAGGSLRLSCAASGYISAYEYMGWYRQAPGKERELVAAISHGGTTNYADSVKGRFTISRDNAKNTVYLQMNSLKPEDTAVYYCAVLFIYRDDGSSYDEQIHRYWGQGTQVTVSS

SEQ ID NO: 22991 - protein, 121 aa, Artificial Sequence
  Chemically Synthesized
QVQLQESGGGLVQAGGSLRLSCAASGTISTIVMGWYRQAPGKERELVASIGVGTITYYADSVKGRFTISRDNAKNTVYLQMNSLKPEDTAVYYCAVPDGDTGLSSYLYNYWGQGTQVTVSS

SEQ ID NO: 22992 - protein, 111 aa, Artificial Sequence
  Chemically Synthesized
QVQLQESGGGLVQAGGSLRLSCAASGSIFGSVYMGWYRQAPGKEREFVAAIGAGGTTNYADSVKGRFTISRDNAKNTVYLQMNSLKPEDTAVYYCAYLKYWGQGTQVTVSS

SEQ ID NO: 22993 - protein, 126 aa, Artificial Sequence
  Chemically Synthesized
QVQLQESGGGLVQAGGSLRLSCAASGYIFVWIWMGWYRQAPGKERELVAAITYGGITNYADSVKGRFTISRDNAKNTVYLQMNSLKPEDTAVYYCAVGVNGRGGEHVQYYSSFPYWGQGTQVTVSS

SEQ ID NO: 22994 - protein, 126 aa, Artificial Sequence
  Chemically Synthesized
QVQLQESGGGLVQAGGSLRLSCAASGYIFYVQAMGWYRQAPGKERELVATISYGSTTNYADSVKGRFTISRDNAKNTVYLQMNSLKPEDTAVYYCAVSAWGDRVGTAGDSYLHYYWGQGTQVTVSS

SEQ ID NO: 22995 - protein, 118 aa, Artificial Sequence
  Chemically Synthesized
QVQLQESGGGLVQAGGSLRLSCAASGNISWGTAMGWYRQAPGKEREFVATISYGTTTYYADSVKGRFTISRDNAKNTVYLQMNSLKPEDTAVYYCAVPVIYTDGYDYWGQGTQVTVSS

SEQ ID NO: 22996 - protein, 122 aa, Artificial Sequence
  Chemically Synthesized
QVQLQESGGGLVQAGGSLRLSCAASGTIFPWGDMGWYRQAPGKEREFVAAIDDGASTNYADSVKGRFTISRDNAKNTVYLQMNSLKPEDTAVYYCAVQRSYRAVWYANFRYWGQGTQVTVSS

SEQ ID NO: 22997 - protein, 117 aa, Artificial Sequence
  Chemically Synthesized
QVQLQESGGGLVQAGGSLRLSCAASGSISIPLDMGWYRQAPGKERELVAAIDYGATTNYADSVKGRFTISRDNAKNTVYLQMNSLKPEDTAVYYCAVSNTLGRSIYWGQGTQVTVSS

SEQ ID NO: 22998 - protein, 117 aa, Artificial Sequence
  Chemically Synthesized
QVQLQESGGGLVQAGGSLRLSCAASGYIFASVMGWYRQAPGKEREFVAGIAGGSNTYYADSVKGRFTISRDNAKNTVYLQMNSLKPEDTAVYYCAAEGYHVDTLSYWGQGTQVTVSS

SEQ ID NO: 22999 - protein, 118 aa, Artificial Sequence
  Chemically Synthesized
QVQLQESGGGLVQAGGSLRLSCAASGNIFGTTTMGWYRQAPGKERELVASIAHGGTTYYADSVKGRFTISRDNAKNTVYLQMNSLKPEDTAVYYCAVNWAFDYAHWYWGQGTQVTVSS

SEQ ID NO: 23000 - protein, 118 aa, Artificial Sequence
  Chemically Synthesized
QVQLQESGGGLVQAGGSLRLSCAASGYIFYDNVMGWYRQAPGKERELVASIDQGGNTYYADSVKGRFTISRDNAKNTVYLQMNSLKPEDTAVYYCAVYRESFYRHYYWGQGTQVTVSS

SEQ ID NO: 23001 - protein, 118 aa, Artificial Sequence
  Chemically Synthesized
QVQLQESGGGLVQAGGSLRLSCAASGTISYDRWMGWYRQAPGKEREFVASITGGSSTYYADSVKGRFTISRDNAKNTVYLQMNSLKPEDTAVYYCAVGHPADTAYDYWGQGTQVTVSS

SEQ ID NO: 23002 - protein, 125 aa, Artificial Sequence
  Chemically Synthesized
QVQLQESGGGLVQAGGSLRLSCAASGTISLYQDMGWYRQAPGKERELVAGIAQGTIPYADSVKGRFTISRDNAKNTVYLQMNSLKPEDTAVYYCAVDKSLSYRVLGNYWSTLSYWGQGTQVTVSS

SEQ ID NO: 23003 - protein, 115 aa, Artificial Sequence
  Chemically Synthesized
QVQLQESGGGLVQAGGSLRLSCAASGFYNAMGWYRQAPGKERELVAAIGSGSNTYYADSVKGRFTISRDNAKNTVYLQMNSLKPEDTAVYYCAVAGAGDYYLEYWGQGTQVTVSS

SEQ ID NO: 23004 - protein, 126 aa, Artificial Sequence
  Chemically Synthesized
QVQLQESGGGLVQAGGSLRLSCAASGYISGLYSMGWYRQAPGKEREFVASIGPGGTTNYADSVKGRFTISRDNAKNTVYLQMNSLKPEDTAVYYCAVFPEFKYVGLRPYYSDYDYWGQGTQVTVSS

SEQ ID NO: 23005 - protein, 118 aa, Artificial Sequence
  Chemically Synthesized
QVQLQESGGGLVQAGGSLRLSCAASGTIFEGPWMGWYRQAPGKERELVAAIAYGGITNYADSVKGRFTISRDNAKNTVYLQMNSLKPEDTAVYYCAVDYINDEPYYYWGQGTQVTVSS

SEQ ID NO: 23006 - protein, 121 aa, Artificial Sequence
  Chemically Synthesized
QVQLQESGGGLVQAGGSLRLSCAASGSIFYGYAMGWYRQAPGKERELVAGLVTVVIPYADSVKGRFTISRDNAKNTVYLQMNSLKPEDTAVYYCAADWYPYSDPDPIYSYWGQGTQVTVSS

SEQ ID NO: 23007 - protein, 126 aa, Artificial Sequence
  Chemically Synthesized
QVQLQESGGGLVQAGGSLRLSCAASGTIFRSYSMGWYRQAPGKEREFVATINYGGSTYYADSVKGRFTISRDNAKNTVYLQMNSLKPEDTAVYYCAANYAGDWYNLGYYRTYYDYWGQGTQVTVSS

SEQ ID NO: 23008 - protein, 122 aa, Artificial Sequence
  Chemically Synthesized
QVQLQESGGGLVQAGGSLRLSCAASGTIFAGLGMGWYRQAPGKEREFVAAIADGATTNYADSVKGRFTISRDNAKNTVYLQMNSLKPEDTAVYYCAVVSTQVIAKGYQHQYWGQGTQVTVSS

SEQ ID NO: 23009 - protein, 126 aa, Artificial Sequence
  Chemically Synthesized
QVQLQESGGGLVQAGGSLRLSCAASGTIFRYYDMGWYRQAPGKERELVASIGYGAITYYADSVKGRFTISRDNAKNTVYLQMNSLKPEDTAVYYCAVGVYYQKRRAGADAGDHSYWGQGTQVTVSS

SEQ ID NO: 23010 - protein, 118 aa, Artificial Sequence
  Chemically Synthesized
QVQLQESGGGLVQAGGSLRLSCAASGTISGILGMGWYRQAPGKERELVASIAPGSNTYYADSVKGRFTISRDNAKNTVYLQMNSLKPEDTAVYYCAVSGYSYAVYTYWGQGTQVTVSS

SEQ ID NO: 23011 - protein, 126 aa, Artificial Sequence
  Chemically Synthesized
QVQLQESGGGLVQAGGSLRLSCAASGNIFYITQMGWYRQAPGKEREFVATINGGTITNYADSVKGRFTISRDNAKNTVYLQMNSLKPEDTAVYYCAADAYDYYRRTGSTDRFLRYWGQGTQVTVSS

SEQ ID NO: 23012 - protein, 122 aa, Artificial Sequence
  Chemically Synthesized
QVQLQESGGGLVQAGGSLRLSCAASGTISWNNGMGWYRQAPGKERELVASIGYGSNTYYADSVKGRFTISRDNAKNTVYLQMNSLKPEDTAVYYCAVYQRGYYVYGVRYRYWGQGTQVTVSS

SEQ ID NO: 23013 - protein, 122 aa, Artificial Sequence
  Chemically Synthesized
QVQLQESGGGLVQAGGSLRLSCAASGNIFALYTMGWYRQAPGKERELVATIDTGTNTYYADSVKGRFTISRDNAKNTVYLQMNSLKPEDTAVYYCAAYEQRYQGYYAYLVYWGQGTQVTVSS

SEQ ID NO: 23014 - protein, 117 aa, Artificial Sequence
  Chemically Synthesized
QVQLQESGGGLVQAGGSLRLSCAASGNISYVQAMGWYRQAPGKERELVAAIDTGASTYYADSVKGRFTISRDNAKNTVYLQMNSLKPEDTAVYYCAALSQSRCCFYWGQGTQVTVSS

SEQ ID NO: 23015 - protein, 121 aa, Artificial Sequence
  Chemically Synthesized
QVQLQESGGGLVQAGGSLRLSCAASGNISYDRFMGWYRQAPGKEREFVATISVGANTYYADSVKGRFTISRDNAKNTVYLQMNSLKPEDTAVYYCAVRGDGRWAFDFRLYWGQGTQVTVSS

SEQ ID NO: 23016 - protein, 125 aa, Artificial Sequence
  Chemically Synthesized
QVQLQESGGGLVQAGGSLRLSCAASGTISNSYYMGWYRQAPGKEREFVAAINVGSITNYADSVKGRFTISRDNAKNTVYLQMNSLKPEDTAVYYCAVLYRNAYFTRTDTDDLTYWGQGTQVTVSS

SEQ ID NO: 23017 - protein, 112 aa, Artificial Sequence
  Chemically Synthesized
QVQLQESGGGLVQAGGSLRLSCAASGSIFYPFGMGWYRQAPGKERELVAAIPYADSVKGRFTISRDNAKNTVYLQMNSLKPEDTAVYYCAAHGYKPFRLAYWGQGTQVTVSS

SEQ ID NO: 23018 - protein, 122 aa, Artificial Sequence
  Chemically Synthesized
QVQLQESGGGLVQAGGSLRLSCAASGSISRLATMGWYRQAPGKEREFVATINTGSITNYADSVKGRFTISRDNAKNTVYLQMNSLKPEDTAVYYCAVQIVDTIYRIYEHDYWGQGTQVTVSS

SEQ ID NO: 23019 - protein, 117 aa, Artificial Sequence
  Chemically Synthesized
QVQLQESGGGLVQAGGSLRLSCAASGNIFKAEMGWYRQAPGKERELVAAIGLGGNTNYADSVKGRFTISRDNAKNTVYLQMNSLKPEDTAVYYCAVGSGSGGLHYYWGQGTQVTVSS

SEQ ID NO: 23020 - protein, 120 aa, Artificial Sequence
  Chemically Synthesized
QVQLQESGGGLVQAGGSLRLSCAASGTISYPTYMGWYRQAPGKERELVAGIGRGGTTYYADSVKGRFTISRDNAKNTVYLQMNSLKPEDTAVYYCAASGNVQFVHGLKYWGQGTQVTVSS

SEQ ID NO: 23021 - protein, 125 aa, Artificial Sequence
  Chemically Synthesized
QVQLQESGGGLVQAGGSLRLSCAASGSISPRYYMGWYRQAPGKERELVAAIDTGGSTYADSVKGRFTISRDNAKNTVYLQMNSLKPEDTAVYYCAVTAIYNYRLYAYQYGDHPYWGQGTQVTVSS

SEQ ID NO: 23022 - protein, 118 aa, Artificial Sequence
  Chemically Synthesized
QVQLQESGGGLVQAGGSLRLSCAASGTIFRQYYMGWYRQAPGKERELVAAIGIGASTNYADSVKGRFTISRDNAKNTVYLQMNSLKPEDTAVYYCAVAYAVYRDHDYWGQGTQVTVSS

SEQ ID NO: 23023 - protein, 118 aa, Artificial Sequence
  Chemically Synthesized
QVQLQESGGGLVQAGGSLRLSCAASGSIFYYGYMGWYRQAPGKERELVAAIDVGSNTYYADSVKGRFTISRDNAKNTVYLQMNSLKPEDTAVYYCAVDRSGIGEHAYWGQGTQVTVSS

SEQ ID NO: 23024 - protein, 116 aa, Artificial Sequence
  Chemically Synthesized
QVQLQESGGGLVQAGGSLRLSCAASGSIFLVAYMGWYRQAPGKEREFVATIAGGASTNYADSVKGRFTISRDNAKNTVYLQMNSLKPEDTAVYYCAVYATTAVFYWGQGTQVTVSS

SEQ ID NO: 23025 - protein, 118 aa, Artificial Sequence
  Chemically Synthesized
QVQLQESGGGLVQAGGSLRLSCAASGTIFPRTYMGWYRQAPGKERELVAGIAYGAITYYADSVKGRFTISRDNAKNTVYLQMNSLKPEDTAVYYCAVALWDDDYLTYWGQGTQVTVSS

SEQ ID NO: 23026 - protein, 126 aa, Artificial Sequence
  Chemically Synthesized
QVQLQESGGGLVQAGGSLRLSCAASGNISYGYDMGWYRQAPGKERELVASIALGANTYYADSVKGRFTISRDNAKNTVYLQMNSLKPEDTAVYYCAVGPVTRPSIPIGYVPYHAYWGQGTQVTVSS

SEQ ID NO: 23027 - protein, 126 aa, Artificial Sequence
  Chemically Synthesized
QVQLQESGGGLVQAGGSLRLSCAASGYISADTLMGWYRQAPGKEREFVAAINRGTSTYYADSVKGRFTISRDNAKNTVYLQMNSLKPEDTAVYYCAVTRSAWVWAQDAVNWYHDYWGQGTQVTVSS

SEQ ID NO: 23028 - protein, 126 aa, Artificial Sequence
  Chemically Synthesized
QVQLQESGGGLVQAGGSLRLSCAASGNIFYFASMGWYRQAPGKERELVAGINHGTNTNYADSVKGRFTISRDNAKNTVYLQMNSLKPEDTAVYYCAARYRQDTSSYYTVQGDHAYWGQGTQVTVSS

SEQ ID NO: 23029 - protein, 119 aa, Artificial Sequence
  Chemically Synthesized
QVQLQESGGGLVQAGGSLRLSCAASGYIFHLKKMGWYRQAPGKERELVAAIGYGATTNYADSVKGRFTISRDNAKNTVYLQMNSLKPEDTAVYYCAVVWPFGYSVYGYWGQGTQVTVSS

SEQ ID NO: 23030 - protein, 118 aa, Artificial Sequence
  Chemically Synthesized
QVQLQESGGGLVQAGGSLRLSCAASGTIFGSPYMGWYRQAPGKEREFVATITYGSSTYYADSVKGRFTISRDNAKNTVYLQMNSLKPEDTAVYYCAVRQAVTTDHGYWGQGTQVTVSS

SEQ ID NO: 23031 - protein, 122 aa, Artificial Sequence
  Chemically Synthesized
QVQLQESGGGLVQAGGSLRLSCAASGSIFYLVGMGWYRQAPGKERELVAGIATGGITNYADSVKGRFTISRDNAKNTVYLQMNSLKPEDTAVYYCAARASFAPSRYVVHWYWGQGTQVTVSS

SEQ ID NO: 23032 - protein, 122 aa, Artificial Sequence
  Chemically Synthesized
QVQLQESGGGLVQAGGSLRLSCAASGTIFPPLSMGWYRQAPGKERELVAGITLGGSTYYADSVKGRFTISRDNAKNTVYLQMNSLKPEDTAVYYCAAQYAYVYAFIPVHQYWGQGTQVTVSS

SEQ ID NO: 23033 - protein, 126 aa, Artificial Sequence
  Chemically Synthesized
QVQLQESGGGLVQAGGSLRLSCAASGSISIAGAMGWYRQAPGKERELVAGINSGATTYYADSVKGRFTISRDNAKNTVYLQMNSLKPEDTAVYYCAVQPSLGSKADSLLEFYFVYWGQGTQVTVSS

SEQ ID NO: 23034 - protein, 117 aa, Artificial Sequence
  Chemically Synthesized
QVQLQESGGGLVQAGGSLRLSCAASGSIFSDTIMGWYRQAPGKEREFVAAISPVLLPYADSVKGRFTISRDNAKNTVYLQMNSLKPEDTAVYYCAAYYLLSRGTVYWGQGTQVTVSS

SEQ ID NO: 23035 - protein, 126 aa, Artificial Sequence
  Chemically Synthesized
QVQLQESGGGLVQAGGSLRLSCAASGSIFATGAMGWYRQAPGKEREFVAGIGYGASTNYADSVKGRFTISRDNAKNTVYLQMNSLKPEDTAVYYCAVLYDPAYRIVGSYVLPYAYWGQGTQVTVSS

SEQ ID NO: 23036 - protein, 118 aa, Artificial Sequence
  Chemically Synthesized
QVQLQESGGGLVQAGGSLRLSCAASGNISRVADMGWYRQAPGKERELVATIDYGATTYYADSVKGRFTISRDNAKNTVYLQMNSLKPEDTAVYYCAVLYRELSTHDYWGQGTQVTVSS

SEQ ID NO: 23037 - protein, 115 aa, Artificial Sequence
  Chemically Synthesized
QVQLQESGGGLVQAGGSLRLSCAASGNISVDSYMGWYRQAPGKERELVAGISYGSTTNYADSVKGRFTISRDNAKNTVYLQMNSLKPEDTAVYYCAVYQFRHPYWGQGTQVTVSS

SEQ ID NO: 23038 - protein, 121 aa, Artificial Sequence
  Chemically Synthesized
QVQLQESGGGLVQAGGSLRLSCAASGSISVPSAMGWYRQAPGKERELVATITRGSNTNYADSVKGRFTISRDNAKNTVYLQMNSLKPEDTAVYYCAAYATDTQYGYSCLYWGQGTQVTVSS

SEQ ID NO: 23039 - protein, 126 aa, Artificial Sequence
  Chemically Synthesized
QVQLQESGGGLVQAGGSLRLSCAASGSISQATQMGWYRQAPGKERELVAGINYGANTNYADSVKGRFTISRDNAKNTVYLQMNSLKPEDTAVYYCAVIYTGRTYYGYIVPGLLTYWGQGTQVTVSS

SEQ ID NO: 23040 - protein, 118 aa, Artificial Sequence
  Chemically Synthesized
QVQLQESGGGLVQAGGSLRLSCAASGYISYPNYMGWYRQAPGKEREFVATIAIGANTNYADSVKGRFTISRDNAKNTVYLQMNSLKPEDTAVYYCAVGADGQDPHDYWGQGTQVTVSS

SEQ ID NO: 23041 - protein, 126 aa, Artificial Sequence
  Chemically Synthesized
QVQLQESGGGLVQAGGSLRLSCAASGNIFHLYVMGWYRQAPGKEREFVAAISSGGSTYYADSVKGRFTISRDNAKNTVYLQMNSLKPEDTAVYYCAADRGPGEGDWYYSTLDHVYWGQGTQVTVSS

SEQ ID NO: 23042 - protein, 118 aa, Artificial Sequence
  Chemically Synthesized
QVQLQESGGGLVQAGGSLRLSCAASGTIFYGYYMGWYRQAPGKERELVAAIDYGSNTYYADSVKGRFTISRDNAKNTVYLQMNSLKPEDTAVYYCAALWGTQRDFTYWGQGTQVTVSS

SEQ ID NO: 23043 - protein, 118 aa, Artificial Sequence
  Chemically Synthesized
QVQLQESGGGLVQAGGSLRLSCAASGYIFSAGYMGWYRQAPGKEREFVATIAQGTTTNYADSVKGRFTISRDNAKNTVYLQMNSLKPEDTAVYYCASVTYPDYSLPYWGQGTQVTVSS

SEQ ID NO: 23044 - protein, 118 aa, Artificial Sequence
  Chemically Synthesized
QVQLQESGGGLVQAGGSLRLSCAASGYIFRPINMGWYRQAPGKEREFVASITYGSNTYYADSVKGRFTISRDNAKNTVYLQMNSLKPEDTAVYYCAVTIAGNTILDYWGQGTQVTVSS

SEQ ID NO: 23045 - protein, 126 aa, Artificial Sequence
  Chemically Synthesized
QVQLQESGGGLVQAGGSLRLSCAASGNISASTIMGWYRQAPGKEREFVATISYGASTNYADSVKGRFTISRDNAKNTVYLQMNSLKPEDTAVYYCAADSDNLYRYRVRGNAYLLYWGQGTQVTVSS

SEQ ID NO: 23046 - protein, 126 aa, Artificial Sequence
  Chemically Synthesized
QVQLQESGGGLVQAGGSLRLSCAASGNISFADNMGWYRQAPGKERELVATIGGGSSTNYADSVKGRFTISRDNAKNTVYLQMNSLKPEDTAVYYCAVTYSSYRWYPDSYRVYHIYWGQGTQVTVSS

SEQ ID NO: 23047 - protein, 122 aa, Artificial Sequence
  Chemically Synthesized
QVQLQESGGGLVQAGGSLRLSCAASGTISGYQSMGWYRQAPGKERELVASINDGSTTYYADSVKGRFTISRDNAKNTVYLQMNSLKPEDTAVYYCAADGAIYGDKYNPFGYWGQGTQVTVSS

SEQ ID NO: 23048 - protein, 126 aa, Artificial Sequence
  Chemically Synthesized
QVQLQESGGGLVQAGGSLRLSCAASGTISYPQQMGWYRQAPGKEREFVASITRGASTYYADSVKGRFTISRDNAKNTVYLQMNSLKPEDTAVYYCAVLGYYPIDYPYFTVRDHDYWGQGTQVTVSS

SEQ ID NO: 23049 - protein, 126 aa, Artificial Sequence
  Chemically Synthesized
QVQLQESGGGLVQAGGSLRLSCAASGTIFGDGDMGWYRQAPGKERELVATINLGATTNYADSVKGRFTISRDNAKNTVYLQMNSLKPEDTAVYYCAVYYTAIRQTTSNYPVWHGYWGQGTQVTVSS

SEQ ID NO: 23050 - protein, 116 aa, Artificial Sequence
  Chemically Synthesized
QVQLQESGGGLVQAGGSLRLSCAASGTIFWLMGWYRQAPGKERELVASIGYGSNTNYADSVKGRFTISRDNAKNTVYLQMNSLKPEDTAVYYCAAATSRRDLHTYWGQGTQVTVSS

SEQ ID NO: 23051 - protein, 118 aa, Artificial Sequence
  Chemically Synthesized
QVQLQESGGGLVQAGGSLRLSCAASGSIFRYYTMGWYRQAPGKEREFVATIGTGGTTYYADSVKGRFTISRDNAKNTVYLQMNSLKPEDTAVYYCAVGEGHPYPFDYWGQGTQVTVSS

SEQ ID NO: 23052 - protein, 126 aa, Artificial Sequence
  Chemically Synthesized
QVQLQESGGGLVQAGGSLRLSCAASGTISFASGMGWYRQAPGKERELVASITYGATTYYADSVKGRFTISRDNAKNTVYLQMNSLKPEDTAVYYCAAAPWENPWGTHPRDGLFAYWGQGTQVTVSS

SEQ ID NO: 23053 - protein, 121 aa, Artificial Sequence
  Chemically Synthesized
QVQLQESGGGLVQAGGSLRLSCAASGTISSRGDMGWYRQAPGKERELVATINGGATTNYADSVKGRFTISRDNAKNTVYLQMNSLKPEDTAVYYCAATPYSQDETTTGIYWGQGTQVTVSS

SEQ ID NO: 23054 - protein, 118 aa, Artificial Sequence
  Chemically Synthesized
QVQLQESGGGLVQAGGSLRLSCAASGSIFTVYYMGWYRQAPGKERELVAAISNGTITNYADSVKGRFTISRDNAKNTVYLQMNSLKPEDTAVYYCAVTSSWPLLHWYWGQGTQVTVSS

SEQ ID NO: 23055 - protein, 118 aa, Artificial Sequence
  Chemically Synthesized
QVQLQESGGGLVQAGGSLRLSCAASGTIFYYTDMGWYRQAPGKEREFVATINGGSSTYYADSVKGRFTISRDNAKNTVYLQMNSLKPEDTAVYYCAVPLYYWGYLNYWGQGTQVTVSS

SEQ ID NO: 23056 - protein, 126 aa, Artificial Sequence
  Chemically Synthesized
QVQLQESGGGLVQAGGSLRLSCAASGYISTSPPMGWYRQAPGKERELVATITKGGTTYYADSVKGRFTISRDNAKNTVYLQMNSLKPEDTAVYYCAALYSGPGDTYYDVYVGLGYWGQGTQVTVSS

SEQ ID NO: 23057 - protein, 118 aa, Artificial Sequence
  Chemically Synthesized
QVQLQESGGGLVQAGGSLRLSCAASGYISYDTGMGWYRQAPGKEREFVASITEGTTTNYADSVKGRFTISRDNAKNTVYLQMNSLKPEDTAVYYCAVVSYYRLIHLYWGQGTQVTVSS

SEQ ID NO: 23058 - protein, 118 aa, Artificial Sequence
  Chemically Synthesized
QVQLQESGGGLVQAGGSLRLSCAASGTISTFLAMGWYRQAPGKEREFVAAIADGGSTYYADSVKGRFTISRDNAKNTVYLQMNSLKPEDTAVYYCAVRARDFPRLRYWGQGTQVTVSS

SEQ ID NO: 23059 - protein, 118 aa, Artificial Sequence
  Chemically Synthesized
QVQLQESGGGLVQAGGSLRLSCAASGYIFYWDVMGWYRQAPGKERELVASINNGTSTYYADSVKGRFTISRDNAKNTVYLQMNSLKPEDTAVYYCAAGFSYTEAHRYWGQGTQVTVSS

SEQ ID NO: 23060 - protein, 126 aa, Artificial Sequence
  Chemically Synthesized
QVQLQESGGGLVQAGGSLRLSCAASGSIFYLYDMGWYRQAPGKERELVATIGYGSSTNYADSVKGRFTISRDNAKNTVYLQMNSLKPEDTAVYYCAARPWRSYDVYFKQYYGLDYWGQGTQVTVSS

SEQ ID NO: 23061 - protein, 118 aa, Artificial Sequence
  Chemically Synthesized
QVQLQESGGGLVQAGGSLRLSCAASGNIFARYDMGWYRQAPGKERELVATIDEGGNTYYADSVKGRFTISRDNAKNTVYLQMNSLKPEDTAVYYCAVGTARFTSFWYWGQGTQVTVSS

SEQ ID NO: 23062 - protein, 126 aa, Artificial Sequence
  Chemically Synthesized
QVQLQESGGGLVQAGGSLRLSCAASGTISYTNNMGWYRQAPGKERELVASISAGAITYYADSVKGRFTISRDNAKNTVYLQMNSLKPEDTAVYYCAAGAHWTSTYYALPGPGHQYWGQGTQVTVSS

SEQ ID NO: 23063 - protein, 125 aa, Artificial Sequence
  Chemically Synthesized
QVQLQESGGGLVQAGGSLRLSCAASGTIFFYYRMGWYRQAPGKEREFVATINDGSITNYADSVKGRFTISRDNAKNTVYLQMNSLKPEDTAVYYCAVSSTYPDWASGRQDTYQYWGQGTQVTVSS

SEQ ID NO: 23064 - protein, 118 aa, Artificial Sequence
  Chemically Synthesized
QVQLQESGGGLVQAGGSLRLSCAASGYIFARWYMGWYRQAPGKEREFVAGIAAGGSTNYADSVKGRFTISRDNAKNTVYLQMNSLKPEDTAVYYCAATRRLRTSYQYWGQGTQVTVSS

SEQ ID NO: 23065 - protein, 127 aa, Artificial Sequence
  Chemically Synthesized
QVQLQESGGGLVQAGGSLRLSCAASGYISEPLDMGWYRQAPGKEREFVAGIGDGTITNYADSVKGRFTISRDNAKNTVYLQMNSLKPEDTAVYYCAAIGDGIPLTTTRAPDFSHTYWGQGTQVTVSS

SEQ ID NO: 23066 - protein, 118 aa, Artificial Sequence
  Chemically Synthesized
QVQLQESGGGLVQAGGSLRLSCAASGYISLRGGMGWYRQAPGKERELVAGIGPGGNTYYADSVKGRFTISRDNAKNTVYLQMNSLKPEDTAVYYCAVWEPNLRDHRYWGQGTQVTVSS

SEQ ID NO: 23067 - protein, 118 aa, Artificial Sequence
  Chemically Synthesized
QVQLQESGGGLVQAGGSLRLSCAASGTISVPDYMGWYRQAPGKEREFVAAINWGGNTNYADSVKGRFTISRDNAKNTVYLQMNSLKPEDTAVYYCAAIASTGDTLGYWGQGTQVTVSS

SEQ ID NO: 23068 - protein, 121 aa, Artificial Sequence
  Chemically Synthesized
QVQLQESGGGLVQAGGSLRLSCAASGYIFSDRVMGWYRQAPGKERELVATISDGSITYYADSVKGRFTISRDNAKNTVYLQMNSLKPEDTAVYYCAADTYTELTLLTLIYWGQGTQVTVSS

SEQ ID NO: 23069 - protein, 118 aa, Artificial Sequence
  Chemically Synthesized
QVQLQESGGGLVQAGGSLRLSCAASGTISDRYPMGWYRQAPGKEREFVASIAYGSNTYYADSVKGRFTISRDNAKNTVYLQMNSLKPEDTAVYYCAVDTSYQAPLTYWGQGTQVTVSS

SEQ ID NO: 23070 - protein, 122 aa, Artificial Sequence
  Chemically Synthesized
QVQLQESGGGLVQAGGSLRLSCAASGTISDYSAMGWYRQAPGKEREFVATIDNGGTTNYADSVKGRFTISRDNAKNTVYLQMNSLKPEDTAVYYCAAYGSYAYLVYGALQYWGQGTQVTVSS

SEQ ID NO: 23071 - protein, 118 aa, Artificial Sequence
  Chemically Synthesized
QVQLQESGGGLVQAGGSLRLSCAASGNIFYYRYMGWYRQAPGKEREFVATIGYGGNTYYADSVKGRFTISRDNAKNTVYLQMNSLKPEDTAVYYCAARLYFRTYYSYWGQGTQVTVSS

SEQ ID NO: 23072 - protein, 117 aa, Artificial Sequence
  Chemically Synthesized
QVQLQESGGGLVQAGGSLRLSCAASGNIFDVDYMGWYRQAPGKEREFVAAIDNGASTNYADSVKGRFTISRDNAKNTVYLQMNSLKPEDTAVYYCAFRTLVTTTFYWGQGTQVTVSS

SEQ ID NO: 23073 - protein, 115 aa, Artificial Sequence
  Chemically Synthesized
QVQLQESGGGLVQAGGSLRLSCAASGNIFDLPGMGWYRQAPGKERELVASIDQGASTYYADSVKGRFTISRDNAKNTVYLQMNSLKPEDTAVYYCAVIADAFTYWGQGTQVTVSS

SEQ ID NO: 23074 - protein, 109 aa, Artificial Sequence
  Chemically Synthesized
QVQLQESGGGLVQAGGSLRLSCAASGTIFYYGMGWYRQAPGKERELVLIPYADSVKGRFTISRDNAKNTVYLQMNSLKPEDTAVYYCAVDMAVLSVWYWGQGTQVTVSS

SEQ ID NO: 23075 - protein, 126 aa, Artificial Sequence
  Chemically Synthesized
QVQLQESGGGLVQAGGSLRLSCAASGNISDYAFMGWYRQAPGKERELVAAIGYGTNTYYADSVKGRFTISRDNAKNTVYLQMNSLKPEDTAVYYCAVWEGGLKWPWYVYYEDHWYWGQGTQVTVSS

SEQ ID NO: 23076 - protein, 118 aa, Artificial Sequence
  Chemically Synthesized
QVQLQESGGGLVQAGGSLRLSCAASGNISSSPGMGWYRQAPGKEREFVAAINDGGTTYYADSVKGRFTISRDNAKNTVYLQMNSLKPEDTAVYYCAARTPDVYPYVYWGQGTQVTVSS

SEQ ID NO: 23077 - protein, 122 aa, Artificial Sequence
  Chemically Synthesized
QVQLQESGGGLVQAGGSLRLSCAASGTISYSKYMGWYRQAPGKERELVATIGIGGSTNYADSVKGRFTISRDNAKNTVYLQMNSLKPEDTAVYYCAVPEESTPLYYVPHRYWGQGTQVTVSS

SEQ ID NO: 23078 - protein, 126 aa, Artificial Sequence
  Chemically Synthesized
QVQLQESGGGLVQAGGSLRLSCAASGTIFDRGGMGWYRQAPGKEREFVASIGSGGTTYYADSVKGRFTISRDNAKNTVYLQMNSLKPEDTAVYYCAAGGSLGYLQYDTEDTIYNYWGQGTQVTVSS

SEQ ID NO: 23079 - protein, 122 aa, Artificial Sequence
  Chemically Synthesized
QVQLQESGGGLVQAGGSLRLSCAASGSISYYALMGWYRQAPGKEREFVATIGQGGITNYADSVKGRFTISRDNAKNTVYLQMNSLKPEDTAVYYCAAGGTTLGSTGLGLDYWGQGTQVTVSS

SEQ ID NO: 23080 - protein, 112 aa, Artificial Sequence
  Chemically Synthesized
QVQLQESGGGLVQAGGSLRLSCAASGYIFVPIDMGWYRQAPGKEREFVASINYGAITYYADSVKGRFTISRDNAKNTVYLQMNSLKPEDTAVYYCAAFGYYWGQGTQVTVSS

SEQ ID NO: 23081 - protein, 122 aa, Artificial Sequence
  Chemically Synthesized
QVQLQESGGGLVQAGGSLRLSCAASGTIFGGPTMGWYRQAPGKERELVASIGTGSSTYYADSVKGRFTISRDNAKNTVYLQMNSLKPEDTAVYYCAVLLGADPSNYALFYYWGQGTQVTVSS

SEQ ID NO: 23082 - protein, 122 aa, Artificial Sequence
  Chemically Synthesized
QVQLQESGGGLVQAGGSLRLSCAASGTISAREGMGWYRQAPGKERELVAAIAEGATTNYADSVKGRFTISRDNAKNTVYLQMNSLKPEDTAVYYCAAGPHQIKTYRDGHSYWGQGTQVTVSS

SEQ ID NO: 23083 - protein, 121 aa, Artificial Sequence
  Chemically Synthesized
QVQLQESGGGLVQAGGSLRLSCAASGNISLDYQMGWYRQAPGKERELVASIDGGAITNYADSVKGRFTISRDNAKNTVYLQMNSLKPEDTAVYYCAVGDSFLTLRSGRLYWGQGTQVTVSS

SEQ ID NO: 23084 - protein, 118 aa, Artificial Sequence
  Chemically Synthesized
QVQLQESGGGLVQAGGSLRLSCAASGSISSRTNMGWYRQAPGKERELVASIDRGGNTNYADSVKGRFTISRDNAKNTVYLQMNSLKPEDTAVYYCAVGLRYTPAHSYWGQGTQVTVSS

SEQ ID NO: 23085 - protein, 118 aa, Artificial Sequence
  Chemically Synthesized
QVQLQESGGGLVQAGGSLRLSCAASGSIFSDHDMGWYRQAPGKERELVAGIALGSNTNYADSVKGRFTISRDNAKNTVYLQMNSLKPEDTAVYYCAVRIYDPLYFDYWGQGTQVTVSS

SEQ ID NO: 23086 - protein, 126 aa, Artificial Sequence
  Chemically Synthesized
QVQLQESGGGLVQAGGSLRLSCAASGSISTHDGMGWYRQAPGKEREFVAAIDDGTTTNYADSVKGRFTISRDNAKNTVYLQMNSLKPEDTAVYYCAVPDGEVVSTFSRRWKYHPYWGQGTQVTVSS

SEQ ID NO: 23087 - protein, 126 aa, Artificial Sequence
  Chemically Synthesized
QVQLQESGGGLVQAGGSLRLSCAASGTISSYVDMGWYRQAPGKERELVASIDYGTITNYADSVKGRFTISRDNAKNTVYLQMNSLKPEDTAVYYCAATYGWSGRNSRQATYAHAYWGQGTQVTVSS

SEQ ID NO: 23088 - protein, 126 aa, Artificial Sequence
  Chemically Synthesized
QVQLQESGGGLVQAGGSLRLSCAASGTIFVVWSMGWYRQAPGKEREFVASISEGATTNYADSVKGRFTISRDNAKNTVYLQMNSLKPEDTAVYYCAVYVRYEDHGRIGQDGHYTYWGQGTQVTVSS

SEQ ID NO: 23089 - protein, 120 aa, Artificial Sequence
  Chemically Synthesized
QVQLQESGGGLVQAGGSLRLSCAASGSIFPGDSMGWYRQAPGKEREFVAGINGAITNYADSVKGRFTISRDNAKNTVYLQMNSLKPEDTAVYYCAATTAYIIYIDYELYWGQGTQVTVSS

SEQ ID NO: 23090 - protein, 118 aa, Artificial Sequence
  Chemically Synthesized
QVQLQESGGGLVQAGGSLRLSCAASGTISLERNMGWYRQAPGKERELVASITIGGTTYYADSVKGRFTISRDNAKNTVYLQMNSLKPEDTAVYYCAVDVTGYRLYYYWGQGTQVTVSS

SEQ ID NO: 23091 - protein, 122 aa, Artificial Sequence
  Chemically Synthesized
QVQLQESGGGLVQAGGSLRLSCAASGNISSYSQMGWYRQAPGKEREFVAGITAGSSTNYADSVKGRFTISRDNAKNTVYLQMNSLKPEDTAVYYCAVYYDNRYPVARPLTYWGQGTQVTVSS

SEQ ID NO: 23092 - protein, 126 aa, Artificial Sequence
  Chemically Synthesized
QVQLQESGGGLVQAGGSLRLSCAASGSISSRYRMGWYRQAPGKERELVAAIDYGATTYYADSVKGRFTISRDNAKNTVYLQMNSLKPEDTAVYYCAARYGAPYAGSWDRDGSHLYWGQGTQVTVSS

SEQ ID NO: 23093 - protein, 114 aa, Artificial Sequence
  Chemically Synthesized
QVQLQESGGGLVQAGGSLRLSCAASGTIFDVEYMGWYRQAPGKERELVATIAQGGTTNYADSVKGRFTISRDNAKNTVYLQMNSLKPEDTAVYYCAPFNTHFYWGQGTQVTVSS

SEQ ID NO: 23094 - protein, 123 aa, Artificial Sequence
  Chemically Synthesized
QVQLQESGGGLVQAGGSLRLSCAASGSIFEGIGYMGWYRQAPGKEREFVATITFGANTNYADSVKGRFTISRDNAKNTVYLQMNSLKPEDTAVYYCAAGSYHWYYYVFYLAYWGQGTQVTVSS

SEQ ID NO: 23095 - protein, 122 aa, Artificial Sequence
  Chemically Synthesized
QVQLQESGGGLVQAGGSLRLSCAASGSISQTKSMGWYRQAPGKEREFVAAIAEGASTYYADSVKGRFTISRDNAKNTVYLQMNSLKPEDTAVYYCAVLYGYYYELAYIHYYWGQGTQVTVSS

SEQ ID NO: 23096 - protein, 118 aa, Artificial Sequence
  Chemically Synthesized
QVQLQESGGGLVQAGGSLRLSCAASGTISGFYLMGWYRQAPGKEREFVATISSGGTTNYADSVKGRFTISRDNAKNTVYLQMNSLKPEDTAVYYCAANGWYYYRLYYWGQGTQVTVSS

SEQ ID NO: 23097 - protein, 121 aa, Artificial Sequence
  Chemically Synthesized
QVQLQESGGGLVQAGGSLRLSCAASGNISPVTMGWYRQAPGKERELVATIAYGATTYYADSVKGRFTISRDNAKNTVYLQMNSLKPEDTAVYYCAVGWPDAYYQQLYFSYWGQGTQVTVSS

SEQ ID NO: 23098 - protein, 122 aa, Artificial Sequence
  Chemically Synthesized
QVQLQESGGGLVQAGGSLRLSCAASGTIFWGWYMGWYRQAPGKERELVAAINYGSITYYADSVKGRFTISRDNAKNTVYLQMNSLKPEDTAVYYCAADNRSGSHDYDPHYYWGQGTQVTVSS

SEQ ID NO: 23099 - protein, 118 aa, Artificial Sequence
  Chemically Synthesized
QVQLQESGGGLVQAGGSLRLSCAASGTIFQLYNMGWYRQAPGKEREFVASIAPGGSTYYADSVKGRFTISRDNAKNTVYLQMNSLKPEDTAVYYCAATLSDGERYYYWGQGTQVTVSS

SEQ ID NO: 23100 - protein, 117 aa, Artificial Sequence
  Chemically Synthesized
QVQLQESGGGLVQAGGSLRLSCAASGSISQYGDMGWYRQAPGKERELVAGIGDGATTNYADSVKGRFTISRDNAKNTVYLQMNSLKPEDTAVYYCAAFRYQDDHGYWGQGTQVTVSS

SEQ ID NO: 23101 - protein, 118 aa, Artificial Sequence
  Chemically Synthesized
QVQLQESGGGLVQAGGSLRLSCAASGSISAIRWMGWYRQAPGKEREFVAGISLGSSTNYADSVKGRFTISRDNAKNTVYLQMNSLKPEDTAVYYCAARDYANLVHDYWGQGTQVTVSS

SEQ ID NO: 23102 - protein, 118 aa, Artificial Sequence
  Chemically Synthesized
QVQLQESGGGLVQAGGSLRLSCAASGNIFTLRYMGWYRQAPGKEREFVASIGIGGTTNYADSVKGRFTISRDNAKNTVYLQMNSLKPEDTAVYYCAVGGPSAYQLPYWGQGTQVTVSS

SEQ ID NO: 23103 - protein, 118 aa, Artificial Sequence
  Chemically Synthesized
QVQLQESGGGLVQAGGSLRLSCAASGNISAAVWMGWYRQAPGKEREFVATISFGSSTYYADSVKGRFTISRDNAKNTVYLQMNSLKPEDTAVYYCAADTHDRVYHDYWGQGTQVTVSS

SEQ ID NO: 23104 - protein, 118 aa, Artificial Sequence
  Chemically Synthesized
QVQLQESGGGLVQAGGSLRLSCAASGTIFPWYVMGWYRQAPGKEREFVAAIGYGATTYYADSVKGRFTISRDNAKNTVYLQMNSLKPEDTAVYYCAVEPEGPDGHRYWGQGTQVTVSS

SEQ ID NO: 23105 - protein, 118 aa, Artificial Sequence
  Chemically Synthesized
QVQLQESGGGLVQAGGSLRLSCAASGYIFYWYDMGWYRQAPGKEREFVAGIDDGSTTNYADSVKGRFTISRDNAKNTVYLQMNSLKPEDTAVYYCAVRAEGYDRFYYWGQGTQVTVSS

SEQ ID NO: 23106 - protein, 123 aa, Artificial Sequence
  Chemically Synthesized
QVQLQESGGGLVQAGGSLRLSCAASGYIFSPTTMGWYRQAPGKEREFVPLLVWVVLPYADSVKGRFTISRDNAKNTVYLQMNSLKPEDTAVYYCAAWAWYVPYYDNGSNDLYWGQGTQVTVSS

SEQ ID NO: 23107 - protein, 121 aa, Artificial Sequence
  Chemically Synthesized
QVQLQESGGGLVQAGGSLRLSCAASGSISQSTMGWYRQAPGKERELVAGISSGSSTYYADSVKGRFTISRDNAKNTVYLQMNSLKPEDTAVYYCAVRGLQQSIAHDDHYYWGQGTQVTVSS

SEQ ID NO: 23108 - protein, 116 aa, Artificial Sequence
  Chemically Synthesized
QVQLQESGGGLVQAGGSLRLSCAASGTISGLIYMGWYRQAPGKEREFVAAISYGASTYYADSVKGRFTISRDNAKNTVYLQMNSLKPEDTAVYYCAVVYEWVHEYWGQGTQVTVSS

SEQ ID NO: 23109 - protein, 112 aa, Artificial Sequence
  Chemically Synthesized
QVQLQESGGGLVQAGGSLRLSCAASGTISAIQYMGWYRQAPGKEREFVAAIAAGSSTNYADSVKGRFTISRDNAKNTVYLQMNSLKPEDTAVYYCAAGHWYWGQGTQVTVSS

SEQ ID NO: 23110 - protein, 117 aa, Artificial Sequence
  Chemically Synthesized
QVQLQESGGGLVQAGGSLRLSCAASGNISGRSYMGWYRQAPGKEREFVATIGDGGSTYYADSVKGRFTISRDNAKNTVYLQMNSLKPEDTAVYYCAARSGSTYHLYWGQGTQVTVSS

SEQ ID NO: 23111 - protein, 116 aa, Artificial Sequence
  Chemically Synthesized
QVQLQESGGGLVQAGGSLRLSCAASGSISDYSYMGWYRQAPGKEREFVATIDSVLLPYADSVKGRFTISRDNAKNTVYLQMNSLKPEDTAVYYCAVYVYVATFMYWGQGTQVTVSS

SEQ ID NO: 23112 - protein, 113 aa, Artificial Sequence
  Chemically Synthesized
QVQLQESGGGLVQAGGSLRLSCAASGSIFYADAMGWYRQAPGKERELVASIGYGGITNYADSVKGRFTISRDNAKNTVYLQMNSLKPEDTAVYYCAADIDDYWGQGTQVTVSS

SEQ ID NO: 23113 - protein, 118 aa, Artificial Sequence
  Chemically Synthesized
QVQLQESGGGLVQAGGSLRLSCAASGYIFYTVLMGWYRQAPGKEREFVATIGNGATTYYADSVKGRFTISRDNAKNTVYLQMNSLKPEDTAVYYCAAPPGYDVYHFYWGQGTQVTVSS

SEQ ID NO: 23114 - protein, 122 aa, Artificial Sequence
  Chemically Synthesized
QVQLQESGGGLVQAGGSLRLSCAASGNIFDVYHMGWYRQAPGKERELVATISLGGSTYYADSVKGRFTISRDNAKNTVYLQMNSLKPEDTAVYYCAVITSYPYQEDYVFDYWGQGTQVTVSS

SEQ ID NO: 23115 - protein, 118 aa, Artificial Sequence
  Chemically Synthesized
QVQLQESGGGLVQAGGSLRLSCAASGNISGGPYMGWYRQAPGKERELVAGIDAGGNTNYADSVKGRFTISRDNAKNTVYLQMNSLKPEDTAVYYCAAHAPGTTDYVYWGQGTQVTVSS

SEQ ID NO: 23116 - protein, 117 aa, Artificial Sequence
  Chemically Synthesized
QVQLQESGGGLVQAGGSLRLSCAASGSISRIGGMGWYRQAPGKEREFVAGIGDGTTTNYADSVKGRFTISRDNAKNTVYLQMNSLKPEDTAVYYCAADLSSLVLFYWGQGTQVTVSS

SEQ ID NO: 23117 - protein, 118 aa, Artificial Sequence
  Chemically Synthesized
QVQLQESGGGLVQAGGSLRLSCAASGNISSRDGMGWYRQAPGKERELVASISYGSITYYADSVKGRFTISRDNAKNTVYLQMNSLKPEDTAVYYCAVTTAAQEYHDYWGQGTQVTVSS

SEQ ID NO: 23118 - protein, 118 aa, Artificial Sequence
  Chemically Synthesized
QVQLQESGGGLVQAGGSLRLSCAASGTISFDATMGWYRQAPGKEREFVASIAGGAITNYADSVKGRFTISRDNAKNTVYLQMNSLKPEDTAVYYCAVADYYYRYYDYWGQGTQVTVSS

SEQ ID NO: 23119 - protein, 112 aa, Artificial Sequence
  Chemically Synthesized
QVQLQESGGGLVQAGGSLRLSCAASGTIFILITMGWYRQAPGKEREFVATISHGAKPYADSVKGRFTISRDNAKNTVYLQMNSLKPEDTAVYYCAVDGHGYWGQGTQVTVSS

SEQ ID NO: 23120 - protein, 120 aa, Artificial Sequence
  Chemically Synthesized
QVQLQESGGGLVQAGGSLRLSCAASGNISWDWMGWYRQAPGKERELVATINRGATTNYADSVKGRFTISRDNAKNTVYLQMNSLKPEDTAVYYCAVYGNSADDSQKHAYWGQGTQVTVSS

SEQ ID NO: 23121 - protein, 118 aa, Artificial Sequence
  Chemically Synthesized
QVQLQESGGGLVQAGGSLRLSCAASGYISARRRMGWYRQAPGKERELVAAIANGGNTYYADSVKGRFTISRDNAKNTVYLQMNSLKPEDTAVYYCAAYYAYTAFFVYWGQGTQVTVSS

SEQ ID NO: 23122 - protein, 118 aa, Artificial Sequence
  Chemically Synthesized
QVQLQESGGGLVQAGGSLRLSCAASGTIFWYYRMGWYRQAPGKEREFVATIDLGSTTNYADSVKGRFTISRDNAKNTVYLQMNSLKPEDTAVYYCAAVYSHAYYFGYWGQGTQVTVSS

SEQ ID NO: 23123 - protein, 121 aa, Artificial Sequence
  Chemically Synthesized
QVQLQESGGGLVQAGGSLRLSCAASGTIFGLVMGWYRQAPGKEREFVATINPGTNTNYADSVKGRFTISRDNAKNTVYLQMNSLKPEDTAVYYCAASHYLLDLDFKSHIYWGQGTQVTVSS

SEQ ID NO: 23124 - protein, 115 aa, Artificial Sequence
  Chemically Synthesized
QVQLQESGGGLVQAGGSLRLSCAASGYISTMGWYRQAPGKEREFVAAINSGTTTNYADSVKGRFTISRDNAKNTVYLQMNSLKPEDTAVYYCAVRERGSVIYDYWGQGTQVTVSS

SEQ ID NO: 23125 - protein, 118 aa, Artificial Sequence
  Chemically Synthesized
QVQLQESGGGLVQAGGSLRLSCAASGTISARNEMGWYRQAPGKERELVATIDRGGNTNYADSVKGRFTISRDNAKNTVYLQMNSLKPEDTAVYYCAAYLPYDDLHPYWGQGTQVTVSS

SEQ ID NO: 23126 - protein, 118 aa, Artificial Sequence
  Chemically Synthesized
QVQLQESGGGLVQAGGSLRLSCAASGSIFLYPYMGWYRQAPGKEREFVAAITPGGTTYYADSVKGRFTISRDNAKNTVYLQMNSLKPEDTAVYYCAAIIVHLYQFSYWGQGTQVTVSS

SEQ ID NO: 23127 - protein, 118 aa, Artificial Sequence
  Chemically Synthesized
QVQLQESGGGLVQAGGSLRLSCAASGTISRESMGWYRQAPGKERELVASIGLGGSTYYADSVKGRFTISRDNAKNTVYLQMNSLKPEDTAVYYCAVYYYGYTQRLKYWGQGTQVTVSS

SEQ ID NO: 23128 - protein, 117 aa, Artificial Sequence
  Chemically Synthesized
QVQLQESGGGLVQAGGSLRLSCAASGNIFDSDPMGWYRQAPGKERELVAGISYGCYLYADSVKGRFTISRDNAKNTVYLQMNSLKPEDTAVYYCAAWHRGPWDFWYWGQGTQVTVSS

SEQ ID NO: 23129 - protein, 121 aa, Artificial Sequence
  Chemically Synthesized
QVQLQESGGGLVQAGGSLRLSCAASGSISDGVDMGWYRQAPGKERELVASIGGGGITNYADSVKGRFTISRDNAKNTVYLQMNSLKPEDTAVYYCAVSWTHVQFVPSAMYWGQGTQVTVSS

SEQ ID NO: 23130 - protein, 118 aa, Artificial Sequence
  Chemically Synthesized
QVQLQESGGGLVQAGGSLRLSCAASGTIFVVWPMGWYRQAPGKERELVAGIGTGSNTYYADSVKGRFTISRDNAKNTVYLQMNSLKPEDTAVYYCAAYAVYDGGHRYWGQGTQVTVSS

SEQ ID NO: 23131 - protein, 116 aa, Artificial Sequence
  Chemically Synthesized
QVQLQESGGGLVQAGGSLRLSCAASGNISVYYFMGWYRQAPGKEREFVAGIDVGGTTYYADSVKGRFTISRDNAKNTVYLQMNSLKPEDTAVYYCAADGYDRLRYWGQGTQVTVSS

SEQ ID NO: 23132 - protein, 126 aa, Artificial Sequence
  Chemically Synthesized
QVQLQESGGGLVQAGGSLRLSCAASGTIFHYVSMGWYRQAPGKERELVAGIAVGTITYYADSVKGRFTISRDNAKNTVYLQMNSLKPEDTAVYYCAVYFWQYYDTVYNFGPPHTYWGQGTQVTVSS

SEQ ID NO: 23133 - protein, 122 aa, Artificial Sequence
  Chemically Synthesized
QVQLQESGGGLVQAGGSLRLSCAASGYIFRSTYMGWYRQAPGKEREFVASITGGANTYYADSVKGRFTISRDNAKNTVYLQMNSLKPEDTAVYYCAAVYTRSLLTWIQLPYWGQGTQVTVSS

SEQ ID NO: 23134 - protein, 117 aa, Artificial Sequence
  Chemically Synthesized
QVQLQESGGGLVQAGGSLRLSCAASGNISGTATMGWYRQAPGKERELVAGISYGAITYYADSVKGRFTISRDNAKNTVYLQMNSLKPEDTAVYYCAVYHRDGYAHYWGQGTQVTVSS

SEQ ID NO: 23135 - protein, 125 aa, Artificial Sequence
  Chemically Synthesized
QVQLQESGGGLVQAGGSLRLSCAASGYIFYEDYMGWYRQAPGKERELVAGIGSGTNTNYADSVKGRFTISRDNAKNTVYLQMNSLKPEDTAVYYCAVWSVWWWGPRQFTRHHQYWGQGTQVTVSS

SEQ ID NO: 23136 - protein, 121 aa, Artificial Sequence
  Chemically Synthesized
QVQLQESGGGLVQAGGSLRLSCAASGNISYQALMGWYRQAPGKEREFVAAITYGSTTYYADSVKGRFTISRDNAKNTVYLQMNSLKPEDTAVYYCAAWFYILVYYADHPYWGQGTQVTVSS

SEQ ID NO: 23137 - protein, 121 aa, Artificial Sequence
  Chemically Synthesized
QVQLQESGGGLVQAGGSLRLSCAASGNISTDDDMGWYRQAPGKERELVAAITRGSTNYADSVKGRFTISRDNAKNTVYLQMNSLKPEDTAVYYCAVDREGAYDWDAYYFYWGQGTQVTVSS

SEQ ID NO: 23138 - protein, 118 aa, Artificial Sequence
  Chemically Synthesized
QVQLQESGGGLVQAGGSLRLSCAASGYIFVHELMGWYRQAPGKERELVASIADGTNTNYADSVKGRFTISRDNAKNTVYLQMNSLKPEDTAVYYCAAVIYDVDLHSYWGQGTQVTVSS

SEQ ID NO: 23139 - protein, 118 aa, Artificial Sequence
  Chemically Synthesized
QVQLQESGGGLVQAGGSLRLSCAASGNISIYADMGWYRQAPGKERELVASINDGGSTYYADSVKGRFTISRDNAKNTVYLQMNSLKPEDTAVYYCAVRGGRVVRLPYWGQGTQVTVSS

SEQ ID NO: 23140 - protein, 117 aa, Artificial Sequence
  Chemically Synthesized
QVQLQESGGGLVQAGGSLRLSCAASGYISYVTMGWYRQAPGKERELVAGIADGGTTYYADSVKGRFTISRDNAKNTVYLQMNSLKPEDTAVYYCAVDGQRSYYHYYWGQGTQVTVSS

SEQ ID NO: 23141 - protein, 126 aa, Artificial Sequence
  Chemically Synthesized
QVQLQESGGGLVQAGGSLRLSCAASGTISYYTGMGWYRQAPGKERELVASIDYGYYYLYADSVKGRFTISRDNAKNTVYLQMNSLKPEDTAVYYCAVRYYYVLGYVHPDGYDHYYWGQGTQVTVSS

SEQ ID NO: 23142 - protein, 110 aa, Artificial Sequence
  Chemically Synthesized
QVQLQESGGGLVQAGGSLRLSCAASGTISVANLMGWYRQAPGKEREFVATINDGTNTYYADSVKGRFTISRDNAKNTVYLQMNSLKPEDTAVYYCAAGYWGQGTQVTVSS

SEQ ID NO: 23143 - protein, 118 aa, Artificial Sequence
  Chemically Synthesized
QVQLQESGGGLVQAGGSLRLSCAASGTISYFTDMGWYRQAPGKEREFVAGINVGSITNYADSVKGRFTISRDNAKNTVYLQMNSLKPEDTAVYYCAVWPVDDYAYPYWGQGTQVTVSS

SEQ ID NO: 23144 - protein, 122 aa, Artificial Sequence
  Chemically Synthesized
QVQLQESGGGLVQAGGSLRLSCAASGSISDANSMGWYRQAPGKERELVATISYGTITNYADSVKGRFTISRDNAKNTVYLQMNSLKPEDTAVYYCAVNGSKYARGPDDYSYWGQGTQVTVSS

SEQ ID NO: 23145 - protein, 118 aa, Artificial Sequence
  Chemically Synthesized
QVQLQESGGGLVQAGGSLRLSCAASGTIFSPVFMGWYRQAPGKERELVAAITGGGTTYYADSVKGRFTISRDNAKNTVYLQMNSLKPEDTAVYYCAVNYDGVPGLTYWGQGTQVTVSS

SEQ ID NO: 23146 - protein, 126 aa, Artificial Sequence
  Chemically Synthesized
QVQLQESGGGLVQAGGSLRLSCAASGYISSGLRMGWYRQAPGKEREFVASITYGGSTNYADSVKGRFTISRDNAKNTVYLQMNSLKPEDTAVYYCAALTDPDGANEYLHASNLDYWGQGTQVTVSS

SEQ ID NO: 23147 - protein, 118 aa, Artificial Sequence
  Chemically Synthesized
QVQLQESGGGLVQAGGSLRLSCAASGTIFVVLVMGWYRQAPGKEREFVAAIAHGGNTYYADSVKGRFTISRDNAKNTVYLQMNSLKPEDTAVYYCAAYRYPKNPFAYWGQGTQVTVSS

SEQ ID NO: 23148 - protein, 118 aa, Artificial Sequence
  Chemically Synthesized
QVQLQESGGGLVQAGGSLRLSCAASGTISIASGMGWYRQAPGKERELVAAISDGSITNYADSVKGRFTISRDNAKNTVYLQMNSLKPEDTAVYYCAVDVYTRYFLVYWGQGTQVTVSS

SEQ ID NO: 23149 - protein, 117 aa, Artificial Sequence
  Chemically Synthesized
QVQLQESGGGLVQAGGSLRLSCAASGNISYAYYMGWYRQAPGKEREFVAGITDGTTTYYADSVKGRFTISRDNAKNTVYLQMNSLKPEDTAVYYCAVPFTHYSTIYWGQGTQVTVSS

SEQ ID NO: 23150 - protein, 126 aa, Artificial Sequence
  Chemically Synthesized
QVQLQESGGGLVQAGGSLRLSCAASGTIFYSYAMGWYRQAPGKERELVAAINNGASTYYADSVKGRFTISRDNAKNTVYLQMNSLKPEDTAVYYCAATDYRYSTYRQEHAGGYLYWGQGTQVTVSS

SEQ ID NO: 23151 - protein, 122 aa, Artificial Sequence
  Chemically Synthesized
QVQLQESGGGLVQAGGSLRLSCAASGSIFPDLAMGWYRQAPGKEREFVAAISDGSTTNYADSVKGRFTISRDNAKNTVYLQMNSLKPEDTAVYYCAVAQYDNHDEGYYFRYWGQGTQVTVSS

SEQ ID NO: 23152 - protein, 118 aa, Artificial Sequence
  Chemically Synthesized
QVQLQESGGGLVQAGGSLRLSCAASGSIFDRSLMGWYRQAPGKERELVAAIGYGSSTYYADSVKGRFTISRDNAKNTVYLQMNSLKPEDTAVYYCAVTYPKYDHHIYWGQGTQVTVSS

SEQ ID NO: 23153 - protein, 117 aa, Artificial Sequence
  Chemically Synthesized
QVQLQESGGGLVQAGGSLRLSCAASGTISQQSLMGWYRQAPGKERELVAAISSGGSTYYADSVKGRFTISRDNAKNTVYLQMNSLKPEDTAVYYCAASYPYRRHLYWGQGTQVTVSS

SEQ ID NO: 23154 - protein, 117 aa, Artificial Sequence
  Chemically Synthesized
QVQLQESGGGLVQAGGSLRLSCAASGNIFDYPPMGWYRQAPGKERELVAAIGGGGSTYYADSVKGRFTISRDNAKNTVYLQMNSLKPEDTAVYYCAAALAYSSHLYWGQGTQVTVSS

SEQ ID NO: 23155 - protein, 118 aa, Artificial Sequence
  Chemically Synthesized
QVQLQESGGGLVQAGGSLRLSCAASGSISTGTLMGWYRQAPGKERELVAAIGEGSTTYYADSVKGRFTISRDNAKNTVYLQMNSLKPEDTAVYYCAATGIQAFYHIYWGQGTQVTVSS

SEQ ID NO: 23156 - protein, 120 aa, Artificial Sequence
  Chemically Synthesized
QVQLQESGGGLVQAGGSLRLSCAASGNIFINYGMGWYRQAPGKERELVAAIGIGGNTYYADSVKGRFTISRDNAKNTVYLQMNSLKPEDTAVYYCAVAYLVDGGIYLDYWGQGTQVTVSS

SEQ ID NO: 23157 - protein, 120 aa, Artificial Sequence
  Chemically Synthesized
QVQLQESGGGLVQAGGSLRLSCAASGYIFGPGRMGWYRQAPGKERELVATIDTGANTNYADSVKGRFTISRDNAKNTVYLQMNSLKPEDTAVYYCAVAYLVDGGIYLDYWGQGTQVTVSS

SEQ ID NO: 23158 - protein, 117 aa, Artificial Sequence
  Chemically Synthesized
QVQLQESGGGLVQAGGSLRLSCAASGTISPAPSMGWYRQAPGKEREFVATIAVGGVPYADSVKGRFTISRDNAKNTVYLQMNSLKPEDTAVYYCAAGYTINPYHDYWGQGTQVTVSS

SEQ ID NO: 23159 - protein, 121 aa, Artificial Sequence
  Chemically Synthesized
QVQLQESGGGLVQAGGSLRLSCAASGTISTQTKMGWYRQAPGKEREFVAAINYGANTNYADSVKGRFTISRDNAKNTVYLQMNSLKPEDTAVYYCAARVVYSGEQPTTIYWGQGTQVTVSS

SEQ ID NO: 23160 - protein, 121 aa, Artificial Sequence
  Chemically Synthesized
QVQLQESGGGLVQAGGSLRLSCAASGTIFPYDIMGWYRQAPGKERELVATITDGTITNYADSVKGRFTISRDNAKNTVYLQMNSLKPEDTAVYYCAAGYAGFIPDSLRLYWGQGTQVTVSS

SEQ ID NO: 23161 - protein, 118 aa, Artificial Sequence
  Chemically Synthesized
QVQLQESGGGLVQAGGSLRLSCAASGYIFYEAIMGWYRQAPGKEREFVATIGYGATTNYADSVKGRFTISRDNAKNTVYLQMNSLKPEDTAVYYCAASADYDQYLHYWGQGTQVTVSS

SEQ ID NO: 23162 - protein, 122 aa, Artificial Sequence
  Chemically Synthesized
QVQLQESGGGLVQAGGSLRLSCAASGTISPYYLMGWYRQAPGKERELVAGINQGTTTNYADSVKGRFTISRDNAKNTVYLQMNSLKPEDTAVYYCAVVYYDTQDDTYRFGYWGQGTQVTVSS

SEQ ID NO: 23163 - protein, 114 aa, Artificial Sequence
  Chemically Synthesized
QVQLQESGGGLVQAGGSLRLSCAASGSIFPSVAMGWYRQAPGKEREFVASINYGATTYYADSVKGRFTISRDNAKNTVYLQMNSLKPEDTAVYYCAAGSLLIYWGQGTQVTVSS

SEQ ID NO: 23164 - protein, 122 aa, Artificial Sequence
  Chemically Synthesized
QVQLQESGGGLVQAGGSLRLSCAASGTISIAHYMGWYRQAPGKERELVATIAVGTNTNYADSVKGRFTISRDNAKNTVYLQMNSLKPEDTAVYYCAVGNWGDDVGDDFHVYWGQGTQVTVSS

SEQ ID NO: 23165 - protein, 125 aa, Artificial Sequence
  Chemically Synthesized
QVQLQESGGGLVQAGGSLRLSCAASGTISYSLYMGWYRQAPGKEREFVASITGGTSTYYADSVKGRFTISRDNAKNTVYLQMNSLKPEDTAVYYCAVVDADSRDGSVRTLTTFYWGQGTQVTVSS

SEQ ID NO: 23166 - protein, 117 aa, Artificial Sequence
  Chemically Synthesized
QVQLQESGGGLVQAGGSLRLSCAASGYIFDTYMGWYRQAPGKEREFVAAIGLGAITYYADSVKGRFTISRDNAKNTVYLQMNSLKPEDTAVYYCAVGDALSDPFSYWGQGTQVTVSS

SEQ ID NO: 23167 - protein, 126 aa, Artificial Sequence
  Chemically Synthesized
QVQLQESGGGLVQAGGSLRLSCAASGTIFYVHAMGWYRQAPGKERELVATIGPGGITYYADSVKGRFTISRDNAKNTVYLQMNSLKPEDTAVYYCAAYPWSHVPYDDNPELLHYYWGQGTQVTVSS

SEQ ID NO: 23168 - protein, 117 aa, Artificial Sequence
  Chemically Synthesized
QVQLQESGGGLVQAGGSLRLSCAASGTISLDTMGWYRQAPGKEREFVATIDVGSTTNYADSVKGRFTISRDNAKNTVYLQMNSLKPEDTAVYYCAAHANGLDQHGYWGQGTQVTVSS

SEQ ID NO: 23169 - protein, 118 aa, Artificial Sequence
  Chemically Synthesized
QVQLQESGGGLVQAGGSLRLSCAASGTISPWAGMGWYRQAPGKEREFVAGITLGGTTNYADSVKGRFTISRDNAKNTVYLQMNSLKPEDTAVYYCAVQYENRQDLYYWGQGTQVTVSS

SEQ ID NO: 23170 - protein, 121 aa, Artificial Sequence
  Chemically Synthesized
QVQLQESGGGLVQAGGSLRLSCAASGSISTFFLMGWYRQAPGKEREFVAGIAYGTNTNYADSVKGRFTISRDNAKNTVYLQMNSLKPEDTAVYYCAASVDDPVDYVLYNYWGQGTQVTVSS

SEQ ID NO: 23171 - protein, 118 aa, Artificial Sequence
  Chemically Synthesized
QVQLQESGGGLVQAGGSLRLSCAASGTISAYNLMGWYRQAPGKERELVAGITGGTSTNYADSVKGRFTISRDNAKNTVYLQMNSLKPEDTAVYYCAVDLAIYVFYQYWGQGTQVTVSS

SEQ ID NO: 23172 - protein, 118 aa, Artificial Sequence
  Chemically Synthesized
QVQLQESGGGLVQAGGSLRLSCAASGNIFYYPYMGWYRQAPGKEREFVASISYGGNTYYADSVKGRFTISRDNAKNTVYLQMNSLKPEDTAVYYCAVWAYPRQHYPYWGQGTQVTVSS

SEQ ID NO: 23173 - protein, 121 aa, Artificial Sequence
  Chemically Synthesized
QVQLQESGGGLVQAGGSLRLSCAASGSIFAYTTMGWYRQAPGKERELVATIDYGSTTYYADSVKGRFTISRDNAKNTVYLQMNSLKPEDTAVYYCAAGREHYAGVATVMYWGQGTQVTVSS

SEQ ID NO: 23174 - protein, 115 aa, Artificial Sequence
  Chemically Synthesized
QVQLQESGGGLVQAGGSLRLSCAASGNISGRSEMGWYRQAPGKEREFVPVLILVLIPYADSVKGRFTISRDNAKNTVYLQMNSLKPEDTAVYYCAVTLTTWTIYWGQGTQVTVSS

SEQ ID NO: 23175 - protein, 122 aa, Artificial Sequence
  Chemically Synthesized
QVQLQESGGGLVQAGGSLRLSCAASGTIFFDDHMGWYRQAPGKERELVAGIGGGTNTNYADSVKGRFTISRDNAKNTVYLQMNSLKPEDTAVYYCAVPVDYFRLGRDQHGYWGQGTQVTVSS

SEQ ID NO: 23176 - protein, 118 aa, Artificial Sequence
  Chemically Synthesized
QVQLQESGGGLVQAGGSLRLSCAASGSISVYGQMGWYRQAPGKEREFVASIGYGTNTYYADSVKGRFTISRDNAKNTVYLQMNSLKPEDTAVYYCAADPEVTGPHGYWGQGTQVTVSS

SEQ ID NO: 23177 - protein, 118 aa, Artificial Sequence
  Chemically Synthesized
QVQLQESGGGLVQAGGSLRLSCAASGSIFVYDDMGWYRQAPGKERELVAGITSGANTNYADSVKGRFTISRDNAKNTVYLQMNSLKPEDTAVYYCAVRAVDDPNYAYWGQGTQVTVSS

SEQ ID NO: 23178 - protein, 125 aa, Artificial Sequence
  Chemically Synthesized
QVQLQESGGGLVQAGGSLRLSCAASGNIFGQFFMGWYRQAPGKERELVPLLVLVVLPYADSVKGRFTISRDNAKNTVYLQMNSLKPEDTAVYYCAAYRNLDRYAYSEPYYELDYWGQGTQVTVSS

SEQ ID NO: 23179 - protein, 118 aa, Artificial Sequence
  Chemically Synthesized
QVQLQESGGGLVQAGGSLRLSCAASGSISVVLIMGWYRQAPGKERELVASIDYGTITYYADSVKGRFTISRDNAKNTVYLQMNSLKPEDTAVYYCAADAIGEERLPYWGQGTQVTVSS

SEQ ID NO: 23180 - protein, 118 aa, Artificial Sequence
  Chemically Synthesized
QVQLQESGGGLVQAGGSLRLSCAASGSISPTYGMGWYRQAPGKEREFVAGISRGSITYYADSVKGRFTISRDNAKNTVYLQMNSLKPEDTAVYYCAAGYTAADYLWYWGQGTQVTVSS

SEQ ID NO: 23181 - protein, 117 aa, Artificial Sequence
  Chemically Synthesized
QVQLQESGGGLVQAGGSLRLSCAASGTIFLFYSMGWYRQAPGKERELVATIAGGTNTNYADSVKGRFTISRDNAKNTVYLQMNSLKPEDTAVYYCAAANVSTTFLYWGQGTQVTVSS

SEQ ID NO: 23182 - protein, 118 aa, Artificial Sequence
  Chemically Synthesized
QVQLQESGGGLVQAGGSLRLSCAASGTIFYPTYMGWYRQAPGKEREFVATISQGSNTNYADSVKGRFTISRDNAKNTVYLQMNSLKPEDTAVYYCAADTPAYTAHTYWGQGTQVTVSS

SEQ ID NO: 23183 - protein, 122 aa, Artificial Sequence
  Chemically Synthesized
QVQLQESGGGLVQAGGSLRLSCAASGYIFSPSLMGWYRQAPGKERELVFGTNTNYADSVKGRFTISRDNAKNTVYLQMNSLKPEDTAVYYCAVPYEARPWVADYNDYYYLYWGQGTQVTVSS

SEQ ID NO: 23184 - protein, 122 aa, Artificial Sequence
  Chemically Synthesized
QVQLQESGGGLVQAGGSLRLSCAASGSISVYVGMGWYRQAPGKEREFVASIGVGANTYYADSVKGRFTISRDNAKNTVYLQMNSLKPEDTAVYYCAVGGAWYDHTYDVYAYWGQGTQVTVSS

SEQ ID NO: 23185 - protein, 118 aa, Artificial Sequence
  Chemically Synthesized
QVQLQESGGGLVQAGGSLRLSCAASGYISYVDYMGWYRQAPGKERELVATIGGGGNTNYADSVKGRFTISRDNAKNTVYLQMNSLKPEDTAVYYCAVYYVVIRTYAYWGQGTQVTVSS

SEQ ID NO: 23186 - protein, 122 aa, Artificial Sequence
  Chemically Synthesized
QVQLQESGGGLVQAGGSLRLSCAASGYISSVSGMGWYRQAPGKERELVATIATGSTTYYADSVKGRFTISRDNAKNTVYLQMNSLKPEDTAVYYCAVTTYYGVRFVTYHEYWGQGTQVTVSS

SEQ ID NO: 23187 - protein, 118 aa, Artificial Sequence
  Chemically Synthesized
QVQLQESGGGLVQAGGSLRLSCAASGYIFGYQDMGWYRQAPGKEREFVATIGQGTSTNYADSVKGRFTISRDNAKNTVYLQMNSLKPEDTAVYYCAVALTPYAQYAYWGQGTQVTVSS

SEQ ID NO: 23188 - protein, 117 aa, Artificial Sequence
  Chemically Synthesized
QVQLQESGGGLVQAGGSLRLSCAASGSISRGATMGWYRQAPGKERELVATIGYGTNTNYADSVKGRFTISRDNAKNTVYLQMNSLKPEDTAVYYCALVLTLVLRMYWGQGTQVTVSS

SEQ ID NO: 23189 - protein, 112 aa, Artificial Sequence
  Chemically Synthesized
QVQLQESGGGLVQAGGSLRLSCAASGTIFPRDYMGWYRQAPGKEREFVASIDNGGITNYADSVKGRFTISRDNAKNTVYLQMNSLKPEDTAVYYCAARHYYWGQGTQVTVSS

SEQ ID NO: 23190 - protein, 118 aa, Artificial Sequence
  Chemically Synthesized
QVQLQESGGGLVQAGGSLRLSCAASGNISILRLMGWYRQAPGKERELVAAIGIGSSTYYADSVKGRFTISRDNAKNTVYLQMNSLKPEDTAVYYCAAQLDDPTTYGYWGQGTQVTVSS

SEQ ID NO: 23191 - protein, 122 aa, Artificial Sequence
  Chemically Synthesized
QVQLQESGGGLVQAGGSLRLSCAASGNIFSYRDMGWYRQAPGKERELVAAIDLGGTTNYADSVKGRFTISRDNAKNTVYLQMNSLKPEDTAVYYCAAVQNTGATDDPGYLYWGQGTQVTVSS

SEQ ID NO: 23192 - protein, 118 aa, Artificial Sequence
  Chemically Synthesized
QVQLQESGGGLVQAGGSLRLSCAASGSISAYRYMGWYRQAPGKEREFVASINVGTTTYYADSVKGRFTISRDNAKNTVYLQMNSLKPEDTAVYYCAVGYTGDGVYVYWGQGTQVTVSS

SEQ ID NO: 23193 - protein, 118 aa, Artificial Sequence
  Chemically Synthesized
QVQLQESGGGLVQAGGSLRLSCAASGSISDPRYMGWYRQAPGKEREFVAAIAYGGTTNYADSVKGRFTISRDNAKNTVYLQMNSLKPEDTAVYYCAVLDGYRQVYFYWGQGTQVTVSS

SEQ ID NO: 23194 - protein, 126 aa, Artificial Sequence
  Chemically Synthesized
QVQLQESGGGLVQAGGSLRLSCAASGNIFTYAFMGWYRQAPGKERELVATISFGGITYYADSVKGRFTISRDNAKNTVYLQMNSLKPEDTAVYYCAAYYPFWVATDDLDAYVHTYWGQGTQVTVSS

SEQ ID NO: 23195 - protein, 125 aa, Artificial Sequence
  Chemically Synthesized
QVQLQESGGGLVQAGGSLRLSCAASGTISSFLMGWYRQAPGKEREFVAAIDYGGNTYYADSVKGRFTISRDNAKNTVYLQMNSLKPEDTAVYYCAALYRYRGRYSDGWSIAHQYWGQGTQVTVSS

SEQ ID NO: 23196 - protein, 111 aa, Artificial Sequence
  Chemically Synthesized
QVQLQESGGGLVQAGGSLRLSCAASGTIFYAIVMGWYRQAPGKERELVAGINYGSTTYYADSVKGRFTISRDNAKNTVYLQMNSLKPEDTAVYYCAVSWYWGQGTQVTVSS

SEQ ID NO: 23197 - protein, 109 aa, Artificial Sequence
  Chemically Synthesized
QVQLQESGGGLVQAGGSLRLSCAASGTISFIGAMGWYRQAPGKERELLPVLLLVVLPYADSVKGRFTISRDNAKNTVYLQMNSLKPEDTAVYYCAVFYWGQGTQVTVSS

SEQ ID NO: 23198 - protein, 118 aa, Artificial Sequence
  Chemically Synthesized
QVQLQESGGGLVQAGGSLRLSCAASGNISGDDPMGWYRQAPGKEREFVASISRGAITNYADSVKGRFTISRDNAKNTVYLQMNSLKPEDTAVYYCAAYRWYYPAHVYWGQGTQVTVSS

SEQ ID NO: 23199 - protein, 118 aa, Artificial Sequence
  Chemically Synthesized
QVQLQESGGGLVQAGGSLRLSCAASGYISRISWMGWYRQAPGKEREFVATIGPGGTTYYADSVKGRFTISRDNAKNTVYLQMNSLKPEDTAVYYCAVNIDWGQSFLYWGQGTQVTVSS

SEQ ID NO: 23200 - protein, 118 aa, Artificial Sequence
  Chemically Synthesized
QVQLQESGGGLVQAGGSLRLSCAASGNIFRYIDMGWYRQAPGKERELVATITSGSSTYYADSVKGRFTISRDNAKNTVYLQMNSLKPEDTAVYYCAVHAFALNNFNYWGQGTQVTVSS

SEQ ID NO: 23201 - protein, 126 aa, Artificial Sequence
  Chemically Synthesized
QVQLQESGGGLVQAGGSLRLSCAASGYISLIYYMGWYRQAPGKEREFVAGINRGATTYYADSVKGRFTISRDNAKNTVYLQMNSLKPEDTAVYYCAVQYPYLAYDPAGYSNYHPYWGQGTQVTVSS

SEQ ID NO: 23202 - protein, 118 aa, Artificial Sequence
  Chemically Synthesized
QVQLQESGGGLVQAGGSLRLSCAASGYIFGRPYMGWYRQAPGKERELVAAITSGGITYYADSVKGRFTISRDNAKNTVYLQMNSLKPEDTAVYYCAVYAPWIWYHGYWGQGTQVTVSS

SEQ ID NO: 23203 - protein, 125 aa, Artificial Sequence
  Chemically Synthesized
QVQLQESGGGLVQAGGSLRLSCAASGSIFDDSMGWYRQAPGKEREFVASIGTGATTYYADSVKGRFTISRDNAKNTVYLQMNSLKPEDTAVYYCAVPFQAPGDSQSYSYYYLDYWGQGTQVTVSS

SEQ ID NO: 23204 - protein, 121 aa, Artificial Sequence
  Chemically Synthesized
QVQLQESGGGLVQAGGSLRLSCAASGTISPYRYMGWYRQAPGKERELVATITPGASTYYADSVKGRFTISRDNAKNTVYLQMNSLKPEDTAVYYCAVSTGLTLKLTSTIYWGQGTQVTVSS

SEQ ID NO: 23205 - protein, 118 aa, Artificial Sequence
  Chemically Synthesized
QVQLQESGGGLVQAGGSLRLSCAASGYIFPGQYMGWYRQAPGKEREFVAAITNGGNTYYADSVKGRFTISRDNAKNTVYLQMNSLKPEDTAVYYCAVEHYFRRWHGYWGQGTQVTVSS

SEQ ID NO: 23206 - protein, 122 aa, Artificial Sequence
  Chemically Synthesized
QVQLQESGGGLVQAGGSLRLSCAASGTIFAPRDMGWYRQAPGKEREFVASISRGSNTYYADSVKGRFTISRDNAKNTVYLQMNSLKPEDTAVYYCAAYNDRESDAARVHHYWGQGTQVTVSS

SEQ ID NO: 23207 - protein, 118 aa, Artificial Sequence
  Chemically Synthesized
QVQLQESGGGLVQAGGSLRLSCAASGTIFTRYAMGWYRQAPGKEREFVAAIGYGTSTYYADSVKGRFTISRDNAKNTVYLQMNSLKPEDTAVYYCAAYTYGRAQFAYWGQGTQVTVSS

SEQ ID NO: 23208 - protein, 118 aa, Artificial Sequence
  Chemically Synthesized
QVQLQESGGGLVQAGGSLRLSCAASGTISGAERMGWYRQAPGKERELVATIADGGNTNYADSVKGRFTISRDNAKNTVYLQMNSLKPEDTAVYYCAVRWRYRRDYRYWGQGTQVTVSS

SEQ ID NO: 23209 - protein, 126 aa, Artificial Sequence
  Chemically Synthesized
QVQLQESGGGLVQAGGSLRLSCAASGSISDVVYMGWYRQAPGKERELVAAIDSGSTTNYADSVKGRFTISRDNAKNTVYLQMNSLKPEDTAVYYCAVLNQDRRIYRTSRPYNHDYWGQGTQVTVSS

SEQ ID NO: 23210 - protein, 121 aa, Artificial Sequence
  Chemically Synthesized
QVQLQESGGGLVQAGGSLRLSCAASGSIFHGSVMGWYRQAPGKERELVAAIADGATTYYADSVKGRFTISRDNAKNTVYLQMNSLKPEDTAVYYCAAFRYAQEDPSVVIYWGQGTQVTVSS

SEQ ID NO: 23211 - protein, 122 aa, Artificial Sequence
  Chemically Synthesized
QVQLQESGGGLVQAGGSLRLSCAASGNISSDTYMGWYRQAPGKEREFVAAITYGGITYYADSVKGRFTISRDNAKNTVYLQMNSLKPEDTAVYYCAVYGFAHDWHARALRYWGQGTQVTVSS

SEQ ID NO: 23212 - protein, 117 aa, Artificial Sequence
  Chemically Synthesized
QVQLQESGGGLVQAGGSLRLSCAASGTISYTDYMGWYRQAPGKEREFVATITEGSNTNYADSVKGRFTISRDNAKNTVYLQMNSLKPEDTAVYYCAALDVESLFFYWGQGTQVTVSS

SEQ ID NO: 23213 - protein, 125 aa, Artificial Sequence
  Chemically Synthesized
QVQLQESGGGLVQAGGSLRLSCAASGNIFPSYTMGWYRQAPGKEREFVAGIGSVLLPYADSVKGRFTISRDNAKNTVYLQMNSLKPEDTAVYYCAVDEDGVLDDGYTTYSDHEYWGQGTQVTVSS

SEQ ID NO: 23214 - protein, 121 aa, Artificial Sequence
  Chemically Synthesized
QVQLQESGGGLVQAGGSLRLSCAASGSFLLLSMGWYRQAPGKERELVATINGGATTYYADSVKGRFTISRDNAKNTVYLQMNSLKPEDTAVYYCAVDGTWRDYVGALYDYWGQGTQVTVSS

SEQ ID NO: 23215 - protein, 122 aa, Artificial Sequence
  Chemically Synthesized
QVQLQESGGGLVQAGGSLRLSCAASGSIFHPNDMGWYRQAPGKERELVASIDGGGITNYADSVKGRFTISRDNAKNTVYLQMNSLKPEDTAVYYCAADGYYDTIWRYSLHYWGQGTQVTVSS

SEQ ID NO: 23216 - protein, 118 aa, Artificial Sequence
  Chemically Synthesized
QVQLQESGGGLVQAGGSLRLSCAASGSISTYSDMGWYRQAPGKEREFVATIDRGANTYYADSVKGRFTISRDNAKNTVYLQMNSLKPEDTAVYYCAALVGDGAYLPYWGQGTQVTVSS

SEQ ID NO: 23217 - protein, 118 aa, Artificial Sequence
  Chemically Synthesized
QVQLQESGGGLVQAGGSLRLSCAASGSIFELYKMGWYRQAPGKERELVAGISDGTITYYADSVKGRFTISRDNAKNTVYLQMNSLKPEDTAVYYCAVDVYQDPFHEYWGQGTQVTVSS

SEQ ID NO: 23218 - protein, 112 aa, Artificial Sequence
  Chemically Synthesized
QVQLQESGGGLVQAGGSLRLSCAASGSMGWYRQAPGKERELVATIAWGTITNYADSVKGRFTISRDNAKNTVYLQMNSLKPEDTAVYYCAALRSAYPSHRYWGQGTQVTVSS

SEQ ID NO: 23219 - protein, 118 aa, Artificial Sequence
  Chemically Synthesized
QVQLQESGGGLVQAGGSLRLSCAASGTIFLGAYMGWYRQAPGKERELVAAIGYGASTYYADSVKGRFTISRDNAKNTVYLQMNSLKPEDTAVYYCAVIQGGNSDFTYWGQGTQVTVSS

SEQ ID NO: 23220 - protein, 117 aa, Artificial Sequence
  Chemically Synthesized
QVQLQESGGGLVQAGGSLRLSCAASGSIFVRSMGWYRQAPGKERELVATITYGASTYYADSVKGRFTISRDNAKNTVYLQMNSLKPEDTAVYYCAAYLWYGSALWYWGQGTQVTVSS

SEQ ID NO: 23221 - protein, 118 aa, Artificial Sequence
  Chemically Synthesized
QVQLQESGGGLVQAGGSLRLSCAASGNIFVLYYMGWYRQAPGKEREFVATIAYGANTYYADSVKGRFTISRDNAKNTVYLQMNSLKPEDTAVYYCAAIYLGPLSYPYWGQGTQVTVSS

SEQ ID NO: 23222 - protein, 118 aa, Artificial Sequence
  Chemically Synthesized
QVQLQESGGGLVQAGGSLRLSCAASGNIFVYVRMGWYRQAPGKEREFVASITVGATTNYADSVKGRFTISRDNAKNTVYLQMNSLKPEDTAVYYCAVEGGPGWKHRYWGQGTQVTVSS

SEQ ID NO: 23223 - protein, 118 aa, Artificial Sequence
  Chemically Synthesized
QVQLQESGGGLVQAGGSLRLSCAASGTISYHTYMGWYRQAPGKERELVAAIDDGGITNYADSVKGRFTISRDNAKNTVYLQMNSLKPEDTAVYYCAANPDGDSYLGYWGQGTQVTVSS

SEQ ID NO: 23224 - protein, 122 aa, Artificial Sequence
  Chemically Synthesized
QVQLQESGGGLVQAGGSLRLSCAASGYISKAQWMGWYRQAPGKERELVAGINNGGNTYYADSVKGRFTISRDNAKNTVYLQMNSLKPEDTAVYYCAVGRRDFSSYYRRLPYWGQGTQVTVSS

SEQ ID NO: 23225 - protein, 118 aa, Artificial Sequence
  Chemically Synthesized
QVQLQESGGGLVQAGGSLRLSCAASGTISYAQAMGWYRQAPGKERELVASIGYGASTYYADSVKGRFTISRDNAKNTVYLQMNSLKPEDTAVYYCAVGTGYVDDHAYWGQGTQVTVSS

SEQ ID NO: 23226 - protein, 118 aa, Artificial Sequence
  Chemically Synthesized
QVQLQESGGGLVQAGGSLRLSCAASGTISDDTTMGWYRQAPGKEREFVAGISQGSITNYADSVKGRFTISRDNAKNTVYLQMNSLKPEDTAVYYCAVNYGIPGSHDYWGQGTQVTVSS

SEQ ID NO: 23227 - protein, 126 aa, Artificial Sequence
  Chemically Synthesized
QVQLQESGGGLVQAGGSLRLSCAASGNISGLGVMGWYRQAPGKERELVASISAGGTTNYADSVKGRFTISRDNAKNTVYLQMNSLKPEDTAVYYCAVPVTGTRPYPWLRPVLLWYWGQGTQVTVSS

SEQ ID NO: 23228 - protein, 126 aa, Artificial Sequence
  Chemically Synthesized
QVQLQESGGGLVQAGGSLRLSCAASGSISPRYGMGWYRQAPGKEREFVAGINYGSITYYADSVKGRFTISRDNAKNTVYLQMNSLKPEDTAVYYCAVLLYWRPDATQGNVLLHRYWGQGTQVTVSS

SEQ ID NO: 23229 - protein, 118 aa, Artificial Sequence
  Chemically Synthesized
QVQLQESGGGLVQAGGSLRLSCAASGTISAYYTMGWYRQAPGKEREFVATISYGATTYYADSVKGRFTISRDNAKNTVYLQMNSLKPEDTAVYYCAVWYLSEYWFLYWGQGTQVTVSS

SEQ ID NO: 23230 - protein, 117 aa, Artificial Sequence
  Chemically Synthesized
QVQLQESGGGLVQAGGSLRLSCAASGNISLAYKMGWYRQAPGKERELVASITHGGSTYYADSVKGRFTISRDNAKNTVYLQMNSLKPEDTAVYYCAVYYPVWNLAYWGQGTQVTVSS

SEQ ID NO: 23231 - protein, 126 aa, Artificial Sequence
  Chemically Synthesized
QVQLQESGGGLVQAGGSLRLSCAASGSISPDPYMGWYRQAPGKEREFVATISYGGNTYYADSVKGRFTISRDNAKNTVYLQMNSLKPEDTAVYYCAAIGYEDWDPVTNNRILYSYWGQGTQVTVSS

SEQ ID NO: 23232 - protein, 118 aa, Artificial Sequence
  Chemically Synthesized
QVQLQESGGGLVQAGGSLRLSCAASGYIFPSTVMGWYRQAPGKERELVAAIGLGSNTNYADSVKGRFTISRDNAKNTVYLQMNSLKPEDTAVYYCAARAYVGWWLYYWGQGTQVTVSS

SEQ ID NO: 23233 - protein, 117 aa, Artificial Sequence
  Chemically Synthesized
QVQLQESGGGLVQAGGSLRLSCAASGSISDLDRMGWYRQAPGKEREFVAAIGPGATTYYADSVKGRFTISRDNAKNTVYLQMNSLKPEDTAVYYCAAILWASSTFYWGQGTQVTVSS

SEQ ID NO: 23234 - protein, 118 aa, Artificial Sequence
  Chemically Synthesized
QVQLQESGGGLVQAGGSLRLSCAASGYISEAWTMGWYRQAPGKEREFVATINHGGITYYADSVKGRFTISRDNAKNTVYLQMNSLKPEDTAVYYCAAITGYDYGHSYWGQGTQVTVSS

SEQ ID NO: 23235 - protein, 118 aa, Artificial Sequence
  Chemically Synthesized
QVQLQESGGGLVQAGGSLRLSCAASGNIFYLSGMGWYRQAPGKEREFVASIANGTNTYYADSVKGRFTISRDNAKNTVYLQMNSLKPEDTAVYYCAAEYYIDYAHEYWGQGTQVTVSS

SEQ ID NO: 23236 - protein, 121 aa, Artificial Sequence
  Chemically Synthesized
QVQLQESGGGLVQAGGSLRLSCAASGSIFTVPSMGWYRQAPGKEREFVATISTGGNTNYADSVKGRFTISRDNAKNTVYLQMNSLKPEDTAVYYCAADSLCCTTLRSVIYWGQGTQVTVSS

SEQ ID NO: 23237 - protein, 126 aa, Artificial Sequence
  Chemically Synthesized
QVQLQESGGGLVQAGGSLRLSCAASGYISQRHIMGWYRQAPGKEREFVATISYGGTTNYADSVKGRFTISRDNAKNTVYLQMNSLKPEDTAVYYCAVYYLYQPNDYNRWIFRFPYWGQGTQVTVSS

SEQ ID NO: 23238 - protein, 117 aa, Artificial Sequence
  Chemically Synthesized
QVQLQESGGGLVQAGGSLRLSCAASGTIFSNYYMGWYRQAPGKEREFVALLITVVLPYADSVKGRFTISRDNAKNTVYLQMNSLKPEDTAVYYCAANYQYGYSFAYWGQGTQVTVSS

SEQ ID NO: 23239 - protein, 122 aa, Artificial Sequence
  Chemically Synthesized
QVQLQESGGGLVQAGGSLRLSCAASGTIFDAGRMGWYRQAPGKERELVAAISYGAITYYADSVKGRFTISRDNAKNTVYLQMNSLKPEDTAVYYCAVSNDLPKADTDVYVYWGQGTQVTVSS

SEQ ID NO: 23240 - protein, 118 aa, Artificial Sequence
  Chemically Synthesized
QVQLQESGGGLVQAGGSLRLSCAASGTIFLLIFMGWYRQAPGKERELVAGIAYGTNYLYADSVKGRFTISRDNAKNTVYLQMNSLKPEDTAVYYCAVRQGPNAGYTYWGQGTQVTVSS

SEQ ID NO: 23241 - protein, 118 aa, Artificial Sequence
  Chemically Synthesized
QVQLQESGGGLVQAGGSLRLSCAASGYIFRADYMGWYRQAPGKEREFVATINTGTNTYYADSVKGRFTISRDNAKNTVYLQMNSLKPEDTAVYYCAVYYPDYGRLPYWGQGTQVTVSS

SEQ ID NO: 23242 - protein, 118 aa, Artificial Sequence
  Chemically Synthesized
QVQLQESGGGLVQAGGSLRLSCAASGTIFTRDGMGWYRQAPGKERELVAAIDYGTITYYADSVKGRFTISRDNAKNTVYLQMNSLKPEDTAVYYCAAQSHTGGSHQYWGQGTQVTVSS

SEQ ID NO: 23243 - protein, 122 aa, Artificial Sequence
  Chemically Synthesized
QVQLQESGGGLVQAGGSLRLSCAASGTIFAIYLMGWYRQAPGKERELVAAIARGATTYYADSVKGRFTISRDNAKNTVYLQMNSLKPEDTAVYYCAVKFRPWWTPYDPLYYWGQGTQVTVSS

SEQ ID NO: 23244 - protein, 117 aa, Artificial Sequence
  Chemically Synthesized
QVQLQESGGGLVQAGGSLRLSCAASGSISGYVPMGWYRQAPGKEREFVATIGSGSSTNYADSVKGRFTISRDNAKNTVYLQMNSLKPEDTAVYYCAVRYLPFTEYYWGQGTQVTVSS

SEQ ID NO: 23245 - protein, 122 aa, Artificial Sequence
  Chemically Synthesized
QVQLQESGGGLVQAGGSLRLSCAASGNIFRPYYMGWYRQAPGKERELVASINTGGSTYYADSVKGRFTISRDNAKNTVYLQMNSLKPEDTAVYYCAVTDKQSGILDADYDYWGQGTQVTVSS

SEQ ID NO: 23246 - protein, 117 aa, Artificial Sequence
  Chemically Synthesized
QVQLQESGGGLVQAGGSLRLSCAASGNIMGWYRQAPGKEREFVATIDQGATTNYADSVKGRFTISRDNAKNTVYLQMNSLKPEDTAVYYCAAYGYDVQYYAHYHVYWGQGTQVTVSS

SEQ ID NO: 23247 - protein, 122 aa, Artificial Sequence
  Chemically Synthesized
QVQLQESGGGLVQAGGSLRLSCAASGNISYTQYMGWYRQAPGKEREFVASITAGSNTNYADSVKGRFTISRDNAKNTVYLQMNSLKPEDTAVYYCAVREGGTLVYAYPLVYWGQGTQVTVSS

SEQ ID NO: 23248 - protein, 118 aa, Artificial Sequence
  Chemically Synthesized
QVQLQESGGGLVQAGGSLRLSCAASGNISYTGQMGWYRQAPGKEREFVAGITPGGNTYYADSVKGRFTISRDNAKNTVYLQMNSLKPEDTAVYYCAVFTGDGPGHFYWGQGTQVTVSS

SEQ ID NO: 23249 - protein, 118 aa, Artificial Sequence
  Chemically Synthesized
QVQLQESGGGLVQAGGSLRLSCAASGNISDSPYMGWYRQAPGKEREFVAAISPGGITYYADSVKGRFTISRDNAKNTVYLQMNSLKPEDTAVYYCAVYAPFYDAYVYWGQGTQVTVSS

SEQ ID NO: 23250 - protein, 118 aa, Artificial Sequence
  Chemically Synthesized
QVQLQESGGGLVQAGGSLRLSCAASGTIFAFSHMGWYRQAPGKEREFVAAINAGSITNYADSVKGRFTISRDNAKNTVYLQMNSLKPEDTAVYYCAVYPWTDSPHRYWGQGTQVTVSS

SEQ ID NO: 23251 - protein, 118 aa, Artificial Sequence
  Chemically Synthesized
QVQLQESGGGLVQAGGSLRLSCAASGYIFTYGTMGWYRQAPGKERELVAAIDLGGITYYADSVKGRFTISRDNAKNTVYLQMNSLKPEDTAVYYCAADPYIDAFLYYWGQGTQVTVSS

SEQ ID NO: 23252 - protein, 121 aa, Artificial Sequence
  Chemically Synthesized
QVQLQESGGGLVQAGGSLRLSCAASGTISDSFMGWYRQAPGKEREFVASITHGTITYYADSVKGRFTISRDNAKNTVYLQMNSLKPEDTAVYYCAVLAKYSYSYSLVHDYWGQGTQVTVSS

SEQ ID NO: 23253 - protein, 118 aa, Artificial Sequence
  Chemically Synthesized
QVQLQESGGGLVQAGGSLRLSCAASGSISDESYMGWYRQAPGKEREFVAAIGEGTITYYADSVKGRFTISRDNAKNTVYLQMNSLKPEDTAVYYCAVISVYLSVFGYWGQGTQVTVSS

SEQ ID NO: 23254 - protein, 121 aa, Artificial Sequence
  Chemically Synthesized
QVQLQESGGGLVQAGGSLRLSCAASGTIFQYALMGWYRQAPGKERELVPVLVLVVVPYADSVKGRFTISRDNAKNTVYLQMNSLKPEDTAVYYCAVYEYTDHDDDTVYNYWGQGTQVTVSS

SEQ ID NO: 23255 - protein, 116 aa, Artificial Sequence
  Chemically Synthesized
QVQLQESGGGLVQAGGSLRLSCAASGNIFGPPYMGWYRQAPGKERELVAGIAQGSSTNYADSVKGRFTISRDNAKNTVYLQMNSLKPEDTAVYYCAVDLGGSFGYWGQGTQVTVSS

SEQ ID NO: 23256 - protein, 118 aa, Artificial Sequence
  Chemically Synthesized
QVQLQESGGGLVQAGGSLRLSCAASGYISYDYYMGWYRQAPGKEREFVATIAGGTTTNYADSVKGRFTISRDNAKNTVYLQMNSLKPEDTAVYYCAVWGNTRDLLEYWGQGTQVTVSS

SEQ ID NO: 23257 - protein, 126 aa, Artificial Sequence
  Chemically Synthesized
QVQLQESGGGLVQAGGSLRLSCAASGTIFDPPYMGWYRQAPGKERELVATIGYGTNTNYADSVKGRFTISRDNAKNTVYLQMNSLKPEDTAVYYCAVQQYVGGGYADSGRQYLGYWGQGTQVTVSS

SEQ ID NO: 23258 - protein, 117 aa, Artificial Sequence
  Chemically Synthesized
QVQLQESGGGLVQAGGSLRLSCAASGNIFPYFYMGWYRQAPGKERELVAAISDGSSTNYADSVKGRFTISRDNAKNTVYLQMNSLKPEDTAVYYCAAWPGYTLFWYWGQGTQVTVSS

SEQ ID NO: 23259 - protein, 122 aa, Artificial Sequence
  Chemically Synthesized
QVQLQESGGGLVQAGGSLRLSCAASGTIFPYSAMGWYRQAPGKERELVAAITTGSNTNYADSVKGRFTISRDNAKNTVYLQMNSLKPEDTAVYYCAVLRYFTGEFYPYYVYWGQGTQVTVSS

SEQ ID NO: 23260 - protein, 122 aa, Artificial Sequence
  Chemically Synthesized
QVQLQESGGGLVQAGGSLRLSCAASGNIFSYFYMGWYRQAPGKEREFVAGIDLGGITYYADSVKGRFTISRDNAKNTVYLQMNSLKPEDTAVYYCAATYPADLYAPARHRYWGQGTQVTVSS

SEQ ID NO: 23261 - protein, 117 aa, Artificial Sequence
  Chemically Synthesized
QVQLQESGGGLVQAGGSLRLSCAASGSIMGWYRQAPGKEREFVAAIDYGANTNYADSVKGRFTISRDNAKNTVYLQMNSLKPEDTAVYYCAVYWPVYHTVRSPYAYWGQGTQVTVSS

SEQ ID NO: 23262 - protein, 118 aa, Artificial Sequence
  Chemically Synthesized
QVQLQESGGGLVQAGGSLRLSCAASGTISYRYDMGWYRQAPGKERELVATISAGTSTNYADSVKGRFTISRDNAKNTVYLQMNSLKPEDTAVYYCAASPGYDYVLAYWGQGTQVTVSS

SEQ ID NO: 23263 - protein, 115 aa, Artificial Sequence
  Chemically Synthesized
QVQLQESGGGLVQAGGSLRLSCAASGTIFFTDTMGWYRQAPGKEREFVATITQGTNTYYADSVKGRFTISRDNAKNTVYLQMNSLKPEDTAVYYCAAYQSVSLYWGQGTQVTVSS

SEQ ID NO: 23264 - protein, 121 aa, Artificial Sequence
  Chemically Synthesized
QVQLQESGGGLVQAGGSLRLSCAASGTIFNDPMGWYRQAPGKEREFVAAITDGSITNYADSVKGRFTISRDNAKNTVYLQMNSLKPEDTAVYYCAVPLAVDYTNRYGHYYWGQGTQVTVSS

SEQ ID NO: 23265 - protein, 116 aa, Artificial Sequence
  Chemically Synthesized
QVQLQESGGGLVQAGGSLRLSCAASGSLITFMGWYRQAPGKERELVAGIDIGANTNYADSVKGRFTISRDNAKNTVYLQMNSLKPEDTAVYYCAAYDSPYYVHRYWGQGTQVTVSS

SEQ ID NO: 23266 - protein, 126 aa, Artificial Sequence
  Chemically Synthesized
QVQLQESGGGLVQAGGSLRLSCAASGNIFFITDMGWYRQAPGKEREFVASISDGAITYYADSVKGRFTISRDNAKNTVYLQMNSLKPEDTAVYYCAAWRTVHWGDLIYVTTPYYYWGQGTQVTVSS

SEQ ID NO: 23267 - protein, 122 aa, Artificial Sequence
  Chemically Synthesized
QVQLQESGGGLVQAGGSLRLSCAASGYIFATLGMGWYRQAPGKERELVATIASGAITNYADSVKGRFTISRDNAKNTVYLQMNSLKPEDTAVYYCAVRGSYYSYPRYVHGYWGQGTQVTVSS

SEQ ID NO: 23268 - protein, 117 aa, Artificial Sequence
  Chemically Synthesized
QVQLQESGGGLVQAGGSLRLSCAASGTIFSGSYMGWYRQAPGKEREFVASINGGGTTNYADSVKGRFTISRDNAKNTVYLQMNSLKPEDTAVYYCAAILYKDASMYWGQGTQVTVSS

SEQ ID NO: 23269 - protein, 118 aa, Artificial Sequence
  Chemically Synthesized
QVQLQESGGGLVQAGGSLRLSCAASGNISYGVDMGWYRQAPGKEREFVAAINNGANTYYADSVKGRFTISRDNAKNTVYLQMNSLKPEDTAVYYCAAYYDDTGAYYYWGQGTQVTVSS

SEQ ID NO: 23270 - protein, 117 aa, Artificial Sequence
  Chemically Synthesized
QVQLQESGGGLVQAGGSLRLSCAASGSIFVPSMGWYRQAPGKERELVAAIAEGTNTNYADSVKGRFTISRDNAKNTVYLQMNSLKPEDTAVYYCAVNYDITQGHTYWGQGTQVTVSS

SEQ ID NO: 23271 - protein, 118 aa, Artificial Sequence
  Chemically Synthesized
QVQLQESGGGLVQAGGSLRLSCAASGNISAPGIMGWYRQAPGKERELVASIDQGSTTNYADSVKGRFTISRDNAKNTVYLQMNSLKPEDTAVYYCAVNDQAFYTHDYWGQGTQVTVSS

SEQ ID NO: 23272 - protein, 118 aa, Artificial Sequence
  Chemically Synthesized
QVQLQESGGGLVQAGGSLRLSCAASGTISDYGIMGWYRQAPGKEREFVAAIAYGGNTYYADSVKGRFTISRDNAKNTVYLQMNSLKPEDTAVYYCAVQYAYDIAHAYWGQGTQVTVSS

SEQ ID NO: 23273 - protein, 115 aa, Artificial Sequence
  Chemically Synthesized
QVQLQESGGGLVQAGGSLRLSCAASGTIFWPISMGWYRQAPGKERELVAGIGIGSTTNYADSVKGRFTISRDNAKNTVYLQMNSLKPEDTAVYYCAKTLVTTMYWGQGTQVTVSS

SEQ ID NO: 23274 - protein, 112 aa, Artificial Sequence
  Chemically Synthesized
QVQLQESGGGLVQAGGSLRLSCAASGNMGWYRQAPGKEREFVAGISAGTITYYADSVKGRFTISRDNAKNTVYLQMNSLKPEDTAVYYCAVQRSDDKYLGYWGQGTQVTVSS

SEQ ID NO: 23275 - protein, 118 aa, Artificial Sequence
  Chemically Synthesized
QVQLQESGGGLVQAGGSLRLSCAASGYISYYIAMGWYRQAPGKERELVAGIAIGGITNYADSVKGRFTISRDNAKNTVYLQMNSLKPEDTAVYYCAVGSPYYTAHDYWGQGTQVTVSS

SEQ ID NO: 23276 - protein, 122 aa, Artificial Sequence
  Chemically Synthesized
QVQLQESGGGLVQAGGSLRLSCAASGTIFFDLYMGWYRQAPGKERELVAAIAGGTTTYYADSVKGRFTISRDNAKNTVYLQMNSLKPEDTAVYYCAVDVDTDGDYGAGHDYWGQGTQVTVSS

SEQ ID NO: 23277 - protein, 122 aa, Artificial Sequence
  Chemically Synthesized
QVQLQESGGGLVQAGGSLRLSCAASGTISDYIRMGWYRQAPGKERELVASIAFGTNTYYADSVKGRFTISRDNAKNTVYLQMNSLKPEDTAVYYCAVDKGRLVFVARTHLYWGQGTQVTVSS

SEQ ID NO: 23278 - protein, 126 aa, Artificial Sequence
  Chemically Synthesized
QVQLQESGGGLVQAGGSLRLSCAASGTIFSWGGMGWYRQAPGKERELVAAINYGTITNYADSVKGRFTISRDNAKNTVYLQMNSLKPEDTAVYYCAVVPYGHYGYWAYEISNLYYWGQGTQVTVSS

SEQ ID NO: 23279 - protein, 122 aa, Artificial Sequence
  Chemically Synthesized
QVQLQESGGGLVQAGGSLRLSCAASGYIFQWYQMGWYRQAPGKERELVATISAGGITNYADSVKGRFTISRDNAKNTVYLQMNSLKPEDTAVYYCAAGAWSDPWEGLSHDYWGQGTQVTVSS

SEQ ID NO: 23280 - protein, 126 aa, Artificial Sequence
  Chemically Synthesized
QVQLQESGGGLVQAGGSLRLSCAASGNISIDVTMGWYRQAPGKEREFVATINYGTITYYADSVKGRFTISRDNAKNTVYLQMNSLKPEDTAVYYCAVDEHGVRRGDGITLDTLYYWGQGTQVTVSS

SEQ ID NO: 23281 - protein, 118 aa, Artificial Sequence
  Chemically Synthesized
QVQLQESGGGLVQAGGSLRLSCAASGTISFDIYMGWYRQAPGKEREFVAAISIGSITYYADSVKGRFTISRDNAKNTVYLQMNSLKPEDTAVYYCAALYAWSGDHAYWGQGTQVTVSS

SEQ ID NO: 23282 - protein, 122 aa, Artificial Sequence
  Chemically Synthesized
QVQLQESGGGLVQAGGSLRLSCAASGNISYWSYMGWYRQAPGKERELVAGITSGGITNYADSVKGRFTISRDNAKNTVYLQMNSLKPEDTAVYYCAVDYTGRNIGDDSFTYWGQGTQVTVSS

SEQ ID NO: 23283 - protein, 109 aa, Artificial Sequence
  Chemically Synthesized
QVQLQESGGGLVQAGGSLRLSCAASGNIFNTDQMGWYRQAPGKERELVAGISSGSITYYADSVKGRFTISRDNAKNTVYLQMNSLKPEDTAVYYCAVYWGQGTQVTVSS

SEQ ID NO: 23284 - protein, 126 aa, Artificial Sequence
  Chemically Synthesized
QVQLQESGGGLVQAGGSLRLSCAASGYIFERDVMGWYRQAPGKEREFVASIASGANTYYADSVKGRFTISRDNAKNTVYLQMNSLKPEDTAVYYCAVYLNTGPDADSYDRAVHEYWGQGTQVTVSS

SEQ ID NO: 23285 - protein, 121 aa, Artificial Sequence
  Chemically Synthesized
QVQLQESGGGLVQAGGSLRLSCAASGTIFLTYYMGWYRQAPGKEREFVASITGGSTTYYADSVKGRFTISRDNAKNTVYLQMNSLKPEDTAVYYCAVNYDIYPFWPFYWYWGQGTQVTVSS

SEQ ID NO: 23286 - protein, 118 aa, Artificial Sequence
  Chemically Synthesized
QVQLQESGGGLVQAGGSLRLSCAASGYISHSVRMGWYRQAPGKEREFVASIDPGASTYYADSVKGRFTISRDNAKNTVYLQMNSLKPEDTAVYYCAVPGPKYLTHSYWGQGTQVTVSS

SEQ ID NO: 23287 - protein, 118 aa, Artificial Sequence
  Chemically Synthesized
QVQLQESGGGLVQAGGSLRLSCAASGNIFDADYMGWYRQAPGKEREFVATINYGATTNYADSVKGRFTISRDNAKNTVYLQMNSLKPEDTAVYYCAVDLDATGDYQYWGQGTQVTVSS

SEQ ID NO: 23288 - protein, 118 aa, Artificial Sequence
  Chemically Synthesized
QVQLQESGGGLVQAGGSLRLSCAASGTISAAVWMGWYRQAPGKEREFVATIGWGASTNYADSVKGRFTISRDNAKNTVYLQMNSLKPEDTAVYYCAVRVWTTGDLIYWGQGTQVTVSS

SEQ ID NO: 23289 - protein, 118 aa, Artificial Sequence
  Chemically Synthesized
QVQLQESGGGLVQAGGSLRLSCAASGNISRWTVMGWYRQAPGKERELVAAIDRGASTYYADSVKGRFTISRDNAKNTVYLQMNSLKPEDTAVYYCAAWYKWRSYYRYWGQGTQVTVSS

SEQ ID NO: 23290 - protein, 118 aa, Artificial Sequence
  Chemically Synthesized
QVQLQESGGGLVQAGGSLRLSCAASGTISVTGVMGWYRQAPGKERELVATIAQGANTNYADSVKGRFTISRDNAKNTVYLQMNSLKPEDTAVYYCAADGRPVLRLNYWGQGTQVTVSS

SEQ ID NO: 23291 - protein, 118 aa, Artificial Sequence
  Chemically Synthesized
QVQLQESGGGLVQAGGSLRLSCAASGTIFDAYYMGWYRQAPGKERELVAAITAGAITYYADSVKGRFTISRDNAKNTVYLQMNSLKPEDTAVYYCAAPKPDGDWYSYWGQGTQVTVSS

SEQ ID NO: 23292 - protein, 122 aa, Artificial Sequence
  Chemically Synthesized
QVQLQESGGGLVQAGGSLRLSCAASGYISYAWFMGWYRQAPGKEREFVAGIAYGGTTYYADSVKGRFTISRDNAKNTVYLQMNSLKPEDTAVYYCAVPYSYRYATYWNHYYWGQGTQVTVSS

SEQ ID NO: 23293 - protein, 126 aa, Artificial Sequence
  Chemically Synthesized
QVQLQESGGGLVQAGGSLRLSCAASGYIFPLSVMGWYRQAPGKEREFVASITGGTITYYADSVKGRFTISRDNAKNTVYLQMNSLKPEDTAVYYCAVSYQFVDPFPFTRHLGFFYWGQGTQVTVSS

SEQ ID NO: 23294 - protein, 118 aa, Artificial Sequence
  Chemically Synthesized
QVQLQESGGGLVQAGGSLRLSCAASGTISDVNYMGWYRQAPGKEREFVAAISSGASTYYADSVKGRFTISRDNAKNTVYLQMNSLKPEDTAVYYCAAPSQTYDDHGYWGQGTQVTVSS

SEQ ID NO: 23295 - protein, 126 aa, Artificial Sequence
  Chemically Synthesized
QVQLQESGGGLVQAGGSLRLSCAASGTIFGIYGMGWYRQAPGKEREFVAGIGTGTTYYADSVKGRFTISRDNAKNTVYLQMNSLKPEDTAVYYCAVRNGLPVNAKYVWLFNDHPYWGQGTQVTVSS

SEQ ID NO: 23296 - protein, 118 aa, Artificial Sequence
  Chemically Synthesized
QVQLQESGGGLVQAGGSLRLSCAASGTIFYFVAMGWYRQAPGKERELVAGIDWGGNTYYADSVKGRFTISRDNAKNTVYLQMNSLKPEDTAVYYCAVGTARYGYFGYWGQGTQVTVSS

SEQ ID NO: 23297 - protein, 121 aa, Artificial Sequence
  Chemically Synthesized
QVQLQESGGGLVQAGGSLRLSCAASGSISSRPYMGWYRQAPGKEREFVATIGYGGNTNYADSVKGRFTISRDNAKNTVYLQMNSLKPEDTAVYYCAVRTEGTDRQPRPLYWGQGTQVTVSS

SEQ ID NO: 23298 - protein, 120 aa, Artificial Sequence
  Chemically Synthesized
QVQLQESGGGLVQAGGSLRLSCAASGTISFADYMGWYRQAPGKEREFVAAIAWGSTTNYADSVKGRFTISRDNAKNTVYLQMNSLKPEDTAVYYCAVTTTTTTTLSTMYWGQGTQVTVSS

SEQ ID NO: 23299 - protein, 122 aa, Artificial Sequence
  Chemically Synthesized
QVQLQESGGGLVQAGGSLRLSCAASGNISWYSFMGWYRQAPGKERELVATINHGSTTYYADSVKGRFTISRDNAKNTVYLQMNSLKPEDTAVYYCAAQYYAGYVGIEPHLYWGQGTQVTVSS

SEQ ID NO: 23300 - protein, 125 aa, Artificial Sequence
  Chemically Synthesized
QVQLQESGGGLVQAGGSLRLSCAASGIFLTTLMGWYRQAPGKEREFVATISYGAITNYADSVKGRFTISRDNAKNTVYLQMNSLKPEDTAVYYCAVGARIQWYPDTWADYAHDYWGQGTQVTVSS

SEQ ID NO: 23301 - protein, 122 aa, Artificial Sequence
  Chemically Synthesized
QVQLQESGGGLVQAGGSLRLSCAASGNISHSWRMGWYRQAPGKERELVATIDNGTNTYYADSVKGRFTISRDNAKNTVYLQMNSLKPEDTAVYYCAAYGVYPWTHTYEHDYWGQGTQVTVSS

SEQ ID NO: 23302 - protein, 118 aa, Artificial Sequence
  Chemically Synthesized
QVQLQESGGGLVQAGGSLRLSCAASGTISGYPYMGWYRQAPGKEREFVASIDGGGSTYYADSVKGRFTISRDNAKNTVYLQMNSLKPEDTAVYYCAAHERYTTDYAYWGQGTQVTVSS

SEQ ID NO: 23303 - protein, 118 aa, Artificial Sequence
  Chemically Synthesized
QVQLQESGGGLVQAGGSLRLSCAASGNISVSANMGWYRQAPGKEREFVAAIGSGGITNYADSVKGRFTISRDNAKNTVYLQMNSLKPEDTAVYYCAADYAWDDQFVYWGQGTQVTVSS

SEQ ID NO: 23304 - protein, 117 aa, Artificial Sequence
  Chemically Synthesized
QVQLQESGGGLVQAGGSLRLSCAASGSISVYVMGWYRQAPGKEREFVAAITSGTTTNYADSVKGRFTISRDNAKNTVYLQMNSLKPEDTAVYYCAAHRVLPFVYGYWGQGTQVTVSS

SEQ ID NO: 23305 - protein, 116 aa, Artificial Sequence
  Chemically Synthesized
QVQLQESGGGLVQAGGSLRLSCAASGNISPRFMGWYRQAPGKEREFVATITDGGSTYYADSVKGRFTISRDNAKNTVYLQMNSLKPEDTAVYYCAVRAIGHYHYYWGQGTQVTVSS

SEQ ID NO: 23306 - protein, 118 aa, Artificial Sequence
  Chemically Synthesized
QVQLQESGGGLVQAGGSLRLSCAASGTISSGLVMGWYRQAPGKEREFVATIGFGGITNYADSVKGRFTISRDNAKNTVYLQMNSLKPEDTAVYYCAVDSGGGDGYYYWGQGTQVTVSS

SEQ ID NO: 23307 - protein, 118 aa, Artificial Sequence
  Chemically Synthesized
QVQLQESGGGLVQAGGSLRLSCAASGTIFDYTAMGWYRQAPGKERELVAGIDGGSNTNYADSVKGRFTISRDNAKNTVYLQMNSLKPEDTAVYYCAVGYAYDDYYYYWGQGTQVTVSS

SEQ ID NO: 23308 - protein, 124 aa, Artificial Sequence
  Chemically Synthesized
QVQLQESGGGLVQAGGSLRLSCAASGNISSLVMGWYRQAPGKERELVAGITSGSNTNYADSVKGRFTISRDNAKNTVYLQMNSLKPEDTAVYYCAVSRGYPDYGGYANSRLIYWGQGTQVTVSS

SEQ ID NO: 23309 - protein, 122 aa, Artificial Sequence
  Chemically Synthesized
QVQLQESGGGLVQAGGSLRLSCAASGSISYDLDMGWYRQAPGKERELVAAIAQGTITKYADSVKGRFTISRDNAKNTVYLQMNSLKPEDTAVYYCAAKYADSRVGQVDFAYWGQGTQVTVSS

SEQ ID NO: 23310 - protein, 118 aa, Artificial Sequence
  Chemically Synthesized
QVQLQESGGGLVQAGGSLRLSCAASGSISYLHSMGWYRQAPGKERELVATITPGTNTYYADSVKGRFTISRDNAKNTVYLQMNSLKPEDTAVYYCAASTPYVDRLHYWGQGTQVTVSS

SEQ ID NO: 23311 - protein, 118 aa, Artificial Sequence
  Chemically Synthesized
QVQLQESGGGLVQAGGSLRLSCAASGTIFVFLGMGWYRQAPGKERELVAGISWGGITYYADSVKGRFTISRDNAKNTVYLQMNSLKPEDTAVYYCAVNYLHEYYHGYWGQGTQVTVSS

SEQ ID NO: 23312 - protein, 122 aa, Artificial Sequence
  Chemically Synthesized
QVQLQESGGGLVQAGGSLRLSCAASGNISSYDDMGWYRQAPGKERELVASIDPGGTTYYADSVKGRFTISRDNAKNTVYLQMNSLKPEDTAVYYCAAIVYIYQNAGVYHFYWGQGTQVTVSS

SEQ ID NO: 23313 - protein, 122 aa, Artificial Sequence
  Chemically Synthesized
QVQLQESGGGLVQAGGSLRLSCAASGNIFDDYIMGWYRQAPGKERELVATIDSGGNTNYADSVKGRFTISRDNAKNTVYLQMNSLKPEDTAVYYCAATLDAYWRAVLRHAYWGQGTQVTVSS

SEQ ID NO: 23314 - protein, 122 aa, Artificial Sequence
  Chemically Synthesized
QVQLQESGGGLVQAGGSLRLSCAASGTIFDSFYMGWYRQAPGKERELVAAITDGTSTNYADSVKGRFTISRDNAKNTVYLQMNSLKPEDTAVYYCAVYWTSSSGFGNNLRYWGQGTQVTVSS

SEQ ID NO: 23315 - protein, 121 aa, Artificial Sequence
  Chemically Synthesized
QVQLQESGGGLVQAGGSLRLSCAASGNIFLYTLMGWYRQAPGKERELVAAITRGATTYADSVKGRFTISRDNAKNTVYLQMNSLKPEDTAVYYCAALYGTTTWDYGYFSYWGQGTQVTVSS

SEQ ID NO: 23316 - protein, 121 aa, Artificial Sequence
  Chemically Synthesized
QVQLQESGGGLVQAGGSLRLSCAASGYISSYDDMGWYRQAPGKERELVASIDYGTITYYADSVKGRFTISRDNAKNTVYLQMNSLKPEDTAVYYCAALGVGYSQDDVHIYWGQGTQVTVSS

SEQ ID NO: 23317 - protein, 118 aa, Artificial Sequence
  Chemically Synthesized
QVQLQESGGGLVQAGGSLRLSCAASGTISTIRPMGWYRQAPGKEREFVAAIGDGSTTNYADSVKGRFTISRDNAKNTVYLQMNSLKPEDTAVYYCAVYGADGQDFQYWGQGTQVTVSS

SEQ ID NO: 23318 - protein, 118 aa, Artificial Sequence
  Chemically Synthesized
QVQLQESGGGLVQAGGSLRLSCAASGYISYWRGMGWYRQAPGKERELVAGIGGGSNTNYADSVKGRFTISRDNAKNTVYLQMNSLKPEDTAVYYCAVGRRFLYYYDYWGQGTQVTVSS

SEQ ID NO: 23319 - protein, 121 aa, Artificial Sequence
  Chemically Synthesized
QVQLQESGGGLVQAGGSLRLSCAASGTISTASGMGWYRQAPGKERELVASINDVLLPYADSVKGRFTISRDNAKNTVYLQMNSLKPEDTAVYYCAVRAQIIYPRYRYYGYWGQGTQVTVSS

SEQ ID NO: 23320 - protein, 121 aa, Artificial Sequence
  Chemically Synthesized
QVQLQESGGGLVQAGGSLRLSCAASGNIFGYSVMGWYRQAPGKERELVAAIAFGGTTYYADSVKGRFTISRDNAKNTVYLQMNSLKPEDTAVYYCAAGWKLGDVDHYHYYWGQGTQVTVSS

SEQ ID NO: 23321 - protein, 126 aa, Artificial Sequence
  Chemically Synthesized
QVQLQESGGGLVQAGGSLRLSCAASGTIFPTQVMGWYRQAPGKEREFVAAIGHGSTTNYADSVKGRFTISRDNAKNTVYLQMNSLKPEDTAVYYCAVRDALYSHAVRYSRESHTYWGQGTQVTVSS

SEQ ID NO: 23322 - protein, 118 aa, Artificial Sequence
  Chemically Synthesized
QVQLQESGGGLVQAGGSLRLSCAASGTISIARTMGWYRQAPGKEREFVASIDTGGNTNYADSVKGRFTISRDNAKNTVYLQMNSLKPEDTAVYYCAVGIYAKSYHGYWGQGTQVTVSS

SEQ ID NO: 23323 - protein, 118 aa, Artificial Sequence
  Chemically Synthesized
QVQLQESGGGLVQAGGSLRLSCAASGNISDQSTMGWYRQAPGKERELVAAISLGTITNYADSVKGRFTISRDNAKNTVYLQMNSLKPEDTAVYYCAVYKYDYSYHSYWGQGTQVTVSS

SEQ ID NO: 23324 - protein, 126 aa, Artificial Sequence
  Chemically Synthesized
QVQLQESGGGLVQAGGSLRLSCAASGYISYLYDMGWYRQAPGKERELVASISSGGITNYADSVKGRFTISRDNAKNTVYLQMNSLKPEDTAVYYCAVVRYTHALGFDAPSGQHDYWGQGTQVTVSS

SEQ ID NO: 23325 - protein, 117 aa, Artificial Sequence
  Chemically Synthesized
QVQLQESGGGLVQAGGSLRLSCAASGNISQLVGMGWYRQAPGKEREFVASIDIGTNTNYADSVKGRFTISRDNAKNTVYLQMNSLKPEDTAVYYCAVLTLLTTCMYWGQGTQVTVSS

SEQ ID NO: 23326 - protein, 122 aa, Artificial Sequence
  Chemically Synthesized
QVQLQESGGGLVQAGGSLRLSCAASGSISRPTRMGWYRQAPGKERELVATIGDGGTTYYADSVKGRFTISRDNAKNTVYLQMNSLKPEDTAVYYCAVDTHTPAANWYWHGYWGQGTQVTVSS

SEQ ID NO: 23327 - protein, 122 aa, Artificial Sequence
  Chemically Synthesized
QVQLQESGGGLVQAGGSLRLSCAASGYISLRDKMGWYRQAPGKERELLPLLLWGSNTNYADSVKGRFTISRDNAKNTVYLQMNSLKPEDTAVYYCAAGWRYASVYTQVFAYWGQGTQVTVSS

SEQ ID NO: 23328 - protein, 126 aa, Artificial Sequence
  Chemically Synthesized
QVQLQESGGGLVQAGGSLRLSCAASGYISSTLKMGWYRQAPGKERELVAAINYGTNTNYADSVKGRFTISRDNAKNTVYLQMNSLKPEDTAVYYCAAYPYDFDSAFPYQRYRLRYWGQGTQVTVSS

SEQ ID NO: 23329 - protein, 119 aa, Artificial Sequence
  Chemically Synthesized
QVQLQESGGGLVQAGGSLRLSCAASGSISEPDDMGWYRQAPGKERELVAAIDYGGTTYYADSVKGRFTISRDNAKNTVYLQMNSLKPEDTAVYYCAVIYVWDYYPYFYWGQGTQVTVSS

SEQ ID NO: 23330 - protein, 126 aa, Artificial Sequence
  Chemically Synthesized
QVQLQESGGGLVQAGGSLRLSCAASGTIFTHYIMGWYRQAPGKERELVATIGVGAITYYADSVKGRFTISRDNAKNTVYLQMNSLKPEDTAVYYCAVVRPLDHHARAPKRVYHVYWGQGTQVTVSS

SEQ ID NO: 23331 - protein, 120 aa, Artificial Sequence
  Chemically Synthesized
QVQLQESGGGLVQAGGSLRLSCAASGYISASYGMGWYRQAPGKERELLPVLMLVLLPYADSVKGRFTISRDNAKNTVYLQMNSLKPEDTAVYYCAVDGDDDYDWSVLLYWGQGTQVTVSS

SEQ ID NO: 23332 - protein, 122 aa, Artificial Sequence
  Chemically Synthesized
QVQLQESGGGLVQAGGSLRLSCAASGNISDNWYMGWYRQAPGKERELVAAISRGGITYYADSVKGRFTISRDNAKNTVYLQMNSLKPEDTAVYYCAAYGYSLDRSDDLHVYWGQGTQVTVSS

SEQ ID NO: 23333 - protein, 117 aa, Artificial Sequence
  Chemically Synthesized
QVQLQESGGGLVQAGGSLRLSCAASGSISDLSAMGWYRQAPGKERELVATIDRGSSTNYADSVKGRFTISRDNAKNTVYLQMNSLKPEDTAVYYCAVSTTTTSTFYWGQGTQVTVSS

SEQ ID NO: 23334 - protein, 118 aa, Artificial Sequence
  Chemically Synthesized
QVQLQESGGGLVQAGGSLRLSCAASGSIFYTYTMGWYRQAPGKEREFVASIAIGATTNYADSVKGRFTISRDNAKNTVYLQMNSLKPEDTAVYYCAVRIYARTGLFYWGQGTQVTVSS

SEQ ID NO: 23335 - protein, 123 aa, Artificial Sequence
  Chemically Synthesized
QVQLQESGGGLVQAGGSLRLSCAASGSIFDGTDMGWYRQAPGKERELVAGINYGTSTNYADSVKGRFTISRDNAKNTVYLQMNSLKPEDTAVYYCAAYAPAPWITSTYGHSYWGQGTQVTVSS

SEQ ID NO: 23336 - protein, 117 aa, Artificial Sequence
  Chemically Synthesized
QVQLQESGGGLVQAGGSLRLSCAASGTISYADVMGWYRQAPGKERELVATIAQGSITYYADSVKGRFTISRDNAKNTVYLQMNSLKPEDTAVYYCAVFTDYRAYGYWGQGTQVTVSS

SEQ ID NO: 23337 - protein, 122 aa, Artificial Sequence
  Chemically Synthesized
QVQLQESGGGLVQAGGSLRLSCAASGNISADYSMGWYRQAPGKERELVAAISYGASTYYADSVKGRFTISRDNAKNTVYLQMNSLKPEDTAVYYCAAYPSPDFSRFYVHYYWGQGTQVTVSS

SEQ ID NO: 23338 - protein, 122 aa, Artificial Sequence
  Chemically Synthesized
QVQLQESGGGLVQAGGSLRLSCAASGTISDATDMGWYRQAPGKEREFVAAIDPGANTYYADSVKGRFTISRDNAKNTVYLQMNSLKPEDTAVYYCAAARPDYPPWDEDFSYWGQGTQVTVSS

SEQ ID NO: 23339 - protein, 122 aa, Artificial Sequence
  Chemically Synthesized
QVQLQESGGGLVQAGGSLRLSCAASGSISVSVVMGWYRQAPGKEREFVAAITTGASTNYADSVKGRFTISRDNAKNTVYLQMNSLKPEDTAVYYCAAWYPIQRDWSATHSYWGQGTQVTVSS

SEQ ID NO: 23340 - protein, 116 aa, Artificial Sequence
  Chemically Synthesized
QVQLQESGGGLVQAGGSLRLSCAASGSISDYPSMGWYRQAPGKEREFVPVLISVVLPYADSVKGRFTISRDNAKNTVYLQMNSLKPEDTAVYYCAVGLYDDALFYWGQGTQVTVSS

SEQ ID NO: 23341 - protein, 117 aa, Artificial Sequence
  Chemically Synthesized
QVQLQESGGGLVQAGGSLRLSCAASGYIFPPEFMGWYRQAPGKERELVASISHGGSTYYADSVKGRFTISRDNAKNTVYLQMNSLKPEDTAVYYCAVVRAPGHLMYWGQGTQVTVSS

SEQ ID NO: 23342 - protein, 117 aa, Artificial Sequence
  Chemically Synthesized
QVQLQESGGGLVQAGGSLRLSCAASGTISISYPMGWYRQAPGKERELVASINSVLLPYADSVKGRFTISRDNAKNTVYLQMNSLKPEDTAVYYCAAQQVIDYALRYWGQGTQVTVSS

SEQ ID NO: 23343 - protein, 118 aa, Artificial Sequence
  Chemically Synthesized
QVQLQESGGGLVQAGGSLRLSCAASGYISWYNDMGWYRQAPGKEREFVATISYGGSTNYADSVKGRFTISRDNAKNTVYLQMNSLKPEDTAVYYCAVTFVDTSWHGYWGQGTQVTVSS

SEQ ID NO: 23344 - protein, 118 aa, Artificial Sequence
  Chemically Synthesized
QVQLQESGGGLVQAGGSLRLSCAASGNISLMGWYRQAPGKERELVAAIGYGAITYYADSVKGRFTISRDNAKNTVYLQMNSLKPEDTAVYYCAVYSGTNTLVTTFMYWGQGTQVTVSS

SEQ ID NO: 23345 - protein, 122 aa, Artificial Sequence
  Chemically Synthesized
QVQLQESGGGLVQAGGSLRLSCAASGTISDPGEMGWYRQAPGKERELVAAITTGGNTNYADSVKGRFTISRDNAKNTVYLQMNSLKPEDTAVYYCAVDAHDVYTWRNYYAYWGQGTQVTVSS

SEQ ID NO: 23346 - protein, 126 aa, Artificial Sequence
  Chemically Synthesized
QVQLQESGGGLVQAGGSLRLSCAASGNISDPTYMGWYRQAPGKEREFVASIGQGGTTNYADSVKGRFTISRDNAKNTVYLQMNSLKPEDTAVYYCAVGTWDRVYLIPDDYGDYAYWGQGTQVTVSS

SEQ ID NO: 23347 - protein, 117 aa, Artificial Sequence
  Chemically Synthesized
QVQLQESGGGLVQAGGSLRLSCAASGTISSYDLMGWYRQAPGKEREFVASISTGAITNYADSVKGRFTISRDNAKNTVYLQMNSLKPEDTAVYYCAFRLVLTWLIYWGQGTQVTVSS

SEQ ID NO: 23348 - protein, 118 aa, Artificial Sequence
  Chemically Synthesized
QVQLQESGGGLVQAGGSLRLSCAASGYIFSNGFMGWYRQAPGKEREFVASIDGGGITNYADSVKGRFTISRDNAKNTVYLQMNSLKPEDTAVYYCAAAPDDAFGYGYWGQGTQVTVSS

SEQ ID NO: 23349 - protein, 126 aa, Artificial Sequence
  Chemically Synthesized
QVQLQESGGGLVQAGGSLRLSCAASGTISKIRIMGWYRQAPGKEREFVAGIDGGTITYYADSVKGRFTISRDNAKNTVYLQMNSLKPEDTAVYYCAAWYDGERNKYPGWHTVHRYWGQGTQVTVSS

SEQ ID NO: 23350 - protein, 117 aa, Artificial Sequence
  Chemically Synthesized
QVQLQESGGGLVQAGGSLRLSCAASGNIFTDQNMGWYRQAPGKEREFVAGISGGGSTNYADSVKGRFTISRDNAKNTVYLQMNSLKPEDTAVYYCAVVVDGVLHSYWGQGTQVTVSS

SEQ ID NO: 23351 - protein, 117 aa, Artificial Sequence
  Chemically Synthesized
QVQLQESGGGLVQAGGSLRLSCAASGNIFGVVYMGWYRQAPGKERELVAGIAIGSSTYYADSVKGRFTISRDNAKNTVYLQMNSLKPEDTAVYYCAVGGSGSTLIYWGQGTQVTVSS

SEQ ID NO: 23352 - protein, 122 aa, Artificial Sequence
  Chemically Synthesized
QVQLQESGGGLVQAGGSLRLSCAASGYISWAVYMGWYRQAPGKERELVAAIDWGGTTNYADSVKGRFTISRDNAKNTVYLQMNSLKPEDTAVYYCAAWKRTASQSRKNHAYWGQGTQVTVSS

SEQ ID NO: 23353 - protein, 117 aa, Artificial Sequence
  Chemically Synthesized
QVQLQESGGGLVQAGGSLRLSCAASGSIFYVHRMGWYRQAPGKERELVATITHGGNTYYADSVKGRFTISRDNAKNTVYLQMNSLKPEDTAVYYCAADTGYLSTFYWGQGTQVTVSS

SEQ ID NO: 23354 - protein, 122 aa, Artificial Sequence
  Chemically Synthesized
QVQLQESGGGLVQAGGSLRLSCAASGTISLLGFMGWYRQAPGKEREFVAAIGQGANTNYADSVKGRFTISRDNAKNTVYLQMNSLKPEDTAVYYCAAYRRFRDGRYGRHLYWGQGTQVTVSS

SEQ ID NO: 23355 - protein, 125 aa, Artificial Sequence
  Chemically Synthesized
QVQLQESGGGLVQAGGSLRLSCAASGYISQRYAMGWYRQAPGKEREFVAGIAPGTNTNYADSVKGRFTISRDNAKNTVYLQMNSLKPEDTAVYYCAACRMLVGLSTSTVVTVMYWGQGTQVTVSS

SEQ ID NO: 23356 - protein, 122 aa, Artificial Sequence
  Chemically Synthesized
QVQLQESGGGLVQAGGSLRLSCAASGYIFGSIAMGWYRQAPGKERELVASIGVGGSTNYADSVKGRFTISRDNAKNTVYLQMNSLKPEDTAVYYCAVRYSLPVPYWLYFHYWGQGTQVTVSS

SEQ ID NO: 23357 - protein, 121 aa, Artificial Sequence
  Chemically Synthesized
QVQLQESGGGLVQAGGSLRLSCAASGYISYLIYMGWYRQAPGKERELLPVLLLVVVPYADSVKGRFTISRDNAKNTVYLQMNSLKPEDTAVYYCAVRSTPKYEPSGDYDYWGQGTQVTVSS

SEQ ID NO: 23358 - protein, 126 aa, Artificial Sequence
  Chemically Synthesized
QVQLQESGGGLVQAGGSLRLSCAASGNIFYRLYMGWYRQAPGKERELVATIGVGAITYYADSVKGRFTISRDNAKNTVYLQMNSLKPEDTAVYYCAVLYDRLWYPSIWGYRPHDYWGQGTQVTVSS

SEQ ID NO: 23359 - protein, 118 aa, Artificial Sequence
  Chemically Synthesized
QVQLQESGGGLVQAGGSLRLSCAASGSISAVAYMGWYRQAPGKERELVASISGGATTYYADSVKGRFTISRDNAKNTVYLQMNSLKPEDTAVYYCAAAYFDTADLAYWGQGTQVTVSS

SEQ ID NO: 23360 - protein, 118 aa, Artificial Sequence
  Chemically Synthesized
QVQLQESGGGLVQAGGSLRLSCAASGTISGKINMGWYRQAPGKERELVATIGYGGTTNYADSVKGRFTISRDNAKNTVYLQMNSLKPEDTAVYYCAAQDDRLDYHYYWGQGTQVTVSS

SEQ ID NO: 23361 - protein, 125 aa, Artificial Sequence
  Chemically Synthesized
QVQLQESGGGLVQAGGSLRLSCAASGYIFPTAPMGWYRQAPGKEREFVAAINAGSITYYADSVKGRFTISRDNAKNTVYLQMNSLKPEDTAVYYCAASYRREVSLCMTSLTSIYWGQGTQVTVSS

SEQ ID NO: 23362 - protein, 118 aa, Artificial Sequence
  Chemically Synthesized
QVQLQESGGGLVQAGGSLRLSCAASGNISWRVYMGWYRQAPGKERELVAGIAYGGTTNYADSVKGRFTISRDNAKNTVYLQMNSLKPEDTAVYYCAADDRGLRPHAYWGQGTQVTVSS

SEQ ID NO: 23363 - protein, 118 aa, Artificial Sequence
  Chemically Synthesized
QVQLQESGGGLVQAGGSLRLSCAASGTIFGPWAMGWYRQAPGKEREFVAGINEGANTYYADSVKGRFTISRDNAKNTVYLQMNSLKPEDTAVYYCAAYYYKHTLYRYWGQGTQVTVSS

SEQ ID NO: 23364 - protein, 121 aa, Artificial Sequence
  Chemically Synthesized
QVQLQESGGGLVQAGGSLRLSCAASGNIFRVVYMGWYRQAPGKEREFVASIGDGATTYYADSVKGRFTISRDNAKNTVYLQMNSLKPEDTAVYYCAAPVWDVHSYDTVFYWGQGTQVTVSS

SEQ ID NO: 23365 - protein, 121 aa, Artificial Sequence
  Chemically Synthesized
QVQLQESGGGLVQAGGSLRLSCAASGTIFPYSGMGWYRQAPGKEREFVAGISAGTSTYYADSVKGRFTISRDNAKNTVYLQMNSLKPEDTAVYYCAVRNTGRSRVTTTIYWGQGTQVTVSS

SEQ ID NO: 23366 - protein, 121 aa, Artificial Sequence
  Chemically Synthesized
QVQLQESGGGLVQAGGSLRLSCAASGSIFGYYQMGWYRQAPGKEREFVASIDTGASTYYADSVKGRFTISRDNAKNTVYLQMNSLKPEDTAVYYCAAYVDPSLEPYTFGYWGQGTQVTVSS

SEQ ID NO: 23367 - protein, 126 aa, Artificial Sequence
  Chemically Synthesized
QVQLQESGGGLVQAGGSLRLSCAASGYISDYLDMGWYRQAPGKEREFVASIASGGSTNYADSVKGRFTISRDNAKNTVYLQMNSLKPEDTAVYYCAVPLLDTVYNFGTGLYRFNYWGQGTQVTVSS

SEQ ID NO: 23368 - protein, 122 aa, Artificial Sequence
  Chemically Synthesized
QVQLQESGGGLVQAGGSLRLSCAASGTISPVQPMGWYRQAPGKERELVASISYGANTNYADSVKGRFTISRDNAKNTVYLQMNSLKPEDTAVYYCAAATLYYFAEERSFDYWGQGTQVTVSS

SEQ ID NO: 23369 - protein, 116 aa, Artificial Sequence
  Chemically Synthesized
QVQLQESGGGLVQAGGSLRLSCAASGTISAPFTMGWYRQAPGKERELVPLLLSVVLPYADSVKGRFTISRDNAKNTVYLQMNSLKPEDTAVYYCAAPKSVNVLIYWGQGTQVTVSS

SEQ ID NO: 23370 - protein, 118 aa, Artificial Sequence
  Chemically Synthesized
QVQLQESGGGLVQAGGSLRLSCAASGTIFVPYTMGWYRQAPGKEREFVAGIDDGTNTYYADSVKGRFTISRDNAKNTVYLQMNSLKPEDTAVYYCAARDQVYYDHYYWGQGTQVTVSS

SEQ ID NO: 23371 - protein, 109 aa, Artificial Sequence
  Chemically Synthesized
QVQLQESGGGLVQAGGSLRLSCAASGTISGTGFMGWYRQAPGKERELVATIAQGSNTYYADSVKGRFTISRDNAKNTVYLQMNSLKPEDTAVYYCAVYWGQGTQVTVSS

SEQ ID NO: 23372 - protein, 121 aa, Artificial Sequence
  Chemically Synthesized
QVQLQESGGGLVQAGGSLRLSCAASGSISRESVMGWYRQAPGKERELVAAIDYGSTTNYADSVKGRFTISRDNAKNTVYLQMNSLKPEDTAVYYCAAYRRWDNPTVGGLYWGQGTQVTVSS

SEQ ID NO: 23373 - protein, 112 aa, Artificial Sequence
  Chemically Synthesized
QVQLQESGGGLVQAGGSLRLSCAASGYIFTTYYMGWYRQAPGKERELVPLLLTVVIPYADSVKGRFTISRDNAKNTVYLQMNSLKPEDTAVYYCAVDGFVYWGQGTQVTVSS

SEQ ID NO: 23374 - protein, 118 aa, Artificial Sequence
  Chemically Synthesized
QVQLQESGGGLVQAGGSLRLSCAASGNIFAVYPMGWYRQAPGKERELVAAIGTGTNTYYADSVKGRFTISRDNAKNTVYLQMNSLKPEDTAVYYCAVRSVRRRSYEYWGQGTQVTVSS

SEQ ID NO: 23375 - protein, 121 aa, Artificial Sequence
  Chemically Synthesized
QVQLQESGGGLVQAGGSLRLSCAASGSIFQRDPMGWYRQAPGKEREFVATIMTVVLPYADSVKGRFTISRDNAKNTVYLQMNSLKPEDTAVYYCAAEPATAEVHGGDLDYWGQGTQVTVSS

SEQ ID NO: 23376 - protein, 118 aa, Artificial Sequence
  Chemically Synthesized
QVQLQESGGGLVQAGGSLRLSCAASGTISHDSTMGWYRQAPGKERELVATISYGGTTNYADSVKGRFTISRDNAKNTVYLQMNSLKPEDTAVYYCAVTVTADDPHEYWGQGTQVTVSS

SEQ ID NO: 23377 - protein, 118 aa, Artificial Sequence
  Chemically Synthesized
QVQLQESGGGLVQAGGSLRLSCAASGNISADTYMGWYRQAPGKERELVAAIAQGGSTYYADSVKGRFTISRDNAKNTVYLQMNSLKPEDTAVYYCAVDLPYGTYLYYWGQGTQVTVSS

SEQ ID NO: 23378 - protein, 118 aa, Artificial Sequence
  Chemically Synthesized
QVQLQESGGGLVQAGGSLRLSCAASGSISHYTPMGWYRQAPGKERELVATISYGTITNYADSVKGRFTISRDNAKNTVYLQMNSLKPEDTAVYYCAVRQWSWSPHEYWGQGTQVTVSS

SEQ ID NO: 23379 - protein, 118 aa, Artificial Sequence
  Chemically Synthesized
QVQLQESGGGLVQAGGSLRLSCAASGTISDWRLMGWYRQAPGKEREFVATIDIGATTYYADSVKGRFTISRDNAKNTVYLQMNSLKPEDTAVYYCAVDAIIDATFDYWGQGTQVTVSS

SEQ ID NO: 23380 - protein, 118 aa, Artificial Sequence
  Chemically Synthesized
QVQLQESGGGLVQAGGSLRLSCAASGTISTHLSMGWYRQAPGKEREFVAAITYGGTTNYADSVKGRFTISRDNAKNTVYLQMNSLKPEDTAVYYCAVLNNVAEIYQYWGQGTQVTVSS

SEQ ID NO: 23381 - protein, 125 aa, Artificial Sequence
  Chemically Synthesized
QVQLQESGGGLVQAGGSLRLSCAASGNIFRLTMGWYRQAPGKERELVASIATGSNTYYADSVKGRFTISRDNAKNTVYLQMNSLKPEDTAVYYCAVGWYKDTPALRDVRGPFDYWGQGTQVTVSS

SEQ ID NO: 23382 - protein, 118 aa, Artificial Sequence
  Chemically Synthesized
QVQLQESGGGLVQAGGSLRLSCAASGYISLAVTMGWYRQAPGKEREFVAAIGIGGTTNYADSVKGRFTISRDNAKNTVYLQMNSLKPEDTAVYYCAVNNPPYHTFSYWGQGTQVTVSS

SEQ ID NO: 23383 - protein, 114 aa, Artificial Sequence
  Chemically Synthesized
QVQLQESGGGLVQAGGSLRLSCAASGTIFLLRYMGWYRQAPGKERELVATIAAGGTTNYADSVKGRFTISRDNAKNTVYLQMNSLKPEDTAVYYCAVRYYLVYWGQGTQVTVSS

SEQ ID NO: 23384 - protein, 117 aa, Artificial Sequence
  Chemically Synthesized
QVQLQESGGGLVQAGGSLRLSCAASGTISRVWLMGWYRQAPGKERELVASIGLGATTYYADSVKGRFTISRDNAKNTVYLQMNSLKPEDTAVYYCAVQYRDSSCIYWGQGTQVTVSS

SEQ ID NO: 23385 - protein, 118 aa, Artificial Sequence
  Chemically Synthesized
QVQLQESGGGLVQAGGSLRLSCAASGTIFDLRYMGWYRQAPGKEREFVAGINAGSSTNYADSVKGRFTISRDNAKNTVYLQMNSLKPEDTAVYYCAAWNLDGYQHWYWGQGTQVTVSS

SEQ ID NO: 23386 - protein, 119 aa, Artificial Sequence
  Chemically Synthesized
QVQLQESGGGLVQAGGSLRLSCAASGTISDAYVMGWYRQAPGKEREFVAAIAQGGSTNYADSVKGRFTISRDNAKNTVYLQMNSLKPEDTAVYYCAAVRAYFPTTLEYWGQGTQVTVSS

SEQ ID NO: 23387 - protein, 121 aa, Artificial Sequence
  Chemically Synthesized
QVQLQESGGGLVQAGGSLRLSCAASGTISDGANMGWYRQAPGKEREFVASIASGSTTNYADSVKGRFTISRDNAKNTVYLQMNSLKPEDTAVYYCAVNGIKSVHRYYHRYWGQGTQVTVSS

SEQ ID NO: 23388 - protein, 122 aa, Artificial Sequence
  Chemically Synthesized
QVQLQESGGGLVQAGGSLRLSCAASGTISWASYMGWYRQAPGKEREFVAGISAGGNTYYADSVKGRFTISRDNAKNTVYLQMNSLKPEDTAVYYCAVHPADSGTDVHQYVYWGQGTQVTVSS

SEQ ID NO: 23389 - protein, 118 aa, Artificial Sequence
  Chemically Synthesized
QVQLQESGGGLVQAGGSLRLSCAASGTIFRVDVMGWYRQAPGKEREFVASIGYGTTTNYADSVKGRFTISRDNAKNTVYLQMNSLKPEDTAVYYCAAKPRYFDPYPYWGQGTQVTVSS

SEQ ID NO: 23390 - protein, 122 aa, Artificial Sequence
  Chemically Synthesized
QVQLQESGGGLVQAGGSLRLSCAASGSIFNERSMGWYRQAPGKEREFVAAIGRGGSTNYADSVKGRFTISRDNAKNTVYLQMNSLKPEDTAVYYCAVIVRNVYAWRGTLRYWGQGTQVTVSS

SEQ ID NO: 23391 - protein, 118 aa, Artificial Sequence
  Chemically Synthesized
QVQLQESGGGLVQAGGSLRLSCAASGTISATTIMGWYRQAPGKERELVATIAGGTSTYYADSVKGRFTISRDNAKNTVYLQMNSLKPEDTAVYYCAAGRVGYDNHWYWGQGTQVTVSS

SEQ ID NO: 23392 - protein, 118 aa, Artificial Sequence
  Chemically Synthesized
QVQLQESGGGLVQAGGSLRLSCAASGNISQVDHMGWYRQAPGKEREFVAGISRGGITNYADSVKGRFTISRDNAKNTVYLQMNSLKPEDTAVYYCAVQYFKHDYYVYWGQGTQVTVSS

SEQ ID NO: 23393 - protein, 117 aa, Artificial Sequence
  Chemically Synthesized
QVQLQESGGGLVQAGGSLRLSCAASGYISGRSTMGWYRQAPGKERELVAAIDLGSNTNYADSVKGRFTISRDNAKNTVYLQMNSLKPEDTAVYYCAAAGTRKPHIYWGQGTQVTVSS

SEQ ID NO: 23394 - protein, 125 aa, Artificial Sequence
  Chemically Synthesized
QVQLQESGGGLVQAGGSLRLSCAASGTISGDYGMGWYRQAPGKERELVAGIGWVVVPYADSVKGRFTISRDNAKNTVYLQMNSLKPEDTAVYYCAVQLGDYDDSYHTRDKSFSYWGQGTQVTVSS

SEQ ID NO: 23395 - protein, 126 aa, Artificial Sequence
  Chemically Synthesized
QVQLQESGGGLVQAGGSLRLSCAASGNISDLRSMGWYRQAPGKEREFVAGISAGGITYYADSVKGRFTISRDNAKNTVYLQMNSLKPEDTAVYYCAAGVYSGYSPYNDYYTGYDYWGQGTQVTVSS

SEQ ID NO: 23396 - protein, 122 aa, Artificial Sequence
  Chemically Synthesized
QVQLQESGGGLVQAGGSLRLSCAASGTISYAWEMGWYRQAPGKERELVATIAHGGTTNYADSVKGRFTISRDNAKNTVYLQMNSLKPEDTAVYYCAVDEVTVYYVVYNYLYWGQGTQVTVSS

SEQ ID NO: 23397 - protein, 118 aa, Artificial Sequence
  Chemically Synthesized
QVQLQESGGGLVQAGGSLRLSCAASGTIFVVSFMGWYRQAPGKERELVAGIALGSSTNYADSVKGRFTISRDNAKNTVYLQMNSLKPEDTAVYYCAAYRDSYNVYLYWGQGTQVTVSS

SEQ ID NO: 23398 - protein, 121 aa, Artificial Sequence
  Chemically Synthesized
QVQLQESGGGLVQAGGSLRLSCAASGSISTRYTMGWYRQAPGKEREFVATIGRGGTTNYADSVKGRFTISRDNAKNTVYLQMNSLKPEDTAVYYCAAQITYYAKRWYRHYWGQGTQVTVSS

SEQ ID NO: 23399 - protein, 118 aa, Artificial Sequence
  Chemically Synthesized
QVQLQESGGGLVQAGGSLRLSCAASGNISYWDGMGWYRQAPGKERELVAAIGLGTTTNYADSVKGRFTISRDNAKNTVYLQMNSLKPEDTAVYYCAAYDFIIDGYDYWGQGTQVTVSS

SEQ ID NO: 23400 - protein, 118 aa, Artificial Sequence
  Chemically Synthesized
QVQLQESGGGLVQAGGSLRLSCAASGYISGVVRMGWYRQAPGKERELVAGIAWGGSTYYADSVKGRFTISRDNAKNTVYLQMNSLKPEDTAVYYCAVIDGKQYLFDYWGQGTQVTVSS

SEQ ID NO: 23401 - protein, 115 aa, Artificial Sequence
  Chemically Synthesized
QVQLQESGGGLVQAGGSLRLSCAASGTIFLSVMGWYRQAPGKEREFVAGITGGGTTNYADSVKGRFTISRDNAKNTVYLQMNSLKPEDTAVYYCAATGLAYHGYWGQGTQVTVSS

SEQ ID NO: 23402 - protein, 126 aa, Artificial Sequence
  Chemically Synthesized
QVQLQESGGGLVQAGGSLRLSCAASGTISTGYYMGWYRQAPGKERELVAAIDIGTSTYYADSVKGRFTISRDNAKNTVYLQMNSLKPEDTAVYYCAAWRTVGVYSYSQGLALYYYWGQGTQVTVSS

SEQ ID NO: 23403 - protein, 118 aa, Artificial Sequence
  Chemically Synthesized
QVQLQESGGGLVQAGGSLRLSCAASGNIFDNGIMGWYRQAPGKEREFVASISLGGTTNYADSVKGRFTISRDNAKNTVYLQMNSLKPEDTAVYYCAVDWGRPYVHHYWGQGTQVTVSS

SEQ ID NO: 23404 - protein, 117 aa, Artificial Sequence
  Chemically Synthesized
QVQLQESGGGLVQAGGSLRLSCAASGYISVYYDMGWYRQAPGKERELVALLVVVVLPYADSVKGRFTISRDNAKNTVYLQMNSLKPEDTAVYYCAAYYGYRLAHYYWGQGTQVTVSS

SEQ ID NO: 23405 - protein, 118 aa, Artificial Sequence
  Chemically Synthesized
QVQLQESGGGLVQAGGSLRLSCAASGYIFRTTIMGWYRQAPGKERELVATITRGANTNYADSVKGRFTISRDNAKNTVYLQMNSLKPEDTAVYYCAARVYLGWPFGYWGQGTQVTVSS

SEQ ID NO: 23406 - protein, 118 aa, Artificial Sequence
  Chemically Synthesized
QVQLQESGGGLVQAGGSLRLSCAASGTISYAEYMGWYRQAPGKEREFVAGIDHGGTTNYADSVKGRFTISRDNAKNTVYLQMNSLKPEDTAVYYCAAYPKGWLLHSYWGQGTQVTVSS

SEQ ID NO: 23407 - protein, 118 aa, Artificial Sequence
  Chemically Synthesized
QVQLQESGGGLVQAGGSLRLSCAASGYISLGFSMGWYRQAPGKEREFVASIAYGGNTNYADSVKGRFTISRDNAKNTVYLQMNSLKPEDTAVYYCAAIVDVAAGFQYWGQGTQVTVSS

SEQ ID NO: 23408 - protein, 116 aa, Artificial Sequence
  Chemically Synthesized
QVQLQESGGGLVQAGGSLRLSCAASGTISYVKKMGWYRQAPGKERELVASIDGGITNYADSVKGRFTISRDNAKNTVYLQMNSLKPEDTAVYYCAVVIDNRYHGYWGQGTQVTVSS

SEQ ID NO: 23409 - protein, 123 aa, Artificial Sequence
  Chemically Synthesized
QVQLQESGGGLVQAGGSLRLSCAASGNIFDDFHMGWYRQAPGKERELVASIGYGGSTNYADSVKGRFTISRDNAKNTVYLQMNSLKPEDTAVYYCAAYQDNLYVGWEDDHYYWGQGTQVTVSS

SEQ ID NO: 23410 - protein, 118 aa, Artificial Sequence
  Chemically Synthesized
QVQLQESGGGLVQAGGSLRLSCAASGTIFGPYWMGWYRQAPGKEREFVASISDGSSTYYADSVKGRFTISRDNAKNTVYLQMNSLKPEDTAVYYCAALWYAAGQHVYWGQGTQVTVSS

SEQ ID NO: 23411 - protein, 118 aa, Artificial Sequence
  Chemically Synthesized
QVQLQESGGGLVQAGGSLRLSCAASGNISAHSRMGWYRQAPGKERELVATNYADSVKGRFTISRDNAKNTVYLQMNSLKPEDTAVYYCAAFAYQYYSFTTIRGTTFYWGQGTQVTVSS

SEQ ID NO: 23412 - protein, 115 aa, Artificial Sequence
  Chemically Synthesized
QVQLQESGGGLVQAGGSLRLSCAASGTISDSYNMGWYRQAPGKEREFVAAITYGTITNYADSVKGRFTISRDNAKNTVYLQMNSLKPEDTAVYYCAATTVVTFYWGQGTQVTVSS

SEQ ID NO: 23413 - protein, 121 aa, Artificial Sequence
  Chemically Synthesized
QVQLQESGGGLVQAGGSLRLSCAASGYILLLTMGWYRQAPGKERELVAGITQGTTTYYADSVKGRFTISRDNAKNTVYLQMNSLKPEDTAVYYCAAETEYISAGGAWYVYWGQGTQVTVSS

SEQ ID NO: 23414 - protein, 117 aa, Artificial Sequence
  Chemically Synthesized
QVQLQESGGGLVQAGGSLRLSCAASGYIFWTDIMGWYRQAPGKERELVAGIGGGSTTNYADSVKGRFTISRDNAKNTVYLQMNSLKPEDTAVYYCAVTLGGGDWYYWGQGTQVTVSS

SEQ ID NO: 23415 - protein, 118 aa, Artificial Sequence
  Chemically Synthesized
QVQLQESGGGLVQAGGSLRLSCAASGNISHYSGMGWYRQAPGKERELVATIDKGTTTYYADSVKGRFTISRDNAKNTVYLQMNSLKPEDTAVYYCAANARYAVGYIYWGQGTQVTVSS

SEQ ID NO: 23416 - protein, 122 aa, Artificial Sequence
  Chemically Synthesized
QVQLQESGGGLVQAGGSLRLSCAASGYISVAAFMGWYRQAPGKEREFVATITTGTSTNYADSVKGRFTISRDNAKNTVYLQMNSLKPEDTAVYYCAALLKGVGPGRGPHPYWGQGTQVTVSS

SEQ ID NO: 23417 - protein, 118 aa, Artificial Sequence
  Chemically Synthesized
QVQLQESGGGLVQAGGSLRLSCAASGSIFRRYRMGWYRQAPGKERELVAAIATGGITYYADSVKGRFTISRDNAKNTVYLQMNSLKPEDTAVYYCAVWGWYKQLHFYWGQGTQVTVSS

SEQ ID NO: 23418 - protein, 122 aa, Artificial Sequence
  Chemically Synthesized
QVQLQESGGGLVQAGGSLRLSCAASGNIFDRWYMGWYRQAPGKERELVAGISYGAITYYADSVKGRFTISRDNAKNTVYLQMNSLKPEDTAVYYCAARRYSYLGIVYTYAYWGQGTQVTVSS

SEQ ID NO: 23419 - protein, 118 aa, Artificial Sequence
  Chemically Synthesized
QVQLQESGGGLVQAGGSLRLSCAASGYISDRGSMGWYRQAPGKEREFVAGIDVGGITNYADSVKGRFTISRDNAKNTVYLQMNSLKPEDTAVYYCAAGVQRYIDLIYWGQGTQVTVSS

SEQ ID NO: 23420 - protein, 122 aa, Artificial Sequence
  Chemically Synthesized
QVQLQESGGGLVQAGGSLRLSCAASGTIFHWYPMGWYRQAPGKERELVAGIAYGAITYYADSVKGRFTISRDNAKNTVYLQMNSLKPEDTAVYYCAVGWRSTYLYRTRYGYWGQGTQVTVSS

SEQ ID NO: 23421 - protein, 119 aa, Artificial Sequence
  Chemically Synthesized
QVQLQESGGGLVQAGGSLRLSCAASGTIFLGGDMGWYRQAPGKERELVATIASGASTYYADSVKGRFTISRDNAKNTVYLQMNSLKPEDTAVYYCAADHDLRGDDHGYWGQGTQVTVSS

SEQ ID NO: 23422 - protein, 118 aa, Artificial Sequence
  Chemically Synthesized
QVQLQESGGGLVQAGGSLRLSCAASGSISYTLYMGWYRQAPGKERELVAAITAGTTTNYADSVKGRFTISRDNAKNTVYLQMNSLKPEDTAVYYCAAYELRVDGFPYWGQGTQVTVSS

SEQ ID NO: 23423 - protein, 121 aa, Artificial Sequence
  Chemically Synthesized
QVQLQESGGGLVQAGGSLRLSCAASGTIFYSYEMGWYRQAPGKERELVATIGTGATTNYADSVKGRFTISRDNAKNTVYLQMNSLKPEDTAVYYCAVSLLVTDDNTQYIYWGQGTQVTVSS

SEQ ID NO: 23424 - protein, 126 aa, Artificial Sequence
  Chemically Synthesized
QVQLQESGGGLVQAGGSLRLSCAASGTIFVGIVMGWYRQAPGKEREFVASINIGANTNYADSVKGRFTISRDNAKNTVYLQMNSLKPEDTAVYYCAVGTDLDAYSISPHVDEHPYWGQGTQVTVSS

SEQ ID NO: 23425 - protein, 126 aa, Artificial Sequence
  Chemically Synthesized
QVQLQESGGGLVQAGGSLRLSCAASGYISWRYLMGWYRQAPGKEREFVASISWGTNTNYADSVKGRFTISRDNAKNTVYLQMNSLKPEDTAVYYCAVTRVHRYSGNRVHAGYLPYWGQGTQVTVSS

SEQ ID NO: 23426 - protein, 126 aa, Artificial Sequence
  Chemically Synthesized
QVQLQESGGGLVQAGGSLRLSCAASGTISGALAMGWYRQAPGKERELVASIDGGGSTYYADSVKGRFTISRDNAKNTVYLQMNSLKPEDTAVYYCAVQTRFGGPYRYGGDAWHPYWGQGTQVTVSS

SEQ ID NO: 23427 - protein, 118 aa, Artificial Sequence
  Chemically Synthesized
QVQLQESGGGLVQAGGSLRLSCAASGNIFRAYYMGWYRQAPGKERELVAGITDGSTTNYADSVKGRFTISRDNAKNTVYLQMNSLKPEDTAVYYCAAGGTDSDNHDYWGQGTQVTVSS

SEQ ID NO: 23428 - protein, 123 aa, Artificial Sequence
  Chemically Synthesized
QVQLQESGGGLVQAGGSLRLSCAASGYISPGPGMGWYRQAPGKEREFVATISGGGTSTNYADSVKGRFTISRDNAKNTVYLQMNSLKPEDTAVYYCAAAVDRGNDSRASYPYWGQGTQVTVSS

SEQ ID NO: 23429 - protein, 122 aa, Artificial Sequence
  Chemically Synthesized
QVQLQESGGGLVQAGGSLRLSCAASGTISDFSSMGWYRQAPGKEREFVAGIGGGSTTNYADSVKGRFTISRDNAKNTVYLQMNSLKPEDTAVYYCAAYWATIGEWYAYHKYWGQGTQVTVSS

SEQ ID NO: 23430 - protein, 121 aa, Artificial Sequence
  Chemically Synthesized
QVQLQESGGGLVQAGGSLRLSCAASGNISRYYYMGWYRQAPGKERELVATIDLVLLPYADSVKGRFTISRDNAKNTVYLQMNSLKPEDTAVYYCAVDVNYHAYGVVGLAYWGQGTQVTVSS

SEQ ID NO: 23431 - protein, 118 aa, Artificial Sequence
  Chemically Synthesized
QVQLQESGGGLVQAGGSLRLSCAASGNIFIVYVMGWYRQAPGKERELVATIGSGAITYYADSVKGRFTISRDNAKNTVYLQMNSLKPEDTAVYYCAATQARYYTHAYWGQGTQVTVSS

SEQ ID NO: 23432 - protein, 118 aa, Artificial Sequence
  Chemically Synthesized
QVQLQESGGGLVQAGGSLRLSCAASGYIFGVYTMGWYRQAPGKERELVASIGYGGNTYYADSVKGRFTISRDNAKNTVYLQMNSLKPEDTAVYYCAVYERGDITYIYWGQGTQVTVSS

SEQ ID NO: 23433 - protein, 122 aa, Artificial Sequence
  Chemically Synthesized
QVQLQESGGGLVQAGGSLRLSCAASGSISPDTYMGWYRQAPGKERELVASIGPGSTTNYADSVKGRFTISRDNAKNTVYLQMNSLKPEDTAVYYCAAGWDIDFVQGLYHAYWGQGTQVTVSS

SEQ ID NO: 23434 - protein, 126 aa, Artificial Sequence
  Chemically Synthesized
QVQLQESGGGLVQAGGSLRLSCAASGTISAGRSMGWYRQAPGKERELVASIDRGGTTYYADSVKGRFTISRDNAKNTVYLQMNSLKPEDTAVYYCAADYYINGYLYWGLRTYLSYWGQGTQVTVSS

SEQ ID NO: 23435 - protein, 122 aa, Artificial Sequence
  Chemically Synthesized
QVQLQESGGGLVQAGGSLRLSCAASGNIFSYDLMGWYRQAPGKERELVATIDVGTNTYYADSVKGRFTISRDNAKNTVYLQMNSLKPEDTAVYYCAVVPHDRRGYNALFYYWGQGTQVTVSS

SEQ ID NO: 23436 - protein, 122 aa, Artificial Sequence
  Chemically Synthesized
QVQLQESGGGLVQAGGSLRLSCAASGNISLDYTMGWYRQAPGKEREFVAGIGDGTTTNYADSVKGRFTISRDNAKNTVYLQMNSLKPEDTAVYYCAAGDDVFLYDGWYLRYWGQGTQVTVSS

SEQ ID NO: 23437 - protein, 117 aa, Artificial Sequence
  Chemically Synthesized
QVQLQESGGGLVQAGGSLRLSCAASGSIFTDHDMGWYRQAPGKEREFVAAITHGTNPYADSVKGRFTISRDNAKNTVYLQMNSLKPEDTAVYYCAVKRVRTIAHQYWGQGTQVTVSS

SEQ ID NO: 23438 - protein, 117 aa, Artificial Sequence
  Chemically Synthesized
QVQLQESGGGLVQAGGSLRLSCAASGSIFAHYAMGWYRQAPGKERELVASIAWGANTYYADSVKGRFTISRDNAKNTVYLQMNSLKPEDTAVYYCAVSLLSSRSMYWGQGTQVTVSS

SEQ ID NO: 23439 - protein, 120 aa, Artificial Sequence
  Chemically Synthesized
QVQLQESGGGLVQAGGSLRLSCAASGNISTTFMGWYRQAPGKERELVAAIAVGSNTYYADSVKGRFTISRDNAKNTVYLQMNSLKPEDTAVYYCAVEPGSVCNGLVTMYWGQGTQVTVSS

SEQ ID NO: 23440 - protein, 122 aa, Artificial Sequence
  Chemically Synthesized
QVQLQESGGGLVQAGGSLRLSCAASGSISPLDGMGWYRQAPGKERELVAAIDEGGTTYYADSVKGRFTISRDNAKNTVYLQMNSLKPEDTAVYYCAVRKVVYRPDRNDHYYWGQGTQVTVSS

SEQ ID NO: 23441 - protein, 121 aa, Artificial Sequence
  Chemically Synthesized
QVQLQESGGGLVQAGGSLRLSCAASGSIFHRDMGWYRQAPGKEREFVAGISIGGTTYYADSVKGRFTISRDNAKNTVYLQMNSLKPEDTAVYYCAVLDQYDPWNYVPHAYWGQGTQVTVSS

SEQ ID NO: 23442 - protein, 126 aa, Artificial Sequence
  Chemically Synthesized
QVQLQESGGGLVQAGGSLRLSCAASGYISRGPFMGWYRQAPGKERELVAAIDLGGSTNYADSVKGRFTISRDNAKNTVYLQMNSLKPEDTAVYYCAANQPDQERGYARRTAYYWYWGQGTQVTVSS

SEQ ID NO: 23443 - protein, 118 aa, Artificial Sequence
  Chemically Synthesized
QVQLQESGGGLVQAGGSLRLSCAASGTIFLITRMGWYRQAPGKEREFVASISWGATTNYADSVKGRFTISRDNAKNTVYLQMNSLKPEDTAVYYCAAVSWYIQRLNYWGQGTQVTVSS

SEQ ID NO: 23444 - protein, 118 aa, Artificial Sequence
  Chemically Synthesized
QVQLQESGGGLVQAGGSLRLSCAASGYIFPGHSMGWYRQAPGKEREFVAGIAQGANTNYADSVKGRFTISRDNAKNTVYLQMNSLKPEDTAVYYCAAGYTRSSGHDYWGQGTQVTVSS

SEQ ID NO: 23445 - protein, 121 aa, Artificial Sequence
  Chemically Synthesized
QVQLQESGGGLVQAGGSLRLSCAASGNISYLSDMGWYRQAPGKERELVAGINIGGTTYYADSVKGRFTISRDNAKNTVYLQMNSLKPEDTAVYYCAADAPDNSLQGYYHYWGQGTQVTVSS

SEQ ID NO: 23446 - protein, 121 aa, Artificial Sequence
  Chemically Synthesized
QVQLQESGGGLVQAGGSLRLSCAASGTISYGDYMGWYRQAPGKERELVASIGDGGSTNYADSVKGRFTISRDNAKNTVYLQMNSLKPEDTAVYYCAAEPSTLNLTLSCFYWGQGTQVTVSS

SEQ ID NO: 23447 - protein, 121 aa, Artificial Sequence
  Chemically Synthesized
QVQLQESGGGLVQAGGSLRLSCAASGNISWLNQMGWYRQAPGKEREFVASINAGSTTYYADSVKGRFTISRDNAKNTVYLQMNSLKPEDTAVYYCAADRSVLLRLVVVLYWGQGTQVTVSS

SEQ ID NO: 23448 - protein, 118 aa, Artificial Sequence
  Chemically Synthesized
QVQLQESGGGLVQAGGSLRLSCAASGNISSGGTMGWYRQAPGKEREFVAAISYGGNTNYADSVKGRFTISRDNAKNTVYLQMNSLKPEDTAVYYCAVVRYYYRRHYYWGQGTQVTVSS

SEQ ID NO: 23449 - protein, 118 aa, Artificial Sequence
  Chemically Synthesized
QVQLQESGGGLVQAGGSLRLSCAASGNIFVIYTMGWYRQAPGKERELVAGINSGSSTNYADSVKGRFTISRDNAKNTVYLQMNSLKPEDTAVYYCAVRYYRRDWHSYWGQGTQVTVSS

SEQ ID NO: 23450 - protein, 118 aa, Artificial Sequence
  Chemically Synthesized
QVQLQESGGGLVQAGGSLRLSCAASGSIFVSRGMGWYRQAPGKEREFVATISDGSNTYYADSVKGRFTISRDNAKNTVYLQMNSLKPEDTAVYYCAVGAGTVYTHRYWGQGTQVTVSS

SEQ ID NO: 23451 - protein, 118 aa, Artificial Sequence
  Chemically Synthesized
QVQLQESGGGLVQAGGSLRLSCAASGYIFGIAYMGWYRQAPGKERELVAAINNGATTNYADSVKGRFTISRDNAKNTVYLQMNSLKPEDTAVYYCAVRTQEGVGLSYWGQGTQVTVSS

SEQ ID NO: 23452 - protein, 121 aa, Artificial Sequence
  Chemically Synthesized
QVQLQESGGGLVQAGGSLRLSCAASGTISTGHYMGWYRQAPGKEREFVASITTGANTNYADSVKGRFTISRDNAKNTVYLQMNSLKPEDTAVYYCAVVDDGWYHEEGHAYWGQGTQVTVSS

SEQ ID NO: 23453 - protein, 117 aa, Artificial Sequence
  Chemically Synthesized
QVQLQESGGGLVQAGGSLRLSCAASGSISPSRMGWYRQAPGKEREFVAAINIGTNTYYADSVKGRFTISRDNAKNTVYLQMNSLKPEDTAVYYCAVDTRKYPTHDYWGQGTQVTVSS

SEQ ID NO: 23454 - protein, 117 aa, Artificial Sequence
  Chemically Synthesized
QVQLQESGGGLVQAGGSLRLSCAASGSISSTDFMGWYRQAPGKERELVAAIARGTITYYADSVKGRFTISRDNAKNTVYLQMNSLKPEDTAVYYCAVTLLGNRNFYWGQGTQVTVSS

SEQ ID NO: 23455 - protein, 121 aa, Artificial Sequence
  Chemically Synthesized
QVQLQESGGGLVQAGGSLRLSCAASGTISIYASMGWYRQAPGKERELVAAITEGGITKYADSVKGRFTISRDNAKNTVYLQMNSLKPEDTAVYYCAAKVTGGSGANDHYYWGQGTQVTVSS

SEQ ID NO: 23456 - protein, 117 aa, Artificial Sequence
  Chemically Synthesized
QVQLQESGGGLVQAGGSLRLSCAASGNISAPDVMGWYRQAPGKERELVATIAAGANYLYADSVKGRFTISRDNAKNTVYLQMNSLKPEDTAVYYCAATYTRDSWHYWGQGTQVTVSS

SEQ ID NO: 23457 - protein, 121 aa, Artificial Sequence
  Chemically Synthesized
QVQLQESGGGLVQAGGSLRLSCAASGNISDSLMGWYRQAPGKEREFVASIDYGANTYYADSVKGRFTISRDNAKNTVYLQMNSLKPEDTAVYYCAVYKGTTLYAERPYVYWGQGTQVTVSS

SEQ ID NO: 23458 - protein, 118 aa, Artificial Sequence
  Chemically Synthesized
QVQLQESGGGLVQAGGSLRLSCAASGTISYAWYMGWYRQAPGKERELVASIGDGTSTNYADSVKGRFTISRDNAKNTVYLQMNSLKPEDTAVYYCAVGITYYWYYLYWGQGTQVTVSS

SEQ ID NO: 23459 - protein, 118 aa, Artificial Sequence
  Chemically Synthesized
QVQLQESGGGLVQAGGSLRLSCAASGNISGWPRMGWYRQAPGKEREFVAAINGGTTTNYADSVKGRFTISRDNAKNTVYLQMNSLKPEDTAVYYCAAPYATSTIFDYWGQGTQVTVSS

SEQ ID NO: 23460 - protein, 118 aa, Artificial Sequence
  Chemically Synthesized
QVQLQESGGGLVQAGGSLRLSCAASGNISYWRYMGWYRQAPGKERELVAAIAAGGSTNYADSVKGRFTISRDNAKNTVYLQMNSLKPEDTAVYYCAANAARDYSFRYWGQGTQVTVSS

SEQ ID NO: 23461 - protein, 118 aa, Artificial Sequence
  Chemically Synthesized
QVQLQESGGGLVQAGGSLRLSCAASGTISQYYYMGWYRQAPGKERELVAAITYGANTYYADSVKGRFTISRDNAKNTVYLQMNSLKPEDTAVYYCAVLPQSYRYHTYWGQGTQVTVSS

SEQ ID NO: 23462 - protein, 121 aa, Artificial Sequence
  Chemically Synthesized
QVQLQESGGGLVQAGGSLRLSCAASGTIFAPYTMGWYRQAPGKERELVASINGGSTYYADSVKGRFTISRDNAKNTVYLQMNSLKPEDTAVYYCAVGYDDADWYADYHVYWGQGTQVTVSS

SEQ ID NO: 23463 - protein, 126 aa, Artificial Sequence
  Chemically Synthesized
QVQLQESGGGLVQAGGSLRLSCAASGNIFSDTRMGWYRQAPGKERELVATIDNGGITYYADSVKGRFTISRDNAKNTVYLQMNSLKPEDTAVYYCAVLDLDRYGWYIGGYDYLVYWGQGTQVTVSS

SEQ ID NO: 23464 - protein, 118 aa, Artificial Sequence
  Chemically Synthesized
QVQLQESGGGLVQAGGSLRLSCAASGTIFFDNTMGWYRQAPGKEREFVATIGSGGNTNYADSVKGRFTISRDNAKNTVYLQMNSLKPEDTAVYYCAARVAKGTWHIYWGQGTQVTVSS

SEQ ID NO: 23465 - protein, 122 aa, Artificial Sequence
  Chemically Synthesized
QVQLQESGGGLVQAGGSLRLSCAASGTISDYITMGWYRQAPGKEREFVATITGGGSTYYADSVKGRFTISRDNAKNTVYLQMNSLKPEDTAVYYCAVVYYSPWWSDSGHQYWGQGTQVTVSS

SEQ ID NO: 23466 - protein, 115 aa, Artificial Sequence
  Chemically Synthesized
QVQLQESGGGLVQAGGSLRLSCAASGNISIQAYMGWYRQAPGKEREFVATIGSGSNTYYADSVKGRFTISRDNAKNTVYLQMNSLKPEDTAVYYCAVSTRYHDYWGQGTQVTVSS

SEQ ID NO: 23467 - protein, 117 aa, Artificial Sequence
  Chemically Synthesized
QVQLQESGGGLVQAGGSLRLSCAASGTIFRGQGMGWYRQAPGKERELVATITDGTNTYYADSVKGRFTISRDNAKNTVYLQMNSLKPEDTAVYYCAATRDSITFFYWGQGTQVTVSS

SEQ ID NO: 23468 - protein, 117 aa, Artificial Sequence
  Chemically Synthesized
QVQLQESGGGLVQAGGSLRLSCAASGYIFYPYMGWYRQAPGKEREFVAGIDYGTTTYYADSVKGRFTISRDNAKNTVYLQMNSLKPEDTAVYYCAADFSWDDNFHYWGQGTQVTVSS

SEQ ID NO: 23469 - protein, 118 aa, Artificial Sequence
  Chemically Synthesized
QVQLQESGGGLVQAGGSLRLSCAASGSIFNGVWMGWYRQAPGKERELVATITYGTTTNYADSVKGRFTISRDNAKNTVYLQMNSLKPEDTAVYYCAARDITDTYFHYWGQGTQVTVSS

SEQ ID NO: 23470 - protein, 118 aa, Artificial Sequence
  Chemically Synthesized
QVQLQESGGGLVQAGGSLRLSCAASGTISYLLYMGWYRQAPGKERELVATITGGASTYYADSVKGRFTISRDNAKNTVYLQMNSLKPEDTAVYYCAVSYYITSDFDYWGQGTQVTVSS

SEQ ID NO: 23471 - protein, 118 aa, Artificial Sequence
  Chemically Synthesized
QVQLQESGGGLVQAGGSLRLSCAASGTISSYDTMGWYRQAPGKEREFVAAIDQGGNTYYADSVKGRFTISRDNAKNTVYLQMNSLKPEDTAVYYCAAENIAAAGFVYWGQGTQVTVSS

SEQ ID NO: 23472 - protein, 118 aa, Artificial Sequence
  Chemically Synthesized
QVQLQESGGGLVQAGGSLRLSCAASGYISGYFSMGWYRQAPGKERELVATIGYGATTYYADSVKGRFTISRDNAKNTVYLQMNSLKPEDTAVYYCAVAGSTRFDFGYWGQGTQVTVSS

SEQ ID NO: 23473 - protein, 118 aa, Artificial Sequence
  Chemically Synthesized
QVQLQESGGGLVQAGGSLRLSCAASGNISPYYDMGWYRQAPGKERELVAGISAGGITYYADSVKGRFTISRDNAKNTVYLQMNSLKPEDTAVYYCAAQLNNNYYYYYWGQGTQVTVSS

SEQ ID NO: 23474 - protein, 116 aa, Artificial Sequence
  Chemically Synthesized
QVQLQESGGGLVQAGGSLRLSCAASGTISDRDQMGWYRQAPGKERELGAITYYADSVKGRFTISRDNAKNTVYLQMNSLKPEDTAVYYCAAYDNGVNLGIADYDYWGQGTQVTVSS

SEQ ID NO: 23475 - protein, 118 aa, Artificial Sequence
  Chemically Synthesized
QVQLQESGGGLVQAGGSLRLSCAASGTISYIPYMGWYRQAPGKEREFVASIDGGSTTYYADSVKGRFTISRDNAKNTVYLQMNSLKPEDTAVYYCAVGQGAGPRYGYWGQGTQVTVSS

SEQ ID NO: 23476 - protein, 118 aa, Artificial Sequence
  Chemically Synthesized
QVQLQESGGGLVQAGGSLRLSCAASGNISGPTSMGWYRQAPGKEREFVASIGIGSTTYYADSVKGRFTISRDNAKNTVYLQMNSLKPEDTAVYYCAVGVYNDDGLSYWGQGTQVTVSS

SEQ ID NO: 23477 - protein, 118 aa, Artificial Sequence
  Chemically Synthesized
QVQLQESGGGLVQAGGSLRLSCAASGNISFYDLMGWYRQAPGKERELVATITWGAITYYADSVKGRFTISRDNAKNTVYLQMNSLKPEDTAVYYCAVGGDTSIHFGYWGQGTQVTVSS

SEQ ID NO: 23478 - protein, 118 aa, Artificial Sequence
  Chemically Synthesized
QVQLQESGGGLVQAGGSLRLSCAASGTISSPDSMGWYRQAPGKEREFVASIDRGANTNYADSVKGRFTISRDNAKNTVYLQMNSLKPEDTAVYYCAAGTSDAGGLYYWGQGTQVTVSS

SEQ ID NO: 23479 - protein, 118 aa, Artificial Sequence
  Chemically Synthesized
QVQLQESGGGLVQAGGSLRLSCAASGSIFRSGTMGWYRQAPGKERELVASISDGSNTNYADSVKGRFTISRDNAKNTVYLQMNSLKPEDTAVYYCAVSAPDIKAHEYWGQGTQVTVSS

SEQ ID NO: 23480 - protein, 118 aa, Artificial Sequence
  Chemically Synthesized
QVQLQESGGGLVQAGGSLRLSCAASGTIFYVYYMGWYRQAPGKEREFVAGIDFGGSTYYADSVKGRFTISRDNAKNTVYLQMNSLKPEDTAVYYCAAYGFVPPYLAYWGQGTQVTVSS

SEQ ID NO: 23481 - protein, 122 aa, Artificial Sequence
  Chemically Synthesized
QVQLQESGGGLVQAGGSLRLSCAASGNIFTYVDMGWYRQAPGKEREFVASITGGSNTNYADSVKGRFTISRDNAKNTVYLQMNSLKPEDTAVYYCAVYSTQGNLAYYVHAYWGQGTQVTVSS

SEQ ID NO: 23482 - protein, 122 aa, Artificial Sequence
  Chemically Synthesized
QVQLQESGGGLVQAGGSLRLSCAASGNISDYAYMGWYRQAPGKEREFVAAINAGAITYYADSVKGRFTISRDNAKNTVYLQMNSLKPEDTAVYYCAVESGYDIGWGPGLTYWGQGTQVTVSS

SEQ ID NO: 23483 - protein, 122 aa, Artificial Sequence
  Chemically Synthesized
QVQLQESGGGLVQAGGSLRLSCAASGYISGSNRMGWYRQAPGKEREFVAGINTGTTTYYADSVKGRFTISRDNAKNTVYLQMNSLKPEDTAVYYCAVPRHLQDAIGGAYQYWGQGTQVTVSS

SEQ ID NO: 23484 - protein, 115 aa, Artificial Sequence
  Chemically Synthesized
QVQLQESGGGLVQAGGSLRLSCAASGSISYTYYMGWYRQAPGKEREGGITYYADSVKGRFTISRDNAKNTVYLQMNSLKPEDTAVYYCAVEDYGARGSYYTLDYWGQGTQVTVSS

SEQ ID NO: 23485 - protein, 126 aa, Artificial Sequence
  Chemically Synthesized
QVQLQESGGGLVQAGGSLRLSCAASGYIFDGGQMGWYRQAPGKERELVAGIAEGANTNYADSVKGRFTISRDNAKNTVYLQMNSLKPEDTAVYYCAVGDTEVLDTYSYTYEQYIYWGQGTQVTVSS

SEQ ID NO: 23486 - protein, 118 aa, Artificial Sequence
  Chemically Synthesized
QVQLQESGGGLVQAGGSLRLSCAASGSISRSAFMGWYRQAPGKERELVATIGYGTNTYYADSVKGRFTISRDNAKNTVYLQMNSLKPEDTAVYYCAAQAQYQWWHVYWGQGTQVTVSS

SEQ ID NO: 23487 - protein, 118 aa, Artificial Sequence
  Chemically Synthesized
QVQLQESGGGLVQAGGSLRLSCAASGYISSRRVMGWYRQAPGKERELVAGIAYGTNTNYADSVKGRFTISRDNAKNTVYLQMNSLKPEDTAVYYCAVRTEEDWSHGYWGQGTQVTVSS

SEQ ID NO: 23488 - protein, 118 aa, Artificial Sequence
  Chemically Synthesized
QVQLQESGGGLVQAGGSLRLSCAASGTIFPTYDMGWYRQAPGKERELVASIDYGTTTYYADSVKGRFTISRDNAKNTVYLQMNSLKPEDTAVYYCAARTVDQGGHDYWGQGTQVTVSS

SEQ ID NO: 23489 - protein, 118 aa, Artificial Sequence
  Chemically Synthesized
QVQLQESGGGLVQAGGSLRLSCAASGTISYVDVMGWYRQAPGKERELVAGIGAGSNTNYADSVKGRFTISRDNAKNTVYLQMNSLKPEDTAVYYCAAEYGGDIELQYWGQGTQVTVSS

SEQ ID NO: 23490 - protein, 118 aa, Artificial Sequence
  Chemically Synthesized
QVQLQESGGGLVQAGGSLRLSCAASGSIFGYTAMGWYRQAPGKERELVAAINHGTITYYADSVKGRFTISRDNAKNTVYLQMNSLKPEDTAVYYCAATTYRPTVHYYWGQGTQVTVSS

SEQ ID NO: 23491 - protein, 125 aa, Artificial Sequence
  Chemically Synthesized
QVQLQESGGGLVQAGGSLRLSCAASGNIFYAAWMGWYRQAPGKERELVATISSVLIPYADSVKGRFTISRDNAKNTVYLQMNSLKPEDTAVYYCAAKTRVAQGDLSADYDTHYYWGQGTQVTVSS

SEQ ID NO: 23492 - protein, 120 aa, Artificial Sequence
  Chemically Synthesized
QVQLQESGGGLVQAGGSLRLSCAASGSIFYYYMGWYRQAPGKERELVAGITDGTTTYYADSVKGRFTISRDNAKNTVYLQMNSLKPEDTAVYYCAARQVITWNGATTMYWGQGTQVTVSS

SEQ ID NO: 23493 - protein, 118 aa, Artificial Sequence
  Chemically Synthesized
QVQLQESGGGLVQAGGSLRLSCAASGYISYPVTMGWYRQAPGKEREFVAAIAIGGSTYYADSVKGRFTISRDNAKNTVYLQMNSLKPEDTAVYYCAAFLNYDAVLGYWGQGTQVTVSS

SEQ ID NO: 23494 - protein, 117 aa, Artificial Sequence
  Chemically Synthesized
QVQLQESGGGLVQAGGSLRLSCAASGYIFGHYFMGWYRQAPGKERELVAAIDSGTYLYADSVKGRFTISRDNAKNTVYLQMNSLKPEDTAVYYCAVDTDYRTLYDYWGQGTQVTVSS

SEQ ID NO: 23495 - protein, 122 aa, Artificial Sequence
  Chemically Synthesized
QVQLQESGGGLVQAGGSLRLSCAASGSIFRYVDMGWYRQAPGKERELVATIGYGSTTNYADSVKGRFTISRDNAKNTVYLQMNSLKPEDTAVYYCAASYYYELTRYHNYWYWGQGTQVTVSS

SEQ ID NO: 23496 - protein, 118 aa, Artificial Sequence
  Chemically Synthesized
QVQLQESGGGLVQAGGSLRLSCAASGTISRADTMGWYRQAPGKEREFVASIDGGGTTNYADSVKGRFTISRDNAKNTVYLQMNSLKPEDTAVYYCAVRVWYLIYHPYWGQGTQVTVSS

SEQ ID NO: 23497 - protein, 122 aa, Artificial Sequence
  Chemically Synthesized
QVQLQESGGGLVQAGGSLRLSCAASGNIFPYISMGWYRQAPGKEREFVAAITQGGITYYADSVKGRFTISRDNAKNTVYLQMNSLKPEDTAVYYCAVSAGYEPPYPDDLTYWGQGTQVTVSS

SEQ ID NO: 23498 - protein, 126 aa, Artificial Sequence
  Chemically Synthesized
QVQLQESGGGLVQAGGSLRLSCAASGNIFDQWKMGWYRQAPGKERELVASISNGATTYYADSVKGRFTISRDNAKNTVYLQMNSLKPEDTAVYYCAVQHYWLQYGTTVRLSLFYYWGQGTQVTVSS

SEQ ID NO: 23499 - protein, 125 aa, Artificial Sequence
  Chemically Synthesized
QVQLQESGGGLVQAGGSLRLSCAASGTIFRFGAMGWYRQAPGKEREFVASISDGGTTNYADSVKGRFTISRDNAKNTVYLQMNSLKPEDTAVYYCAVVAYDWWGPLYHLYYHLYWGQGTQVTVSS

SEQ ID NO: 23500 - protein, 117 aa, Artificial Sequence
  Chemically Synthesized
QVQLQESGGGLVQAGGSLRLSCAASGTIMGWYRQAPGKEREFVAAITSGGTTYYADSVKGRFTISRDNAKNTVYLQMNSLKPEDTAVYYCAAYIADAYYDPADLEYWGQGTQVTVSS

SEQ ID NO: 23501 - protein, 118 aa, Artificial Sequence
  Chemically Synthesized
QVQLQESGGGLVQAGGSLRLSCAASGSISLYLIMGWYRQAPGKEREFVAGINDGGSTYYADSVKGRFTISRDNAKNTVYLQMNSLKPEDTAVYYCAVGKQGDGYYQYWGQGTQVTVSS

SEQ ID NO: 23502 - protein, 122 aa, Artificial Sequence
  Chemically Synthesized
QVQLQESGGGLVQAGGSLRLSCAASGSIFDRDGMGWYRQAPGKERELVASIDDGANTNYADSVKGRFTISRDNAKNTVYLQMNSLKPEDTAVYYCAVRLQYYQGYLLEYEYWGQGTQVTVSS

SEQ ID NO: 23503 - protein, 117 aa, Artificial Sequence
  Chemically Synthesized
QVQLQESGGGLVQAGGSLRLSCAASGTISGGFMGWYRQAPGKEREFVATIGRGASTNYADSVKGRFTISRDNAKNTVYLQMNSLKPEDTAVYYCAAFIYTDVSLLYWGQGTQVTVSS

SEQ ID NO: 23504 - protein, 118 aa, Artificial Sequence
  Chemically Synthesized
QVQLQESGGGLVQAGGSLRLSCAASGSISYLRSMGWYRQAPGKEREFVASIARGTTTNYADSVKGRFTISRDNAKNTVYLQMNSLKPEDTAVYYCAAAVWFLIFFHYWGQGTQVTVSS

SEQ ID NO: 23505 - protein, 118 aa, Artificial Sequence
  Chemically Synthesized
QVQLQESGGGLVQAGGSLRLSCAASGTISGSVDMGWYRQAPGKERELVATIAFGGITNYADSVKGRFTISRDNAKNTVYLQMNSLKPEDTAVYYCAVASFWLPGTCYWGQGTQVTVSS

SEQ ID NO: 23506 - protein, 118 aa, Artificial Sequence
  Chemically Synthesized
QVQLQESGGGLVQAGGSLRLSCAASGTISARRTMGWYRQAPGKEREFVAAIGEGGNTYYADSVKGRFTISRDNAKNTVYLQMNSLKPEDTAVYYCAAQRVRPVSYDYWGQGTQVTVSS

SEQ ID NO: 23507 - protein, 118 aa, Artificial Sequence
  Chemically Synthesized
QVQLQESGGGLVQAGGSLRLSCAASGTIFPLHFMGWYRQAPGKEREFVAAITYGGITNYADSVKGRFTISRDNAKNTVYLQMNSLKPEDTAVYYCAAGQIIFLSHYYWGQGTQVTVSS

SEQ ID NO: 23508 - protein, 126 aa, Artificial Sequence
  Chemically Synthesized
QVQLQESGGGLVQAGGSLRLSCAASGSIFYPRYMGWYRQAPGKEREFVAGIAYGSTTNYADSVKGRFTISRDNAKNTVYLQMNSLKPEDTAVYYCAAQDIVGRLDWTGDYRHLFYWGQGTQVTVSS

SEQ ID NO: 23509 - protein, 126 aa, Artificial Sequence
  Chemically Synthesized
QVQLQESGGGLVQAGGSLRLSCAASGSIFPLEIMGWYRQAPGKERELVATISYGANTNYADSVKGRFTISRDNAKNTVYLQMNSLKPEDTAVYYCAVYGTGSGYILVAYAVQHTYWGQGTQVTVSS

SEQ ID NO: 23510 - protein, 121 aa, Artificial Sequence
  Chemically Synthesized
QVQLQESGGGLVQAGGSLRLSCAASGTISIGGVMGWYRQAPGKERELVAGIDRGGTTYYADSVKGRFTISRDNAKNTVYLQMNSLKPEDTAVYYCAVYGGYIEGDGEYFYWGQGTQVTVSS

SEQ ID NO: 23511 - protein, 122 aa, Artificial Sequence
  Chemically Synthesized
QVQLQESGGGLVQAGGSLRLSCAASGTISAPDQMGWYRQAPGKEREFVATINHGGNTYYADSVKGRFTISRDNAKNTVYLQMNSLKPEDTAVYYCAANIPGFYLPREALRYWGQGTQVTVSS

SEQ ID NO: 23512 - protein, 126 aa, Artificial Sequence
  Chemically Synthesized
QVQLQESGGGLVQAGGSLRLSCAASGYISLYYHMGWYRQAPGKERELVAGITDGTSTYYADSVKGRFTISRDNAKNTVYLQMNSLKPEDTAVYYCAVYYRYYADLYQRQFDPYVYWGQGTQVTVSS

SEQ ID NO: 23513 - protein, 121 aa, Artificial Sequence
  Chemically Synthesized
QVQLQESGGGLVQAGGSLRLSCAASGNISGNSYMGWYRQAPGKERELVASITYGSTTNYADSVKGRFTISRDNAKNTVYLQMNSLKPEDTAVYYCAVAPYPLGWDSTLMYWGQGTQVTVSS

SEQ ID NO: 23514 - protein, 122 aa, Artificial Sequence
  Chemically Synthesized
QVQLQESGGGLVQAGGSLRLSCAASGTIFVYANMGWYRQAPGKEREFVATITPGTITYYADSVKGRFTISRDNAKNTVYLQMNSLKPEDTAVYYCAVSYGPDNLRTEPLLYWGQGTQVTVSS

SEQ ID NO: 23515 - protein, 122 aa, Artificial Sequence
  Chemically Synthesized
QVQLQESGGGLVQAGGSLRLSCAASGTISGGGHMGWYRQAPGKEREFVAAIGDGASTYYADSVKGRFTISRDNAKNTVYLQMNSLKPEDTAVYYCAVDYVPDPKQIGDHYYWGQGTQVTVSS

SEQ ID NO: 23516 - protein, 121 aa, Artificial Sequence
  Chemically Synthesized
QVQLQESGGGLVQAGGSLRLSCAASGTIFYIRSMGWYRQAPGKERELVAGITGGSTYYADSVKGRFTISRDNAKNTVYLQMNSLKPEDTAVYYCAAATGGKYGYYSRHTYWGQGTQVTVSS

SEQ ID NO: 23517 - protein, 118 aa, Artificial Sequence
  Chemically Synthesized
QVQLQESGGGLVQAGGSLRLSCAASGTISGYTYMGWYRQAPGKERELVASITDGATTNYADSVKGRFTISRDNAKNTVYLQMNSLKPEDTAVYYCAANGPSDPSYFYWGQGTQVTVSS

SEQ ID NO: 23518 - protein, 118 aa, Artificial Sequence
  Chemically Synthesized
QVQLQESGGGLVQAGGSLRLSCAASGNIFSALRMGWYRQAPGKEREFVAAIGLGGTTYYADSVKGRFTISRDNAKNTVYLQMNSLKPEDTAVYYCAAPQDVSSYHYYWGQGTQVTVSS

SEQ ID NO: 23519 - protein, 118 aa, Artificial Sequence
  Chemically Synthesized
QVQLQESGGGLVQAGGSLRLSCAASGTIFLAVPMGWYRQAPGKEREFVASINYGSSTNYADSVKGRFTISRDNAKNTVYLQMNSLKPEDTAVYYCAAYDNLEPYYRYWGQGTQVTVSS

SEQ ID NO: 23520 - protein, 112 aa, Artificial Sequence
  Chemically Synthesized
QVQLQESGGGLVQAGGSLRLSCAASGTIFRDLRMGWYRQAPGKERELVATISYGTNTNYADSVKGRFTISRDNAKNTVYLQMNSLKPEDTAVYYCAVFTIYWGQGTQVTVSS

SEQ ID NO: 23521 - protein, 119 aa, Artificial Sequence
  Chemically Synthesized
QVQLQESGGGLVQAGGSLRLSCAASGTISDRLLMGWYRQAPGKERELVATIASGGSNTNYADSVKGRFTISRDNAKNTVYLQMNSLKPEDTAVYYCAVVDFVNSHYAYWGQGTQVTVSS

SEQ ID NO: 23522 - protein, 122 aa, Artificial Sequence
  Chemically Synthesized
QVQLQESGGGLVQAGGSLRLSCAASGYISDDVLMGWYRQAPGKERELVATIGEGSNTYYADSVKGRFTISRDNAKNTVYLQMNSLKPEDTAVYYCAAFRHWWYRDYLALFYWGQGTQVTVSS

SEQ ID NO: 23523 - protein, 122 aa, Artificial Sequence
  Chemically Synthesized
QVQLQESGGGLVQAGGSLRLSCAASGTISYDTDMGWYRQAPGKERELVAGIAGGTITNYADSVKGRFTISRDNAKNTVYLQMNSLKPEDTAVYYCAVKDRWNTYATGRHDYWGQGTQVTVSS

SEQ ID NO: 23524 - protein, 118 aa, Artificial Sequence
  Chemically Synthesized
QVQLQESGGGLVQAGGSLRLSCAASGNIFLDSSMGWYRQAPGKEREFVAAIDDGGSTNYADSVKGRFTISRDNAKNTVYLQMNSLKPEDTAVYYCAVAYYDSGWHYYWGQGTQVTVSS

SEQ ID NO: 23525 - protein, 116 aa, Artificial Sequence
  Chemically Synthesized
QVQLQESGGGLVQAGGSLRLSCAASGNISGRSIMGWYRQAPGKEREFVAGITIGGSTYYADSVKGRFTISRDNAKNTVYLQMNSLKPEDTAVYYCAAVYSSRHYYWGQGTQVTVSS

SEQ ID NO: 23526 - protein, 118 aa, Artificial Sequence
  Chemically Synthesized
QVQLQESGGGLVQAGGSLRLSCAASGTISERVAMGWYRQAPGKEREFVAGISAGASTNYADSVKGRFTISRDNAKNTVYLQMNSLKPEDTAVYYCAVAYRIPVLHGYWGQGTQVTVSS

SEQ ID NO: 23527 - protein, 118 aa, Artificial Sequence
  Chemically Synthesized
QVQLQESGGGLVQAGGSLRLSCAASGTIFDSAYMGWYRQAPGKEREFVASISFGTNTYYADSVKGRFTISRDNAKNTVYLQMNSLKPEDTAVYYCAVTTPDPYVFGYWGQGTQVTVSS

SEQ ID NO: 23528 - protein, 117 aa, Artificial Sequence
  Chemically Synthesized
QVQLQESGGGLVQAGGSLRLSCAASGNIFVSTMGWYRQAPGKEREFVASIDLGATTNYADSVKGRFTISRDNAKNTVYLQMNSLKPEDTAVYYCAAHQDVHVTHGYWGQGTQVTVSS

SEQ ID NO: 23529 - protein, 123 aa, Artificial Sequence
  Chemically Synthesized
QVQLQESGGGLVQAGGSLRLSCAASGNISSYRSMGWYRQAPGKEREFVAAITYGATTNYADSVKGRFTISRDNAKNTVYLQMNSLKPEDTAVYYCAAVSYLYFGDAYHYHGYWGQGTQVTVSS

SEQ ID NO: 23530 - protein, 118 aa, Artificial Sequence
  Chemically Synthesized
QVQLQESGGGLVQAGGSLRLSCAASGNISTVYFMGWYRQAPGKEREFVAGITWGTTTNYADSVKGRFTISRDNAKNTVYLQMNSLKPEDTAVYYCAAPDAGIRVHGYWGQGTQVTVSS

SEQ ID NO: 23531 - protein, 126 aa, Artificial Sequence
  Chemically Synthesized
QVQLQESGGGLVQAGGSLRLSCAASGNIFDDYGMGWYRQAPGKERELVAGIATGGNTYYADSVKGRFTISRDNAKNTVYLQMNSLKPEDTAVYYCAAGVRPTQGYYNGVQYLYDYWGQGTQVTVSS

SEQ ID NO: 23532 - protein, 121 aa, Artificial Sequence
  Chemically Synthesized
QVQLQESGGGLVQAGGSLRLSCAASGTIFPEIGMGWYRQAPGKEREFVPLLVWVVLPYADSVKGRFTISRDNAKNTVYLQMNSLKPEDTAVYYCAVEYVRDELLHDYHTYWGQGTQVTVSS

SEQ ID NO: 23533 - protein, 118 aa, Artificial Sequence
  Chemically Synthesized
QVQLQESGGGLVQAGGSLRLSCAASGTISRIRDMGWYRQAPGKERELVAAIARGSTTYYADSVKGRFTISRDNAKNTVYLQMNSLKPEDTAVYYCAAEQWYYYYHYYWGQGTQVTVSS

SEQ ID NO: 23534 - protein, 118 aa, Artificial Sequence
  Chemically Synthesized
QVQLQESGGGLVQAGGSLRLSCAASGSISTGAYMGWYRQAPGKEREFVATITFGTNTNYADSVKGRFTISRDNAKNTVYLQMNSLKPEDTAVYYCAAIAYVLGYHYYWGQGTQVTVSS

SEQ ID NO: 23535 - protein, 123 aa, Artificial Sequence
  Chemically Synthesized
QVQLQESGGGLVQAGGSLRLSCAASGYISAYLYMGWYRQAPGKEREFVASISGGGTTNYADSVKGRFTISRDNAKNTVYLQMNSLKPEDTAVYYCAVGLYYLDYYDLDYHSYWGQGTQVTVSS

SEQ ID NO: 23536 - protein, 118 aa, Artificial Sequence
  Chemically Synthesized
QVQLQESGGGLVQAGGSLRLSCAASGNIFASDYMGWYRQAPGKEREFVASITHGAITYYADSVKGRFTISRDNAKNTVYLQMNSLKPEDTAVYYCAVAYYPVYYLPYWGQGTQVTVSS

SEQ ID NO: 23537 - protein, 122 aa, Artificial Sequence
  Chemically Synthesized
QVQLQESGGGLVQAGGSLRLSCAASGTIFYYNLMGWYRQAPGKERELVATIDPGSTTYYADSVKGRFTISRDNAKNTVYLQMNSLKPEDTAVYYCAVGVKYIWYDLYQFTYWGQGTQVTVSS

SEQ ID NO: 23538 - protein, 118 aa, Artificial Sequence
  Chemically Synthesized
QVQLQESGGGLVQAGGSLRLSCAASGTIFRVYAMGWYRQAPGKEREFVASINVGSNTNYADSVKGRFTISRDNAKNTVYLQMNSLKPEDTAVYYCAAVSKLWRYFYYWGQGTQVTVSS

SEQ ID NO: 23539 - protein, 116 aa, Artificial Sequence
  Chemically Synthesized
QVQLQESGGGLVQAGGSLRLSCAASGNISGWYYMGWYRQAPGKERELVATIELVLLPYADSVKGRFTISRDNAKNTVYLQMNSLKPEDTAVYYCAADSSGTDQHYWGQGTQVTVSS

SEQ ID NO: 23540 - protein, 117 aa, Artificial Sequence
  Chemically Synthesized
QVQLQESGGGLVQAGGSLRLSCAASGSIFRSYPMGWYRQAPGKEREFVATIGYGANTNYADSVKGRFTISRDNAKNTVYLQMNSLKPEDTAVYYCAVWFRRRTLVYWGQGTQVTVSS

SEQ ID NO: 23541 - protein, 118 aa, Artificial Sequence
  Chemically Synthesized
QVQLQESGGGLVQAGGSLRLSCAASGTISTYYGMGWYRQAPGKEREFVAAINLGSTTYYADSVKGRFTISRDNAKNTVYLQMNSLKPEDTAVYYCAVVIVVSQYHYYWGQGTQVTVSS

SEQ ID NO: 23542 - protein, 118 aa, Artificial Sequence
  Chemically Synthesized
QVQLQESGGGLVQAGGSLRLSCAASGNISRPWRMGWYRQAPGKERELVATIGPGTNTNYADSVKGRFTISRDNAKNTVYLQMNSLKPEDTAVYYCAVYRFRASRYYYWGQGTQVTVSS

SEQ ID NO: 23543 - protein, 125 aa, Artificial Sequence
  Chemically Synthesized
QVQLQESGGGLVQAGGSLRLSCAASGSISHEQLMGWYRQAPGKERELVAGIAYGGNTYYADSVKGRFTISRDNAKNTVYLQMNSLKPEDTAVYYCAAIVSTFTKLRTSSVKLFYWGQGTQVTVSS

SEQ ID NO: 23544 - protein, 126 aa, Artificial Sequence
  Chemically Synthesized
QVQLQESGGGLVQAGGSLRLSCAASGSIFAYYAMGWYRQAPGKEREFVAGITFGGNTNYADSVKGRFTISRDNAKNTVYLQMNSLKPEDTAVYYCAVFYWPKYNHWAWAYGGYDYWGQGTQVTVSS

SEQ ID NO: 23545 - protein, 122 aa, Artificial Sequence
  Chemically Synthesized
QVQLQESGGGLVQAGGSLRLSCAASGTIFTIVRMGWYRQAPGKEREFVATIGRGSSTNYADSVKGRFTISRDNAKNTVYLQMNSLKPEDTAVYYCAAIHRDQYHTPGWHWYWGQGTQVTVSS

SEQ ID NO: 23546 - protein, 118 aa, Artificial Sequence
  Chemically Synthesized
QVQLQESGGGLVQAGGSLRLSCAASGTISVYQGMGWYRQAPGKEREFVASIAAGAITNYADSVKGRFTISRDNAKNTVYLQMNSLKPEDTAVYYCAVDHGTDIVHGYWGQGTQVTVSS

SEQ ID NO: 23547 - protein, 122 aa, Artificial Sequence
  Chemically Synthesized
QVQLQESGGGLVQAGGSLRLSCAASGTIFRALGMGWYRQAPGKEREFVATISDGGSTYYADSVKGRFTISRDNAKNTVYLQMNSLKPEDTAVYYCAVGWGRRSYGISSHLYWGQGTQVTVSS

SEQ ID NO: 23548 - protein, 117 aa, Artificial Sequence
  Chemically Synthesized
QVQLQESGGGLVQAGGSLRLSCAASGYISATDGMGWYRQAPGKEREFVPVLLVVLVPYADSVKGRFTISRDNAKNTVYLQMNSLKPEDTAVYYCAVGYDGYAAFYYWGQGTQVTVSS

SEQ ID NO: 23549 - protein, 127 aa, Artificial Sequence
  Chemically Synthesized
QVQLQESGGGLVQAGGSLRLSCAASGYISYPYAMGWYRQAPGKEREFVAGIDRGTNTNYADSVKGRFTISRDNAKNTVYLQMNSLKPEDTAVYYCAALVFLQDIGRDARGYRPYAYWGQGTQVTVSS

SEQ ID NO: 23550 - protein, 118 aa, Artificial Sequence
  Chemically Synthesized
QVQLQESGGGLVQAGGSLRLSCAASGTIFYPLYMGWYRQAPGKERELVAAINWGTSTYYADSVKGRFTISRDNAKNTVYLQMNSLKPEDTAVYYCAVLIGGVDSLWYWGQGTQVTVSS

SEQ ID NO: 23551 - protein, 118 aa, Artificial Sequence
  Chemically Synthesized
QVQLQESGGGLVQAGGSLRLSCAASGNIFRRYIMGWYRQAPGKEREFVAAIGRGGSTNYADSVKGRFTISRDNAKNTVYLQMNSLKPEDTAVYYCAVYYGTHGVHVYWGQGTQVTVSS

SEQ ID NO: 23552 - protein, 121 aa, Artificial Sequence
  Chemically Synthesized
QVQLQESGGGLVQAGGSLRLSCAASGNISLWQDMGWYRQAPGKERELVAGIDSVVIPYADSVKGRFTISRDNAKNTVYLQMNSLKPEDTAVYYCAVYQYLHFTPYLYHNYWGQGTQVTVSS

SEQ ID NO: 23553 - protein, 122 aa, Artificial Sequence
  Chemically Synthesized
QVQLQESGGGLVQAGGSLRLSCAASGYIFSDAVMGWYRQAPGKEREFVAGIAKGTNTYYADSVKGRFTISRDNAKNTVYLQMNSLKPEDTAVYYCAVVVRDPVRNARPLGYWGQGTQVTVSS

SEQ ID NO: 23554 - protein, 118 aa, Artificial Sequence
  Chemically Synthesized
QVQLQESGGGLVQAGGSLRLSCAASGSISYYTYMGWYRQAPGKEREFVATIAFGGNTYYADSVKGRFTISRDNAKNTVYLQMNSLKPEDTAVYYCAVAGAGTAQFYYWGQGTQVTVSS

SEQ ID NO: 23555 - protein, 118 aa, Artificial Sequence
  Chemically Synthesized
QVQLQESGGGLVQAGGSLRLSCAASGYIFARAVMGWYRQAPGKEREFVAGIDYGGITNYADSVKGRFTISRDNAKNTVYLQMNSLKPEDTAVYYCAVVTTDKRHYAYWGQGTQVTVSS

SEQ ID NO: 23556 - protein, 118 aa, Artificial Sequence
  Chemically Synthesized
QVQLQESGGGLVQAGGSLRLSCAASGYISGFLSMGWYRQAPGKEREFVATIGDGTTTNYADSVKGRFTISRDNAKNTVYLQMNSLKPEDTAVYYCAALYRYPDWHYYWGQGTQVTVSS

SEQ ID NO: 23557 - protein, 119 aa, Artificial Sequence
  Chemically Synthesized
QVQLQESGGGLVQAGGSLRLSCAASGYISVFAHMGWYRQAPGKEREFVATINYGGTTNYADSVKGRFTISRDNAKNTVYLQMNSLKPEDTAVYYCAVWPFDGRLTHTYWGQGTQVTVSS

SEQ ID NO: 23558 - protein, 118 aa, Artificial Sequence
  Chemically Synthesized
QVQLQESGGGLVQAGGSLRLSCAASGTIFWVPSMGWYRQAPGKERELVAAIGIGSNTYYADSVKGRFTISRDNAKNTVYLQMNSLKPEDTAVYYCAVSALRYRGLRYWGQGTQVTVSS

SEQ ID NO: 23559 - protein, 126 aa, Artificial Sequence
  Chemically Synthesized
QVQLQESGGGLVQAGGSLRLSCAASGSISLPYIMGWYRQAPGKERELVASITYGANTYYADSVKGRFTISRDNAKNTVYLQMNSLKPEDTAVYYCAVNYSNYAYLWSHYTRRHSYWGQGTQVTVSS

SEQ ID NO: 23560 - protein, 118 aa, Artificial Sequence
  Chemically Synthesized
QVQLQESGGGLVQAGGSLRLSCAASGNISPFIRMGWYRQAPGKEREFVASINLGSNTNYADSVKGRFTISRDNAKNTVYLQMNSLKPEDTAVYYCAVIWKRSGLHAYWGQGTQVTVSS

SEQ ID NO: 23561 - protein, 118 aa, Artificial Sequence
  Chemically Synthesized
QVQLQESGGGLVQAGGSLRLSCAASGTISPSYYMGWYRQAPGKERELVASITRGAITNYADSVKGRFTISRDNAKNTVYLQMNSLKPEDTAVYYCAVFAQPYYDFNYWGQGTQVTVSS

SEQ ID NO: 23562 - protein, 118 aa, Artificial Sequence
  Chemically Synthesized
QVQLQESGGGLVQAGGSLRLSCAASGNISYGYVMGWYRQAPGKEREFVAGITDGANTYYADSVKGRFTISRDNAKNTVYLQMNSLKPEDTAVYYCAALNRKPAYHYYWGQGTQVTVSS

SEQ ID NO: 23563 - protein, 118 aa, Artificial Sequence
  Chemically Synthesized
QVQLQESGGGLVQAGGSLRLSCAASGNISSEGYMGWYRQAPGKEREFVAAIAYGGSTNYADSVKGRFTISRDNAKNTVYLQMNSLKPEDTAVYYCAVVFFISRYLWYWGQGTQVTVSS

SEQ ID NO: 23564 - protein, 118 aa, Artificial Sequence
  Chemically Synthesized
QVQLQESGGGLVQAGGSLRLSCAASGNIFGLVEMGWYRQAPGKERELVASISYGSSTNYADSVKGRFTISRDNAKNTVYLQMNSLKPEDTAVYYCAVIILQAYSALYWGQGTQVTVSS

SEQ ID NO: 23565 - protein, 118 aa, Artificial Sequence
  Chemically Synthesized
QVQLQESGGGLVQAGGSLRLSCAASGYISYYGPMGWYRQAPGKEREFVAAIGPGSITNYADSVKGRFTISRDNAKNTVYLQMNSLKPEDTAVYYCAVIIRFNVYHYYWGQGTQVTVSS

SEQ ID NO: 23566 - protein, 123 aa, Artificial Sequence
  Chemically Synthesized
QVQLQESGGGLVQAGGSLRLSCAASGYISRYPSMGWYRQAPGKEREFVASISRGGTNTNYADSVKGRFTISRDNAKNTVYLQMNSLKPEDTAVYYCAVNQYLPFYWIKPHYYWGQGTQVTVSS

SEQ ID NO: 23567 - protein, 118 aa, Artificial Sequence
  Chemically Synthesized
QVQLQESGGGLVQAGGSLRLSCAASGTISGDGVMGWYRQAPGKERELVAAIGSGSNTYYADSVKGRFTISRDNAKNTVYLQMNSLKPEDTAVYYCAVRVGPDYSHDYWGQGTQVTVSS

SEQ ID NO: 23568 - protein, 118 aa, Artificial Sequence
  Chemically Synthesized
QVQLQESGGGLVQAGGSLRLSCAASGSIFSYRAMGWYRQAPGKERELVATITAGASTYYADSVKGRFTISRDNAKNTVYLQMNSLKPEDTAVYYCAADSPYYTYLAYWGQGTQVTVSS

SEQ ID NO: 23569 - protein, 118 aa, Artificial Sequence
  Chemically Synthesized
QVQLQESGGGLVQAGGSLRLSCAASGNISSSSYMGWYRQAPGKEREFVAAIDRGSITNYADSVKGRFTISRDNAKNTVYLQMNSLKPEDTAVYYCAAVTPYYPYHYYWGQGTQVTVSS

SEQ ID NO: 23570 - protein, 118 aa, Artificial Sequence
  Chemically Synthesized
QVQLQESGGGLVQAGGSLRLSCAASGTIFTWRSMGWYRQAPGKEREFVAGITRGGSTNYADSVKGRFTISRDNAKNTVYLQMNSLKPEDTAVYYCAAIFNDTHFHYYWGQGTQVTVSS

SEQ ID NO: 23571 - protein, 118 aa, Artificial Sequence
  Chemically Synthesized
QVQLQESGGGLVQAGGSLRLSCAASGSISDWRYMGWYRQAPGKEREFVAAINGGGITNYADSVKGRFTISRDNAKNTVYLQMNSLKPEDTAVYYCAAFTRRDRWLYYWGQGTQVTVSS

SEQ ID NO: 23572 - protein, 118 aa, Artificial Sequence
  Chemically Synthesized
QVQLQESGGGLVQAGGSLRLSCAASGTIFYYAYMGWYRQAPGKERELVASIGSGTTTYYADSVKGRFTISRDNAKNTVYLQMNSLKPEDTAVYYCAAGGSAGDQHVYWGQGTQVTVSS

SEQ ID NO: 23573 - protein, 126 aa, Artificial Sequence
  Chemically Synthesized
QVQLQESGGGLVQAGGSLRLSCAASGTIFANRYMGWYRQAPGKERELVAGIGSGGTTNYADSVKGRFTISRDNAKNTVYLQMNSLKPEDTAVYYCAVVSYSLDKRIVTSDLSYWYWGQGTQVTVSS

SEQ ID NO: 23574 - protein, 118 aa, Artificial Sequence
  Chemically Synthesized
QVQLQESGGGLVQAGGSLRLSCAASGTISDYLYMGWYRQAPGKERELVASIAEGSITYYADSVKGRFTISRDNAKNTVYLQMNSLKPEDTAVYYCAARTYDKGPLAYWGQGTQVTVSS

SEQ ID NO: 23575 - protein, 122 aa, Artificial Sequence
  Chemically Synthesized
QVQLQESGGGLVQAGGSLRLSCAASGSISYDIVMGWYRQAPGKEREFVAAIGSGSSTNYADSVKGRFTISRDNAKNTVYLQMNSLKPEDTAVYYCAALSIGTYRERDYLYYWGQGTQVTVSS

SEQ ID NO: 23576 - protein, 118 aa, Artificial Sequence
  Chemically Synthesized
QVQLQESGGGLVQAGGSLRLSCAASGNISRVSAMGWYRQAPGKEREFVAGISYGSNTYYADSVKGRFTISRDNAKNTVYLQMNSLKPEDTAVYYCAALSNHGRYHYYWGQGTQVTVSS

SEQ ID NO: 23577 - protein, 122 aa, Artificial Sequence
  Chemically Synthesized
QVQLQESGGGLVQAGGSLRLSCAASGSISARSVMGWYRQAPGKERELVAAIDAGAITNYADSVKGRFTISRDNAKNTVYLQMNSLKPEDTAVYYCAALQRATNSYYGYHYYWGQGTQVTVSS

SEQ ID NO: 23578 - protein, 118 aa, Artificial Sequence
  Chemically Synthesized
QVQLQESGGGLVQAGGSLRLSCAASGTISGTGRMGWYRQAPGKEREFVAGIGTGASTNYADSVKGRFTISRDNAKNTVYLQMNSLKPEDTAVYYCAALLQYRGYHYYWGQGTQVTVSS

SEQ ID NO: 23579 - protein, 122 aa, Artificial Sequence
  Chemically Synthesized
QVQLQESGGGLVQAGGSLRLSCAASGYISVFYFMGWYRQAPGKEREFVAAIDFGTSTNYADSVKGRFTISRDNAKNTVYLQMNSLKPEDTAVYYCAALTRYDAYPRYNHYYWGQGTQVTVSS

SEQ ID NO: 23580 - protein, 118 aa, Artificial Sequence
  Chemically Synthesized
QVQLQESGGGLVQAGGSLRLSCAASGSISGQLDMGWYRQAPGKERELVASISKGANTNYADSVKGRFTISRDNAKNTVYLQMNSLKPEDTAVYYCAARTEVVDDHAYWGQGTQVTVSS

SEQ ID NO: 23581 - protein, 117 aa, Artificial Sequence
  Chemically Synthesized
QVQLQESGGGLVQAGGSLRLSCAASGSIFGRASMGWYRQAPGKEREFVAGIARGTTNYADSVKGRFTISRDNAKNTVYLQMNSLKPEDTAVYYCAALTTYRFYHYYWGQGTQVTVSS

SEQ ID NO: 23582 - protein, 118 aa, Artificial Sequence
  Chemically Synthesized
QVQLQESGGGLVQAGGSLRLSCAASGYISDYADMGWYRQAPGKEREFVATIAVGAITNYADSVKGRFTISRDNAKNTVYLQMNSLKPEDTAVYYCAAYWRTHRHHYYWGQGTQVTVSS

SEQ ID NO: 23583 - protein, 113 aa, Artificial Sequence
  Chemically Synthesized
QVQLQESGGGLVQAGGSLRLSCAASGTIFDYPAMGWYRQAPGKEREFVATITYGGTTYADSVKGRFTISRDNAKNTVYLQMNSLKPEDTAVYYCADIRILDYWGQGTQVTVSS

SEQ ID NO: 23584 - protein, 122 aa, Artificial Sequence
  Chemically Synthesized
QVQLQESGGGLVQAGGSLRLSCAASGSIFYRRTMGWYRQAPGKEREFVATINRGSITYYADSVKGRFTISRDNAKNTVYLQMNSLKPEDTAVYYCAAARNYWYHYNTTFDYWGQGTQVTVSS

SEQ ID NO: 23585 - protein, 118 aa, Artificial Sequence
  Chemically Synthesized
QVQLQESGGGLVQAGGSLRLSCAASGYIFPGFYMGWYRQAPGKEREFVAGINFGGNTNYADSVKGRFTISRDNAKNTVYLQMNSLKPEDTAVYYCAVDSYSQERLYYWGQGTQVTVSS

SEQ ID NO: 23586 - protein, 122 aa, Artificial Sequence
  Chemically Synthesized
QVQLQESGGGLVQAGGSLRLSCAASGNIFVGDVMGWYRQAPGKEREFVAGITSGGITNYADSVKGRFTISRDNAKNTVYLQMNSLKPEDTAVYYCAAITVNRSGVRRVFAYWGQGTQVTVSS

SEQ ID NO: 23587 - protein, 118 aa, Artificial Sequence
  Chemically Synthesized
QVQLQESGGGLVQAGGSLRLSCAASGNIFPKRGMGWYRQAPGKEREFVAAIGYGGTTYYADSVKGRFTISRDNAKNTVYLQMNSLKPEDTAVYYCAAKLGRWYAFGYWGQGTQVTVSS

SEQ ID NO: 23588 - protein, 122 aa, Artificial Sequence
  Chemically Synthesized
QVQLQESGGGLVQAGGSLRLSCAASGSIFRRWRMGWYRQAPGKERELVAGISYGATTNYADSVKGRFTISRDNAKNTVYLQMNSLKPEDTAVYYCAVYRKRILWSRDDYVYWGQGTQVTVSS

SEQ ID NO: 23589 - protein, 122 aa, Artificial Sequence
  Chemically Synthesized
QVQLQESGGGLVQAGGSLRLSCAASGNISTTAVMGWYRQAPGKEREFVAAIGYGGTTNYADSVKGRFTISRDNAKNTVYLQMNSLKPEDTAVYYCAVVIHDNRAGTSWLYYWGQGTQVTVSS

SEQ ID NO: 23590 - protein, 118 aa, Artificial Sequence
  Chemically Synthesized
QVQLQESGGGLVQAGGSLRLSCAASGTISPSWEMGWYRQAPGKERELVASISRGGITYYADSVKGRFTISRDNAKNTVYLQMNSLKPEDTAVYYCAVANDIFYLLRYWGQGTQVTVSS

SEQ ID NO: 23591 - protein, 118 aa, Artificial Sequence
  Chemically Synthesized
QVQLQESGGGLVQAGGSLRLSCAASGTISGYTRMGWYRQAPGKERELVATISYGAITYYADSVKGRFTISRDNAKNTVYLQMNSLKPEDTAVYYCAAFYRSAKGLGYWGQGTQVTVSS

SEQ ID NO: 23592 - protein, 122 aa, Artificial Sequence
  Chemically Synthesized
QVQLQESGGGLVQAGGSLRLSCAASGNISSTPYMGWYRQAPGKERELVAGIGSGTNTYYADSVKGRFTISRDNAKNTVYLQMNSLKPEDTAVYYCAAYNLETLYTGDTHRYWGQGTQVTVSS

SEQ ID NO: 23593 - protein, 126 aa, Artificial Sequence
  Chemically Synthesized
QVQLQESGGGLVQAGGSLRLSCAASGNISQLYSMGWYRQAPGKERELVASIDYGGSTYYADSVKGRFTISRDNAKNTVYLQMNSLKPEDTAVYYCAAAAYWAGLHDAHWAYAHDYWGQGTQVTVSS

SEQ ID NO: 23594 - protein, 118 aa, Artificial Sequence
  Chemically Synthesized
QVQLQESGGGLVQAGGSLRLSCAASGSIFRATVMGWYRQAPGKEREFVASIDVGASTNYADSVKGRFTISRDNAKNTVYLQMNSLKPEDTAVYYCAVTYSNSGGFLYWGQGTQVTVSS

SEQ ID NO: 23595 - protein, 118 aa, Artificial Sequence
  Chemically Synthesized
QVQLQESGGGLVQAGGSLRLSCAASGSISENSYMGWYRQAPGKEREFVASITHGASTNYADSVKGRFTISRDNAKNTVYLQMNSLKPEDTAVYYCAADRYTGTRFYYWGQGTQVTVSS

SEQ ID NO: 23596 - protein, 114 aa, Artificial Sequence
  Chemically Synthesized
QVQLQESGGGLVQAGGSLRLSCAASGSIFYVYYMGWYRQAPGKERELVASIGVGAITYYADSVKGRFTISRDNAKNTVYLQMNSLKPEDTAVYYCAVTRLTFYWGQGTQVTVSS

SEQ ID NO: 23597 - protein, 122 aa, Artificial Sequence
  Chemically Synthesized
QVQLQESGGGLVQAGGSLRLSCAASGSIFRPYLMGWYRQAPGKERELVASIDDGTNTYYADSVKGRFTISRDNAKNTVYLQMNSLKPEDTAVYYCAASRTRYARYTDYHAYWGQGTQVTVSS

SEQ ID NO: 23598 - protein, 121 aa, Artificial Sequence
  Chemically Synthesized
QVQLQESGGGLVQAGGSLRLSCAASGNISRPYYMGWYRQAPGKERELVATITFGTTTYYADSVKGRFTISRDNAKNTVYLQMNSLKPEDTAVYYCAALDDIPRNLSTTFYWGQGTQVTVSS

SEQ ID NO: 23599 - protein, 117 aa, Artificial Sequence
  Chemically Synthesized
QVQLQESGGGLVQAGGSLRLSCAASGTISSGDSMGWYRQAPGKERELVATINSVVVPYADSVKGRFTISRDNAKNTVYLQMNSLKPEDTAVYYCAAYAYGVYTHPYWGQGTQVTVSS

SEQ ID NO: 23600 - protein, 118 aa, Artificial Sequence
  Chemically Synthesized
QVQLQESGGGLVQAGGSLRLSCAASGTIFVSDLMGWYRQAPGKEREFVASIAFGASTNYADSVKGRFTISRDNAKNTVYLQMNSLKPEDTAVYYCAVGERRRGRYGYWGQGTQVTVSS

SEQ ID NO: 23601 - protein, 117 aa, Artificial Sequence
  Chemically Synthesized
QVQLQESGGGLVQAGGSLRLSCAASGNIFSFYYMGWYRQAPGKERELVASIDYGATPYADSVKGRFTISRDNAKNTVYLQMNSLKPEDTAVYYCAAADTQYFQLTYWGQGTQVTVSS

SEQ ID NO: 23602 - protein, 122 aa, Artificial Sequence
  Chemically Synthesized
QVQLQESGGGLVQAGGSLRLSCAASGTISGYDDMGWYRQAPGKERELVAAITYGASTYYADSVKGRFTISRDNAKNTVYLQMNSLKPEDTAVYYCAVDNSVGVDTYDGHDYWGQGTQVTVSS

SEQ ID NO: 23603 - protein, 118 aa, Artificial Sequence
  Chemically Synthesized
QVQLQESGGGLVQAGGSLRLSCAASGSISDPRYMGWYRQAPGKEREFVASIAYGSSTNYADSVKGRFTISRDNAKNTVYLQMNSLKPEDTAVYYCAAYDPLTSSYRYWGQGTQVTVSS

SEQ ID NO: 23604 - protein, 122 aa, Artificial Sequence
  Chemically Synthesized
QVQLQESGGGLVQAGGSLRLSCAASGYISSYDYMGWYRQAPGKEREFVATINDGTTTNYADSVKGRFTISRDNAKNTVYLQMNSLKPEDTAVYYCAVLTIGIYDAVAALDYWGQGTQVTVSS

SEQ ID NO: 23605 - protein, 118 aa, Artificial Sequence
  Chemically Synthesized
QVQLQESGGGLVQAGGSLRLSCAASGTIFDNRYMGWYRQAPGKERELVAAITYGATTNYADSVKGRFTISRDNAKNTVYLQMNSLKPEDTAVYYCAVLRYRNSFHLYWGQGTQVTVSS

SEQ ID NO: 23606 - protein, 122 aa, Artificial Sequence
  Chemically Synthesized
QVQLQESGGGLVQAGGSLRLSCAASGSIFLFNDMGWYRQAPGKERELVASISNGSNTYADSVKGRFTISRDNAKNTVYLQMNSLKPEDTAVYYCAATVYQDRPYGQWEFHYWGQGTQVTVSS

SEQ ID NO: 23607 - protein, 117 aa, Artificial Sequence
  Chemically Synthesized
QVQLQESGGGLVQAGGSLRLSCAASGTIFNAYSMGWYRQAPGKERELVASIASVVLPYADSVKGRFTISRDNAKNTVYLQMNSLKPEDTAVYYCAVARTGYYDHFYWGQGTQVTVSS

SEQ ID NO: 23608 - protein, 117 aa, Artificial Sequence
  Chemically Synthesized
QVQLQESGGGLVQAGGSLRLSCAASGYISGSMMGWYRQAPGKERELVATIGPGGTTNYADSVKGRFTISRDNAKNTVYLQMNSLKPEDTAVYYCAVWTFRAEWHDYWGQGTQVTVSS

SEQ ID NO: 23609 - protein, 122 aa, Artificial Sequence
  Chemically Synthesized
QVQLQESGGGLVQAGGSLRLSCAASGTISSRYVMGWYRQAPGKEREFVAGITVGSNTNYADSVKGRFTISRDNAKNTVYLQMNSLKPEDTAVYYCAAYRLTAVYGWYRHSYWGQGTQVTVSS

SEQ ID NO: 23610 - protein, 122 aa, Artificial Sequence
  Chemically Synthesized
QVQLQESGGGLVQAGGSLRLSCAASGNIFSTDGMGWYRQAPGKERELVAAISRGGSTYYADSVKGRFTISRDNAKNTVYLQMNSLKPEDTAVYYCAVRYDDELTYGSGFSYWGQGTQVTVSS

SEQ ID NO: 23611 - protein, 118 aa, Artificial Sequence
  Chemically Synthesized
QVQLQESGGGLVQAGGSLRLSCAASGYISTYDDMGWYRQAPGKEREFVATITDGANTYYADSVKGRFTISRDNAKNTVYLQMNSLKPEDTAVYYCAADLQPANPFQYWGQGTQVTVSS

SEQ ID NO: 23612 - protein, 126 aa, Artificial Sequence
  Chemically Synthesized
QVQLQESGGGLVQAGGSLRLSCAASGNIFRVTYMGWYRQAPGKERELVASIGPGGITYYADSVKGRFTISRDNAKNTVYLQMNSLKPEDTAVYYCAVGWYSDATIYHVANLWHLYWGQGTQVTVSS

SEQ ID NO: 23613 - protein, 122 aa, Artificial Sequence
  Chemically Synthesized
QVQLQESGGGLVQAGGSLRLSCAASGSIFSRIAMGWYRQAPGKERELVATITYGSTTYYADSVKGRFTISRDNAKNTVYLQMNSLKPEDTAVYYCAAYQRYYSNKDAPHTYWGQGTQVTVSS

SEQ ID NO: 23614 - protein, 122 aa, Artificial Sequence
  Chemically Synthesized
QVQLQESGGGLVQAGGSLRLSCAASGSISDRDDMGWYRQAPGKEREFVASIASGSSTYYADSVKGRFTISRDNAKNTVYLQMNSLKPEDTAVYYCAVDTVPQLYITEGYYYWGQGTQVTVSS

SEQ ID NO: 23615 - protein, 118 aa, Artificial Sequence
  Chemically Synthesized
QVQLQESGGGLVQAGGSLRLSCAASGSISRRGYMGWYRQAPGKEREFVAAIDYGSTTYYADSVKGRFTISRDNAKNTVYLQMNSLKPEDTAVYYCAARLKRYLNHRYWGQGTQVTVSS

SEQ ID NO: 23616 - protein, 121 aa, Artificial Sequence
  Chemically Synthesized
QVQLQESGGGLVQAGGSLRLSCAASGNISVGLGMGWYRQAPGKEREFVAGIDRGGSTYYADSVKGRFTISRDNAKNTVYLQMNSLKPEDTAVYYCAAQQGADSLLTLTMYWGQGTQVTVSS

SEQ ID NO: 23617 - protein, 118 aa, Artificial Sequence
  Chemically Synthesized
QVQLQESGGGLVQAGGSLRLSCAASGTISGGAGMGWYRQAPGKEREFVAAIDKGANTYYADSVKGRFTISRDNAKNTVYLQMNSLKPEDTAVYYCAAWYHDGYGYGYWGQGTQVTVSS

SEQ ID NO: 23618 - protein, 109 aa, Artificial Sequence
  Chemically Synthesized
QVQLQESGGGLVQAGGSLRLSCAASGSISDRLGMGWYRQAPGKERELVATIGYGGTTNYADSVKGRFTISRDNAKNTVYLQMNSLKPEDTAVYYCAVYWGQGTQVTVSS

SEQ ID NO: 23619 - protein, 117 aa, Artificial Sequence
  Chemically Synthesized
QVQLQESGGGLVQAGGSLRLSCAASGTIFSRTMGWYRQAPGKERELVAAITYGSNTNYADSVKGRFTISRDNAKNTVYLQMNSLKPEDTAVYYCAAHVRYYAAFDYWGQGTQVTVSS

SEQ ID NO: 23620 - protein, 126 aa, Artificial Sequence
  Chemically Synthesized
QVQLQESGGGLVQAGGSLRLSCAASGNISFVYRMGWYRQAPGKEREFVATIGTGGNTYYADSVKGRFTISRDNAKNTVYLQMNSLKPEDTAVYYCAVDYAGLKPDQYWYLYDLVYWGQGTQVTVSS

SEQ ID NO: 23621 - protein, 118 aa, Artificial Sequence
  Chemically Synthesized
QVQLQESGGGLVQAGGSLRLSCAASGSIFRGAVMGWYRQAPGKEREFVAGIAYGGITYYADSVKGRFTISRDNAKNTVYLQMNSLKPEDTAVYYCAAGGPVHTGHYYWGQGTQVTVSS

SEQ ID NO: 23622 - protein, 118 aa, Artificial Sequence
  Chemically Synthesized
QVQLQESGGGLVQAGGSLRLSCAASGTISTGGWMGWYRQAPGKEREFVAAITYGGNTYYADSVKGRFTISRDNAKNTVYLQMNSLKPEDTAVYYCAAYDLTRTRLPYWGQGTQVTVSS

SEQ ID NO: 23623 - protein, 118 aa, Artificial Sequence
  Chemically Synthesized
QVQLQESGGGLVQAGGSLRLSCAASGSISTYFGMGWYRQAPGKERELVAAIGGGGITNYADSVKGRFTISRDNAKNTVYLQMNSLKPEDTAVYYCAVRTVTYFVHLYWGQGTQVTVSS

SEQ ID NO: 23624 - protein, 124 aa, Artificial Sequence
  Chemically Synthesized
QVQLQESGGGLVQAGGSLRLSCAASGTIFDEPDMGWYRQAPGKERELVAGITRVLLPYADSVKGRFTISRDNAKNTVYLQMNSLKPEDTAVYYCAAWLGGLVTTVTRRFTCIYWGQGTQVTVSS

SEQ ID NO: 23625 - protein, 126 aa, Artificial Sequence
  Chemically Synthesized
QVQLQESGGGLVQAGGSLRLSCAASGTISSKQAMGWYRQAPGKERELVASIDPGGTTYYADSVKGRFTISRDNAKNTVYLQMNSLKPEDTAVYYCAAQFNLHRNRDGTWRYTFGYWGQGTQVTVSS

SEQ ID NO: 23626 - protein, 121 aa, Artificial Sequence
  Chemically Synthesized
QVQLQESGGGLVQAGGSLRLSCAASGTISPRYRMGWYRQAPGKEREFATINAGGNTNYADSVKGRFTISRDNAKNTVYLQMNSLKPEDTAVYYCAADYASDTYRRDAYQYWGQGTQVTVSS

SEQ ID NO: 23627 - protein, 126 aa, Artificial Sequence
  Chemically Synthesized
QVQLQESGGGLVQAGGSLRLSCAASGNIFEYTAMGWYRQAPGKEREFVAAISHGANTNYADSVKGRFTISRDNAKNTVYLQMNSLKPEDTAVYYCAAGRQYYPYLYSSSGSVFDYWGQGTQVTVSS

SEQ ID NO: 23628 - protein, 117 aa, Artificial Sequence
  Chemically Synthesized
QVQLQESGGGLVQAGGSLRLSCAASGSISYYRMGWYRQAPGKERELVAAINWGSSTYYADSVKGRFTISRDNAKNTVYLQMNSLKPEDTAVYYCAARWLVSWQYDYWGQGTQVTVSS

SEQ ID NO: 23629 - protein, 118 aa, Artificial Sequence
  Chemically Synthesized
QVQLQESGGGLVQAGGSLRLSCAASGTISNSPHMGWYRQAPGKEREFVAGISDGGSTYYADSVKGRFTISRDNAKNTVYLQMNSLKPEDTAVYYCAAYVQGPYDFGYWGQGTQVTVSS

SEQ ID NO: 23630 - protein, 118 aa, Artificial Sequence
  Chemically Synthesized
QVQLQESGGGLVQAGGSLRLSCAASGTIFHQYIMGWYRQAPGKEREFVAGITVGSSTYYADSVKGRFTISRDNAKNTVYLQMNSLKPEDTAVYYCAVHDRGRNAHYYWGQGTQVTVSS

SEQ ID NO: 23631 - protein, 126 aa, Artificial Sequence
  Chemically Synthesized
QVQLQESGGGLVQAGGSLRLSCAASGTISLGLVMGWYRQAPGKEREFVATINDGGTTNYADSVKGRFTISRDNAKNTVYLQMNSLKPEDTAVYYCAALYLGSTDGWTDDRFRFWYWGQGTQVTVSS

SEQ ID NO: 23632 - protein, 117 aa, Artificial Sequence
  Chemically Synthesized
QVQLQESGGGLVQAGGSLRLSCAASGLFLSTLMGWYRQAPGKEREFVAAIASGGNTNYADSVKGRFTISRDNAKNTVYLQMNSLKPEDTAVYYCAAGRYITDGLDYWGQGTQVTVSS

SEQ ID NO: 23633 - protein, 126 aa, Artificial Sequence
  Chemically Synthesized
QVQLQESGGGLVQAGGSLRLSCAASGSISPRVYMGWYRQAPGKEREFVAAISGGGTTNYADSVKGRFTISRDNAKNTVYLQMNSLKPEDTAVYYCAVGYSYAFYWVHYDVYVHGYWGQGTQVTVSS

SEQ ID NO: 23634 - protein, 122 aa, Artificial Sequence
  Chemically Synthesized
QVQLQESGGGLVQAGGSLRLSCAASGYISDVDRMGWYRQAPGKEREFVATIAEGAITYYADSVKGRFTISRDNAKNTVYLQMNSLKPEDTAVYYCAANEPITTAYDDYHNYWGQGTQVTVSS

SEQ ID NO: 23635 - protein, 122 aa, Artificial Sequence
  Chemically Synthesized
QVQLQESGGGLVQAGGSLRLSCAASGSIFAVPHMGWYRQAPGKEREFVAGIGGGGTTYYADSVKGRFTISRDNAKNTVYLQMNSLKPEDTAVYYCAATGAWRPGRLYRYSYWGQGTQVTVSS

SEQ ID NO: 23636 - protein, 121 aa, Artificial Sequence
  Chemically Synthesized
QVQLQESGGGLVQAGGSLRLSCAASGTISRDSMGWYRQAPGKEREFVAGISDGGNTYYADSVKGRFTISRDNAKNTVYLQMNSLKPEDTAVYYCAADPDYDFWDGDGHPYWGQGTQVTVSS

SEQ ID NO: 23637 - protein, 121 aa, Artificial Sequence
  Chemically Synthesized
QVQLQESGGGLVQAGGSLRLSCAASGSISYEGYMGWYRQAPGKEREFVATIATGSSTNYADSVKGRFTISRDNAKNTVYLQMNSLKPEDTAVYYCAVHNSSTLLMTNGMYWGQGTQVTVSS

SEQ ID NO: 23638 - protein, 117 aa, Artificial Sequence
  Chemically Synthesized
QVQLQESGGGLVQAGGSLRLSCAASGNIFRWVYMGWYRQAPGKEREFVAAITRGSTTNYADSVKGRFTISRDNAKNTVYLQMNSLKPEDTAVYYCAVYLRSWTTIYWGQGTQVTVSS

SEQ ID NO: 23639 - protein, 118 aa, Artificial Sequence
  Chemically Synthesized
QVQLQESGGGLVQAGGSLRLSCAASGYISRDYYMGWYRQAPGKEREFVAGIDYGSSTYYADSVKGRFTISRDNAKNTVYLQMNSLKPEDTAVYYCAVGNHGVYYLAYWGQGTQVTVSS

SEQ ID NO: 23640 - protein, 126 aa, Artificial Sequence
  Chemically Synthesized
QVQLQESGGGLVQAGGSLRLSCAASGNIFYHTTMGWYRQAPGKEREFVAAISHGTNTYYADSVKGRFTISRDNAKNTVYLQMNSLKPEDTAVYYCAVLGTALVYLVTAGNDPFYYWGQGTQVTVSS

SEQ ID NO: 23641 - protein, 115 aa, Artificial Sequence
  Chemically Synthesized
QVQLQESGGGLVQAGGSLRLSCAASGTIFYVRAMGWYRQAPGKERELVAAIAYGGTTNYADSVKGRFTISRDNAKNTVYLQMNSLKPEDTAVYYCAVRRKYHSYWGQGTQVTVSS

SEQ ID NO: 23642 - protein, 118 aa, Artificial Sequence
  Chemically Synthesized
QVQLQESGGGLVQAGGSLRLSCAASGNISDRDAMGWYRQAPGKEREFVATITVGGTTYYADSVKGRFTISRDNAKNTVYLQMNSLKPEDTAVYYCAVTSDEGDIFRYWGQGTQVTVSS

SEQ ID NO: 23643 - protein, 118 aa, Artificial Sequence
  Chemically Synthesized
QVQLQESGGGLVQAGGSLRLSCAASGNIFDNLRMGWYRQAPGKEREFVAGISTGAITYYADSVKGRFTISRDNAKNTVYLQMNSLKPEDTAVYYCAVVTINYIYLDYWGQGTQVTVSS

SEQ ID NO: 23644 - protein, 122 aa, Artificial Sequence
  Chemically Synthesized
QVQLQESGGGLVQAGGSLRLSCAASGTISSGVIMGWYRQAPGKEREFVATINYGAITYYADSVKGRFTISRDNAKNTVYLQMNSLKPEDTAVYYCAVPETDHLNLLDPHDYWGQGTQVTVSS

SEQ ID NO: 23645 - protein, 118 aa, Artificial Sequence
  Chemically Synthesized
QVQLQESGGGLVQAGGSLRLSCAASGNISAYYPMGWYRQAPGKERELVAAITLGTNTNYADSVKGRFTISRDNAKNTVYLQMNSLKPEDTAVYYCAAYPQDITDHGYWGQGTQVTVSS

SEQ ID NO: 23646 - protein, 118 aa, Artificial Sequence
  Chemically Synthesized
QVQLQESGGGLVQAGGSLRLSCAASGNISDLLLMGWYRQAPGKEREFVAAIALGATTYYADSVKGRFTISRDNAKNTVYLQMNSLKPEDTAVYYCAVDDKNRRFFDYWGQGTQVTVSS

SEQ ID NO: 23647 - protein, 122 aa, Artificial Sequence
  Chemically Synthesized
QVQLQESGGGLVQAGGSLRLSCAASGTISISYAMGWYRQAPGKERELVAGITNGGTTNYADSVKGRFTISRDNAKNTVYLQMNSLKPEDTAVYYCAARLFYYYRRGRSYQYWGQGTQVTVSS

SEQ ID NO: 23648 - protein, 126 aa, Artificial Sequence
  Chemically Synthesized
QVQLQESGGGLVQAGGSLRLSCAASGNIFVDDYMGWYRQAPGKEREFVAGIAPGANTYYADSVKGRFTISRDNAKNTVYLQMNSLKPEDTAVYYCAAHQYDDPDPFYINGQGYYYWGQGTQVTVSS

SEQ ID NO: 23649 - protein, 118 aa, Artificial Sequence
  Chemically Synthesized
QVQLQESGGGLVQAGGSLRLSCAASGSISSYAYMGWYRQAPGKEREFVAAIDAGANTYYADSVKGRFTISRDNAKNTVYLQMNSLKPEDTAVYYCAALRYVTTWLSYWGQGTQVTVSS

SEQ ID NO: 23650 - protein, 122 aa, Artificial Sequence
  Chemically Synthesized
QVQLQESGGGLVQAGGSLRLSCAASGSIFRRGVMGWYRQAPGKEREFVAGIAHGGSTNYADSVKGRFTISRDNAKNTVYLQMNSLKPEDTAVYYCAAFIPYYDETRYSHYYWGQGTQVTVSS

SEQ ID NO: 23651 - protein, 118 aa, Artificial Sequence
  Chemically Synthesized
QVQLQESGGGLVQAGGSLRLSCAASGTISDYAYMGWYRQAPGKERELVATIDYGTTTYYADSVKGRFTISRDNAKNTVYLQMNSLKPEDTAVYYCAVSVNYYVNYYYWGQGTQVTVSS

SEQ ID NO: 23652 - protein, 126 aa, Artificial Sequence
  Chemically Synthesized
QVQLQESGGGLVQAGGSLRLSCAASGSIFSPLDMGWYRQAPGKEREFVAGIGRGTSTNYADSVKGRFTISRDNAKNTVYLQMNSLKPEDTAVYYCAALYNIPYDVDDYKPRYFGYWGQGTQVTVSS

SEQ ID NO: 23653 - protein, 121 aa, Artificial Sequence
  Chemically Synthesized
QVQLQESGGGLVQAGGSLRLSCAASGTISHYVAMGWYRQAPGKEREFVAAISGGTTNYADSVKGRFTISRDNAKNTVYLQMNSLKPEDTAVYYCAVLRRDHPGGIQYYYYWGQGTQVTVSS

SEQ ID NO: 23654 - protein, 122 aa, Artificial Sequence
  Chemically Synthesized
QVQLQESGGGLVQAGGSLRLSCAASGTISYYTYMGWYRQAPGKERELVASIGTGANTNYADSVKGRFTISRDNAKNTVYLQMNSLKPEDTAVYYCAAFIQFQYWKYGGHGYWGQGTQVTVSS

SEQ ID NO: 23655 - protein, 126 aa, Artificial Sequence
  Chemically Synthesized
QVQLQESGGGLVQAGGSLRLSCAASGNISYLSPMGWYRQAPGKERELVAGIGTGTTTYYADSVKGRFTISRDNAKNTVYLQMNSLKPEDTAVYYCAVAIDGGQYDGEWGAYDHWYWGQGTQVTVSS

SEQ ID NO: 23656 - protein, 118 aa, Artificial Sequence
  Chemically Synthesized
QVQLQESGGGLVQAGGSLRLSCAASGTISSYGDMGWYRQAPGKEREFVASITDGASTYYADSVKGRFTISRDNAKNTVYLQMNSLKPEDTAVYYCAVHAPYRLPYQYWGQGTQVTVSS

SEQ ID NO: 23657 - protein, 122 aa, Artificial Sequence
  Chemically Synthesized
QVQLQESGGGLVQAGGSLRLSCAASGYISLYTQMGWYRQAPGKEREFVAAISTGTITNYADSVKGRFTISRDNAKNTVYLQMNSLKPEDTAVYYCAALTGGGRRGQTVHYYWGQGTQVTVSS

SEQ ID NO: 23658 - protein, 122 aa, Artificial Sequence
  Chemically Synthesized
QVQLQESGGGLVQAGGSLRLSCAASGTISSYNSMGWYRQAPGKEREFVATITKGGTTNYADSVKGRFTISRDNAKNTVYLQMNSLKPEDTAVYYCAALAQGYYDDYQDYDYWGQGTQVTVSS

SEQ ID NO: 23659 - protein, 118 aa, Artificial Sequence
  Chemically Synthesized
QVQLQESGGGLVQAGGSLRLSCAASGSISGYGSMGWYRQAPGKEREFVASIAVGTITYYADSVKGRFTISRDNAKNTVYLQMNSLKPEDTAVYYCAVIRQDSDVLFYWGQGTQVTVSS

SEQ ID NO: 23660 - protein, 117 aa, Artificial Sequence
  Chemically Synthesized
QVQLQESGGGLVQAGGSLRLSCAASGTIFTLVMGWYRQAPGKEREFVAGISYGSSTNYADSVKGRFTISRDNAKNTVYLQMNSLKPEDTAVYYCAAISYEDVEHFYWGQGTQVTVSS

SEQ ID NO: 23661 - protein, 126 aa, Artificial Sequence
  Chemically Synthesized
QVQLQESGGGLVQAGGSLRLSCAASGTIFFGYYMGWYRQAPGKEREFVAAINVGSNTNYADSVKGRFTISRDNAKNTVYLQMNSLKPEDTAVYYCAVTYDSDVDAVWYTYPYHVYWGQGTQVTVSS

SEQ ID NO: 23662 - protein, 122 aa, Artificial Sequence
  Chemically Synthesized
QVQLQESGGGLVQAGGSLRLSCAASGTIFYLTYMGWYRQAPGKERELVAAINDGGNTNYADSVKGRFTISRDNAKNTVYLQMNSLKPEDTAVYYCAAVYKDAERSGDYFGYWGQGTQVTVSS

SEQ ID NO: 23663 - protein, 120 aa, Artificial Sequence
  Chemically Synthesized
QVQLQESGGGLVQAGGSLRLSCAASGSIFPSSMGWYRQAPGKERELVATIDRGGSTYYADSVKGRFTISRDNAKNTVYLQMNSLKPEDTAVYYCAAGSQWYYWVLVLWYWGQGTQVTVSS

SEQ ID NO: 23664 - protein, 122 aa, Artificial Sequence
  Chemically Synthesized
QVQLQESGGGLVQAGGSLRLSCAASGTIFASDDMGWYRQAPGKERELVAAIDPGGSTYYADSVKGRFTISRDNAKNTVYLQMNSLKPEDTAVYYCAVDLWRYYQYRTSYGYWGQGTQVTVSS

SEQ ID NO: 23665 - protein, 118 aa, Artificial Sequence
  Chemically Synthesized
QVQLQESGGGLVQAGGSLRLSCAASGSIFVGLAMGWYRQAPGKEREFVATIDRGGTTNYADSVKGRFTISRDNAKNTVYLQMNSLKPEDTAVYYCAVVYYRSRYYSYWGQGTQVTVSS

SEQ ID NO: 23666 - protein, 122 aa, Artificial Sequence
  Chemically Synthesized
QVQLQESGGGLVQAGGSLRLSCAASGNISVVQGMGWYRQAPGKEREFVAGIDTGTNTYYADSVKGRFTISRDNAKNTVYLQMNSLKPEDTAVYYCAAIYYDADQSVRYHYYWGQGTQVTVSS

SEQ ID NO: 23667 - protein, 122 aa, Artificial Sequence
  Chemically Synthesized
QVQLQESGGGLVQAGGSLRLSCAASGTIFEYITMGWYRQAPGKEREFVATISSGAITYYADSVKGRFTISRDNAKNTVYLQMNSLKPEDTAVYYCAAYAYPRWDDTPEHQYWGQGTQVTVSS

SEQ ID NO: 23668 - protein, 118 aa, Artificial Sequence
  Chemically Synthesized
QVQLQESGGGLVQAGGSLRLSCAASGNIFPSPDMGWYRQAPGKERELVASISVGSITNYADSVKGRFTISRDNAKNTVYLQMNSLKPEDTAVYYCAVTADHYKGHYYWGQGTQVTVSS

SEQ ID NO: 23669 - protein, 115 aa, Artificial Sequence
  Chemically Synthesized
QVQLQESGGGLVQAGGSLRLSCAASGTIFRNYHMGWYRQAPGKERELVAGINVGAITYYADSVKGRFTISRDNAKNTVYLQMNSLKPEDTAVYYCAVYDVIYDYWGQGTQVTVSS

SEQ ID NO: 23670 - protein, 118 aa, Artificial Sequence
  Chemically Synthesized
QVQLQESGGGLVQAGGSLRLSCAASGNISATPGMGWYRQAPGKERELVASISRGATTYYADSVKGRFTISRDNAKNTVYLQMNSLKPEDTAVYYCAATKVDGSYHYYWGQGTQVTVSS

SEQ ID NO: 23671 - protein, 118 aa, Artificial Sequence
  Chemically Synthesized
QVQLQESGGGLVQAGGSLRLSCAASGTISGDWAMGWYRQAPGKEREFVAGIARGAITNYADSVKGRFTISRDNAKNTVYLQMNSLKPEDTAVYYCAATDRVYPGHYYWGQGTQVTVSS

SEQ ID NO: 23672 - protein, 117 aa, Artificial Sequence
  Chemically Synthesized
QVQLQESGGGLVQAGGSLRLSCAASGSIFPYLSMGWYRQAPGKERELVAGIDWGGNTYYADSVKGRFTISRDNAKNTVYLQMNSLKPEDTAVYYCAVDSPDTVVLYWGQGTQVTVSS

SEQ ID NO: 23673 - protein, 118 aa, Artificial Sequence
  Chemically Synthesized
QVQLQESGGGLVQAGGSLRLSCAASGNISQVQYMGWYRQAPGKERELVATIANGATTNYADSVKGRFTISRDNAKNTVYLQMNSLKPEDTAVYYCAVNDNQRIYHLYWGQGTQVTVSS

SEQ ID NO: 23674 - protein, 120 aa, Artificial Sequence
  Chemically Synthesized
QVQLQESGGGLVQAGGSLRLSCAASGTISDAGNMGWYRQAPGKERELVASIAAGYYLYADSVKGRFTISRDNAKNTVYLQMNSLKPEDTAVYYCAVDYRDDTEVVTNIYWGQGTQVTVSS

SEQ ID NO: 23675 - protein, 117 aa, Artificial Sequence
  Chemically Synthesized
QVQLQESGGGLVQAGGSLRLSCAASGYISWFDSMGWYRQAPGKEREFVAGIAYGTNTYYADSVKGRFTISRDNAKNTVYLQMNSLKPEDTAVYYCAVGAGAVTRIYWGQGTQVTVSS

SEQ ID NO: 23676 - protein, 118 aa, Artificial Sequence
  Chemically Synthesized
QVQLQESGGGLVQAGGSLRLSCAASGYISPRGVMGWYRQAPGKERELVATIAWGTNTNYADSVKGRFTISRDNAKNTVYLQMNSLKPEDTAVYYCAVTYKLTNEHGYWGQGTQVTVSS

SEQ ID NO: 23677 - protein, 118 aa, Artificial Sequence
  Chemically Synthesized
QVQLQESGGGLVQAGGSLRLSCAASGNISGYPGMGWYRQAPGKERELVATIGTGASTNYADSVKGRFTISRDNAKNTVYLQMNSLKPEDTAVYYCAASGGGRNLHGYWGQGTQVTVSS

SEQ ID NO: 23678 - protein, 118 aa, Artificial Sequence
  Chemically Synthesized
QVQLQESGGGLVQAGGSLRLSCAASGTISYTYTMGWYRQAPGKERELVAAIDGGGITNYADSVKGRFTISRDNAKNTVYLQMNSLKPEDTAVYYCAATYESADAHRYWGQGTQVTVSS

SEQ ID NO: 23679 - protein, 109 aa, Artificial Sequence
  Chemically Synthesized
QVQLQESGGGLVQAGGSLRLSCAASGNIFPEADMGWYRQAPGKEREFVATISYGGNTNYADSVKGRFTISRDNAKNTVYLQMNSLKPEDTAVYYCAVYWGQGTQVTVSS

SEQ ID NO: 23680 - protein, 126 aa, Artificial Sequence
  Chemically Synthesized
QVQLQESGGGLVQAGGSLRLSCAASGSISQYSHMGWYRQAPGKEREFVASITDGTSTYYADSVKGRFTISRDNAKNTVYLQMNSLKPEDTAVYYCAAADTPYPDTYSVQHRPLDYWGQGTQVTVSS

SEQ ID NO: 23681 - protein, 121 aa, Artificial Sequence
  Chemically Synthesized
QVQLQESGGGLVQAGGSLRLSCAASGNIFWPYSMGWYRQAPGKEREFVPVLVLVLLPYADSVKGRFTISRDNAKNTVYLQMNSLKPEDTAVYYCAVYAAYVEGGYDVHWYWGQGTQVTVSS

SEQ ID NO: 23682 - protein, 118 aa, Artificial Sequence
  Chemically Synthesized
QVQLQESGGGLVQAGGSLRLSCAASGSISVYYYMGWYRQAPGKERELVASIAVGATTNYADSVKGRFTISRDNAKNTVYLQMNSLKPEDTAVYYCAAVAAAYTYYDYWGQGTQVTVSS

SEQ ID NO: 23683 - protein, 122 aa, Artificial Sequence
  Chemically Synthesized
QVQLQESGGGLVQAGGSLRLSCAASGTISSTYYMGWYRQAPGKERELVATINWGAITYYADSVKGRFTISRDNAKNTVYLQMNSLKPEDTAVYYCAAYPYSAYRFDYPLYYWGQGTQVTVSS

SEQ ID NO: 23684 - protein, 118 aa, Artificial Sequence
  Chemically Synthesized
QVQLQESGGGLVQAGGSLRLSCAASGTIFRRSYMGWYRQAPGKERELVAAIGYGGNTYYADSVKGRFTISRDNAKNTVYLQMNSLKPEDTAVYYCAVRGWYGRGYYYWGQGTQVTVSS

SEQ ID NO: 23685 - protein, 118 aa, Artificial Sequence
  Chemically Synthesized
QVQLQESGGGLVQAGGSLRLSCAASGTISITDYMGWYRQAPGKERELVATITKGTSTNYADSVKGRFTISRDNAKNTVYLQMNSLKPEDTAVYYCAAIPDIYLYHWYWGQGTQVTVSS

SEQ ID NO: 23686 - protein, 118 aa, Artificial Sequence
  Chemically Synthesized
QVQLQESGGGLVQAGGSLRLSCAASGSISIYLVMGWYRQAPGKERELVATIGKGTSTNYADSVKGRFTISRDNAKNTVYLQMNSLKPEDTAVYYCAVRVDTGDYFGYWGQGTQVTVSS

SEQ ID NO: 23687 - protein, 122 aa, Artificial Sequence
  Chemically Synthesized
QVQLQESGGGLVQAGGSLRLSCAASGYISVYREMGWYRQAPGKERELVASISFGTSTNYADSVKGRFTISRDNAKNTVYLQMNSLKPEDTAVYYCAADLILAVYDQDVHGYWGQGTQVTVSS

SEQ ID NO: 23688 - protein, 122 aa, Artificial Sequence
  Chemically Synthesized
QVQLQESGGGLVQAGGSLRLSCAASGNISRGYDMGWYRQAPGKERELVATIGDGANTNYADSVKGRFTISRDNAKNTVYLQMNSLKPEDTAVYYCAVDDDGDATAYNSHLYWGQGTQVTVSS

SEQ ID NO: 23689 - protein, 117 aa, Artificial Sequence
  Chemically Synthesized
QVQLQESGGGLVQAGGSLRLSCAASGTIFYSAMGWYRQAPGKEREFVAAIGYGTTTNYADSVKGRFTISRDNAKNTVYLQMNSLKPEDTAVYYCAVHIRHWRTYPYWGQGTQVTVSS

SEQ ID NO: 23690 - protein, 120 aa, Artificial Sequence
  Chemically Synthesized
QVQLQESGGGLVQAGGSLRLSCAASGTIFRYMGWYRQAPGKEREFVAAIANGSSTNYADSVKGRFTISRDNAKNTVYLQMNSLKPEDTAVYYCAVHYYDHLVGVYDHTYWGQGTQVTVSS

SEQ ID NO: 23691 - protein, 126 aa, Artificial Sequence
  Chemically Synthesized
QVQLQESGGGLVQAGGSLRLSCAASGYIFPYVAMGWYRQAPGKERELVAGIGWGTNTNYADSVKGRFTISRDNAKNTVYLQMNSLKPEDTAVYYCAVDDSKEWERSRPPSYLHSYWGQGTQVTVSS

SEQ ID NO: 23692 - protein, 118 aa, Artificial Sequence
  Chemically Synthesized
QVQLQESGGGLVQAGGSLRLSCAASGTISTRYYMGWYRQAPGKEREFVATIAWGASTNYADSVKGRFTISRDNAKNTVYLQMNSLKPEDTAVYYCAVVLRDARYHYYWGQGTQVTVSS

SEQ ID NO: 23693 - protein, 126 aa, Artificial Sequence
  Chemically Synthesized
QVQLQESGGGLVQAGGSLRLSCAASGNIFGGVNMGWYRQAPGKERELVAAIANGGSTNYADSVKGRFTISRDNAKNTVYLQMNSLKPEDTAVYYCAAPYPGEDSTAHATQGYHDYWGQGTQVTVSS

SEQ ID NO: 23694 - protein, 121 aa, Artificial Sequence
  Chemically Synthesized
QVQLQESGGGLVQAGGSLRLSCAASGSISASASMGWYRQAPGKEREFVATIGYGTNTYYADSVKGRFTISRDNAKNTVYLQMNSLKPEDTAVYYCAVDYYGDIGPPYHGYWGQGTQVTVSS

SEQ ID NO: 23695 - protein, 122 aa, Artificial Sequence
  Chemically Synthesized
QVQLQESGGGLVQAGGSLRLSCAASGTISTPYSMGWYRQAPGKERELVATISNGTSTYYADSVKGRFTISRDNAKNTVYLQMNSLKPEDTAVYYCAADGFWAEAYYTWHLYWGQGTQVTVSS

SEQ ID NO: 23696 - protein, 121 aa, Artificial Sequence
  Chemically Synthesized
QVQLQESGGGLVQAGGSLRLSCAASGNISYWTYMGWYRQAPGKERELVAGITFGGTTNYADSVKGRFTISRDNAKNTVYLQMNSLKPEDTAVYYCAVYGQYYTSTGTLAYWGQGTQVTVSS

SEQ ID NO: 23697 - protein, 119 aa, Artificial Sequence
  Chemically Synthesized
QVQLQESGGGLVQAGGSLRLSCAASGSISDQPRMGWYRQAPGKEREFVATITDGGITNYADSVKGRFTISRDNAKNTVYLQMNSLKPEDTAVYYCAVITRDRDGLHGYWGQGTQVTVSS

SEQ ID NO: 23698 - protein, 122 aa, Artificial Sequence
  Chemically Synthesized
QVQLQESGGGLVQAGGSLRLSCAASGNISSSGYMGWYRQAPGKEREFVVGINVGAITYYADSVKGRFTISRDNAKNTVYLQMNSLKPEDTAVYYCAVIPRNDDDYTVLFPYWGQGTQVTVSS

SEQ ID NO: 23699 - protein, 122 aa, Artificial Sequence
  Chemically Synthesized
QVQLQESGGGLVQAGGSLRLSCAASGYISVRDRMGWYRQAPGKEREFVAAIDRGGTTNYADSVKGRFTISRDNAKNTVYLQMNSLKPEDTAVYYCAAVYRERGGVRRYLWYWGQGTQVTVSS

SEQ ID NO: 23700 - protein, 122 aa, Artificial Sequence
  Chemically Synthesized
QVQLQESGGGLVQAGGSLRLSCAASGTISWYAYMGWYRQAPGKERELVATIDIGTTTYYADSVKGRFTISRDNAKNTVYLQMNSLKPEDTAVYYCAAIGLVTTGVYADLDYWGQGTQVTVSS

SEQ ID NO: 23701 - protein, 117 aa, Artificial Sequence
  Chemically Synthesized
QVQLQESGGGLVQAGGSLRLSCAASGTISSIYMGWYRQAPGKEREFVAAINPGSNTNYADSVKGRFTISRDNAKNTVYLQMNSLKPEDTAVYYCAALYYDYAWFRYWGQGTQVTVSS

SEQ ID NO: 23702 - protein, 118 aa, Artificial Sequence
  Chemically Synthesized
QVQLQESGGGLVQAGGSLRLSCAASGNIFLVPYMGWYRQAPGKEREFVATINAGGITYYADSVKGRFTISRDNAKNTVYLQMNSLKPEDTAVYYCAVTSEPTGTFVYWGQGTQVTVSS

SEQ ID NO: 23703 - protein, 123 aa, Artificial Sequence
  Chemically Synthesized
QVQLQESGGGLVQAGGSLRLSCAASGTIFSVSSGMGWYRQAPGKERELVATISLGGNTNYADSVKGRFTISRDNAKNTVYLQMNSLKPEDTAVYYCAVADSYSGQPGGNFFYWGQGTQVTVSS

SEQ ID NO: 23704 - protein, 121 aa, Artificial Sequence
  Chemically Synthesized
QVQLQESGGGLVQAGGSLRLSCAASGTIFPENAMGWYRQAPGKERELVATISRGGTTNYADSVKGRFTISRDNAKNTVYLQMNSLKPEDTAVYYCAVSTWSFSTLLNVIYWGQGTQVTVSS

SEQ ID NO: 23705 - protein, 122 aa, Artificial Sequence
  Chemically Synthesized
QVQLQESGGGLVQAGGSLRLSCAASGTIFVVRPMGWYRQAPGKEREFVASITHGATTNYADSVKGRFTISRDNAKNTVYLQMNSLKPEDTAVYYCAAWDSYRWQTPARFDYWGQGTQVTVSS

SEQ ID NO: 23706 - protein, 121 aa, Artificial Sequence
  Chemically Synthesized
QVQLQESGGGLVQAGGSLRLSCAASGTISDVTMGWYRQAPGKEREFVATIDGGSTTNYADSVKGRFTISRDNAKNTVYLQMNSLKPEDTAVYYCAVVDKRDDAVGDRYGYWGQGTQVTVSS

SEQ ID NO: 23707 - protein, 122 aa, Artificial Sequence
  Chemically Synthesized
QVQLQESGGGLVQAGGSLRLSCAASGTIFGPDDMGWYRQAPGKERELVATIAYGATTYYADSVKGRFTISRDNAKNTVYLQMNSLKPEDTAVYYCAAFRVTSPDGADGLDYWGQGTQVTVSS

SEQ ID NO: 23708 - protein, 122 aa, Artificial Sequence
  Chemically Synthesized
QVQLQESGGGLVQAGGSLRLSCAASGSIFWFLVMGWYRQAPGKEREFVAGINSGANTNYADSVKGRFTISRDNAKNTVYLQMNSLKPEDTAVYYCAAYLYVDQRDIHDYDYWGQGTQVTVSS

SEQ ID NO: 23709 - protein, 118 aa, Artificial Sequence
  Chemically Synthesized
QVQLQESGGGLVQAGGSLRLSCAASGNIFGSIGMGWYRQAPGKEREFVASISDGTNTYYADSVKGRFTISRDNAKNTVYLQMNSLKPEDTAVYYCAAVQRYDLYHYYWGQGTQVTVSS

SEQ ID NO: 23710 - protein, 118 aa, Artificial Sequence
  Chemically Synthesized
QVQLQESGGGLVQAGGSLRLSCAASGSIFRTRTMGWYRQAPGKEREFVAAITWGGTTYYADSVKGRFTISRDNAKNTVYLQMNSLKPEDTAVYYCAVGRGPYRTHGYWGQGTQVTVSS

SEQ ID NO: 23711 - protein, 122 aa, Artificial Sequence
  Chemically Synthesized
QVQLQESGGGLVQAGGSLRLSCAASGSISYTGDMGWYRQAPGKEREFVATINVGANTNYADSVKGRFTISRDNAKNTVYLQMNSLKPEDTAVYYCAVLLLYYAVREYAHFYWGQGTQVTVSS

SEQ ID NO: 23712 - protein, 114 aa, Artificial Sequence
  Chemically Synthesized
QVQLQESGGGLVQAGGSLRLSCAASGSIFPVDIMGWYRQAPGKEREFVAGITDGTNTNYADSVKGRFTISRDNAKNTVYLQMNSLKPEDTAVYYCAASIDYDYWGQGTQVTVSS

SEQ ID NO: 23713 - protein, 118 aa, Artificial Sequence
  Chemically Synthesized
QVQLQESGGGLVQAGGSLRLSCAASGYIFWFTAMGWYRQAPGKEREFVAAISRGTSTNYADSVKGRFTISRDNAKNTVYLQMNSLKPEDTAVYYCAALAKSDLRHYYWGQGTQVTVSS

SEQ ID NO: 23714 - protein, 122 aa, Artificial Sequence
  Chemically Synthesized
QVQLQESGGGLVQAGGSLRLSCAASGNISLIIVMGWYRQAPGKEREFVAGITRGSNTNYADSVKGRFTISRDNAKNTVYLQMNSLKPEDTAVYYCAVIVYYPSSGEAYHSYWGQGTQVTVSS

SEQ ID NO: 23715 - protein, 118 aa, Artificial Sequence
  Chemically Synthesized
QVQLQESGGGLVQAGGSLRLSCAASGNISSLISMGWYRQAPGKEREFVAGIGWGGSTNYADSVKGRFTISRDNAKNTVYLQMNSLKPEDTAVYYCAAITRNYTWHYYWGQGTQVTVSS

SEQ ID NO: 23716 - protein, 118 aa, Artificial Sequence
  Chemically Synthesized
QVQLQESGGGLVQAGGSLRLSCAASGYIFWDKQMGWYRQAPGKEREFVAAISAGANTNYADSVKGRFTISRDNAKNTVYLQMNSLKPEDTAVYYCAARQWEATRLRYWGQGTQVTVSS

SEQ ID NO: 23717 - protein, 122 aa, Artificial Sequence
  Chemically Synthesized
QVQLQESGGGLVQAGGSLRLSCAASGTIFDRDLMGWYRQAPGKEREFVAGIAGGTNTNYADSVKGRFTISRDNAKNTVYLQMNSLKPEDTAVYYCAVIWRGDRYTLGYHYYWGQGTQVTVSS

SEQ ID NO: 23718 - protein, 126 aa, Artificial Sequence
  Chemically Synthesized
QVQLQESGGGLVQAGGSLRLSCAASGYIFYWRYMGWYRQAPGKEREFVAAIGRGASTYYADSVKGRFTISRDNAKNTVYLQMNSLKPEDTAVYYCAAKATWADVAWSSYDQKFKYWGQGTQVTVSS

SEQ ID NO: 23719 - protein, 117 aa, Artificial Sequence
  Chemically Synthesized
QVQLQESGGGLVQAGGSLRLSCAASGTIFAYYYMGWYRQAPGKERELVATIDRGSNTNYADSVKGRFTISRDNAKNTVYLQMNSLKPEDTAVYYCAVTHSFGSTMYWGQGTQVTVSS

SEQ ID NO: 23720 - protein, 117 aa, Artificial Sequence
  Chemically Synthesized
QVQLQESGGGLVQAGGSLRLSCAASGTISLADDMGWYRQAPGKEREFVAGIADGANTNYADSVKGRFTISRDNAKNTVYLQMNSLKPEDTAVYYCAAIDFTYYHHYWGQGTQVTVSS

SEQ ID NO: 23721 - protein, 125 aa, Artificial Sequence
  Chemically Synthesized
QVQLQESGGGLVQAGGSLRLSCAASGTISGPTPMGWYRQAPGKERELVASITRGTSTNYADSVKGRFTISRDNAKNTVYLQMNSLKPEDTAVYYCAAGPGWRSRGLDIGHDSFYWGQGTQVTVSS

SEQ ID NO: 23722 - protein, 118 aa, Artificial Sequence
  Chemically Synthesized
QVQLQESGGGLVQAGGSLRLSCAASGTISFDQDMGWYRQAPGKEREFVASISAGSITNYADSVKGRFTISRDNAKNTVYLQMNSLKPEDTAVYYCAADVPPVYQYSYWGQGTQVTVSS

SEQ ID NO: 23723 - protein, 122 aa, Artificial Sequence
  Chemically Synthesized
QVQLQESGGGLVQAGGSLRLSCAASGYISQLPYMGWYRQAPGKEREFVASISHGANTYYADSVKGRFTISRDNAKNTVYLQMNSLKPEDTAVYYCAARYWPRIWYGWELEYWGQGTQVTVSS

SEQ ID NO: 23724 - protein, 118 aa, Artificial Sequence
  Chemically Synthesized
QVQLQESGGGLVQAGGSLRLSCAASGTISDVTIMGWYRQAPGKEREFVAGINYGANTYYADSVKGRFTISRDNAKNTVYLQMNSLKPEDTAVYYCAVVYRDRYYLYYWGQGTQVTVSS

SEQ ID NO: 23725 - protein, 125 aa, Artificial Sequence
  Chemically Synthesized
QVQLQESGGGLVQAGGSLRLSCAASGSISRYPNMGWYRQAPGKEREFVASIANGGTTYYADSVKGRFTISRDNAKNTVYLQMNSLKPEDTAVYYCAVESITLRNGKDEVTNLIYWGQGTQVTVSS

SEQ ID NO: 23726 - protein, 122 aa, Artificial Sequence
  Chemically Synthesized
QVQLQESGGGLVQAGGSLRLSCAASGTIFTDFKMGWYRQAPGKERELVAAIDTGTTTYYADSVKGRFTISRDNAKNTVYLQMNSLKPEDTAVYYCAVWPDQYFGQSYDLGYWGQGTQVTVSS

SEQ ID NO: 23727 - protein, 118 aa, Artificial Sequence
  Chemically Synthesized
QVQLQESGGGLVQAGGSLRLSCAASGNIFRSPLMGWYRQAPGKEREFVAGIGGGATTNYADSVKGRFTISRDNAKNTVYLQMNSLKPEDTAVYYCAVAYVTGRWYYYWGQGTQVTVSS

SEQ ID NO: 23728 - protein, 118 aa, Artificial Sequence
  Chemically Synthesized
QVQLQESGGGLVQAGGSLRLSCAASGSIFYYRAMGWYRQAPGKERELVASISNGASTNYADSVKGRFTISRDNAKNTVYLQMNSLKPEDTAVYYCAAPTGGDDSYLYWGQGTQVTVSS

SEQ ID NO: 23729 - protein, 126 aa, Artificial Sequence
  Chemically Synthesized
QVQLQESGGGLVQAGGSLRLSCAASGNIFPLDAMGWYRQAPGKEREFVAGITAGGSTNYADSVKGRFTISRDNAKNTVYLQMNSLKPEDTAVYYCAAARYKQTAGTDYRVERHGYWGQGTQVTVSS

SEQ ID NO: 23730 - protein, 117 aa, Artificial Sequence
  Chemically Synthesized
QVQLQESGGGLVQAGGSLRLSCAASGNISPYPMGWYRQAPGKERELVAAITLGTITNYADSVKGRFTISRDNAKNTVYLQMNSLKPEDTAVYYCAVYVVYNTVYNYWGQGTQVTVSS

SEQ ID NO: 23731 - protein, 118 aa, Artificial Sequence
  Chemically Synthesized
QVQLQESGGGLVQAGGSLRLSCAASGTISYILAMGWYRQAPGKERELVAAINAGSNTNYADSVKGRFTISRDNAKNTVYLQMNSLKPEDTAVYYCAVHSYYSGYLFYWGQGTQVTVSS

SEQ ID NO: 23732 - protein, 118 aa, Artificial Sequence
  Chemically Synthesized
QVQLQESGGGLVQAGGSLRLSCAASGNISEYTYMGWYRQAPGKEREFVAGINNGTNTNYADSVKGRFTISRDNAKNTVYLQMNSLKPEDTAVYYCAVYVNYAYYHSYWGQGTQVTVSS

SEQ ID NO: 23733 - protein, 118 aa, Artificial Sequence
  Chemically Synthesized
QVQLQESGGGLVQAGGSLRLSCAASGNISYAYTMGWYRQAPGKEREFVAGINYGGNTNYADSVKGRFTISRDNAKNTVYLQMNSLKPEDTAVYYCAVVAAHYYYYFYWGQGTQVTVSS

SEQ ID NO: 23734 - protein, 121 aa, Artificial Sequence
  Chemically Synthesized
QVQLQESGGGLVQAGGSLRLSCAASGTISRYPDMGWYRQAPGKEREFVASIGSGGITNYADSVKGRFTISRDNAKNTVYLQMNSLKPEDTAVYYCAVGLPDGADVGSFRYWGQGTQVTVSS

SEQ ID NO: 23735 - protein, 118 aa, Artificial Sequence
  Chemically Synthesized
QVQLQESGGGLVQAGGSLRLSCAASGNIFRSYYMGWYRQAPGKEREFVAAIDSGGNTNYADSVKGRFTISRDNAKNTVYLQMNSLKPEDTAVYYCAVQALYYYPYRYWGQGTQVTVSS

SEQ ID NO: 23736 - protein, 122 aa, Artificial Sequence
  Chemically Synthesized
QVQLQESGGGLVQAGGSLRLSCAASGYIFTYDLMGWYRQAPGKEREFVASITSGSSTYYADSVKGRFTISRDNAKNTVYLQMNSLKPEDTAVYYCAADGIYNVYDYYPHVYWGQGTQVTVSS

SEQ ID NO: 23737 - protein, 122 aa, Artificial Sequence
  Chemically Synthesized
QVQLQESGGGLVQAGGSLRLSCAASGTIFSDLQMGWYRQAPGKEREFVATIAQGANTYYADSVKGRFTISRDNAKNTVYLQMNSLKPEDTAVYYCAAGSITYEVVGGLFGYWGQGTQVTVSS

SEQ ID NO: 23738 - protein, 118 aa, Artificial Sequence
  Chemically Synthesized
QVQLQESGGGLVQAGGSLRLSCAASGNISFRNDMGWYRQAPGKEREFVATIDYGTNTYYADSVKGRFTISRDNAKNTVYLQMNSLKPEDTAVYYCAVYTATGLRLPYWGQGTQVTVSS

SEQ ID NO: 23739 - protein, 117 aa, Artificial Sequence
  Chemically Synthesized
QVQLQESGGGLVQAGGSLRLSCAASGTISTTVMGWYRQAPGKERELVAGIADGAITNYADSVKGRFTISRDNAKNTVYLQMNSLKPEDTAVYYCAAPYWEYTGHRYWGQGTQVTVSS

SEQ ID NO: 23740 - protein, 118 aa, Artificial Sequence
  Chemically Synthesized
QVQLQESGGGLVQAGGSLRLSCAASGTIFEKGDMGWYRQAPGKERELVASIATGTSTYYADSVKGRFTISRDNAKNTVYLQMNSLKPEDTAVYYCAVPWVRYSSLGYWGQGTQVTVSS

SEQ ID NO: 23741 - protein, 118 aa, Artificial Sequence
  Chemically Synthesized
QVQLQESGGGLVQAGGSLRLSCAASGNISWSTYMGWYRQAPGKEREFVAAIAPGGTTNYADSVKGRFTISRDNAKNTVYLQMNSLKPEDTAVYYCAAGGARDTIYGYWGQGTQVTVSS

SEQ ID NO: 23742 - protein, 122 aa, Artificial Sequence
  Chemically Synthesized
QVQLQESGGGLVQAGGSLRLSCAASGYISYSYLMGWYRQAPGKEREFVAAIASGTSTNYADSVKGRFTISRDNAKNTVYLQMNSLKPEDTAVYYCAAPRPFGTQDIVSLSYWGQGTQVTVSS

SEQ ID NO: 23743 - protein, 120 aa, Artificial Sequence
  Chemically Synthesized
QVQLQESGGGLVQAGGSLRLSCAASGTISKSESMGWYRQAPGKEREFVASINSGSTTNYADSVKGRFTISRDNAKNTVYLQMNSLKPEDTAVYYCAALTRAVARPRHYYWGQGTQVTVSS

SEQ ID NO: 23744 - protein, 126 aa, Artificial Sequence
  Chemically Synthesized
QVQLQESGGGLVQAGGSLRLSCAASGNIFDYDAMGWYRQAPGKERELVASITHGTSTNYADSVKGRFTISRDNAKNTVYLQMNSLKPEDTAVYYCAVEIRTRFYPPLLWYLDHYYWGQGTQVTVSS

SEQ ID NO: 23745 - protein, 112 aa, Artificial Sequence
  Chemically Synthesized
QVQLQESGGGLVQAGGSLRLSCAASGYMGWYRQAPGKERELVATIASGTITNYADSVKGRFTISRDNAKNTVYLQMNSLKPEDTAVYYCAVGNTDVIGFRYWGQGTQVTVSS

SEQ ID NO: 23746 - protein, 118 aa, Artificial Sequence
  Chemically Synthesized
QVQLQESGGGLVQAGGSLRLSCAASGTIFTSGYMGWYRQAPGKEREFVASINDGSNTYYADSVKGRFTISRDNAKNTVYLQMNSLKPEDTAVYYCAVLDEYLRGHPYWGQGTQVTVSS

SEQ ID NO: 23747 - protein, 126 aa, Artificial Sequence
  Chemically Synthesized
QVQLQESGGGLVQAGGSLRLSCAASGNISYYAGMGWYRQAPGKERELVATINVGTSTNYADSVKGRFTISRDNAKNTVYLQMNSLKPEDTAVYYCAAAPPDDVTEGKYAYYIHDYWGQGTQVTVSS

SEQ ID NO: 23748 - protein, 124 aa, Artificial Sequence
  Chemically Synthesized
QVQLQESGGGLVQAGGSLRLSCAASGTIFLDATMGWYRQAPGKERELVAGIDYGANTNYADSVKGRFTISRDNAKNTVYLQMNSLKPEDTAVYYCAAGAANRGDRHSYFSHAYWGQGTQVTVSS

SEQ ID NO: 23749 - protein, 126 aa, Artificial Sequence
  Chemically Synthesized
QVQLQESGGGLVQAGGSLRLSCAASGYISKPNRMGWYRQAPGKEREFVAGIDDGTITYYADSVKGRFTISRDNAKNTVYLQMNSLKPEDTAVYYCAVVRYGGQTDNKYGNRWHGYWGQGTQVTVSS

SEQ ID NO: 23750 - protein, 118 aa, Artificial Sequence
  Chemically Synthesized
QVQLQESGGGLVQAGGSLRLSCAASGNIFDLVYMGWYRQAPGKERELVAGISSGSTTNYADSVKGRFTISRDNAKNTVYLQMNSLKPEDTAVYYCAVDVSPTAPLYYWGQGTQVTVSS

SEQ ID NO: 23751 - protein, 117 aa, Artificial Sequence
  Chemically Synthesized
QVQLQESGGGLVQAGGSLRLSCAASGYISRSVMGWYRQAPGKEREFVAGIGQGASTNYADSVKGRFTISRDNAKNTVYLQMNSLKPEDTAVYYCAVAGYDYTLLDYWGQGTQVTVSS

SEQ ID NO: 23752 - protein, 118 aa, Artificial Sequence
  Chemically Synthesized
QVQLQESGGGLVQAGGSLRLSCAASGTIFGASYMGWYRQAPGKERELVAAINTGGTTNYADSVKGRFTISRDNAKNTVYLQMNSLKPEDTAVYYCAVLPGDYDWFDYWGQGTQVTVSS

SEQ ID NO: 23753 - protein, 121 aa, Artificial Sequence
  Chemically Synthesized
QVQLQESGGGLVQAGGSLRLSCAASGTIFVVYQMGWYRQAPGKERELVAGILLVVVPYADSVKGRFTISRDNAKNTVYLQMNSLKPEDTAVYYCAAYVRYTPQYQGEHDYWGQGTQVTVSS

SEQ ID NO: 23754 - protein, 118 aa, Artificial Sequence
  Chemically Synthesized
QVQLQESGGGLVQAGGSLRLSCAASGTIFFVQGMGWYRQAPGKEREFVAAIGRGASTYYADSVKGRFTISRDNAKNTVYLQMNSLKPEDTAVYYCAAYSQRFRYYGYWGQGTQVTVSS

SEQ ID NO: 23755 - protein, 120 aa, Artificial Sequence
  Chemically Synthesized
QVQLQESGGGLVQAGGSLRLSCAASGYISSQDIMGWYRQAPGKEREFVAGIAYGANTYADSVKGRFTISRDNAKNTVYLQMNSLKPEDTAVYYCAVHIYSTTTLTLLIYWGQGTQVTVSS

SEQ ID NO: 23756 - protein, 116 aa, Artificial Sequence
  Chemically Synthesized
QVQLQESGGGLVQAGGSLRLSCAASGNIFSFRMGWYRQAPGKEREFVATIDTGGITNYADSVKGRFTISRDNAKNTVYLQMNSLKPEDTAVYYCAVRTVTGVTLYWGQGTQVTVSS

SEQ ID NO: 23757 - protein, 118 aa, Artificial Sequence
  Chemically Synthesized
QVQLQESGGGLVQAGGSLRLSCAASGYISDVGNMGWYRQAPGKERELVAGIALGANTNYADSVKGRFTISRDNAKNTVYLQMNSLKPEDTAVYYCAAPHDPSYDHPYWGQGTQVTVSS

SEQ ID NO: 23758 - protein, 118 aa, Artificial Sequence
  Chemically Synthesized
QVQLQESGGGLVQAGGSLRLSCAASGTISSFRGMGWYRQAPGKEREFVAAIDYGANTNYADSVKGRFTISRDNAKNTVYLQMNSLKPEDTAVYYCAAIGFAIPYHYYWGQGTQVTVSS

SEQ ID NO: 23759 - protein, 118 aa, Artificial Sequence
  Chemically Synthesized
QVQLQESGGGLVQAGGSLRLSCAASGYISDSTSMGWYRQAPGKEREFVATIAYGATTNYADSVKGRFTISRDNAKNTVYLQMNSLKPEDTAVYYCAAPRDGPYRYNYWGQGTQVTVSS

SEQ ID NO: 23760 - protein, 117 aa, Artificial Sequence
  Chemically Synthesized
QVQLQESGGGLVQAGGSLRLSCAASGTIFDYNSMGWYRQAPGKEREFVPVLITVVVPYADSVKGRFTISRDNAKNTVYLQMNSLKPEDTAVYYCAVRVRYRLTLRYWGQGTQVTVSS

SEQ ID NO: 23761 - protein, 118 aa, Artificial Sequence
  Chemically Synthesized
QVQLQESGGGLVQAGGSLRLSCAASGTISDRYQMGWYRQAPGKERELVATIDVGATTNYADSVKGRFTISRDNAKNTVYLQMNSLKPEDTAVYYCAARYDYDPTLYYWGQGTQVTVSS

SEQ ID NO: 23762 - protein, 122 aa, Artificial Sequence
  Chemically Synthesized
QVQLQESGGGLVQAGGSLRLSCAASGNISYGYYMGWYRQAPGKEREFVASIDFGGITNYADSVKGRFTISRDNAKNTVYLQMNSLKPEDTAVYYCAVVTRTDEDPRYWHAYWGQGTQVTVSS

SEQ ID NO: 23763 - protein, 122 aa, Artificial Sequence
  Chemically Synthesized
QVQLQESGGGLVQAGGSLRLSCAASGSISYDATMGWYRQAPGKERELVAGIAFGTTTYYADSVKGRFTISRDNAKNTVYLQMNSLKPEDTAVYYCAASRRIDDTFLLLFFYWGQGTQVTVSS

SEQ ID NO: 23764 - protein, 117 aa, Artificial Sequence
  Chemically Synthesized
QVQLQESGGGLVQAGGSLRLSCAASGYIFGLTMGWYRQAPGKERELVATITNGGNTNYADSVKGRFTISRDNAKNTVYLQMNSLKPEDTAVYYCAADTPIVVDHLYWGQGTQVTVSS

SEQ ID NO: 23765 - protein, 118 aa, Artificial Sequence
  Chemically Synthesized
QVQLQESGGGLVQAGGSLRLSCAASGYISVLAAMGWYRQAPGKERELVASIDVGGNTYYADSVKGRFTISRDNAKNTVYLQMNSLKPEDTAVYYCAVIVETTLTLIYWGQGTQVTVSS

SEQ ID NO: 23766 - protein, 118 aa, Artificial Sequence
  Chemically Synthesized
QVQLQESGGGLVQAGGSLRLSCAASGNISPSYIMGWYRQAPGKERELVATISLGGSTNYADSVKGRFTISRDNAKNTVYLQMNSLKPEDTAVYYCAAYIGERSGLDYWGQGTQVTVSS

SEQ ID NO: 23767 - protein, 118 aa, Artificial Sequence
  Chemically Synthesized
QVQLQESGGGLVQAGGSLRLSCAASGTIFIDIGMGWYRQAPGKERELVAAIDPGGNTYYADSVKGRFTISRDNAKNTVYLQMNSLKPEDTAVYYCAVDLRTGEGHLYWGQGTQVTVSS

SEQ ID NO: 23768 - protein, 118 aa, Artificial Sequence
  Chemically Synthesized
QVQLQESGGGLVQAGGSLRLSCAASGTISDPYYMGWYRQAPGKEREFVATIATGTNTNYADSVKGRFTISRDNAKNTVYLQMNSLKPEDTAVYYCAALYRNGTWYHYWGQGTQVTVSS

SEQ ID NO: 23769 - protein, 118 aa, Artificial Sequence
  Chemically Synthesized
QVQLQESGGGLVQAGGSLRLSCAASGTIFGDIAMGWYRQAPGKEREFVAAITAGASTYYADSVKGRFTISRDNAKNTVYLQMNSLKPEDTAVYYCAALQLGVTRHYYWGQGTQVTVSS

SEQ ID NO: 23770 - protein, 122 aa, Artificial Sequence
  Chemically Synthesized
QVQLQESGGGLVQAGGSLRLSCAASGTIFVSYYMGWYRQAPGKERELVASIAGGASTNYADSVKGRFTISRDNAKNTVYLQMNSLKPEDTAVYYCAVRDANPFQGGNHLNYWGQGTQVTVSS

SEQ ID NO: 23771 - protein, 121 aa, Artificial Sequence
  Chemically Synthesized
QVQLQESGGGLVQAGGSLRLSCAASGNILLVTMGWYRQAPGKERELVAGIAKGTTTNYADSVKGRFTISRDNAKNTVYLQMNSLKPEDTAVYYCAVYGLPDTYTVYLFVYWGQGTQVTVSS

SEQ ID NO: 23772 - protein, 123 aa, Artificial Sequence
  Chemically Synthesized
QVQLQESGGGLVQAGGSLRLSCAASGTISRHDVMGWYRQAPGKEREFVAAINLGTTTNYADSVKGRFTISRDNAKNTVYLQMNSLKPEDTAVYYCAAYRTDYYNGRAWYHGYWGQGTQVTVSS

SEQ ID NO: 23773 - protein, 121 aa, Artificial Sequence
  Chemically Synthesized
QVQLQESGGGLVQAGGSLRLSCAASGYFLHSVMGWYRQAPGKERELVASIATGATTNYADSVKGRFTISRDNAKNTVYLQMNSLKPEDTAVYYCAAQYRTVGYYLYGHDYWGQGTQVTVSS

SEQ ID NO: 23774 - protein, 118 aa, Artificial Sequence
  Chemically Synthesized
QVQLQESGGGLVQAGGSLRLSCAASGTISRPYAMGWYRQAPGKEREFVAGIDRGSNTYYADSVKGRFTISRDNAKNTVYLQMNSLKPEDTAVYYCAAVYVGGQRHYYWGQGTQVTVSS

SEQ ID NO: 23775 - protein, 122 aa, Artificial Sequence
  Chemically Synthesized
QVQLQESGGGLVQAGGSLRLSCAASGNISTTYDMGWYRQAPGKERELVASITDGSSTNYADSVKGRFTISRDNAKNTVYLQMNSLKPEDTAVYYCAVYWLQDESDVYLPSYWGQGTQVTVSS

SEQ ID NO: 23776 - protein, 125 aa, Artificial Sequence
  Chemically Synthesized
QVQLQESGGGLVQAGGSLRLSCAASGNIFWDVYMGWYRQAPGKEREFVASIARGTITNYADSVKGRFTISRDNAKNTVYLQMNSLKPEDTAVYYCAAVRRTYLATGTYQYSYSYWGQGTQVTVSS

SEQ ID NO: 23777 - protein, 118 aa, Artificial Sequence
  Chemically Synthesized
QVQLQESGGGLVQAGGSLRLSCAASGSISPPDSMGWYRQAPGKEREFVAGIGKGGSTNYADSVKGRFTISRDNAKNTVYLQMNSLKPEDTAVYYCAAVTYDGTLLGYWGQGTQVTVSS

SEQ ID NO: 23778 - protein, 118 aa, Artificial Sequence
  Chemically Synthesized
QVQLQESGGGLVQAGGSLRLSCAASGTIFSTYYMGWYRQAPGKEREFVATIGDGTSTNYADSVKGRFTISRDNAKNTVYLQMNSLKPEDTAVYYCAVLLRKTAWFYYWGQGTQVTVSS

SEQ ID NO: 23779 - protein, 121 aa, Artificial Sequence
  Chemically Synthesized
QVQLQESGGGLVQAGGSLRLSCAASGSISARIFMGWYRQAPGKEREFVASISYGASTNYADSVKGRFTISRDNAKNTVYLQMNSLKPEDTAVYYCAVVSVFTVTLTGNMYWGQGTQVTVSS

SEQ ID NO: 23780 - protein, 117 aa, Artificial Sequence
  Chemically Synthesized
QVQLQESGGGLVQAGGSLRLSCAASGNIFYVYVMGWYRQAPGKERELVAAIAYGASTYYADSVKGRFTISRDNAKNTVYLQMNSLKPEDTAVYYCAAASTLKLTLYWGQGTQVTVSS

SEQ ID NO: 23781 - protein, 118 aa, Artificial Sequence
  Chemically Synthesized
QVQLQESGGGLVQAGGSLRLSCAASGYISDRSRMGWYRQAPGKEREFVAAIGQGTSTYYADSVKGRFTISRDNAKNTVYLQMNSLKPEDTAVYYCAAVILYGPFHHYWGQGTQVTVSS

SEQ ID NO: 23782 - protein, 122 aa, Artificial Sequence
  Chemically Synthesized
QVQLQESGGGLVQAGGSLRLSCAASGTIFYPDDMGWYRQAPGKERELVATINYGASTYYADSVKGRFTISRDNAKNTVYLQMNSLKPEDTAVYYCAADIEDDDGDPYDFQYWGQGTQVTVSS

SEQ ID NO: 23783 - protein, 124 aa, Artificial Sequence
  Chemically Synthesized
QVQLQESGGGLVQAGGSLRLSCAASGSIFQYFFMGWYRQAPGKEREFVATIDGATTNYADSVKGRFTISRDNAKNTVYLQMNSLKPEDTAVYYCAAYDNDFPGQAVGDNNHDYWGQGTQVTVSS

SEQ ID NO: 23784 - protein, 118 aa, Artificial Sequence
  Chemically Synthesized
QVQLQESGGGLVQAGGSLRLSCAASGTIFYPSGMGWYRQAPGKERELVASIDIGTITNYADSVKGRFTISRDNAKNTVYLQMNSLKPEDTAVYYCAADQPHALEHIYWGQGTQVTVSS

SEQ ID NO: 23785 - protein, 122 aa, Artificial Sequence
  Chemically Synthesized
QVQLQESGGGLVQAGGSLRLSCAASGNIFQLDDMGWYRQAPGKEREFVAAIDYGAITYYADSVKGRFTISRDNAKNTVYLQMNSLKPEDTAVYYCAAHRTLYEYTRREHAYWGQGTQVTVSS

SEQ ID NO: 23786 - protein, 126 aa, Artificial Sequence
  Chemically Synthesized
QVQLQESGGGLVQAGGSLRLSCAASGNISGDVDMGWYRQAPGKERELVATITQGGITNYADSVKGRFTISRDNAKNTVYLQMNSLKPEDTAVYYCAADRDDVYGSDRIRPDLYEYWGQGTQVTVSS

SEQ ID NO: 23787 - protein, 118 aa, Artificial Sequence
  Chemically Synthesized
QVQLQESGGGLVQAGGSLRLSCAASGNISRPGYMGWYRQAPGKEREFVAGIDDGGITNYADSVKGRFTISRDNAKNTVYLQMNSLKPEDTAVYYCAAIGQNYPYLYYWGQGTQVTVSS

SEQ ID NO: 23788 - protein, 118 aa, Artificial Sequence
  Chemically Synthesized
QVQLQESGGGLVQAGGSLRLSCAASGTISSTLNMGWYRQAPGKEREFVASINTGSSTNYADSVKGRFTISRDNAKNTVYLQMNSLKPEDTAVYYCAAVYYGSRWHQYWGQGTQVTVSS

SEQ ID NO: 23789 - protein, 118 aa, Artificial Sequence
  Chemically Synthesized
QVQLQESGGGLVQAGGSLRLSCAASGSISPAITMGWYRQAPGKERELVASINYGTTTYYADSVKGRFTISRDNAKNTVYLQMNSLKPEDTAVYYCAAVRDNNYPHEYWGQGTQVTVSS

SEQ ID NO: 23790 - protein, 126 aa, Artificial Sequence
  Chemically Synthesized
QVQLQESGGGLVQAGGSLRLSCAASGNIFPSPIMGWYRQAPGKERELVAAIDGGSITYYADSVKGRFTISRDNAKNTVYLQMNSLKPEDTAVYYCAADLALPGRVTYAFSAGHRYWGQGTQVTVSS

SEQ ID NO: 23791 - protein, 118 aa, Artificial Sequence
  Chemically Synthesized
QVQLQESGGGLVQAGGSLRLSCAASGNIFDDHYMGWYRQAPGKEREFVASIDPGSTTNYADSVKGRFTISRDNAKNTVYLQMNSLKPEDTAVYYCAAVSYDYTWFGYWGQGTQVTVSS

SEQ ID NO: 23792 - protein, 119 aa, Artificial Sequence
  Chemically Synthesized
QVQLQESGGGLVQAGGSLRLSCAASGNIFGAQYMGWYRQAPGKERELVAAIAYGTTTNYADSVKGRFTISRDNAKNTVYLQMNSLKPEDTAVYYCAVTNGYYVGRHPYWGQGTQVTVSS

SEQ ID NO: 23793 - protein, 118 aa, Artificial Sequence
  Chemically Synthesized
QVQLQESGGGLVQAGGSLRLSCAASGSIFDTTNMGWYRQAPGKEREFVAGIGAGANTYYADSVKGRFTISRDNAKNTVYLQMNSLKPEDTAVYYCAVDFLDISVYPYWGQGTQVTVSS

SEQ ID NO: 23794 - protein, 121 aa, Artificial Sequence
  Chemically Synthesized
QVQLQESGGGLVQAGGSLRLSCAASGYIFYYLNMGWYRQAPGKERELVATINYGGNTNYADSVKGRFTISRDNAKNTVYLQMNSLKPEDTAVYYCAAAGGAPSRRTLLMYWGQGTQVTVSS

SEQ ID NO: 23795 - protein, 118 aa, Artificial Sequence
  Chemically Synthesized
QVQLQESGGGLVQAGGSLRLSCAASGNIFYQGYMGWYRQAPGKEREFVAGITDGTTTYYADSVKGRFTISRDNAKNTVYLQMNSLKPEDTAVYYCAADAYHTTFLGYWGQGTQVTVSS

SEQ ID NO: 23796 - protein, 109 aa, Artificial Sequence
  Chemically Synthesized
QVQLQESGGGLVQAGGSLRLSCAASGTIFLIVFMGWYRQAPGKERELLPVLVTVLIPYADSVKGRFTISRDNAKNTVYLQMNSLKPEDTAVYYCAVDYWGQGTQVTVSS

SEQ ID NO: 23797 - protein, 117 aa, Artificial Sequence
  Chemically Synthesized
QVQLQESGGGLVQAGGSLRLSCAASGSISGTLMGWYRQAPGKERELVASISQGGTTNYADSVKGRFTISRDNAKNTVYLQMNSLKPEDTAVYYCAVIAYSWTPHFYWGQGTQVTVSS

SEQ ID NO: 23798 - protein, 118 aa, Artificial Sequence
  Chemically Synthesized
QVQLQESGGGLVQAGGSLRLSCAASGNIFGRSRMGWYRQAPGKEREFVAGIGDGGITYYADSVKGRFTISRDNAKNTVYLQMNSLKPEDTAVYYCAVGYADGADLGYWGQGTQVTVSS

SEQ ID NO: 23799 - protein, 118 aa, Artificial Sequence
  Chemically Synthesized
QVQLQESGGGLVQAGGSLRLSCAASGTISVLLIMGWYRQAPGKERELVAAIGRGATTNYADSVKGRFTISRDNAKNTVYLQMNSLKPEDTAVYYCAVYRAHWGDHPYWGQGTQVTVSS

SEQ ID NO: 23800 - protein, 122 aa, Artificial Sequence
  Chemically Synthesized
QVQLQESGGGLVQAGGSLRLSCAASGNIFGALIMGWYRQAPGKEREFVASINDGSITNYADSVKGRFTISRDNAKNTVYLQMNSLKPEDTAVYYCAAHDWYTVGPTIEHHYWGQGTQVTVSS

SEQ ID NO: 23801 - protein, 121 aa, Artificial Sequence
  Chemically Synthesized
QVQLQESGGGLVQAGGSLRLSCAASGNISTSDPMGWYRQAPGKERELVAGIGSGSTTNYADSVKGRFTISRDNAKNTVYLQMNSLKPEDTAVYYCAANTLYYVKRDGSMYWGQGTQVTVSS

SEQ ID NO: 23802 - protein, 121 aa, Artificial Sequence
  Chemically Synthesized
QVQLQESGGGLVQAGGSLRLSCAASGYISVDYTMGWYRQAPGKERELVAAISRGANTNYADSVKGRFTISRDNAKNTVYLQMNSLKPEDTAVYYCAAPTTPDLLVVDHHYWGQGTQVTVSS

SEQ ID NO: 23803 - protein, 121 aa, Artificial Sequence
  Chemically Synthesized
QVQLQESGGGLVQAGGSLRLSCAASGTIFIRDPMGWYRQAPGKEREFVAAIGYGANTYYADSVKGRFTISRDNAKNTVYLQMNSLKPEDTAVYYCAAGTYRDDTVSTTIYWGQGTQVTVSS

SEQ ID NO: 23804 - protein, 122 aa, Artificial Sequence
  Chemically Synthesized
QVQLQESGGGLVQAGGSLRLSCAASGTIFIGDYMGWYRQAPGKERELVAGIDEGGNYADSVKGRFTISRDNAKNTVYLQMNSLKPEDTAVYYCAAGPQQYDRLVDVANYRYWGQGTQVTVSS

SEQ ID NO: 23805 - protein, 122 aa, Artificial Sequence
  Chemically Synthesized
QVQLQESGGGLVQAGGSLRLSCAASGSISAYPVMGWYRQAPGKERELVASINIGSSTYYADSVKGRFTISRDNAKNTVYLQMNSLKPEDTAVYYCAAIYYYRSGAYDYHQYWGQGTQVTVSS

SEQ ID NO: 23806 - protein, 122 aa, Artificial Sequence
  Chemically Synthesized
QVQLQESGGGLVQAGGSLRLSCAASGNISDASTMGWYRQAPGKEREFVAGISPGTSTNYADSVKGRFTISRDNAKNTVYLQMNSLKPEDTAVYYCAARAGPTAGNTAYHFYWGQGTQVTVSS

SEQ ID NO: 23807 - protein, 118 aa, Artificial Sequence
  Chemically Synthesized
QVQLQESGGGLVQAGGSLRLSCAASGTISKQNGMGWYRQAPGKEREFVAGIADGGTTYYADSVKGRFTISRDNAKNTVYLQMNSLKPEDTAVYYCAAYPYLVEYLEYWGQGTQVTVSS

SEQ ID NO: 23808 - protein, 117 aa, Artificial Sequence
  Chemically Synthesized
QVQLQESGGGLVQAGGSLRLSCAASGYISLTCLMGWYRQAPGKEREFVAGIDDGGNYYADSVKGRFTISRDNAKNTVYLQMNSLKPEDTAVYYCAAGVAVRNYHGYWGQGTQVTVSS

SEQ ID NO: 23809 - protein, 118 aa, Artificial Sequence
  Chemically Synthesized
QVQLQESGGGLVQAGGSLRLSCAASGNIFQGLYMGWYRQAPGKERELVAGIGTGGITYYADSVKGRFTISRDNAKNTVYLQMNSLKPEDTAVYYCAAGLTSGSDYIYWGQGTQVTVSS

SEQ ID NO: 23810 - protein, 122 aa, Artificial Sequence
  Chemically Synthesized
QVQLQESGGGLVQAGGSLRLSCAASGNISVSGYMGWYRQAPGKEREFVAGIGPGASTNYADSVKGRFTISRDNAKNTVYLQMNSLKPEDTAVYYCAARRGGNNRDDEVLDYWGQGTQVTVSS

SEQ ID NO: 23811 - protein, 118 aa, Artificial Sequence
  Chemically Synthesized
QVQLQESGGGLVQAGGSLRLSCAASGYISGLDRMGWYRQAPGKEREFVATIDPGSITNYADSVKGRFTISRDNAKNTVYLQMNSLKPEDTAVYYCAVGSYAYWPHWYWGQGTQVTVSS

SEQ ID NO: 23812 - protein, 126 aa, Artificial Sequence
  Chemically Synthesized
QVQLQESGGGLVQAGGSLRLSCAASGNISPSGIMGWYRQAPGKERELVAAIDRGASTNYADSVKGRFTISRDNAKNTVYLQMNSLKPEDTAVYYCAVVDRRSQGGRSVALDKHKYWGQGTQVTVSS

SEQ ID NO: 23813 - protein, 126 aa, Artificial Sequence
  Chemically Synthesized
QVQLQESGGGLVQAGGSLRLSCAASGTIFTDSKMGWYRQAPGKERELVASITDGASTNYADSVKGRFTISRDNAKNTVYLQMNSLKPEDTAVYYCAAIKHLRTSRTEGAVPQYAYWGQGTQVTVSS

SEQ ID NO: 23814 - protein, 117 aa, Artificial Sequence
  Chemically Synthesized
QVQLQESGGGLVQAGGSLRLSCAASGNIFRYGIMGWYRQAPGKERELVAGISLGTITYADSVKGRFTISRDNAKNTVYLQMNSLKPEDTAVYYCAVYTYRNTRHGYWGQGTQVTVSS

SEQ ID NO: 23815 - protein, 122 aa, Artificial Sequence
  Chemically Synthesized
QVQLQESGGGLVQAGGSLRLSCAASGYIFTQYEMGWYRQAPGKEREFVASIADGGTTYYADSVKGRFTISRDNAKNTVYLQMNSLKPEDTAVYYCAVSIYVEAADSYDHIYWGQGTQVTVSS

SEQ ID NO: 23816 - protein, 126 aa, Artificial Sequence
  Chemically Synthesized
QVQLQESGGGLVQAGGSLRLSCAASGSISSLYYMGWYRQAPGKEREFVASITIGASTYYADSVKGRFTISRDNAKNTVYLQMNSLKPEDTAVYYCAVGGGPYQDHSTYPPWLLDYWGQGTQVTVSS

SEQ ID NO: 23817 - protein, 112 aa, Artificial Sequence
  Chemically Synthesized
QVQLQESGGGLVQAGGSLRLSCAASGTTMGWYRQAPGKERELVASIDRGASTNYADSVKGRFTISRDNAKNTVYLQMNSLKPEDTAVYYCALLLLRLTTLYWGQGTQVTVSS

SEQ ID NO: 23818 - protein, 122 aa, Artificial Sequence
  Chemically Synthesized
QVQLQESGGGLVQAGGSLRLSCAASGSIFQDFDMGWYRQAPGKERELVAAIDSGTSTNYADSVKGRFTISRDNAKNTVYLQMNSLKPEDTAVYYCAVVRGLRDALRDDLAYWGQGTQVTVSS

SEQ ID NO: 23819 - protein, 118 aa, Artificial Sequence
  Chemically Synthesized
QVQLQESGGGLVQAGGSLRLSCAASGYISSGYYMGWYRQAPGKERELVAAIDDGSNTNYADSVKGRFTISRDNAKNTVYLQMNSLKPEDTAVYYCAVKLYSDNSHPYWGQGTQVTVSS

SEQ ID NO: 23820 - protein, 120 aa, Artificial Sequence
  Chemically Synthesized
QVQLQESGGGLVQAGGSLRLSCAASGYIFHHHAMGWYRQAPGKEREFVASITAGAITYYADSVKGRFTISRDNAKNTVYLQMNSLKPEDTAVYYCAVHDRDRYPWLHDYWGQGTQVTVSS

SEQ ID NO: 23821 - protein, 118 aa, Artificial Sequence
  Chemically Synthesized
QVQLQESGGGLVQAGGSLRLSCAASGYISDKSYMGWYRQAPGKERELVAAIGYGGTTYYADSVKGRFTISRDNAKNTVYLQMNSLKPEDTAVYYCAVARASPDFHAYWGQGTQVTVSS

SEQ ID NO: 23822 - protein, 117 aa, Artificial Sequence
  Chemically Synthesized
QVQLQESGGGLVQAGGSLRLSCAASGNIFVYDGMGWYRQAPGKEREFVAAIDSGAITNYADSVKGRFTISRDNAKNTVYLQMNSLKPEDTAVYYCAVGTSGSVFLYWGQGTQVTVSS

SEQ ID NO: 23823 - protein, 116 aa, Artificial Sequence
  Chemically Synthesized
QVQLQESGGGLVQAGGSLRLSCAASGNIFDDGYMGWYRQAPGKEREFVAAIGSVVLPYADSVKGRFTISRDNAKNTVYLQMNSLKPEDTAVYYCAVSLVLLTGIYWGQGTQVTVSS

SEQ ID NO: 23824 - protein, 117 aa, Artificial Sequence
  Chemically Synthesized
QVQLQESGGGLVQAGGSLRLSCAASGSILTTVMGWYRQAPGKEREFVAAIGIGGTTNYADSVKGRFTISRDNAKNTVYLQMNSLKPEDTAVYYCAAYGYGIGDYYYWGQGTQVTVSS

SEQ ID NO: 23825 - protein, 123 aa, Artificial Sequence
  Chemically Synthesized
QVQLQESGGGLVQAGGSLRLSCAASGYISLYDYMGWYRQAPGKEREFVDTGANTYYADSVKGRFTISRDNAKNTVYLQMNSLKPEDTAVYYCAAADAPDYQDPIHGSDAYSYWGQGTQVTVSS

SEQ ID NO: 23826 - protein, 121 aa, Artificial Sequence
  Chemically Synthesized
QVQLQESGGGLVQAGGSLRLSCAASGYISLRDSMGWYRQAPGKEREFVAAIDRGATTNYADSVKGRFTISRDNAKNTVYLQMNSLKPEDTAVYYCAASTVVLVTVTLLIYWGQGTQVTVSS

SEQ ID NO: 23827 - protein, 117 aa, Artificial Sequence
  Chemically Synthesized
QVQLQESGGGLVQAGGSLRLSCAASGSISTPEKMGWYRQAPGKEREFVASITAGASTNYADSVKGRFTISRDNAKNTVYLQMNSLKPEDTAVYYCAVIYGGEVPFYWGQGTQVTVSS

SEQ ID NO: 23828 - protein, 117 aa, Artificial Sequence
  Chemically Synthesized
QVQLQESGGGLVQAGGSLRLSCAASGNISKAELMGWYRQAPGKEREFVASIASGGITYYADSVKGRFTISRDNAKNTVYLQMNSLKPEDTAVYYCAAYTYRGSFNYWGQGTQVTVSS

SEQ ID NO: 23829 - protein, 126 aa, Artificial Sequence
  Chemically Synthesized
QVQLQESGGGLVQAGGSLRLSCAASGYISGGEFMGWYRQAPGKEREFVAAIDTGGITYYADSVKGRFTISRDNAKNTVYLQMNSLKPEDTAVYYCAVDKNPLEPFPDAGRQYFQYWGQGTQVTVSS

SEQ ID NO: 23830 - protein, 122 aa, Artificial Sequence
  Chemically Synthesized
QVQLQESGGGLVQAGGSLRLSCAASGSIFPPDIMGWYRQAPGKEREFVATITYGGITNYADSVKGRFTISRDNAKNTVYLQMNSLKPEDTAVYYCAALIGEYDSPVYLHNYWGQGTQVTVSS

SEQ ID NO: 23831 - protein, 117 aa, Artificial Sequence
  Chemically Synthesized
QVQLQESGGGLVQAGGSLRLSCAASGTISHYYIMGWYRQAPGKERELVAGINYGSTTNYADSVKGRFTISRDNAKNTVYLQMNSLKPEDTAVYYCAVLLLLPVPSYWGQGTQVTVSS

SEQ ID NO: 23832 - protein, 118 aa, Artificial Sequence
  Chemically Synthesized
QVQLQESGGGLVQAGGSLRLSCAASGNIFYTSHMGWYRQAPGKEREFVATITAGGNTNYADSVKGRFTISRDNAKNTVYLQMNSLKPEDTAVYYCAVVIRKGYVHPYWGQGTQVTVSS

SEQ ID NO: 23833 - protein, 126 aa, Artificial Sequence
  Chemically Synthesized
QVQLQESGGGLVQAGGSLRLSCAASGYIFGGDAMGWYRQAPGKEREFVAAIDDGSNTNYADSVKGRFTISRDNAKNTVYLQMNSLKPEDTAVYYCAVYVYPYSGPPYGGPITHAYWGQGTQVTVSS

SEQ ID NO: 23834 - protein, 118 aa, Artificial Sequence
  Chemically Synthesized
QVQLQESGGGLVQAGGSLRLSCAASGNIFYDIFMGWYRQAPGKERELVAGIGQGSSTNYADSVKGRFTISRDNAKNTVYLQMNSLKPEDTAVYYCAVTHPFWPSHDYWGQGTQVTVSS

SEQ ID NO: 23835 - protein, 126 aa, Artificial Sequence
  Chemically Synthesized
QVQLQESGGGLVQAGGSLRLSCAASGYISTDYYMGWYRQAPGKERELVATIGYGSTTNYADSVKGRFTISRDNAKNTVYLQMNSLKPEDTAVYYCAVDGPVGAYAHWRYHATHVYWGQGTQVTVSS

SEQ ID NO: 23836 - protein, 126 aa, Artificial Sequence
  Chemically Synthesized
QVQLQESGGGLVQAGGSLRLSCAASGSISPDDWMGWYRQAPGKEREFVATITRGSTTNYADSVKGRFTISRDNAKNTVYLQMNSLKPEDTAVYYCAAYQKWRVPWYVTVSVPHTYWGQGTQVTVSS

SEQ ID NO: 23837 - protein, 117 aa, Artificial Sequence
  Chemically Synthesized
QVQLQESGGGLVQAGGSLRLSCAASGYIFYDHYMGWYRQAPGKEREFVAGITNGSNTYADSVKGRFTISRDNAKNTVYLQMNSLKPEDTAVYYCAVGWHRDPPHYYWGQGTQVTVSS

SEQ ID NO: 23838 - protein, 123 aa, Artificial Sequence
  Chemically Synthesized
QVQLQESGGGLVQAGGSLRLSCAASGYIFRTDYMGWYRQAPGKERELVASITYGSSTNYADSVKGRFTISRDNAKNTVYLQMNSLKPEDTAVYYCAADYKGQEQWDYADHYYWGQGTQVTVSS

SEQ ID NO: 23839 - protein, 118 aa, Artificial Sequence
  Chemically Synthesized
QVQLQESGGGLVQAGGSLRLSCAASGNIFGRYIMGWYRQAPGKERELVAAIDGGSITYYADSVKGRFTISRDNAKNTVYLQMNSLKPEDTAVYYCAVYEGYDYNHGYWGQGTQVTVSS

SEQ ID NO: 23840 - protein, 118 aa, Artificial Sequence
  Chemically Synthesized
QVQLQESGGGLVQAGGSLRLSCAASGTISINYYMGWYRQAPGKERELVAAIDDGSSTYYADSVKGRFTISRDNAKNTVYLQMNSLKPEDTAVYYCAAWDGPPAEHRYWGQGTQVTVSS

SEQ ID NO: 23841 - protein, 126 aa, Artificial Sequence
  Chemically Synthesized
QVQLQESGGGLVQAGGSLRLSCAASGYIFTDYVMGWYRQAPGKEREFVAGITGGGTTNYADSVKGRFTISRDNAKNTVYLQMNSLKPEDTAVYYCAAVYYGQHRDSDVYVYTHGYWGQGTQVTVSS

SEQ ID NO: 23842 - protein, 118 aa, Artificial Sequence
  Chemically Synthesized
QVQLQESGGGLVQAGGSLRLSCAASGTISQQDGMGWYRQAPGKERELVAGIDPGGSTNYADSVKGRFTISRDNAKNTVYLQMNSLKPEDTAVYYCAALDQRLGGHGYWGQGTQVTVSS

SEQ ID NO: 23843 - protein, 118 aa, Artificial Sequence
  Chemically Synthesized
QVQLQESGGGLVQAGGSLRLSCAASGSISYVGVMGWYRQAPGKEREFVATINEGSSTYYADSVKGRFTISRDNAKNTVYLQMNSLKPEDTAVYYCAVYYAVNGGHGYWGQGTQVTVSS

SEQ ID NO: 23844 - protein, 114 aa, Artificial Sequence
  Chemically Synthesized
QVQLQESGGGLVQAGGSLRLSCAASGNISVQSMGWYRQAPGKERELVAAIALGTTTNYADSVKGRFTISRDNAKNTVYLQMNSLKPEDTAVYYCAADGGVHGYWGQGTQVTVSS

SEQ ID NO: 23845 - protein, 112 aa, Artificial Sequence
  Chemically Synthesized
QVQLQESGGGLVQAGGSLRLSCAASGTISYGPDMGWYRQAPGKEREFVAGIADGGSTYYADSVKGRFTISRDNAKNTVYLQMNSLKPEDTAVYYCADCLLYWGQGTQVTVSS

SEQ ID NO: 23846 - protein, 122 aa, Artificial Sequence
  Chemically Synthesized
QVQLQESGGGLVQAGGSLRLSCAASGTISIPVAMGWYRQAPGKEREFVASITTGATTYYADSVKGRFTISRDNAKNTVYLQMNSLKPEDTAVYYCAAYKPRTPAYDGRYAYWGQGTQVTVSS

SEQ ID NO: 23847 - protein, 118 aa, Artificial Sequence
  Chemically Synthesized
QVQLQESGGGLVQAGGSLRLSCAASGTISSADWMGWYRQAPGKERELVATITIGGNTNYADSVKGRFTISRDNAKNTVYLQMNSLKPEDTAVYYCAVVPYAVADFVYWGQGTQVTVSS

SEQ ID NO: 23848 - protein, 118 aa, Artificial Sequence
  Chemically Synthesized
QVQLQESGGGLVQAGGSLRLSCAASGTISGYLVMGWYRQAPGKERELVASISGGTSTNYADSVKGRFTISRDNAKNTVYLQMNSLKPEDTAVYYCAAADASLYVHIYWGQGTQVTVSS

SEQ ID NO: 23849 - protein, 118 aa, Artificial Sequence
  Chemically Synthesized
QVQLQESGGGLVQAGGSLRLSCAASGYISYQANMGWYRQAPGKERELVAGISWGAITYYADSVKGRFTISRDNAKNTVYLQMNSLKPEDTAVYYCAVQYSPGPYHGYWGQGTQVTVSS

SEQ ID NO: 23850 - protein, 118 aa, Artificial Sequence
  Chemically Synthesized
QVQLQESGGGLVQAGGSLRLSCAASGYISLQGSMGWYRQAPGKEREFVAAITPGGSTYYADSVKGRFTISRDNAKNTVYLQMNSLKPEDTAVYYCAVYDAVITTYDYWGQGTQVTVSS

SEQ ID NO: 23851 - protein, 117 aa, Artificial Sequence
  Chemically Synthesized
QVQLQESGGGLVQAGGSLRLSCAASGTISDGSAMGWYRQAPGKERELVATINGGTTYYADSVKGRFTISRDNAKNTVYLQMNSLKPEDTAVYYCAVQYWLYRGLSYWGQGTQVTVSS

SEQ ID NO: 23852 - protein, 118 aa, Artificial Sequence
  Chemically Synthesized
QVQLQESGGGLVQAGGSLRLSCAASGSIFAYVYMGWYRQAPGKEREFVATIGSGSNTNYADSVKGRFTISRDNAKNTVYLQMNSLKPEDTAVYYCAAIHDSRPQYWYWGQGTQVTVSS

SEQ ID NO: 23853 - protein, 126 aa, Artificial Sequence
  Chemically Synthesized
QVQLQESGGGLVQAGGSLRLSCAASGNIFAVINMGWYRQAPGKEREFVASIDFGSSTNYADSVKGRFTISRDNAKNTVYLQMNSLKPEDTAVYYCAAFTYQYESPDVYGTDLFHYWGQGTQVTVSS

SEQ ID NO: 23854 - protein, 122 aa, Artificial Sequence
  Chemically Synthesized
QVQLQESGGGLVQAGGSLRLSCAASGYISLYANMGWYRQAPGKERELVAGIAQGATTYYADSVKGRFTISRDNAKNTVYLQMNSLKPEDTAVYYCAVVYVWRYADKLYYPYWGQGTQVTVSS

SEQ ID NO: 23855 - protein, 118 aa, Artificial Sequence
  Chemically Synthesized
QVQLQESGGGLVQAGGSLRLSCAASGYISRRWKMGWYRQAPGKEREFVAAIGYGANTNYADSVKGRFTISRDNAKNTVYLQMNSLKPEDTAVYYCAATQHFTAYYLYWGQGTQVTVSS

SEQ ID NO: 23856 - protein, 126 aa, Artificial Sequence
  Chemically Synthesized
QVQLQESGGGLVQAGGSLRLSCAASGNISPSYYMGWYRQAPGKERELVAGITSGGNTYYADSVKGRFTISRDNAKNTVYLQMNSLKPEDTAVYYCAAYDTEDGERLYSVSPSYAYWGQGTQVTVSS

SEQ ID NO: 23857 - protein, 126 aa, Artificial Sequence
  Chemically Synthesized
QVQLQESGGGLVQAGGSLRLSCAASGNISWDYPMGWYRQAPGKERELVAGISYGTNTYYADSVKGRFTISRDNAKNTVYLQMNSLKPEDTAVYYCAVIPKKAYATGATFSAWHTYWGQGTQVTVSS

SEQ ID NO: 23858 - protein, 121 aa, Artificial Sequence
  Chemically Synthesized
QVQLQESGGGLVQAGGSLRLSCAASGTISAVTPMGWYRQAPGKERELVATITTVVLPYADSVKGRFTISRDNAKNTVYLQMNSLKPEDTAVYYCAVIPYDRDGRFYYHDYWGQGTQVTVSS

SEQ ID NO: 23859 - protein, 125 aa, Artificial Sequence
  Chemically Synthesized
QVQLQESGGGLVQAGGSLRLSCAASGYIFTIYRMGWYRQAPGKERELVASIGGGSITYYADSVKGRFTISRDNAKNTVYLQMNSLKPEDTAVYYCAAPPSTLSRTTLVLLLTFYWGQGTQVTVSS

SEQ ID NO: 23860 - protein, 122 aa, Artificial Sequence
  Chemically Synthesized
QVQLQESGGGLVQAGGSLRLSCAASGSIFRRDIMGWYRQAPGKEREFVAGIDGGGNTNYADSVKGRFTISRDNAKNTVYLQMNSLKPEDTAVYYCAVRKVTRAQWRYNLPYWGQGTQVTVSS

SEQ ID NO: 23861 - protein, 118 aa, Artificial Sequence
  Chemically Synthesized
QVQLQESGGGLVQAGGSLRLSCAASGTISSYRYMGWYRQAPGKERELVAGITYGGSTYYADSVKGRFTISRDNAKNTVYLQMNSLKPEDTAVYYCAVYRQDRNAHPYWGQGTQVTVSS

SEQ ID NO: 23862 - protein, 122 aa, Artificial Sequence
  Chemically Synthesized
QVQLQESGGGLVQAGGSLRLSCAASGNISKQVEMGWYRQAPGKEREFVATISYGTSTNYADSVKGRFTISRDNAKNTVYLQMNSLKPEDTAVYYCAVHQDRFWSYRADHGYWGQGTQVTVSS

SEQ ID NO: 23863 - protein, 118 aa, Artificial Sequence
  Chemically Synthesized
QVQLQESGGGLVQAGGSLRLSCAASGNIFPDYTMGWYRQAPGKERELVASIGRGSTTYYADSVKGRFTISRDNAKNTVYLQMNSLKPEDTAVYYCAAFYPDYDIHHYWGQGTQVTVSS

SEQ ID NO: 23864 - protein, 126 aa, Artificial Sequence
  Chemically Synthesized
QVQLQESGGGLVQAGGSLRLSCAASGSISRLYFMGWYRQAPGKEREFVAAIDIGTSTNYADSVKGRFTISRDNAKNTVYLQMNSLKPEDTAVYYCAVRWKQGTPYDRQLSASLDYWGQGTQVTVSS

SEQ ID NO: 23865 - protein, 122 aa, Artificial Sequence
  Chemically Synthesized
QVQLQESGGGLVQAGGSLRLSCAASGSIFRAYSMGWYRQAPGKEREFVASINNGANTYYADSVKGRFTISRDNAKNTVYLQMNSLKPEDTAVYYCAVDFAGPPDGINDHDYWGQGTQVTVSS

SEQ ID NO: 23866 - protein, 122 aa, Artificial Sequence
  Chemically Synthesized
QVQLQESGGGLVQAGGSLRLSCAASGYIFAVYYMGWYRQAPGKERELVAAINDGTSTYYADSVKGRFTISRDNAKNTVYLQMNSLKPEDTAVYYCAAFVDYRSNVPRVYDYWGQGTQVTVSS

SEQ ID NO: 23867 - protein, 122 aa, Artificial Sequence
  Chemically Synthesized
QVQLQESGGGLVQAGGSLRLSCAASGNISITYGMGWYRQAPGKEREFVASITTGGSTYYADSVKGRFTISRDNAKNTVYLQMNSLKPEDTAVYYCAVYTDSYGVYIFYHSYWGQGTQVTVSS

SEQ ID NO: 23868 - protein, 118 aa, Artificial Sequence
  Chemically Synthesized
QVQLQESGGGLVQAGGSLRLSCAASGYISYPGWMGWYRQAPGKERELVATITPGGNTYYADSVKGRFTISRDNAKNTVYLQMNSLKPEDTAVYYCAADYSTTPGLQYWGQGTQVTVSS

SEQ ID NO: 23869 - protein, 122 aa, Artificial Sequence
  Chemically Synthesized
QVQLQESGGGLVQAGGSLRLSCAASGSISTYTWMGWYRQAPGKEREFVASISIGGNTNYADSVKGRFTISRDNAKNTVYLQMNSLKPEDTAVYYCAVFTRVYGRWGDPLRYWGQGTQVTVSS

SEQ ID NO: 23870 - protein, 122 aa, Artificial Sequence
  Chemically Synthesized
QVQLQESGGGLVQAGGSLRLSCAASGSIFNVGQMGWYRQAPGKERELVATIDHGASTYYADSVKGRFTISRDNAKNTVYLQMNSLKPEDTAVYYCAAAIPYYLNHNYAFYYWGQGTQVTVSS

SEQ ID NO: 23871 - protein, 122 aa, Artificial Sequence
  Chemically Synthesized
QVQLQESGGGLVQAGGSLRLSCAASGTIFDYLYMGWYRQAPGKEREFVAGIAYGGTTYYADSVKGRFTISRDNAKNTVYLQMNSLKPEDTAVYYCAAPEGYLVRDPPWYRYWGQGTQVTVSS

SEQ ID NO: 23872 - protein, 112 aa, Artificial Sequence
  Chemically Synthesized
QVQLQESGGGLVQAGGSLRLSCAASGTISGSQIMGWYRQAPGKEREFVASITAGANTYADSVKGRFTISRDNAKNTVYLQMNSLKPEDTAVYYCAAPILQYWGQGTQVTVSS

SEQ ID NO: 23873 - protein, 122 aa, Artificial Sequence
  Chemically Synthesized
QVQLQESGGGLVQAGGSLRLSCAASGNISRDDNMGWYRQAPGKERELVATITYGSSTNYADSVKGRFTISRDNAKNTVYLQMNSLKPEDTAVYYCAVTWAYPGILVFAHDYWGQGTQVTVSS

SEQ ID NO: 23874 - protein, 118 aa, Artificial Sequence
  Chemically Synthesized
QVQLQESGGGLVQAGGSLRLSCAASGTIFDAYAMGWYRQAPGKEREFVAGIGDGTNTNYADSVKGRFTISRDNAKNTVYLQMNSLKPEDTAVYYCAVSRPWGRLFIYWGQGTQVTVSS

SEQ ID NO: 23875 - protein, 118 aa, Artificial Sequence
  Chemically Synthesized
QVQLQESGGGLVQAGGSLRLSCAASGYISRAYYMGWYRQAPGKERELVAAINSGANTYYADSVKGRFTISRDNAKNTVYLQMNSLKPEDTAVYYCAVDRDDLHYHDYWGQGTQVTVSS

SEQ ID NO: 23876 - protein, 122 aa, Artificial Sequence
  Chemically Synthesized
QVQLQESGGGLVQAGGSLRLSCAASGSISWDTIMGWYRQAPGKEREFVASISYGTTTNYADSVKGRFTISRDNAKNTVYLQMNSLKPEDTAVYYCAAYTWDDWLGWRRHDYWGQGTQVTVSS

SEQ ID NO: 23877 - protein, 117 aa, Artificial Sequence
  Chemically Synthesized
QVQLQESGGGLVQAGGSLRLSCAASGSISFADRMGWYRQAPGKEREFVASISPGSSTYYADSVKGRFTISRDNAKNTVYLQMNSLKPEDTAVYYCAADVDTSFSLYWGQGTQVTVSS

SEQ ID NO: 23878 - protein, 122 aa, Artificial Sequence
  Chemically Synthesized
QVQLQESGGGLVQAGGSLRLSCAASGTIFRGYDMGWYRQAPGKERELVASIAVGGITYYADSVKGRFTISRDNAKNTVYLQMNSLKPEDTAVYYCAVLGGNQRGSWRGFVYWGQGTQVTVSS

SEQ ID NO: 23879 - protein, 117 aa, Artificial Sequence
  Chemically Synthesized
QVQLQESGGGLVQAGGSLRLSCAASGTIFSTVMGWYRQAPGKERELVATIAAGANTYYADSVKGRFTISRDNAKNTVYLQMNSLKPEDTAVYYCAAYSYIALYLPYWGQGTQVTVSS

SEQ ID NO: 23880 - protein, 118 aa, Artificial Sequence
  Chemically Synthesized
QVQLQESGGGLVQAGGSLRLSCAASGYISYYHYMGWYRQAPGKERELVAAIDSGAITYYADSVKGRFTISRDNAKNTVYLQMNSLKPEDTAVYYCAVYHPIFKALTYWGQGTQVTVSS

SEQ ID NO: 23881 - protein, 118 aa, Artificial Sequence
  Chemically Synthesized
QVQLQESGGGLVQAGGSLRLSCAASGTISVYYDMGWYRQAPGKERELVAAISYGSSTNYADSVKGRFTISRDNAKNTVYLQMNSLKPEDTAVYYCAVRVGVTSHFAYWGQGTQVTVSS

SEQ ID NO: 23882 - protein, 116 aa, Artificial Sequence
  Chemically Synthesized
QVQLQESGGGLVQAGGSLRLSCAASGYISNVEMGWYRQAPGKERELVAAISYGTITNYADSVKGRFTISRDNAKNTVYLQMNSLKPEDTAVYYCAVFPSDRRLLYWGQGTQVTVSS

SEQ ID NO: 23883 - protein, 126 aa, Artificial Sequence
  Chemically Synthesized
QVQLQESGGGLVQAGGSLRLSCAASGTIFPYDFMGWYRQAPGKEREFVAGITNGSSTNYADSVKGRFTISRDNAKNTVYLQMNSLKPEDTAVYYCAAAITGAWSGARYGNDGLYYWGQGTQVTVSS

SEQ ID NO: 23884 - protein, 118 aa, Artificial Sequence
  Chemically Synthesized
QVQLQESGGGLVQAGGSLRLSCAASGYISDPYYMGWYRQAPGKERELVASISGGGITNYADSVKGRFTISRDNAKNTVYLQMNSLKPEDTAVYYCAVHGVYIYNHTYWGQGTQVTVSS

SEQ ID NO: 23885 - protein, 126 aa, Artificial Sequence
  Chemically Synthesized
QVQLQESGGGLVQAGGSLRLSCAASGYISAYNGMGWYRQAPGKERELVATIDRGGTTYYADSVKGRFTISRDNAKNTVYLQMNSLKPEDTAVYYCAARSADYGADYYGFRYVLYYWGQGTQVTVSS

SEQ ID NO: 23886 - protein, 117 aa, Artificial Sequence
  Chemically Synthesized
QVQLQESGGGLVQAGGSLRLSCAASGNISAIDGMGWYRQAPGKERELVASIALGAITNYADSVKGRFTISRDNAKNTVYLQMNSLKPEDTAVYYCAAPSTLTTVIYWGQGTQVTVSS

SEQ ID NO: 23887 - protein, 122 aa, Artificial Sequence
  Chemically Synthesized
QVQLQESGGGLVQAGGSLRLSCAASGNIFVASTMGWYRQAPGKEREFVAAISYGSNTYYADSVKGRFTISRDNAKNTVYLQMNSLKPEDTAVYYCAAGAFLHPGYKVQLTYWGQGTQVTVSS

SEQ ID NO: 23888 - protein, 118 aa, Artificial Sequence
  Chemically Synthesized
QVQLQESGGGLVQAGGSLRLSCAASGSIFGHYIMGWYRQAPGKERELVAGIDRGTITYYADSVKGRFTISRDNAKNTVYLQMNSLKPEDTAVYYCAAAGLAPYQLYYWGQGTQVTVSS

SEQ ID NO: 23889 - protein, 122 aa, Artificial Sequence
  Chemically Synthesized
QVQLQESGGGLVQAGGSLRLSCAASGNIFTPDAMGWYRQAPGKERELVATIDDGSITYYADSVKGRFTISRDNAKNTVYLQMNSLKPEDTAVYYCAAHSQPSGPPGYYYEYWGQGTQVTVSS

SEQ ID NO: 23890 - protein, 117 aa, Artificial Sequence
  Chemically Synthesized
QVQLQESGGGLVQAGGSLRLSCAASGSISAPGWMGWYRQAPGKERELVAGIGGGTITYYADSVKGRFTISRDNAKNTVYLQMNSLKPEDTAVYYCAAYLYDGGFSYWGQGTQVTVSS

SEQ ID NO: 23891 - protein, 122 aa, Artificial Sequence
  Chemically Synthesized
QVQLQESGGGLVQAGGSLRLSCAASGTIFGSSYMGWYRQAPGKEREFVAAIGIGGNTYYADSVKGRFTISRDNAKNTVYLQMNSLKPEDTAVYYCAARFLLAGLYVPLHRYWGQGTQVTVSS

SEQ ID NO: 23892 - protein, 118 aa, Artificial Sequence
  Chemically Synthesized
QVQLQESGGGLVQAGGSLRLSCAASGSIFEPSTMGWYRQAPGKEREFVAAISDGATTNYADSVKGRFTISRDNAKNTVYLQMNSLKPEDTAVYYCAVTGPFDDLLDYWGQGTQVTVSS

SEQ ID NO: 23893 - protein, 122 aa, Artificial Sequence
  Chemically Synthesized
QVQLQESGGGLVQAGGSLRLSCAASGSISTSRRMGWYRQAPGKEREFVASIGVGSSTYYADSVKGRFTISRDNAKNTVYLQMNSLKPEDTAVYYCAVISRQGDNDYSAHSYWGQGTQVTVSS

SEQ ID NO: 23894 - protein, 118 aa, Artificial Sequence
  Chemically Synthesized
QVQLQESGGGLVQAGGSLRLSCAASGSISTGVRMGWYRQAPGKEREFVASISPGSSTYYADSVKGRFTISRDNAKNTVYLQMNSLKPEDTAVYYCAASRRNYWPHRYWGQGTQVTVSS

SEQ ID NO: 23895 - protein, 126 aa, Artificial Sequence
  Chemically Synthesized
QVQLQESGGGLVQAGGSLRLSCAASGTISYYLQMGWYRQAPGKERELVAAIDSGGNTNYADSVKGRFTISRDNAKNTVYLQMNSLKPEDTAVYYCAVLSADDYVGYPGDDRDHYYWGQGTQVTVSS

SEQ ID NO: 23896 - protein, 118 aa, Artificial Sequence
  Chemically Synthesized
QVQLQESGGGLVQAGGSLRLSCAASGTISADVGMGWYRQAPGKEREFVATIGAGSNTNYADSVKGRFTISRDNAKNTVYLQMNSLKPEDTAVYYCAAYSTVHRIFLYWGQGTQVTVSS

SEQ ID NO: 23897 - protein, 118 aa, Artificial Sequence
  Chemically Synthesized
QVQLQESGGGLVQAGGSLRLSCAASGTISRYSAMGWYRQAPGKEREFVASISGGGITNYADSVKGRFTISRDNAKNTVYLQMNSLKPEDTAVYYCAVHIDDRGVHAYWGQGTQVTVSS

SEQ ID NO: 23898 - protein, 119 aa, Artificial Sequence
  Chemically Synthesized
QVQLQESGGGLVQAGGSLRLSCAASGYIFGYQFMGWYRQAPGKERELVATISQGSNTNYADSVKGRFTISRDNAKNTVYLQMNSLKPEDTAVYYCAVDYYYSGSWYVYWGQGTQVTVSS

SEQ ID NO: 23899 - protein, 122 aa, Artificial Sequence
  Chemically Synthesized
QVQLQESGGGLVQAGGSLRLSCAASGSISNPAYMGWYRQAPGKEREFVASISNGSNTNYADSVKGRFTISRDNAKNTVYLQMNSLKPEDTAVYYCAAVYFQALRWGGNHIYWGQGTQVTVSS

SEQ ID NO: 23900 - protein, 118 aa, Artificial Sequence
  Chemically Synthesized
QVQLQESGGGLVQAGGSLRLSCAASGTISYIARMGWYRQAPGKERELVAGITFGTITNYADSVKGRFTISRDNAKNTVYLQMNSLKPEDTAVYYCAVAIWWYYNHIYWGQGTQVTVSS

SEQ ID NO: 23901 - protein, 118 aa, Artificial Sequence
  Chemically Synthesized
QVQLQESGGGLVQAGGSLRLSCAASGTIFDDNVMGWYRQAPGKEREFVAAINSGATTYYADSVKGRFTISRDNAKNTVYLQMNSLKPEDTAVYYCAVSPLSSLFYGYWGQGTQVTVSS

SEQ ID NO: 23902 - protein, 110 aa, Artificial Sequence
  Chemically Synthesized
QVQLQESGGGLVQAGGSLRLSCAASGYISRDSLMGWYRQAPGKERELVASITYGANTNYADSVKGRFTISRDNAKNTVYLQMNSLKPEDTAVYYCAHGYWGQGTQVTVSS

SEQ ID NO: 23903 - protein, 115 aa, Artificial Sequence
  Chemically Synthesized
QVQLQESGGGLVQAGGSLRLSCAASGTIFVYADMGWYRQAPGKEREFVATIDTGASTYYADSVKGRFTISRDNAKNTVYLQMNSLKPEDTAVYYCAITQIPYDYWGQGTQVTVSS

SEQ ID NO: 23904 - protein, 118 aa, Artificial Sequence
  Chemically Synthesized
QVQLQESGGGLVQAGGSLRLSCAASGNISAPEDMGWYRQAPGKEREFVATINGGGNTNYADSVKGRFTISRDNAKNTVYLQMNSLKPEDTAVYYCAAAEYGYADLGYWGQGTQVTVSS

SEQ ID NO: 23905 - protein, 125 aa, Artificial Sequence
  Chemically Synthesized
QVQLQESGGGLVQAGGSLRLSCAASGTISYSSMGWYRQAPGKEREFVAGISGGASTNYADSVKGRFTISRDNAKNTVYLQMNSLKPEDTAVYYCAVYYVINGSVLSEDSTTFFYWGQGTQVTVSS

SEQ ID NO: 23906 - protein, 121 aa, Artificial Sequence
  Chemically Synthesized
QVQLQESGGGLVQAGGSLRLSCAASGNISIRGTMGWYRQAPGKERELVAGIASVVIPYADSVKGRFTISRDNAKNTVYLQMNSLKPEDTAVYYCAADDLAPGRETGWHIYWGQGTQVTVSS

SEQ ID NO: 23907 - protein, 117 aa, Artificial Sequence
  Chemically Synthesized
QVQLQESGGGLVQAGGSLRLSCAASGYISSYPIMGWYRQAPGKERELVATINSVLLPYADSVKGRFTISRDNAKNTVYLQMNSLKPEDTAVYYCAVLTFDEVDFYYWGQGTQVTVSS

SEQ ID NO: 23908 - protein, 118 aa, Artificial Sequence
  Chemically Synthesized
QVQLQESGGGLVQAGGSLRLSCAASGNIFRQYRMGWYRQAPGKERELVAAIATGSTTYYADSVKGRFTISRDNAKNTVYLQMNSLKPEDTAVYYCAVWRKYRGVLGYWGQGTQVTVSS

SEQ ID NO: 23909 - protein, 117 aa, Artificial Sequence
  Chemically Synthesized
QVQLQESGGGLVQAGGSLRLSCAASGSIFSVTMGWYRQAPGKERELVATINGGTTTNYADSVKGRFTISRDNAKNTVYLQMNSLKPEDTAVYYCAADERVTPQLYYWGQGTQVTVSS

SEQ ID NO: 23910 - protein, 114 aa, Artificial Sequence
  Chemically Synthesized
QVQLQESGGGLVQAGGSLRLSCAASGSIFAALSMGWYRQAPGKEREFVATIGGGGSTNYADSVKGRFTISRDNAKNTVYLQMNSLKPEDTAVYYCAVDDRLDYWGQGTQVTVSS

SEQ ID NO: 23911 - protein, 121 aa, Artificial Sequence
  Chemically Synthesized
QVQLQESGGGLVQAGGSLRLSCAASGTIFYDYGMGWYRQAPGKERELVAGIGAGGTTNYADSVKGRFTISRDNAKNTVYLQMNSLKPEDTAVYYCAVTKLYSRQFATTLYWGQGTQVTVSS

SEQ ID NO: 23912 - protein, 118 aa, Artificial Sequence
  Chemically Synthesized
QVQLQESGGGLVQAGGSLRLSCAASGTISWHEDMGWYRQAPGKERELVAGIALGTTTYYADSVKGRFTISRDNAKNTVYLQMNSLKPEDTAVYYCAADLDEPPFLYYWGQGTQVTVSS

SEQ ID NO: 23913 - protein, 118 aa, Artificial Sequence
  Chemically Synthesized
QVQLQESGGGLVQAGGSLRLSCAASGNISAYAYMGWYRQAPGKEREFVASIGTGGNTNYADSVKGRFTISRDNAKNTVYLQMNSLKPEDTAVYYCAAVTTSTADLVYWGQGTQVTVSS

SEQ ID NO: 23914 - protein, 117 aa, Artificial Sequence
  Chemically Synthesized
QVQLQESGGGLVQAGGSLRLSCAASGTIFRFSWMGWYRQAPGKEREFVATISFVLVPYADSVKGRFTISRDNAKNTVYLQMNSLKPEDTAVYYCAAQSNRRSKLFYWGQGTQVTVSS

SEQ ID NO: 23915 - protein, 118 aa, Artificial Sequence
  Chemically Synthesized
QVQLQESGGGLVQAGGSLRLSCAASGTIFPVYSMGWYRQAPGKERELVAAITFGTITNYADSVKGRFTISRDNAKNTVYLQMNSLKPEDTAVYYCAVRSSYTFYLLYWGQGTQVTVSS

SEQ ID NO: 23916 - protein, 118 aa, Artificial Sequence
  Chemically Synthesized
QVQLQESGGGLVQAGGSLRLSCAASGTISRPYNMGWYRQAPGKERELVAAIGYGATTYYADSVKGRFTISRDNAKNTVYLQMNSLKPEDTAVYYCAVGFWGDTIFAYWGQGTQVTVSS

SEQ ID NO: 23917 - protein, 126 aa, Artificial Sequence
  Chemically Synthesized
QVQLQESGGGLVQAGGSLRLSCAASGNIFDGLLMGWYRQAPGKERELVATIGSGAITYYADSVKGRFTISRDNAKNTVYLQMNSLKPEDTAVYYCAASYLFVTDGPGRYGGTYIYWGQGTQVTVSS

SEQ ID NO: 23918 - protein, 118 aa, Artificial Sequence
  Chemically Synthesized
QVQLQESGGGLVQAGGSLRLSCAASGTISVGDDMGWYRQAPGKERELVAAISWGGNTYYADSVKGRFTISRDNAKNTVYLQMNSLKPEDTAVYYCAVTNYSFRPYSYWGQGTQVTVSS

SEQ ID NO: 23919 - protein, 118 aa, Artificial Sequence
  Chemically Synthesized
QVQLQESGGGLVQAGGSLRLSCAASGTIFQGAEMGWYRQAPGKEREFVATIGHGTNTNYADSVKGRFTISRDNAKNTVYLQMNSLKPEDTAVYYCAVGDAVPARYPYWGQGTQVTVSS

SEQ ID NO: 23920 - protein, 126 aa, Artificial Sequence
  Chemically Synthesized
QVQLQESGGGLVQAGGSLRLSCAASGTIFDLVDMGWYRQAPGKEREFVAAIGLGAITNYADSVKGRFTISRDNAKNTVYLQMNSLKPEDTAVYYCAVHTGYVPYLRDWGRVSHAYWGQGTQVTVSS

SEQ ID NO: 23921 - protein, 122 aa, Artificial Sequence
  Chemically Synthesized
QVQLQESGGGLVQAGGSLRLSCAASGNIFAWQIMGWYRQAPGKEREFVASIGTGTTTYYADSVKGRFTISRDNAKNTVYLQMNSLKPEDTAVYYCAVYKGYPLVGSTVLYYWGQGTQVTVSS

SEQ ID NO: 23922 - protein, 118 aa, Artificial Sequence
  Chemically Synthesized
QVQLQESGGGLVQAGGSLRLSCAASGTISVPINMGWYRQAPGKEREFVAAIGLGSNTNYADSVKGRFTISRDNAKNTVYLQMNSLKPEDTAVYYCAAVIKTQAWYYYWGQGTQVTVSS

SEQ ID NO: 23923 - protein, 126 aa, Artificial Sequence
  Chemically Synthesized
QVQLQESGGGLVQAGGSLRLSCAASGYISLPGYMGWYRQAPGKERELVATIDIGGSTYYADSVKGRFTISRDNAKNTVYLQMNSLKPEDTAVYYCAVDYRAGTGISGWPWYILAYWGQGTQVTVSS

SEQ ID NO: 23924 - protein, 118 aa, Artificial Sequence
  Chemically Synthesized
QVQLQESGGGLVQAGGSLRLSCAASGSIFNRSWMGWYRQAPGKERELVAAIAYGTSTNYADSVKGRFTISRDNAKNTVYLQMNSLKPEDTAVYYCAADTLFYIYHVYWGQGTQVTVSS

SEQ ID NO: 23925 - protein, 122 aa, Artificial Sequence
  Chemically Synthesized
QVQLQESGGGLVQAGGSLRLSCAASGNIFEGRDMGWYRQAPGKEREFVAAITYGTTTYYADSVKGRFTISRDNAKNTVYLQMNSLKPEDTAVYYCAARKLGRRFQFDVLSYWGQGTQVTVSS

SEQ ID NO: 23926 - protein, 122 aa, Artificial Sequence
  Chemically Synthesized
QVQLQESGGGLVQAGGSLRLSCAASGYISAIRAMGWYRQAPGKEREFVAGISRGTITNYADSVKGRFTISRDNAKNTVYLQMNSLKPEDTAVYYCAVVYYDDEVTRGVHGYWGQGTQVTVSS

SEQ ID NO: 23927 - protein, 117 aa, Artificial Sequence
  Chemically Synthesized
QVQLQESGGGLVQAGGSLRLSCAASGNISGDPWMGWYRQAPGKERELVAAINDGGITNYADSVKGRFTISRDNAKNTVYLQMNSLKPEDTAVYYCAVDQSTLTTIYWGQGTQVTVSS

SEQ ID NO: 23928 - protein, 118 aa, Artificial Sequence
  Chemically Synthesized
QVQLQESGGGLVQAGGSLRLSCAASGTISAHANMGWYRQAPGKERELVATIGQGSTTNYADSVKGRFTISRDNAKNTVYLQMNSLKPEDTAVYYCAVDDDYQRDLDYWGQGTQVTVSS

SEQ ID NO: 23929 - protein, 122 aa, Artificial Sequence
  Chemically Synthesized
QVQLQESGGGLVQAGGSLRLSCAASGTISSSSEMGWYRQAPGKEREFVAGISYGGSTYYADSVKGRFTISRDNAKNTVYLQMNSLKPEDTAVYYCAVPDNFDDPSWTTLFYWGQGTQVTVSS

SEQ ID NO: 23930 - protein, 124 aa, Artificial Sequence
  Chemically Synthesized
QVQLQESGGGLVQAGGSLRLSCAASGSISYDNDMGWYRQAPGKERELVAAITYGTNYADSVKGRFTISRDNAKNTVYLQMNSLKPEDTAVYYCAVDDPSVDQIDERAIPRLVYWGQGTQVTVSS

SEQ ID NO: 23931 - protein, 118 aa, Artificial Sequence
  Chemically Synthesized
QVQLQESGGGLVQAGGSLRLSCAASGNISDKFFMGWYRQAPGKEREFVAAITRGGNTYYADSVKGRFTISRDNAKNTVYLQMNSLKPEDTAVYYCAVDYTIDTPHPYWGQGTQVTVSS

SEQ ID NO: 23932 - protein, 118 aa, Artificial Sequence
  Chemically Synthesized
QVQLQESGGGLVQAGGSLRLSCAASGSIFGSVGMGWYRQAPGKEREFVASIDAGAITNYADSVKGRFTISRDNAKNTVYLQMNSLKPEDTAVYYCAVADAYLSWLTYWGQGTQVTVSS

SEQ ID NO: 23933 - protein, 122 aa, Artificial Sequence
  Chemically Synthesized
QVQLQESGGGLVQAGGSLRLSCAASGYISYGDDMGWYRQAPGKERELVATIAKGTNTNYADSVKGRFTISRDNAKNTVYLQMNSLKPEDTAVYYCAASQYETLGYGVGFDYWGQGTQVTVSS

SEQ ID NO: 23934 - protein, 122 aa, Artificial Sequence
  Chemically Synthesized
QVQLQESGGGLVQAGGSLRLSCAASGTIFRYRYMGWYRQAPGKEREFVASITLGGSTNYADSVKGRFTISRDNAKNTVYLQMNSLKPEDTAVYYCAVYKYLFGVRPDTFDYWGQGTQVTVSS

SEQ ID NO: 23935 - protein, 118 aa, Artificial Sequence
  Chemically Synthesized
QVQLQESGGGLVQAGGSLRLSCAASGYISRQVRMGWYRQAPGKEREFVASIAPGANTNYADSVKGRFTISRDNAKNTVYLQMNSLKPEDTAVYYCAAVEKRDTYHHYWGQGTQVTVSS

SEQ ID NO: 23936 - protein, 116 aa, Artificial Sequence
  Chemically Synthesized
QVQLQESGGGLVQAGGSLRLSCAASGTFPNDMGWYRQAPGKERELVAGIDGGSTTNYADSVKGRFTISRDNAKNTVYLQMNSLKPEDTAVYYCAARSPLSQPYDYWGQGTQVTVSS

SEQ ID NO: 23937 - protein, 121 aa, Artificial Sequence
  Chemically Synthesized
QVQLQESGGGLVQAGGSLRLSCAASGTISGYTSMGWYRQAPGKEREFVAGINNGANTNYADSVKGRFTISRDNAKNTVYLQMNSLKPEDTAVYYCAAIGYSDTQPRFHYYWGQGTQVTVSS

SEQ ID NO: 23938 - protein, 117 aa, Artificial Sequence
  Chemically Synthesized
QVQLQESGGGLVQAGGSLRLSCAASGYIFGYFVMGWYRQAPGKERELVAGISPGGSTNYADSVKGRFTISRDNAKNTVYLQMNSLKPEDTAVYYCAAIVSPPYDYYWGQGTQVTVSS

SEQ ID NO: 23939 - protein, 117 aa, Artificial Sequence
  Chemically Synthesized
QVQLQESGGGLVQAGGSLRLSCAASGYISGYTDMGWYRQAPGKERELVAAIGQGANTNYADSVKGRFTISRDNAKNTVYLQMNSLKPEDTAVYYCAVDDLTSSSYYWGQGTQVTVSS

SEQ ID NO: 23940 - protein, 118 aa, Artificial Sequence
  Chemically Synthesized
QVQLQESGGGLVQAGGSLRLSCAASGTISPPTTMGWYRQAPGKEREFVAGIGRGGTTNYADSVKGRFTISRDNAKNTVYLQMNSLKPEDTAVYYCAAIWGGGGFHWYWGQGTQVTVSS

SEQ ID NO: 23941 - protein, 118 aa, Artificial Sequence
  Chemically Synthesized
QVQLQESGGGLVQAGGSLRLSCAASGSIFRLWYMGWYRQAPGKEREFVAGINYGAITYYADSVKGRFTISRDNAKNTVYLQMNSLKPEDTAVYYCAALTIWFDVLGYWGQGTQVTVSS

SEQ ID NO: 23942 - protein, 121 aa, Artificial Sequence
  Chemically Synthesized
QVQLQESGGGLVQAGGSLRLSCAASGTILLLTMGWYRQAPGKERELVAAITLGSSTYYADSVKGRFTISRDNAKNTVYLQMNSLKPEDTAVYYCAAYDAYYGLYVPTHDYWGQGTQVTVSS

SEQ ID NO: 23943 - protein, 118 aa, Artificial Sequence
  Chemically Synthesized
QVQLQESGGGLVQAGGSLRLSCAASGYISRSAGMGWYRQAPGKEREFVAGISRGGNTYYADSVKGRFTISRDNAKNTVYLQMNSLKPEDTAVYYCAVRRYRRHYLTYWGQGTQVTVSS

SEQ ID NO: 23944 - protein, 118 aa, Artificial Sequence
  Chemically Synthesized
QVQLQESGGGLVQAGGSLRLSCAASGTISRAYLMGWYRQAPGKEREFVAGINSGGTTNYADSVKGRFTISRDNAKNTVYLQMNSLKPEDTAVYYCAALNGYNNDHYYWGQGTQVTVSS

SEQ ID NO: 23945 - protein, 118 aa, Artificial Sequence
  Chemically Synthesized
QVQLQESGGGLVQAGGSLRLSCAASGYISPYDAMGWYRQAPGKERELVASINRGGSTYYADSVKGRFTISRDNAKNTVYLQMNSLKPEDTAVYYCAIIVSDYVRFDYWGQGTQVTVSS

SEQ ID NO: 23946 - protein, 117 aa, Artificial Sequence
  Chemically Synthesized
QVQLQESGGGLVQAGGSLRLSCAASGSISRATYMGWYRQAPGKERELVATLVRVVLPYADSVKGRFTISRDNAKNTVYLQMNSLKPEDTAVYYCAVVIDTDFHLLYWGQGTQVTVSS

SEQ ID NO: 23947 - protein, 112 aa, Artificial Sequence
  Chemically Synthesized
QVQLQESGGGLVQAGGSLRLSCAASGSIFTTDSMGWYRQAPGKERELVASIAWGGNTYYADSVKGRFTISRDNAKNTVYLQMNSLKPEDTAVYYCAVVLVYWGQGTQVTVSS

SEQ ID NO: 23948 - protein, 117 aa, Artificial Sequence
  Chemically Synthesized
QVQLQESGGGLVQAGGSLRLSCAASGSIFDSVMGWYRQAPGKERELVAAIAWGASTYYADSVKGRFTISRDNAKNTVYLQMNSLKPEDTAVYYCAARQYRVPYFTYWGQGTQVTVSS

SEQ ID NO: 23949 - protein, 122 aa, Artificial Sequence
  Chemically Synthesized
QVQLQESGGGLVQAGGSLRLSCAASGTISTTVAMGWYRQAPGKEREFVAGIGRGATTNYADSVKGRFTISRDNAKNTVYLQMNSLKPEDTAVYYCAAVDLNSGSRAYRYYYWGQGTQVTVSS

SEQ ID NO: 23950 - protein, 122 aa, Artificial Sequence
  Chemically Synthesized
QVQLQESGGGLVQAGGSLRLSCAASGYISELYYMGWYRQAPGKERELVAGIGDGGNTNYADSVKGRFTISRDNAKNTVYLQMNSLKPEDTAVYYCAVDAYNDRGQVVIFQYWGQGTQVTVSS

SEQ ID NO: 23951 - protein, 120 aa, Artificial Sequence
  Chemically Synthesized
QVQLQESGGGLVQAGGSLRLSCAASGTIFSYQMGWYRQAPGKEREFVASISQGGTTYYADSVKGRFTISRDNAKNTVYLQMNSLKPEDTAVYYCAAPLSRTNCRTTFIYWGQGTQVTVSS

SEQ ID NO: 23952 - protein, 118 aa, Artificial Sequence
  Chemically Synthesized
QVQLQESGGGLVQAGGSLRLSCAASGNISTITHMGWYRQAPGKEREFVAGIGYGGNTNYADSVKGRFTISRDNAKNTVYLQMNSLKPEDTAVYYCAAAYHWVHWHNYWGQGTQVTVSS

SEQ ID NO: 23953 - protein, 118 aa, Artificial Sequence
  Chemically Synthesized
QVQLQESGGGLVQAGGSLRLSCAASGNIFSPSVMGWYRQAPGKERELVASIGYGTITNYADSVKGRFTISRDNAKNTVYLQMNSLKPEDTAVYYCAVLYHDRYYYYYWGQGTQVTVSS

SEQ ID NO: 23954 - protein, 117 aa, Artificial Sequence
  Chemically Synthesized
QVQLQESGGGLVQAGGSLRLSCAASGSISTATDMGWYRQAPGKERELVASIDSVLVPYADSVKGRFTISRDNAKNTVYLQMNSLKPEDTAVYYCAAPYGYPYRLQYWGQGTQVTVSS

SEQ ID NO: 23955 - protein, 122 aa, Artificial Sequence
  Chemically Synthesized
QVQLQESGGGLVQAGGSLRLSCAASGTIFDSLEMGWYRQAPGKERELVATIGAGGTTYYADSVKGRFTISRDNAKNTVYLQMNSLKPEDTAVYYCAVHNGYENLNDLDYRYWGQGTQVTVSS

SEQ ID NO: 23956 - protein, 121 aa, Artificial Sequence
  Chemically Synthesized
QVQLQESGGGLVQAGGSLRLSCAASGNISPVSGMGWYRQAPGKEREFVASITYGTITYYADSVKGRFTISRDNAKNTVYLQMNSLKPEDTAVYYCAADYFQSRWSYSSFYWGQGTQVTVSS

SEQ ID NO: 23957 - protein, 122 aa, Artificial Sequence
  Chemically Synthesized
QVQLQESGGGLVQAGGSLRLSCAASGNISGSYPMGWYRQAPGKERELVAAINRGTTTNYADSVKGRFTISRDNAKNTVYLQMNSLKPEDTAVYYCAVRAWAWYGHWARHAYWGQGTQVTVSS

SEQ ID NO: 23958 - protein, 118 aa, Artificial Sequence
  Chemically Synthesized
QVQLQESGGGLVQAGGSLRLSCAASGYIFVVAGMGWYRQAPGKEREFVAGIGGGANTNYADSVKGRFTISRDNAKNTVYLQMNSLKPEDTAVYYCAAYYYYDGDHAYWGQGTQVTVSS

SEQ ID NO: 23959 - protein, 126 aa, Artificial Sequence
  Chemically Synthesized
QVQLQESGGGLVQAGGSLRLSCAASGYISEGYLMGWYRQAPGKEREFVAGIAVGATTNYADSVKGRFTISRDNAKNTVYLQMNSLKPEDTAVYYCAAVQRSYHDYTERHTGYHFYWGQGTQVTVSS

SEQ ID NO: 23960 - protein, 124 aa, Artificial Sequence
  Chemically Synthesized
QVQLQESGGGLVQAGGSLRLSCAASGTISTSTMGWYRQAPGKERELVATIALVVLPYADSVKGRFTISRDNAKNTVYLQMNSLKPEDTAVYYCAAWDYPPWVVNGTLRPYLRYWGQGTQVTVSS

SEQ ID NO: 23961 - protein, 118 aa, Artificial Sequence
  Chemically Synthesized
QVQLQESGGGLVQAGGSLRLSCAASGSISIAWSMGWYRQAPGKEREFVAGIAQGTNTNYADSVKGRFTISRDNAKNTVYLQMNSLKPEDTAVYYCAVIIWASSWHYYWGQGTQVTVSS

SEQ ID NO: 23962 - protein, 118 aa, Artificial Sequence
  Chemically Synthesized
QVQLQESGGGLVQAGGSLRLSCAASGYISAYYVMGWYRQAPGKERELVATITYGTITNYADSVKGRFTISRDNAKNTVYLQMNSLKPEDTAVYYCAVNRYSDGSLSYWGQGTQVTVSS

SEQ ID NO: 23963 - protein, 118 aa, Artificial Sequence
  Chemically Synthesized
QVQLQESGGGLVQAGGSLRLSCAASGYISYTRTMGWYRQAPGKERELVAAISRGATTYYADSVKGRFTISRDNAKNTVYLQMNSLKPEDTAVYYCAAAGYYRSSLLYWGQGTQVTVSS

SEQ ID NO: 23964 - protein, 121 aa, Artificial Sequence
  Chemically Synthesized
QVQLQESGGGLVQAGGSLRLSCAASGTIFDIYPMGWYRQAPGKEREFVAAIGGGTITNYADSVKGRFTISRDNAKNTVYLQMNSLKPEDTAVYYCAVTYSSTTLLFTTFYWGQGTQVTVSS

SEQ ID NO: 23965 - protein, 118 aa, Artificial Sequence
  Chemically Synthesized
QVQLQESGGGLVQAGGSLRLSCAASGTIFSPPFMGWYRQAPGKEREFVAAIDSGAITNYADSVKGRFTISRDNAKNTVYLQMNSLKPEDTAVYYCAAILYDSRWYYYWGQGTQVTVSS

SEQ ID NO: 23966 - protein, 122 aa, Artificial Sequence
  Chemically Synthesized
QVQLQESGGGLVQAGGSLRLSCAASGNISVASIMGWYRQAPGKEREFVAGITGGANTNYADSVKGRFTISRDNAKNTVYLQMNSLKPEDTAVYYCAALWGARQHAPSYHFYWGQGTQVTVSS

SEQ ID NO: 23967 - protein, 117 aa, Artificial Sequence
  Chemically Synthesized
QVQLQESGGGLVQAGGSLRLSCAASGYIFGGVEMGWYRQAPGKERELVAAIGPGASTYYADSVKGRFTISRDNAKNTVYLQMNSLKPEDTAVYYCAALSLLTRTLYWGQGTQVTVSS

SEQ ID NO: 23968 - protein, 118 aa, Artificial Sequence
  Chemically Synthesized
QVQLQESGGGLVQAGGSLRLSCAASGTISRDYYMGWYRQAPGKERELVAAIATGASTNYADSVKGRFTISRDNAKNTVYLQMNSLKPEDTAVYYCAVDWRIVTVHWYWGQGTQVTVSS

SEQ ID NO: 23969 - protein, 116 aa, Artificial Sequence
  Chemically Synthesized
QVQLQESGGGLVQAGGSLRLSCAASGYILTTLMGWYRQAPGKEREFVAAIMVVLLPYADSVKGRFTISRDNAKNTVYLQMNSLKPEDTAVYYCAVGAYDAVYHSYWGQGTQVTVSS

SEQ ID NO: 23970 - protein, 122 aa, Artificial Sequence
  Chemically Synthesized
QVQLQESGGGLVQAGGSLRLSCAASGTIFLRGYMGWYRQAPGKERELVATITYGAITYYADSVKGRFTISRDNAKNTVYLQMNSLKPEDTAVYYCAVYYPDVQDVLANFWYWGQGTQVTVSS

SEQ ID NO: 23971 - protein, 122 aa, Artificial Sequence
  Chemically Synthesized
QVQLQESGGGLVQAGGSLRLSCAASGTIFAIGTMGWYRQAPGKERELVATIGVGSTTNYADSVKGRFTISRDNAKNTVYLQMNSLKPEDTAVYYCAADGDDGYGILSYHYYWGQGTQVTVSS

SEQ ID NO: 23972 - protein, 122 aa, Artificial Sequence
  Chemically Synthesized
QVQLQESGGGLVQAGGSLRLSCAASGNISLLNGMGWYRQAPGKEREFVAGINQGSNTNYADSVKGRFTISRDNAKNTVYLQMNSLKPEDTAVYYCAVLFHVPDDPGTYHAYWGQGTQVTVSS

SEQ ID NO: 23973 - protein, 112 aa, Artificial Sequence
  Chemically Synthesized
QVQLQESGGGLVQAGGSLRLSCAASGTISSWWYMGWYRQAPGKEREFVASITTVVLPYADSVKGRFTISRDNAKNTVYLQMNSLKPEDTAVYYCAAPSDAYWGQGTQVTVSS

SEQ ID NO: 23974 - protein, 122 aa, Artificial Sequence
  Chemically Synthesized
QVQLQESGGGLVQAGGSLRLSCAASGNIFYYGIMGWYRQAPGKERELVAGIDGGATTNYADSVKGRFTISRDNAKNTVYLQMNSLKPEDTAVYYCAAPRLVGDRYNIPHGYWGQGTQVTVSS

SEQ ID NO: 23975 - protein, 118 aa, Artificial Sequence
  Chemically Synthesized
QVQLQESGGGLVQAGGSLRLSCAASGNISPDAVMGWYRQAPGKEREFVAGISYGTITNYADSVKGRFTISRDNAKNTVYLQMNSLKPEDTAVYYCAADGVGLHDHYYWGQGTQVTVSS

SEQ ID NO: 23976 - protein, 121 aa, Artificial Sequence
  Chemically Synthesized
QVQLQESGGGLVQAGGSLRLSCAASGNISDVGYMGWYRQAPGKERELVAAISEGGNTNYADSVKGRFTISRDNAKNTVYLQMNSLKPEDTAVYYCAAGSKTVVFTTLSFYWGQGTQVTVSS

SEQ ID NO: 23977 - protein, 117 aa, Artificial Sequence
  Chemically Synthesized
QVQLQESGGGLVQAGGSLRLSCAASGYISYYYQMGWYRQAPGKEREFVAGIDDGSTTNYADSVKGRFTISRDNAKNTVYLQMNSLKPEDTAVYYCAAERDQYETMYWGQGTQVTVSS

SEQ ID NO: 23978 - protein, 117 aa, Artificial Sequence
  Chemically Synthesized
QVQLQESGGGLVQAGGSLRLSCAASGNIFVYLVMGWYRQAPGKERELVPLLVTVLLPYADSVKGRFTISRDNAKNTVYLQMNSLKPEDTAVYYCAVSRPLDTYHPYWGQGTQVTVSS

SEQ ID NO: 23979 - protein, 121 aa, Artificial Sequence
  Chemically Synthesized
QVQLQESGGGLVQAGGSLRLSCAASGNISSDTPMGWYRQAPGKERELVATISVGGTTNYADSVKGRFTISRDNAKNTVYLQMNSLKPEDTAVYYCAVSVLVCTRLSTLMYWGQGTQVTVSS

SEQ ID NO: 23980 - protein, 122 aa, Artificial Sequence
  Chemically Synthesized
QVQLQESGGGLVQAGGSLRLSCAASGYISSNNAMGWYRQAPGKERELVASIGIGGSTNYADSVKGRFTISRDNAKNTVYLQMNSLKPEDTAVYYCAAYYTWSILAAGYYLYWGQGTQVTVSS

SEQ ID NO: 23981 - protein, 118 aa, Artificial Sequence
  Chemically Synthesized
QVQLQESGGGLVQAGGSLRLSCAASGSISDESIMGWYRQAPGKEREFVAAITAGGTTNYADSVKGRFTISRDNAKNTVYLQMNSLKPEDTAVYYCAAIYKGRYYLWYWGQGTQVTVSS

SEQ ID NO: 23982 - protein, 125 aa, Artificial Sequence
  Chemically Synthesized
QVQLQESGGGLVQAGGSLRLSCAASGTISAAPIMGWYRQAPGKERELVAGIADGTTTYYADSVKGRFTISRDNAKNTVYLQMNSLKPEDTAVYYCAANENYGQVTYVDKRSLIYWGQGTQVTVSS

SEQ ID NO: 23983 - protein, 118 aa, Artificial Sequence
  Chemically Synthesized
QVQLQESGGGLVQAGGSLRLSCAASGTIFAFLGMGWYRQAPGKEREFVAAITSGTITYYADSVKGRFTISRDNAKNTVYLQMNSLKPEDTAVYYCAAYEYSTYYYVYWGQGTQVTVSS

SEQ ID NO: 23984 - protein, 126 aa, Artificial Sequence
  Chemically Synthesized
QVQLQESGGGLVQAGGSLRLSCAASGNISRFRAMGWYRQAPGKEREFVASIGYGGITNYADSVKGRFTISRDNAKNTVYLQMNSLKPEDTAVYYCAALLDGATFGGSRPPLFHYYWGQGTQVTVSS

SEQ ID NO: 23985 - protein, 118 aa, Artificial Sequence
  Chemically Synthesized
QVQLQESGGGLVQAGGSLRLSCAASGNIFPFGGMGWYRQAPGKEREFVAGISYGANTNYADSVKGRFTISRDNAKNTVYLQMNSLKPEDTAVYYCAAYLYYRFYHYYWGQGTQVTVSS

SEQ ID NO: 23986 - protein, 126 aa, Artificial Sequence
  Chemically Synthesized
QVQLQESGGGLVQAGGSLRLSCAASGNISDIYFMGWYRQAPGKERELVAGIAEGSTTYYADSVKGRFTISRDNAKNTVYLQMNSLKPEDTAVYYCAVRSYRAQRAAYQDYRDLVYWGQGTQVTVSS

SEQ ID NO: 23987 - protein, 118 aa, Artificial Sequence
  Chemically Synthesized
QVQLQESGGGLVQAGGSLRLSCAASGYISDPTVMGWYRQAPGKEREFVAAIGNGATTNYADSVKGRFTISRDNAKNTVYLQMNSLKPEDTAVYYCAAIWLDFRYHYYWGQGTQVTVSS

SEQ ID NO: 23988 - protein, 122 aa, Artificial Sequence
  Chemically Synthesized
QVQLQESGGGLVQAGGSLRLSCAASGTIFAPDSMGWYRQAPGKEREFVAAISSGSNTYYADSVKGRFTISRDNAKNTVYLQMNSLKPEDTAVYYCAVYNSRYTPGVWPLAYWGQGTQVTVSS

SEQ ID NO: 23989 - protein, 118 aa, Artificial Sequence
  Chemically Synthesized
QVQLQESGGGLVQAGGSLRLSCAASGTISYPWSMGWYRQAPGKERELVAGIANGTITYYADSVKGRFTISRDNAKNTVYLQMNSLKPEDTAVYYCAAAFYVAYVHDYWGQGTQVTVSS

SEQ ID NO: 23990 - protein, 120 aa, Artificial Sequence
  Chemically Synthesized
QVQLQESGGGLVQAGGSLRLSCAASGSIFVYNMGWYRQAPGKERELVAGIDVGTNTNYADSVKGRFTISRDNAKNTVYLQMNSLKPEDTAVYYCAVQRGLDPGYPSSIYWGQGTQVTVSS

SEQ ID NO: 23991 - protein, 118 aa, Artificial Sequence
  Chemically Synthesized
QVQLQESGGGLVQAGGSLRLSCAASGNISGNADMGWYRQAPGKERELVATIAGGANTYYADSVKGRFTISRDNAKNTVYLQMNSLKPEDTAVYYCAADDTYQEQHGYWGQGTQVTVSS

SEQ ID NO: 23992 - protein, 118 aa, Artificial Sequence
  Chemically Synthesized
QVQLQESGGGLVQAGGSLRLSCAASGNIFRRYTMGWYRQAPGKEREFVAAIASGASTNYADSVKGRFTISRDNAKNTVYLQMNSLKPEDTAVYYCAAAWYKQTKHYYWGQGTQVTVSS

SEQ ID NO: 23993 - protein, 126 aa, Artificial Sequence
  Chemically Synthesized
QVQLQESGGGLVQAGGSLRLSCAASGNIFRPSTMGWYRQAPGKEREFVAGINLGSTTNYADSVKGRFTISRDNAKNTVYLQMNSLKPEDTAVYYCAAVDPTRSYGGEVKGLWHYYWGQGTQVTVSS

SEQ ID NO: 23994 - protein, 116 aa, Artificial Sequence
  Chemically Synthesized
QVQLQESGGGLVQAGGSLRLSCAASGNISSRMGWYRQAPGKERELVAGIDGGATTNYADSVKGRFTISRDNAKNTVYLQMNSLKPEDTAVYYCAAYSSSVNGLRYWGQGTQVTVSS

SEQ ID NO: 23995 - protein, 118 aa, Artificial Sequence
  Chemically Synthesized
QVQLQESGGGLVQAGGSLRLSCAASGYIFAYTRMGWYRQAPGKERELVAGITYGTNTYYADSVKGRFTISRDNAKNTVYLQMNSLKPEDTAVYYCAVTAHPLERLLYWGQGTQVTVSS

SEQ ID NO: 23996 - protein, 115 aa, Artificial Sequence
  Chemically Synthesized
QVQLQESGGGLVQAGGSLRLSCAASGSISDYYYMGWYRQAPGKERELVATISVGGTTNYADSVKGRFTISRDNAKNTVYLQMNSLKPEDTAVYYCADYSVYLDYWGQGTQVTVSS

SEQ ID NO: 23997 - protein, 118 aa, Artificial Sequence
  Chemically Synthesized
QVQLQESGGGLVQAGGSLRLSCAASGTISYRYIMGWYRQAPGKEREFVASINGGSSTYYADSVKGRFTISRDNAKNTVYLQMNSLKPEDTAVYYCAVPGRWYGRYWYWGQGTQVTVSS

SEQ ID NO: 23998 - protein, 125 aa, Artificial Sequence
  Chemically Synthesized
QVQLQESGGGLVQAGGSLRLSCAASGYISYRQEMGWYRQAPGKERELVAGIAYGTTTNYADSVKGRFTISRDNAKNTVYLQMNSLKPEDTAVYYCAVDGGAGGNSYIYDGTHDYWGQGTQVTVSS

SEQ ID NO: 23999 - protein, 116 aa, Artificial Sequence
  Chemically Synthesized
QVQLQESGGGLVQAGGSLRLSCAASGYIFSTVYMGWYRQAPGKEREFVAAINGSTTNYADSVKGRFTISRDNAKNTVYLQMNSLKPEDTAVYYCAVCVTVTTLIYWGQGTQVTVSS

SEQ ID NO: 24000 - protein, 118 aa, Artificial Sequence
  Chemically Synthesized
QVQLQESGGGLVQAGGSLRLSCAASGNISRILVMGWYRQAPGKEREFVAGINGGANTYYADSVKGRFTISRDNAKNTVYLQMNSLKPEDTAVYYCAAIRRQYSWHAYWGQGTQVTVSS

SEQ ID NO: 24001 - protein, 122 aa, Artificial Sequence
  Chemically Synthesized
QVQLQESGGGLVQAGGSLRLSCAASGSISVLAAMGWYRQAPGKEREFVASINVGGNTNYADSVKGRFTISRDNAKNTVYLQMNSLKPEDTAVYYCAAVPRRDSSPYPYLAYWGQGTQVTVSS

SEQ ID NO: 24002 - protein, 122 aa, Artificial Sequence
  Chemically Synthesized
QVQLQESGGGLVQAGGSLRLSCAASGTISPVASMGWYRQAPGKERELVATIDRGGTTNYADSVKGRFTISRDNAKNTVYLQMNSLKPEDTAVYYCAVDLNIKDYYQYIFDYWGQGTQVTVSS

SEQ ID NO: 24003 - protein, 118 aa, Artificial Sequence
  Chemically Synthesized
QVQLQESGGGLVQAGGSLRLSCAASGSISSTNGMGWYRQAPGKERELVAAISGGSTTNYADSVKGRFTISRDNAKNTVYLQMNSLKPEDTAVYYCAVVWWRDRYYYYWGQGTQVTVSS

SEQ ID NO: 24004 - protein, 118 aa, Artificial Sequence
  Chemically Synthesized
QVQLQESGGGLVQAGGSLRLSCAASGSISGIRKMGWYRQAPGKERELVAAIGGGSTTYYADSVKGRFTISRDNAKNTVYLQMNSLKPEDTAVYYCAVLTYDAQYFYYWGQGTQVTVSS

SEQ ID NO: 24005 - protein, 118 aa, Artificial Sequence
  Chemically Synthesized
QVQLQESGGGLVQAGGSLRLSCAASGSISAYAVMGWYRQAPGKEREFVAAITVGGSTNYADSVKGRFTISRDNAKNTVYLQMNSLKPEDTAVYYCAAAGRAAVWHYYWGQGTQVTVSS

SEQ ID NO: 24006 - protein, 118 aa, Artificial Sequence
  Chemically Synthesized
QVQLQESGGGLVQAGGSLRLSCAASGYISNPVRMGWYRQAPGKEREFVAGIGVGGITYYADSVKGRFTISRDNAKNTVYLQMNSLKPEDTAVYYCAAVLRKYTYHAYWGQGTQVTVSS

SEQ ID NO: 24007 - protein, 118 aa, Artificial Sequence
  Chemically Synthesized
QVQLQESGGGLVQAGGSLRLSCAASGSISWWDWMGWYRQAPGKERELVASINAGTTTNYADSVKGRFTISRDNAKNTVYLQMNSLKPEDTAVYYCAVIRFRRYRFPYWGQGTQVTVSS

SEQ ID NO: 24008 - protein, 126 aa, Artificial Sequence
  Chemically Synthesized
QVQLQESGGGLVQAGGSLRLSCAASGTISYFYYMGWYRQAPGKEREFVATIAHGTSTNYADSVKGRFTISRDNAKNTVYLQMNSLKPEDTAVYYCAVIVKPNGRAHLGRGNYLGYWGQGTQVTVSS

SEQ ID NO: 24009 - protein, 118 aa, Artificial Sequence
  Chemically Synthesized
QVQLQESGGGLVQAGGSLRLSCAASGNIFVSYVMGWYRQAPGKEREFVAGIADGANTYYADSVKGRFTISRDNAKNTVYLQMNSLKPEDTAVYYCAAGWVSHDPLYYWGQGTQVTVSS

SEQ ID NO: 24010 - protein, 122 aa, Artificial Sequence
  Chemically Synthesized
QVQLQESGGGLVQAGGSLRLSCAASGTIFWYRRMGWYRQAPGKEREFVAGINRGTTTYYADSVKGRFTISRDNAKNTVYLQMNSLKPEDTAVYYCAAYPYYYVGATYPFDYWGQGTQVTVSS

SEQ ID NO: 24011 - protein, 122 aa, Artificial Sequence
  Chemically Synthesized
QVQLQESGGGLVQAGGSLRLSCAASGYISDPRDMGWYRQAPGKERELVAGISDGATTYYADSVKGRFTISRDNAKNTVYLQMNSLKPEDTAVYYCAAYWDGRVSRRPNYPYWGQGTQVTVSS

SEQ ID NO: 24012 - protein, 118 aa, Artificial Sequence
  Chemically Synthesized
QVQLQESGGGLVQAGGSLRLSCAASGSIFGRYRMGWYRQAPGKERELVAGIDDGSSTNYADSVKGRFTISRDNAKNTVYLQMNSLKPEDTAVYYCAALWYDTRYHYYWGQGTQVTVSS

SEQ ID NO: 24013 - protein, 114 aa, Artificial Sequence
  Chemically Synthesized
QVQLQESGGGLVQAGGSLRLSCAASGTISDYLSMGWYRQAPGKEREFVAAIATGGTTYYADSVKGRFTISRDNAKNTVYLQMNSLKPEDTAVYYCAASDNHLYWGQGTQVTVSS

SEQ ID NO: 24014 - protein, 121 aa, Artificial Sequence
  Chemically Synthesized
QVQLQESGGGLVQAGGSLRLSCAASGNIFSLFMGWYRQAPGKEREFVAGIDYGANTNYADSVKGRFTISRDNAKNTVYLQMNSLKPEDTAVYYCAARFYGDTVDYVPFQYWGQGTQVTVSS

SEQ ID NO: 24015 - protein, 118 aa, Artificial Sequence
  Chemically Synthesized
QVQLQESGGGLVQAGGSLRLSCAASGYISKHDLMGWYRQAPGKEREFVASISDGGITNYADSVKGRFTISRDNAKNTVYLQMNSLKPEDTAVYYCAVENYNLWSHVYWGQGTQVTVSS

SEQ ID NO: 24016 - protein, 118 aa, Artificial Sequence
  Chemically Synthesized
QVQLQESGGGLVQAGGSLRLSCAASGTISGSQFMGWYRQAPGKERELVATITVGTITYYADSVKGRFTISRDNAKNTVYLQMNSLKPEDTAVYYCAAWYLAYPLYWYWGQGTQVTVSS

SEQ ID NO: 24017 - protein, 122 aa, Artificial Sequence
  Chemically Synthesized
QVQLQESGGGLVQAGGSLRLSCAASGNISPPAVMGWYRQAPGKEREFVAGIDVGANTNYADSVKGRFTISRDNAKNTVYLQMNSLKPEDTAVYYCAVIIYDEISGGPRHYYWGQGTQVTVSS

SEQ ID NO: 24018 - protein, 118 aa, Artificial Sequence
  Chemically Synthesized
QVQLQESGGGLVQAGGSLRLSCAASGNISRKVTMGWYRQAPGKEREFVAGIGAGGSTYYADSVKGRFTISRDNAKNTVYLQMNSLKPEDTAVYYCAVVILGEAWHYYWGQGTQVTVSS

SEQ ID NO: 24019 - protein, 116 aa, Artificial Sequence
  Chemically Synthesized
QVQLQESGGGLVQAGGSLRLSCAASGNISPTDIMGWYRQAPGKEREFVAAITYGATYADSVKGRFTISRDNAKNTVYLQMNSLKPEDTAVYYCAATHPEDQDLLYWGQGTQVTVSS

SEQ ID NO: 24020 - protein, 118 aa, Artificial Sequence
  Chemically Synthesized
QVQLQESGGGLVQAGGSLRLSCAASGNIFARRYMGWYRQAPGKERELVAAISLGGTTYYADSVKGRFTISRDNAKNTVYLQMNSLKPEDTAVYYCAARIRYQSAFRYWGQGTQVTVSS

SEQ ID NO: 24021 - protein, 118 aa, Artificial Sequence
  Chemically Synthesized
QVQLQESGGGLVQAGGSLRLSCAASGTISTDLLMGWYRQAPGKEREFVAGIARGGSTYYADSVKGRFTISRDNAKNTVYLQMNSLKPEDTAVYYCAALYARYRRYYYWGQGTQVTVSS

SEQ ID NO: 24022 - protein, 118 aa, Artificial Sequence
  Chemically Synthesized
QVQLQESGGGLVQAGGSLRLSCAASGTISGVWRMGWYRQAPGKEREFVAGIGDGAITYYADSVKGRFTISRDNAKNTVYLQMNSLKPEDTAVYYCAVIQRGRQYHGYWGQGTQVTVSS

SEQ ID NO: 24023 - protein, 122 aa, Artificial Sequence
  Chemically Synthesized
QVQLQESGGGLVQAGGSLRLSCAASGSIFRPSYMGWYRQAPGKERELVAGIADGSTTNYADSVKGRFTISRDNAKNTVYLQMNSLKPEDTAVYYCAAADWARAVHHAKHRYWGQGTQVTVSS

SEQ ID NO: 24024 - protein, 122 aa, Artificial Sequence
  Chemically Synthesized
QVQLQESGGGLVQAGGSLRLSCAASGNIFVDDYMGWYRQAPGKEREFVATIAGGANTNYADSVKGRFTISRDNAKNTVYLQMNSLKPEDTAVYYCAVRTALSIKRGRLLEYWGQGTQVTVSS

SEQ ID NO: 24025 - protein, 118 aa, Artificial Sequence
  Chemically Synthesized
QVQLQESGGGLVQAGGSLRLSCAASGTISVASVMGWYRQAPGKEREFVAAISAGGITNYADSVKGRFTISRDNAKNTVYLQMNSLKPEDTAVYYCAVVTYGSYYHYYWGQGTQVTVSS

SEQ ID NO: 24026 - protein, 118 aa, Artificial Sequence
  Chemically Synthesized
QVQLQESGGGLVQAGGSLRLSCAASGYIFGVGDMGWYRQAPGKEREFVASITAGGNTYYADSVKGRFTISRDNAKNTVYLQMNSLKPEDTAVYYCAVDVGRYGLFRYWGQGTQVTVSS

SEQ ID NO: 24027 - protein, 118 aa, Artificial Sequence
  Chemically Synthesized
QVQLQESGGGLVQAGGSLRLSCAASGTISHFTFMGWYRQAPGKERELVATIGTGGNTYYADSVKGRFTISRDNAKNTVYLQMNSLKPEDTAVYYCAAHDYLIDRYYYWGQGTQVTVSS

SEQ ID NO: 24028 - protein, 118 aa, Artificial Sequence
  Chemically Synthesized
QVQLQESGGGLVQAGGSLRLSCAASGSIFATYYMGWYRQAPGKEREFVASIGLGTTTNYADSVKGRFTISRDNAKNTVYLQMNSLKPEDTAVYYCAAVVYRPPYYWYWGQGTQVTVSS

SEQ ID NO: 24029 - protein, 119 aa, Artificial Sequence
  Chemically Synthesized
QVQLQESGGGLVQAGGSLRLSCAASGTISSLLMGWYRQAPGKEREFVAAISRVVVPYADSVKGRFTISRDNAKNTVYLQMNSLKPEDTAVYYCAAYYGDDAWGSTSFYWGQGTQVTVSS

SEQ ID NO: 24030 - protein, 118 aa, Artificial Sequence
  Chemically Synthesized
QVQLQESGGGLVQAGGSLRLSCAASGSISAKIIMGWYRQAPGKEREFVASIGYGASTNYADSVKGRFTISRDNAKNTVYLQMNSLKPEDTAVYYCAVLTLGTRWLYYWGQGTQVTVSS

SEQ ID NO: 24031 - protein, 117 aa, Artificial Sequence
  Chemically Synthesized
QVQLQESGGGLVQAGGSLRLSCAASGYISPDSQMGWYRQAPGKERELVAAISSGVIPYADSVKGRFTISRDNAKNTVYLQMNSLKPEDTAVYYCAAYEDDLSDLRYWGQGTQVTVSS

SEQ ID NO: 24032 - protein, 118 aa, Artificial Sequence
  Chemically Synthesized
QVQLQESGGGLVQAGGSLRLSCAASGNIFADYKMGWYRQAPGKERELVAAINRGSTTYYADSVKGRFTISRDNAKNTVYLQMNSLKPEDTAVYYCAAIYWKGYYHRYWGQGTQVTVSS

SEQ ID NO: 24033 - protein, 122 aa, Artificial Sequence
  Chemically Synthesized
QVQLQESGGGLVQAGGSLRLSCAASGSIFSYIYMGWYRQAPGKEREFVATISAGAITNYADSVKGRFTISRDNAKNTVYLQMNSLKPEDTAVYYCAVGDGSPYWASAVHLYWGQGTQVTVSS

SEQ ID NO: 24034 - protein, 118 aa, Artificial Sequence
  Chemically Synthesized
QVQLQESGGGLVQAGGSLRLSCAASGTISESSRMGWYRQAPGKERELVASINYGANTNYADSVKGRFTISRDNAKNTVYLQMNSLKPEDTAVYYCAVVFATYSLHRYWGQGTQVTVSS

SEQ ID NO: 24035 - protein, 116 aa, Artificial Sequence
  Chemically Synthesized
QVQLQESGGGLVQAGGSLRLSCAASGTIFSNPSMGWYRQAPGKERELVATIGRGSNTNYADSVKGRFTISRDNAKNTVYLQMNSLKPEDTAVYYCAVYDTLYLYYWGQGTQVTVSS

SEQ ID NO: 24036 - protein, 122 aa, Artificial Sequence
  Chemically Synthesized
QVQLQESGGGLVQAGGSLRLSCAASGSISTQYRMGWYRQAPGKEREFVAGIAYGANTYYADSVKGRFTISRDNAKNTVYLQMNSLKPEDTAVYYCAAIVWDSDGGPRYLSYWGQGTQVTVSS

SEQ ID NO: 24037 - protein, 122 aa, Artificial Sequence
  Chemically Synthesized
QVQLQESGGGLVQAGGSLRLSCAASGNIFWHATMGWYRQAPGKEREFVAAINLGGTTNYADSVKGRFTISRDNAKNTVYLQMNSLKPEDTAVYYCAALVYAQATGRAWHYYWGQGTQVTVSS

SEQ ID NO: 24038 - protein, 122 aa, Artificial Sequence
  Chemically Synthesized
QVQLQESGGGLVQAGGSLRLSCAASGYISDVQPMGWYRQAPGKEREFVASISVGTTTNYADSVKGRFTISRDNAKNTVYLQMNSLKPEDTAVYYCAALTYFGRDGQRWLYYWGQGTQVTVSS

SEQ ID NO: 24039 - protein, 118 aa, Artificial Sequence
  Chemically Synthesized
QVQLQESGGGLVQAGGSLRLSCAASGTISPYRNMGWYRQAPGKEREFVATIAYGTNTNYADSVKGRFTISRDNAKNTVYLQMNSLKPEDTAVYYCAVGYRYYRGFRYWGQGTQVTVSS

SEQ ID NO: 24040 - protein, 118 aa, Artificial Sequence
  Chemically Synthesized
QVQLQESGGGLVQAGGSLRLSCAASGYISTPSTMGWYRQAPGKERELVASIDDGSSTNYADSVKGRFTISRDNAKNTVYLQMNSLKPEDTAVYYCAAWSLGQANYPYWGQGTQVTVSS

SEQ ID NO: 24041 - protein, 118 aa, Artificial Sequence
  Chemically Synthesized
QVQLQESGGGLVQAGGSLRLSCAASGNISRAGYMGWYRQAPGKEREFVATISPGGNTNYADSVKGRFTISRDNAKNTVYLQMNSLKPEDTAVYYCAAVLDGGLRYYYWGQGTQVTVSS

SEQ ID NO: 24042 - protein, 118 aa, Artificial Sequence
  Chemically Synthesized
QVQLQESGGGLVQAGGSLRLSCAASGSISAFLRMGWYRQAPGKERELVATIAAGGITNYADSVKGRFTISRDNAKNTVYLQMNSLKPEDTAVYYCAARLDHDGLLYYWGQGTQVTVSS

SEQ ID NO: 24043 - protein, 125 aa, Artificial Sequence
  Chemically Synthesized
QVQLQESGGGLVQAGGSLRLSCAASGSILTTTMGWYRQAPGKEREFVAAIAYGGSTYYADSVKGRFTISRDNAKNTVYLQMNSLKPEDTAVYYCAVDTWEGGPYRTVVISWHEYWGQGTQVTVSS

SEQ ID NO: 24044 - protein, 122 aa, Artificial Sequence
  Chemically Synthesized
QVQLQESGGGLVQAGGSLRLSCAASGNISNYLTMGWYRQAPGKEREFVATISGGTTTNYADSVKGRFTISRDNAKNTVYLQMNSLKPEDTAVYYCAAIIDGARDYILNHGYWGQGTQVTVSS

SEQ ID NO: 24045 - protein, 122 aa, Artificial Sequence
  Chemically Synthesized
QVQLQESGGGLVQAGGSLRLSCAASGSISTTDDMGWYRQAPGKEREFVAGIGSGTITYYADSVKGRFTISRDNAKNTVYLQMNSLKPEDTAVYYCAADNDQPDQYLSYYGYWGQGTQVTVSS

SEQ ID NO: 24046 - protein, 118 aa, Artificial Sequence
  Chemically Synthesized
QVQLQESGGGLVQAGGSLRLSCAASGSISRTPRMGWYRQAPGKERELVASITDGSTTNYADSVKGRFTISRDNAKNTVYLQMNSLKPEDTAVYYCAVLYRDGYWHAYWGQGTQVTVSS

SEQ ID NO: 24047 - protein, 122 aa, Artificial Sequence
  Chemically Synthesized
QVQLQESGGGLVQAGGSLRLSCAASGNIFATGVMGWYRQAPGKEREFVAGIGGGGNTNYADSVKGRFTISRDNAKNTVYLQMNSLKPEDTAVYYCAAVPYRTYYAHAFHAYWGQGTQVTVSS

SEQ ID NO: 24048 - protein, 118 aa, Artificial Sequence
  Chemically Synthesized
QVQLQESGGGLVQAGGSLRLSCAASGSIFAGLYMGWYRQAPGKEREFVAGIAAGTTTYYADSVKGRFTISRDNAKNTVYLQMNSLKPEDTAVYYCAAEGDYGPNLTYWGQGTQVTVSS

SEQ ID NO: 24049 - protein, 122 aa, Artificial Sequence
  Chemically Synthesized
QVQLQESGGGLVQAGGSLRLSCAASGYIFVGQGMGWYRQAPGKERELVAAIATGANTYYADSVKGRFTISRDNAKNTVYLQMNSLKPEDTAVYYCAAGEPAIWYANRGYRYWGQGTQVTVSS

SEQ ID NO: 24050 - protein, 118 aa, Artificial Sequence
  Chemically Synthesized
QVQLQESGGGLVQAGGSLRLSCAASGTISAFQGMGWYRQAPGKEREFVAGITSGGTTNYADSVKGRFTISRDNAKNTVYLQMNSLKPEDTAVYYCAVYITHYWRHWYWGQGTQVTVSS

SEQ ID NO: 24051 - protein, 118 aa, Artificial Sequence
  Chemically Synthesized
QVQLQESGGGLVQAGGSLRLSCAASGSISAPYAMGWYRQAPGKERELVAGISSGGNTNYADSVKGRFTISRDNAKNTVYLQMNSLKPEDTAVYYCAALYRETRTLYYWGQGTQVTVSS

SEQ ID NO: 24052 - protein, 118 aa, Artificial Sequence
  Chemically Synthesized
QVQLQESGGGLVQAGGSLRLSCAASGTIFYLYNMGWYRQAPGKEREFVAAIANGGITNYADSVKGRFTISRDNAKNTVYLQMNSLKPEDTAVYYCAAVWYAGDWHHYWGQGTQVTVSS

SEQ ID NO: 24053 - protein, 120 aa, Artificial Sequence
  Chemically Synthesized
QVQLQESGGGLVQAGGSLRLSCAASGSISDYTYMGWYRQAPGKEREFVAAIARGSSTYYADSVKGRFTISRDNAKNTVYLQMNSLKPEDTAVYYCAAQTTYYNDEVHVYWGQGTQVTVSS

SEQ ID NO: 24054 - protein, 118 aa, Artificial Sequence
  Chemically Synthesized
QVQLQESGGGLVQAGGSLRLSCAASGTISSYGYMGWYRQAPGKEREFVAAIDYGTTTNYADSVKGRFTISRDNAKNTVYLQMNSLKPEDTAVYYCAAITYQRPYFYYWGQGTQVTVSS

SEQ ID NO: 24055 - protein, 126 aa, Artificial Sequence
  Chemically Synthesized
QVQLQESGGGLVQAGGSLRLSCAASGTISDPSAMGWYRQAPGKEREFVAAISTGGSTNYADSVKGRFTISRDNAKNTVYLQMNSLKPEDTAVYYCAALAQDRPDDDRAKANWHAYWGQGTQVTVSS

SEQ ID NO: 24056 - protein, 118 aa, Artificial Sequence
  Chemically Synthesized
QVQLQESGGGLVQAGGSLRLSCAASGNISSIWRMGWYRQAPGKEREFVAGISTGSSTYYADSVKGRFTISRDNAKNTVYLQMNSLKPEDTAVYYCAVVGYTHRYYAYWGQGTQVTVSS

SEQ ID NO: 24057 - protein, 117 aa, Artificial Sequence
  Chemically Synthesized
QVQLQESGGGLVQAGGSLRLSCAASGNIFQYYPMGWYRQAPGKEREFVAAIAYGTITNYADSVKGRFTISRDNAKNTVYLQMNSLKPEDTAVYYCAAYWPGRRYDYWGQGTQVTVSS

SEQ ID NO: 24058 - protein, 126 aa, Artificial Sequence
  Chemically Synthesized
QVQLQESGGGLVQAGGSLRLSCAASGNIFHGSYMGWYRQAPGKEREFVATITGGSSTYYADSVKGRFTISRDNAKNTVYLQMNSLKPEDTAVYYCAAFGGTTVIPYPNASYFFVYWGQGTQVTVSS

SEQ ID NO: 24059 - protein, 116 aa, Artificial Sequence
  Chemically Synthesized
QVQLQESGGGLVQAGGSLRLSCAASGTIFDQYYMGWYRQAPGKEREFVAGISAGASTNYADSVKGRFTISRDNAKNTVYLQMNSLKPEDTAVYYCAAITYQHLAYWGQGTQVTVSS

SEQ ID NO: 24060 - protein, 127 aa, Artificial Sequence
  Chemically Synthesized
QVQLQESGGGLVQAGGSLRLSCAASGTISERLRMGWYRQAPGKEREFVAAIGGGSITYYADSVKGRFTISRDNAKNTVYLQMNSLKPEDTAVYYCAAANLPYTDPAVYWRPYYHLYWGQGTQVTVSS

SEQ ID NO: 24061 - protein, 118 aa, Artificial Sequence
  Chemically Synthesized
QVQLQESGGGLVQAGGSLRLSCAASGTIFPRLIMGWYRQAPGKERELVAGIDDGGNTNYADSVKGRFTISRDNAKNTVYLQMNSLKPEDTAVYYCAALARVDRYYAYWGQGTQVTVSS

SEQ ID NO: 24062 - protein, 126 aa, Artificial Sequence
  Chemically Synthesized
QVQLQESGGGLVQAGGSLRLSCAASGNISGGQRMGWYRQAPGKERELVASIDIGTSTYYADSVKGRFTISRDNAKNTVYLQMNSLKPEDTAVYYCAASYVNYVDGNWSPKKSHDYWGQGTQVTVSS

SEQ ID NO: 24063 - protein, 118 aa, Artificial Sequence
  Chemically Synthesized
QVQLQESGGGLVQAGGSLRLSCAASGSISLRYYMGWYRQAPGKEREFVASISSGANTNYADSVKGRFTISRDNAKNTVYLQMNSLKPEDTAVYYCAVVTQSDRWYYYWGQGTQVTVSS

SEQ ID NO: 24064 - protein, 123 aa, Artificial Sequence
  Chemically Synthesized
QVQLQESGGGLVQAGGSLRLSCAASGYIFGGDTMGWYRQAPGKERELVASISYGGITNYADSVKGRFTISRDNAKNTVYLQMNSLKPEDTAVYYCAVADHVHVISYGDYHAYWGQGTQVTVSS

SEQ ID NO: 24065 - protein, 118 aa, Artificial Sequence
  Chemically Synthesized
QVQLQESGGGLVQAGGSLRLSCAASGSIFQYPYMGWYRQAPGKERELVATIGWGAITNYADSVKGRFTISRDNAKNTVYLQMNSLKPEDTAVYYCAAQYRSDWNHGYWGQGTQVTVSS

SEQ ID NO: 24066 - protein, 123 aa, Artificial Sequence
  Chemically Synthesized
QVQLQESGGGLVQAGGSLRLSCAASGTISTMGWYRQAPGKEREFVAAIGPGTITNYADSVKGRFTISRDNAKNTVYLQMNSLKPEDTAVYYCAVYYTDGPPQVRKAIHDLAYWGQGTQVTVSS

SEQ ID NO: 24067 - protein, 118 aa, Artificial Sequence
  Chemically Synthesized
QVQLQESGGGLVQAGGSLRLSCAASGSISSPRTMGWYRQAPGKEREFVAGITYGTSTNYADSVKGRFTISRDNAKNTVYLQMNSLKPEDTAVYYCAVVYDKPTYFYYWGQGTQVTVSS

SEQ ID NO: 24068 - protein, 118 aa, Artificial Sequence
  Chemically Synthesized
QVQLQESGGGLVQAGGSLRLSCAASGNIFYPPYMGWYRQAPGKERELVAGIARGSITNYADSVKGRFTISRDNAKNTVYLQMNSLKPEDTAVYYCAVLRGYTWRHYYWGQGTQVTVSS

SEQ ID NO: 24069 - protein, 122 aa, Artificial Sequence
  Chemically Synthesized
QVQLQESGGGLVQAGGSLRLSCAASGTISPDGYMGWYRQAPGKEREFVASISDGATTNYADSVKGRFTISRDNAKNTVYLQMNSLKPEDTAVYYCAARSNLTYHRGGWHWYWGQGTQVTVSS

SEQ ID NO: 24070 - protein, 118 aa, Artificial Sequence
  Chemically Synthesized
QVQLQESGGGLVQAGGSLRLSCAASGNISRVYGMGWYRQAPGKERELVAGINRGSTTYYADSVKGRFTISRDNAKNTVYLQMNSLKPEDTAVYYCAVRFDILGYLQYWGQGTQVTVSS

SEQ ID NO: 24071 - protein, 122 aa, Artificial Sequence
  Chemically Synthesized
QVQLQESGGGLVQAGGSLRLSCAASGNISPLYWMGWYRQAPGKERELVATIASGGSTYYADSVKGRFTISRDNAKNTVYLQMNSLKPEDTAVYYCAVYDFGSYHYAYLHGYWGQGTQVTVSS

SEQ ID NO: 24072 - protein, 122 aa, Artificial Sequence
  Chemically Synthesized
QVQLQESGGGLVQAGGSLRLSCAASGTISNRTPMGWYRQAPGKERELVAAIGGGSSTYYADSVKGRFTISRDNAKNTVYLQMNSLKPEDTAVYYCAVSQLFKWYVGYIYSYWGQGTQVTVSS

SEQ ID NO: 24073 - protein, 118 aa, Artificial Sequence
  Chemically Synthesized
QVQLQESGGGLVQAGGSLRLSCAASGTISYTGSMGWYRQAPGKERELVAGIARGGSTNYADSVKGRFTISRDNAKNTVYLQMNSLKPEDTAVYYCAVIYRSDVYLWYWGQGTQVTVSS

SEQ ID NO: 24074 - protein, 122 aa, Artificial Sequence
  Chemically Synthesized
QVQLQESGGGLVQAGGSLRLSCAASGTISRRGLMGWYRQAPGKEREFVAGINPGASTYYADSVKGRFTISRDNAKNTVYLQMNSLKPEDTAVYYCAVKRWAYWIIDPYHAYWGQGTQVTVSS

SEQ ID NO: 24075 - protein, 118 aa, Artificial Sequence
  Chemically Synthesized
QVQLQESGGGLVQAGGSLRLSCAASGTISNANYMGWYRQAPGKERELVAGITGGGTTYYADSVKGRFTISRDNAKNTVYLQMNSLKPEDTAVYYCAVAGRYENQFDYWGQGTQVTVSS

SEQ ID NO: 24076 - protein, 118 aa, Artificial Sequence
  Chemically Synthesized
QVQLQESGGGLVQAGGSLRLSCAASGNIFWARTMGWYRQAPGKERELVAGINRGTNTYYADSVKGRFTISRDNAKNTVYLQMNSLKPEDTAVYYCAVSGVPYYRFWYWGQGTQVTVSS

SEQ ID NO: 24077 - protein, 125 aa, Artificial Sequence
  Chemically Synthesized
QVQLQESGGGLVQAGGSLRLSCAASGNIFSFVMGWYRQAPGKEREFVASIDKGATTNYADSVKGRFTISRDNAKNTVYLQMNSLKPEDTAVYYCAVQPYVHRQYDIYADEYLDYWGQGTQVTVSS

SEQ ID NO: 24078 - protein, 118 aa, Artificial Sequence
  Chemically Synthesized
QVQLQESGGGLVQAGGSLRLSCAASGSIFHSAYMGWYRQAPGKEREFVATISQGTSTNYADSVKGRFTISRDNAKNTVYLQMNSLKPEDTAVYYCAAVVRDTYTLGYWGQGTQVTVSS

SEQ ID NO: 24079 - protein, 122 aa, Artificial Sequence
  Chemically Synthesized
QVQLQESGGGLVQAGGSLRLSCAASGNISVDDDMGWYRQAPGKEREFVATIAAGASTYYADSVKGRFTISRDNAKNTVYLQMNSLKPEDTAVYYCAVTKDGGYDRGIGYYYWGQGTQVTVSS

SEQ ID NO: 24080 - protein, 118 aa, Artificial Sequence
  Chemically Synthesized
QVQLQESGGGLVQAGGSLRLSCAASGFISAQYVMGWYRQAPGKEREFVAGIGQGGTTYYADSVKGRFTISRDNAKNTVYLQMNSLKPEDTAVYYCAAAVYQGAYYWYWGQGTQVTVSS

SEQ ID NO: 24081 - protein, 122 aa, Artificial Sequence
  Chemically Synthesized
QVQLQESGGGLVQAGGSLRLSCAASGSIFEGYYMGWYRQAPGKEREFVATITDGASTYYADSVKGRFTISRDNAKNTVYLQMNSLKPEDTAVYYCAVLAYTLIPPRKYHPYWGQGTQVTVSS

SEQ ID NO: 24082 - protein, 118 aa, Artificial Sequence
  Chemically Synthesized
QVQLQESGGGLVQAGGSLRLSCAASGNIFLDASMGWYRQAPGKEREFVAAISRGANTYYADSVKGRFTISRDNAKNTVYLQMNSLKPEDTAVYYCAAVYLVDSVLYYWGQGTQVTVSS

SEQ ID NO: 24083 - protein, 122 aa, Artificial Sequence
  Chemically Synthesized
QVQLQESGGGLVQAGGSLRLSCAASGTIFQVIDMGWYRQAPGKEREFVAAIGVGAITYYADSVKGRFTISRDNAKNTVYLQMNSLKPEDTAVYYCAVYALRDYGQDQQLPYWGQGTQVTVSS

SEQ ID NO: 24084 - protein, 118 aa, Artificial Sequence
  Chemically Synthesized
QVQLQESGGGLVQAGGSLRLSCAASGSIFGFLYMGWYRQAPGKEREFVASIDGGATTYYADSVKGRFTISRDNAKNTVYLQMNSLKPEDTAVYYCAAYIEAYDGYYYWGQGTQVTVSS

SEQ ID NO: 24085 - protein, 121 aa, Artificial Sequence
  Chemically Synthesized
QVQLQESGGGLVQAGGSLRLSCAASGTIFHSLMGWYRQAPGKEREFVAAISAGTSTNYADSVKGRFTISRDNAKNTVYLQMNSLKPEDTAVYYCAVVDEAYGGSPRSHQYWGQGTQVTVSS

SEQ ID NO: 24086 - protein, 118 aa, Artificial Sequence
  Chemically Synthesized
QVQLQESGGGLVQAGGSLRLSCAASGNISVRDSMGWYRQAPGKEREFVASIDRGGSTNYADSVKGRFTISRDNAKNTVYLQMNSLKPEDTAVYYCAVEYRRRAPLGYWGQGTQVTVSS

SEQ ID NO: 24087 - protein, 122 aa, Artificial Sequence
  Chemically Synthesized
QVQLQESGGGLVQAGGSLRLSCAASGSISPSIYMGWYRQAPGKERELVAAINYGTSTNYADSVKGRFTISRDNAKNTVYLQMNSLKPEDTAVYYCAARVHVQYNVVVDYIYWGQGTQVTVSS

SEQ ID NO: 24088 - protein, 118 aa, Artificial Sequence
  Chemically Synthesized
QVQLQESGGGLVQAGGSLRLSCAASGSISVLLFMGWYRQAPGKEREFVASIDTGGSTYYADSVKGRFTISRDNAKNTVYLQMNSLKPEDTAVYYCAVYATYPSLLRYWGQGTQVTVSS

SEQ ID NO: 24089 - protein, 116 aa, Artificial Sequence
  Chemically Synthesized
QVQLQESGGGLVQAGGSLRLSCAASGTISYTFMGWYRQAPGKERELVAAITVGANTNYADSVKGRFTISRDNAKNTVYLQMNSLKPEDTAVYYCAVQVYDTGLRYWGQGTQVTVSS

SEQ ID NO: 24090 - protein, 118 aa, Artificial Sequence
  Chemically Synthesized
QVQLQESGGGLVQAGGSLRLSCAASGNIFETEDMGWYRQAPGKERELVAAIDRGSTTYYADSVKGRFTISRDNAKNTVYLQMNSLKPEDTAVYYCAATKTGTAPHLYWGQGTQVTVSS

SEQ ID NO: 24091 - protein, 118 aa, Artificial Sequence
  Chemically Synthesized
QVQLQESGGGLVQAGGSLRLSCAASGYISQFIIMGWYRQAPGKERELVASISIGGNTYYADSVKGRFTISRDNAKNTVYLQMNSLKPEDTAVYYCAAWGTNYQFYYYWGQGTQVTVSS

SEQ ID NO: 24092 - protein, 126 aa, Artificial Sequence
  Chemically Synthesized
QVQLQESGGGLVQAGGSLRLSCAASGNIFHRYDMGWYRQAPGKEREFVAAINSGATTNYADSVKGRFTISRDNAKNTVYLQMNSLKPEDTAVYYCAAYTTRNVVAIQVSSKSFYYWGQGTQVTVSS

SEQ ID NO: 24093 - protein, 126 aa, Artificial Sequence
  Chemically Synthesized
QVQLQESGGGLVQAGGSLRLSCAASGSIFSPVGMGWYRQAPGKERELVAGIGYGASTYYADSVKGRFTISRDNAKNTVYLQMNSLKPEDTAVYYCAVPSGTYPIYYDDWNTDLDYWGQGTQVTVSS

SEQ ID NO: 24094 - protein, 117 aa, Artificial Sequence
  Chemically Synthesized
QVQLQESGGGLVQAGGSLRLSCAASGTIFDYSMGWYRQAPGKERELVAAIDYGGSTYYADSVKGRFTISRDNAKNTVYLQMNSLKPEDTAVYYCAAFTIGSELYYYWGQGTQVTVSS

SEQ ID NO: 24095 - protein, 121 aa, Artificial Sequence
  Chemically Synthesized
QVQLQESGGGLVQAGGSLRLSCAASGNIFVTSVMGWYRQAPGKEREFVASIDPGATTNYADSVKGRFTISRDNAKNTVYLQMNSLKPEDTAVYYCAVDFHVVELLSRVMYWGQGTQVTVSS

SEQ ID NO: 24096 - protein, 126 aa, Artificial Sequence
  Chemically Synthesized
QVQLQESGGGLVQAGGSLRLSCAASGNISYDFDMGWYRQAPGKERELVAGITYGGTTYYADSVKGRFTISRDNAKNTVYLQMNSLKPEDTAVYYCAVYTHWQIADERGIDDKHWYWGQGTQVTVSS

SEQ ID NO: 24097 - protein, 117 aa, Artificial Sequence
  Chemically Synthesized
QVQLQESGGGLVQAGGSLRLSCAASGNILLVLMGWYRQAPGKERELVATISYGSTTNYADSVKGRFTISRDNAKNTVYLQMNSLKPEDTAVYYCAVRDYTFIEHYYWGQGTQVTVSS

SEQ ID NO: 24098 - protein, 122 aa, Artificial Sequence
  Chemically Synthesized
QVQLQESGGGLVQAGGSLRLSCAASGYIFRYLYMGWYRQAPGKERELVAAIDGGASTNYADSVKGRFTISRDNAKNTVYLQMNSLKPEDTAVYYCAADPTQWWSLWERHDYWGQGTQVTVSS

SEQ ID NO: 24099 - protein, 118 aa, Artificial Sequence
  Chemically Synthesized
QVQLQESGGGLVQAGGSLRLSCAASGTIFDVYLMGWYRQAPGKERELVAGITSGATTNYADSVKGRFTISRDNAKNTVYLQMNSLKPEDTAVYYCAAITYADTVFAYWGQGTQVTVSS

SEQ ID NO: 24100 - protein, 118 aa, Artificial Sequence
  Chemically Synthesized
QVQLQESGGGLVQAGGSLRLSCAASGSISRLLGMGWYRQAPGKEREFVATIGRGASTYYADSVKGRFTISRDNAKNTVYLQMNSLKPEDTAVYYCAVAVYYIIWHDYWGQGTQVTVSS

SEQ ID NO: 24101 - protein, 117 aa, Artificial Sequence
  Chemically Synthesized
QVQLQESGGGLVQAGGSLRLSCAASGNISYYRYMGWYRQAPGKERELVAAINRGGSTNYADSVKGRFTISRDNAKNTVYLQMNSLKPEDTAVYYCAVRWARARFWYWGQGTQVTVSS

SEQ ID NO: 24102 - protein, 122 aa, Artificial Sequence
  Chemically Synthesized
QVQLQESGGGLVQAGGSLRLSCAASGTISQIGYMGWYRQAPGKEREFVATIDTGANTNYADSVKGRFTISRDNAKNTVYLQMNSLKPEDTAVYYCAVGYADYVDYDDDHWYWGQGTQVTVSS

SEQ ID NO: 24103 - protein, 122 aa, Artificial Sequence
  Chemically Synthesized
QVQLQESGGGLVQAGGSLRLSCAASGNIFYSYDMGWYRQAPGKERELVAAIGSGSNTNYADSVKGRFTISRDNAKNTVYLQMNSLKPEDTAVYYCAVVQDPLPWHPSKHQYWGQGTQVTVSS

SEQ ID NO: 24104 - protein, 118 aa, Artificial Sequence
  Chemically Synthesized
QVQLQESGGGLVQAGGSLRLSCAASGNIFHYAAMGWYRQAPGKEREFVASITYGGSTNYADSVKGRFTISRDNAKNTVYLQMNSLKPEDTAVYYCAAYSYQDNHHPYWGQGTQVTVSS

SEQ ID NO: 24105 - protein, 118 aa, Artificial Sequence
  Chemically Synthesized
QVQLQESGGGLVQAGGSLRLSCAASGTISAGIYMGWYRQAPGKEREFVATIDGGTNTNYADSVKGRFTISRDNAKNTVYLQMNSLKPEDTAVYYCAVVDWAADKHVYWGQGTQVTVSS

SEQ ID NO: 24106 - protein, 118 aa, Artificial Sequence
  Chemically Synthesized
QVQLQESGGGLVQAGGSLRLSCAASGYISYYKYMGWYRQAPGKEREFVASIDQGSTTNYADSVKGRFTISRDNAKNTVYLQMNSLKPEDTAVYYCAVANNIDAVHSYWGQGTQVTVSS

SEQ ID NO: 24107 - protein, 117 aa, Artificial Sequence
  Chemically Synthesized
QVQLQESGGGLVQAGGSLRLSCAASGSISPLVAMGWYRQAPGKERELVAGIAYGGITNYADSVKGRFTISRDNAKNTVYLQMNSLKPEDTAVYYCAAYPYPPSTIYWGQGTQVTVSS

SEQ ID NO: 24108 - protein, 118 aa, Artificial Sequence
  Chemically Synthesized
QVQLQESGGGLVQAGGSLRLSCAASGYISTYGAMGWYRQAPGKEREFVAAIDVGGNTNYADSVKGRFTISRDNAKNTVYLQMNSLKPEDTAVYYCAAHSAPSVTYAYWGQGTQVTVSS

SEQ ID NO: 24109 - protein, 125 aa, Artificial Sequence
  Chemically Synthesized
QVQLQESGGGLVQAGGSLRLSCAASGSISWHLGMGWYRQAPGKERELVAAIDDGSLPYADSVKGRFTISRDNAKNTVYLQMNSLKPEDTAVYYCAVGTFYAEDHLRRLPVRSWYWGQGTQVTVSS

SEQ ID NO: 24110 - protein, 118 aa, Artificial Sequence
  Chemically Synthesized
QVQLQESGGGLVQAGGSLRLSCAASGYISTVRFMGWYRQAPGKERELVAGITSGASTNYADSVKGRFTISRDNAKNTVYLQMNSLKPEDTAVYYCAVLGWWDGWHYYWGQGTQVTVSS

SEQ ID NO: 24111 - protein, 117 aa, Artificial Sequence
  Chemically Synthesized
QVQLQESGGGLVQAGGSLRLSCAASGSISSPSWMGWYRQAPGKERELVAAIGIGGTTYADSVKGRFTISRDNAKNTVYLQMNSLKPEDTAVYYCAAALYNRQTHTYWGQGTQVTVSS

SEQ ID NO: 24112 - protein, 118 aa, Artificial Sequence
  Chemically Synthesized
QVQLQESGGGLVQAGGSLRLSCAASGSIFGDSEMGWYRQAPGKERELVAGIGTGSTTYYADSVKGRFTISRDNAKNTVYLQMNSLKPEDTAVYYCAVGRTIGGRHSYWGQGTQVTVSS

SEQ ID NO: 24113 - protein, 122 aa, Artificial Sequence
  Chemically Synthesized
QVQLQESGGGLVQAGGSLRLSCAASGSISILLWMGWYRQAPGKEREFVATISHGSSTNYADSVKGRFTISRDNAKNTVYLQMNSLKPEDTAVYYCAVDVYDIYDDYLLYLYWGQGTQVTVSS

SEQ ID NO: 24114 - protein, 117 aa, Artificial Sequence
  Chemically Synthesized
QVQLQESGGGLVQAGGSLRLSCAASGNISTSFVMGWYRQAPGKEREFVAGISDGGNTNYADSVKGRFTISRDNAKNTVYLQMNSLKPEDTAVYYCAVRLDPLYSIYWGQGTQVTVSS

SEQ ID NO: 24115 - protein, 118 aa, Artificial Sequence
  Chemically Synthesized
QVQLQESGGGLVQAGGSLRLSCAASGNISREDLMGWYRQAPGKERELVAAISGGGTTYYADSVKGRFTISRDNAKNTVYLQMNSLKPEDTAVYYCAAASLDDGLHDYWGQGTQVTVSS

SEQ ID NO: 24116 - protein, 121 aa, Artificial Sequence
  Chemically Synthesized
QVQLQESGGGLVQAGGSLRLSCAASGYIFVTSMGWYRQAPGKERELVATIADGTNTNYADSVKGRFTISRDNAKNTVYLQMNSLKPEDTAVYYCAVRHQYYYDWRPYHGYWGQGTQVTVSS

SEQ ID NO: 24117 - protein, 118 aa, Artificial Sequence
  Chemically Synthesized
QVQLQESGGGLVQAGGSLRLSCAASGNISPGDSMGWYRQAPGKERELVAGIAVGAITNYADSVKGRFTISRDNAKNTVYLQMNSLKPEDTAVYYCAALVHRKHYHYYWGQGTQVTVSS

SEQ ID NO: 24118 - protein, 122 aa, Artificial Sequence
  Chemically Synthesized
QVQLQESGGGLVQAGGSLRLSCAASGYISDLPYMGWYRQAPGKEREFVAGITAGANTNYADSVKGRFTISRDNAKNTVYLQMNSLKPEDTAVYYCAALGGHAGNTYGRHYYWGQGTQVTVSS

SEQ ID NO: 24119 - protein, 118 aa, Artificial Sequence
  Chemically Synthesized
QVQLQESGGGLVQAGGSLRLSCAASGTISILTWMGWYRQAPGKEREFVATIGDGTNTNYADSVKGRFTISRDNAKNTVYLQMNSLKPEDTAVYYCAVRDRRRQVFDYWGQGTQVTVSS

SEQ ID NO: 24120 - protein, 118 aa, Artificial Sequence
  Chemically Synthesized
QVQLQESGGGLVQAGGSLRLSCAASGTIFERSIMGWYRQAPGKEREFVAGINDGANTNYADSVKGRFTISRDNAKNTVYLQMNSLKPEDTAVYYCAAVRFADRFFYYWGQGTQVTVSS

SEQ ID NO: 24121 - protein, 126 aa, Artificial Sequence
  Chemically Synthesized
QVQLQESGGGLVQAGGSLRLSCAASGSISEPRSMGWYRQAPGKEREFVASINPGSNTNYADSVKGRFTISRDNAKNTVYLQMNSLKPEDTAVYYCAAVYRTRNSGPADQYGYLGYWGQGTQVTVSS

SEQ ID NO: 24122 - protein, 118 aa, Artificial Sequence
  Chemically Synthesized
QVQLQESGGGLVQAGGSLRLSCAASGYISDRPVMGWYRQAPGKEREFVAAITLGTNTNYADSVKGRFTISRDNAKNTVYLQMNSLKPEDTAVYYCAAVTYDRVHLYYWGQGTQVTVSS

SEQ ID NO: 24123 - protein, 118 aa, Artificial Sequence
  Chemically Synthesized
QVQLQESGGGLVQAGGSLRLSCAASGNISYRYYMGWYRQAPGKEREFVAGIGYGGITYYADSVKGRFTISRDNAKNTVYLQMNSLKPEDTAVYYCAVYRRASWYLTYWGQGTQVTVSS

SEQ ID NO: 24124 - protein, 118 aa, Artificial Sequence
  Chemically Synthesized
QVQLQESGGGLVQAGGSLRLSCAASGSISGRLGMGWYRQAPGKEREFVATINTGGNTNYADSVKGRFTISRDNAKNTVYLQMNSLKPEDTAVYYCAAYVPSYHQHGYWGQGTQVTVSS

SEQ ID NO: 24125 - protein, 118 aa, Artificial Sequence
  Chemically Synthesized
QVQLQESGGGLVQAGGSLRLSCAASGYIFFIYAMGWYRQAPGKEREFVAAIDVGANTNYADSVKGRFTISRDNAKNTVYLQMNSLKPEDTAVYYCAAVVRRRGYFPYWGQGTQVTVSS

SEQ ID NO: 24126 - protein, 118 aa, Artificial Sequence
  Chemically Synthesized
QVQLQESGGGLVQAGGSLRLSCAASGTISHDDYMGWYRQAPGKERELVAGIDSGTSTNYADSVKGRFTISRDNAKNTVYLQMNSLKPEDTAVYYCAVGFDDDHYYPYWGQGTQVTVSS

SEQ ID NO: 24127 - protein, 122 aa, Artificial Sequence
  Chemically Synthesized
QVQLQESGGGLVQAGGSLRLSCAASGTIFLYGAMGWYRQAPGKEREFVASIDYGGNTNYADSVKGRFTISRDNAKNTVYLQMNSLKPEDTAVYYCAAYHIDVFGYDATYYYWGQGTQVTVSS

SEQ ID NO: 24128 - protein, 122 aa, Artificial Sequence
  Chemically Synthesized
QVQLQESGGGLVQAGGSLRLSCAASGSIFGSGGMGWYRQAPGKEREFVAGIDYGGNTYYADSVKGRFTISRDNAKNTVYLQMNSLKPEDTAVYYCAVVVYDGQGDRIGHVYWGQGTQVTVSS

SEQ ID NO: 24129 - protein, 122 aa, Artificial Sequence
  Chemically Synthesized
QVQLQESGGGLVQAGGSLRLSCAASGTISGVDDMGWYRQAPGKEREFVASIASGGTTNYADSVKGRFTISRDNAKNTVYLQMNSLKPEDTAVYYCAVGYLYNAHLRYNHDYWGQGTQVTVSS

SEQ ID NO: 24130 - protein, 118 aa, Artificial Sequence
  Chemically Synthesized
QVQLQESGGGLVQAGGSLRLSCAASGNISLSYSMGWYRQAPGKERELVASINPGGTTYYADSVKGRFTISRDNAKNTVYLQMNSLKPEDTAVYYCAAYVNYYDQLEYWGQGTQVTVSS

SEQ ID NO: 24131 - protein, 122 aa, Artificial Sequence
  Chemically Synthesized
QVQLQESGGGLVQAGGSLRLSCAASGYISPYYGMGWYRQAPGKEREFVAAIGDGSTTNYADSVKGRFTISRDNAKNTVYLQMNSLKPEDTAVYYCAADRGGYDWYVPPHAYWGQGTQVTVSS

SEQ ID NO: 24132 - protein, 118 aa, Artificial Sequence
  Chemically Synthesized
QVQLQESGGGLVQAGGSLRLSCAASGTISQDSDMGWYRQAPGKEREFVAGINYGATTNYADSVKGRFTISRDNAKNTVYLQMNSLKPEDTAVYYCAAYTAQYWGLAYWGQGTQVTVSS

SEQ ID NO: 24133 - protein, 121 aa, Artificial Sequence
  Chemically Synthesized
QVQLQESGGGLVQAGGSLRLSCAASGNIFSAAYMGWYRQAPGKEREFVAGINDGSITYYADSVKGRFTISRDNAKNTVYLQMNSLKPEDTAVYYCAAAPTNAGYDVQLFYWGQGTQVTVSS

SEQ ID NO: 24134 - protein, 117 aa, Artificial Sequence
  Chemically Synthesized
QVQLQESGGGLVQAGGSLRLSCAASGSIFYRYMGWYRQAPGKEREFVAGIGPGSITNYADSVKGRFTISRDNAKNTVYLQMNSLKPEDTAVYYCAAGYRPYYPYQYWGQGTQVTVSS

SEQ ID NO: 24135 - protein, 122 aa, Artificial Sequence
  Chemically Synthesized
QVQLQESGGGLVQAGGSLRLSCAASGTISPRYDMGWYRQAPGKERELVAAITEGTTTYYADSVKGRFTISRDNAKNTVYLQMNSLKPEDTAVYYCAARTGDVTYWYYGHDYWGQGTQVTVSS

SEQ ID NO: 24136 - protein, 109 aa, Artificial Sequence
  Chemically Synthesized
QVQLQESGGGLVQAGGSLRLSCAASGTIFVSTMGWYRQAPGKEREFVAAISSGGITNYADSVKGRFTISRDNAKNTVYLQMNSLKPEDTAVYYCAAIYWGQGTQVTVSS

SEQ ID NO: 24137 - protein, 106 aa, Artificial Sequence
  Chemically Synthesized
QVQLQESGGGLVQAGGSLRLSCAASGTIFDIVIMGWYRQAPGKERELVASTYYADSVKGRFTISRDNAKNTVYLQMNSLKPEDTAVYYCAADLYYWGQGTQVTVSS

SEQ ID NO: 24138 - protein, 118 aa, Artificial Sequence
  Chemically Synthesized
QVQLQESGGGLVQAGGSLRLSCAASGYISPSRYMGWYRQAPGKERELVAGITYGGTTYYADSVKGRFTISRDNAKNTVYLQMNSLKPEDTAVYYCAAPIIPYWQFTYWGQGTQVTVSS

SEQ ID NO: 24139 - protein, 122 aa, Artificial Sequence
  Chemically Synthesized
QVQLQESGGGLVQAGGSLRLSCAASGNIFTFYPMGWYRQAPGKERELVAAIASGSNTNYADSVKGRFTISRDNAKNTVYLQMNSLKPEDTAVYYCAVGPITYTLDWYDHTYWGQGTQVTVSS

SEQ ID NO: 24140 - protein, 115 aa, Artificial Sequence
  Chemically Synthesized
QVQLQESGGGLVQAGGSLRLSCAASGTISTAYLMGWYRQAPGKEREFVAAIAVVVLPYADSVKGRFTISRDNAKNTVYLQMNSLKPEDTAVYYCAYYFGSNHYYWGQGTQVTVSS

SEQ ID NO: 24141 - protein, 116 aa, Artificial Sequence
  Chemically Synthesized
QVQLQESGGGLVQAGGSLRLSCAASGYISDGAYMGWYRQAPGKERELVASIGSGSTTNYADSVKGRFTISRDNAKNTVYLQMNSLKPEDTAVYYCAAVDVADYFYWGQGTQVTVSS

SEQ ID NO: 24142 - protein, 122 aa, Artificial Sequence
  Chemically Synthesized
QVQLQESGGGLVQAGGSLRLSCAASGNISVPRFMGWYRQAPGKEREFVASITDGTITNYADSVKGRFTISRDNAKNTVYLQMNSLKPEDTAVYYCAVEGHTTQTRSYVFDYWGQGTQVTVSS

SEQ ID NO: 24143 - protein, 125 aa, Artificial Sequence
  Chemically Synthesized
QVQLQESGGGLVQAGGSLRLSCAASGSISSPLYMGWYRQAPGKEREFVATIAAGSSTYADSVKGRFTISRDNAKNTVYLQMNSLKPEDTAVYYCAVYDNWYGDYTADPDDALYYWGQGTQVTVSS

SEQ ID NO: 24144 - protein, 111 aa, Artificial Sequence
  Chemically Synthesized
QVQLQESGGGLVQAGGSLRLSCAASGNISTAYSMGWYRQAPGKERELVATISPGSTTNYADSVKGRFTISRDNAKNTVYLQMNSLKPEDTAVYYCAVPSYWGQGTQVTVSS

SEQ ID NO: 24145 - protein, 117 aa, Artificial Sequence
  Chemically Synthesized
QVQLQESGGGLVQAGGSLRLSCAASGTISWPFIMGWYRQAPGKERELVAAINIGGITYYADSVKGRFTISRDNAKNTVYLQMNSLKPEDTAVYYCAVDDASLRTMYWGQGTQVTVSS

SEQ ID NO: 24146 - protein, 117 aa, Artificial Sequence
  Chemically Synthesized
QVQLQESGGGLVQAGGSLRLSCAASGTILTLTMGWYRQAPGKERELVAAITYGATTNYADSVKGRFTISRDNAKNTVYLQMNSLKPEDTAVYYCAAGLYFWYNYTYWGQGTQVTVSS

SEQ ID NO: 24147 - protein, 122 aa, Artificial Sequence
  Chemically Synthesized
QVQLQESGGGLVQAGGSLRLSCAASGTIFGWCSMGWYRQAPGKEREFVASITFGTTTNYADSVKGRFTISRDNAKNTVYLQMNSLKPEDTAVYYCAVYVRPEAYRVDVHPYWGQGTQVTVSS

SEQ ID NO: 24148 - protein, 117 aa, Artificial Sequence
  Chemically Synthesized
QVQLQESGGGLVQAGGSLRLSCAASGYFLLPGMGWYRQAPGKEREFVATIDYGASTYYADSVKGRFTISRDNAKNTVYLQMNSLKPEDTAVYYCAAYSKGWYNLTYWGQGTQVTVSS

SEQ ID NO: 24149 - protein, 121 aa, Artificial Sequence
  Chemically Synthesized
QVQLQESGGGLVQAGGSLRLSCAASGNIFDNASMGWYRQAPGKERELVAGIDSVVVPYADSVKGRFTISRDNAKNTVYLQMNSLKPEDTAVYYCAVPYDRERANYIPFDYWGQGTQVTVSS

SEQ ID NO: 24150 - protein, 118 aa, Artificial Sequence
  Chemically Synthesized
QVQLQESGGGLVQAGGSLRLSCAASGSISAVYDMGWYRQAPGKERELVATITRGGNTNYADSVKGRFTISRDNAKNTVYLQMNSLKPEDTAVYYCAAHVGHDRVHQYWGQGTQVTVSS

SEQ ID NO: 24151 - protein, 126 aa, Artificial Sequence
  Chemically Synthesized
QVQLQESGGGLVQAGGSLRLSCAASGSISSTRGMGWYRQAPGKERELVATIDHGGITYYADSVKGRFTISRDNAKNTVYLQMNSLKPEDTAVYYCAVVYGAAGFLNAVYLYDHGYWGQGTQVTVSS

SEQ ID NO: 24152 - protein, 116 aa, Artificial Sequence
  Chemically Synthesized
QVQLQESGGGLVQAGGSLRLSCAASGTIFPDYYMGWYRQAPGKERELAATMTVVIPYADSVKGRFTISRDNAKNTVYLQMNSLKPEDTAVYYCAARIATDDILPYWGQGTQVTVSS

SEQ ID NO: 24153 - protein, 121 aa, Artificial Sequence
  Chemically Synthesized
QVQLQESGGGLVQAGGSLRLSCAASGYISSSRMGWYRQAPGKERELVATIGAGGNTYYADSVKGRFTISRDNAKNTVYLQMNSLKPEDTAVYYCAVDSYGSDDYGDIHYYWGQGTQVTVSS

SEQ ID NO: 24154 - protein, 117 aa, Artificial Sequence
  Chemically Synthesized
QVQLQESGGGLVQAGGSLRLSCAASGTIFADPSMGWYRQAPGKERELVAAIVRVVIPYADSVKGRFTISRDNAKNTVYLQMNSLKPEDTAVYYCAARYPSHHDHNYWGQGTQVTVSS

SEQ ID NO: 24155 - protein, 118 aa, Artificial Sequence
  Chemically Synthesized
QVQLQESGGGLVQAGGSLRLSCAASGYISYTDLMGWYRQAPGKERELVASIARGTTTNYADSVKGRFTISRDNAKNTVYLQMNSLKPEDTAVYYCAADSYADLFFAYWGQGTQVTVSS

SEQ ID NO: 24156 - protein, 118 aa, Artificial Sequence
  Chemically Synthesized
QVQLQESGGGLVQAGGSLRLSCAASGNISDVGYMGWYRQAPGKERELVASIAKGTNTYYADSVKGRFTISRDNAKNTVYLQMNSLKPEDTAVYYCAVGERGGTEHSYWGQGTQVTVSS

SEQ ID NO: 24157 - protein, 122 aa, Artificial Sequence
  Chemically Synthesized
QVQLQESGGGLVQAGGSLRLSCAASGNISFTEYMGWYRQAPGKEREFVAAIGHGGTTYYADSVKGRFTISRDNAKNTVYLQMNSLKPEDTAVYYCAVGDGQNGNVPLEHGYWGQGTQVTVSS

SEQ ID NO: 24158 - protein, 122 aa, Artificial Sequence
  Chemically Synthesized
QVQLQESGGGLVQAGGSLRLSCAASGTISRYYDMGWYRQAPGKERELVASITQGAITYYADSVKGRFTISRDNAKNTVYLQMNSLKPEDTAVYYCAALTAYEDHQLYDYRYWGQGTQVTVSS

SEQ ID NO: 24159 - protein, 120 aa, Artificial Sequence
  Chemically Synthesized
QVQLQESGGGLVQAGGSLRLSCAASGNISARFIMGWYRQAPGKERELVASISRGTVPYADSVKGRFTISRDNAKNTVYLQMNSLKPEDTAVYYCAVNRYQDGYGYYHYYWGQGTQVTVSS

SEQ ID NO: 24160 - protein, 117 aa, Artificial Sequence
  Chemically Synthesized
QVQLQESGGGLVQAGGSLRLSCAASGYILLVTMGWYRQAPGKERELVAGINYGANTYYADSVKGRFTISRDNAKNTVYLQMNSLKPEDTAVYYCAVDTHPVTPLQYWGQGTQVTVSS

SEQ ID NO: 24161 - protein, 118 aa, Artificial Sequence
  Chemically Synthesized
QVQLQESGGGLVQAGGSLRLSCAASGYIFTADSMGWYRQAPGKERELVAGIDDGSTTNYADSVKGRFTISRDNAKNTVYLQMNSLKPEDTAVYYCAVTTWDGPSHSYWGQGTQVTVSS

SEQ ID NO: 24162 - protein, 121 aa, Artificial Sequence
  Chemically Synthesized
QVQLQESGGGLVQAGGSLRLSCAASGTISYYRIMGWYRQAPGKEREFVASIDYGGSTYYADSVKGRFTISRDNAKNTVYLQMNSLKPEDTAVYYCAVTGQFDGIEHLSIYWGQGTQVTVSS

SEQ ID NO: 24163 - protein, 117 aa, Artificial Sequence
  Chemically Synthesized
QVQLQESGGGLVQAGGSLRLSCAASGNIFQTTYMGWYRQAPGKERELVASIAFGASTYYADSVKGRFTISRDNAKNTVYLQMNSLKPEDTAVYYCAVSYYGPTDHYWGQGTQVTVSS

SEQ ID NO: 24164 - protein, 118 aa, Artificial Sequence
  Chemically Synthesized
QVQLQESGGGLVQAGGSLRLSCAASGTIFAFNSMGWYRQAPGKERELVATITLGGNTNYADSVKGRFTISRDNAKNTVYLQMNSLKPEDTAVYYCAVEYGRARAHLYWGQGTQVTVSS

SEQ ID NO: 24165 - protein, 122 aa, Artificial Sequence
  Chemically Synthesized
QVQLQESGGGLVQAGGSLRLSCAASGTIFLTQDMGWYRQAPGKEREFVASIAYGATTNYADSVKGRFTISRDNAKNTVYLQMNSLKPEDTAVYYCAVQDEVSPYEPYLHNYWGQGTQVTVSS

SEQ ID NO: 24166 - protein, 118 aa, Artificial Sequence
  Chemically Synthesized
QVQLQESGGGLVQAGGSLRLSCAASGNISVIRYMGWYRQAPGKEREFVAAIDRGGITNYADSVKGRFTISRDNAKNTVYLQMNSLKPEDTAVYYCAVVENADDYHGYWGQGTQVTVSS

SEQ ID NO: 24167 - protein, 113 aa, Artificial Sequence
  Chemically Synthesized
QVQLQESGGGLVQAGGSLRLSCAASGSISTVDVMGWYRQAPGKERELVAAIGRGTTTNYADSVKGRFTISRDNAKNTVYLQMNSLKPEDTAVYYCAVLYLRYWGQGTQVTVSS

SEQ ID NO: 24168 - protein, 118 aa, Artificial Sequence
  Chemically Synthesized
QVQLQESGGGLVQAGGSLRLSCAASGNISTSAYMGWYRQAPGKERELVATIDYGSITNYADSVKGRFTISRDNAKNTVYLQMNSLKPEDTAVYYCAALYLLAYQFGYWGQGTQVTVSS

SEQ ID NO: 24169 - protein, 118 aa, Artificial Sequence
  Chemically Synthesized
QVQLQESGGGLVQAGGSLRLSCAASGSIFVRALMGWYRQAPGKERELVASIARGSSTNYADSVKGRFTISRDNAKNTVYLQMNSLKPEDTAVYYCAVYYIRLRKLRYWGQGTQVTVSS

SEQ ID NO: 24170 - protein, 117 aa, Artificial Sequence
  Chemically Synthesized
QVQLQESGGGLVQAGGSLRLSCAASGNISRYFNMGWYRQAPGKEREFVAGIASVVIPYADSVKGRFTISRDNAKNTVYLQMNSLKPEDTAVYYCAAYDLLEYYLAYWGQGTQVTVSS

SEQ ID NO: 24171 - protein, 121 aa, Artificial Sequence
  Chemically Synthesized
QVQLQESGGGLVQAGGSLRLSCAASGTIFQYWDMGWYRQAPGKERELVASIDHGANTNYADSVKGRFTISRDNAKNTVYLQMNSLKPEDTAVYYCAAWVYAIDPPNTSIYWGQGTQVTVSS

SEQ ID NO: 24172 - protein, 122 aa, Artificial Sequence
  Chemically Synthesized
QVQLQESGGGLVQAGGSLRLSCAASGYIFDASAMGWYRQAPGKERELVATIGYGSNTYYADSVKGRFTISRDNAKNTVYLQMNSLKPEDTAVYYCAAARYIDDRYEPSYEYWGQGTQVTVSS

SEQ ID NO: 24173 - protein, 128 aa, Artificial Sequence
  Chemically Synthesized
QVQLQESGGGLVQAGGSLRLSCAASGSISYYSNMGWYRQAPGKEREFVATIASGGSTNYADSVKGRFTISRDNAKNTVYLQMNSLKPEDTAVYYCAAIANDGYYRDVYTPYQYYYDYWGQGTQVTVSS

SEQ ID NO: 24174 - protein, 118 aa, Artificial Sequence
  Chemically Synthesized
QVQLQESGGGLVQAGGSLRLSCAASGYISPYDKMGWYRQAPGKERELVATIDQGSNTYYADSVKGRFTISRDNAKNTVYLQMNSLKPEDTAVYYCAASGWDWRRHGYWGQGTQVTVSS

SEQ ID NO: 24175 - protein, 117 aa, Artificial Sequence
  Chemically Synthesized
QVQLQESGGGLVQAGGSLRLSCAASGNIFPDTRMGWYRQAPGKERELVATITPGATTYYADSVKGRFTISRDNAKNTVYLQMNSLKPEDTAVYYCAANTTTLTVLYWGQGTQVTVSS

SEQ ID NO: 24176 - protein, 122 aa, Artificial Sequence
  Chemically Synthesized
QVQLQESGGGLVQAGGSLRLSCAASGSIFYPSYMGWYRQAPGKERELVAGIGDGSNTYYADSVKGRFTISRDNAKNTVYLQMNSLKPEDTAVYYCAAYTRDYALYYHNHTYWGQGTQVTVSS

SEQ ID NO: 24177 - protein, 122 aa, Artificial Sequence
  Chemically Synthesized
QVQLQESGGGLVQAGGSLRLSCAASGNISPTQDMGWYRQAPGKEREFVASIDGGGNTNYADSVKGRFTISRDNAKNTVYLQMNSLKPEDTAVYYCAVDTYDNRPYAYHHLYWGQGTQVTVSS

SEQ ID NO: 24178 - protein, 118 aa, Artificial Sequence
  Chemically Synthesized
QVQLQESGGGLVQAGGSLRLSCAASGNISYVNYMGWYRQAPGKERELVAAISWGATTYYADSVKGRFTISRDNAKNTVYLQMNSLKPEDTAVYYCAAPYFYHVDLQYWGQGTQVTVSS

SEQ ID NO: 24179 - protein, 122 aa, Artificial Sequence
  Chemically Synthesized
QVQLQESGGGLVQAGGSLRLSCAASGNISVYDVMGWYRQAPGKEREFVASITYGASTYYADSVKGRFTISRDNAKNTVYLQMNSLKPEDTAVYYCAVVADTLTGKYWSHPYWGQGTQVTVSS

SEQ ID NO: 24180 - protein, 122 aa, Artificial Sequence
  Chemically Synthesized
QVQLQESGGGLVQAGGSLRLSCAASGTIFSYAIMGWYRQAPGKEREFVAAIGAGTSTNYADSVKGRFTISRDNAKNTVYLQMNSLKPEDTAVYYCAVVNTSYHIGGITHPYWGQGTQVTVSS

SEQ ID NO: 24181 - protein, 122 aa, Artificial Sequence
  Chemically Synthesized
QVQLQESGGGLVQAGGSLRLSCAASGTISFHSRMGWYRQAPGKEREFVAAINFGGSTYYADSVKGRFTISRDNAKNTVYLQMNSLKPEDTAVYYCAVNYHTEGDYAVYLSYWGQGTQVTVSS

SEQ ID NO: 24182 - protein, 118 aa, Artificial Sequence
  Chemically Synthesized
QVQLQESGGGLVQAGGSLRLSCAASGTISDRTAMGWYRQAPGKEREFVAAIGYGGNTNYADSVKGRFTISRDNAKNTVYLQMNSLKPEDTAVYYCAVAFDPSLRFIYWGQGTQVTVSS

SEQ ID NO: 24183 - protein, 122 aa, Artificial Sequence
  Chemically Synthesized
QVQLQESGGGLVQAGGSLRLSCAASGNIFGSAYMGWYRQAPGKERELVATINRGTITNYADSVKGRFTISRDNAKNTVYLQMNSLKPEDTAVYYCAAGAGHHDATLDYYLYWGQGTQVTVSS

SEQ ID NO: 24184 - protein, 118 aa, Artificial Sequence
  Chemically Synthesized
QVQLQESGGGLVQAGGSLRLSCAASGSISRQIPMGWYRQAPGKERELVAGINGGSNTNYADSVKGRFTISRDNAKNTVYLQMNSLKPEDTAVYYCAVYVPAWYPHGYWGQGTQVTVSS

SEQ ID NO: 24185 - protein, 118 aa, Artificial Sequence
  Chemically Synthesized
QVQLQESGGGLVQAGGSLRLSCAASGYISFYVGMGWYRQAPGKERELVATIGAGGSTYYADSVKGRFTISRDNAKNTVYLQMNSLKPEDTAVYYCAALAADQSRFVYWGQGTQVTVSS

SEQ ID NO: 24186 - protein, 118 aa, Artificial Sequence
  Chemically Synthesized
QVQLQESGGGLVQAGGSLRLSCAASGNIFYFYDMGWYRQAPGKEREFVASITLGTNTNYADSVKGRFTISRDNAKNTVYLQMNSLKPEDTAVYYCAVGYGDWYDLYYWGQGTQVTVSS

SEQ ID NO: 24187 - protein, 121 aa, Artificial Sequence
  Chemically Synthesized
QVQLQESGGGLVQAGGSLRLSCAASGTISTSTMGWYRQAPGKEREFVAAIAYGSTTNYADSVKGRFTISRDNAKNTVYLQMNSLKPEDTAVYYCAVKQTTQGDNPLRHPYWGQGTQVTVSS

SEQ ID NO: 24188 - protein, 117 aa, Artificial Sequence
  Chemically Synthesized
QVQLQESGGGLVQAGGSLRLSCAASGYISVPVTMGWYRQAPGKERELVAAIADGSNTYYADSVKGRFTISRDNAKNTVYLQMNSLKPEDTAVYYCAAGTGSSTLMYWGQGTQVTVSS

SEQ ID NO: 24189 - protein, 126 aa, Artificial Sequence
  Chemically Synthesized
QVQLQESGGGLVQAGGSLRLSCAASGTIFDSDYMGWYRQAPGKERELVASIAGGGSTNYADSVKGRFTISRDNAKNTVYLQMNSLKPEDTAVYYCAADWYSVYYFPYVYGGGHLYWGQGTQVTVSS

SEQ ID NO: 24190 - protein, 118 aa, Artificial Sequence
  Chemically Synthesized
QVQLQESGGGLVQAGGSLRLSCAASGNISPRWRMGWYRQAPGKERELVAAINDGGTTTNYADSVKGRFTISRDNAKNTVYLQMNSLKPEDTAVYYCAAELYYYPYEYWGQGTQVTVSS

SEQ ID NO: 24191 - protein, 118 aa, Artificial Sequence
  Chemically Synthesized
QVQLQESGGGLVQAGGSLRLSCAASGNISHGYNMGWYRQAPGKEREFVAGIDTGGSTYYADSVKGRFTISRDNAKNTVYLQMNSLKPEDTAVYYCAVYYFGDRPYVYWGQGTQVTVSS

SEQ ID NO: 24192 - protein, 117 aa, Artificial Sequence
  Chemically Synthesized
QVQLQESGGGLVQAGGSLRLSCAASGSIFDLYGMGWYRQAPGKEREFVASIDYGANTYYADSVKGRFTISRDNAKNTVYLQMNSLKPEDTAVYYCAVSLTVSLVLYWGQGTQVTVSS

SEQ ID NO: 24193 - protein, 116 aa, Artificial Sequence
  Chemically Synthesized
QVQLQESGGGLVQAGGSLRLSCAASGSISDYTRMGWYRQAPGKERELVAAIARGSITNYADSVKGRFTISRDNAKNTVYLQMNSLKPEDTAVYYCAARGGDGYGYWGQGTQVTVSS

SEQ ID NO: 24194 - protein, 124 aa, Artificial Sequence
  Chemically Synthesized
QVQLQESGGGLVQAGGSLRLSCAASGNISDAKRMGWYRQAPGKEREFVVLVTVLVPYADSVKGRFTISRDNAKNTVYLQMNSLKPEDTAVYYCAAPLYVLYNDVGVPGPDLAYWGQGTQVTVSS

SEQ ID NO: 24195 - protein, 126 aa, Artificial Sequence
  Chemically Synthesized
QVQLQESGGGLVQAGGSLRLSCAASGSIFLYYGMGWYRQAPGKEREFVAAINGGTTTYYADSVKGRFTISRDNAKNTVYLQMNSLKPEDTAVYYCAAYVYLVTPYLRGYYAYYRYWGQGTQVTVSS

SEQ ID NO: 24196 - protein, 117 aa, Artificial Sequence
  Chemically Synthesized
QVQLQESGGGLVQAGGSLRLSCAASGTIFLYTDMGWYRQAPGKERELVAAINQGTSTNYADSVKGRFTISRDNAKNTVYLQMNSLKPEDTAVYYCAVISTVSLTIYWGQGTQVTVSS

SEQ ID NO: 24197 - protein, 118 aa, Artificial Sequence
  Chemically Synthesized
QVQLQESGGGLVQAGGSLRLSCAASGYIFALSYMGWYRQAPGKEREFVAAISLGGITYYADSVKGRFTISRDNAKNTVYLQMNSLKPEDTAVYYCAVGSTYLFDYVYWGQGTQVTVSS

SEQ ID NO: 24198 - protein, 118 aa, Artificial Sequence
  Chemically Synthesized
QVQLQESGGGLVQAGGSLRLSCAASGNISYDLRMGWYRQAPGKEREFVAGISTGSSTYYADSVKGRFTISRDNAKNTVYLQMNSLKPEDTAVYYCAVDDLITTYYYYWGQGTQVTVSS

SEQ ID NO: 24199 - protein, 118 aa, Artificial Sequence
  Chemically Synthesized
QVQLQESGGGLVQAGGSLRLSCAASGTISAGQYMGWYRQAPGKERELVAGIGTGGSTYYADSVKGRFTISRDNAKNTVYLQMNSLKPEDTAVYYCAASPTGPGILQYWGQGTQVTVSS

SEQ ID NO: 24200 - protein, 121 aa, Artificial Sequence
  Chemically Synthesized
QVQLQESGGGLVQAGGSLRLSCAASGTISPDDVMGWYRQAPGKERELVATINPGGSTNYADSVKGRFTISRDNAKNTVYLQMNSLKPEDTAVYYCAVLQYGYDDNSLNLYWGQGTQVTVSS

SEQ ID NO: 24201 - protein, 118 aa, Artificial Sequence
  Chemically Synthesized
QVQLQESGGGLVQAGGSLRLSCAASGYISLGDDMGWYRQAPGKEREFVATIGSGASTNYADSVKGRFTISRDNAKNTVYLQMNSLKPEDTAVYYCAVIRDFFTSLYYWGQGTQVTVSS

SEQ ID NO: 24202 - protein, 116 aa, Artificial Sequence
  Chemically Synthesized
QVQLQESGGGLVQAGGSLRLSCAASGSISRPQYMGWYRQAPGKERELVASISRGTTTNYADSVKGRFTISRDNAKNTVYLQMNSLKPEDTAVYYCAADDLHTYRYWGQGTQVTVSS

SEQ ID NO: 24203 - protein, 126 aa, Artificial Sequence
  Chemically Synthesized
QVQLQESGGGLVQAGGSLRLSCAASGYIFSPYLMGWYRQAPGKERELVASIDTGTTTYYADSVKGRFTISRDNAKNTVYLQMNSLKPEDTAVYYCAAGEVEPNPWTVEDGTAYYYWGQGTQVTVSS

SEQ ID NO: 24204 - protein, 109 aa, Artificial Sequence
  Chemically Synthesized
QVQLQESGGGLVQAGGSLRLSCAASGSISFPLWMGWYRQAPGKEREFVANTYYADSVKGRFTISRDNAKNTVYLQMNSLKPEDTAVYYCAVLSLLSFYWGQGTQVTVSS

SEQ ID NO: 24205 - protein, 122 aa, Artificial Sequence
  Chemically Synthesized
QVQLQESGGGLVQAGGSLRLSCAASGNIFYDSAMGWYRQAPGKEREFVATISVGSTTNYADSVKGRFTISRDNAKNTVYLQMNSLKPEDTAVYYCAAYSWAWLVARTRHLYWGQGTQVTVSS

SEQ ID NO: 24206 - protein, 118 aa, Artificial Sequence
  Chemically Synthesized
QVQLQESGGGLVQAGGSLRLSCAASGSISIDYTMGWYRQAPGKEREFVAGISTGGTTNYADSVKGRFTISRDNAKNTVYLQMNSLKPEDTAVYYCAALDPYRRDLKYWGQGTQVTVSS

SEQ ID NO: 24207 - protein, 118 aa, Artificial Sequence
  Chemically Synthesized
QVQLQESGGGLVQAGGSLRLSCAASGSISQRANMGWYRQAPGKERELVAAISYGTSTYYADSVKGRFTISRDNAKNTVYLQMNSLKPEDTAVYYCAVNGEPDGDLTYWGQGTQVTVSS

SEQ ID NO: 24208 - protein, 118 aa, Artificial Sequence
  Chemically Synthesized
QVQLQESGGGLVQAGGSLRLSCAASGSIFDLPRMGWYRQAPGKERELVAAINYGAITNYADSVKGRFTISRDNAKNTVYLQMNSLKPEDTAVYYCAAIAGTNWHPWYWGQGTQVTVSS

SEQ ID NO: 24209 - protein, 122 aa, Artificial Sequence
  Chemically Synthesized
QVQLQESGGGLVQAGGSLRLSCAASGNIFSDFYMGWYRQAPGKERELVASIADGTNTNYADSVKGRFTISRDNAKNTVYLQMNSLKPEDTAVYYCAAYRTVIWDLIRAYPYWGQGTQVTVSS

SEQ ID NO: 24210 - protein, 122 aa, Artificial Sequence
  Chemically Synthesized
QVQLQESGGGLVQAGGSLRLSCAASGTISVITDMGWYRQAPGKERELVAAITAGSSTYYADSVKGRFTISRDNAKNTVYLQMNSLKPEDTAVYYCAVYSGYFAPQYLGYDYWGQGTQVTVSS

SEQ ID NO: 24211 - protein, 125 aa, Artificial Sequence
  Chemically Synthesized
QVQLQESGGGLVQAGGSLRLSCAASGTISGTDWMGWYRQAPGKEREFVATISYGATTYADSVKGRFTISRDNAKNTVYLQMNSLKPEDTAVYYCAAAYDVTAKNGYIYRDLYAYWGQGTQVTVSS

SEQ ID NO: 24212 - protein, 119 aa, Artificial Sequence
  Chemically Synthesized
QVQLQESGGGLVQAGGSLRLSCAASGTIFTVSGMGWYRQAPGKERELVAAINQGGTTYYADSVKGRFTISRDNAKNTVYLQMNSLKPEDTAVYYCAAFITRGRWAHRYWGQGTQVTVSS

SEQ ID NO: 24213 - protein, 122 aa, Artificial Sequence
  Chemically Synthesized
QVQLQESGGGLVQAGGSLRLSCAASGYISPYIRMGWYRQAPGKERELVATIDSGTNTNYADSVKGRFTISRDNAKNTVYLQMNSLKPEDTAVYYCAVQYLYGVDERDTFYYWGQGTQVTVSS

SEQ ID NO: 24214 - protein, 118 aa, Artificial Sequence
  Chemically Synthesized
QVQLQESGGGLVQAGGSLRLSCAASGTISYLGYMGWYRQAPGKERELVATIGYGSTTNYADSVKGRFTISRDNAKNTVYLQMNSLKPEDTAVYYCAAVLQDSTDHYYWGQGTQVTVSS

SEQ ID NO: 24215 - protein, 122 aa, Artificial Sequence
  Chemically Synthesized
QVQLQESGGGLVQAGGSLRLSCAASGTISPSYGMGWYRQAPGKEREFVAAIAPGSSTNYADSVKGRFTISRDNAKNTVYLQMNSLKPEDTAVYYCAADITAYYTPYYYHNYWGQGTQVTVSS

SEQ ID NO: 24216 - protein, 122 aa, Artificial Sequence
  Chemically Synthesized
QVQLQESGGGLVQAGGSLRLSCAASGYISTYLYMGWYRQAPGKEREFVAGINVGGNTNYADSVKGRFTISRDNAKNTVYLQMNSLKPEDTAVYYCAAHRLSNATYELSHNYWGQGTQVTVSS

SEQ ID NO: 24217 - protein, 121 aa, Artificial Sequence
  Chemically Synthesized
QVQLQESGGGLVQAGGSLRLSCAASGNISAGHDMGWYRQAPGKERELVATIDSGSNTYYADSVKGRFTISRDNAKNTVYLQMNSLKPEDTAVYYCAALDQYGDAPTLLYYWGQGTQVTVSS

SEQ ID NO: 24218 - protein, 118 aa, Artificial Sequence
  Chemically Synthesized
QVQLQESGGGLVQAGGSLRLSCAASGTISYYRWMGWYRQAPGKEREFVATIDSGASTYYADSVKGRFTISRDNAKNTVYLQMNSLKPEDTAVYYCAADLGVRVGHVYWGQGTQVTVSS

SEQ ID NO: 24219 - protein, 117 aa, Artificial Sequence
  Chemically Synthesized
QVQLQESGGGLVQAGGSLRLSCAASGTISVDDQMGWYRQAPGKERELVATISYGGITYYADSVKGRFTISRDNAKNTVYLQMNSLKPEDTAVYYCAATRDASTTIYWGQGTQVTVSS

SEQ ID NO: 24220 - protein, 122 aa, Artificial Sequence
  Chemically Synthesized
QVQLQESGGGLVQAGGSLRLSCAASGYISLGYDMGWYRQAPGKEREFVATISSGTITNYADSVKGRFTISRDNAKNTVYLQMNSLKPEDTAVYYCAVLIYGDGAGVDLLDYWGQGTQVTVSS

SEQ ID NO: 24221 - protein, 126 aa, Artificial Sequence
  Chemically Synthesized
QVQLQESGGGLVQAGGSLRLSCAASGSISWAYGMGWYRQAPGKERELVASIADGGITYYADSVKGRFTISRDNAKNTVYLQMNSLKPEDTAVYYCAAVVIWPGYAAITYLYWHNYWGQGTQVTVSS

SEQ ID NO: 24222 - protein, 113 aa, Artificial Sequence
  Chemically Synthesized
QVQLQESGGGLVQAGGSLRLSCAASGTISPRNYMGWYRQAPGKERELVASISNGGNTNYADSVKGRFTISRDNAKNTVYLQMNSLKPEDTAVYYCAAGVHDYWGQGTQVTVSS

SEQ ID NO: 24223 - protein, 125 aa, Artificial Sequence
  Chemically Synthesized
QVQLQESGGGLVQAGGSLRLSCAASGTIFIERQMGWYRQAPGKERELVAAIDYGATTNYADSVKGRFTISRDNAKNTVYLQMNSLKPEDTAVYYCAVVRRCWLRHLHDYRDYSYWGQGTQVTVSS

SEQ ID NO: 24224 - protein, 125 aa, Artificial Sequence
  Chemically Synthesized
QVQLQESGGGLVQAGGSLRLSCAASGTISGDDMGWYRQAPGKEREFVAAIGDGTTTNYADSVKGRFTISRDNAKNTVYLQMNSLKPEDTAVYYCAVGDAWDTTSDSDEAPSHYYWGQGTQVTVSS

SEQ ID NO: 24225 - protein, 118 aa, Artificial Sequence
  Chemically Synthesized
QVQLQESGGGLVQAGGSLRLSCAASGSISYHSYMGWYRQAPGKEREFVAGINLGANTNYADSVKGRFTISRDNAKNTVYLQMNSLKPEDTAVYYCAAWRTLSDPHIYWGQGTQVTVSS

SEQ ID NO: 24226 - protein, 122 aa, Artificial Sequence
  Chemically Synthesized
QVQLQESGGGLVQAGGSLRLSCAASGTIFWTNAMGWYRQAPGKERELVATITYGTSTNYADSVKGRFTISRDNAKNTVYLQMNSLKPEDTAVYYCAALELYDPRDIRRHLYWGQGTQVTVSS

SEQ ID NO: 24227 - protein, 117 aa, Artificial Sequence
  Chemically Synthesized
QVQLQESGGGLVQAGGSLRLSCAASGNISPYGIMGWYRQAPGKERELVAGINTGATTYYADSVKGRFTISRDNAKNTVYLQMNSLKPEDTAVYYCAVDDDQARYRYWGQGTQVTVSS

SEQ ID NO: 24228 - protein, 118 aa, Artificial Sequence
  Chemically Synthesized
QVQLQESGGGLVQAGGSLRLSCAASGYISGSHYMGWYRQAPGKERELVAGISDGTSTYYADSVKGRFTISRDNAKNTVYLQMNSLKPEDTAVYYCAVGSPIADILRYWGQGTQVTVSS

SEQ ID NO: 24229 - protein, 126 aa, Artificial Sequence
  Chemically Synthesized
QVQLQESGGGLVQAGGSLRLSCAASGSISWDTRMGWYRQAPGKEREFVASITDGANTNYADSVKGRFTISRDNAKNTVYLQMNSLKPEDTAVYYCAVRYTDYASNWGYPHYNLAYWGQGTQVTVSS

SEQ ID NO: 24230 - protein, 118 aa, Artificial Sequence
  Chemically Synthesized
QVQLQESGGGLVQAGGSLRLSCAASGNIFAYVWMGWYRQAPGKERELVAGIGTGGSTYYADSVKGRFTISRDNAKNTVYLQMNSLKPEDTAVYYCAARSDDQVSLGYWGQGTQVTVSS

SEQ ID NO: 24231 - protein, 118 aa, Artificial Sequence
  Chemically Synthesized
QVQLQESGGGLVQAGGSLRLSCAASGTISGDSSMGWYRQAPGKERELVASIGYGGSTNYADSVKGRFTISRDNAKNTVYLQMNSLKPEDTAVYYCAVERDQKYRHGYWGQGTQVTVSS

SEQ ID NO: 24232 - protein, 121 aa, Artificial Sequence
  Chemically Synthesized
QVQLQESGGGLVQAGGSLRLSCAASGSISSASAMGWYRQAPGKERELVAAINPGAITYYADSVKGRFTISRDNAKNTVYLQMNSLKPEDTAVYYCAAKDRTYSLLTTLIYWGQGTQVTVSS

SEQ ID NO: 24233 - protein, 121 aa, Artificial Sequence
  Chemically Synthesized
QVQLQESGGGLVQAGGSLRLSCAASGNIFGYVMGWYRQAPGKEREFVASIANGGNTNYADSVKGRFTISRDNAKNTVYLQMNSLKPEDTAVYYCAADAYAELATHFDHDYWGQGTQVTVSS

SEQ ID NO: 24234 - protein, 122 aa, Artificial Sequence
  Chemically Synthesized
QVQLQESGGGLVQAGGSLRLSCAASGSIFDAYYMGWYRQAPGKEREFVASINSGSNTNYADSVKGRFTISRDNAKNTVYLQMNSLKPEDTAVYYCAAYLDGYGKDGPVPCYWGQGTQVTVSS

SEQ ID NO: 24235 - protein, 117 aa, Artificial Sequence
  Chemically Synthesized
QVQLQESGGGLVQAGGSLRLSCAASGSISYRDLMGWYRQAPGKERELVAGIAIGSNTYYADSVKGRFTISRDNAKNTVYLQMNSLKPEDTAVYYCAANYTYATTLYWGQGTQVTVSS

SEQ ID NO: 24236 - protein, 122 aa, Artificial Sequence
  Chemically Synthesized
QVQLQESGGGLVQAGGSLRLSCAASGTIFRTRGMGWYRQAPGKEREFVASITLGSNTNYADSVKGRFTISRDNAKNTVYLQMNSLKPEDTAVYYCAARLRHAVWGYSQHAYWGQGTQVTVSS

SEQ ID NO: 24237 - protein, 118 aa, Artificial Sequence
  Chemically Synthesized
QVQLQESGGGLVQAGGSLRLSCAASGTISHVTVMGWYRQAPGKEREFVAAISYGGSTYYADSVKGRFTISRDNAKNTVYLQMNSLKPEDTAVYYCAAAPLIWNDFDYWGQGTQVTVSS

SEQ ID NO: 24238 - protein, 125 aa, Artificial Sequence
  Chemically Synthesized
QVQLQESGGGLVQAGGSLRLSCAASGNISYGSMGWYRQAPGKERELVAAIGDGGTTYYADSVKGRFTISRDNAKNTVYLQMNSLKPEDTAVYYCAANDESIWLWQNWYAVWYGYWGQGTQVTVSS

SEQ ID NO: 24239 - protein, 117 aa, Artificial Sequence
  Chemically Synthesized
QVQLQESGGGLVQAGGSLRLSCAASGTIFVRYSMGWYRQAPGKEREFVAAITYGGTTYYADSVKGRFTISRDNAKNTVYLQMNSLKPEDTAVYYCAAATRWTPYYYWGQGTQVTVSS

SEQ ID NO: 24240 - protein, 122 aa, Artificial Sequence
  Chemically Synthesized
QVQLQESGGGLVQAGGSLRLSCAASGYISGTWAMGWYRQAPGKEREFVAGITNGGTTNYADSVKGRFTISRDNAKNTVYLQMNSLKPEDTAVYYCAALWYALALGDRTHYYWGQGTQVTVSS

SEQ ID NO: 24241 - protein, 118 aa, Artificial Sequence
  Chemically Synthesized
QVQLQESGGGLVQAGGSLRLSCAASGYIFQRPDMGWYRQAPGKERELVASIDGGANTNYADSVKGRFTISRDNAKNTVYLQMNSLKPEDTAVYYCAVTGYGYDYFNYWGQGTQVTVSS

SEQ ID NO: 24242 - protein, 120 aa, Artificial Sequence
  Chemically Synthesized
QVQLQESGGGLVQAGGSLRLSCAASGNLTGSMGWYRQAPGKEREFVATIDIGGSTNYADSVKGRFTISRDNAKNTVYLQMNSLKPEDTAVYYCAVSPPELLELAGTLTYWGQGTQVTVSS

SEQ ID NO: 24243 - protein, 116 aa, Artificial Sequence
  Chemically Synthesized
QVQLQESGGGLVQAGGSLRLSCAASGNISRADDMGWYRQAPGKERELVASIGSGAITNYADSVKGRFTISRDNAKNTVYLQMNSLKPEDTAVYYCAVDRRLEFDYWGQGTQVTVSS

SEQ ID NO: 24244 - protein, 118 aa, Artificial Sequence
  Chemically Synthesized
QVQLQESGGGLVQAGGSLRLSCAASGTISYYYEMGWYRQAPGKERELVASNYYWCYYQYADSVKGRFTISRDNAKNTVYLQMNSLKPEDTAVYYCAVQDPYDWQYAYWGQGTQVTVSS

SEQ ID NO: 24245 - protein, 118 aa, Artificial Sequence
  Chemically Synthesized
QVQLQESGGGLVQAGGSLRLSCAASGTISSPYTMGWYRQAPGKERELVAAIAGGSTTYYADSVKGRFTISRDNAKNTVYLQMNSLKPEDTAVYYCAVSDGWRYDLGYWGQGTQVTVSS

SEQ ID NO: 24246 - protein, 118 aa, Artificial Sequence
  Chemically Synthesized
QVQLQESGGGLVQAGGSLRLSCAASGSIFVQRTMGWYRQAPGKERELVATITRGSSTYYADSVKGRFTISRDNAKNTVYLQMNSLKPEDTAVYYCAASWHGRRRYWYWGQGTQVTVSS

SEQ ID NO: 24247 - protein, 118 aa, Artificial Sequence
  Chemically Synthesized
QVQLQESGGGLVQAGGSLRLSCAASGYISAYVAMGWYRQAPGKEREFVAAIAPGTTTYYADSVKGRFTISRDNAKNTVYLQMNSLKPEDTAVYYCAAWYWHDHDYGYWGQGTQVTVSS

SEQ ID NO: 24248 - protein, 118 aa, Artificial Sequence
  Chemically Synthesized
QVQLQESGGGLVQAGGSLRLSCAASGNIFYYYNMGWYRQAPGKEREFVASIDPGSTTNYADSVKGRFTISRDNAKNTVYLQMNSLKPEDTAVYYCAVFGGDSSRLYYWGQGTQVTVSS

SEQ ID NO: 24249 - protein, 122 aa, Artificial Sequence
  Chemically Synthesized
QVQLQESGGGLVQAGGSLRLSCAASGTIFTRTYMGWYRQAPGKERELVAAIAPGANTNYADSVKGRFTISRDNAKNTVYLQMNSLKPEDTAVYYCAVPPLDGIWAASWFDYWGQGTQVTVSS

SEQ ID NO: 24250 - protein, 120 aa, Artificial Sequence
  Chemically Synthesized
QVQLQESGGGLVQAGGSLRLSCAASGYIFLESDMGWYRQAPGKERELVAAIASGGIPYADSVKGRFTISRDNAKNTVYLQMNSLKPEDTAVYYCAVDSEYGQDSLVTIYWGQGTQVTVSS

SEQ ID NO: 24251 - protein, 118 aa, Artificial Sequence
  Chemically Synthesized
QVQLQESGGGLVQAGGSLRLSCAASGTIFYVTYMGWYRQAPGKEREFVAGIANGSTTNYADSVKGRFTISRDNAKNTVYLQMNSLKPEDTAVYYCAVQIDYHTGHLYWGQGTQVTVSS

SEQ ID NO: 24252 - protein, 122 aa, Artificial Sequence
  Chemically Synthesized
QVQLQESGGGLVQAGGSLRLSCAASGSISGRLVMGWYRQAPGKEREFVAAINQGGSTYYADSVKGRFTISRDNAKNTVYLQMNSLKPEDTAVYYCAVVNDTYQYAGWGYVYWGQGTQVTVSS

SEQ ID NO: 24253 - protein, 122 aa, Artificial Sequence
  Chemically Synthesized
QVQLQESGGGLVQAGGSLRLSCAASGYIFRAKRMGWYRQAPGKEREFVAGINPGSNTYYADSVKGRFTISRDNAKNTVYLQMNSLKPEDTAVYYCAVGDLASRYSVGPLRYWGQGTQVTVSS

SEQ ID NO: 24254 - protein, 121 aa, Artificial Sequence
  Chemically Synthesized
QVQLQESGGGLVQAGGSLRLSCAASGNISDHLNMGWYRQAPGKERELVAAISYGTNTNYADSVKGRFTISRDNAKNTVYLQMNSLKPEDTAVYYCAARVQQRVPCRTTFYWGQGTQVTVSS

SEQ ID NO: 24255 - protein, 121 aa, Artificial Sequence
  Chemically Synthesized
QVQLQESGGGLVQAGGSLRLSCAASGSIFRYYRMGWYRQAPGKERELVAGIVLVLLPYADSVKGRFTISRDNAKNTVYLQMNSLKPEDTAVYYCAADFYYDYVAAGQFAYWGQGTQVTVSS

SEQ ID NO: 24256 - protein, 118 aa, Artificial Sequence
  Chemically Synthesized
QVQLQESGGGLVQAGGSLRLSCAASGSISAYPYMGWYRQAPGKEREFVAGISLGGTTNYADSVKGRFTISRDNAKNTVYLQMNSLKPEDTAVYYCAVIRPDTSQHGYWGQGTQVTVSS

SEQ ID NO: 24257 - protein, 122 aa, Artificial Sequence
  Chemically Synthesized
QVQLQESGGGLVQAGGSLRLSCAASGNIFYIEYMGWYRQAPGKEREFVAGINDGGSTNYADSVKGRFTISRDNAKNTVYLQMNSLKPEDTAVYYCAVGYTYVDPYSITHKYWGQGTQVTVSS

SEQ ID NO: 24258 - protein, 118 aa, Artificial Sequence
  Chemically Synthesized
QVQLQESGGGLVQAGGSLRLSCAASGTIFTFNVMGWYRQAPGKEREFVASINGGTTTYYADSVKGRFTISRDNAKNTVYLQMNSLKPEDTAVYYCAATTRRYRAHVYWGQGTQVTVSS

SEQ ID NO: 24259 - protein, 122 aa, Artificial Sequence
  Chemically Synthesized
QVQLQESGGGLVQAGGSLRLSCAASGSISYPHNMGWYRQAPGKERELVASIGVGGITYYADSVKGRFTISRDNAKNTVYLQMNSLKPEDTAVYYCAVYDGDQADWDESLDYWGQGTQVTVSS

SEQ ID NO: 24260 - protein, 126 aa, Artificial Sequence
  Chemically Synthesized
QVQLQESGGGLVQAGGSLRLSCAASGTISGSEYMGWYRQAPGKEREFVATIGEGSSTYYADSVKGRFTISRDNAKNTVYLQMNSLKPEDTAVYYCAANGTTFVGTTQRSVWAHDYWGQGTQVTVSS

SEQ ID NO: 24261 - protein, 122 aa, Artificial Sequence
  Chemically Synthesized
QVQLQESGGGLVQAGGSLRLSCAASGYISNADYMGWYRQAPGKERELVAAIDFGSNTNYADSVKGRFTISRDNAKNTVYLQMNSLKPEDTAVYYCAVLTPLTSQSSPGHGYWGQGTQVTVSS

SEQ ID NO: 24262 - protein, 121 aa, Artificial Sequence
  Chemically Synthesized
QVQLQESGGGLVQAGGSLRLSCAASGTISRRGLMGWYRQAPGKERELVAAITVGGITYYADSVKGRFTISRDNAKNTVYLQMNSLKPEDTAVYYCAALGPRGARWRDHFYWGQGTQVTVSS

SEQ ID NO: 24263 - protein, 117 aa, Artificial Sequence
  Chemically Synthesized
QVQLQESGGGLVQAGGSLRLSCAASGNIFSVLMGWYRQAPGKERELVATISRGATTNYADSVKGRFTISRDNAKNTVYLQMNSLKPEDTAVYYCAAYDEFPSQHDYWGQGTQVTVSS

SEQ ID NO: 24264 - protein, 118 aa, Artificial Sequence
  Chemically Synthesized
QVQLQESGGGLVQAGGSLRLSCAASGSISYTRAMGWYRQAPGKERELVATIDVGSNTNYADSVKGRFTISRDNAKNTVYLQMNSLKPEDTAVYYCAVPYDQYYVHPYWGQGTQVTVSS

SEQ ID NO: 24265 - protein, 118 aa, Artificial Sequence
  Chemically Synthesized
QVQLQESGGGLVQAGGSLRLSCAASGNISRSDIMGWYRQAPGKERELVASIATGASTYYADSVKGRFTISRDNAKNTVYLQMNSLKPEDTAVYYCAVDDGDTRTHTYWGQGTQVTVSS

SEQ ID NO: 24266 - protein, 118 aa, Artificial Sequence
  Chemically Synthesized
QVQLQESGGGLVQAGGSLRLSCAASGSISSSRYMGWYRQAPGKERELVAAITRGAITYYADSVKGRFTISRDNAKNTVYLQMNSLKPEDTAVYYCAVYGEGNQVYPYWGQGTQVTVSS

SEQ ID NO: 24267 - protein, 125 aa, Artificial Sequence
  Chemically Synthesized
QVQLQESGGGLVQAGGSLRLSCAASGNISIVYGMGWYRQAPGKERELVAGINFGSNTYYADSVKGRFTISRDNAKNTVYLQMNSLKPEDTAVYYCAVQIGPASWYTHHSSVTMYWGQGTQVTVSS

SEQ ID NO: 24268 - protein, 118 aa, Artificial Sequence
  Chemically Synthesized
QVQLQESGGGLVQAGGSLRLSCAASGSISRLRIMGWYRQAPGKERELVAGITRGATTNYADSVKGRFTISRDNAKNTVYLQMNSLKPEDTAVYYCAAYRYYGHYHWYWGQGTQVTVSS

SEQ ID NO: 24269 - protein, 118 aa, Artificial Sequence
  Chemically Synthesized
QVQLQESGGGLVQAGGSLRLSCAASGNISSVRLMGWYRQAPGKERELVASITPGGNTNYADSVKGRFTISRDNAKNTVYLQMNSLKPEDTAVYYCAVAVGYWSRFYYWGQGTQVTVSS

SEQ ID NO: 24270 - protein, 118 aa, Artificial Sequence
  Chemically Synthesized
QVQLQESGGGLVQAGGSLRLSCAASGTISYAERMGWYRQAPGKEREFVATIAYGGITYYADSVKGRFTISRDNAKNTVYLQMNSLKPEDTAVYYCAANAQYTPYYGYWGQGTQVTVSS

SEQ ID NO: 24271 - protein, 118 aa, Artificial Sequence
  Chemically Synthesized
QVQLQESGGGLVQAGGSLRLSCAASGNISLVRGMGWYRQAPGKERELVAAINAGTTTNYADSVKGRFTISRDNAKNTVYLQMNSLKPEDTAVYYCAVYNDDYIDLGYWGQGTQVTVSS

SEQ ID NO: 24272 - protein, 118 aa, Artificial Sequence
  Chemically Synthesized
QVQLQESGGGLVQAGGSLRLSCAASGYIFQYYIMGWYRQAPGKERELVASITVGTSTYYADSVKGRFTISRDNAKNTVYLQMNSLKPEDTAVYYCAVYYYQDNPLQYWGQGTQVTVSS

SEQ ID NO: 24273 - protein, 126 aa, Artificial Sequence
  Chemically Synthesized
QVQLQESGGGLVQAGGSLRLSCAASGTISQQGDMGWYRQAPGKEREFVASINSGAITNYADSVKGRFTISRDNAKNTVYLQMNSLKPEDTAVYYCAAGPQADPYDTIDVYAHHTYWGQGTQVTVSS

SEQ ID NO: 24274 - protein, 113 aa, Artificial Sequence
  Chemically Synthesized
QVQLQESGGGLVQAGGSLRLSCAASGYIFPREFMGWYRQAPGKEREFVAGINTGSNTNYADSVKGRFTISRDNAKNTVYLQMNSLKPEDTAVYYCATLTSIYWGQGTQVTVSS

SEQ ID NO: 24275 - protein, 122 aa, Artificial Sequence
  Chemically Synthesized
QVQLQESGGGLVQAGGSLRLSCAASGYISTLGSMGWYRQAPGKEREFVAGIDSGGNTNYADSVKGRFTISRDNAKNTVYLQMNSLKPEDTAVYYCAVDRIRPPGGDDAHSYWGQGTQVTVSS

SEQ ID NO: 24276 - protein, 117 aa, Artificial Sequence
  Chemically Synthesized
QVQLQESGGGLVQAGGSLRLSCAASGNIFAASSMGWYRQAPGKEREFVAAISPGANTYYADSVKGRFTISRDNAKNTVYLQMNSLKPEDTAVYYCAAGQYNWYLAYWGQGTQVTVSS

SEQ ID NO: 24277 - protein, 118 aa, Artificial Sequence
  Chemically Synthesized
QVQLQESGGGLVQAGGSLRLSCAASGYISWRLYMGWYRQAPGKERELVAAIAYGANTYYADSVKGRFTISRDNAKNTVYLQMNSLKPEDTAVYYCAVGNRYRRGHDYWGQGTQVTVSS

SEQ ID NO: 24278 - protein, 118 aa, Artificial Sequence
  Chemically Synthesized
QVQLQESGGGLVQAGGSLRLSCAASGNISVAWTMGWYRQAPGKEREFVASITVGAITNYADSVKGRFTISRDNAKNTVYLQMNSLKPEDTAVYYCAALYYPDGRHDYWGQGTQVTVSS

SEQ ID NO: 24279 - protein, 117 aa, Artificial Sequence
  Chemically Synthesized
QVQLQESGGGLVQAGGSLRLSCAASGYISTLTMGWYRQAPGKEREFVAAITRGSTTYYADSVKGRFTISRDNAKNTVYLQMNSLKPEDTAVYYCAVYYYDNTYFVYWGQGTQVTVSS

SEQ ID NO: 24280 - protein, 118 aa, Artificial Sequence
  Chemically Synthesized
QVQLQESGGGLVQAGGSLRLSCAASGTISRPKDMGWYRQAPGKEREFVASIGRGTSTNYADSVKGRFTISRDNAKNTVYLQMNSLKPEDTAVYYCAVRYLRWYGLVYWGQGTQVTVSS

SEQ ID NO: 24281 - protein, 122 aa, Artificial Sequence
  Chemically Synthesized
QVQLQESGGGLVQAGGSLRLSCAASGTIFLQRRMGWYRQAPGKEREFVASINYGGTTYYADSVKGRFTISRDNAKNTVYLQMNSLKPEDTAVYYCAVIAYRWLSRNWLHYYWGQGTQVTVSS

SEQ ID NO: 24282 - protein, 118 aa, Artificial Sequence
  Chemically Synthesized
QVQLQESGGGLVQAGGSLRLSCAASGYIFYGPYMGWYRQAPGKERELVAAISKGATTNYADSVKGRFTISRDNAKNTVYLQMNSLKPEDTAVYYCAVYLGYPWRFTYWGQGTQVTVSS

SEQ ID NO: 24283 - protein, 122 aa, Artificial Sequence
  Chemically Synthesized
QVQLQESGGGLVQAGGSLRLSCAASGSISLSAGMGWYRQAPGKERELVAAITDGASTYYADSVKGRFTISRDNAKNTVYLQMNSLKPEDTAVYYCAADWDTDYQQDASYPYWGQGTQVTVSS

SEQ ID NO: 24284 - protein, 118 aa, Artificial Sequence
  Chemically Synthesized
QVQLQESGGGLVQAGGSLRLSCAASGTIFPSWYMGWYRQAPGKERELVAAISSGTSTYYADSVKGRFTISRDNAKNTVYLQMNSLKPEDTAVYYCAAYHYFQYILPYWGQGTQVTVSS

SEQ ID NO: 24285 - protein, 122 aa, Artificial Sequence
  Chemically Synthesized
QVQLQESGGGLVQAGGSLRLSCAASGNISYSRLMGWYRQAPGKEREFVATIDLGGNTYYADSVKGRFTISRDNAKNTVYLQMNSLKPEDTAVYYCAARPRYLDSYRYRYRYWGQGTQVTVSS

SEQ ID NO: 24286 - protein, 125 aa, Artificial Sequence
  Chemically Synthesized
QVQLQESGGGLVQAGGSLRLSCAASGSISERTDMGWYRQAPGKERELVASIATGATTNYADSVKGRFTISRDNAKNTVYLQMNSLKPEDTAVYYCAVYITTYRYGDVTQANKHYWGQGTQVTVSS

SEQ ID NO: 24287 - protein, 118 aa, Artificial Sequence
  Chemically Synthesized
QVQLQESGGGLVQAGGSLRLSCAASGNISRRKYMGWYRQAPGKERELVATIAFGGNTYYADSVKGRFTISRDNAKNTVYLQMNSLKPEDTAVYYCAAGVPYWRYHVYWGQGTQVTVSS

SEQ ID NO: 24288 - protein, 117 aa, Artificial Sequence
  Chemically Synthesized
QVQLQESGGGLVQAGGSLRLSCAASGYIFLSRSMGWYRQAPGKEREFVASINYGGSTNYADSVKGRFTISRDNAKNTVYLQMNSLKPEDTAVYYCAVNGFRRTYHYWGQGTQVTVSS

SEQ ID NO: 24289 - protein, 122 aa, Artificial Sequence
  Chemically Synthesized
QVQLQESGGGLVQAGGSLRLSCAASGTISLRAVMGWYRQAPGKEREFVAAINRGAITYYADSVKGRFTISRDNAKNTVYLQMNSLKPEDTAVYYCAVRSRRILHAGTGHSYWGQGTQVTVSS

SEQ ID NO: 24290 - protein, 115 aa, Artificial Sequence
  Chemically Synthesized
QVQLQESGGGLVQAGGSLRLSCAASGNISYERSMGWYRQAPGKEREFVATIDDGTILYADSVKGRFTISRDNAKNTVYLQMNSLKPEDTAVYYCAVGSTRLLMYWGQGTQVTVSS

SEQ ID NO: 24291 - protein, 122 aa, Artificial Sequence
  Chemically Synthesized
QVQLQESGGGLVQAGGSLRLSCAASGNISVTHRMGWYRQAPGKEREFVATIGFGANTYYADSVKGRFTISRDNAKNTVYLQMNSLKPEDTAVYYCAVGRRSWVYSQYRHYYWGQGTQVTVSS

SEQ ID NO: 24292 - protein, 118 aa, Artificial Sequence
  Chemically Synthesized
QVQLQESGGGLVQAGGSLRLSCAASGYISRRPIMGWYRQAPGKERELVAAISYGGSTYYADSVKGRFTISRDNAKNTVYLQMNSLKPEDTAVYYCAVTRGTQARYVYWGQGTQVTVSS

SEQ ID NO: 24293 - protein, 118 aa, Artificial Sequence
  Chemically Synthesized
QVQLQESGGGLVQAGGSLRLSCAASGNIFTRYRMGWYRQAPGKEREFVASISRGGITYYADSVKGRFTISRDNAKNTVYLQMNSLKPEDTAVYYCAVRRGRSEQLNYWGQGTQVTVSS

SEQ ID NO: 24294 - protein, 126 aa, Artificial Sequence
  Chemically Synthesized
QVQLQESGGGLVQAGGSLRLSCAASGNIFGAFDMGWYRQAPGKERELVATINPGGNTYYADSVKGRFTISRDNAKNTVYLQMNSLKPEDTAVYYCAVYVRGPSTWFTTLLTDHYYWGQGTQVTVSS

SEQ ID NO: 24295 - protein, 118 aa, Artificial Sequence
  Chemically Synthesized
QVQLQESGGGLVQAGGSLRLSCAASGNIFPFYAMGWYRQAPGKEREFVASITYGSTTYYADSVKGRFTISRDNAKNTVYLQMNSLKPEDTAVYYCAAGSKPRKRHKYWGQGTQVTVSS

SEQ ID NO: 24296 - protein, 125 aa, Artificial Sequence
  Chemically Synthesized
QVQLQESGGGLVQAGGSLRLSCAASGNIFGYTVMGWYRQAPGKERELVATISSVLIPYADSVKGRFTISRDNAKNTVYLQMNSLKPEDTAVYYCAAKHTGTRDRADRYDSYYSYWGQGTQVTVSS

SEQ ID NO: 24297 - protein, 122 aa, Artificial Sequence
  Chemically Synthesized
QVQLQESGGGLVQAGGSLRLSCAASGNISVPGYMGWYRQAPGKEREFVASITRGSTTNYADSVKGRFTISRDNAKNTVYLQMNSLKPEDTAVYYCAAWTYRLLTFWGRHGYWGQGTQVTVSS

SEQ ID NO: 24298 - protein, 118 aa, Artificial Sequence
  Chemically Synthesized
QVQLQESGGGLVQAGGSLRLSCAASGTIFYNRPMGWYRQAPGKEREFVASITIGASTYYADSVKGRFTISRDNAKNTVYLQMNSLKPEDTAVYYCAALFYDINDFHYWGQGTQVTVSS

SEQ ID NO: 24299 - protein, 118 aa, Artificial Sequence
  Chemically Synthesized
QVQLQESGGGLVQAGGSLRLSCAASGSIFAPQYMGWYRQAPGKEREFVAGIGWGGTTYYADSVKGRFTISRDNAKNTVYLQMNSLKPEDTAVYYCAVRFVRWFKHYYWGQGTQVTVSS

SEQ ID NO: 24300 - protein, 118 aa, Artificial Sequence
  Chemically Synthesized
QVQLQESGGGLVQAGGSLRLSCAASGYISKRKYMGWYRQAPGKEREFVASIAHGTSTYYADSVKGRFTISRDNAKNTVYLQMNSLKPEDTAVYYCAVYLVYVPGYRYWGQGTQVTVSS

SEQ ID NO: 24301 - protein, 118 aa, Artificial Sequence
  Chemically Synthesized
QVQLQESGGGLVQAGGSLRLSCAASGSIFPRNSMGWYRQAPGKEREFVAAITWGGITNYADSVKGRFTISRDNAKNTVYLQMNSLKPEDTAVYYCAAIRRWYYHHIYWGQGTQVTVSS

SEQ ID NO: 24302 - protein, 118 aa, Artificial Sequence
  Chemically Synthesized
QVQLQESGGGLVQAGGSLRLSCAASGNISDYRSMGWYRQAPGKERELVATISRGAITYYADSVKGRFTISRDNAKNTVYLQMNSLKPEDTAVYYCAAGRTRYTLLWYWGQGTQVTVSS

SEQ ID NO: 24303 - protein, 125 aa, Artificial Sequence
  Chemically Synthesized
QVQLQESGGGLVQAGGSLRLSCAASGYIFSTKYMGWYRQAPGKEREFVAAINYGGSTYYADSVKGRFTISRDNAKNTVYLQMNSLKPEDTAVYYCAVADDIDKGDYVSRISLLYWGQGTQVTVSS

SEQ ID NO: 24304 - protein, 118 aa, Artificial Sequence
  Chemically Synthesized
QVQLQESGGGLVQAGGSLRLSCAASGSIFRYLGMGWYRQAPGKEREFVAGIGRGGSTNYADSVKGRFTISRDNAKNTVYLQMNSLKPEDTAVYYCAVYRRYNSSHRYWGQGTQVTVSS

SEQ ID NO: 24305 - protein, 118 aa, Artificial Sequence
  Chemically Synthesized
QVQLQESGGGLVQAGGSLRLSCAASGNIFRVGSMGWYRQAPGKEREFVAAIDYGGTTNYADSVKGRFTISRDNAKNTVYLQMNSLKPEDTAVYYCAASRRWRLYYFYWGQGTQVTVSS

SEQ ID NO: 24306 - protein, 118 aa, Artificial Sequence
  Chemically Synthesized
QVQLQESGGGLVQAGGSLRLSCAASGNIFRYYIMGWYRQAPGKERELVASITTGASTYYADSVKGRFTISRDNAKNTVYLQMNSLKPEDTAVYYCAVGRRYSVGHRYWGQGTQVTVSS

SEQ ID NO: 24307 - protein, 122 aa, Artificial Sequence
  Chemically Synthesized
QVQLQESGGGLVQAGGSLRLSCAASGNIFYYTIMGWYRQAPGKERELVAAINRGSNTYYADSVKGRFTISRDNAKNTVYLQMNSLKPEDTAVYYCAASYLLYSGGYYDLTYWGQGTQVTVSS

SEQ ID NO: 24308 - protein, 118 aa, Artificial Sequence
  Chemically Synthesized
QVQLQESGGGLVQAGGSLRLSCAASGNISRYWFMGWYRQAPGKERELVATIGVGGSTYYADSVKGRFTISRDNAKNTVYLQMNSLKPEDTAVYYCAAGYVWKWRHRYWGQGTQVTVSS

SEQ ID NO: 24309 - protein, 122 aa, Artificial Sequence
  Chemically Synthesized
QVQLQESGGGLVQAGGSLRLSCAASGTIFGATIMGWYRQAPGKEREFVAAIAAGTTTYYADSVKGRFTISRDNAKNTVYLQMNSLKPEDTAVYYCAAYSTDRRWFHRNHYYWGQGTQVTVSS

SEQ ID NO: 24310 - protein, 122 aa, Artificial Sequence
  Chemically Synthesized
QVQLQESGGGLVQAGGSLRLSCAASGTISDGWVMGWYRQAPGKEREFVAGIGDGGTTNYADSVKGRFTISRDNAKNTVYLQMNSLKPEDTAVYYCAVRRVQYGSDGGHYYYWGQGTQVTVSS

SEQ ID NO: 24311 - protein, 122 aa, Artificial Sequence
  Chemically Synthesized
QVQLQESGGGLVQAGGSLRLSCAASGYIFRDGTMGWYRQAPGKERELVAGITGGATTYYADSVKGRFTISRDNAKNTVYLQMNSLKPEDTAVYYCAVYVVSRYFSWWSFAYWGQGTQVTVSS

SEQ ID NO: 24312 - protein, 122 aa, Artificial Sequence
  Chemically Synthesized
QVQLQESGGGLVQAGGSLRLSCAASGSISRYVYMGWYRQAPGKEREFVASITKGSSTYYADSVKGRFTISRDNAKNTVYLQMNSLKPEDTAVYYCAVRIRWGYINSRTHYYWGQGTQVTVSS

SEQ ID NO: 24313 - protein, 117 aa, Artificial Sequence
  Chemically Synthesized
QVQLQESGGGLVQAGGSLRLSCAASGNIFYRYMGWYRQAPGKEREFVAAINFGSSTNYADSVKGRFTISRDNAKNTVYLQMNSLKPEDTAVYYCAVITRYRFYHLYWGQGTQVTVSS

SEQ ID NO: 24314 - protein, 118 aa, Artificial Sequence
  Chemically Synthesized
QVQLQESGGGLVQAGGSLRLSCAASGNIFDGKYMGWYRQAPGKERELVATIDIGATTNYADSVKGRFTISRDNAKNTVYLQMNSLKPEDTAVYYCAVTDDATTVLAYWGQGTQVTVSS

SEQ ID NO: 24315 - protein, 118 aa, Artificial Sequence
  Chemically Synthesized
QVQLQESGGGLVQAGGSLRLSCAASGTIFRNYYMGWYRQAPGKEREFVATIGSGGSTYYADSVKGRFTISRDNAKNTVYLQMNSLKPEDTAVYYCAVYVSYTLDHRYWGQGTQVTVSS

SEQ ID NO: 24316 - protein, 118 aa, Artificial Sequence
  Chemically Synthesized
QVQLQESGGGLVQAGGSLRLSCAASGYIFAPYMGWYRQAPGKERELVAAISGGGITNYADSVKGRFTISRDNAKNTVYLQMNSLKPEDTAVYYCAAVRRWSRPYNWYWGQGTQVTVSS

SEQ ID NO: 24317 - protein, 122 aa, Artificial Sequence
  Chemically Synthesized
QVQLQESGGGLVQAGGSLRLSCAASGNISPARLMGWYRQAPGKEREFVAGIDYGCYYQYADSVKGRFTISRDNAKNTVYLQMNSLKPEDTAVYYCAAWGRQDGEYSVDYGYWGQGTQVTVSS

SEQ ID NO: 24318 - protein, 118 aa, Artificial Sequence
  Chemically Synthesized
QVQLQESGGGLVQAGGSLRLSCAASGSIFGLGAMGWYRQAPGKERELVAAIGRGANTYYADSVKGRFTISRDNAKNTVYLQMNSLKPEDTAVYYCAVWTRYYRRYQYWGQGTQVTVSS

SEQ ID NO: 24319 - protein, 123 aa, Artificial Sequence
  Chemically Synthesized
QVQLQESGGGLVQAGGSLRLSCAASGSISSRAYMGWYRQAPGKEREFVAAIGHGGNTNYADSVKGRFTISRDNAKNTVYLQMNSLKPEDTAVYYCAAVYGGYIGDDYDYLWYWGQGTQVTVSS

SEQ ID NO: 24320 - protein, 117 aa, Artificial Sequence
  Chemically Synthesized
QVQLQESGGGLVQAGGSLRLSCAASGTISAQDTMGWYRQAPGKEREFVAAISYGTNTNYADSVKGRFTISRDNAKNTVYLQMNSLKPEDTAVYYCAVDQFTGNLAYWGQGTQVTVSS

SEQ ID NO: 24321 - protein, 118 aa, Artificial Sequence
  Chemically Synthesized
QVQLQESGGGLVQAGGSLRLSCAASGNIFRYNIMGWYRQAPGKERELVASIGLGGNTYYADSVKGRFTISRDNAKNTVYLQMNSLKPEDTAVYYCAARYRYRVPYRYWGQGTQVTVSS

SEQ ID NO: 24322 - protein, 126 aa, Artificial Sequence
  Chemically Synthesized
QVQLQESGGGLVQAGGSLRLSCAASGTISGARYMGWYRQAPGKEREFVAGIGRGTTTYYADSVKGRFTISRDNAKNTVYLQMNSLKPEDTAVYYCAVGRVGLRLNGRGWYPTHPYWGQGTQVTVSS

SEQ ID NO: 24323 - protein, 118 aa, Artificial Sequence
  Chemically Synthesized
QVQLQESGGGLVQAGGSLRLSCAASGTIFALYQMGWYRQAPGKERELVATISFGTNTNYADSVKGRFTISRDNAKNTVYLQMNSLKPEDTAVYYCAARKTDISDYVYWGQGTQVTVSS

SEQ ID NO: 24324 - protein, 118 aa, Artificial Sequence
  Chemically Synthesized
QVQLQESGGGLVQAGGSLRLSCAASGYISTYVVMGWYRQAPGKERELVASINDGGITNYADSVKGRFTISRDNAKNTVYLQMNSLKPEDTAVYYCAAQAYNWWDLTYWGQGTQVTVSS

SEQ ID NO: 24325 - protein, 119 aa, Artificial Sequence
  Chemically Synthesized
QVQLQESGGGLVQAGGSLRLSCAASGNIFQRTRAMGWYRQAPGKERELVAAITGGTITYYADSVKGRFTISRDNAKNTVYLQMNSLKPEDTAVYYCAAADRFWRYHTYWGQGTQVTVSS

SEQ ID NO: 24326 - protein, 117 aa, Artificial Sequence
  Chemically Synthesized
QVQLQESGGGLVQAGGSLRLSCAASGTIFSDVAMGWYRQAPGKEREFVAGIGSVVVPYADSVKGRFTISRDNAKNTVYLQMNSLKPEDTAVYYCAAPAYRPAAFFYWGQGTQVTVSS

SEQ ID NO: 24327 - protein, 122 aa, Artificial Sequence
  Chemically Synthesized
QVQLQESGGGLVQAGGSLRLSCAASGNISHRDGMGWYRQAPGKERELVAAINQGANTYYADSVKGRFTISRDNAKNTVYLQMNSLKPEDTAVYYCAAYWLDDYWYHRWLAYWGQGTQVTVSS

SEQ ID NO: 24328 - protein, 122 aa, Artificial Sequence
  Chemically Synthesized
QVQLQESGGGLVQAGGSLRLSCAASGSISPLRYMGWYRQAPGKERELVAGIGRGGNTYYADSVKGRFTISRDNAKNTVYLQMNSLKPEDTAVYYCAVKGGRSPYYARYYPYWGQGTQVTVSS

SEQ ID NO: 24329 - protein, 115 aa, Artificial Sequence
  Chemically Synthesized
QVQLQESGGGLVQAGGSLRLSCAASGTIFPYAVMGWYRQAPGKERELVAAIGRGSTTYYADSVKGRFTISRDNAKNTVYLQMNSLKPEDTAVYYCAAWRYYFFYWGQGTQVTVSS

SEQ ID NO: 24330 - protein, 118 aa, Artificial Sequence
  Chemically Synthesized
QVQLQESGGGLVQAGGSLRLSCAASGSIFARSVMGWYRQAPGKEREFVAAINGGAITYYADSVKGRFTISRDNAKNTVYLQMNSLKPEDTAVYYCAAHYRRFRYHDYWGQGTQVTVSS

SEQ ID NO: 24331 - protein, 118 aa, Artificial Sequence
  Chemically Synthesized
QVQLQESGGGLVQAGGSLRLSCAASGYIFTVIAMGWYRQAPGKERELVASISGGGSTYYADSVKGRFTISRDNAKNTVYLQMNSLKPEDTAVYYCAVTDGGYSGFVYWGQGTQVTVSS

SEQ ID NO: 24332 - protein, 122 aa, Artificial Sequence
  Chemically Synthesized
QVQLQESGGGLVQAGGSLRLSCAASGYISYYGRMGWYRQAPGKERELVAGIAYGGTTYYADSVKGRFTISRDNAKNTVYLQMNSLKPEDTAVYYCAAIRPYSDSGNRKYYYWGQGTQVTVSS

SEQ ID NO: 24333 - protein, 126 aa, Artificial Sequence
  Chemically Synthesized
QVQLQESGGGLVQAGGSLRLSCAASGTIFYARGMGWYRQAPGKEREFVASISYGTITYYADSVKGRFTISRDNAKNTVYLQMNSLKPEDTAVYYCAARFSLRGNLVLEGKRRLWYWGQGTQVTVSS

SEQ ID NO: 24334 - protein, 126 aa, Artificial Sequence
  Chemically Synthesized
QVQLQESGGGLVQAGGSLRLSCAASGYISQVRDMGWYRQAPGKERELVATIAGGASTYYADSVKGRFTISRDNAKNTVYLQMNSLKPEDTAVYYCAATGRYREGDWPWGRRRYAYWGQGTQVTVSS

SEQ ID NO: 24335 - protein, 117 aa, Artificial Sequence
  Chemically Synthesized
QVQLQESGGGLVQAGGSLRLSCAASGTIFTVPVMGWYRQAPGKERELVAAISHGTNTYYADSVKGRFTISRDNAKNTVYLQMNSLKPEDTAVYYCAAQYYRSPYRYWGQGTQVTVSS

SEQ ID NO: 24336 - protein, 118 aa, Artificial Sequence
  Chemically Synthesized
QVQLQESGGGLVQAGGSLRLSCAASGYIFRIYKMGWYRQAPGKEREFVASIAPGTNTYYADSVKGRFTISRDNAKNTVYLQMNSLKPEDTAVYYCAANTPPWYFFRYWGQGTQVTVSS

SEQ ID NO: 24337 - protein, 118 aa, Artificial Sequence
  Chemically Synthesized
QVQLQESGGGLVQAGGSLRLSCAASGYIFPWRFMGWYRQAPGKERELVAAISWGASTNYADSVKGRFTISRDNAKNTVYLQMNSLKPEDTAVYYCAVQYTSRTWLRYWGQGTQVTVSS

SEQ ID NO: 24338 - protein, 118 aa, Artificial Sequence
  Chemically Synthesized
QVQLQESGGGLVQAGGSLRLSCAASGNISRRRAMGWYRQAPGKEREFVAAIAYGATTYYADSVKGRFTISRDNAKNTVYLQMNSLKPEDTAVYYCAVPYQGYFRHRYWGQGTQVTVSS

SEQ ID NO: 24339 - protein, 126 aa, Artificial Sequence
  Chemically Synthesized
QVQLQESGGGLVQAGGSLRLSCAASGTISYNDQMGWYRQAPGKEREFVAAITEGATTNYADSVKGRFTISRDNAKNTVYLQMNSLKPEDTAVYYCAATALYGDGYFYDLFWLYRYWGQGTQVTVSS

SEQ ID NO: 24340 - protein, 125 aa, Artificial Sequence
  Chemically Synthesized
QVQLQESGGGLVQAGGSLRLSCAASGYIFRRSDMGWYRQAPGKERELVAGIDRGSNTNYADSVKGRFTISRDNAKNTVYLQMNSLKPEDTAVYYCAVSRRHIPVYYAGSTSYRYWGQGTQVTVSS

SEQ ID NO: 24341 - protein, 126 aa, Artificial Sequence
  Chemically Synthesized
QVQLQESGGGLVQAGGSLRLSCAASGTIFYTYGMGWYRQAPGKEREFVAGIAPGGTTYYADSVKGRFTISRDNAKNTVYLQMNSLKPEDTAVYYCAAQFQQLDWYGYDYYPLHYYWGQGTQVTVSS

SEQ ID NO: 24342 - protein, 126 aa, Artificial Sequence
  Chemically Synthesized
QVQLQESGGGLVQAGGSLRLSCAASGYISYYKGMGWYRQAPGKEREFVAAIASGTTTYYADSVKGRFTISRDNAKNTVYLQMNSLKPEDTAVYYCAVRSYRGYPYATYVYRRHYYWGQGTQVTVSS

SEQ ID NO: 24343 - protein, 118 aa, Artificial Sequence
  Chemically Synthesized
QVQLQESGGGLVQAGGSLRLSCAASGYISYRRDMGWYRQAPGKEREFVASIARGATTYYADSVKGRFTISRDNAKNTVYLQMNSLKPEDTAVYYCAAYWRQRSRFAYWGQGTQVTVSS

SEQ ID NO: 24344 - protein, 122 aa, Artificial Sequence
  Chemically Synthesized
QVQLQESGGGLVQAGGSLRLSCAASGTISRQRPMGWYRQAPGKEREFVAGIAYGANTYYADSVKGRFTISRDNAKNTVYLQMNSLKPEDTAVYYCAAFIGGYEGGRSFHRYWGQGTQVTVSS

SEQ ID NO: 24345 - protein, 118 aa, Artificial Sequence
  Chemically Synthesized
QVQLQESGGGLVQAGGSLRLSCAASGNISTARVMGWYRQAPGKEREFVAAIATGANTYYADSVKGRFTISRDNAKNTVYLQMNSLKPEDTAVYYCAVAGVYRLRFRYWGQGTQVTVSS

SEQ ID NO: 24346 - protein, 126 aa, Artificial Sequence
  Chemically Synthesized
QVQLQESGGGLVQAGGSLRLSCAASGYIFQYYGMGWYRQAPGKEREFVAAIDVGGNTNYADSVKGRFTISRDNAKNTVYLQMNSLKPEDTAVYYCAVTLWQDNWDLDILYHYLIYWGQGTQVTVSS

SEQ ID NO: 24347 - protein, 122 aa, Artificial Sequence
  Chemically Synthesized
QVQLQESGGGLVQAGGSLRLSCAASGYISLVYGMGWYRQAPGKERELVAGIDAGTNTNYADSVKGRFTISRDNAKNTVYLQMNSLKPEDTAVYYCAVYRIDQAVDVSRHQYWGQGTQVTVSS

SEQ ID NO: 24348 - protein, 118 aa, Artificial Sequence
  Chemically Synthesized
QVQLQESGGGLVQAGGSLRLSCAASGSIFYIYYMGWYRQAPGKERELVAAISLGTNTYYADSVKGRFTISRDNAKNTVYLQMNSLKPEDTAVYYCAADIYDLQQLVYWGQGTQVTVSS

SEQ ID NO: 24349 - protein, 126 aa, Artificial Sequence
  Chemically Synthesized
QVQLQESGGGLVQAGGSLRLSCAASGYISVRQDMGWYRQAPGKERELVASIGVGGITYYADSVKGRFTISRDNAKNTVYLQMNSLKPEDTAVYYCAAAGYEDPEAFPSKNGLFGYWGQGTQVTVSS

SEQ ID NO: 24350 - protein, 121 aa, Artificial Sequence
  Chemically Synthesized
QVQLQESGGGLVQAGGSLRLSCAASGNIFRVFRMGWYRQAPGKEREFVATIGYGTNTYYADSVKGRFTISRDNAKNTVYLQMNSLKPEDTAVYYCAARVSFGDYRAKIFYWGQGTQVTVSS

SEQ ID NO: 24351 - protein, 122 aa, Artificial Sequence
  Chemically Synthesized
QVQLQESGGGLVQAGGSLRLSCAASGYISRFYIMGWYRQAPGKERELVASISYGGITNYADSVKGRFTISRDNAKNTVYLQMNSLKPEDTAVYYCAARNYRVAWYTSGHDYWGQGTQVTVSS

SEQ ID NO: 24352 - protein, 118 aa, Artificial Sequence
  Chemically Synthesized
QVQLQESGGGLVQAGGSLRLSCAASGNIFYTDDMGWYRQAPGKEREFVASIGYGANTYYADSVKGRFTISRDNAKNTVYLQMNSLKPEDTAVYYCAALANGGQYHLYWGQGTQVTVSS

SEQ ID NO: 24353 - protein, 122 aa, Artificial Sequence
  Chemically Synthesized
QVQLQESGGGLVQAGGSLRLSCAASGTISSRRHMGWYRQAPGKERELVAAITTGTITYYADSVKGRFTISRDNAKNTVYLQMNSLKPEDTAVYYCAVGRYYDAAKAFALHYWGQGTQVTVSS

SEQ ID NO: 24354 - protein, 112 aa, Artificial Sequence
  Chemically Synthesized
QVQLQESGGGLVQAGGSLRLSCAASGSISNTPYMGWYRQAPGKEREFVAAITSGGSTYYADSVKGRFTISRDNAKNTVYLQMNSLKPEDTAVYYCAVLLLYWGQGTQVTVSS

SEQ ID NO: 24355 - protein, 118 aa, Artificial Sequence
  Chemically Synthesized
QVQLQESGGGLVQAGGSLRLSCAASGTISGWYAMGWYRQAPGKEREFVAGIAGGSTNYADSVKGRFTISRDNAKNTVYLQMNSLKPEDTAVYYCAVIIGTSYSAFRYWGQGTQVTVSS

SEQ ID NO: 24356 - protein, 118 aa, Artificial Sequence
  Chemically Synthesized
QVQLQESGGGLVQAGGSLRLSCAASGYIFLTYIMGWYRQAPGKEREFVAGIGIGGNTYYADSVKGRFTISRDNAKNTVYLQMNSLKPEDTAVYYCAALYPTDIYHDYWGQGTQVTVSS

SEQ ID NO: 24357 - protein, 125 aa, Artificial Sequence
  Chemically Synthesized
QVQLQESGGGLVQAGGSLRLSCAASGNISADTTMGWYRQAPGKEREFVATISQGASTNYADSVKGRFTISRDNAKNTVYLQMNSLKPEDTAVYYCAVGGPYTSNTTLTFRTVLYWGQGTQVTVSS

SEQ ID NO: 24358 - protein, 126 aa, Artificial Sequence
  Chemically Synthesized
QVQLQESGGGLVQAGGSLRLSCAASGTIFDRPYMGWYRQAPGKERELVAAIAWGANTYYADSVKGRFTISRDNAKNTVYLQMNSLKPEDTAVYYCAVHTYDPYWFTSYALAFLWYWGQGTQVTVSS

SEQ ID NO: 24359 - protein, 122 aa, Artificial Sequence
  Chemically Synthesized
QVQLQESGGGLVQAGGSLRLSCAASGNIFAITGMGWYRQAPGKERELVAAIGAGGSTNYADSVKGRFTISRDNAKNTVYLQMNSLKPEDTAVYYCAVSDTKYANVPGPLYYWGQGTQVTVSS

SEQ ID NO: 24360 - protein, 122 aa, Artificial Sequence
  Chemically Synthesized
QVQLQESGGGLVQAGGSLRLSCAASGNISPYWVMGWYRQAPGKEREFVASITEGTTTYYADSVKGRFTISRDNAKNTVYLQMNSLKPEDTAVYYCAVGSALGRYYVYVHRYWGQGTQVTVSS

SEQ ID NO: 24361 - protein, 118 aa, Artificial Sequence
  Chemically Synthesized
QVQLQESGGGLVQAGGSLRLSCAASGSISSHPGMGWYRQAPGKERELVASIAYGTITYYADSVKGRFTISRDNAKNTVYLQMNSLKPEDTAVYYCAAYVSYDGPLVYWGQGTQVTVSS

SEQ ID NO: 24362 - protein, 118 aa, Artificial Sequence
  Chemically Synthesized
QVQLQESGGGLVQAGGSLRLSCAASGNISNHSQMGWYRQAPGKEREFVASIDSGGITNYADSVKGRFTISRDNAKNTVYLQMNSLKPEDTAVYYCAVGYYPWYYYLYWGQGTQVTVSS

SEQ ID NO: 24363 - protein, 125 aa, Artificial Sequence
  Chemically Synthesized
QVQLQESGGGLVQAGGSLRLSCAASGTISNDATMGWYRQAPGKERELVASIDGGGITNYADSVKGRFTISRDNAKNTVYLQMNSLKPEDTAVYYCAAYPGDVDAATVGVAYSMYWGQGTQVTVSS

SEQ ID NO: 24364 - protein, 118 aa, Artificial Sequence
  Chemically Synthesized
QVQLQESGGGLVQAGGSLRLSCAASGTISATRAMGWYRQAPGKERELVAGINSGSSTYYADSVKGRFTISRDNAKNTVYLQMNSLKPEDTAVYYCAVYYGRKYVHLYWGQGTQVTVSS

SEQ ID NO: 24365 - protein, 122 aa, Artificial Sequence
  Chemically Synthesized
QVQLQESGGGLVQAGGSLRLSCAASGSIFVTDSMGWYRQAPGKERELVAGITTGTTTNYADSVKGRFTISRDNAKNTVYLQMNSLKPEDTAVYYCAVPGGWVGWYATLLLYWGQGTQVTVSS

SEQ ID NO: 24366 - protein, 116 aa, Artificial Sequence
  Chemically Synthesized
QVQLQESGGGLVQAGGSLRLSCAASGSISAEGMGWYRQAPGKEREFVAAIDYGAITYYADSVKGRFTISRDNAKNTVYLQMNSLKPEDTAVYYCAVRSVLTVRMYWGQGTQVTVSS

SEQ ID NO: 24367 - protein, 115 aa, Artificial Sequence
  Chemically Synthesized
QVQLQESGGGLVQAGGSLRLSCAASGNISEPALMGWYRQAPGKEREFVASIDYGASTYYADSVKGRFTISRDNAKNTVYLQMNSLKPEDTAVYYCAVTKLVVIYWGQGTQVTVSS

SEQ ID NO: 24368 - protein, 118 aa, Artificial Sequence
  Chemically Synthesized
QVQLQESGGGLVQAGGSLRLSCAASGNISVDTLMGWYRQAPGKEREFVAAISFGTSTYYADSVKGRFTISRDNAKNTVYLQMNSLKPEDTAVYYCAVEDYSLAGHRYWGQGTQVTVSS

SEQ ID NO: 24369 - protein, 118 aa, Artificial Sequence
  Chemically Synthesized
QVQLQESGGGLVQAGGSLRLSCAASGSISYDSPMGWYRQAPGKERELVASINAGGITYYADSVKGRFTISRDNAKNTVYLQMNSLKPEDTAVYYCAAWSYVYLNHWYWGQGTQVTVSS

SEQ ID NO: 24370 - protein, 122 aa, Artificial Sequence
  Chemically Synthesized
QVQLQESGGGLVQAGGSLRLSCAASGSIFDYRGMGWYRQAPGKEREFVATITAGTTTNYADSVKGRFTISRDNAKNTVYLQMNSLKPEDTAVYYCAADAYKYWFHYADLYYWGQGTQVTVSS

SEQ ID NO: 24371 - protein, 122 aa, Artificial Sequence
  Chemically Synthesized
QVQLQESGGGLVQAGGSLRLSCAASGYISRNTGMGWYRQAPGKERELVASIGDGTSTYYADSVKGRFTISRDNAKNTVYLQMNSLKPEDTAVYYCAVNLWLTGGVGHIFGYWGQGTQVTVSS

SEQ ID NO: 24372 - protein, 122 aa, Artificial Sequence
  Chemically Synthesized
QVQLQESGGGLVQAGGSLRLSCAASGSISHASRMGWYRQAPGKERELVATIARGGSTYYADSVKGRFTISRDNAKNTVYLQMNSLKPEDTAVYYCAARPRGSIGWFVGHDYWGQGTQVTVSS

SEQ ID NO: 24373 - protein, 115 aa, Artificial Sequence
  Chemically Synthesized
QVQLQESGGGLVQAGGSLRLSCAASGSISYATYMGWYRQAPGKEREFVASGSSTNYADSVKGRFTISRDNAKNTVYLQMNSLKPEDTAVYYCAVDIREQHTLDYWGQGTQVTVSS

SEQ ID NO: 24374 - protein, 122 aa, Artificial Sequence
  Chemically Synthesized
QVQLQESGGGLVQAGGSLRLSCAASGNISIRPEMGWYRQAPGKERELVASIDRGANTYYADSVKGRFTISRDNAKNTVYLQMNSLKPEDTAVYYCAVLTRLYGAEGDEHIYWGQGTQVTVSS

SEQ ID NO: 24375 - protein, 122 aa, Artificial Sequence
  Chemically Synthesized
QVQLQESGGGLVQAGGSLRLSCAASGNISRYTGMGWYRQAPGKEREFVAGIGWGASTNYADSVKGRFTISRDNAKNTVYLQMNSLKPEDTAVYYCAARLGWPHAYIPYHGYWGQGTQVTVSS

SEQ ID NO: 24376 - protein, 123 aa, Artificial Sequence
  Chemically Synthesized
QVQLQESGGGLVQAGGSLRLSCAASGNIFDDYYMGWYRQAPGKERELVAGITFGGITNYADSVKGRFTISRDNAKNTVYLQMNSLKPEDTAVYYCAAGVTRDDNGHWLHDYYWGQGTQVTVSS

SEQ ID NO: 24377 - protein, 118 aa, Artificial Sequence
  Chemically Synthesized
QVQLQESGGGLVQAGGSLRLSCAASGTIFSTRYMGWYRQAPGKERELVAGIDNGGTTYYADSVKGRFTISRDNAKNTVYLQMNSLKPEDTAVYYCAANNLLDAYLRYWGQGTQVTVSS

SEQ ID NO: 24378 - protein, 111 aa, Artificial Sequence
  Chemically Synthesized
QVQLQESGGGLVQAGGSLRLSCAASGNISYDSPMGWYRQAPGKERELVAAIAEVVIPYADSVKGRFTISRDNAKNTVYLQMNSLKPEDTAVYYCALTRIYWGQGTQVTVSS

SEQ ID NO: 24379 - protein, 122 aa, Artificial Sequence
  Chemically Synthesized
QVQLQESGGGLVQAGGSLRLSCAASGNIFLLSDMGWYRQAPGKEREFVAGINFGSNTNYADSVKGRFTISRDNAKNTVYLQMNSLKPEDTAVYYCAASYAQYSTVFTEHDYWGQGTQVTVSS

SEQ ID NO: 24380 - protein, 118 aa, Artificial Sequence
  Chemically Synthesized
QVQLQESGGGLVQAGGSLRLSCAASGTISPVQLMGWYRQAPGKEREFVASIGDGSTTNYADSVKGRFTISRDNAKNTVYLQMNSLKPEDTAVYYCAATFDTATLHNYWGQGTQVTVSS

SEQ ID NO: 24381 - protein, 117 aa, Artificial Sequence
  Chemically Synthesized
QVQLQESGGGLVQAGGSLRLSCAASGYISSDTDMGWYRQAPGKEREFVAAITDGTTYYADSVKGRFTISRDNAKNTVYLQMNSLKPEDTAVYYCAARTLRGRDYAYWGQGTQVTVSS

SEQ ID NO: 24382 - protein, 118 aa, Artificial Sequence
  Chemically Synthesized
QVQLQESGGGLVQAGGSLRLSCAASGTIFWLTYMGWYRQAPGKERELVASIDYGASTNYADSVKGRFTISRDNAKNTVYLQMNSLKPEDTAVYYCAAYRRGADNYAYWGQGTQVTVSS

SEQ ID NO: 24383 - protein, 117 aa, Artificial Sequence
  Chemically Synthesized
QVQLQESGGGLVQAGGSLRLSCAASGNISYVDLMGWYRQAPGKERELVASIASVVLPYADSVKGRFTISRDNAKNTVYLQMNSLKPEDTAVYYCAAGTYDVFVLYYWGQGTQVTVSS

SEQ ID NO: 24384 - protein, 122 aa, Artificial Sequence
  Chemically Synthesized
QVQLQESGGGLVQAGGSLRLSCAASGTISQFATMGWYRQAPGKERELVASIAFGGSTYYADSVKGRFTISRDNAKNTVYLQMNSLKPEDTAVYYCAAIATDFHDGYQRHDYWGQGTQVTVSS

SEQ ID NO: 24385 - protein, 122 aa, Artificial Sequence
  Chemically Synthesized
QVQLQESGGGLVQAGGSLRLSCAASGYISYYLAMGWYRQAPGKERELVASIALGSITYYADSVKGRFTISRDNAKNTVYLQMNSLKPEDTAVYYCAVRTNVYDLGYLLLGYWGQGTQVTVSS

SEQ ID NO: 24386 - protein, 122 aa, Artificial Sequence
  Chemically Synthesized
QVQLQESGGGLVQAGGSLRLSCAASGNISPYVPMGWYRQAPGKERELVAAIAAGGNTNYADSVKGRFTISRDNAKNTVYLQMNSLKPEDTAVYYCAARGDSVGGYGDSHIYWGQGTQVTVSS

SEQ ID NO: 24387 - protein, 116 aa, Artificial Sequence
  Chemically Synthesized
QVQLQESGGGLVQAGGSLRLSCAASGTISGRAYMGWYRQAPGKEREFVASIATGATTYYADSVKGRFTISRDNAKNTVYLQMNSLKPEDTAVYYCAVWGPDDLLYWGQGTQVTVSS

SEQ ID NO: 24388 - protein, 118 aa, Artificial Sequence
  Chemically Synthesized
QVQLQESGGGLVQAGGSLRLSCAASGYISFPHTMGWYRQAPGKEREFVATIARGTSTNYADSVKGRFTISRDNAKNTVYLQMNSLKPEDTAVYYCAAPRGGYGWLPYWGQGTQVTVSS

SEQ ID NO: 24389 - protein, 122 aa, Artificial Sequence
  Chemically Synthesized
QVQLQESGGGLVQAGGSLRLSCAASGTIFYVGSMGWYRQAPGKERELVAAIAYGASTYYADSVKGRFTISRDNAKNTVYLQMNSLKPEDTAVYYCAARAFRAVYDYSGHVYWGQGTQVTVSS

SEQ ID NO: 24390 - protein, 121 aa, Artificial Sequence
  Chemically Synthesized
QVQLQESGGGLVQAGGSLRLSCAASGSILVLSMGWYRQAPGKERELVAAISSGSTTNYADSVKGRFTISRDNAKNTVYLQMNSLKPEDTAVYYCAVDISYRLDIYSSFGYWGQGTQVTVSS

SEQ ID NO: 24391 - protein, 118 aa, Artificial Sequence
  Chemically Synthesized
QVQLQESGGGLVQAGGSLRLSCAASGNISRIYYMGWYRQAPGKERELVASIDYGAITYYADSVKGRFTISRDNAKNTVYLQMNSLKPEDTAVYYCAAYVLGYDGLVYWGQGTQVTVSS

SEQ ID NO: 24392 - protein, 115 aa, Artificial Sequence
  Chemically Synthesized
QVQLQESGGGLVQAGGSLRLSCAASGYIMGWYRQAPGKERELVAAISRGGSTNYADSVKGRFTISRDNAKNTVYLQMNSLKPEDTAVYYCAVITFRGYSYPGRYWGQGTQVTVSS

SEQ ID NO: 24393 - protein, 122 aa, Artificial Sequence
  Chemically Synthesized
QVQLQESGGGLVQAGGSLRLSCAASGNMFMGWYRQAPGKEREFVATIGFGTTTNYADSVKGRFTISRDNAKNTVYLQMNSLKPEDTAVYYCAVDLDQGYIDSLLDGVGFDYWGQGTQVTVSS
